United States Patent Application Publication US 2026/0103690 A1 - sequence listing, part 14

SEQ ID NO: 54461 - protein, 346 aa, unidentified
MLHVGLDLSRKRVDVHVMNDAGETVDTWAVLPDRDGLHALARRLEQRGTPVYAAIESMTGARYVHDELELAGWRVDVADAVRVKGLAPLACKTDKIDARVLAELCRRDLVPAIWLPTPEHRAERERSRWRLHLVRHRVALKGRIHATLLTFGHQCPTSDLFGVSGRRRLEEMRLPEPWLGTVQASLRLIDQLEAEIDSCERELRTLGADHPYVPHLLTVPGIGWVLAYTIASEIGDIDRFASPKKLSGYTGLCPSVYQSGGKDRRGALKKNGPTYLRWALIEAAVHAARHPAYYEHYEATKKRLGKQRGSKVARIDVARRLAEAIWHMLTRNQAFSPAGPPGCLVA

SEQ ID NO: 54462 - protein, 410 aa, unidentified
MDVLIPRCCGLDVHQKTVVASVRILGPTGEVTRDTRTFGTTTRELEALAAWLRPSQITHIAMEATGVLWKPVWHILEPEWQLLLVNPQHLKRVPGRKTDVLDAAWIAQLLQCGLLRGSYVPPAIIRELRDLTRTRTTLEDETTRVVNRIHKVLEDANIKLATVATDIMGASGRAMLRAIIAGETDPLRLADLARRRLRLKHGALAEALYGRVTPHHRFLLERLLAQVEFLETEIHRFDQRVTEMSAPFAAALQRLDAIPGINRRLAENVLAEVGDDMAPFPSVPEMVSWAGICPGKRESAGVSHSARIRKGNRWLSRALVQAAWAARRKKNCYLATQFQRIARRRGAQRAVVAVAHSILTATFFILRDGVDYQDLGPEHFHRLSPDKVVRDLVKRLEKLGHRVTLEMIAA

SEQ ID NO: 54463 - protein, 371 aa, unidentified
MKKDSTTKFIGLDVHSKTISVAIADEGREGEVRHYGTIENTFEAIDKVIKKLTATGVELKFIYEAGPCGFALYRYLTGNGFTCIITSPAMIPRRKNVRIKNDRRDAMTLARLYRAGELTGIYVPEPEDEAIRDLGRARDDARVAERKAKQRLNSFLLRHNLIYPGKTKWNRTYFNWLGSVGMKYPAQKVALQEYIEAVKECTGRVARLSEQIGLAVEEWRMGPMVKALQALRGVSLICATITVAELGDLSRFQNPKELMAYLGLVPSEHSSGETIRRGGITKTGNGHARRVLVEGAWTYKHHARVTPPLIKRQRDLPKSICDISWKAQLRLCARYRKMVARKKPNNVVVIAIARELAAFMWAIAQEVRAAA

SEQ ID NO: 54464 - protein, 347 aa, unidentified
MNITHVGIDLAKLVFQVHGVDARGKCTLRKQLKRQQVMAFFSQLPPCLIGMEACGGAHFWARKLTGLGHTVKLISPQFVKPYVKTNKNDAADAEAICEAVGRPNMRFVPVKNTEQQALLGLHRARHGFVIERTAQANQIRGLLTEFGLVIPVGIRSIGHKLPEMLEDAENGLSGRSRALFARLFEHFRALDRQVKELELEINAWHREDTASQRLQAIPGIGPLTASALVASVGDATVFRNGRQFAAWLGLVPRQNSSGGKTTLLGISKRGDTYLRTLLIHGARSALLHLKHHPDQAEGWLARVAARRNANIAVVALANKNARTVWALLAHGRNYQPGYRATHIQMAA

SEQ ID NO: 54465 - protein, 347 aa, unidentified
MLADQLDYIVGVDPHRDSHALVVLHVISGAVVFEAAVSANSEGYAQALELVDQHAAGLRAFAVEGTGSFGAGLTRFLTGQGERVLEVSRLRRERRSGGKTDALDAIRAARSVLAQERPATPRAGGERQALQALVAAREGAVNAKRAGLCQLRDLLITTPEPLRSELRPLTRARLLQRLAATRPDARRDPELRGSMLALRSIARRVLQLTAEERELAREIETLTRKLAPQLLEQPGIGPHAAAQLVLSWSHQGRITSEAAFARLAGAAPIPASSGQTIRYRLDRSGDRKLNRALHMILVTRKRSHPATIAYIARRVEEGKTRREANRCLKRYLARNLYRLLENPPIRT

SEQ ID NO: 54466 - protein, 362 aa, unidentified
MKEYIGVDLGKRKAVVVKKDRQGKVTSKVTVAVSQAALESYFSKQDRRSQVVVEATGNWMYLYETIERYTPDVVLAHPLKTRAIAEARIKTDTIDATTLAELLRLDGIPKAYIPRREVRDIRELLRYRASLVSIRVGIKNKIHAVLTKNGIECTFSDVLGKSTQLWLKNLNLRACYRQEIDGYLRIAEALAISIAEITTSIKAEVAENSQAQLLMSMPGISYYSALLILSEIGEVERFPDAKRLCSYAGLVPSVYSSGSKTYNGRITKQGSRWLRWILVEISTHAANGDANFQKVYRRVSRRRGRSTARVAVARKLLTIIYAMLKKNEPFRRQKPRQRLMAVPGHKKVPDVSGHPAGVMVPG

SEQ ID NO: 54467 - protein, 312 aa, unidentified
MAQNTDFVGLDVGKFEIFVYVSKTGAAFSVSNTPAGHSSLQRKLGPVDGQIIALEPTGGYEWTIWEALDAAGYDVRQVCAAHVRAFSRATGALAKTDPIDARLIADFIAFRPTSGRKLPAKKLRYLSVLSTKRRQLVELRKRLKCQVKQHDKDLMVALDVELLELLSRQIRGLEDAIQAQIMDDPQMKQHAKILRSIPGIGPVLCAALIGEMPELGTIGDKQIAALAGVAPINRDSGRMDGRRSIKGGRYVIRSLLYQAALVASTHNKTLKVFANRLKEKGKPHKVVLIAVARKLLMIANTLMAKNQLWRTT

SEQ ID NO: 54468 - protein, 390 aa, unidentified
MRVVFGIDVSKVSSEVAILVNGEKVHNYTMSNDAIGFSRLLGDLKTVHKPEIIFEATGVYSRRLQSFLDEHGYAYTRLNPLEAKKQLDSLRVRKTDQIDAEKLAQSQFVLNRKTTYVQEEIYQNLRDLSRFYQNLTEDIVRAKNRLHKALQVTFPELENILSTPSGEQYWNLVIAFPCKDFVLDLSKDELSESIRQSTSKRISDKRVAYLAEKLIALANQSYCAVKKTSPMLEEVRYYAKELFRLSEQRQTILDEMVELAQPLPEYDILLSIPGIAETTATSIIGELGDIRRFQSANQINAFIGIDLRHYESGNFLAKEHITKRGNPYARKILFKCIHNIASASHTNPCHIADFYEKRKRQSQTTSTKPHTIASIHRFSVKSAYKTNTLC

SEQ ID NO: 54469 - protein, 317 aa, unidentified
MTEQQTTFVGIDVSKARLDIAVRPGGRYWHCPNTPERFPELIAQLRAIAPTLIVLEASGGLETALAAALAEAELPLAVVNPRQVRDFAKATGTLAKTDALDAHVLAHFAEAVRPAGRPLPPAPLAALDALADRRAQLVKMQSAEQNRLASAPPCVRPDIQAHLDWLAQRIDITNRELRRLIESRPGWRAKDDLLQSMAGVGPVLSVVLIAAVPELGTLNNRQIAKLIGLAPLNRDSGKHRGKRRIFGGRAQVRSTMYMPARAAVRFNPVIKALYERLKAAGKPENVAITACMRKMLVILNSMVKSNTHWHQTAVPQP

SEQ ID NO: 54470 - protein, 417 aa, unidentified
MDVLRERSAGLDVHRSVIVACVLASPAAGAQVSKAVQSFAATAAGLAALVSWLRGFAVTHVGMEGTGVYWMPVYAALEAAGGMTPIVANARHIKAVPGRKTDVIDAEWIARLIRYGLVRASFVPPRPIRELRDLTRYRRTLVEVQASERRRLLKLLESADMKLAEVLSDVFGVTGRDILRALIAGTATPAQMAALARGHARKKIAPLTAALEGHLAQHQRFMLQMQLLRIEATEQQIAQLDEQIETRLEPYRAQMALLTSLPGIEWVGAATILAEIGVDMSLFPTAGHLAAWAGVCPANNQSAGKQKGAAARAGNRHAITALCNAAVSAAHRKGSYFKAKYYSLKSRIGAGKAVLAIGHKLLVCIWHMLSDGCFYRELGESYLDRRTEQHTLKRYARKLDALGYAIVPKQEAALMAA

SEQ ID NO: 54471 - protein, 397 aa, unidentified
MYIVGIDIAKRKHEAAVIDGEGTVIIKPFSFTNNCSGYNRLLAMLAKAKLPLDEVSFAMEATGHYWLALFTRLQKEGFRVQVINPVQTNSIRSFYIRQAKTDPRDALLIAEVIRFGHFSESTLHPENIYELRELCRGRHAIVSMQADVKRKVVALLDQVFPEYETAFTNMFSDTSMAILQTCPTPKELSEMPLEELCHLIEVSSHKRFRMAKARELQELARNSFGFAMAGDVFSTMIRLYAKHLDFLKQQVREMDRKITEIMDTLDTPITTITGIGPTLGAYILSEIGDISRFSSAAKLAAYAGIDPTMRQSGEYNGVRNRMSKRGSPYLRHAIWLAASSAVLHDPALKLYFQKKRDEGKPYMASVGHACRKMVSIIYAVMRDNKAYTPYIPNEISA

SEQ ID NO: 54472 - protein, 385 aa, unidentified
MLAHPTQTQAAARCEANTLFASLELSKARWLVTVSAPGSDKLSRHDVPGGDGKALLKLLWRLQAAAGRRTGAPVAIVVIQEAGLDGFWIHRLLVQNGITSHVVDAASIAVNRRHRRAKTDKIDGVKLLRTLMAWMRGERQVCSMVQPPSPEDEDRRRLARERARLLKERVQHTNRIKGLLWGQGIPDYDALHRDRRARLAALTTGDGRSLPERLKTEIGRELDRLELVVSQLAAVERERDALMAQTAEADACAAPAALARLRGIGPELAALLSLEALFRRFDNRRQIAAYAGLTPSPWKSGGIDREQGIAKSGNPRLRRAMIELAWFWTRHQPGSALSRWFAERVGAARGRVRRIAIVALARKLLVALWRYVTHGVVPEGAVLKA

SEQ ID NO: 54473 - protein, 373 aa, unidentified
MSEFNKFVGLDVHKSTIAISIAPEDGGEVRYFGEIKNTKEALTNFANKISQGSLKLSFCYEAGGCGYEVYRHLRNIGHDCMVVVPSLIPKKAGQRVKTDRRDSLNLARLHRAGELTGVWVPDAMNEALRDLTRAREDMKHLQRQAKQRLLAFLLRHGWTYSGKSNWTKDHFNWLETVKFQHAAQQIVFQEYVDTVKYCGKRVESVTQQIEVCSRESACWPVIESLMALKGIDLITAATIMAEIGDLTRFDSAPKLMSYLGLVPSEHSSGSSVRRGGITKTGNSHVRRVLVEAAWTYRFPARKTAHTQKRAKVTTEAVQEISWNAQKRLCQRYKELNANGKIKVQTCTAIARELAGFVWAIGQTVSLKQSANAQ

SEQ ID NO: 54474 - protein, 413 aa, unidentified
MPYEWFVGIDWGSQRHQICVLDRNRRRVGERAIDHDGASLAQLAAWLWTLSTGQPQRVAVAIEVPRGAIVEGLLDRGFHVFALNPKQLDRFRDRHSVAGAKDDRRDAFVLADAVRTDQPSFRRLHLDDPQLLRLRELSRAEETLLEDFRRSANRLQDQLHRFYPQMLQLCSAADASWLWDLIELAPTPAHAALLSEEQVQRVLKAHRIRRVTAHEVLTCLQAPALPVAPGAAEAAQAHCGFLLPCLRVLAEQLQSCSQQVSVLLHTLAEELGEGEGPSNVAIVLSLPGVGRKITAWLFAEAAQPLAERDYQVLRTHGGVAPITKQSGKRRVVVMRRGCNPRLRHALYHMARVAMQRDAHFRRVYAALRAKGQRHGQALRTIGDRLLRILMAMLRDRTCYDASRIRREPVGQMG

SEQ ID NO: 54475 - protein, 345 aa, unidentified
MEIHTIGIDLGKTVFHLVGLNTRGEVVVRKKCSRDQILRFTANLQVTLIGMEACGGAHFLARALREQGHDVRLMPAKYVKPYVKTNKNDYIDAEAIAEAVGRARMRFVPIKTDDQLDLQSLHRVRERWVSGRTAVINQIRGLLLERGVTIRKGRRHIEESLPGILEDAENKLSGALRVLVTQLRLEMQYLQRQIDECDKLILRIADELEDCRRILAVPGIGPMTATATIAAIGNGSAFKKGRGFAAWLGVVPGEHSTGGKQTLTDTSRRGSRYLRKLFVQGAHAVLQQRMKQSNGLNTWLAQLTSRKRIQVAAVALANKMARMVWAVLSKGEAYRPPLLIETAAV

SEQ ID NO: 54476 - protein, 339 aa, unidentified
MMSSFVGVDLHRNNFTYCIRENGEEKKIGKCEISELKCFASMLGKNTAMAVEATGNTFMFCRFLKAHVGRLVVVNPSQFKVISMSTKKTDRHDAKVLAEFLEKDMLPEVRMKDDLQAKISSLTQTREKLVQLRTILKNKVNNLLAANFIVLKREELSTETGLRKALSFHFDPITDTEMFVVVEQIRSLNQSIEKLDKAIEDHGSKMDGFKNLKSIKGIGSKGAATLLSTIGNIHDFRSSKQLAAYIGIVPRVSNSNDTVCHGRITKNGSKIARTTLVQCALVAKRYSPYLHAFHESVKSRRGGAKANIALARKFLDIVYRTLKNNWMFEEFTQFKLVKN

SEQ ID NO: 54477 - protein, 344 aa, unidentified
MEQYVALDVSLKEISVCVIDGRGAVTFEGKVAAEPTLLIALIRREAPQLVRLGLETGATSPWLYHALKGADLPVVLMDARHAHAALSMRPTKSDRSDARGLAEMLRMGWYRAVTAKSFTAHERLALLAARRRLVEIRVELDGQIRGLLKTFGLIVGPGNTDALVRRAEALAEGNATISGLVAKLAEVRRHVVAQVAALDRDIRRLVRREPVLKRFMTVPGVGPITAVAFLSTIDDPERFKHARDVGPYLGLTPTRYQSGETDRHGRISKCGDAFTRTCLYEAANVLLTKVQRFSPLKAWGTRLVQRIGAKKARVAVARKIAVILRCIWTDGTEFWWSREEAKMA

SEQ ID NO: 54478 - protein, 464 aa, unidentified
MTAGQQLWRNRKEKKEWARRLRSEDPGLEVVHPHAAGIDVGNSTHYVAVRPDRDPEPVRRFECFTADLHRLADWLQSCGVKTVAMQSSGVYWIPLYEILEEHGLEVYLVNARHTKNLPGRKSDVQESQWLLKLHTYGLLNNSFQPVSEIRVLRTYWRQRGEQVRGAATCIQRMQKTLTQMNVQLANVISDISGLTGQAIIRAIVAGERNPLKLARLSDPRVHASHEAIAKSLEGNWRPELLFVLHQEVDMYDTYQKRIAECDQRLQKHLASFTRPLPIQPPTQKLKTKKPAAKNAPRFDLSSELQRVTGVDLTRIDGIDVMVAQTLLSEVGLDMSRWITESHFASWLGLCPDNRISGDKVLSRGTRRVVNRAATALRQAANTLMRSRSYLDAQYRRLRTKLGAPKAITAMAHRLARLVYRMLRYGQTYVDKGTQYYEERFRQQQVQLLRKRAAKLGLQVAEIHA

SEQ ID NO: 54479 - protein, 316 aa, unidentified
MYLGIDVSKLTIDCCLIADGQNHQKKFQNNKGGFEQLIKWLQIHKVTDKLHCVCEATGTYYEALAEYIYTRYTITVENPRKIKGYAIAELQRSKTDTQDAKLIAQYCQDRKHKLKAWQPPAKEQKQLQEIARYLDYLKQQRATEKAKQHEAPEYIKSHIQTTISNLTAQIKTVKKQLLQFYKDNPSYNDLRKRLKTITGIGEQATAILLSTYKRHEFKNAKQFTAYLGLDPRKYQSGTSVNGKSRISKIGSSEIRKSLYMPAVVAYRCNAFPEFVGRLKNKGKHIKLILIAIMRKLAVIAFTLLQNGQDFQVERYK

SEQ ID NO: 54480 - protein, 342 aa, unidentified
MDCVSELYVGVDVHESKSQVAVYKSDGTLLEERRIRTKRLPRYISSLPGEKHVGLESVGFIYPIYDALVKEGCDVAVANPNNILLIARTRIKHDRVDARVLGELLRTNFFPRSHIPGEETREKRLLARERVRYGVKRANLKNSIKWLLKRRGIRVKKPFSMLGRERLRSLGIPEISYRLEELELVERFVKELDLKIKHVVSRDHNAKLLDTIPGVGAYTALFLSSALDDVDRFPDSKHACAYVGLVPSLHQSGSKSRSGHITRQGSGWLRRNLVECARWAVRKDPHMKAFYERVKGRKGKKKALVAVARKIVSYAFWMLKRNLTYEELAPWKNDWGGSPNLE

SEQ ID NO: 54481 - protein, 355 aa, unidentified
MDKQRLGDGEIVGGVDTHKHAHMAAVVDRTGRLLGTFEFPTTSAGYRELLRWLREHGSVSLVGVEGTGSYGAGLARYLAREGVAVVEVIRPNRQLRRRRGKSDPIDAEAAARAALSKEANTTPKSADGVVEAMRMIRLARCSAVKARTQAANQIDALVTCAPQSLRSQLKELSVLRLAERARRWRPRDIQDLLSACRATIKGLAQRWSQLGAEIAGYDKQLLRLTQRVCPELLARPGVGFEVASSLLVAAGDNPDRLHSEASFAALCGVSPLDASSGQQRRHRLNRGGNRDANRALWVVAMTRLRVDERTQAYAARRTKQGRTKREILRCLKRYIARELYSILRCNTLARPLDVT

SEQ ID NO: 54482 - protein, 346 aa, unidentified
METYFGCDAHKRYSIFTSMTERGQRGRPVRVEHTRAQYRAFLGDLPPGSPIAIETIGNWYWMVEEMERAGHVPKLAHAGKAKLMMGQINKTDKLDAAGLATLLRNGTLPEVWIPPGDLRDQRELPRMRMSLVSVRTMLKNRIHATLAKYLIEIEASDVFGVKGRELLACRMDELPPYTRESVVTQLELLDEVEAHIERCEEQIREVVAATPEMELLRTIPGVGPILAVVIALEIGDIARFAGPENVASYAGTVPRVNASGDRMRFGKVRPDVNRYLKWALVEAANVVVLHQRHWGDRHVVQLYQRLRERKGHGKAVVAVARHLAEAAYWILKKKGPYREPKSSNQT

SEQ ID NO: 54483 - protein, 340 aa, unidentified
MDCIGLDLHKRESQLCILTEAGEVIEQRIVTSRERFAAVLGVRSPARILLEASTESEWVARHLEGLGHEVIVADPTYAPMYATRSRRVKTDRRDARTLADSCRLGAFRAAHRASDAQRHVRAQLAVRDALIRTRTRYVAVVKALLRRDGWRLPRGVPAHLGERIAALPIGPTAATELKPLLALLAPLQGEIDAADRQLAALAAHDPVVGRLTGIPGVGPVTAVGFVAALDEVGRFASARQVAGYLGLAPSERSSGEQQRRGRISKTGNPRARVLLVEAGWRLLRSRQPDAAPLRAWAERIAARRGRAIAAVALARRLARILYAVWRDGEEYQVERVAEAA

SEQ ID NO: 54484 - protein, 356 aa, unidentified
MTKVTASFENQKVYVGLDVHKRSWNAAVYLEDQFIRNVHQPPQPQALHHYLVHTYPGASYVCAYECGKFGYWIHREFQQLGIECLVVNPADIPSTHKDEVYKTDRRDARGIGDALSKGQLKGVYVPYEEQEADRHLVRQRKKIWRDLVRCKNRIKGFLDYTGIEVPPQYDNANWSKNFITWLMQLDFKQSSNRVTLNYMLTEMELLRKELLSISNAIRKLMRSKKYNRLYYLLRSVTGIGPLTAASLLTEIGDMNRFKNFYHLNSFIGLMPMEHSSGERELKGRITVRKHRQLRSDLVECAWTAKRTDPALALYYSQQIKRGKNGKAAIVKVARKLLSRIRYVWLSGKAYEPSVVN

SEQ ID NO: 54485 - protein, 281 aa, unidentified
MSSIAPTRQVTVTRIICGVDIASSSLAARVGQDGAEATFQNSTEGIAGLAAFCHNHDVELVAMEATGGYEQRAFAQLSESDLAVTIVNPRAVRQFAQSMGRLEKTDSIDAGMIAWYAETKKSQPLCLAPQTQLELRARVTRLRQLTELRTTQLNQQRLVTNRAVQAGFRKMLAFVAKQIISKLAGVAPLAQDSGKHQGKRAVRGGRAAVREILFIVASVVGRHEPDFVAFQKRLRDAGKPPKVIRIALAHKLLVRLNAKAREVRQRLAILDPTASPLLAAY

SEQ ID NO: 54486 - protein, 397 aa, unidentified
MKRVAGLDVHKDSVFVSIKRGQYQNEVKEFGTTTQELTELHHYLHGECVLKVAMESTGIYWMPIWRALEQDFKLYLVNPYFIKQMPGRKTDIQDAQWIATLLDKDMLRSSVVPEKTIRILRSYLRRHAQLQGQMNRCFQSMERQLSQCNIKISSLTSTIGSKTVLKVVQSITEGKTSAKYLLTQVHGRIINSKGKDTVLQSLEGIIEEHDIFLLKQIFQDYLHIELQSQQLLAQAEHLADTHYKNQIKLLQTIPGISKLSAVIIFAEIGGDISKFQTAHHLSGWCGLRPKNEESAGKIKNTRIGKGNKYLRRILVQTAWAASRKKDCYLKEKFERLCVRKSRKKALIAIARKQLVIAWNVLTKQEDYVEPVIVLSQNQIQQKRKYYQQKLKNLEKVG

SEQ ID NO: 54487 - protein, 310 aa, unidentified
MDKFVGIDISKDSLDLCIEPDDEVLHLVYDDKGIAQVVNRLTQVAPTLIVMEATGGLEMRLASELAAKGLPVTVINPRQARDFAKATRKLAKTDSVDAGVLAVFARAIRPAVRRIKDVDTRELDDLVTRRRQLIDMRVQETLRLGTASKVQSKSLKAHIAWLDKRIASLDDDLTKRLRASDAWRTKDDLLQGIPGVGAVTTLTMLAKCPELGTMNRRQIAALVGVAPKANDSGKHRGKRFVWGGRADVRAVLYMATVSAIRCNHDIKAFAQRLKQAGKPAKVVIVACMRKLLTIMNAIVKNNAQWAPKTA

SEQ ID NO: 54488 - protein, 359 aa, unidentified
MLKYSIGLDISAKTIHACISTIDAAQKVTVKSSCKIDNALSGFKQLDEWVKRHRREKDVPLVVSMEATGVYYENCALYLFKRGYAVSVLLPNKAKKWLQSEGLKSKNDKIDAQGLSKMGAEKALELWQPAAEYYYELRALTRQRQSLQEMKTSVNNQLHAEEHGMYQNKLVIKQLKQQIAFIEKQIAALEPVIEAHIAADKEVAAKVGNICRIQGLGIQTVAVILAETNGFLLFKNTPQLVSYTGYDVIENQSGDHKGKTKISKKGNSRIRRALFMPAFNMVKFKQTPFVDLYKRTFDKHGLKMKSYVAVQKKLLVLIYALWKNNAAYNIDYKNKYTRELEQELPLGMASTEATLTNAV

SEQ ID NO: 54489 - protein, 359 aa, unidentified
MLYVGCDAHKRYSIFAVMNNEGPVGVPVRVDHDRVLFRRYLDCLPAGTSVAIETIGSWYWMVDEIEQAGHNPILTHARKAKLMMGQINKTDKLDAKGLALLLRNGTLPEVWIPPGELRDQRELPRLRMALVGIRTRLKNRIQSSLAKYAIRIDEPSDLFGKAGREALAGRLGELPPQTRLSVESELVLLDQVEEQIELAEKQIKEVIAETPAMKLLMTMPGVGAILGVVIAMEIGDVERFAGAEKLASYAGTVPRVSSSGGKTHYGKSRPDVNRNLKWAFMEAANVISSHPRWWAGRHVGRLYQRIRERKGHGKAVGAVARHLSEAAYWILKKKEAYREPQSHIPDSSTREETRSFHES

SEQ ID NO: 54490 - protein, 487 aa, unidentified
MEENFAVGTESPEEQSEWENIQFTKSYGVGIDTHRDFIQVCVLVKHDDEIRKIEQKFYTSWWELGEAREWIIKTIETNIHPVPDDILPLHYSIESTGTYHIPVIKALGGKPSVVNPLLASPSRCKTDVLDAKMLAQQNMTGLWPESYIVSDEVQELRLLIAQRNYHKQQQTKISNQINNYILRFGHTFGRLGSVTKSKVVRPMVEDLIDNIADMKNLCQTGIPEDVRPMFKEMYHNFDFHADEEKRYMALAISKAKKMKWETEEGVFVDGNKLIENLCTVPGVGETTAVLWLSIIITPSRFPTSKAISAYCGLDPSLKVSAGKVTSTVKRGGNKLLHYSLNLSANILLRSRTENFGVWGYNLYKSSGKWKKASNAVGRKICIAMYYVNKLNVPFSYDHYRCYEKRNVMNISLDELFTLIPDMKRFKKALINAGFTNTKEIVDEYYEGRLKDYRGLGKTFYTILKDFIFNQKKYDEISEQIQENQGGK

SEQ ID NO: 54491 - protein, 331 aa, unidentified
MEQRKTIIGIDVSKKTLDVFIKDVEMYLKISNDSEGFKKLLSVLKASRLKLEDCFIVLEYTGGYEYRLVQFCQSKQISFVRISGLAIKRSMGLVRGKNDKIDASRIAEYGVEKQFKLKAETPSLDGIVRLKRLLSQRDAFVSDRKAHQNRYKEIQHMMELPDSDPMLKRYKKIADELQKLIVKTEEEIRKLIKNNDAFQFNFDLITSIKGIGEVNGWTMIAYTENFTSFENARQFGAYIGVVPYPFTSGTSIKGKSRTSKMANQHIKALLEMAARAAIAHDKELGLYYERRIAKGKHHMGVMNEIKFKLVLIMFAVVKKQQPYVDKYKNAA

SEQ ID NO: 54492 - protein, 396 aa, unidentified
MEKQRNKVCGADIHKKFLVATLLSRDGTKSTGRFGMTLDEIMRFKEWVIENNCEQVAVESTGVYWVPIHTVLEDKIEIIVANAYKIKHIPGRKTDIRDSEWIAELCLNGMIEPSRIFPKDDRELRTLTRNRESLVNNVTQMKNRIHQALESSCIKMSSVLSDIFGKSGRHILDGLLEGKNIDEILLGIKSKKVMKKEQELRDAIKNSLDPAKILQIQNFLELIEEIQKKIKKLDTEIMNRIERMKENIEIAMSIPGISFVSASAILAEIGDYRDFLNGEKLAAWCGLTPRVSQSADMLVTGSITKQGSKHVRRMLVQVAHAISRTKNSALKRFFLKIQLKKGTKKAAVALARKILCILHHLLVNKEKYQENGNIKSKPFKFDRTSSPSQMTEEDMD

SEQ ID NO: 54493 - protein, 413 aa, unidentified
MVDNRAGDVSLRARASGSAEATYGILKAITLSKPEGLLGSPADFKSGTPPTSGRTRIREAVVTLTLYTLRVTQKSVPHQPLIKEFIMNPHPKSIQIQRYIGIDIHKHYLMNGGQNTRREWTLRPRKVQVSRFRGWAEKNFQPGDAVVIETTGSVWDIYDIVAPLVNRTLVVHARKVRQIAEARVRTDKEDIKRLITLLIADIVPEVWVPPQHVRELRSLISFRWRLNKQITMSKNRLHSVVQRFNLNPPEGGLLADKNKCWRERQTYSELTGFQGERDLEIVKTLEEQKAAIDQKLAELSNTEPWASDMVYMMQIPGFGLIFSMVVLSAIGDMSRFSHPKKLVGYAGLGAGVHASGEKYQEKSITNTEGTQSARDARSCAGPWWRLPGEQWAAILIGGLSSNGWRNGCTATKS

SEQ ID NO: 54494 - protein, 312 aa, unidentified
MTRIERYVGIDVSKARLDVHVRPEAEVLVFANDEAGIAALCAQLQQATGPCLAVLEATGALQERAAAALCAAGIFVAVVNPRQVRDFARATGRLAKTDRLDAAVIAAFAEAVKPEPRPLPDEARKALIDRVTRRRQLVEMRASEKIRRSQITPKLRSSLEAHIAFLDKEIAALDDEIGTSLRHSPAWRSEDDLLASVPGVGPVLRAALIAKLPELGQLTRRQIAALIGVAPINRDSGQMRGKRVIAGGRAELRTLLYMAALTAIRCNPTLKAFNARLRAAGKPAKLAITACMRKLITILNAIIRNKSPWRCA

SEQ ID NO: 54495 - protein, 372 aa, unidentified
MSMVTKFVGLDVHKASVSIAVAEGGVDRPAEHLARVPHDVPRVIKRLLTIAPAEHLRVAYEAGPTGFGLWRALHAAGIHCQVIAPSKTPVRPGDRVKTDRRDAEKLASFLRSGQLQPIDVPDVQREALRDLARQRYDAVTARHAARQQLSSFLLRHGRMWSMKSAWTRRYMDWVQSQRFEIAAQQLVLDEYLHEVRHADLRVERITEKLVECARAPMFESLMRALQALRGVSTIVAATIVAEIGDLRRFASAGKFMSYLGLTPSEHSSGATVKRGSITKAGNSGARRVLVEAAWCAQRRPSMSAALKKRQEGLDPAILLIAEKAQARLYKRFWSLMRSGKTRQTAIVAVARELSGFVWAIGQQPLTASTQAA

SEQ ID NO: 54496 - protein, 372 aa, unidentified
MQQDRAVFVGLDTSKMKISVALAEEGRQGEVRFLGEIDSTPEAVRRLVTKLAGQYRRLLFCYEAGPTGYGLQRQISALGHDCAVIAPSLIPKRPGERVKTNRRDALTLARLHRADELTRIWVPDPGHEAVREVVRAREAAMEDLRAKRQHLQSFLLRHGRVFTGRKPWSRAHARWLAELAFEHPAQHWVLREYRQAIEDAEARLERLTRQVAEVVSSWSMAPVVEAYQALRGVALLTAVTFAAEIGDVRRFETPRQLMAYVGLVPCEHSTGDRVRRGSITKAGNTRARHVLIEGAWTYRFPARLTRLLQERQAGLPKIVRAIAWKAQVRLCGRYRRLMAAGNRQTVVTTAIAREMAAFLWAIGREIEPRLTA

SEQ ID NO: 54497 - protein, 388 aa, unidentified
MNRILKIGMDVHSTNYTLCAMEPTIGSEDRIYGEIQVAPDYKEVIAFIASLKLKLGLRDDYSIECGYEAGCLGYTLYHQLANAGIKCVILAPTTMLTQQGKRIKTDKRDARLIAQCLCYGGYHPVYIPTGEDDSVKEYLRMRDDHKVALKKLKQQMNAFVLRHGYQYPGTKWTQKHVSWLKKLELDPMYRETLNEYMASYEEQEAKIERYDQRIQEIAAEVRYQENASKLGCFLGIRTHTALSLIVETGDFKRFAKGNTYAAFLGLAPGERSSSTNVNRLGISKAGNSHLRSLLIEAAGGICKGAIGHKSKELRSRQRGQSAEVIAYADKANTRLRSKYYKMIRHGKKRNVAVAAVARELACFIWGMMTGNISKHPGSCTSDPAVSQG

SEQ ID NO: 54498 - protein, 388 aa, unidentified
MQIFTDRPQAPTAIRTDLGAIFVSLELSRSTWLITSLSPGSGEKMSKHTVRSGDVAGLWARFSQLKDKVQVRTGHAVPIIVIQEAGLDGFWIHRLLQDERVESHVVDPASIATSRRRRRAKTDKIDGEALVRALLAYKRGEPRVCAMVRAPTPQEEDRRRICRERKTLTAERVEHVNRIKGLLFAQGISDYEPLLRKRRERLEELRTGDGRPLPEHLKAQIGRELDRLELTLQQIKSVETERDAMLSPSDEGTPAPGAMLKNLNGIGPEFAGVLWSEGLFRSFCNRRQVAAYAGLAPTPWRSGSVAHEQGVSKAGNPRLRTTMIQLAWLWIRHQPRSILTLWFHQRVQLNGGRVRKVLIVALARKLLIAFWKYVNAGIVLEGAETTTV

SEQ ID NO: 54499 - protein, 341 aa, unidentified
MQITTIGLDIAKNVFQVHGIDGDEKVVVRKQLRRSQVLRFFQDLPPCLVGLEACATAHHWARELTRLGHEVRLMPARDVKAYVKRNKNDAADAEAICEAVRRPTMRFVSIKSAQQQAQLMQHRTRDLLMRQRTQLVNAIRAHMAELGIAAQQGNAGIRQLLAIIADEEDARLPADARASLMVLAAQLEAMQTAIGALEKRIVAQHRSNQDSKRLQTIPGVGVIGATAIAATITDPAAFRSGRDFAAWVGLVPRQDSTGGKPRLGPISKQGDRYLRRILVLGAVSILRRAKLDPQRYPWVTRLLARRPFKVVAIALANKMARIAWALLANAETYRRPRLAAV

SEQ ID NO: 54500 - protein, 419 aa, unidentified
MASIKSKKVKRINKKTMIATFDIGKNVHYGYFRAPDGRECKPFSFNNSQKSFNRLWTQICQFKHDHQLEQVVIGFESTGPYAEPLFHFLRKKPVKLVQVNPVHTKRVKELTGNSPNKTDKKDPRVIADVISLGHALTLIVPSGASAHLRRLTQARERALRDRTATINQLQHLIFVVFPEFLRIMKNISTKTARYLIKHHPSAQDIAGLGVEDLTAIMRKISRGKLGQERAEELIAAAKSSVGIREGRESIFLEMAHLNAKIENENCFIDRLENQLDEYLQQIPYSSSLLSVKGIGVVTAAGLIGEVADFTKFDTISEIMKLAGLDLYEISSGKHRGQRRISKRGRPLMRKLLFFAAINAVKSNGIMHETYQRMLERGMLKMKALVAISRKLLGLIFAIVRDNTKYIEDYSEKHHYKLAA

SEQ ID NO: 54501 - protein, 415 aa, unidentified
MEAIIECAAGLDVHQATVVACVVATGVGRKLRKEIRTFGTMTRDLDCLRAWLSEHAVTHVGMESTGVYWMPVYAALEGSFTLIVGNAHHIRNVPGRKTDAKDAEWLAELVRHGLIRPSFVPSPELRELRDLLRHRRSLAGAIAAGRNRTLKLLESAGIKLSTVATDAFGVSGMAMLHALADGVDTPEAMAALAKGRLRRKLEALARALEGRMTDHHRFMLRLHLVHLQHLESTVAELDARITEKINPYHAQVRLLAGIPGVDQLIAAHIIAEIGVDMSVFGTAGRLSAWAGVCPGNYESAGKRQGGATRKGNVSLKTALITAAIGASRTRGTYLKDKFYRLRARCGAMKAAMAIAHKILVAVFHILAARVPFRELGDGYLDSRSKHRVTKALVRRLDVLGYRVTLEQKSIVVAAS

SEQ ID NO: 54502 - protein, 345 aa, unidentified
MPIVGGLDIHRKQITFDYLDTVTGEVKRGQIAPADREHLRAWLARFAGRGDVGFAVEGCTGWRYVAEELAAAGIAAHLGEPADTAALRGRKRHAKTDKTDSRHLRVLLAEGRLPECWIPPAQILEYRALLETYHDLRAEHTAWVQRIHAVFFHQGAPALGEGVLRTEQGLAALRVAAAAHLSPAGQPRVATALEVLAAVEARMEVLRVQLRFAARHLTGARVLAAQLYGVGPVTALALTCWLAGAGRFSSSRKAVRFTGLDVTVWSSDRKGPPGRLSRQGPPMLRWAVYEAGKTHARASAPDHAYYAAVKDRKNSKRAALSEARKIVRQACHILTELGDDALTTA

SEQ ID NO: 54503 - protein, 344 aa, unidentified
MEHYAAIDVSLEWSSVCVVDATGEIVREVRVPSEPEALVAFFAAAGLCIARIGLEAGPLSQWLHAGLIEAGLPAILIETRHVKAALKAMTVKTDRNDARGMAQLMRMGWFRPVHVKTLQAQEIRALLTARKLLVAKLRDVQSSIRGILRGFGLKVGAISKGKFEARIRELVAGQAMLERVAEPLLRVRAALGAEYRALHRQLLAAVRQDQVCGRLMTVPGVGAVVAMTFRSAIDQPGRFAKSKAVGAHFGLTPKKYQSGEIDRTGRISKVGDAMVRTALFEAANVMLTRTGRFSTLKAWALRVAGRHGAKKAKVALARKLAVVMHRMWVDGTTFRWGEASVSAA

SEQ ID NO: 54504 - protein, 362 aa, unidentified
MDNRKYIGMDVHQASISIAVSDAAGKVLMECILETKAATVLEFVQGLRGSLWVTFEEGTSAAWLYDLLKPHVTKVVVCDPRKNALLKAGNKNDRVDARKLSDLLRARLLTPVYHGESGVRTLRELSRSYLVASKDLTRVMNRLKAIYRSWAIPCGGQQVYSPRHRAVWLEKLREAGVRRRAEQTYGQLDFLMGIRKETRKELLAESRKHPARKLLEQIPRLGPIRVALLIALLQTPHRFRTKRQLWNYCGLGLRTRSSGEYRYTGGQLQHARKAPALRGLNVNHNHDLKNLFKSAATQAGACKDDPLGEFYQNLLVRGMEPPMARLTLARKIAAIALKIWKLRSDKIETTSSLSVYESRRQP

SEQ ID NO: 54505 - protein, 395 aa, unidentified
MFYGLDVHKEFIQVCALDADGKTRRDFRVGGTAAAIENFGRSLDRADPVVLEATFHSWAIVQILSRHVDRVAVADPAQLKAIANARIKTDKVDAHILAQLLRLDFLPEVELPTRGTWALRQLMAHRRQLRRQSVAAKNTIHGVLNRSLERYPGKFLFSEKGFAWLAQLKLPAAERMVLDQQTGLLREVQAHLQGVDRALREQAQRNPEAKLLVTIPGVDVVVAMGFLAAIGSIDRFPSPGKLAAYFGLVPKIRQSGSTRYYGHITKAGSRNARWLAIEAAHTIARSDSPLAASYHRVRRRKGHQIAVTALARKLVVVVWHILTTRQPYRYGAPERTRIKLRRLQKHERPPRRRVPGNLDDVYAEAGLALAPPTSGEKRVAKRSRAALTRMRNENS

SEQ ID NO: 54506 - protein, 413 aa, unidentified
MDVVHPRCAGIDCSKKDAKVCVRIQGQGTRTRSATVSTWGATTSQILALREHLIAEKVSCVVIESTSDYWKPFYYLLDDGLNVVLVNAASVRNLPGRKTDVSDAAWLADLGAHGLVKASFVPPAPIRALRDLTRARTAITRGRTREVQRLEKLLEDAGIKLSSVASEITGVSGRAMLEALIAGQRDPAALADLAQRRMRSKIPALTEALTGRFGEHHAFMARLFLDRIDAHSADITRLDERIEAAMEPFCPARDLLISIPGFSRIAAEVFIAETGGDMSVFPSAGHLASWAGLAPGSNESAGRVKSSKTRPGNRYLKGVLGIAALSAARSKNTYFSAKYKRIATRRGPMRAIVAVEHAMIIAAWNLLTNGEFYRDAGADYYTARQPTATKARAISQLHALGYRVTLEPLAEPA

SEQ ID NO: 54507 - protein, 361 aa, unidentified
MRHPHYVGLDVHCRFTQVAVISESGHLLRQQECPTTIPAIVQALESVRRPLSVALEEGPLADWISRNVAPHVDEVTVCDPRRNQLIAKDSDKDDSLDAGKLAQLLRGGFLKPVHHADSLARVIFKQHVALYHDCVRQRVRTANRIVGLLSRHGVCVREKAFSQHRNRQGLISRLPAHPVLHKDLKLLWQAYDLSADHVTAMRRRLKHLALQEEPIRRFVFLPGVKWIRAATFYAYIDTPERFASKQKLWKYAGLGLQRRQSGSRKQRVSLAHRANRMLKYVLLGAARSAVVRGNNPFASQYRTWLAKGKPPAVALRNTARSLATTLWAMWKSGASFRPDVVGVPPPQEIPVKQIKREKGRI

SEQ ID NO: 54508 - protein, 358 aa, unidentified
MKIVGCDLHARQQTIAMVDTETGEFTEKTLSHEGNAVREFYAALEGPVVVGIEATGAMQWFLELLEELGIECRVGHPAKIRAAEIRKQKHDRRDARLVLDLLVMKDRFPQIWMPSTEQRDLRTLLRDRHQWVKMRARLQHTLQAIALNHALRQGHALWSAAGQSALQALPLPPYTSQRRTELQSLYVQLQKRIQELDKEVEAQARQRPQARRLLTHPGVGAVTALATEVFLGDPSRFATGNQVASYIGMIPCEHSSGKRQRLGKLTKEGTSLLRYLWTEATMHAVRKDPELKRFYRRKLIQKGMGKARIAAARKLGIRLWIMMRDQIDYEEFCRRGKLRQKGEAHAGMPDFNSGPARQ

SEQ ID NO: 54509 - protein, 281 aa, unidentified
MKKIVIGIDISKKKLDWCVMVDKEIAGFHDTANRMDDIYNKFAEVLEYGKIDIGEVLVCAEYTGKYIYPLVLACHKCRVDLWLESGYNIKCEARKERGKDDRTDARRIAEYGRKNQDDARIYRLPAESIATLRGLLSERAMYCSQRAAHKGQLRDMRGFMSPEAYTARAVRQLSLIKELDRLIEEVDNSMAEIVASDPELLRQQQLLLSVPGIGMVCAAALIAVTAGFSLFDNGRELCCFAGLAPFAYTSGTSIRSKRRVSCRADHQLKALLHMCALVLPA

SEQ ID NO: 54510 - protein, 403 aa, unidentified
MNLNAVGIDVSKDKSMVAILRPYGEIVSSPFEIKHTSGNIQSLIERIKSIEGESRIVMEHTGHYYEPLARELSLAGLFVTAVNPKLIKDFGDHSLRKVKSDKADAVKIARYTLDSWTQLKQYSLMDEIRNQLKTMNRQFGFYMKHKTAMKNNLIGILDQTYPGVNTYFDSPAREDGSQKWVDFATTYWHVDCVRKLSLNAFVGHYQKWCKRRKYNFSKDKAEEIYGAAKELVPVLPKDDLTKLIVKQAIEQLNTASKTVEELRTLMNETASKLPEYPVVMGMKGVGPSLGPQLMAEIGDVTRFTHKGAITAFAGVDPGVNESGTYEQKSVPTSKRGSSSLRKTLFQVMDCLIKTKPQDDPVYAFIDKKRAQGKPYYVYMTAGANKFLRIYYGRVKEYLMSLPE

SEQ ID NO: 54511 - protein, 313 aa, unidentified
MSEHMTVVGIDVSKRSLEVATDSESFSVGNHQQGLEQLIARLLPLKPELVVLEASGGYEKAAWVALWAAGIKVAPVNPREAYHFAQASRQLAKTDRLDAQGLRRFGQHLQPAPTPVPSEADQELQELVRRRQQLVTIITAERNRQQPTRNSTIRQSIGRTIRNLEREKDALEHAIEQKLEQQPSQRVALLESVPGVGRVTSAILIARWPELGTLSPREVAALVGVAPFTHHSGQWRGESHLFGGRADLRSALYMAAHNAVRCAGPLRDFYQRLRSAGKARPQALTACIRKLIVILNAMVKHTTHWSPPCPTPA

SEQ ID NO: 54512 - protein, 359 aa, unidentified
MFTVTTTSVPDVIIGVDTHKDVHAAVAINSLGARLAGATFPANRTGYQALEAWASALGSIRTIGIEGTGSYGAGLSRYLREQGHVVLEVNRPNRQLRRQKGKSDTVDAESAARAVLSDQATSCPKSGTSSVEMIRHLKVARDTAVKGRSQAMQTLKAIIVSAPAALRERFDGIQGKMTLIRRLAALRPGVMTSVTASAKMALRAIARRWLALDAEIREHDAHLEALIAACAPQLVEAHGIATGTAAEMLLLVGDNSERIKSEAAFAKMCGACPIPASSGKTNRYRLNRGGNRQANAALYRVVIVRMRGHQPTVDYARRRTAEGKSKLEIIRCLKRYVAREIFGYLRNPPKTAAAAKNTP

SEQ ID NO: 54513 - protein, 346 aa, unidentified
MEHFAGLDVSVKETSVCIVDETGKIVREVRVASEPDALLEVLKSHAYRFKRIGLEAGPLSQWLFSALAEVGVPVVCVETRHMRAVLKAQINKTDRNDARGIAQMMRAGLYRPVHVKTLRSQKLRMLLTHRKLLQSKAIAIENDLRGTLRNFGLKVGMVGTVKFEARIGELVENVPDLAALVEPLLVVRRAIREQIAILHRRLLAIVRDDEVCRRLMTIPGVGPVVALTYRSTVDVPARFRNSKAVGAVFGLTPAQYQSGEIDRTGAISRCGDEMMRVMLYEAAHIMLVRSTKWSWLKAWAMQIARRRGMKKAIVALARRLAVIMHRIWVDGTEFRWTREQHAAAGA

SEQ ID NO: 54514 - protein, 388 aa, unidentified
MQDVADQSAAPTTIGADLCAIFVSLELSRSTWLATSLSPGRGEKMSKHSVSAGDIAGLLARFSELRRKACTRTGKSFPIVVIQEAGLDGFWIHRVLLSEGIESHVVDAASIATSRRRRRAKTDRIDGETLLRALLAHKRGEPRVCSMVRAPTPEDEDRRRICRERKVLIMERVQHVNRIKGLLFSQGASGYEPLRRDRRARLDALQTGDGRRLPQHLKAQVCRELDRLELLLEQIKAVEAERDALLDAEQAKASAPPPMLLGVHGVGPEFASVLWSEGLSRHFDNRRQVAAYAGLAPTPWQSGSVNREQGISQSGNRRLRTTMIQLAWLWLRHQPRSALTLWFKDRMERNGGRRRKTTIVALARKLLVALWKYVSAGVVIEGAMIRAA

SEQ ID NO: 54515 - protein, 346 aa, unidentified
MMIIGCDFHPSWQQIAWLDTETGESGEQKLVHASGDAKVFYQQLAAPALIGIEATGNSQWFVEMVEDLGHAIWIGDAAEIRASFVRKQKTDKRDAAHILRLLLEGRFPRLWMPDREQRDQRQLVLHRQKLVQIRSRVKNELQHLAMNKGVQKKHRLWSQAGQQGLRELPLKPWAACRRDDLLGLLAMLDQQVGKLDAAVQKAAEQNPQARLLMTQPGVGPNTALAYVLTLGDVSRFQRGKQVASYLGLIPHEDSSGERRKTGRISKQGNRMLRALLVEAAQSAVRFDPEMRQQYVHRCHHKPKGVAKVAAARKLAIRLYWMLRTNRGYPEIVRIESSPRVPLVGAS

SEQ ID NO: 54516 - protein, 344 aa, unidentified
MLVVGMDVHKDTVAVCAIDEAGRPVARTIVENTRVGHRRLTRWITGLGAGVERCGLEHSGGIATVLARSLQSAGWKVVAVPPRLSARENGRLRTRGKSDPADALAVARVVLREPKLPEVSAGSDKDLKLLVDYRDQLWGERTRTANRLHADLAIAYPGYQRSLGRALTTKRSLQAAEDLVAADNSVRAELDRARIARLHQLDAEIKDLERRIGALVEASASSLVSIVGISALTAARILGEVGDVRRFPTSSTFASVTGTSPIPASSGRTERHRLNRGGNRRLNRALYVVALTQTRHEPRAVAYLERKRNEGKTRREAMRCLKRRLSDVVYRQMLLDAGALDHRS

SEQ ID NO: 54517 - protein, 350 aa, unidentified
MGKLYHIGVDLHKKNLQVAVLDNAGEILDMRRLGNNDKEGLKEYFSSFPEETPVVVEATTGWEWLSDLLEEEELAVKLANPHKVKLIAEATIKTDKIDARTLAQLERANFLPLSYLAPREVRERRELLRHRMILVRLRTSLKSRIHSILNKKGIIIEETTDLFGKKGREILKEVDLPEIYREETDTYLDLIDRLDDHIKVKEKQISKIVREEELARLLMSIPGISYFSGLLILSEIGDINRFNSAKKLCSYAGLAPTTSQSDEAVYHGHLKKDSNKYIKWVLIEAVEHIIKKDPQLAYKYEKILSKKGKNKARVAVAQKLCISIYYMLKNRQPYKTRERKRNRVLFRVSP

SEQ ID NO: 54518 - protein, 350 aa, unidentified
MEVHTIGIDLGKTLFHLVGVDASGAVVIRKRCSRTQLLAYTSNMRVHRIGMEACSGAHFLGRALREQGHDVRLMPAQYVKPYVKTNKSDYIDAEAIAEAVQRPTMRFVPIKTEEQLDLQAVHRVRERWVMRRTAVVNQVRGLLLERGLTLPKGRSHVDHALPEILADTQSKLSDSFRVVLAQLKLELDQLTARIDEMDRVIRNTATEDEACQRLTTIPGIGPVTATALFAAIGNGAAFRKGRDLSAWVGMVPREYSTGGKQKLLGISKQGNSYLRRLFVQGARTVMQHRTKQALGLRCWLDQLLARSHQNVVIVALANKLVRTAWAVLRKNETYRCPVPLSSSCDSGVSG

SEQ ID NO: 54519 - protein, 415 aa, unidentified
MFIGDDWAEDHHDVELESEDGRRLARARLPEGLEGVGRLHALVAEHAPAGWAELTPAQAAGRVVIGIETDRGPWVSALRAAGYQVFAINPLSAARYRERHSTSGAKSDAGDAHVLAEIVRLDGDHHRPIAGDSDLADAVKLLARAHQTAIWERTRAVLRLRSALLEFFPAAVGAFEDLAAKDALWVLGRAPDPTRAAKLTRGQLVTALRAARRHHVESKAEDLLAVLRAPGLRQSPALEGAYAAIVGGQVSVITAFNEQIAQLQEVVAAHFGRHPDAEIYLSQPGLGVVLAARTLGEFGDDKKRFSDARARKNYSGQSPITRASGKKSIVLARYATNRRLGAALHLQAYSALGASPGARNYYDALRGRNIGHHAALRQLANRLVGILHGCLKTGTVYNENTAWQHHRADSERIAA

SEQ ID NO: 54520 - protein, 318 aa, unidentified
MGGVNAAIEVGKQQLVVQLGSQGEQFSEANEPRAIKRIAKRLFQAGCERVLIEGGSYQSVLIAGLRAAELPVVIVNPRRVREFARSIGQLAKTDKIDARILALYGEQTQPPLRELPDEQSQALRALWVRREQLIEMLVMEKNRLEHTAEKAKAVRHNLCSHIDYLRKQVKQADNDLDREVRNSALWDKYEMLSSVPGVGPVLSVALLSDLPELGRLNRGEIAALAGVAPFNCDSGTLRGQRRIDGGRSRLRRVLYIATVAAVRCNPMLKLFYLRLRAAGKPPKVALVAVARKLLTILNAMLKTKTAWRPPCPARPELT

SEQ ID NO: 54521 - protein, 336 aa, unidentified
MSTLPVIVGLDYSDRSVQVCVLNEQGQVLGNRGCANDWQAIKEFAESRGTVVRAAIESCSGAADLADELVTRAGWHVDLAHPGYVARMKQTPDKTDYQDARMVADLERVGYLPRVWLAPEPIRELRHLVRYRQQLVEQRKAVKLRIRALLRVQRCRPPASVNPWTRAWLTWVSKDALLGDHSRWIMERHLEELRRVADALKHVEKRLHEATAKDPVVVTLQEQPGIGPVTSWTLRAEIGRFERFRTGKQLARFCGTSPRNASSGERVADAGLIRAASPTLRATIIETAHRLIRTQATWAQMAARLRARGKPKCVAVAAVANRWVRKLYHQMVQQAA

SEQ ID NO: 54522 - protein, 354 aa, unidentified
MKRTAKYVGLDVHQATTVMSVRDPGGRVIAHSILHTDEREVVVFLRGLRGRVAVALEEGTQAQWLHDVLEPVVDEVVVCDRRGKKGQGNKGDLVDADEISELLRLGTLRPVYHGSAHQANLRELARTYRGVVGDATRVMQRIKALFRARGIKTPGARVYHPTNRSEWLDKLPRGGARFRAEVLYAQLDALREQRPVVKAAMIVEARRDPAWPALRSVPFLGPVRVAQILAIARTPWRFRSKRGIWAYSGLAVVTATSAEYVIVDGRPVRRRRAPITRGLNRNHNAILKDVFKGAASAATARPGPLQDLYHTMTEHGMRAEMARLTLARKIAALSLRLWKTGERYDPIKLTMQAR

SEQ ID NO: 54523 - protein, 353 aa, unidentified
MSSLDYIGFDVHKKTISFCVKTGDGRILDEGRIAARRDELNAWAKVRSRPWVGAMEATLFTGWIYDFLRPHAQELKVAHPAMLRAITASKKKNDCVDARTLADLLRCNLLPECYMAPSQTRERRRILRYRNLVVREATRMKNRISGLLMETGTPYNKGRLHGKAYFAELLGTLQETPASVQDLLRLSRGQLDLFESIQSRLMKELVSDPELAERVERLRSIDGVGPILALTWVLEIGEVQRFASIRQAQSYCGLTSAQHHSAGIDHRGPISKQRNKHLQTMLIEAAKLAPRFNGQWAAVHARELARGNRNQATLAVARKMVAYLMAVDKNGRPFQIRSSEASAAVGQESGRAA

SEQ ID NO: 54524 - protein, 408 aa, unidentified
MKTLHKRCAGLDVHKAEVVACLRLISKRKVEREVRRFPTTTQGLLALAEWLESAGCTHVAMEATGVYWKPVWHILEGRLALILANAAHVKNVPGRKSDVNDATWLADLLAHGLIRSSFVPPPAIQELRDLTRTRRQLTREIVQHVQRIQAVLEEANIKLCSVITDIMGASGRRMLKAMIAGETDAEKLAALGHERLGCTRAELVEVLTGRVREHHGFLLGQHLRTIEQLEDSVAAFDARIEAALSPFHDIVERLKEVPGLAAIATETVIAEIGTDMSPFPTVGHLLSWAGFAPRLDESAGKHRSTRIRKGAPWLKPILVQAAWGAARKKNSYFQAQFLRLKARQGAKKAAIAVAASILTTVYHMLRHGTCYQDLGPEYFTRRNPAQAAARLANRIRNLGYHVEIRAAA

SEQ ID NO: 54525 - protein, 343 aa, unidentified
MSEISTIGLDLAKNVFQVHAVDASGRVVLRRQLRRGAVEKFFAKLPPCTVGMEACGSAHHWARVIGRYGHQVRLMPPAYVKPYVKRNKNDGRDAEAIYEAVGRPTMRFVPVKSVEQQATLAVHTTRALMVRQRTMIGNSLRAALSELGIVAAQGFKGLRELMAKLEAANDEIPETMRSALLMLARHWQALDADERALERQIAQAARCDRDARRLMEVPSVGPIIASTVLAKVPDAKVFRSGRDFAAWIGLTGRDHGTGGKHRPGRISKQGDRMLRALLISGASAHLRQQKARGVSDPWLRELLARRPYKVAMVAFAARTARILWAMLVKGEAYRDRARASAAA

SEQ ID NO: 54526 - protein, 412 aa, unidentified
MEVVHAVCAGMDVSKTDAKVCVRVAGAGRRKTVETVTTWGAMTGQILDLREHLAAAQVTCVVMEATGDYWKPFYYLLQDLPGVEVMLVNARHVKNLPGRKTDVADATWLAQLGAHGLVRGSFVPPAPIRRLRDLTRTRTAITRERGREAQRLEKLLEDAGIKLSVVASDILGVSGRAMLEALIAGQRDPGVLADLAKRRLRPKIPELTQALQGRFEEHHAFMARVHLDLIDQHTAAIEALTARIEQVIEPFRGFRDLICTIPGISTLTADVIVAEIGDDMSRFPTAAHLASWAGTTPGSNESAGKVKSSKTRPGNPYLQGALGAAAMSCAQHPGTYLNAKYRRVATRRGPQKANVAVQHAMLVAIWNMGTNGTLYDDPGADYFTRLNPERARTRAVQQLESLGYAVTLANAS

SEQ ID NO: 54527 - protein, 414 aa, unidentified
MSTQVFCGIDWAEDHHDVALVDRDGQLLARRRISDDAAGLATLLDLLAEHGDSAEQPVPVAIETPRGLLVACLRATGRKVYPINPMAVARYRDRHSVSGGKSDQGDSVVLANVLRTDLTFHRPLPADTELAQAIAVLARAQQDAVWDRVTAHNRLRSCLREYYPGFLAAFEAARGGIMRPEARVILAAAPTPADAARLTLAQLRGLLKKAGRRRGIDAEAARLREAFRAEQMRQLPLVEQAMGRQTLALLRQLDAACASAEDLEQAAIESFNQHPDAGIITSFPGLGLLTGARVLAEIGDDRSRFCDAKGLKAYAGAAPITRASGKTKSVTHRRVKNNRLNATGYTWAFSALTASPGARAHYDRRRETGDRHAAAQRNLFGRLLGCLHRCLATGQHYDENIAFPGTADKLRQAA

SEQ ID NO: 54528 - protein, 343 aa, unidentified
MDQIIRIGMDTSKRFFQLHGVDGEGRPVLRRQLTRAQVLPFFEKLGPTFVAMEACGAAHHWARVLTRLGHEARLIAPQLAKPYVARGKNDAADAAALCEAASRPHMRFVPAKSMDEQAALMLAGQRERLVRQRTQLVNTIRGHGAEFGLIAAKGPAGIGPLLERLARADIPALARELFAELGEEHAALCGRIAALDRRLRGWRNANETARRLEAIPGIGPLIASLLVMKAPDPHLFKSGRDFAAWLGLTPRDHSTAGKARPGRITRAGDPMLRSLLVVGATAVIWRTRRGAAKNPSGWLEALIERKPAKLAAVALANKMARIAWKLMASGERYAGGDVAVVAA

SEQ ID NO: 54529 - protein, 314 aa, unidentified
MNTQGMVAGIDVSKDWLDVALGSESLRVANEAAGVSGLIERLQAMSVKLVVMEATGGYETQAASAIAGAGLKLAVVNPRQVRDFAKATGRLAKNDRIDAHVIAAFGQAIEPQIVHLPDEQTRELQGLLLRRSQLLGMRVQETNRLAQMQGAVRKQIKSHIAWLDRAIDEVNTDLTARIRQSPAWREKDELLQSMKGIGPITSGTLMTSLPELGQLDRRSIAALVGVAPFNRDSGAFRGRRAIWGGRAQVRHMLYMAATTAIRANPVIKPFYERLIARGKPHKVAMVACMRKMLTILNAMMRSNTPWSPTFQGAN

SEQ ID NO: 54530 - protein, 440 aa, unidentified
MAMRKREDLVFPNAGAIDVGASSHWAAVLPHSTDAPVREVGAMTDDLNGLADWLLACGVDVVALESTGVYWIPVYEVLEQRGLKVWLVDARQVKYVPGRKSDVQDCQWLQKLMSYGLLRAAFRPAAEVCVIRAVARQREVLLTEQASWVQRMQKALVQMNIQLTEVISDVMGQTGQAIIRDIVAGQREPKLLARHRHRRIKASEQDIVRALTGNWREEHLFVLKQALAMYDDIARHLRECETKLQTLLAERSAASVDLGKAPRAGSKARAEFDVRQQLANWAGADLTRINGLGLDSVMKILSEIGTDLSRFANVKHFCSWLGLCPATKISGGKVLSARTKRSANRVRQALKMAAMSLSHSGSALAAFYRRLCSRMDKPRANTATAHKLARMVYFMLTRGEAFVDQGQQRYEEQQRERSVAALKRRAAALGFQINPMGAPA

SEQ ID NO: 54531 - protein, 345 aa, unidentified
MNLTPVEIDIAKTAFQVHYVDHDTGEVVNKPIRRAAFLEHFANLSPCLIGMEACGGAHHWARKLVQMGHQVKLMPGEFVKAFNIRNKNDAADARAIWLAVQQPGKAVAVKTEMQQAMLALHRARAQLVKFRTMQINGLRGLLAEYGEVSAKGRASLDKAIPEILARVAERLPAVLIDTLREQWAGLTKLDEQIAAIERRMREWKKDDHAVKAISEIPGVGLLTATAAVAMMGDAKAFRSGREFAAWAGLVPRQTGSGGKVNLHGISKRGDTYLRTLLIHGARSVLIHANASGPWVEQLKKRRHPNVVIVALANKIARTIWAVLAHDRPYQKGYVSVNPVGTANIS

SEQ ID NO: 54532 - protein, 344 aa, unidentified
MDHFAGLDVSVKETSVCIVDDAGKIVREVKVASEPEALLAVLKKPAYRFKQIGLEAGPLSQWLFSALAEAGLPVVCVETRHMQAVLKAQINKTDRNDARGIAQMMRVGIYRPVHVKTLRSQKLRMLLTHRKLLQSKAIAIENDLRGTLRNFGLKVGIVGKVRFEARIKELVENLPDLAVLVEPLLLVRRTLREQTIILHRRLLAIVRDDEVCRRLMTIPGVGPVVALTYRATVDVPARFRKSKAVGAVFGLTCAKYQSGEIDWTGRISRCGDEMMRVMLYEAAQSMLRAKKWSWLKAWAMQIARRRGMKKAIVALARRLAVIMHRIWVDGTEFRWTREQAAAAA

SEQ ID NO: 54533 - protein, 314 aa, unidentified
MDDLTTMPASFIGCDVGAREIVVFDSRSGATTSVRNEPEALRAFAMTLDPDGLAICEATGGHEAALLDALVATGRLVHRADARKVKAFIRSFGTLGKSDAIDARALARYGRERHRSLLRWQPRDRAREQLQLLVNTRQDMVRQRTACKNRLKAPGTAPVAACLKRLLDTLDAEIKGLDDDIKALIRTHAPLATITTVLCSIQGIGITTAAQLAALMPELGQLGRRQAASLGGLAPHPRQSGASDRYRNTRGGRPDVKQALFMAAMSASKHHPSLSAFYKRLIGNGKKPIVALVAVMRKLIVIANAKVRDALAHN

SEQ ID NO: 54534 - protein, 327 aa, unidentified
MEQFSFFTGIDVSKLWLDFAVIDPAYGLVHQSRINNTVKDIRAFFKHIKKLLKAETTEHLFCMEHTGKYGQAFLTASILEKAKVWVELPIQIKRSLGLVRGKTDKWDAIRIAQYAHRFADKAVFWKPIDKALQDIKELQVKRSLLVKAHSQLIQEDKNDPLFKKPLLALKQAIQAIELKMEKLLEQNEGTCHQYNLLKTVPGIGKQTAMALIIVTNGFTRLTQSRKLSCYAGLAPFPYSSGSSVKGRTKVSKMGDMKLKVLLNLSAWNAIRSISAFKDYFKRKVSEGKHKMSVINAVRNKLLALALAVIKRNSPYVKEYCVDLLVLP

SEQ ID NO: 54535 - protein, 340 aa, unidentified
MKLYGAIDLHSTNNVTVVIDEQDRVVYQKRLPNDLALILMELSVYQTELQGIVVESTYNWYWLVDGLMEQGYKVRLANTAAIQQYEGLKYTDDHSDARWLAHLLRLGVLPEGYIYPRADRPVRDLLRKRSQLVRQRTTNLLSIQNLVTRNTGESLSANQIKGLDVQQVDELLPNGDLALAVKANLSVMCCADEQTEILERTVRDRIKLRPEFSFLKTVPGIGQILALTIMLETGDIRRFCSVGNFASYCRCVGSQKISNGKRKGKGNTKNGNKYLAWAFVEAANFAIRFNSKIKSFYQRKKAKTKGVVAIKAVAHKLCRACYYIMRDRVAFDLIKAFGQK

SEQ ID NO: 54536 - protein, 324 aa, unidentified
MSKDKKYFGIDISKDIFDVYDYLGNFHQFSNDFKGFKKFNKLLDKESHCVMEATGYYHTKLAYYLIEKKVLVSVENPLKIKRFIQMGLSKIKTDKSDAKQIYNYALKVDLRFWYGESKTQQESLQIVRLLSVYTKQSTMLKNKIHGENVLGTPSKIVVQSLKRQLKSIQKELKKLEVALENNVKTEHQESLTLLRSIPGIGPKTAMMMLVFTDGFSRFNTSKELCSYAGITPVIRESGSSVKGKPRISKVGNVKLRNLLFLCSFNACKYNKSCKALYDRIVAKGKSKKLALIAVCNKLLKQAFSIVKNRVPYDDNFRSILVKNN

SEQ ID NO: 54537 - protein, 414 aa, unidentified
MSFENSREGFRALVDRISLYVPLTQVYVVVEVTGHYHRALLQYLQELDITVYVLHVQKRQKGLLKTDKRDALGLANMLYNQLDKGVQMGDPLQVVRRLAPPTPAAAQLRGMVYHRQELITESTQRKNKLTAIYDEMFPEFTQVFHDPNGPTALVFRERFPTPAAIATTRGKTRILSDARLLELQRLADQSIRTKDLARLRGLIFEQQQLIEEYHLIVAHLEALEAEMMQVVEHCREGQILTSIPGIGPLQAAILIALIGNIANFEQPAQLKSYCGWVPAIAESGTTLDQARLSPRGSRLLKPTIYLAVWKAIRMDCEWARLYERLIPIKCRYDEKRRAYVGRGRVIGRIAGQMLSVVYALLKSDQETLSKVPPGAALPEPVLYDPEIHRKHRAGQYQSPSSRQRPRKLIELPHH

SEQ ID NO: 54538 - protein, 333 aa, unidentified
MQNYSFFIGSDISKRVIDVSYHQNGKAQYLGQYPNNTKGFIALFKKLSKITQFSFDHWFVCFENTGIYSKPFFEWLHSMNIPFREENALKISRSLGFRRGKDDKIDSMDICQYAFEKRDSILPSKMPSALIVKLKKYLARRDFLVKQRQSLKTSLKEQKGFIDDDIFQALSIGNDKLIKTFNESIKEIEQLIDTLIESDNDISTNQKLVQSVIGIGKITSAYLIAVTENFTSFSDPRKFACYCGVAPFPNRSGIKSGSNKVSHIANKKMKSLFSNCTMSAINHDPEIAKYYNRKINDGKRNGIVINAIKNKLIQRVFAVIKRQTPYVKIMTYA

SEQ ID NO: 54539 - protein, 344 aa, unidentified
MDHFAGLDVSVKETSVCIVDDTGKVFREVKVASEPEALLAVLKNPAYHFKRIGLEAGPLSQWLYSALAEAGLPVICVETRHMRAVLKAQINKTDRNDARGMAQMIRVGLYRPVHVKTLRSQKLRMLLTHRKLLQSKAIAIENDLRGTLRNFGLKVGMVGTVKFEARIKELVETLPEVAVLVEPLLIVRRALREQFVILHRRLLAIVRDDEVCRRLITTPGVGPVVALTYRATVDVPARFRKSKSVGAVFGLTCAKYQSGEVDWDGRISRCGDEMMRTMLYEAAQAMMRSKKWSWLKAWAMQIARRRGLRKAIVALARRLAVIMHRIWTDGTEFRWTREQAPIAA

SEQ ID NO: 54540 - protein, 365 aa, unidentified
MNATAALPVVGIDIANSVFQLAVADGAWRVTEEHRLTRTQMERWFANRSVGLVVMEACGSAHHWGRWLNALGIEVRLLPALYVRAYVKRNKTDAADACALLEAARCADIVPVKVKSIEQQALQGLHRTRSLWMGTRTSRINALRGFCREFGIVIAQGARLGVERIARVLADPHSAVPELIRGTMKLLIEEIRLLEARIAQLERELTLVARASGACTRLLTIPGVGLLTATAMVAATGGGVQHFRDARHFASWFGLTPKERSSGNVRHLGRISKRGDRYLRMLLTHGARSVLNAAGRAVQIGKNVDALRQWALTVQARANHNKAVCALANKLARICYATLRDAQPYGEPVRRPNKKLERSSFAIAA

SEQ ID NO: 54541 - protein, 427 aa, unidentified
MARAIGLDVHLEFCEVAIAEDRAVRSAGRVETKPDALELFAQSLGPDDRVALEVTGNAWEIARIVEPHVARVVVVSPADTGIRQARAKTDRLDARTLARLLWSGELDAVWMPDRVTWVMRRRLSRRGQLVWTRSRAKNEIHAVLMRCLVGRPPFADLFGVKGRRWLAELELPVEERETVDAGMRQVEFLDTEIAAVERLIARDALASEEIKRLMTVPGVNVIVAASFVAAIGDIGRFHNPRKLVGYLGLDPRVRQSGSGPASHGHISKQGSVRARHALVESCWSAVRQPGPLHAFYQRVRARRGHSVAIVACARKLACLFWVLLTREEDYAYAQPSLTRKKLRLLELAAGAQRYSPAGDGVWHANEAVRAAERELAHQAEIAYQRTVRDYHATQATTKGAAATPGRASSSRQSGKQRGRATVPDPAL

SEQ ID NO: 54542 - protein, 339 aa, unidentified
MQLYAGLDLHSTNTYIGILDQEFNRIFKKRVSNNLGKILQTLKPFGGQLKGLVVESTYNWYWLIDGLMDNGYQCVHLANPSAIKQYEGLKHADDQHDAFFLAHLLILGILPQGYIYPKKDRPVRDLARKRMFLVQHKTAHILSLQSLIARCCAKKISSNEMRHLTLDDLQHLLEEEHLVLCAQANLDNIRFLTRQIKRIEKTINKKVKLNKAFQNLLTVPGIGNILAMTIMLEVGDISRFAKVGNFASYCRCVSSQRLSDGKSKGHGNRKNGNRYLSWAFVEAAHLTRRHCQQFRRYYNRKVAQANTSLATKALSNKLARICYYIMRDNVPFREELSSQ

SEQ ID NO: 54543 - protein, 341 aa, unidentified
MSEVSTIGLDLAKHVFQAHGADANGNVVFRKQLRRDKVLAFLARQPVCLVAMEACASAHYWAREIGKLGHAVRLVPPSYVKPFVKRQKNDMADAEAICEAVQRPTMRFAAVKSEDQQASAVVFRARDLLVRQRTQVINALRGHLAEYGLIVAKGPPHVAALIEQAKAAGSSVPAAALPALDILIKMLTVLAEQIKQLDIEIAKRAREEEIARRLMTVPGIGPITATALMALAPEPENFRRGRDFAAWLGLTPLQRSTGGKQKLGQISRMGERTLRRLLIIGASAVVQQARRRGAPQGTWLGRMLARKPPMLVAVALANKIARTVWALMANGGVYKAPVAAA

SEQ ID NO: 54544 - protein, 464 aa, unidentified
MKNTAARKLKQVPEGYLIIGVDPHKKKHAAVAITQDLTICDRYKVDNSREGLEFLLQRAKTEMVKSGCRGIMFAIETGGHYWRNIAYYLDEKGIPFRFINQYTLKRRREGKDLNKRKNDYRDSEVAAQLLCTGEFVDSSIPQGVYAELRTAHNAYRRLVKERTRITNLLKGLLDALFPEFVRVFKDPCGMTALSVLSTCSIPSVIAGMTNDEFISVIEAQHHGRRLMRKKLGELRNVAKTSIGIEAGARSLSVEISFLVEKLELIKRHIQTIERTLVRLVDEAEEGKYLISIRGLNYIAVAGLLAELGCFKSYRSAKQMIKMAGSNPTESESAGKKRTLTPMSKQGRPVLRHCAWTSVIPMLRLNPDFRAWAKERRERPAHANPLNGREVVGAALNRLLRLSFALVKNKTYYRSPYCSAGVQLGGVYYASGGQGDTAGRFGSSMQQTRVHNMVPLPSWPNPYEV

SEQ ID NO: 54545 - protein, 428 aa, unidentified
MASQIDPIAPRTWVAIDIAKGVNVALVEHADGRQQRFRFVHQRDDYDRLVAFLKSCAEPRRIALEPTADYHRTVAFRLVSEGFDLVLVSSVAGARLREALFNSWDKNDPKDAQVIMRLLKQGMTQRYCDPVVMKTHDLQELSKTYLHISRARTRLQHVLLTHYLTLYFPEMERFWTTQRNEWFIRLLLQFPTPASITAISLSQFREAIWKSMGRRVHKEAKITEIYALAAHSIALPMLDGCPAITTFRLQLERYLQLSETRTALAAQTDALLGDNSDYQCLKTVPGVGAVIALVILAEAGDLRRFSHHRQFLKFCGLDLAKCQSGAFRSREKLSKRGNARLRCALWMAAMSAARMRENVFREKYQRYIAAAPEDNDLKRKARTAITAKMARVVYALIKHGKPYRRLFDADLPSGSIPLRRVSGDMITV

SEQ ID NO: 54546 - protein, 429 aa, unidentified
MNYTQNEKIEQVTDSTMVVGIDIGSQIHYARAFDNRGRELTKRIFSFHNDLEGFNSFNLWAETLKTENKKTAVLIGCEPTGHYWFAFAKYVNDHQKRLVMVNPFSVKKIKELDDNSPKKTDSKDPKTIAKLVVDGRYSIPYMPEGIYAEIRDLVYSRDRIMKQHNISANRIQRWLAIHFPEYLGLYTRFDAISGLAVLEKAPLPKDVIALGVNGIRKIWHDKKMRGRGVTEDRAKTLVEAAHNSVGLDGGIGTKSELYMLLEEHRLWTSQLEAVNKVLEEMILKVPHMEKLLAIKGVGSITIAGFIAEVGDIRRFDSPKQIQKYAGLELVENSSGKHKGRTRISKRGRRKLRKILYQVMVPLLARNKEFRGIYDYYVTRVKNPLKRRQAMVAVSCKLIRVFYAVLTKGVEYDRFKMMSDIHRKSDIIAA

SEQ ID NO: 54547 - protein, 453 aa, unidentified
MAQRNRSISRKPGRSRAALTITHPNAAGIDIGSASHFVAVPADRDDEPVREFPSFTVDLNAIADWLAACGVDTVAMESTGVYWIPLFELLESRGFTVLLVNARHVKNVSGRKSDVLDCQWLQQLMTYGLLSGAFRPAEQVCVLRSLWRQRGMLLKNQARDVQHMQKALTQMNIQLTNVISDVVGETGQKILRAIVAGERDGQVLGAMKNTRIQASVEEIAKSLHGNWRAEHLFALKQALGAFDFIGTQLTECDQEIEAQLQRLQTHDGEPAKGKKRGRARNAPKFDLRTQLFKMCGVDLTRIDGIDVTTALAVISETGADLSRFPTVGHFARWMGLCPGTKITGGKVMSGKTKRCANRAAQALRLAAAALRTSRSALGAYFRRMCSRMDKPKAVTAAAHKLARLIYTMLTKGEEYTDQGQEYYEERYRERVLRQLSQRAQKLGMKLVATEQPA

SEQ ID NO: 54548 - protein, 339 aa, unidentified
MTVKTVGLDLAKDVFQVHCVSGTGRKILNKKIKRAKLLAFFETLPRCMVGMEACGSAHHWGRELRKLGHDVRLMPAAYVKPYVKRGKTDAADAEAICEAVRRPTMRFVEIKSESQQAVLAIHRVRDLVVRQRTQVVNMIRSILREFGHILPTGIKAVSKFARERGTEDQLKMPEIADGILGVMCHQLNSLNARIDGLTKLIEQHAWLDADARRLMRMPGIGPITASAIVATIGDAKQFRTGRDLAAWLGLTPLNKSSGGKERLGRITKKGDRYIRKLLIVGMTSRALMAKNKPEKADTWTAKILAEKPFRLATVAMANKSARIIWALLTKREEYRQPVA

SEQ ID NO: 54549 - protein, 350 aa, unidentified
MRTVAEEYARVVGVDTHAATHTMTLLIGATGAVVEHRTFPTSAAGLRRALTWIRNRTQDQACLVVVEGTGSYGAGLAEHFTQGGIVVAEAPTIPAARPRGKDDAMDSARIARAVLGLRLDQLCWPRAGGTRTAIRVLVSARDQMSTERTKIINALTALVRSVDLGVDARKALTSAQITTIAGWRARDEDPAVAACRREAIRLASRIHALGRDLAANMAELRQFTAAQVPELLDLPGVGPVVAGTILLAWSHPGRVRSEAAFAALAGTSPIPASSGNTIRYRLNRGGDRQLNRVLTTIVLVRMRHDQTTRNYLARRRAEGRTTKEIMRILKRYIARQVFRLLAAAHPTPTV

SEQ ID NO: 54550 - protein, 340 aa, unidentified
MSEITTIGLDLAKHVFQVHGVDAQGTTVLRKRLRRGQVLAFFSRIPRCVVGLEACATAHYWARELGALGHEVRLMPAQYVKAYIKRNKHDAADAEAICEAVQRPTMRFVPVKTAEQQATALLHRGREQLVRQRTMLVNALRAHLAEFGIVAAQGLRNVGELIAIVRDDGDTRLPDVARQVLQVLADQIEQIETAVAGLERQLLAWHKTNPVSQRLASIPGIGPIIATAIATTVADPKVFRSGREFAAWLGLVPRQNSTGGKTRLGGITKRGNRYLRRLLINGASANLLRSKATKADPWVIGLRRRRPPLVVAVALANKTARIAWAVMLREKEYQPRAMAA

SEQ ID NO: 54551 - protein, 370 aa, unidentified
MEENIKFFVGLDVHKDTIAVAVAQAGREPARLVGSIAHDVGKLRKLLARYGDSGAVQVVYEAGPTGYGLQRELARRGYRCQVIAPSLIPKRAGDRIKTDNRDCLRLAELSRAGELKAIWIPDPADEAIRDLARAREDAVNARTRVRQQLKGFLLRHDVRYTGKTSWSKTYYRWLATLNFGLSGAQVAFTEYWQAVTAADERVARLTDALANSIAGWRFEAMVRALQALRGIDVVSAIGLVAEIGDIERFAHPRQLMAYLGLVPSEHSSGERVVRGSITKTGNTHARRLLTEAAWNYRFQPRIGRRAQQRAEDLPQAIRDVAWKAQLRLAGRFARLRARGVQINKVCVAVARELAGFVWAIASTQAKLKSS

SEQ ID NO: 54552 - protein, 352 aa, unidentified
MSQKFAPSTAVSTIGIDVGKNSFHLVGLDQRGAIVLQLKCSRAQLERRLANIPSCLIGMEACCGAHYIARQLAALGHDVRLIPAQYVKPFLKGHKNDYRDAEAIAEAVQRPTMHFVAIKTPEQMDLLALHRVRSRLVGQRTGVINQIRGFLIERGITVRQGVVPLRKALPDILSSNTDALSPRMVNLIAELVQDWRRLDERIAAVSAEIEALAQQDEGCQRVMTVPGVGPIISSAVVAAIGNGAGFTQGRDFSAWLGLIPKQESTGDRTILGKISKRGNKYLRTLFVQAAHVVLARRPNAAMRSLWPWIEQASRRLHRNMLAIALANKLARIAWAVLARGHSYQPRIVADAA

SEQ ID NO: 54553 - protein, 352 aa, unidentified
MSEHSKESVVTVVGIDLAKRSFHVYGADGHGKQVFSKKLTRARLSLFMANLPACTVAMEACGSAHHWARTFRTYGHEVRLIAPQFVKPFVKSNKNDAADAEAICEAAQRPTMRFVAVKTVEQQDIQAIHRMRSLMVDRRTAQINQIRGLLLEYGIEIAQSRAAVGRRLPEILEDADNGLSARFRAELHELAEELRHLDTRVSHYDEQIEEIARQDAQVQRLMTIPGLGAKGATALVAAVGEDPRLFQNGRGLAAWLGLVPRQHATGGRERLLGISKRGDVYLRQLLIHGARAVLRWVERKEDHTSRWATALKARRHTNIACVAMANKITRVAYAVLTTGKPYDPASGALAKG

SEQ ID NO: 54554 - protein, 369 aa, unidentified
MADRITYVGLDVHKDSIVVAVAAGGLRGEVREYGRIANTSTALDRLLRKLGGDGMRLRFCYEAGPCGYGIQRRLSTRGHECVVVAPSLIPKRAGDRVKTDRRDAAGLAKLHRAGELTAVWVPDVGHEAMRDLVRARLDAVHSLRRARQQLSGFLLRHGCHYGRPAWTRLHRRWLAGLKFEQAVHHIVLEDYIAAVEAAEARRNRLTAQIEAMLPDWTLAPVVAALQTMRGMALVNAASLIAELGDLSRFANPRQLMAYLGLVPSEHSSGSSVKRGGITKAGNAAARRLLIEAAWSYRFPARLSRELLLRQESQPRLIRDIAWKGQVRLCARYRRLARTGKPANIVTTAIARELAGFVWAIARQVTVTTD

SEQ ID NO: 54555 - protein, 349 aa, unidentified
MRSFTPPATTRFYAGVDLHARALFLVILDRDGRVVFARNLPAAPEPFLRAVAPFRDGLLVACECVHCWYWLADTCRDHDIPFVLGHAWAMKAVHGCKSKCDRKDAEAIARLLKGGNFPPAYAYPRERRGLRDLLRARLRLVRQRAELYGHVHTARRQANLPPVSNDVKYVSKRAAITADIADPLVRRRVETDLALLEPLDTAIRQLEADLEDAAQEHYATELAVLQSTPGIGLVLSLTILLETDTIDRFDTRQQYCSYARLCGAVQTSDNKRTGEGNRKAGNAWLKWAFSEAAVLSAQKDERIGAYLQRLASRLGKAKALSALAHKLGRAFYHMLHTKEVFDVNRFVRP

SEQ ID NO: 54556 - protein, 492 aa, unidentified
MVPVLVIATLVTLARSMGHDPVEEITRHTVWPDSQPTGGDMELKMGKSAGLSLECIELNAAGIDVGATEIYVAVPPDRDPQPVRRFATFTADLRAMAAWLVQCRITTVAMESTGVYWIPPYEILEQAGIRVCLVNSKHVKHVPGRKSDVQDCQWLQYLHAVGLLHASFRPDERICAIRSLSRHRASLIENAAGHVQHMQKALTQMNLQIHHVLSDITGLSGMAILEAIVAGERDAAKLAALCHTRVRSDQQTVIKSLVGNYRSEHLFTLKQSLTAYKHYRELMAECDREIERLTRQLNSRIDPPQKEPMPPADLRFRKRSKNQFHCDMSSELTRVLGVDLTTIPGISALTAHTLLSEIGSDLSPFPNAAAFASWLALCPANKKSGGKVLSSRTRQTNSRASRALRLAAQTLARNRSHLGNFYRSMRARLGAPPAITATAHKLARIIYHLLTTGQPYDESVFLQEGKKQAQRNEKRLRKQAKALGFQLVPIAA

SEQ ID NO: 54557 - protein, 446 aa, unidentified
MRAMYPADLSLERQTTRFSVSVQSLLVFSNKFEELPMPKIVYPICCGIDVHKSFVVACVATTDEKLVTTYKRKRFSTFTGDLRRLAEWLAQNNCRDVCMESTGKYWIPVYNVLEPTCSIVLAHPKYAKAIKGKKTDKRDAKWIADIFKHDLINGSFIPPADIRQLRDLVRYRFKLTSYTTGEKNRAQNCLTVSNIKLDEVFSNVFGKSASAIITRLLESNEPFDVKPFVDSRCKTPIQEIQAAVDGSMCENQAEKLRIIRSHMDNLKLCKLNLESEILTVAEKFLPQISLMSTVPGIQSFSAIAIIGEIGVDMSVFETSRHLCSWAGLTPQNDQSAGKKKTTRISRAGAYIKPLLVQCALAAIKSTKHPEVRHRYQSIKKRRGHKKAIIAIARMMLTAIYNILKKNESYNAELYRVSDKPPVKREVSVEQAIFILQRQGYLVTATD

SEQ ID NO: 54558 - protein, 342 aa, unidentified
MDTIGLDLHKRESQLCIIDSQGEITEKRIVTARERFTAVLAGKPRCRILLEASTESEWVARHLESLGHEVIVADPGFAAMYAMRSKKVKTDKRDARTLAEACVLGAYRATHRVSAEQRHVRSQLLVRDALVRTRTRYVALIKAAVRREGSRLSSGEAERTAAKVRAIELREEVVEELTPILGLLSPLNREIDSADRSLEQLARSNPVVTRLMSAPGIGAVTALSFVAALDDVKRFRSAHQVESYLGVVPSEYSSGERQHRGRITKRGNARMRSLLVEAGWRILRSRKSECAALKSWAIQIAARRGKRIAVVALARRLSGILYAMWRDGSEYRTSNKKLEVAA

SEQ ID NO: 54559 - protein, 393 aa, unidentified
MICVGIDVAKDKHDCVILNSEGKVLAGVFTIPNNADGFDTLLQKIHGCTSPDDKIKVGLEATGHYSYNILGFLLNQGLPTYVINPLHTNLFRKSMSLRKTKTDRVDAKTIAAMLMSNVDLKSYTDTAYHNEELKSLTRYRFDKVQERAQLKQSVSRLVTILFPELEKLVPTLHMSSVYALLIEFPGAKQIAEAHLTHLKSLLKDASKGRYGRDMATEIRDAAKHSIGSVMPAKSLELRHTIRLIRELDSAIEDIESAIEAIMDEIQSPITTIPGMGFRMGAMILAEIGDFSRFDSPSKILAYAGMSPSTYQSGQLSLAGTYSHMEKRGSRYLRYALYNATKYVCHWDPGFAAYLAKKRAEGKHYNVALSHAAKKLVRLIYALEKSRQPYRRAA

SEQ ID NO: 54560 - protein, 396 aa, unidentified
MRNDVTIYVGIDFSKEKFNACLLMEQGVMGESEFPNTKTGYLKLTKWVKNTSELGRSFDSSLVLFCGEHTGTCSIGLCEYLYAKGMKIWLESALKIKYGSGLKRIKDDKADAEMIAYYAKRFYEPGSCVLFEPDSADLKTLRTLYQFRNRVVCDRVAIGNRISSGAFDCSTLVRNRMVKHHKEAQKDEKDIEKEMVKLMETSEELASNYQILISFKGIGPITAAALIIYTSNFKKFDNPRKFACYCGIAPFGKQSGTSINTKPHVSRFAHIGIKAAMVQACKSAMQHNAVIKAYAQRLYAKGKHEGIVMNNVKNKVMHIIFKMIQTQTLWEKEYQQKHTKECKPIPGKNGIGATEAAPIINATLKTSSSVVECTFLEKHSFQKNSKKTSSFSCVET

SEQ ID NO: 54561 - protein, 326 aa, unidentified
MFPVGIDVSKNTLDLCMLYDGIKGRIKTRNIQNNRHSVENILRWLRLQHCSPEDVHVVMEATGVYHERLATELHDAGFRVSLANPHRSREFARGMGIMTKTDKVDAYMLACYAFLKKPHRPEIRYLGALLRRRDVLLGDALREENRLEKYLSTDTPADIISSCRRMAQLLREEVSNIERQIKAHIKASPALRRDYTLLTSIKSVGPQLGMHMLVVLRSHNFVSAEQAAAFLGVVPIEKRSGTSVRSRPRMSKIGPPQLRAKLYMSALCGKIYNKRMRNIYDEMCLRGKPKMVAIGALMRKLVHWCYGVLKTGTVFNDEDLKPVLST

SEQ ID NO: 54562 - protein, 378 aa, unidentified
MRMTTDQAHVTAGVDAHADTHEAAALDERGRLLGTRTFRTGSEGYRELLAWLEQFGELVVVGVESTGSYAAGLVRFLGAHGVDVVEVNRPHAHTRRRRGKSDPIDAEMAARQALSGDASAIPKTTTGIVESIRQLRVARDGAVKARSAALCQLSDVIVTAPDGLRERLSQRKRTRAKANLCLGLRPRTTHLGEPAEAAKLALRSLARRIQNLDEEIAALDKHLGTLVATAAPRTTKLLGISTGHAGQLLVTAGQNIERLRSDGAFAALCGASPVPVSSGRRSRHRLNPGGDRDANRTLHMIAVVRLRYCHRTRAYAQRRSTEGKTKREIIRCLKRYIARETYRTLCADLHDLQQPPRPAAAVTIMCGAGPIGRARRRT

SEQ ID NO: 54563 - protein, 339 aa, unidentified
MHVTTIGLDLAKNVFQVHGIDDHGEIAFNRALRRAQVLAFFERLEPCLVGIEACGTSHHWARELIKLGHNVKLIPPAYVKPYVKRGKSDAVDAAAICEAVTRPTMRFVEVKTPEQQAILAVHRTRDLIVRQRTQTINMLRAQLAEFGLVLPQGVYHPLRFAKDCVDGEQPDLPQDAQEVVFDLCDELLFLHAKILWHSRHMTRIAKSEKRVALLRTIPGVGPITASAIVATVGSGKQFNNGREFAAWLGLTPLNRSSGGKERLGQISKMGDQYIRRLLVLGMTSRIRSIRLEPEKFDPWFADILSRKPSRVAAVAMANKTARMIWAVLTRNEPYKVRTV

SEQ ID NO: 54564 - protein, 313 aa, unidentified
MTVKYEYIGIDVSKATLDVACQTSREYKQFSNTTQGINALIKWLENIHPELIVMEATGGLELPCVAELAHTKMPVAIVNPRRIREFARSIGQLAKTDKLDARVIAHFGEATHPEPRKLPTEQEEKLTALLTRRRQVVEMLTAERNRVHSARFAMRERIEVHIQWLNQELMDLDNEITDFIHQSSLWKEKNTLLQSVPGVGKVTSATMLAMLPELGTLNRQKIAALVGVAPVNKDSGRRQRKRRVFGGRANVRSVLYMAALSASKHNPKIKAFYNHLVDMGKEKKVALTACMRKLLVILNAMIRANQPFTTNLV

SEQ ID NO: 54565 - protein, 353 aa, unidentified
MRKMQEFIVKGNRIFVGLEDSKKTWKVCVRCDRMIVHETGMPAKYEVLRTYLLDQYPNCEISLIYEAGFQGVWLHDLLEADGIDCIVTPPNKVSCPKNDRVKTDKRDARLLAKNLEAGVYMSCAVPDRERREDRQISRTLSQVQKDIVAEKNRIRRFLDYHGLNGGLPEKNWTDRDYIRLKEMKLPHPLRVSLDAYIQILETLFSTRDGLKSELRALCKKERYKTGVHFKRTVPGIGWLTAIRLTLEWGDLRRFPTGKHMAAFTGLTSREYSSGDTVRRGRITGQSSGYVRSWLIECAWRARRKDPALLDKYLRVWRNSGSKKKAAVAVARMLAVRIRAIEITGQSYCCSVAE

SEQ ID NO: 54566 - protein, 345 aa, unidentified
MPATEVHTFAGIDVSSRELSVALRRGQGEDKPAVAKFSNHPSGHKALLAHLLRGGRPVRICLEASGNYSLDLALTLQAHRQVEISVINPRRARRFAESLGERSKTDPVDARVLCDFAARMPWVRWQPPSPVALHLRALTRAIADLGAIHTQQNNRAHAAAASQALPALVVKEMQRHQKYLEQRMTRLRREALRLIADDPELDRRFRLLLTTTGIAETSALQILGELAVLPEMLDARQWVAFSGLDPRLFKSGKSVEKRARISRGGSRHLRRALYMPALVALRRDPYLRGFYQNLLARGKARLQAVVAVMRKLLHALFAMFRSNQPYDGSKLCAPHLALDAVAACA

SEQ ID NO: 54567 - protein, 341 aa, unidentified
MKNLFIGVDFSKEKVDVAILFADGLVETAARVFNEFKTTVSGYRQLVKWVEQNSCGIDSSLWLFCGENTGDYSKGLCNFLYGKGYDMWLENAKSIKDASGLRRLKSDRADASMIAEYAMRNYDKAVMYKPLSESLTQLRELFLYRQMIVRHRCSFQVRRGEKRLTMEKSPVKTMISQSGRHIVSELNKEIEKIDKRIADLIKSDEELTKVFTIVTSVPGIGTQNAVCLMVYTDNFRRFNYDSRKIACYYGLAPFGKDSGTSVHSDPHVHYMANRQIKAMLTQAALAAVNFNPIMARYYMRLVERGKKKQVALNNVKNKLVHLVTAMVRNRQTFTPEYKISA

SEQ ID NO: 54568 - protein, 313 aa, unidentified
MSQNNPNILYVGLDVAKLSLQLHLAGRFHLLANDAKGHAQLLKRLRGHPAAHVVCEATGGYEQAVVRALQSAGVPVSIVEAGRVRYFARAQGQRAKTDPIDAAVLSEYGTTFQPAATAPASPQQQQLADLAQRRRQLIQLLVSERNHAEHYTDSFRVRQSRQLVKALEKQITQCDEAITTLIAQDTELARKAERLKAIPGVGPVVAATMLAEMPELGKLTTQTAAALAGVAPYNRDSGGQNGVRHINGGRAAVRCALYMATLSAVRHDRILKEFYLRLRAAGKKPLVAMTACMRKLVILMNRLLKNNDFQLAS

SEQ ID NO: 54569 - protein, 396 aa, unidentified
MFGPIIAIDVSKDSSHAQLFESFKKPMGKPFVFDHDKQGFDLLSEKLKMLEEFTGEKVSVVLEYTGHYSIPVVRWCLQNDVKVYAISPLLSAKFRKKDLRGTKTDKKDCANIAGVYFSQDNLRVARPTDPLQELSRRYQRTNKRIVGLKCQFMKCLDQVFPMFEKKIGDPYTDKSINVLINYSHPEKILKAGRGNLGKFIAKVTSHTEKVSEKYADELIRFAKDCVSGCSIDSCVTEELSEYGQAIIDLTEKCESIIARIKEIEGERQIESVRKVCNFKSSKLIVLILAEIGDISRFKAKENLVSYAGMDPVVYQSGEQTGKGLSITRKGNSLLRKYTYLAVCCIIREDPSSPITQYFQKKIKEGKPAKVARIACCVKLLRLIHASLTLQDNFKLV

SEQ ID NO: 54570 - protein, 384 aa, unidentified
MRGNFIPREYDIFTGLDVSKKSISVTFTNHQGFIRSLNMPHKAEPLLNYVRKHFPDQKIAFVYEAGPTGYGLYDGLAAQAYPCLIAAPSMIPRAPGQRVKTNRLDSKALSENLRGGQLKSIHIPSATYRQLRHLTQLRDVLVSELAGMKQRIKSLLLFEGIEFPPAPPGSQWSFLVKDKLRKLPCSGTVRFKLDQLLDSLEFNEKQVLKTITEIRRFCRNDPELSQCMKYLMSLPGIGWITASQLLARIGDWRELKNIRQLAGFLGLVPTEHSTGEKVDRGSITRTGDERLRSKLIQGSWSAIRQDGELREFFRSVCRKHPREVASRVAIVAVARKLSVRISVVLMKQRPYEVREKVHSAPLTQEETSPQGTTRRLREPGEKNS

SEQ ID NO: 54571 - protein, 459 aa, unidentified
MMRKGIRGKPVNVKRAEGNLAVTRPKVAGIDLGSVEHFVACPPRDGQANVKTFGTTTPELTALADWLQVEGVVSVAMESTGVYWIPLYELLEQRKIEVLLVDARQMKHVPGRKTDMIDCQWLQLLHSCGLLRGAFRPADAFCRLRALVRQKATLIDEQADWLRRMQKSMDQMNVRVHRAVSDISGTTGMGMIRAIVAGERDPRKLAGLRDARCTKTIEQITEELTGNWREDHLFNLKEALAMYDFILARIASYESEIQRILKELAPNPALGSAPEPNNPTKKRQLRARGQEPLRQALYGSCAKDLTTIDGISTATAEVVLSEMGPDLCDFPTEGHFVSFVKLSPKLAISGGKPIHKRPKGTASTRVGAALRMAALTLRNSKTALGAAYRRIARRKGASVAVFATARKLAILIYRLLRYGKVYVDEGVQAYEQRFQAARLRLCKDIANQFGYTLMQNEAL

SEQ ID NO: 54572 - protein, 406 aa, unidentified
MKQIVSVGIDVSKGKSTVCAMIHPNTIIKESFEVLNTVEEMSMLADYIGSLDGEIRIVMESTGHYHLPVAQFLYQKGFFVCVENAYIIRQFSRIMLHGAKTDPLDAKKLAKYGLAYWSELKPYKFHPSCYTELSLLSKQYQTYIKLLIAAKQNVIHLMDEMLPGFKEALDTASSVQFSKVKYVDFAKEFYHVDMIKTMGKEIFRENYKQWCKEKGYRFQSEKADELFHLAEDGIPTLPTEFPSTRLCMEVATEQVSQLGYALEQILSQMQNLAKTLPEYQTIRQMGGMGEKLCVRFIADIGDVRRFHNGKALVAYAGIDAPPYQSGQYTGTKRRISKRGNSALRKTGYEVMKSLKSHPPKTDTRVYDFIIKKENEGKSKKQAKIAGLNKFLQIYYARVMEIYKNIV

SEQ ID NO: 54573 - protein, 443 aa, unidentified
MSEPYNVGIDVSIDRLDIAIRPGGRAFCVTNDAAGWAELIARLPRGAIAAIGLEPSGGYERGIVRVLAAAGFSVRRINPNRLRQFARAAGTLAKNDHIDARLIADYVTVMPTRVVERNPALERLAETVTMRRHLCDEHIAVESQASHLEDALLQRIAKRRLTRIEADIALLDKRLAELVAAQPDLARRFRLLCSMPGVGPTLGYTLLALMPELGQIGRKQIAALVGLAPYNFDSGRFRGQRHIYGGRIGVRNTLYMPALAAIRFNPALRSFHRRLVGVGKKPKVVIVAVMRKMLTTLCHAPGWQQLDRRTLWPAHRAGHLTAPAPSGRAESRPQPRTARWRAASVSTRHDRWATRRPNEHSCSPVAARSGDRLLSEPEAGTQPSRREPLFMPLKRLSRQGQQETASGGFLSFASTRSGDKVAPKAAIRRDWPAGSAMVVAPAT

SEQ ID NO: 54574 - protein, 338 aa, unidentified
MKITTIGIDIAKSIFHLYAVNKIGRYVKKKQLKRHQLLQYLAQLEPCVIAMEACGGANYWAREIKALGHEVKLIAPQYVKPYVKGNKNDYNDAEAIAEAAQRPTMRFVPIKSVEQQDVQNLHRQRERIKKARTALVNQIRGLLAEYGIVINKGVAAVRSGLPDILEDAQNGLTMRSRELFADLYEELRLLDERFKESEKQIEVGNRGNEVCQRLDEILGIGPITASATYAAAGDGDFVNGRHFSAWIGLVPGQHSTGGKPTLLGISKRGNAYLRTLFIHGARAVLRHSASKTDRFSVWAQALLERRGHNKACVAVANKMARMAWVIMARGETYRPAMS

SEQ ID NO: 54575 - protein, 343 aa, unidentified
MEDYIGIDVSMKETALSIRRGGQRVWRGKCVSDPKRIAQIVRKHAPSATRIVFETGPLSVWFYHALRAEGLPAICIDARHAKVALNMAANKTDANDADGLAHLAEVGFYREVRVKGFDSMLARTLVAARTKLVGIATELSNQIRGLMKTFGLIVPAGKGRTFEKNVRNLLADQSDLASILLPMLDAWRSIRTRAAELTKMLLANARQSHACRLLMTIPGVGAITATAFATAIEGPENFKNSRAVGAWLGLTTRRYQSGEVDYGGHISRRGDRHVRGLLYEAALVILTRSSAESDLRTWGLKLRERLGFKRAAVAVARKLAVTMHAMLKTGQAFNRVIEVKATL

SEQ ID NO: 54576 - protein, 279 aa, unidentified
MDVLGIDVGKRDLHATMLQNDRAVSKSVPNSETGIAQLQTWLKNRNADRVHACLEATGGWSEQVAISLGEAGHVVSIVNPARIKAFAQSERVRTKTDRIDAALIARFCRLHQPEPWTPPAPEIRILQGLVRRQHSLIQMRVDEENRRSAPMVSPAVTASIEATLEHLARELERVDREIEQLFDDCPPLRRQRELLISIPGIAETTAARILGEMPNIAEFRDVKAIAAYAGLSPRHYQSGSIERRSRIAKSGNAHLRRALYFQRSRPCASTHLFERSLHA

SEQ ID NO: 54577 - protein, 344 aa, unidentified
MQSMYYVGLDVHKKTISYCVKDGSGKIHADGTIPATRFDLDRWMRTLPQPWTAAMEATVFTGWIYDYLLPHAAAVKVAHPLMLRAIAAAKKKNDHVDANKICDCLRCDFLPECYMASTAIRERRRTLRYRNLLVRQMVQMKNKISGLLMEAGVSYNKQRLHKAGYFRELLATNPDIDEGLVSLLRLCRETVVRLQRTESALVRSLERDSLLMDRVERLMTIPAVGPITALTWALEVGDAKRFSSIKKAISYCGLCGAEKSSANTVQRTPLSKQRNQHLQTTLIEAAKMAPRNSPELAMLYDKEKQKGNANRATLTVARKLVAYLMAVDRGQRNFQVVETNCIAA

SEQ ID NO: 54578 - protein, 352 aa, unidentified
MEEYRRNGQEGKTVFVGVDLHRFKWHVTVRTEDQELFSGTLPGHWEALRRLLDRYRGDSIQVVYEAGYFGFWLHDRVVAYGADCIVTPPSLLPQEYGNRVKTDRRDSRKLAYLLAKGMLRRVWVPTLEERYHRQVIRRRRQLIGDRVRTQNRIKAELRFYGIELVEPRGPWPRRYVERLWCIRFGNRWMQESFERLLEEYEFLTEQIAKQTQLLRELSETPCYRERVEILRSVPGIGLIAAMELLVELQDVGRFRRAEQLAAYVGLTPSQYSSAEKIRMGRITGAGKNGLRAILVEASWKLITKDGVMRDKYERIKARSGAKRAIVAIARTLLLRSRRMLLDGRPYALGLIR

SEQ ID NO: 54579 - protein, 343 aa, unidentified
MLHAGIDMHKEFLMVTVLDEEGGEVVSPRRIPTSGLCIEEFFGEFAPEEITAVLEAGPNWYWLCDQLDELGIQNRLAHPLKTKAIASARIKTDKIDSHTLADLSRADLIAESYKPDIKTRYLRELMRGRSFMVNLRTGLKNRVHSILAKVNVKNPYSDLFGIGGMGFLASLALPGVYRDSLDSYLEVIESLNGEIKGAEKKAARALEGSPEARLLSTIPGVGLITSLMITAEMGDVSRFGSHRQLCSFAGLVPSTWQSGGTTRHGRITRQGSRWLRFALVEACRHAVARPGPLADFYGRLAKRKGKSTAKVAAARKLGTYVYYMLRDGKDYRELICFLNGERG

SEQ ID NO: 54580 - protein, 315 aa, unidentified
MNSVRMHIGVDVGKSSLDVCFPDGKKEHLKNNKPGRARIIHAAKKLGAIVCFEATGIYEEDLANECLAAEVRAARLDAWKTRQYAKSRGRIEKTDRLDSEMIRDFASSLEEGKLPFVKPRSAAHSRIKEYAKIRENLMKARVVVSSQLEFVRDKSARRNIIAIVERIEREIARLEDECGKSVDEDERMSSLSRRFLEVKGVGPCLVRAIFAECPDIGSFSKKGIAKFCGKAPIASKSCTVEKQSRMRRGRQGLRQAFHMAALSASKHNHVLCETYRRLVANGKPKMVALGAVGRHLAILLNNIAKYPDFKIRHEP

SEQ ID NO: 54581 - protein, 387 aa, unidentified
MKKVNSNVACAGMDVHYKFSNVTFRDACGKVVSRQRLDHPDRKQLAERLSRWPTGIPVVMEASFGWGWLSDLVEQAGQDVHLSNCYKVEQMRKARGWVKTNKKDADLVSLLVFEQSDWWKVWRAPPDVRNRREQMRFRGDLVGSQTRVKSRIHAIFHRHGIFHEFSDLFGGKGRKFLVELCLYNPANLPAEALLALRGQLKLLDHLRRQLADVARILHKQLLKTPLTTRLKTIPGFGLILAHVLAAEIGKIERFKNQKSLASYSLLAPRADDTGEDDPSHSPKGRHLGLRGNRTLKWAFIEAAHGAVRSGGKWRAIFDRVTNGGKKNRNRGYIKVARELVKVVYVVWAKGVDYQVIPPVRPGRKSNKKKSRSETGQLLHPMVHALPA

SEQ ID NO: 54582 - protein, 450 aa, unidentified
MVSTKKTSGKCIERINPSAAGIDIGSEKHYVAVDPSRSETAVMSFGCYTSDLETMARWLIDCGVTTVAMESTGVYWIPVYQVLEQHGLDVKLVDARHVKNVPGRKTDVVDCQWLQQLHSYGLLRGCFIPSREIVGLREYWRHRQSLVESVSREILHMQKSLEQMNVQLHKVLSDITGVSGMKIMRAIVRGERRPLVLAGMREPGVKKSEAEIMKALTGNYREEQLFMLQQALELYDVLHAKIAECDERIEECLSRFEDKPNPSEMAKSSKSKTRRKNQPHFALNHELHRITGVDLTAIDGIDSLTAQTIISEVGFDLSMFASEKHFASWLALSPENTITGGRVRKRRTRKSGNRVATALRLSAQSLHRNKSSLGAFFRRVRAMKGAPKAITATARKPACLVYRMLVYGMAYVDFGQQQYEQRYQEQQCLLLQKRAAALGYQLVPLQEAVS

SEQ ID NO: 54583 - protein, 408 aa, unidentified
MVVEAARVTSSTVVVAVDVGKTEFAFSVSDGARVSLLKPRTGCPMTGPSLAQVVADIARVLPGGAGVKVGIEAAGHYHRPLLRAPWPVDWEVLELNPGHVTEQRRVLGKRTIKTDVIDLQAMTELMLAGRGQPVRDRSLVLGGLAAWSAHRTGRVSLRTATKNQLLGQLDRTFPGLTLALPDVLATKVGRLVAAEFADPAGLAALGSSRFLRFGATRGLQIRRPVADRLVQAARDALPTADAAVARAVLAADLALLSDLDAQVDQATDQLARLLPSSPFAPLLTVPGWGQVRAGNYGGALGDPARFDNHRQIYRTAGLNPIQYESAGKRRDSVISREGSVELRRSLIDLGVGLWHCDPAAKVYGTQLRARGKKGLVIACAMANRANRIAFAMVRDQCPYDPTRWLQGA

SEQ ID NO: 54584 - protein, 334 aa, unidentified
MNYVGIDLHKVELVISVEDDKGPVGKSEKFKCRDVAQIVAFFKSHVPFRAVIEASSSYRWLYDLLSPMGEVILAHPLKMRAIVTARAKTDKLDSRMLARLLRAELIPRSYVPPERYQRLRDITRTRARLVRNVTVAINEVHYLLARRNLQCPYKDIFTQRGRQWIKNQDLGFGGNMAVAELLRRMDYYQQEVAQVDLKLHEVAGEFPEAEVLLDLFGVGVFTALLVIGEIGDPERFANGDQVGAYAGLTARVHQSGGHEYSGHISKQGSPWLRWALVQAAMKLVRRDEKLREFYARVRRRAGAKIARVAAARKLAEICWVRLRCFHRQHARAVA

SEQ ID NO: 54585 - protein, 310 aa, unidentified
MGGINAAIDVGKHKLDIALGSNGELFSEPNQPRAIARLAKRLAHLGCERVLIEGGAYQNVLVGALRAAELPVVIINPRRVREFAKSMGQLAKTDHIDARVLADYGERIQPPVRELPDEQNQALRGRWVRREQLIEMLVMEENRLEHAPKALHRSLRAHIAYLRKQITQADHDLDRAVRNSALWDTYELLSSVPGVGRVLSVALLSDLPELGRLNRREIAALAGVAPFNCDSGTLRGQRKIQGGRKRLRRVLYSATLASVRCNPVLRPFYQRLRATGKPAKVALVAAMHKLLLILNAMLKTKTVWRPPCPA

SEQ ID NO: 54586 - protein, 386 aa, unidentified
MLYVGVDISSESFDVCFYLPEKKKMKSMKYKQDREGFREFLKKLNAYKDEKQVGMEATGSYHSNLYGFLRSRGIDVQLLDPYTLSKFMKAMSRSKTDKKDAKSIAVAMYRIFDLLSVSQVPEEEMSAFRDLVRMRSTVVANCSDLQRKLKSKLKIHMPELLKTFRSVSSPVLLHLLSVYPSKEEILANEEDAVKLLSSHRNWSEKKAREVIDSLKDSIGKPDTFGTYSTITSTFITEIKLLKEHVEALDEEIKKFLQKFPDNPLRTIPGIAEITEAEIVSEVGDIDRFSSGKAFVSYIGLDPVIKQSGNMTRGLSISKKGNKHLRKTFYQLAKNLITNTEKYKNKYEKMKERGVKKKVALIATARAAAEMVYQLLKNNVPFDLSLS

SEQ ID NO: 54587 - protein, 319 aa, unidentified
MRRMERDRSICLRSEETVPEPGRHVPHHPSPNSGQGHQARMFTRSGYTQEAARQTPLVFVGIDVSKARLDVGVRPSDERRSVPYDAHGSTTLLAQLTQVQPTRIVLEATGGLERPLVRALVDAALPVIVVNPRQVRDFAKATGQLAKTDVLDARVLARFAEVIQPSLRVIPDAQTQELAALLARRRQVLAMQGAEQNRLDRAPDRVRKRIEVHLRWLRAELARLDADLDDVIQPSPMWREREDLLQSVPGIGPVMSRTMLAELPELGRLNRKQIAALVGVAPFNRDSGRRRGHRTIWGGRAPGAERCTGPRWWRRGGIP

SEQ ID NO: 54588 - protein, 421 aa, unidentified
MHYIAVPMDRAEQSVRKFGSFTEDLHEMARWLKSCNIDTVAMESTGVYWVQPFLVLEEYGFDVFLVNARYIKNVSGRKSDVKDCQWIQQLHSYWLLNKSFQPEELIRELRTYVRQRKNLTQNSATQIQLIQKAFDQMNIKLHNVISDITGKSGRLIIDAILRGERDAGILAEFADIRIKASKEDVVKSLQGIWRQDNLFELKQAYELYQIFKDKIMECDNQIETVLQRLVNDSDKAQNKKQNRKTKSKNKFSFNATDYLNIITGVNLTDIFGISELTVTEIVSEIGTDMSKWATEKNFTSWLNLAPNTRTSGGKRLKGKSIKKINKAGQAFRIAASTLKASNNWLGEFYRRIKAKSGTPVAIKATARKLAIIFYKMLKDKVDFNPLPIEEYNQCFKERKLKYINKQATNYGLKLVPVDFVS

SEQ ID NO: 54589 - protein, 373 aa, unidentified
MSQSTTKLFVGLDVHKDSIAVAYAPQVRGAEIISIGSFGTRQCDINKFLKKLLAHSRNIVFAYEAGPCGYWLYRYLTKKGHTCLVVAPSLIPKRPGDRVKTDRRDAIMLARTLRAGDLTTVYVPNVVDEAIRDLSRAREDAKKDLKSAKHRLKSFLLRQDIRFEGKARWGPKYLRWLGNVACETPAQQIVFQEYVRAITERHERVERLEAELRDQVDGWRLKPVVIAIQALRGIQFITAATLIAELGDITRFDNPKQLMGFLGLTPSEYSSGRKRKLGGITKAGNSHARRVLVEGAWSYRFPARVSRHLQYRLERVPQEIQDISWKAQVRLCKRYHRMIAGGKNKNKVVVAIAREMAAFVWSIAMRTPLEDVN

SEQ ID NO: 54590 - protein, 349 aa, unidentified
MHARSVVACGLDRQTGEVFEQRLTPSHEEIAAWIRSLPGPAAAVYEAGPTGFGLARSLRAVGIDCEVAAPSKLMRPSGDRVKTDTRDARHLARLLMLGDVTAVAIPSREQEAARDLVRAREDCRGDLMSTRHRLSKLLLRQGIVYSGGKAWTGKHELWLRCQRFDDPALQLAYDTSFEAMLATIARRDRLDRAIEQMAADSEFTPVVSRLCCVRGVATLTAFGLAVEIGHWHRLTGRSIGAYLGLVPTEYSSGASRVQGGVTRTGNGHARRLLIEAAWHHRARYRPGATLRRRWDAASAPARARGQLANQRLHARWQTFDARKKRAVVANTAIARELAGWCWSLAVLDG

SEQ ID NO: 54591 - protein, 368 aa, unidentified
MKQVTTYVGVDAHKKDLFIAMLIGDRSAPVTWQVANEPQAVRRLVRRLEREAPGPVRVCYEAGPCGYALQRQMTTTRVACQVIAPALIPRKPGERIKTNRRDARKLVELHRAGLLTEVQPPTPADEAVRDLCRARDDAREDLQRSRHRLGKLLLRRGLHFSGRNWTQAHRRWIESLTWAHAPERVVVDDYLLAIDHLEARLIELDARLTDLAQTHPYREPVGWLRCFRGIDTLTAMLLLAELHDFRRFTSAPALMAYLGLVPGEDSTGEKHRRGRITRTGNALVRRLLVETAWHYQHRPSVGVTLKRRRKGQPARVIAIADKAQQRLCRRFRKLAAEHKPPPKVAVAIARELAGFLWAALQPTPATVN

SEQ ID NO: 54592 - protein, 344 aa, unidentified
MGEVSTIGLDIAKAVFQVHGVDGSGAVVIRKRISRAKVLEFFADVPACLIGIEACPSAHHWGRELAGLGHTVKLMPPSYVKAYLKRSKNDANDAAAICEAVTRPSMRFVPIKTKQQQTALMLHRTRQLLVRQRTMLSNALRGHLAELGIVSAKGRNGTTELLKIIADGADNRVAASARGILNVLARQYSALGAEIGSIDKGILTLHRSCEASRRLAEIPGIGPIVATALVAEIGDWRAFASGRNLAAWIGLVPKQHTTGGKDRLGSITKQGNRYLRWLLVVGAMAVVRYAKKHGTKNRPWLGQLMERRPTKVAAVALANKIARVAWAIMVHGDRYKEPKVLMAA

SEQ ID NO: 54593 - protein, 393 aa, unidentified
MVVVDPRGKVLEDFEIEHSALGWKKFRERMQPYGSIPFAVETSQGAAVEQLLEAGMQVYPLNPKSAQSYRQRKAPSGVKDDRLDAWSFADALRVDGHGWKPLRPEDSLIKELRLLCRDEVGLIEQRTAFINQLQHALAEYYPTALEAFEDWGAVSAWMFLQRFPTPQLLEKAGKRQWEKFLHSCRLWRTESGPRRMELFAKATEFCGSEPTAKAKSILALSLVKMLFALEDRLSEYRKRIEELFNSHPDHDLFGSLRGAGPKLAPRLLAEIGDDRERFEGDAQNLQCLAGTAPVTRRSGKHRECHQRWACNKYLRHAVHLFSEQSLTRCAWAETYYKAHRAKDHSHAKSLRCLGQRWLKIIHKMWMNRTPYNPELHHRNQVKHGSWVFRFQAA

SEQ ID NO: 54594 - protein, 323 aa, unidentified
MSIILSLIVVGVDIAKAHFDVARLAEGKYRHKKFDNTPEGFALFAEWLAGFGDEAPHVCMEATGAYSVPLAEYLVGRGFLVSVVNPAKVAAFAKSELSKAKTDKADAKRIARYALAMRPVPWAPPPREIRELQALLRRVEHLLEMERMEKNRLDTADSVVAGSIQAVLATLEQELKATRDKIRQPIDNHPNLRDRQDLLESIPGVAAATSAWLLVVLSEHYGFTDAKQAVAQVGLAPVIRQSGKWAGKTRLSKTGDPMVRKALYMPILSALQFNPAIRAFCQRLKAKGKHGMAVNCAAMRKLIHIAFAILKSGRPFDPNFALA

SEQ ID NO: 54595 - protein, 407 aa, unidentified
MEVVYRCCCGIDVHKKVIVACLVNGGEQELREFGTTTSEIKTLANWLTESGCEMIAMESTGVFWKPLYNLFELMDLDAMIVNAAHMKALPGRKTDVKDAEWIADLLRHGLLKASYIPNREQRELRELTRYRKSLTEERCREVNRLQKILEGANIKLDSVVKDITGKSARKLLQRIIDDDIPDSDEVSKLVHGRMRPKLEQIVASIEGITTPLQRKLLAQIIDHIDDLNRRIGELDKLVQEYMAEYEAAIEAIDEIPGIARRSAEVILAEIGLDMGRFPSAAHLCSWAGVCPGNYQSAGRRKHGKTTKGNKALKTILTQCAKSAKTVKSSYFFAQYQRISARRGKNRATLAVAHSMLIAIYHILKNKTAFHDLGSDYYDSFNRDRKINSYLKRLKALGWEPDAIPSSA

SEQ ID NO: 54596 - protein, 355 aa, unidentified
MQKYKVSFKGQNIYVGIDVHLKTWHVTTLTESGYKYSFAQHADAKELFDRLNKKFPEAHFKSAYEAGFCGFSAHYALTEQGIENIVVNAADIPTTGKEKTMKTDAVDSEKIAWALKRNELTGIYIKDKRYMDDTNLIRLRQRFIMDLSRQKNRTKHLLYTQGVTYPERFRNSKTHWSRNFMKWLREEVELLSEQKLSLLLLCDQVENTRKAILKVTREIRRLSTTDRYKENYDLLFTVPGFGLITSMSMLTELDNDIMRFPNERSFVSMLGLIPTCHDSGEKKVSGEKTNRGNKHLGPLIVEASWVAIYRDYQLGAYYSSCCHIMKPHKAIIKVARKLACRTYAVLKTKTKYELS

SEQ ID NO: 54597 - protein, 376 aa, unidentified
MQWDGLLLTLSASMCQTEIDISVSNEEEPTMKISRVGVDLAKNIFQLHGVDHKGKTVWKRRLSRDKWLNALFTTVEPGAVIGMEACAGAHHWSRVLRDKGYAVKIIPPQFVKPFVKSNKNDANDAQAICEAMVRPNMHPVKVKTVEQQDIQAIHRVRNEIKSHRTAKANQIRGLVAEYGLVAPKEMSSLRNAIPGWLEDASNGLTSCFRQLLQGLWEDLRSMDKRMTELDKQIAVIAQQNPIANRLQQLRGVGPLIATALVATLGDAKQYRKGRDMAAAIGLTPRQHSSGGKDKLLGISKRGDAYLRCLLVHGARAAIRTAKDKDDRLSRWISNLQARRHTNIVAVAMANKMARMAWAMMSKGVDYDPSFCSVSAT

SEQ ID NO: 54598 - protein, 415 aa, unidentified
MDNDKTLFFAGIDWGRGFHQVCVIDQEGSVVGEKSFRHTGAGLFEMAQWVMKVSGSKARNIAAAIEVNHGPVVESLLEQGYRVYSVNPRQLDRFRDRFCVSGAKDDRRDALVLASALRTDRGHFRRLEPQDPDIIILRELNRTREELVGERTRLVNRFRGLLWRYYPQFGELIGNTVRPWHLELWEFMPCPDSAKRKRGSTVAVLLKRNRVRRIDAKRVLEVLRCEKININKATEESCVAHIRSVAQRMKVIDRQLVETKDSMRKVIETMNSKLKTEGGRPTDIEILRSIPGVGDVVLVTLLAEAWDLIRRRDREALRCLGGTAPVTRQSGKSKQVVRRRAVCRSLSDALHVLGGIAAIHDPVSRARYQSLRARGLGYCRSVRTVCDRLLLVACAILEKGELFDKEFKKPLRDAA

SEQ ID NO: 54599 - protein, 422 aa, unidentified
MKVFNPADFAALIAIDWADRKHDVCELDQQNNETTFSVISAKPEAINAWANALKQKYNGQQVAVACELKKGPLIYALSKFKHIVLFTINPSTVAKYRKAFTHSGAKDDPTDAAIQLEILQQHMSKLNVIMPDTQSIRSLAQLVEYRRKLVQDRVDLTNRLSTTLKNYYPQVLDWFNEKDSMIFCDFLLRWPSLAKVKRARKQTLHDFFNLHNARYPNVNEKRINDIKHAEPLTSDNAIIGPNLLLVECLVGQLKQLMLSIERFDHEIKSIYKQHSDRFIFDSLPGAGPQMAPRLLAAMGSNRERYQSSEEVQKYAGIAPVTERSGKKEWIHWRYSCTTFLRQTFVEWAGQSVRYSFWAKAYYEQQKSKGKPHNTIIRALAFKWIRILFRCWKRKTAYDESTYLEALKRKGSPLLKYAMESKF

SEQ ID NO: 54600 - protein, 430 aa, unidentified
MEHLNGIRLREFRQVRNEIRGSTEHLIVGLDIAKERHNAFFGTATGKTLHKGMFFDNTYEGFQKLLIQTDALKVQHGLRKVVFGLEPTANYHKPLGEYLIKGGHPVVLVSAAATSKNRELLDGRWDKHDTKDSANVADLIAQGKCLYYDCPGEELRSLRGLLSLKKRLKKEEHGLRVRIRNQLLAQYFPEMDQHFGSVASLNVVSRCLDPSLISIMEYDEFCRTVSPGKVNLAQQRRLTQIWRAAKQSIGCIVGEAVSVEAQIMVAALHRVRETIKTLEGKIEDICLGFPEYSLLLTIPGFGPDVSSKVLASIGAPERFTSGKQVLKMAGFDLCASRSGKTSQSATPVISKHGKSDLRYALYQAAMISSLTNRHFMAYYTNKLRGREREKGIGIKMRVKLAAKLLIIAWTLMKKKEPFDPKYLNQGDSKV

SEQ ID NO: 54601 - protein, 414 aa, unidentified
MNLFVGLDVSSETLEACFLGNQIDQVFLRTRFTNDTVGASQIKNEIIKLNDENHFKKIMIGMESTSLYSFHPAIFFQNDQELKALNVKTVIEDPRRVRKYAESYDTDKTDYNDAFIIADYLRIGRGTTSPMREEKFMALQRLTRSRYQLIQQLTETKQHFLENLCYKVNTLSRELDSVQVFSATTIELMTEELSVDDLANMPLEDLAELVQKKGHGRFKDPEVFAKTIQKACRNSYRLDKAMADSIDTILGILAREMRGLTKSIKELNKAIEDLVSTTPEYKCLTSIPGVGPVYAAGILAEIGQIERFPDQAQLAKYAGLTWKRKQSGNFESENTKLSQTGNRYFRYYLVEAANSVKNRVPEYKTFYQRKYAETPKHKHKRALVLTARKFVRLVDTLLRNHQLYMPPKEAKEIE

SEQ ID NO: 54602 - protein, 343 aa, unidentified
MQTVTTIGFDIAKSVFQVHGVDAAGQMVVRRQLKRRQVVAFFQKLPPCLVGIEACASSHYWSRELQALGHSVRLMPPAYVRPYVKRQKNDMADAEAICEAVTRANMRFVPTKTPEQQSGLMLHRTRHLFMRQQTSVINAIRAHLAEFGIVAPVGRRGVEELLRVIADPSDKRLPEVVRACLAALGSQLLSLKKQILDFDRMIMAWHRSNQTSKRLNCIPGVGPLLSTALVASVADPKTFRSGRNFSAWIGLVPKQNSSGGRDKLGSISKQGDRYLRGLFVAGAFAVIRYAKIHGTKHRPWLTALLARRHTKVAAIALANKLARMAWAMMATGERYNYPASLKV

SEQ ID NO: 54603 - protein, 341 aa, unidentified
MHSHFVGLDVHKQVIAFCIKTADGSIVAEGKVKSTRAELDAWLKTVPEPWLGGMETTMFSHWIYYHLKQRGANVLIGHAARMKAICAGKKKSDKLDARTIADLLRCDMFPSCWVISPELGALRRQMRFRRRVVNEQTRFKNFTAGLLMQRGVEYERRCLHGKRYFADLMKTNAWAGEEMKPLLRFNRQQIETLGKMDKGLIGMLQKHPLLVQRVAALRKIDGVGPITALTWALEIGTPERFGSIGKAQSYAGLTSAFWESAGKQKHGPISKQRNAHLQSALIEAAKLAPMHNETLKAIYQKHRARGADDNVATLEVARKMVAYLLAADRAFHAQMAQTACA

SEQ ID NO: 54604 - protein, 472 aa, unidentified
MSDRRLVGIDLGIASAHTVRVLDQEGNTVAKRKCWPTAESLGEIERAALAGAAEGTVLEVVMEPTGPAWLPIAVFFGARGHRVFRVSSQKAADLRRFLSRHTKTNGIDADTLARLALFDLAGLRPLQLPGAERATLDRRVRACDRLTRLGAEHKVRIKDLVRQLLPMSPLTGDLGVADLAVLERWADPEDLVKVGEKRLGALIAKASNNHLGAERARQWIGAARAALELYGGHPAVAFSDLAAEVATEVRLLRAVQAELATHAAVREQAYGSVDPEALARSLPGLAEVGGPAAVAAMGDPTRFKKGKAFRSFTGLVPKASETGETDRKGQAMSKAGSSLLRTTMVRAADTARKQDPQLARIYFVQMTERGKDHLGALCVVAANLAERAWAVMDRGTPYVIRDTDGHPVNPEEAKAIIAERFTVAPEVRARRRSKKSGGKAPKNVLSGQSTPRAQGGSTRGDLPPAPSSALAS

SEQ ID NO: 54605 - protein, 431 aa, unidentified
MNTQQFEVIRPKCAGLDVHKKSVVAAVCTSDPVTLTASYKTKVFNTTNSDIAALRDWLLAQDCHDVCMESTGKYWIPIFNILEPHMHVILTHPKYVKAIKGKKTDKRDAKWIANLFRFDIVKASFIPPADIRVLRELSRYRLKLSYMRTAEKNRYQNSMTISRIRIDCVLTDPFGLSATRIMDYLLSGEPFNEGKCRSLIDGRVKASKDEVMDAVHGYHILEEQKFKMTHAKAHMDFINQSIDEIEAELFLRSRQYDSQIKRIATVSGITELSALFILSEIGADMSVFESDRHLCSWAGLTPANNESASKKKSTRCSKAGQYLKPLLIQCALAAAKSKKEPYFAIKYQRLAKRRGKKKAIIAIARMMLTSIYHMLLNGEDFHPDDYEATVNPPKQKPVILTVENTLQFLREQGADPEILKLIQQQCAAQAG

SEQ ID NO: 54606 - protein, 369 aa, unidentified
MPHVTSIGLDVHARSVAAAAFNPFTGEVVHRDFGTDAAEIAEWALGFEEPRACYESGPTGFHMARELRALGLDCAVAAVSKMQRPAADARRKNDRRDAEFIARMLATHNIVEVPLPDAAVEAARDLDRALEDATVEYRRARQRLNMFLIRLGHVWDERNADGTRKGSWTRAHWRWISGIRLEGPQRDVLEYYVTAARCAESDRRQLEKKVLALARTDRWRPAVEALSCIKGIDTLTAFRLAAEAGSFTRFRTAPAFASWCGLVPSERSSGETERRGGITKTGNRLARTALVESAWHYLTCTPRPKAPAPGADVPAAIRARADDCTARLCRRREALAAAGKSSCKANAAVARELACWVWEIGRRAEGTLG

SEQ ID NO: 54607 - protein, 343 aa, unidentified
MKLHVLGIDLGKTVFHLVGLDSTGKVVIRKKCSRTQLLAFTANLQVQLIGMESCSGSHFLGRALREQGHEVRLMPAQYVKPYVQTNKSDFLDAEAIAEAVQRPRMRFVPIKTEEQLDLQALHRVRERWVMRRTAVVNQIRSLLLERGLTLPKGRSYVDRQLPRILEDGELRLSGSFRVLLAQLKLELEQLTARIEEMDRVIQKTAKENEDCQRLTEIPGIGPVTATALIAAVGNASAFQKGRNLAAWMGIVPGEYSTGGKQKLLGISKRGNKYLRTLFIQGARSVLQQRHKQAPGLSHWLAQLLGRTHQNVVIVALANKLVRMAWAVLCKNERYRAPVLAATT

SEQ ID NO: 54608 - protein, 271 aa, unidentified
MTFRPHALHLKAELFVKSSRVHVRDDGFTRCNFHLKFFIMVYRGIDISKSSFVAAYPSTNGNPTKTFPNTTAGMRELIGTLAVAEHHCVMEATSNYGCCCTCYIRTVLPSVLPPPQKKKQIKHFSRMMMPVTKTDEKDAYMIAMYGEKMNPPIYKMPSQATIRILTTEGFTYFDNAKQLSRFIGICPTYQQSRTSVNIREHINRNDDERLRSLLYIAFWTALRYNSRECYIRLKANEKPFKVALIAVTNKLVRPVLTITTINSIYRWICPG

SEQ ID NO: 54609 - protein, 415 aa, unidentified
MDVLYERCCGLDIHKKLVVACMITPGFKGTPRKEVRSFGTMTADLLVLSDWLEEQGATHVAMESTGVYWKPLFNLLEDRFTLVLANAQHIKQVPGRKTDVKDCEWIADLLRHGLLRPSYVPDRPQRELRELTRFRTTLVRERAREVNRIQKTLEGANVKLGDVASDVLGTSGRAILDALVGGMTDTAILADLAHGRLRDKRASLERAVDARMGAHQRFLLAEQLAHYDALNQSIDRVSAEIAERVRLFEPIIERMDAIPGIGRRVAEILVAEVGTDMSRFPSAAHLASWAGICPGNNESAGKRKSGRIRRGSPWLRTALVEAAHAAVRAKDTYLSAQFRRLAARRGAKKASVAVAHSILVIVWHLLQHDCHYVDLGTNYFDEHDRQQVARRLVKRLEGLGYRVALDSLPPSASAA

SEQ ID NO: 54610 - protein, 339 aa, unidentified
MSQDYVGIDLHRRRSVIVRMTEAGEEIERIRIDSDPVAFALKFGDLEPGTDVVLEATYGWYWAADLLEDHGMNVHLAHPLGINGFKNRRVKDDFRDAADLADLLRMDRLPEGWIAPHDIRELRELVRYRAKLVALRSGAKAQVHAVLAKLGVTVDVTDLFGVTGNELLDDLCLKGAYRLRVDSLRDLIDVYDGEIAFFNKEIRTALKDHPGYRAIQAIPGVGPVIAAILVVEIGDVTRFSRPAKLCSWAGVTPRHRESDAVVHRGHITKQGPKIVRWAIVEAVARLSGDTKQARDYRRIADRRGKSIGRVAAARKLLTLVYYGLRDGHISCLERLGRAA

SEQ ID NO: 54611 - protein, 227 aa, unidentified
MNESKQLEQEAEEVVMESTAQYWKPVWGALERYWKPICEKREGARRKSGTLHLAQAQSNRGRRGRKRDFVDAERLVKRLGARELVLSFVPDAEQRLWRTVTPRKYQLRCDRVRLQNQVESLLEEAHRAWIPRSRSFAEVGPSAAAFPSEKCLSSWVGACRGDGESAGVNYSNRSPKGNRHMRRLLNQAANAAARTKGSIFEIVYRRSVPRLGHNQAIGAIAHRQCRP

SEQ ID NO: 54612 - protein, 342 aa, unidentified
MEITTVGLDLAKNVFQVHAISSTGEVVVRRALRRAQMTPFFGKLSPCLIGIEACGTSHHWARELVALGHEVRLMPPAYVKPYVKRGKTDAGDAEAICEAVMRPTMRFVPIKSVEQQAALSLHRTRDLLVRQRTQLVNMIRGLLAEFGVDIPKGITHALAFVRRVVAGEAHEVPQLAAKVIGALAEQALEGQHRIRQLERDLLAWHRANPLARRIATVPGVGLLGATALAATVTDPTQFRSGRQFAAWLGLTPLNNSSGGKERLGRISKMGDQYLRRLLVTGMTSLVRRNLHHPESADPRIAALLARKPVRLATVAMANRAARAIWAIMVRGGVYRMPEPVAA

SEQ ID NO: 54613 - protein, 416 aa, unidentified
MDVIVARCAGLDVHKNTVMACVRAPGPDGGRISTVRRFGTFTDALRQLRAWLVAEGVTQVAMEATGVYWKPVWHVLEAVPEFELLLANAHAVKNMPGRKTDVADAEWLALLCECGLLRPSFVPPPVIAELRDLTRYRKKLIEERSRETQRIQKLLEDAGIKLDSVVSDILGVSARQMLEALIAGVRDVEALAELAQTRMRPKIPQLRRALEGRFGAHHALMLQMHLDQVDQLSAAITRLDVEVDRVIRPFSAQLQRLITIPGVGRRTAEVIIAEVGVDMRRFATAGHLASWAGMCPGNHESGGKRRSGRARKGNQALRAALCEAAWAAAHGKTGYLPAQYRHLMRTFGKKGQTRAVFAVGHSILVIAWHLLANDCDYTDLGAEHFTRNADPEARKHYLIRQLEALGHKVTVEPAAA

SEQ ID NO: 54614 - protein, 334 aa, unidentified
MNDTIYDHYIAIDWADKNMAIARMTKKSNKIISMDVPSDLSNLKAYLKNLKGTKVLMIEETTTSQWLYVELQDYVDRIIVCDPHRNKLLSEGAKNDKIDATKLVTLLKAGLIKEVYHSNNKFIYFRRLVSGYDDLVKAGVRLKNQRSSLLKCCGKKGKNEPDKLEIESDNFVLQCLNRQIDAYEEEKSGYEKEFKSLAKKHPEIRYQTSLPGIGHINAVKIVARVVTPYRFADKGHYWSYSGLIKHEKISGQKSYGKRSPRYCRQLKEAYKTGTNAAIGGNNPINDYYEYLIREKGEIPYNARHKACRMLATLSLGVFKSGRKYNPFKKGYVNT

SEQ ID NO: 54615 - protein, 393 aa, unidentified
MICIGIDVAKDKHDCFILNSEGEVLTNVFTIQNNRDGFESLLLRIHSCAQKSEKIIVGLEATGHYSYNILGFLLDHGLPTCVINPLHTNLYRKSLSLRKTKTDRIDARTIATMLMSDVDLKSYTDTAYHNEELKSLTRYRFNKVQERAKLKQSVARLVNILFPELEKLVPSLHMASVYALLSEFPGAKQIASAHLSHLKSVLLDASKGRYHRDKAVDIREAAKYSVGSNMPAKSLELRHTIRLISELDKEIAEIESAIEEIMKTIHSPITTIPGIGLRMGAMILAEIGDFSNFDSPDKILAYAGLSPSTYESGKLSLAGSYSHMEKRGSRYLRYAIFNATRFVCKWDSTFAAYLARKRAEGKHYYVAISHAAKKLVRVIYALQKAGKPYKALT

SEQ ID NO: 54616 - protein, 346 aa, unidentified
MKDCKVKSEVTVLGIDLAKQSFQLHGVDKAGQTVFRKKLDRNKLTAFVANLPPCLIGLEACGGAHHWVRQFTKYGHTVRMISPQFVKPYVKSNKNDTVDAEAICEAVQRPNMRFVPVKSIEQQDIQSTHRIRSLLVSRRTAQANQIRGLLLEYGIIIPKGIVHIRKAVPDILEDAENALTALFRELLIELYEEMVHLDERIDTLEKKLQSICLQNKDCQRLLTIPGVGLLTAAAMVAAVSDIKAFKNGRELSAWLGLVPRQHSTGGKPTLMGISKRGDNYLRAPLIHGGRTVVRVADKYQDKRNRWISELDKRRGKNISAVAVANKNARIVWALLSKNEIYDKAVA

SEQ ID NO: 54617 - protein, 353 aa, unidentified
MSIRTASKIAVAEEGREPARLFASIPGENSKLIRKISKLGSSSEIKCCYEAGPGGYSIYRALTAAGIDCRVIAPSMIPKQSGKRVKTDRLDAENLAHYFRSGDLTEVWVPDENTGSIRNLVRLREDARNARQKARQQLNQFLLRKGLTYHLKTKWNTGHTSWIRGQRFPQEADNVTLADYLKQAEVLDESVTGIEEHLKVYSGHWEQNSLVESLQGLRGIAFVSAVAIAAEVGDLRRFPTAGKFMSYVGLVPSEHSSGRKEKRGSITRCGNSIVRRLLVEASWNYRHKPGNSRAITLRNEELPKRIQDITWKAQERLHRKYMKLLMAGKPKNKVCVAVARELAGFIWAIGQSI

SEQ ID NO: 54618 - protein, 322 aa, unidentified
MPVDYLGIDISKSDFHAHLLQSGSSAKRTFPNSSAGYGQLQRWLSNRKASGVHACMEATGAYWIGLAAYLYHHSVCVSVVNPARIKNFARSQMRRTKTDGVDAQIIAQFCQTQTPVLWKPPAKEILEIRALLAYRNQLIAERHRVRQLASTIYEARVVQEHTSSHVAALNDLIDGVDEQLHALIKQTPAIADAVQRLAGIPGVGQLSAAAIFAQLPLDQLRNSKAAAAYAGLCPSDRQSGTSIHGKSRLSKMGNADLRKALYMPAVSVLRTTSSLAQFAARLRSRGKPGKVIVAALMRKILTIAYAVLKSGKPYVEALMLDT

SEQ ID NO: 54619 - protein, 344 aa, unidentified
MATYYIGADVHSNNTELAIEKRGRIVARYSVPTSVSAISTVLNSLQGKKIFAMEEGPMAGWLYRNLSEKVEEFIVSEPRRNKLISCEGDRDDRIDSGKLAALLRGNFLKAVHHTSDSNRAHLKHWINLYHDRVRDAVRNINKIRACCRMHGLAIPRKVLRNNIHRHGWLSGLDNPVLKAQLQMLWIGFDATKEQVAMTKREFSLLARRYPIIKHWRKLPGVGLIRAATIFAYLDTPWRFKNRAKLHKYCGVGLVRMTSGADKKGKPKPARLKLPWAVNRRIKNAVIGATTSAINQKANVFKDYYERMLSNGIIPSNAKHSVARKMVSTMSAMWKTDSKFDEKLF

SEQ ID NO: 54620 - protein, 424 aa, unidentified
MMHPKMKWTYVGVDSHKDTHTAVFMDCFFGKLGEITFNNMPSEFDAFFKQAQKFKIGGTNFAFGLEDTTAYGRTLTVFLTGRKEMVRHVNAALVADERRSGNILHKTDSFDAECAARVLLSRFDNLPIANPQDKYFILQSLVTRRNSIVKINVALKNQLHSLLSDNYPSYRKLFPHISTNTALAFFEKYPSPLTLDNISADELVDVFKEVGNCKFTIRKANDILAHVQGCGFTASEYQMQKDFTIASTIRQVKSNLHEISAIDKLLEDFLPNFDYKLTSMKGIDTVTASKLIAEIGDIRRFENSAKLARYAGVAPVTYSSGKSSAQFANERGNRELHEIIFRLALTLTMAVGRDTKIINHYFYDYYRKRQSEGKTKKQALKCVERRLINIIFGMMKNGTEYINPVAQDKPNEESKPEKKKPRSA

SEQ ID NO: 54621 - protein, 425 aa, unidentified
MTGNTQDTHRLRTDDMHVVCPRAAGVDVHKTRITAALRVCEAGGGPARVMTQEFSALPDGLRAMTDWLLDHDVTAAALESTGVYWKAPFEALEDAGIRADLHHAEHVRQIRGRKTDGSDSLWLARVCQFGLVTPSFVPPRRFRQLRQLTRYRRTLVAERSRARNRIHKILDHDGLRLGGVLSDIFGMNGRRILDGLAAGRPARRILADVTGHIRGKLELLTRTLAATLDPVALVTLQMQLEAVDRTAAAVAALDGRIQAALADYRRPLLLLQTIPGIDLRSAAAILVEIGPDVAAFRSARHLAAWAGVAPGNHVSARKRRSGRVRPGNRMLRATLAECAHGAARSTSSQFHRYHHDLAKRLGYKRAIVATAHKLLRVIHAVLTNDRPYSDPRIDYERLVIESGAPRWIRVLKQDDLIEEVRSMRT

SEQ ID NO: 54622 - protein, 426 aa, unidentified
MNCTQNYKIDQVTEQTLVVGIDIAKRTHYACFVDDRGRVLRKSFPIFQSKEGFQQLYKAIQGAMQAFGKSEVIVAVEPTGHYWLNLAYFLEEHGIPLVMVNPAHVCRSKELDDNLPTKHDAKDALVIARLAKDGRFLVPRLLHEIEADLRVGSTLKEKLRKEQTAVKNAIVRWTDRYFPEFWTVFRDLGKTALSVLEWTPLPADMAGRTVEELLEVYRQSEGMKCPQKAKIQALINTAKDSIGVTEGTAMARFEIAALVRRYRQLEAEIAALDAELKALVQTTMEYQWLKTVDGLGDATIIDLLAEIGSFAHYRDPRQLVKLAGLTLKENSSGQRKGQKHISKRGRKRLRSVLFRAVIPLIRHNEAFRELHEYYTTRPVNPLTGKQSIVALCRKLLNVLFAICTKKQAFDAERMKQDVLSQVQRAA

SEQ ID NO: 54623 - protein, 444 aa, unidentified
MSDAWTTATSEPEFAAFAAIDWADQKNFWRLLPASSRRSEAGELENTPEAVEAWAAGLQQRFGSGPIAVIVEQSRGALVYMLTKYPHLVLFPVHPTTAAGYRQTFAPSGAKCDPSDTESLLDLLLRHRERLRPLQPDTVETRLLHFLVEERRQMVEERTRQSHRLTACLKLYFPQVLRWFDDVTSPLVGDLLDRWPNLEQLQRAHPGTLRKFFHDHNCRSAEKNEERIAAIYKATPATKDQAVVEGSALIAGGLVALLTTLRANIAAFDKRIAELAAAHPDTAIFASLPGAGAVLAPRLIVAFGTRRDRYQDAYEVQCYSGIAPVTESSGSSKWVHFRFACPKFLRQTFHEFAGCSIQWSEWAKACYRHLREEGKSHQAAVRSLAFKWIRIIFRCWKDGKPYNEEIYMQSLRRRGSLLVGALEVTTSAKWKTVAGFQKLSENNA

SEQ ID NO: 54624 - protein, 339 aa, unidentified
MSKLLKNFVGIDISKTWFDAAVIKADHPDQSMHSQFSQTPEGFKKMLTWLQQQDVSLDNETLFCMEYTGIYNTGLVNFLVEQKAQVWVEMPLRIKRSAGFERGSDDKTSAIKIAGYAFRYRDKMQLWRPVDSSIEKIKNLIAQRDRVINAITQLTVPVNELSACGCTKDAKELEKLQRSPLKALQKTKQAIEQLIVKTAQQDVEIIKKVQQVQSINGIGPVTAVALLAYTKGFTTFSNAKELACYCGVVPFAKRSGTSIRFKPTVSPHANKKLKRLLHLCALSAIKNDKEMQAYFERKVAEGKNKMSVINAVRNKLVHRVFAVIRDDRFYEENYVRKCA

SEQ ID NO: 54625 - protein, 344 aa, unidentified
MKIAVLGIDLGKNVCSVVGLDASGAVVLRRRVRRDTLIDLVAKLPACIVGMEACCGAHHLGRLFATQGHNIRLMSPEYVRPYVKAQKNDDRDAEGIAEAATRPTMRFVEVKTEAQLDMQTLHRSRERLVGERTALINQLRAVLLERGIVVPQGKRKFEQYLVAMMDEHDGEGLSARMRMLVADTRAQWRELDRRIAAFDAEFARWAKENEDARRLATIPGVGVTISTALIAAIGKAETFEHARDLAAWLGLVPRQATTGGKPRLMGISKRGNKYLRTLLIHGARAALPHLAEKGTTLGRWAKNLLSRVHQNVAVVALANKLARICWAVLRSGEKFAAKEATLTV

SEQ ID NO: 54626 - protein, 416 aa, unidentified
MSRVVDIVHPVCCGIDVHKSFLVACIATTDERNHTTHQLRRFSTFKGDLQKLATWLEVNHCKDVCMESTGKYWIPVFNVLEKTCNVCLTHPKYVKAIKGKKTDKKDAKWIAELFKCDLVRSSFIPPPLTRHLRELCRYHAKLTYMNSSEKNRGLNCLTICNFKLDDVFSDVFGASATRILDKMIELGHSNFDVTPLLHKRCKATPEEVKAAIDGELSPAQVQKLTIVREHMKYLEGLQSTLESSATELAAPYQPHIDLLLTVPGIGCQFTAIRILAEIGTDMSVFETAKQLCSWAGLTPQNNESANKKKTTRIARAGAFLKPLLVQCVNGALRSNKYPWIKDKFIALRKRRGYKKAVIAIARKLLTAIWNMLAKNEPYNHLLHIKTDPPPQNRVLTPLQGLALLRRHGYWITDTIA

SEQ ID NO: 54627 - protein, 408 aa, unidentified
MDVVYSHVCGLDVHKKTVVACIITPDEKEIRTFSTMTDDLLQMVDWIKSKGCTHAAMESTGSYWKPVYNLLETEEIQTLVVNAQHIKHVPGRKTDVKDAEWIASLLRLGLLRGSFIPPRDQRELRELIRYRRSLIEERAREVNRIQKVLEGANIKLSSVASDILGKSARAMIEALIAGNVDPESLSELALRRLKNKKADLQRALKGLIGPHQRLMLQTQLRHVDELDALIQQLDEEIKRRMLPFEEDLERLDTIPGVARWTAEQIVAETGTDMSRFPSAAHLCSWAGVAPGNNESAGKRKSGRTTKGNPKLRSALIEAARAAVRTKHTYLSSLYHRIAARRGANRAAVAVAHRILTIVYHLLKEKQVYNELGPHYYEERRREQMARQAIRKLEMLGYDVMVKEREQTA

SEQ ID NO: 54628 - protein, 363 aa, unidentified
MNILAIDLGKFNSMCCFYDTKTQEYRFQTIATTRPYLTAVFTHHKIDLVVMEACGPSGWISDLCQECGLKTLVCSTNEAAWIWKNVKRKTDKDDALKLARLAMLQQLTSVHVPKHQVREHRSLIKYRKKLVGRINGIRNAIRGLFVCHGIEIAKGPIAWRTGRHEIDSYRKPLAECSMKELWQGQLDAELTQLDSLGEQISVMEQRLKTIAQKDERIQRVQTIPGVGPRTAEAIVTTLDDVNRFKNGRQVSSYIGLVPRQFQSGETDRNGRITKRGSRLLRTLLLECAWISIRHNPWAKTTYERIHGGQKTRKKKAAIALARKIAVVSWAMLKNETDWDPEKAGIEPQSEAPSKSTEQAAVIA

SEQ ID NO: 54629 - protein, 322 aa, unidentified
MKVFYLGVDVSKKKLDLCLRSNGKDILYDVIPNDLSSIKSWLTRTFEKFFLSEDSLVVCAEHTGQYTYPLVCATKSIGVYLCLEDAAKIKYCHGIPRGKNDKIDACRIAMYAERYNDCLQPYTASELIIQKLKNLSTERSMLVADRAKYQSQLKDQVDYMEHSIYIAKCNRVEGIINTFTDYIAQIDLEIKELINQAPVIAHQMDLLMSVDGVGERVALKMIMETDAFTSFTDPRKFCCHAGVVPFVYVSGSSQRSKNRVSNRADKSIKHLLHMAALSVSQVKNSPLKKYYDRKVEEGKNKMSVLNAVRAKLVTIMFAVIRG

SEQ ID NO: 54630 - protein, 333 aa, unidentified
MNYLYFIGIDVSKNTLDVAVVKDGKLLFHVQISNDVEGLKTLFKRLKSLPDFSVQQAVFCMEHTGIYNQHVLNFLHEQQANVCLESAVHIKYSSGLQRGKNDKVDAIRIGEYAYEKRDKLKLWKPQREVVQQLGYLAGLRNRLIGVKNQLTVPINEAKPFNKKVARHMEKLSSASVRALERDIEKTDKAIREVIESDTELKRLFAIVTSVDGIGKVTAVQMIITTGEFTSITDPSKFACYSGVAPYAYSSGTTIKGKMHVSHKANKTMKTLLHMCAVSAIQRDSDMKLYYQRKIEEKKPKMSVLNAVRNKLIWRVFACVRDNRLYQKKYEISA

SEQ ID NO: 54631 - protein, 430 aa, unidentified
MKSNTQNAKIEAITEKTLVLGIDVGSETHYARAFDHRGIEYSKKPFKFSNTEAGFVTFKEWVLDLKEKHEKDKVVPGMEPTGHYWFNLGKFLQDNEMKPVLVNPHHVKKSKELDDNNPTKNDRKDPKVIAGLVREGRYMIPYLPDGVYADLRTASNLRFQLQAELTRIQNRISRWFNIYFPEYKTVYGKPDAKSGMLILKEAPLPEDILTLGIDGVNQIWRDAKMRAVGKARAKTLIEAAGHSVGSKEGAVSARMEIRMLLEDYESRNIRLQEVMTLIEELVNQIPMAEKLLEIKGVGIKTVSGFLAEVGDISRFNTPKELQKLAGLALVEKSSGKHKGKTTISRRGRKRLRYLLFEVAMSLVAKNPEFRELHNYYTTRRLNPLKKMQSLMAVAAKLIRVFYAILTKGVDYDPKKMVGDIRRPVVYLPAA

SEQ ID NO: 54632 - protein, 310 aa, unidentified
MKTLPEKTQTVYAGLDIAKATLQLHLQGRQHAPPNTAQGHTQLRQWLRAVPGVHVVCEATGGYERAVVAALHAAGIPVSVVNPARVRHFAQAQGRRAKNDPIDAATLSAFGAALQPRCTPLPDAALAELRDLVRWRQHLKEQLVATGNRTGHAATKFVTRQQAKLVKQLAAQIEAVEAELAAALQRMPQWQAQIRKLTQLDGIGTLTAVATLSQMPELGRIGRREAAALAGLAPWTRQSGPWEGQRHIGGGRAEVRRALYMAAVAVARMKHTALGKFYERLREAGKPAKVALTAVMRKLLLQMNHILKPA

SEQ ID NO: 54633 - protein, 331 aa, unidentified
MGNVTTVGIDLAKNVFSLHGIDANGAVVLRKTVSRARLMEIVAQQPACLIGLEACSGAHEWARRFQDLGHTVKLMAPRFVAPYRKNGKNDGNDAEAICEAVSRPSMRFVPIKTLEQQAVLCLHRVRQGFVEERTATINRLRGLLAEFGFVMPQKAAEVRRRATEWLEQLPPRAACAVRDLREHLRVLDARVKEYERSIEAYARDHEHAKLVQQRLGIGPMTASAIVASVVDVREFKNGRQFSAWLGLVPRQHSTGGKQRLGHITGRGDPYLRTLLVMGARSVLQRARSQSDPLSRWALAVRVRRGYHRACIAVAAKNARVVWAMLNQHAST

SEQ ID NO: 54634 - protein, 401 aa, unidentified
MTTGTIDVTIGLDVGKTNHHACAMLETGEIIYDKPLPQDEDQLRKVFTDLQEHGVVLVVVDQPNTIGALPIAVARDAGCLVGYLPGLAMRKAADLYPGRSKTDRRDAFIIADTARTMPHTLRAVDRDNDVLSALKMLSGFDDDIAKDATRTINRLRSVLTQIYPSLERVLPGSVITRPLVLDMLIHYGGPTKLKKAGYQRVHTWMAKRSKKDPTALVDAIFEGLKAQTVTVPGTSAAEVVIPQLAANIKALLEQRKTIAEQVEELLQDFPLSEVLMSMPGIGIKTAANILLAVGDCSDFRSAGHLAAYAGIAPVTRRSGTSIKGEFPARSGNKRLKNALFYSAFASIRFHEPSKSYYEKKRAEGKRHNAAVMCLARRRCNVIYAMLTRGEFFREVPARIAA

SEQ ID NO: 54635 - protein, 450 aa, unidentified
MSKRGRSREEGELRRINPRAAGIDIGSASHWVAIDPSLTQQPVREFAAYTSDLQALADWLVEHKIQTVAMEATGVYWIALFEVLRDRGLEVCLVDARATKQVAGRKSDVSDCQWIQELHSYGLLKQAFVPEAQIATLRSYVRQRDRWVADAGRAIQHMQQALELMNVKLTEVVSDITGTTGMAIIDSILAGERDAGRLSELRNFRCSRSQEEIARALLGSWREEHLFALAQAHDYYRYLGERIAACDARIAAAMVVCASPEGPSSEPPKVGKRDSSAHPFGFDALGHCYRMAGVDLTAIDGVGANTVLTVLSETGADMSAWRSERAFGSWLSLAPNPRKSGGRVMRSATKPGAQRAATAFRLAARSLSNSKSALGAFYRRLRARIGAPKAITATAYKIAKLFYRMLKTKQPYQDIGQAAYDERFLARRLRSLRRMATELGFNLVPADSAA

SEQ ID NO: 54636 - protein, 470 aa, unidentified
MAACSPKKRRSPTARQRLCVMHPHAAGIDVHAEVHWVAVPPGDAPPPSPDHPSNLPAHVRSFGSCTADLIALADWLAVCGIRTVVMESTGIYWIPLFELLESRGLEVLLVEPRQARHAPGRPKSDVLDCQWLQRLHSYGLLSGSFRPAEQIVVLRSYLRQRQMLIRYAAQHVQHMQKALEQMNVKLAEVVSDISGLTGLAIIRAILAGERNPLELAKLRNVNCKRAEAEIARALYGHWRAEHLFALKQAVTLYDGYREQLRLCDEQLQAYLATFADQSQGRPRPRRHGRGRRERRRNDPAFDVAGALYRMSGVDLTVLEGIDPNTALVLLSEIGPDVSRFPTVKHFCSWLGLSPQHQLSAGKIRSRRVRRGANRAGRALRLVAQACHHARNVLGAFYRRIQARAGAPKAIVATAHKLAERVYRLLKYGADYVCQELEVYEAAYRQRVVKGLARKAAEMGYRLEPAIPAGT

SEQ ID NO: 54637 - protein, 375 aa, unidentified
MMEKVRFLGLDVHAETIAIAVAEPDGEVRSLGTIPNRAESIRKMIKKLGPAEKLRVCYEAGPTGYVVYWQLAELGVRCEVVAPTLVPIKAGDRVKTDRRDAEKLARCYRSGDLTAVWVPDEGSEALRDLVRAREAAKQDQMRARHRLSKFLLRSGQRPPLGVRPWTRPYLIWVAQLRFAQIAQEATRQDYLHEVEHMRERVERLEQAITEAVKLASPALQQVINDLQALRGIGDISAVTIAAELGQVSRFDSARQLMGYCGAVPSEDSSGKRTRRGGITKTGNAHLRRIVVEAAWSYRRPPCIWYGLRRRQESISEEVKEIAWKAQHRLHKRYRKLGATGKDQRKIATAVARELLGFIWAIGTRAEAIAEQRTAA

SEQ ID NO: 54638 - protein, 415 aa, unidentified
MAVERMFLMEVIIERACGMDIHKDSITACIMTPEGKVIQSFSTKTVFLLQLIDWIKEHGCTHVAMESTGVFWKPIVNILEAENIEFLVVNAQHIKAVPGRKTDVKDAEWIAKLLRHGLLKASFIPDRTQRELRELVRYRRSMIEERARQHNRIQKVLEGANIKLGSVVSDVMGVSSLDMLRAIAEGENDPEKLAGFARRSMKKKKAELELALRGYIQPHQRLMIKTILTHIDFLTAQIELLNQEVACRLSTHQEDIERLDSIPGIATRMAEQILAEIGTDVKKQFPSAAHLCSWAGLVPGHNESAGKRKSSTMKKGNKYLKSALIEAAHSVRGSKTYLGALYRRTATRKGKKRAGISVAHAILRIAYYLLTRKEMYVDLGEDYFDKQKEQSIIRYSVRRLESLGYNVTITELGAS

SEQ ID NO: 54639 - protein, 463 aa, unidentified
MKKRASSGPAKHQRSTPNRGRIISTNSSGDLRPLNEHAAGIDIGAERHYVAVPPSADPHPVREFSVFTKDLYAIAEWLQQCSITSVALESTGVYWVPLYELLESRGFQVKLVDARKVKNVSGRKSDVLDCQWLQQLESYGLLAAAYRRKDEIVVLRGYMRQREMLVKSAATHIQHMQKALQQMNLRLDNVVSDITGQTGMRILKAIIGGERDVKKLGAMRHPSCHASAEVIAQSLVGNYRQEHLFALKQAVELFEFYQAKILECEAEMEKYLAKLSHKRDDEPPPLTGRKKVQTMSFNVRDEARKLLGVDLFRIKGLNAETVLRLVSEVGLEVSGFASEKQFASWLSLSPNRRVSGGKVLSSKTKASKNRAAGAFRQAAASVARSDSELGAYYRRMMGRKGPGAAITATAHKLARIYYNLVKNGREYDEGGSRAYEERQRERAVANLRKRAKGMGYELVAVAA

SEQ ID NO: 54640 - protein, 354 aa, unidentified
MPSSAETAVARTIGIDTGKNTLHMIGLDEKGAIVLREKVSRTRIAARFVNLPPCLVGIEAGMASHYVARELAGLGHEVKQVPPAYCKPFRQSHKNDFRDAHAVAEAVERPSTRCVPIKTDGQLDLQALHRLRSRLIGNRTAVINQTRGFLLEHGIPVRQGHHFLRQQLPQILATRTDVLSPRMVRIIGDLMTDWKYLDERIEGVTDEIEALAHADEGCQQLITVPGIGPIISSAMVAAIGNGAAFCKGRDFAAWLGLVPKQRSTGDRTILGRITKRGNRYLRMLFIQGARAVLLRPASWAKHGFGSWLTAATRRLHRNVLAVALANKLARIAWTVLAQGRRYEARVEPRVEAAA

SEQ ID NO: 54641 - protein, 423 aa, unidentified
MLLNNSLIVGVDVHRRTNVVQVMDDQGQVLTTSLVVSNNRQGTSHLADCLAEAARRGNFASIHIAAEATGAYWLPFFCQLQQEPRLAAWPLTLYPFNPPVVHNFRKAFVDLDKVDLNDAHLVAERLRFGRNLPAPFVMEEQFLPLRSLTRYRFHLVHELVRVKSYCTYLIYLKSSEYTADRDWQPFSDVFDATSRAVLRDFPSMDAIIEMPFDELVEWLDVKGKRRFADPEANARKLLQVAEDSYRLPTPWLESVHTILGLNLRHLKTLENLIQRVDTAIADEMEAIPNTLTTIPGIGPVIAAGIIAELGDLARFDYDQKKVASYAGLKWSRRQSGDFLAEETSLKRQGNRFLRYYFCEAAHLVRMNDAEYNAFYTKKYNEALKHKHKRAIVLTARKLVRLVVRLLTTNQPFRVRRVDSDESV

SEQ ID NO: 54642 - protein, 365 aa, unidentified
MKTTKKYPHKKQFRTIIGVDLGDKKHHVCVTDKDGNILCEKTVANTQKQLGLLVHEYRGALVAIEVGTHSPWISRLIEAGGCTCLVANARKLRAIYQNDRKCDAYDARMLAKLARVDPELLSPIQHGSEARQLHRLSITLRDSLVRQRVNIISTIRGSLKSLGVRISGCSTPYFAGRCREELEGMPLLETLDASLEALEGLNSQIKALDKQIAKTAAEHYPETKLLEQIKGVGPITSLSFVLAIGDPGRFEDPRNVGAYFGLVPRRDQSGQSDKQLPISKAGNREMRRPLVQCAQYIMGSFGADCDLRSYGLNLAAKGGRSAKRKAVIAVARKLAVLMLMLWKTGEPYDPIRNTLETPPTTKQAA

SEQ ID NO: 54643 - protein, 357 aa, unidentified
MAALSIADVPANVTVGVDTHKHSHVARAKDGLGRHLGQLEIETDPRGYAGLLAWAQGFGPVVTFGIEGTSSYGAGLTRFLRAQGQAVIEVLRPVRRDRRFGSKSDPIDADAAAGAVLSGKATAVPKAGDAGVEMIRALKIAKQTAIKARTQAVNAVKGLIVMAPDPIREQLRHLKTPALIRTCCAYRVEGASDPTSAVKLSLRSMSRRYVALDHEVRALENELDALTVRLVPQLREVFGVGQDVAATPVLAAGNSGDRLRSEASFSMLCGASPIPASSGIVKRHRLNRGGDRQANAALHQIVLVRLRYDEATKAYFAKRKAEGKSKNETFRCLKRYVAREVYRTLVGPSEEAIRSAA

SEQ ID NO: 54644 - protein, 338 aa, unidentified
MEVAVIGIDLAKDVFQVFGVDARGRAVLTKRLRRPQLAPFVAALSPCLIGLEACASAFHWARQFQARGHTVRIISPQFVKPFIRGNKNDGNDAAAICEAVQRPNMRFVPLKSVEQQDVQSLHRARQRLVNHRTALISQMRGILLDRGIVFAKSATRARRFLPLILSDPMSELSPLMRETLASLLELLRELDARVKRFDRQIADVFQASPVCQRIAQVEGVGPKTATAVVAAVGNAHDFKNGRHLAAWLGLVPRHRASGDRITLGGISKRGDQHLRTLLVHGARAVVRTAVRKTDARSQWVNALVARRGVNRAIVAVANKNARIIWALLARQEDYRRAA

SEQ ID NO: 54645 - protein, 451 aa, unidentified
MRQPILAVGVDPAKRLHRAVAVLFPDEVVLDVELPNAFDAVANLDLRLCELANQHGADLVYGLEDHRRYGRLFCQVLTERGRDVRVVNPLRTNRQRAFYGQDKDDAIDGRSIAAVVLRRHHQLPLASDFGEVAQAIREAERSLQDLSKVGTQLVNRLHLQLSDTYTAAYEEYFGKLKSPLALRFFRRFPLPQDLVGHNVEMLASLLLDLAGGKVGPHKGGNRLIAMRSKAQAILETSGAMRASPRTLALELKAELIRQLCDELLANHDRIIRLERMLREQLLPATKQTITTITGISTILAATIIGETGSISRFRSPAAFAVYNGTAPARNSTGGRDRHKARRDCNHRLKRAFYLAARAAVLHDPIAKAYHQSCKSRGLSYVEALKRVARRMSDVVYALLKSGKAYDRSIIEHAIERRREQAAHAARSHAKQSLVHSRPRKSNSPLSQRQVM

SEQ ID NO: 54646 - protein, 333 aa, unidentified
MVKVIVGIDIAKNVFQVHATDGTGATAYIKKLSRGQVLSFFAKHAPAAIGMEACATSHYWARELIKLGHDVRLLPPTVVKPFVRRGKKNDAADAAAICEAMVRPNIHSVPVKTEEQQSVLALHTVREQLVGVRTGFVNSVRAHFAEHGMVVGLGRGKLAELATMRLHLPDRTAFAVDILLERIHALDVDIARIEKKLIEFHKTCEKSCNLATIPSVGPLTATLIVAKIGDPSRFKRGRNFAAWLGMVPRQNSSGGKDRLGAITKAGDQSIRRMLFLGATSLVWRAKPDTWLGKLRGRKPAKLAAMAQANKTARIIWAVLTRGEVYRAPMAASV

SEQ ID NO: 54647 - protein, 343 aa, unidentified
MQTVSTIGLDIAKSVFQVHGIDAEGKVVIRRQLKRRYVLAFFEKLPPCLIGIEACASSHHWSRELQALGHTVRLMPPAYVKPYVKRQKNDATDAEAICEAVTRANMRFVATKTPEQQSGLVLHRTRHLFIRQQTAVINAIRAHLSEFGIVAPVGRNGVEELLGVVVDPSDKRLPEVARACLTALGAQLRMLKAQILEFDRMIRAWHRSSETSRRLDHCPGVGPVLATALVATVADPKSFRSGRNFSAWIGLVPKQHSSGGKNRLGSISKQGDRYLRGLFVAGALAVIRYAKIHGTKHRPWLTALLARRPTKVAAIALANKIARMAWVMMAKGERYKEPVALAA

SEQ ID NO: 54648 - protein, 352 aa, unidentified
MKNFFGCDAHKKYSMFASMNEEGHRAHCIKVKNDRHQFSCFLKTLPPGSPIAVETVGNWYWMIDDMEKAGHVPKLANAWKAKLMMGQINKTDKLDATGLALLLRNGTLPSVWIPPRELRDQRELPRMRMALVSVRTKFKNRIHATLAKYAILITEVSDIFGVRGRSLIKERLSELPRYTRRSVEMQLELLDQTVEHIKVCEKQIGEVIKKTPAIMLLMTLPGVGPVLAIVIALEIGEIERFARAENLASYAGTVPRISESAGRTRYGRVRPDVNRYLKWALVEAANTVVMNQSCWSERHVVRLYRRIRGRRGHAKAVVAVARHLAEASYWVLKRNESYKEPKKYEPISSTQK

SEQ ID NO: 54649 - protein, 388 aa, unidentified
MIAVMRPLGEMMIPPFEVGHTGIELCELSSRLRELGGETRVVMEATGNYHLPVAGFLYDSGFYVSVVNAMLVHGYGNNSLRRAKTDKKDAIKLANYGLDHWLTLPRYIPEDEVRLMLKTTYRQYQQCAKVQTMLKNNLISLLDTAFPDANRLFSSPIRADGSEKWVDFVAAFWHCECVCGLSEKAFIAKYQKWCKKHGYNFSQDKALDIYASARGHFSVMPKTDTAKLLVDQSVSQLRAASTALATLRNEMQSLAASLPEYPVVMGMFGVGPALGPQLMAEIGDVRRFHSKKALVAFAGIDAPPYQSGQVEVRSRSISKRGSSALRRTLFLVMTVILQRSPADNPIYQFMDKKRAEGKPYRVYMMASANKFLRIYYATVKQYLDSLEA

SEQ ID NO: 54650 - protein, 411 aa, unidentified
MSYKIAGIDVHKKVLMVVVIDATTPEEKPERRRFATLPSDRQRFLIGLREQGVEEAGMESTAQYWRSVWLELEPHMRLHLAQAFSNRAPRGRKHDFKDAERRVRRLIANELILSFVPGGEQRTWRNMTRMKLQLTRDRVRLQNQMECLLEEMRIKLSMVVSNLLGASGIRMLRALAKGETDPKKLAELGDQRLQCTEEQLVDALTGRAQPLHREMLALQLERLPLIDTQIAKLNGMIAQAMKPHQEAVMRLAEVPGLGVDSAQQIIAEVGEQASTFPSAAELTSWVGSCPGKDESAEPNHSRRSAKGNKYLRRVLNQAAHAAVKRKGSYFQVVFRRLLPRLGYQSAIWAVAHRLCRVVWKILHEGVRFLEHGIEPDPKAKMRHARRLAQALRKLGYQVTITPTNLASGMQM

SEQ ID NO: 54651 - protein, 358 aa, unidentified
MKPTTNTRTKKYTYFIGVDISRNELDFAVCQENTFLFHAEIKNEKDAILEFVGRLKAIPAFKLFKAVFCMENTGFYGNHLLHVLVKIKASIVNEHPLKIKNSIRMARGKDDKTDAIRIAEYAWKNRTELELWSPKRAVINELAELMALRSRLLNVAMVLKTPQKEKKAFMNTKVYSKMAGICEASIDAISTDLMNLEQVIKNVISGDENLSKLMKIITSVPYIGFVTGTYILIYTNEYKDITDPKKFACYAGIAPFPKESGLLVRRRRLSSMANKRMKSLLHICAAAAATRNAELNVYYKRKLEEGKPKLAVINAVRYKLVLRVFACLKQDRLFIKKYERDQTNSNDYPSEVIITETI

SEQ ID NO: 54652 - protein, 335 aa, unidentified
MKKIYVGIDISKEKCNLCYRSGLEIVREEECFNDAKALKKAFKAALKVLGTSFEDVLVCAEYTGRYIYPLTVACQELDLFLWMDDPTRIKNSMGLTRGKNDAIDAARIAEYAFRYSDKAVRYCIPDAVLVSMKNLLADREFLLVDKKRYQSQLTDQKKYMASGDFKHKSARWKKVIKSIDEQIAAIDAEIETLIAADPVLTRQKELLVSIDGIGERIAINMIAITSGFTRFQNARQFCSFAGLTPYKYDSGTSVRSKAKISKRANQTMKALLHMSAVNVATRMKAGEYKDYYERKLKEGKHIMCILNVLRAKLVHRMFSVIKRDTEYTKEYKPAC

SEQ ID NO: 54653 - protein, 288 aa, unidentified
MKIVGCDLHARQQSVALLDVETGELVERTLEHEGHQVQEFYAKLGAPVVVGIEATGSMQWFLELMEELGIECRVGHPAKIRAGETRKQKHDRRDARLMLQMLVENRFPEIWMPSIEQRDLRTLLRDRHQWVRMRSRAQSTLQAMALNHGLRKGKGLWTQAGIDALQRLALPAYTSQRRNELLRLYEQLRGRILDLDREVERQAEQRTQARRLLTHPGVGPVTALATEVFLGDPRRFEDGKAVASYIGMIPAEHSSGKRQRLGELSKEGNTLRRYLCGASGDARSPARR

SEQ ID NO: 54654 - protein, 319 aa, unidentified
MNTTTAAHIDRSERNVGIDIGKSTLDACIFELDVYLQYPNTTEGIRELIKKLSRYNLTRILVEATGGYERCLVEACAEKELPIIIIQPSQVRQFANALGINAKTDKIDSRAIAQFGAVIKPEARPLNNKKVRYIRDLLSRKRQLNEMRTQELNRQHKAPAILAATHKRLLKVLDKEIESINKLLAKAVSEVTEWQRTYEILSSVPGVGDGVTFTLLGELPELGHLSPRKIAALCGLAPYNRDSGIMKGRRRIKGGRAPIRTVLYMAMLSAIQCNPIMKKFYKKLVEQGKHKKVALTACMRKMVTILNAMVRDSCEWQAN

SEQ ID NO: 54655 - protein, 359 aa, unidentified
MARVSVSSIRQFVKGFEAQQFCIGIDVHKRSYHVALRRADGRAVTFVCPADPQGFVEQIRRLAVRVAVVAYEAGPTGFCFARVLRGAGIKSMMAAPSRIPRAVTSGAKTDRLDCLRLADYAAKDLLRSIAVPTPQEEAQRSLQRRRHDLVDALRRCKQRIKGLLLFLGQAEPKETEHWRRGAAEALRELPLDPHARLTLESHLRELTFYQQELSEVEEQLHQMVRQQPLQSDVLECLQSIPGVGEVVARTFMLELFRPERFHRAEEVTSYLGLAPMVHHSGERSPAGRLRPVGQTRLRSLLIEAAWMWQHRDEYARNLYHRFLGRMGIAQKAIAAVARKLAVILWRLYVERRPYRTVAS

SEQ ID NO: 54656 - protein, 318 aa, unidentified
MTAPACFVGVDVAKATLEVAIRPTGDQWSAANDEAGIAALVGRLRPLAPTLIVLEATGGFETAVVAALAAAGLAVVVANPRQVRDFAKATGQLAKTDALDAQVLALFAERVRPEPRPLLDEAARGLDALLTRRRQLLEMRTAEQNRLGFAAAGAVRRDITQHIHWLERRLRDVDSDLEQVIRTSPVWRAKEDLLRSVPGVGPVVSRTLLGELPELGRLTHRQIAALVGVAPRACDSGTLRGKRIVWGGRAPVRAALYMAALVASRCNPVIRAFYARLRAAGKPAKVALVACMRKLLTIMNAMVRNGTRWRTLDAGAAA

SEQ ID NO: 54657 - protein, 319 aa, unidentified
MNQKNITSKYAGVDVSKAGLDCWKQSTRNQGGSFKSFANNGKGIRALLKWIPEGGHVVAEATGGYEELLVCMSHNLGAAVSVVNPGGVRKFADAQGRHAKTDRLDAALIARYAEVFRPASLPKPTKAQMALASHVDLREGLVNDRTCQLNRLDKESNPSLRVHLEEVIDCLGKTIAKIEKQIDSLIASCPKMTILSRELRKIPGIGPVISSTLIALPPELGTLTRKEVAALCGLAPYARYSGKKKGRRYITAGRAKLRRRLYMGATATLRTRTPLAAQYRAMVARGKDRMVALIAVARKLAIRANTLCKPFASLQHADT

SEQ ID NO: 54658 - protein, 360 aa, unidentified
MTVTMTYVGLDVHARSTHAAAIDVVSGELRRARFGGGSEEVVGWLAGLPQPLHGCYEAGPTGFALYRAAEAAGLRVEVIAPSKTPRAPGDRIKSDRKDAELLARLLLAGQLKVVAVPDPAVEAARHLCRAREQIRGDLMRCRHRVSKLLLLHGRVYPETSSWTQRHRQWLARQQFNEPATELAFLDTLAAVDGLAARKAALDERLSRLALDEQWWPTVARLRCFRGIDTLTALVLCLEIGDFARFPRPAKLASWLGLVPTLDQSGESHRQGAITKTGSSYARRLLVEAAWHYLRQPRIGATVANRQQGQPAHVLQIAWRAQHRLYRLHNRLRARGKPANVATVAVARELACFLWAAAVAE

SEQ ID NO: 54659 - protein, 316 aa, unidentified
MPRKRILVKSIDTSISYQVIGIDLAKHLVSACLITGAGEIFGIDRLTYDDLLKSAERMSPTLFCMEPCPEVHYLAEKLQGYGHHTKVIDGAAVKEYIKTHFGGQKTDLNDAQAIAFLSLDTNLPEITPKNTSNSVLSSIQAVREQFRKEYIQSFVSLKGICQRWGLPISKGVMNKNKVEELVSESKKIPQEVKDWLLELLQSCRELQKRLNKISKYLKEYADNDEICQKIMSVPGIGPITATRLKATIGDIQRFEKPKSIVAYYGLVPKSKATGHNEKKGGITRRGDRVARSLLNRGCGSSFEFGSKRIPKIKASQ

SEQ ID NO: 54660 - protein, 310 aa, unidentified
MKQTIVYIGIDVAKAHLDVAWQKRLRRFDNDKAGRATLVKWIKQKQSDPVQVICEASGGYEQELLDALAEADLAFSLVQATRVRQYARAAGILAKTDKVDARVLARFGAAMRPEPTSPRSAAQKLLRKLESQRRHLSYLLVAEQNRLEQLNDEKLRRLTCALMGTLKKQIALIDSRIATLIMQDQELCQKAQKLTSVKGVGERTAALLLAQMPELGTLNRREAAALAGLAPFNRDSGTMRGKRLIFGGRRAVRHGLYMAALVASRRNPILSSFYRRLRIKDKPHKVALTAVMRKLLLALNQALTPNQSFT

SEQ ID NO: 54661 - protein, 395 aa, unidentified
MELVPIHKRVIGLDVHQAQITACAIIEEGSGETRIEQRQFGGFKRDRRELAAWAATLRPDEVVLESTGIYWKSPYAALEAAGIRATVVNARHVKQVPGRKTDIGDAQWLATLARAGLLRGSFVPPAKLRELRLIARQRQKLVGLLSSEKNRMHKVLTDAGVRLGVVVSDLHGQSARAMIKGILQGQAPNEVLALASRRLKASREVLHDALQGELTASHLFVLDELLRHIEELEARIARFDARLLDELASEHNALALLQTLPGVDTIGAAMLLVEIGSDMSIFGNPDRLASWVGICPGNNESAGKRKSGRVRKGNPYVRRLLCEFAHAASRTKSAFHAKFQSLIVRRGHKRAIVALAHKMLRTIFFMLKRGDYYRDSATSYEQLSVQRNASRWIKA

SEQ ID NO: 54662 - protein, 419 aa, unidentified
MSFKILKFNCCGLDVHKTWIYACIGITDSNNRTEYKQARFSSFTKGLNELCDWLAKYNCTDVCMESSGKYWIPVFNILEQHNLWVTLSHPKYTKPMKGNKTDRKDAKWICDLYMCGMVKPSFIPPADIRELRDLVRYRYKLTCMIAGEKNRAQNCLTVSNLKLDDVFSDVFGKSSRSITEQILQHSGEKFDVAPFVYGHCKTPIEEIQAAVDGAISKEQAVKLRQCLDHIDELNKHISEVEQEILCLSDKYEAALNLIRTVPGFNKNPMTAIQMLSEIGCDMSVFPTDKHLVSWAGCCPRNDKSDRKIKSTRISRAGSYFKPVLVQVANALIKSKKHPEFTNRYKRIKARRGHKKAIIAICRMILTAIWHILSDLKPYTPEGFLESRPVKEEKILSTSQALNLLRQRGYVIKDEPLTVS

SEQ ID NO: 54663 - protein, 405 aa, unidentified
MQVYIGIDWSQSKHDITFLSERGAVMATLVIPHSQDGFAKLDATCRRLGVGPGECVVGLETAHNLLIDFLWARRYCEVYVVPPNVVKSSRTRYRQSGAHTDRSDSFVVADVLRTDRGRLQPWHPDSLLTRQIQARVSLISFLTREIVRLQNRLTAALLRYYPAALHVFNPSTQIGADFIRTYPTPQRATALTFEQFEAFARAHHYHRTQKLATYFANLHADHPEASPETVAVYEAEAPVLASTLAEMVKTKTRALSELNGLFAQHLDYPIFSSLPGAGEFLGPALLAKFGDDRMRFPTPASVQALAGTCPVTEQSGKGSWIHFRWACDHEFRRIAQQWAKASLSYSVWAVAYWRQVLPRSGSESHAYRCLANRWLAILWSLWQKRQPYDEAYHFKQRVQRSKPRP

SEQ ID NO: 54664 - protein, 342 aa, unidentified
MSKFVVPGGDVSALLERFEHLQRKASARSGRSFRIVSIQEAGLDGFWIHRVLEDSGIESYVVDPASIAISRRRRRAKTDRIDGETLVRALLAHKRGEPRVCAMLHVPTPDEEDSRRLVRERKALINERIRHVNRIKGLLFSQGVSGYEPLNRDRRERLEALMTGEGRPLPKALKAQISRELARLELLIEQIGDVEEARDAVLAEAEHSTRGPALLLNLRGIGPEFAAVLWSEGLSRRFDNRRQVAAYAGLAPTPWQSGQISQDQGVSKSGNPRLRATLIQVAWLWVRHQPTSALAAWFKARVSQNGGHRKKSTIVALARKLLVALWKYVNAGVVIEGAVVRT

SEQ ID NO: 54665 - protein, 484 aa, unidentified
MSRRKRSTFERLQRGDKLSRRERRQIERQLQAEDPGWEVVHRNVAGIDVGNESHFVCVDPQRATPWIREFGSWTTALREMVEWLKSCGVERVVMQTTGVYWIPLQDVLEQAGLEVAVVNARATKNLPGRKSDVQECQWVRKLDLYGLLRAAFQVPETIRAIRTLWRLRERWVQEAGRAIQQMQKALTTMNVQLANAISDISGKTGMAMIRAIVGGEHNPWVLAKLRDERIRASEEEIAHSLEGHWREDVLFELRQVVQAYDFQQQQIAECDKQLEKFMKAQRTRVVEEKVEAVKIPAPASSEPGRKKKQRKPLKNQPAFDLEAELKRVLGVDLTVIDGVKLMTIQTIYAELGADLSAFPTERHFTSWLMLAPKREVSGGKVIKHSTLPGRNRVANALRMAAESLKESDSYLGARYRSLRGRLGGVKAVKAMARYLACLIYRMLTKGQAFVDRGAACYEQKRRERELSHLQRKAATLGLQLVPAQ

SEQ ID NO: 54666 - protein, 366 aa, unidentified
MNNDNPLFFVGVDWGSQSHCVCVIDRDNRVVGERSFKHSGEGLLNMGEWIIKVAGSAAGKVAAGIEVTRGPVVESLMACGFSVHSINPKQLDRFRDRFSLAGAKDDRRDAMVLASALRTDRRHFRSLEPQCDDTRTLRTLSRRREELVTERTRHINRMGEQLWVYYPQFRELVGNDTIRPWIIELWQLAPTPDAARRIRVSSVQKILERHKIRRVSAEEALGILRSKKINISPSAASDCVWRIQSIVEHFDLVSRQIRETEVLIKEMLDAIISRQRAENAGTARPSDLEILLSMPGVGPVTAATLVGECYDLIRRRDYRALRCVTGTAPVTKQSGKSKYVMRRRTSSCRLQAAICHWAESRFCTTR

SEQ ID NO: 54667 - protein, 523 aa, unidentified
MARAPKSKKRFFSAPQTIHKPRGVISPRVQRVGPEHFGIVCVDCAKARSKWSLTDYYGRVLVPPTEVAHTQACLSSMIRDLRTALEQAGIRDQIVVIERTGRYHRPIQSAFAKAGFEVRIMHPLTTKQHRQPANPGNKTDDTDLAAMHRGAISGFGLLEPPADPLSIRLQLLARHRRDLVEKMVALRCQIHEHLHAIMPGYSKSFDDIYDARIPLWIARQYGSAAAILQAGVPELIVQLRRAEIRLHLPTLEKIVAWARSAPTAEDESHIHLHILIELDDDRLSKVRGVRAIEAELAGLLVQTPYVLLMGIPGINVVSAAEFAGEMGPIERYPTARAITGRAGLFPSRYQSDRVDYPDGQLVRCANRKLRRALMMIADNLVKCNDHFRVLAMGWRLHGRDARAIRVQVAGRFSRIAYQMVAGRKAYRHPCCQQRDYILNKLLTFHTDNEIGYDQLIMNLDAAVAQIPRSEYREEAAPLADELDRVLKKRGKGPRPLSEILPVVLAKLGVKPVRSPKSGEAILT

SEQ ID NO: 54668 - protein, 419 aa, unidentified
MLNLGVCRPTHKPAVDQRLRAAPYKKHAAACRRLSPAGRHKILDQRPAHPLAVDVKQTTKSSPLFTNLRSCVVKKIATIGLDRAKNVFQVHAADADGSTVFNRKIKRADLLEFFAKLPPCLVGLEACSTAHHWARRIAEFGHEVRLIHPAYVKPFVKRGKSDFNDAEAINEALTRKTMRFVPVKSAEQQASAMIFRARTLAIRQRTQAINALRSHLAELGVATAQGTTGLKALIAIANDEHDGRIPASARFALQQILKQIEFLGEYIARLDREILARTKNDADIKRLMTIPGVGPIIAVAITALAPDLSGFKSARHFAAWIGLTPKSHSSGESQALGNISRMGNSHLRTLLVTGAMSVIRSAKTAERVSPWLAKLRKRRPFKVAAVALANKTARIVWALLIRGGNYIKPGGTVDVGTMA

SEQ ID NO: 54669 - protein, 396 aa, unidentified
MSLWDDVAGVYTHRSGGGFPVELIQAARFGPFRRHGGVCHPFAFSEQKGATMSMVRMIVGGVDTHADTHVAAAVDANGGVLGIESFPADHAGFEALLGWLMSHGEIDRVGVEGTGSWGVGLARFLYNHEVTVIEVDRPNRQDRRKFGKSDPTDALSAARAALSGSASVIPKTRNGPVEQIRILLVARRSARSQRIETLNQLRHLIYTGPETVRSRFKDRYKTGLVTEVAKLRPRKGSDPVLYTTQVTMRGLARRIQMLNAEIKSLDGMLVELVTNTAPSLVALFGVGTDTAATLLVAAGDNPDRLRSERSWAHLCGVSPIPAGSGKTSGRHRLNRGGNRQANAALYRIVLTRMSHEERTKTYVARRRSEGKNTAEIMRCLKRYVARETFKHLPRTA

SEQ ID NO: 54670 - protein, 372 aa, unidentified
MKKPILYVGIDVDDNAFHCHLIDDQTGEIFNFSCKPTSSALIKKLYKFKDQGCHLKVCYEATYLGFSLCRQLRDKDIECEVVASSLIPDVPGSKVKTNRLDSQRLSLYYKKGLLTFIYVPKIEDESERDLLRSRSFLVKQIKMLKCHIQSVCRRMNFNYKEESNKSRYWTVHHENWLDSKVKSMENKTLKVNLQNLLSTLNQLTQTVDYYNDQISQLAETPKYKEKVQALTCFRGIEQLTAMTLLTELGDIKRFSHPAKLTSYLGLDIKEYSTGNKEKKFGITKMGNKFARTALIESNQTASTPARVSRWLNRRRQGVEPKIISIADRCMKRLNKKSRILLGRGKNRNKVKVACAREMLGFLWEALHVVEAA

SEQ ID NO: 54671 - protein, 342 aa, unidentified
MEHIAIDLGKVESQICARNQQGEIIDERRERTEELGRYLGKRAPGRVILETCAEAFSVADEAAAQGHDVRVVKSKLASKLGVGDHGVKTDKRDARALSEASTLINVPSVHVPSRESRERKALTNSRDALIQARTQLINSVRGGLRPLRLSLATGSVSTFPVRVRKKLQGQPNGLSMHIERLLRVIEKLNEQVSEADKELVKLAKGDPDCRRSMTMPGVGSLTAVRFKATLDEVGRFPSAHRVESFLGLTPGEDSSSDRKRITSITKAGPSRLRWTLVQAAWSLWRTRPKDPMVAWANAIALRRGKRVAIIALARKMAGVLFAMWRDKTSYAPAFALTNGTLP

SEQ ID NO: 54672 - protein, 388 aa, unidentified
MIYVGIDIAKLNHFAAAISSEGEILIEPFKFSNDYDGFYLLLSNLAPLDQNSIIIGLESTAHYGDNLVRFLISKDFKVCVLNPLSTSAMRKNNVRKTKTDKVDTFVIAKTLMIQDSPRFITLKDLDYIELKELGRFRQKTVKQRTRLKIQLTSYLDQVFPELQYFFKSGVHQNSVYALLKEAPTPNAIASMHMTHLTHLLQTASHGHFDKDTARELRVLAQKSVGILDSSLSIQITQTIEQIELLDRQLFHTELEMANLVTCLHSVIMTIPGIGSTNGGMILGEIGDIHRFSTPGKLLAFAGLDPSVYQSGNFQVQRTRMSKRGSRILRYALMNAVHNVVKNNATFKAYYDAKKAEGWTHYNALGHCAGKLVRVIWKMLTDEVAFNLE

SEQ ID NO: 54673 - protein, 344 aa, unidentified
MNYYAALDVSLRSVHLCVIDDEGELITETKLSSEVTDIIAYLDSLGLDISVVGLEAGTLAQYLTYGLQSAGFEVVCMEARQVKAALSAMRNKTDKNDARGIAQLLRTGWYSSVHIKSMESHRVRALLSSRKAVLSKCIDLENEIRGLFKIFGIKLPSKLGHGSFDAAVRDVITVDATLSHALLPLLDARLVLYRSFRELDNRTRHMAHADPVCQRLMSAPGVGFITALTYKSGVDDPYRFKHSRTVAAHFGLTPRRFQSGEINIDGHISRCGDRDVRCTLYTAANALLTRSSKWSPLKAWGMKLAKTRGHRRAVIAVARKLAVILHRMWLDDVPFHWSTEGARS

SEQ ID NO: 54674 - protein, 339 aa, unidentified
MKLYSGIDLHSTNSYLAIIDESGKRIFKEKLPNEIVTITDRLSLYSGTLEGVVVESTYNWYWLVDGLMAEGFAVHLANPSAIQKYSGLKHADDKHDAFWLAEMLRLDILPTGYIYPKDERPLRDLLRKRTHLVSLRSSLLISLQNIISRNCGMKMKTNDIKRLRENRVHPLLADNEDLALAGQVSKDSIDFLTRQIRSIETFIEKKIELKDGYKNLVTICGIGKILGLTIMLESGPMERFEKVGNYASYCRVVSSQWTSNGKSKGKGNKKNGNKYLSWAFSEAAELARRFDDRARAYYNRKMRKTNFMVAHAALAHKLARAAYYIMRDQVEFLPEKIFT

SEQ ID NO: 54675 - protein, 354 aa, unidentified
MSSKYVGMDVHQSTISVAVMDATGRILMECVLRTEAATILQFVQGLRGSIYLTFEEGTWAAWLYDLLEPHVTKIVVCDPRKAALLKAGNKSDKIDARKLADLLRAGLLSAVYHGEASVRTLKELARSYLTLTRDGTRVMSRIKALYRSRALPCAGQKVYSEKYRNQWLEQLGEPGVRKRATWLYQQLDQVAGLRRQARRALLTEAQKHPASRSLRSIPSLGPIRAAILIAIMQTPQRFRTKRQLWAYSGLALETHTSGDYKVVADRVQPANVLRNIGGLNPNHNHDLKYVFMSTAISCSVCPGPFHDFYAGLLTKGARPPMARVTLARKIAAISLILWKKGERFDPAHLKQQAA

SEQ ID NO: 54676 - protein, 354 aa, unidentified
MAISKQCIGIDISKATFTACLCQRSDDGGLAFSKTVDFSNDTKGFNQFLRWAKGGIARDAALVFLMEATGVYYENLAHHLYKIKKRVHVVLPNTSKHYFSSLNIKTKTDAVDARILSQFGVERTHKAWSPPPPVLLQLRNLTRYHVQLQEQKTALGNIKHSKDCSHDVQIFILKSNKKLIAEIDKEIGRCIGEINRLVKSAVDFHKKIEKLATIKGIGMITMVTILAETMGFEQFGSAKQLVSYAGYDVVQRESGTSVKGKTRISKKGNRYIRNALYFPAMVACRYNPLLKEAYMRIIQKKSSKMIGQVAIQRKLLILMYTLWKNDTVFIENYKVSSPDPKTETTLDSSEAELL

SEQ ID NO: 54677 - protein, 526 aa, unidentified
MSYYVRRPGRKPIKAKPSGKRSLQKPHGVISPRVQKVGGEHFAIVCVDPAKHRSEWMMADYFGNVLIEPQTVEHQSVFFKLAVEMIHQSQQQHDILETIVVVERTGNYHLPPKRAFSRAGFETRVVHPFATRQYRMPADPGNKTDETDLYAQHRAAVAGFGLCELELEPPYRDLQSRARHRRNLVVKAGALACQIREHLHLAMPGYAGLFDRLFELPAGLMIAARCDSPAKLTQLGRVRLSNYLRKNKVRHQLRTIDKVLAWAAQAADEPIQDGPMHHAIWTDLHELYQLFQRKIVALERQLASDLVHTPYVRLMAIPGINVVSAAELAAEIGPISAYANANAITGRAGLFPSRYQSDQTDHDSGPLIRHANRRLRCVLMRVADNLACHCHYYRGQEEVDKARGVDQRASRVKIAKRFSRLALACVGGDQPMRHPCFQKPDSILEKLRRFHQEHQTPMDVMLADLEAAVEQLPYNTCNHEAEIVADVLEQYQRRQRGAKPIGEVLPAVLARLNIRSKEANRNRDRS

SEQ ID NO: 54678 - protein, 417 aa, unidentified
MKETQRKLYVGIDVHSKEHKAAVMPVALLEQPGNAWKKVKPLNIKNNVADFERLDTAIRSHISSAKEAVIAVDHTGGHYSEPIVYFLQARGYDVYYLETKAVKAARERFLDEESKSDIIDSTSAAYLLYLRDLHGLSFRISALTPELGSRAAALNSLMLQRWQFNKLASQATNRLHQLLLAVFPEGEGQYFKQLVMITSHYPTPRDILTSDGLKSFPNLRRKDKEIILDLAASTVGIPGDIYQWLIRDLSNQRTEALAKREVLTSMLITQVRAHPYGHILLSFPFLVEIAAATIIGVIKDIDRWPDKKKFKKALGVYNNLTQSGTGLTRTRQGKEGSRHGRRVLFQVCFGCIRTNAHDNDFRDYYHRHVARGKPRIKALVSTMGKLAEIVYHCLKVGEPYEYHGKYRAITISADKES

SEQ ID NO: 54679 - protein, 420 aa, unidentified
MRNAGIHANSLLEVRRMYNAVGIDVSKGKSTIAVLQPGGTVIRKPFDVSHTSQNLNELADYLSSLDGTTKIVMECTGRYHEPMIKALSEAGLFISIVNPHLIKNFGNNSLRKVKSDPADARKIARYTLDNWTELRQYSGMDNTRTQLKTLNSQFSFFMKQKVAAKANLIALLDNTYPGVNKLFDSPTREDGSEKWVDYAYSFWHADCVRKIGLKAFTERYMSFCKKHHYIFQQDKPEKLFNASKELVAVFPKEKTYKLLIQQSIQQLNLASEHVERLRREMNELASTLPEYSTVMGIYGVGKTYGPQLIAEIGDVSRFTHREALTAFAGVDPGVDESGQHKSKSNRASKVGSVRLRKTLFQIMTTLLQNAPEADPVYRFLDKKRSQGKPYYVYMTAGANKFLRIYYGKVKECLRNLEQTE

SEQ ID NO: 54680 - protein, 408 aa, unidentified
MSIVFGIDVSSRDSSVCVLQSGATREYKITNDTIGFKTLLIDLKEYAEHPQIILEATGVYSRRITRFLDEYDYDYILLNPLKAKKEINQGLRRNKTDRNDAYHLALAQDQNQHQPNRKEPDVYHQLQSLSRAYEELTHDIISSKNRLHKYLQLTFPELETIFNNSRGVNYWYLVELFPHCQDVRNLEVSTIAKQIKDFKGYGINRAQKLAIKLKHLADLAYPAVDQDDPERDEVVYYANRLLRLTADRERRSEEMIKLAKTLPNRDLEILMSIPGIAEITAVRILAELGDIRRFSNPNKINAFVGIDPGRYQSGEKDSSLRISKHGNAVARKILYRAIGQIDLAAKTSPCHIADYYERKKQFSQTKGFKKIAIASIHKLLRTIYILIITDQMYDYNVANNNQKDFCRN

SEQ ID NO: 54681 - protein, 316 aa, unidentified
MSENLVEQFVGVDVSKATLDLFITPCGRRLHVTYDDEGLARVLSMLKEARATLIVLEATGGLEVRLAGECAAAGLPVAIINPRQARDFAKATGRLAKTDRVDAAMLADFARAIRPQVRPLKEAHTRALDDMVSRRRQLIAMRVQEALRLGTAASKPLQTSLNKHIAWLDKQIAQVDDDLHRCLRASEVWRAKDDLLRAIPGVGAVTSLTLLAKCPELGTLNRREIAALTGVAPLARGSGTHRGKRFIWGGRADVRAVLYMAALSAMRCNATIKSFAQRLKQAGKPAKVVIVACMRKLLTTMNAMLKNNAPWNPQPA

SEQ ID NO: 54682 - protein, 318 aa, unidentified
MPEPIVVGVDIAKKTFDAAIGCTGDILSLPNDDAGHEALIAALIDRTVALVVMEATGGLERHLACALQAAGFAIAVVNPRQARDFAKAMGRLAKTDRIDARSLAEFAQVLNRHADRHKFIKQLPTAQHQELQALVARRRQLIAMLVAERHRLSTSHSVARKSIEAIIEAIRNQLDTVETDLSTHIEQHHAELSRQLTSVRGIGPVSVTTMIAEVPELGILSRREISALIGVAPFNRDSGQMRGKRIIFGGRADVRRVLYMATLAAIRFNQVIQRFYERLVAAGKPKKVAIVACMRKLLTILNAMVKSQKKWDESLHLT

SEQ ID NO: 54683 - protein, 366 aa, unidentified
MKKTSTIRVNGNMIFKGHKLTIGLDLGDRWSFYCVLDEAGQIILEQKLPTTPEAMKQTFGKIQRSLIALETGTHSPWVSRLLRELGHQVLVAHAQKVQLISKSNRKDDRHDARTLARLARIDPELLGPVRHRSAKAQIHLTVIRARAELVSARTALVNAARGLAKSYGERLRKCGTQQVSRELAAELSVELREVLEPLLQEVESLNEGIKEYDARMEKIARESYPQVELLKQVKGVGTQIALTFVLTLEDPHRFPKSREVGCFLGLRPGRRDSGGSQPQMHISKEGDPYLRTMLVQGAHYILGPFGQDSDLRRWGLKLAARGGKNAKKRAVIAVARKLAVLLHRLWVGGEVYEPLRNNHQAMRAVA

SEQ ID NO: 54684 - protein, 383 aa, unidentified
MQPTQAQYFTPDAAVLAVSLELAKGSWKVALHDGRRAKPAVHTVAHEQAAGRLVEAVQLVEATKRKWQLGAATRVVVIYEAGQDGFWIERALAALGYEVKVVDPASLPVTRRARRAKTDRLDAIGLVLSLLAWLRGERDRMQVVRVPAVAAEAQRHGVRERGALQKEIGQHRDRIRKLLRTVGCWEEVKSDFAQRLARGAVVCHDDSELPAQLRTRLERECERLALAVGQLKTLEAALMEALPEAVRERIGRLMQIKGVGQVGATRLVLELFWRDFANRRQVGACVGLVPQPYDSGESRVDQGISKQGNRRVRALLIEMAWLWLRYQPDSTLTQWFAYRTQGSGPSKRGKRIAIVAVARKLVIALWRYLEQGVIPEGAALKAA

SEQ ID NO: 54685 - protein, 346 aa, unidentified
MRILAIDLGKNRSVACIYEAETATARYRKVPTGPDAIERLIRQYCPQRVVIEICSAAGWVSDLVRSLAVELQVANTSAPAWRWSNTKRKTDRDDALRLAQLSSLGQLPQVTPARKVVRQWRALIRYRHHLVRRRTQIRNRIRALFEREGVALPKGKLCWTAVGIGALREESRNLDLLNDTELWRGELACELDALQSVEELVVRVEKKLDAIEGQQARCQLLRTIPGVGPRLAEIVVAVLGDPGRFRSGKQVASYAGLTPRQYQSGDNDRHGRISRQGNSLLRAMLVEVSWVSLQYNDWARAVYERARRGSPARKKIAIVAVARRLLVRCWAMLRDGTTWQPPTVVA

SEQ ID NO: 54686 - protein, 391 aa, unidentified
MKLYTGMDLHSNNTYIGISDEDDKRVFNGRFPNQLPIILKVLEPYEEKIVGIVVESTFNWYWLVDGLMENGYEDRVHLAHPAGFQPYKGLKNSNDKTSAFFLGKLLRLGILPEGHILPKNDRHLRDLLRKRLMLVQQRTDHLLSLKSLLNRNFCLSPNRNELKQISQEDIDALIRNEHLNLSAKTNIDVSQHLESRIKQLEKKILADTIGKPYYLKLLTVPGIGKVLALTITLETGDINRFEDDGNYASYSRCVTSKRISNEKYKGSNNRKNGNKYLGWAFVEAANFMKRYCPEAEAFHTRKCLQENYTLATKSLACKIAKACFYIMRDDVAFDMEKMFGKPLKSKRDKGRGSKPDRGLAAKPRAPIGKTAAADFNSGYNNPDIEEMQDKN

SEQ ID NO: 54687 - protein, 338 aa, unidentified
MKTKKVAGPEMLWAGIDLAKLTFQVAIWGQQDFPEMKGRSFDRTRKAMKPFLAWLRAQAPAGAKLGLVLEATGAFAEEVASWLLDLEPTLWVSIVNPGQTSAFIKSLGFRNKTDDLDAKGLAKYGHDRRPAPWERPTPELAALKDLVRIRMDLINARTAMHLRLKDHQRAAKKASDAMRKVILSLKTQIQNLDDAIKEQVAAFPELAHQLELFTSICGVAQVTATTVMVELGDLRRFPRSRQLTAFAGLSPKKWQSGTSVNGKTRLCKQGSARVRAVLYMAAGCAARFNPDMKATYEGQLAKGKEKRSALGAVMRKLLVLMRAVLIADRAWQPMKQAA

SEQ ID NO: 54688 - protein, 450 aa, unidentified
MAQRSGLTRGDRRRNAKIEELRAVVRADRAILAIDLGEDKQVAALLDHDGRVLGRRVARDKAHALGGLVRWAAEQACRHGFVGVVVGCEPTGHRWRSVMQLADAAGLGFVCVQSLRVHLAREADDYTRDKTDHKDAVLIGKLIARLDCYLPERAEEDWARLRHLGQRRFRLVGEMVACRNQIDDLLSCCWPAALECAVKPFDSTTWLACLAVTVDRCNGNPAKLRRLGRDRFSAAVRRELPRFGAQRVCHKVADRFFAALTDGRGVTAQRRGALERVGMLIDDWRSAIARLGEVEARMLAVLDGLGLTTLVTSVPGVSAVGAAVILAETGDLSRFATARSVVKHAGLNPAENTSANFRGQTRVSHRGRPALRAAAWRAAWGALPHNPVLGARFTHLTTRERDRLAPGQARVACAATLLRWLYAIVTRRESWNPDRAAGIRAGQAGEPVAA

SEQ ID NO: 54689 - protein, 339 aa, unidentified
MKYTPVGVDIAKHLIQVHFIDENTGEVVDKQLRGRDFLEYFSNREPCLIGMEACGGSQYWARELTKLGHKVRLLQARFVKAFVMGNKNDVMDARAIWMAVQQPGKEIAVKTEEQQSVLVLHRTRMQLVKFRTAQINALHGTLLEFGETIHKGRAAMEREFPEALERMKERLPPYLITVLENQYKRLNELDSLIEDIEKQLASVAKQNETCKRLLDIPGVGPLIATAAVATMGEASAFKSGREFAAYVGLVPKQTGSGGKIRLLGISKRGDTYLRTLFIHGARAAALLTKEPGPWITELKKRRPASVAIVAMANKLARTVWAIAAHDRKYDRNHVSIRPY

SEQ ID NO: 54690 - protein, 349 aa, unidentified
MNETVLKQALGIDVSKASLSMCLGIMKSDLSKEFTPGKDVSNDKSGYKGLSKWLKKVSGTGDLPTIVMEATGVYHEGIATYLYDLGYQVSILQSGRVKKYAQSLDQRSKTDALDSKMLSMLGCERSLLAWSPPSALMQTLKALSRERSALIKDKCIEKNRQGAIDSSIYSNKKEIKRFNQRLKLLNAQIAEVELEMSELTAQDLDLTKKLAYLESIPGVSFISAITVIAETSGFALINSGKQLTSYAGYDVVMKESGTYRGKTKISKKGNRHIRAVLHMPSMTCVRVNPTLGPFYQRLKPKKAKPIVALVAVQRKLLILMYTLWKNEEYYDGEFEQKKAANLLETCCTG

SEQ ID NO: 54691 - protein, 370 aa, unidentified
MKMSIGVDLHKTQFTVCLLSEDRKVQDTGMYPTSGNGYRAFLEAAYALSDDGYELTAAVEATGNARYFRNKLLSAGIEVKVVNTSKFKVVNESVKKTDKHDARTLAEFLEKDMLPESILCSQESEDIRRVLKSRSILVKSVVSLKNQVHGLLLGYGIETKKGQLQSKKGRQRILNGLEDHNFYGSAAKAVIPLLDTIDQVSVQVKNLEKVLAQLVENDEDVELLQTIPGVGLITAATVRAYTDDIGRYDSAKKYAAYSGLVPWVQNSNMTIHHGHITKRGPIELRTAFVQMVMGMVRMQKKTGSYRIMMKYSAMKKQKGSGTSIIATARKMSTLVYTILKTREPFDPMKMAFRKEYREMQAAAWEAAMVV

SEQ ID NO: 54692 - protein, 445 aa, unidentified
MSNYYLGCDVSKGYADFIILDSEKRIIEPVFQLDDTFEGHNQFYRFLQDFFKLYPGSILFSAVESTGGLENNWLSLFRRLSDLVDIKSTRINPVGPNALHKASLERNSNDAISAKLIAEYLITYPEKVNYNVDDPYVSLRKQWNLIEMYKKQKTQLLNQFNILLYTSMPFLMKYTRNGIPTWMLFLVNKYPSSSKLARAKESTLAKIPYISHKRACAIIADAKQSVGSTDDDITGFVINSAVEQILHLKNKIEQHKQYMTTRCDLPEVKLLESFQGIGKYSAIGLVLNIVSIDRFPSAKHLASYFGVHPVYKTSGDGKSGFHMSKKGRSAPRKILYMVARSSIIHNSLLKEVYINHIKRGNTKSSALGVCMHKILRIVFGILKHQKEFDPEIDKQNRNKTRIIKKNGTRSDSKQRYQEKSEEAPVSRRQSIKRRKRKQSQSLLEA

SEQ ID NO: 54693 - protein, 462 aa, unidentified
MLQAINPRAAAADVGSEAIYVSIAGAKPVFFGTVTRELHRLRDYLHEHQVETIAMEFTGVYWIPLFEILEESPIKTCLFNGAQIKALPGRKSDVADSQWAATLHAHGLIRCGFVPSAEIRELRDYVRLRTNHISQASTHVLQMQKALELMNVKIQDVLSDLMGASGRRLIDAILGGTRNPQILLELCDQRILSKKEQRMREALEGTWSEQHLFALKQAYSAWKLCQGHIKACDQKIHGVLRAMAAATKASGKEPAGEDPKSDGGDGGMTEPDTKAKRMGKNAPKILGFNSLMEKVLGGRRPGRLPGLTQYTVLQLVSETGTDLSAFPDKKHFTSWLGLAPGKRQSGKRSRRESRKGARAGQIFRNVAQTVGRTLDAGLGGFYRRIRAHKGGLVASKALGRKLAALYYDVMTKGLEFAEEGLKKSEERYRAQEKAKLERLARKMGMSLQPLTIEEPQIQAATS

SEQ ID NO: 54694 - protein, 366 aa, unidentified
MDPIYIGVDFHARQQTICYLKTETGELVISELLHQDKEQVRACYQQFQGHVIIGLEASGYSPWFETMLEQLGCEVWLGDATEIRRRARWRQKSDRRDAELIWDLMVHNEFPRLHQPLPESREVLRMLRYRQKLIKFRTMSKNSLQAIALQAGLAKGRRLFTTAGQQELRTAEMSPVLQWQRDHWFELLQPLNQQLLETMVWFKQQSKDDVRIKRLRTHPGIGLLTSLCLLHTLQPVSRFRNQRKVVAYAGFDPMVRSSAERAIYLGISKAGSRMLRYLLVEAVHTAIRYDEDLKRFYKRVAERRGRPKAKVAAARKLLIRAYIMLRDEIDYAEFRRRAVAARLARRGQGPTNVPEVLIGQSASPGA

SEQ ID NO: 54695 - protein, 441 aa, unidentified
MTEFFLGIDVSKGYADFVLIDSQKNIIEKNFQLDDTFQGHNLLFSFLQSFFLNNPQSNIIAAVESTGGYENNWVSFIAKLKDDFPICVARLNPFGVSHSSKAELKRVITDKISALTIAEYVINHRAKISFVGEDYFAPLRKQWIYIKLLVKQKVQLYNQLEALLYTANPELITYCKHGMPNWVLMLLKQYPSSKSLAKASPSVLSRIPYVTVQKAETIISNAKISVASQTDPVTGALLKSVVEQIIFLDKTIKAQEKKLTDSCAFPEVKLLSSFIGIGAYSAVGLLLEIRTIERFSSSKKLAAFFGLHPVYKASGDGMGSMRMSKKGRREPRLILFNIARTAINCNPLIKEVYKNNLKKGKSGLSAIGVVMHKILRIVYGMLKTNTPFNPDIDRRNTEHAAIKKPKVVVLKSRRFQEFDSLAPVSKKQNKKREEQKASPKE

SEQ ID NO: 54696 - protein, 313 aa, unidentified
MNTVKYIGMDVHLATISMAVLDGKGKLIMEVTIATQAGALLDCIRGLSGTRQVTFEEGTSAHWLYTLLEPQVAKAVVCDPRQNPRRRGEKKSDRLDARKLAEGLRLGTLKPVYHGNSLGPALKELARSYRTLVSDTTRVMSRLKALYRARGIRCAGTRVYSPRFRDQWLEPLREPGARARADLLYKQLDLLLPLRQEARAAMLAESRKHPAQKILCSIPALGPVPVALLLALLQTPYRFRGKRQLWTYAGLALVTRTSADYQRVDGQVTRARKPALVLGLNANHNHTLKGLFKDAAASALAHPGPFKDFYPRE

SEQ ID NO: 54697 - protein, 337 aa, unidentified
MGLYCWIDLHSNNHVMTVIDEGDRRLYERRLPNDLAITKAALEPFRAQLVAVAVESTFNWYWLVDGLMDAGYEVRLVHTGAVVQYAGLKHTDDQHDAFWLAHLMRLGILPTGYIYPKGKRGLRDLARQRMRLVQHRASHITSVQSQVWRSTAVRLSGHTIKGEGKQPWPELRDADLALSIETGRAAIDALTVQIERLEEVLLKRVGLSPQFQVLKTVTGIGPILALTIALEVGDIKRFPGVGEFASYCRCVDSQRLSNAKKKGEANRKNGNPYLAWAFMEAAHFAIRYLPAARRFYERKCRQRNALLAVKALAHKLARACFYILRDQVPFAPERLFV

SEQ ID NO: 54698 - protein, 392 aa, unidentified
MSAVIIGVDPHKRSNTLLVLDAKENVLATQRFVNDRDGHRALKAFVRPWKNRTWAIEGATGCGLGLAQRLAAEGETVLNVPAKMAARVRAFDGGSGRKTDDTDAYAIAVAGLRGRNLKLVQPDESAAVFKLLADRRQQLVEQRIMTVNRLHQLIQELLPGGASKRLTAKKARELLSTIRPRQCVAKARKSMALEQLADLEQLDTKIKQMACRIADALKEHPSHVQQIHGIAAVTTAIVLGEVGDVRRFPSKHHFASYTGTAPVDASSGDVVHHRLNQGGNRRLNFVLHVAANVQLATHHPEGYTYYQRKRAAGKSHLEAMRCLKRRLSDVVFRALQDDLAKREAADPVGHSGATLQSSASDPTPMVSPSDQSQPGPATTDATPRQQRSKVPA

SEQ ID NO: 54699 - protein, 344 aa, unidentified
MDISVLGIDLGKNVCSVVGLEPSGAVVMRRKVRRETLIALAEKLPPCVVGMEACCGAHHLGRVFAAHGHDVRLMSPEYVRPYIKAQKNDDRDAEGIAEAATRPTMRFVELKSQDQLDMQTLHRSRDRLVGERTALINQLRAILLERGMVAPQGKRKLEQFLAVLMDEQGGAGLSPRMIVLVADARTQWAEIDRRIAAFDGEFVRWVKENEEARRLMTIPGVGAIVASALVAAVGQAESFERGRDLAAWLGLVPRQFTTGGKAKLLGISKRGNKYLRRQLIHGARAALPYVAERDTPLGRWAKGLASRAHRNVAIVAFANKLARIAWAVLRRGERFAVTGMPVAA

SEQ ID NO: 54700 - protein, 346 aa, unidentified
METIVRIGLDTSKSVFQLHGVDVTEQPVLRRKLRRGQVLEFFRRLPPALVALEACGASHYWARELQSLGHEVAMIPPQYVKPYVQRGKSDAADAEAICEAASRPKLRKNFVPIKSPEQQGTQMLARVRNQFIGRRTQLANSIRGYAAEFGFTAPKGLSRLQQLLIDIQADATVPDLTKELVDALAAELARVDDQITKLDKKLMQLHRSNEMSRRLAAIPGVGPIGATLLSIKVVDAHGFKSARNFAAWLGLTPKNHSTAGKNRLGVITRAGDGMLRTVLVAGATAVIADMRRRETRSWPWLKDIIARKPPKLVAIALANKLARIAWKLMVSGERYRPASNVVPMPT

SEQ ID NO: 54701 - protein, 410 aa, unidentified
MEVIWGCCAGLDVHKDSVEACVRRMSAGGKVEHEVRHWGTTTRELMAMAEWLGSMGVTQVAMESTGVYWKPIFNILEARFEILLANAHHLKNVPGRKTDIRDCQWIAQLLQHGLLKGSFIPPRPQRELRDLTRQRTQLIDEGSRISNRIQKVLEDANVKLGSVASNVVGASGRLMLEAMVAGEDDPARLADLAQRRMRSKIPQLEQALYGKLTEHHRWMLKLLLDQLEATEQFIARLDERIAELARPQQPVLEKLDAIPGVDRRVAEVLMAEIGPDMTPFPSDAHLASWAGISPGNNESAGKKRSGKTTKGSRWLRQALVQAAWAASHKKDSYFQAHARNLMHRRGRKRGLVAVAHSLLTVVYHMLKEDTAYRDLGSQFLDRLRARHLIRFHVRRLQNLGLQVTIAPQVA

SEQ ID NO: 54702 - protein, 419 aa, unidentified
MEADGFVLFAGIDWATEKHDVCLVDPAGRVVEERAFPASAEGLATLADWLLEEAGGEPPGRVAVGIEIPHGPLVETLVERGFAVHSINPKQLDRFRDRFCASGAKADRRDARVLADSLRTDARAYRLLSTEDPDIIELREWARMSEDLQRERNILGNRTREQLRRFYPQALDLTDDVGEKWFLDILEAAPTPADAHRLRPARVAKILKARRIRRLSAEDVLRVLRGPAVHVAPGTVEAATGHLRLLRERLLLVQSQLAECHAHLDAICKRLGPVGESGMGGRENEPRVVEILRSLPGAGRIVAATLLAEASRPLMDGDYQAIRTLSGIAPVTRRSGKSRIVVMRKACNPRLRNALYHWARVAAQCDVAWRTKYLALRARGLSHGRACRGVADSLLRVCVAMVKTRTLYDPARPRLVRAA

SEQ ID NO: 54703 - protein, 385 aa, unidentified
MRGKSFIPGDYDVFTGLDVSKKSMSVTFTNHQGFIRSLNMPHKVEPLLHYVRKHFPDQKIAFVYEAGPTGYGLYDGLVAQAYPCLIAAPSMIPKAPGQRVKTNRLDSKALSESLRGGQLKSIHIPSATYRQLRHLTQLRDVLVSELAGMKQRIKSLLLFEGIEFPPAPAGSQWAFLVKDKLRKLPCSGTVRFKLDQLLDSLEFNEKQVLKTITEIRRFCRNDPELSQCIKYLMTVSGIGWISASQLLARIGDWRELNNIRQLAGFLGLVPTEHSTGERIDRGSITRTGDERLRSKLIQASWSAIRQDSELREFFRSVCRKHPREVASRVAIVAVARKLTVRISVVLMKQRPYEVREKVHSAPLTQEETSPQGATRRLTEPGEKNS

SEQ ID NO: 54704 - protein, 393 aa, unidentified
MDAHMTQVDDLSRSLAAFDQNSTLTIAIEMSAASWLVAGVIPGIDRLPVKKLQPDPDGLLRLVERWRAEAVKAGRTIARIVLAYEAGRDGFWLARWLRTRGVEAHVIHSTSVAVSREHRRAKTDRLDTGMLIRVFLGWLRGERGHCGMVAIPTLADEDAKRPSRERENLVAERTRISNRLKSALARLGIRGFKPTLRKAPQRLAGLRTLEGMPIPPNTVAEMQRDMARLAVVREQIDEIERARLQALQQAAKSGPHAMVRLLARIVGVGIETADMLVHEVLTRNLRDRRAVARYVGLTGTPDESGSKRREKGLAKSGNSRVRRGLIQLAWRFLRFQKNSALARWYRARTEGPKGARKTTMIVGLARKLLIALWRMARTGVVPVGVELRQLASA

SEQ ID NO: 54705 - protein, 426 aa, unidentified
MNCSQNKKLNQVTEETLVIGIDIAHETQWARAFDWRGVELGKVFRFENSKEGFEAFGRWVEKLKHSTGKTAIMVGAEPTGHYWFNLASYLKESGMKLVLVNPHHVKKSKEMDDNHPSKSDRKDPKTIAKLVCEGRYNEPYIPEGVYADLRSMMECRRRVCKELNQIKNRIQRWLSIYFPEFVKMYCKIDTVSGLIVLENAPLPEDILALGAAGLNELWRKSKVKAVGMKKAMSLYEAAKNSVGCSGGNGARLELRLLLADYRIKMEQYAQIMAEVEKLVEQVPNANKLMEIDGVGLVTIAGFVAEVGDIGRFQSSKQVQKLAGLALRENSSGQNKGQTTISRRGRARLRAVLFQAVMPLVSKNQEFMEIHRYYTTRSKNPLKKKQSLIVLCCKLIRVFYALLTKGSAYDPIKLATDIRRTAQPLAA

SEQ ID NO: 54706 - protein, 334 aa, unidentified
MNCVGIDVSHKELVVVVSVKGKARKAKSYKNTAAGFLTIIQLLSKLKGPVKVCLEATGVYHFDLAVSLSRAEDIEVMVINPKVSSNFAKVLMKRSKTDALDAEILAIYCERMPFEAWIRPASEKIALRAHSRRMAALSKLKTQNKNQLHALISTEETPELIIEQINELIAVLDQQIGVQCDAALELIKGHTELKASFALVTSIKGIADTSGIQILAELMILPPDMSAKQWVAHAGLDPRAFESGSSVSKKPRISKAGNKYIRQAIYMPALVATRFEPHIKGYYLHMINDNGLKKMQAICAVMRKLLHAIHGMLKANKSFEGERFYKFPSETTYS

SEQ ID NO: 54707 - protein, 428 aa, unidentified
MEPSISTGPSAAVTAYIGIDWADQKHAIALRSAAEPSKVQHQVVEQKPEALMQWIGQLEQRFGAQGKILICLEQSRGALIYHLMGYEFLELYPVNPLQLARYRETFSPGGAKDDRPDSELLCELLYCHRDRLRAWKADSALTRKLAFFNEGRREAVDQRTALSNAIKSQLKVYFPLALELLNAESSTALAADLLLRWPSLEVLQKQSAHTLRKFFYGHNCRGETKMLQRLELIQQARPLTQDSAVIEPAAFRVQLLARQLKSLLADIARYDQKIAQLFAAHPDRLLFENLPGAGAALAPRLVTAFGSDPTRWDSAQEVATLLGIAPLRRASGKNTGKKASVHFRLACPKFLRQSLHEFAGCSIRYCSWARACYETQRARGKAHHASVRALAFKWIRILFACWKQRTPYDPQRYQSALQHRGSPFASAC

SEQ ID NO: 54708 - protein, 422 aa, unidentified
MENEYRFYVGIDWATEAHQVCVLDAARRIVSERSFAHAGDAVAAFAEWLNELAGDDPGGTAVAIEIPRGAVVETLVERGFHVYAINPKQLDRFRDRHGVAGAKDDRRDAFVLGDSLRTDRDCFRRVRLDDPVVIQLRELSRVDEDLKRESNQLANRLREQLHRFYVQALKLCPAADEPWLWSVLELAPSPVAAHGLRTKRVERLLREHRIRRVSAAQVIAALRAPALQVAPGVVEAATEHIGLLLPRLRLVHSQLQRCGERLEALLDQLQATPDQGPKQREHRDVEILRSLPGVGRLVAATVLAEASWALVERDYHALRAHAGIAPITKQSGKHRVVLMRYACNVRLRNALYHWARVAAICDPASKTYYAALRGRGHSYARALRALGDRLLRVLIAMLKNDSLYDASKRRSRPTPLPLEDVA

SEQ ID NO: 54709 - protein, 359 aa, unidentified
MNEITRVGIDLAKRVIQVSAVNSAGLRVANRALARDKFMLWCAQLPAGCMVAMEASSSAHHWARRLVALGLDARIIAAHLVVPYRLQGKSGKNDANDAAAICEAASRPHMHFVPIKSVEQQSMLCVHRLREGFKSERVACINRIRGLLAEFGLVFSQKPEALRQALPDAMEDADNELGGVARLALQRAYAQWQELDAHLHWCDERIAAHGKASEQVRLARQLKGVGPITASAVVATVGDFKQFKNAAQFGAWLGLTPRQNSSGGKNNLGRITKRGDMYLRTLLIQGAKSAVMTAHTRDDPISRWAHALRERSGWQKAVVALANKNARILWAVFVRGLAFDARHVSTKPDRAIAIAIAAT

SEQ ID NO: 54710 - protein, 398 aa, unidentified
MEVMDAAGRRLSAAKLPEGIAGMARFHAMIAAQLDPDADLDAQAGQVLIGIETDRGPWVQALIAAGYRVYAVNPLQAARYRERLGVSGAKSDPADAHLLADMVRTDSHQLRVVAGDSDLAEAVKVVTRAHKTLIWERTRHTLRLRSTLREYFPAALAAFEDLTDADTLELLAKAPDPASAARLTTTQIMAALKRARRHHRDRRAGEIQAALRTEQLGQPAVVAGAYAVAVRAQVAILGVLNEQINLLQEQVEAHFGRHPDAEIYTSQPGLGQILGARVLAEFGDDPTRYGDTRARKNYAGTSPITRQSGKKKVVLARYVHNDRLLDALGGQAFAALTRSPGARAYYDKQRDRGLGHRAALRQLANRLVGILHGCLKTGTRYDEATAWSHAQQDQQVAA

SEQ ID NO: 54711 - protein, 343 aa, unidentified
MEDCNIVGIDLAKNVFQVHASDEIGRRLFSKKVSRGQLLKLMSTIKPCVVALEACASAHYWGRQITELGHEVKLIPPIYVKPFVKRQKNDAADAEAIVEAASRPTMRFVAVKSADQQAAGMAFKTRDLFVRQRTQLTNALRGHLAEHGVVAPQGIVHLKRLKAALSDEKNELPATVVIHAELILDQIATLQSHIEALEKEILAVSRKEDLATRLMTIPGVGPITSAALLAFAPDPATFRRGRDFSAWMGLTPKQHSSGGKEKMGRTSKMGQRDLRRLLITGAMAVVRWAARKGAQEGSWLARMIDRKPKMLIAVALANKMGRIIWALMAHGGTYNSHRGTAQT

SEQ ID NO: 54712 - protein, 455 aa, unidentified
MAKRRQSKSTKKQVAALSKINYNVSGIDLGSEEMFIAVIGEDVRKFSTFTRGLEEAAEYLESENIEKVVMEATGVYWIPVYEYLESKGFNVSLVNGAHAKNVPGRKTDVLDSEWLRELHTYGLLRASFIPDEKIRELRYYVRLRDDNIAMGATHINIVQKNLDMMNIKLHKVIDSIMSKSGLLIVQAILDGERNPERLWDLCEEFINSKKKEDVIHSLKGNYRTEYLFGIKQALDMWKHYQALQAQCDTEIEKLLNQMTLDKEDPQNLGTVKPIKKRNKPVIEDFHLLMTKLTLGKDTTTIAGINDYSALKIIAEIGTDLDKFQNEKHFTSWLGLAPSAHQSAKKKRNKGRRHCNRAGMIFRQIAVNVGNGKHTALSSFYKRIRARAGKMIAIKATARKIAVYFYNLLTKGMEFVEEGIKRYEQRYSEQQEKYLQRKATEMGYILVKSQKGKTNI

SEQ ID NO: 54713 - protein, 326 aa, unidentified
MAKQKQTQEVSFEEVVERGCGLDVHKKEIVATVSGTGIESETRTFQSTTRSLTELKEWLLALGVTHVAMESTGVYWKPVMNILEPGGFTIMVVNARHIKYVPGHKTDKKNSAWICKLLRAGLLKGSFVPGRNQRDLRDLTRYRRKLVQQQSAEHNRMIRIFEDANLKLSSVFSNIRGKMCTRVIDAVIAGETDPQKLAALCTHRRLKASKEEIALAVEGCFTEHHKFMIRAIRTSISNIEAEIDHLDKEIERRMQPFEAQIQQLCEIPGIDVTSVNELLAEIGVDMEVFPTAEHLTSWAGLAPGDNESAGKKKTHTPTTATKPQKR

SEQ ID NO: 54714 - protein, 403 aa, unidentified
MIFVGNDWAEDHHDVYVMDEAGKKLAAKRFGEGIEGVTALHALLGAHAEDPAQVRVGIETDRGLWVNALVAAGYQVHAINPRAAARYRDRHHVSGAKSDAGDAKMLADLVRTDAHNHRLVAGDSAQVEGVKVIARAHQNLVWSRSRETNRLRSALREYYPAALVAFEDLDHRDALAVLGRAPDPLTGAKLTLSQIKAALRAGGRRRYLDATAERIQEGLRTEQLAAPAPVVEAYAASTKALVGLLVAFNTQIADLETQLEQSFEQHPDADIYLSLPGLSDVLGARVLGELGDDPERFADAKSRRNYAGTSPITKASGKKKIVLARYVRNKRLYDAVDQWAFCSLTGSPGARAYYDERRAADYEHHEALRALGNRWIGILHGCLKHGTPYDEHTAWAHRHHAAA

SEQ ID NO: 54715 - protein, 311 aa, unidentified
MSEKALFVGIDVAKERLDVAVNPSGETRTFLHDHKGLSSLTTYVQSLAPSLIVLEATGGYHKTVLSTLAAEGLPAVAVNPRQIRDFAKATGTLAKTDRIDALVIARFAEAVRPEIRPLKDEETERLQALITRRRQLIEMLTAEKNRLAMAPRWTRKDIRAHIQMLERQLKRIDDHLKDLIDQSPLWRQKDQILQSMPGVGPVLARTLLAELPELGTLNRRQVAALAGLAPFNRDSGQFRGRRMIWGGRAHIRTVLYMSAVAAARFNPVIRAFYQRLREAGKCFKVAITACMRKILITLNTMIKNNTCWKYA

SEQ ID NO: 54716 - protein, 376 aa, unidentified
MKIIACDYHPSFQQIAMLDQNTGELSGRRWAHPGEAEAFYRGLQGPVRVGMEAIGNALWFERLLAELGHELWVGDAARMRASAVRPQKTDARDAAPLLQLMVQDGFPRIGVPSPAERDLRQLLLHRHKLVQMRTPVKNQLQHLALHQGVRRQHRLWSRAGLQFLEQLRLPSWTARRRQDLLALRQELERSVAELDQAVEAQALARPEARRLMSQPGVGPVVALAVVLTLGPVERFRCGKPVASYFGLIPRESSRGGRQRRGAISKQGSPFVRALLVQAVHAAVRHDSELRRQYLRLAQRKNRAVATVALARQLAVRWYGILRRGAQASPATGSMQGRPSHSLAEVPEPMRCVGPLPPDVTAWGVHRNNHGRDLVIE

SEQ ID NO: 54717 - protein, 403 aa, unidentified
MNNVAGIDVSKGKSMVSVLRPFGEVVAKPFSIGHTGSELKELADYLKSLDGETRVVMEHTGRYYEPVARFLHEEGVFVSAVNPKLIKDYGNNTLRKVKTDKADSRKIARYGIDNWAELRQHTPMDTIRMQLKTLNRQQSLYTKTKTMMKNNLIALLDQTYPGVNALFDSPVREDGSQKWVDFATTFWHVDCVRNMSLTAFAERYRKWCKRHGYNFSQSKAVEVHAGAQDLIAMLPRDALTKTMVRQAIDALNAVSASLERLKAEMQALAAQLPEYPVVMAMHGVGDSLGPQLMAELGDVTRFTHRNAITAFAGVDPGADQSGTHEAKSTRVSKSGPPELRRALFLVMDCLLKTQPQDDPVYRFMDKKRAEGKPYLVYMTAGANKFLRIYYGRVKEYLAQLENS

SEQ ID NO: 54718 - protein, 354 aa, unidentified
MKIRRVGVDLAKNVIHVHAVDRQEKVVWRRQLRRASWLNVLREKVEPGCEIGMEACAGAHHWARKLQAYGMVVKLMAPQFVKPYVKSNKNDRNDAEAICEAMCRPTMRFVPVKTVEQQDIQAAHRIREGLMSQRTAKANQIRGLVAEYGLVAPKHLSQLRAALPGWLEDADNGLTARFRRLLPGLWGDLIELDRRIGELDTEIETVAKSDPVAQRLQQLRGVGPLIATALVAAVGSGEQFTKGRDLAVSLGLTPKQHSTGGKERLLGISKRGDSYLRKLLIHGARSVIYRSKDKDDGLSRWVKGVAARRHINVACVALANKTARIAWAMIRNGADYQPQWAAQPLRATEEQATT

SEQ ID NO: 54719 - protein, 339 aa, unidentified
MAIITIGIDLAKNVFAVHGVDETGKPNLVKPKVQRADLLALIVQLPPCLIGMEACSGAHHWARLFQQHGHTVKLIAPKFVAPYRLGGKHGKNDAADAAAICEAVTRPHMRFVPIKSADQQALLTLHRTRQGLVEDRTATYNRIRGLIAEFGIVLPQKVERLRREIGAHLEDLPGWANRCIGDLLQYASQLSERIDSYSDAIAQQARQDDRARQLQRQPGIGPTTASALLASIGAGHDFDSGRQLAAWIGLVPGQYSSGGKTRLGRITKAGDAYLRSLLVMGARAVLAGLGDKQDRYSRWARNLQSRRGYWKAVVAIAAKNARMAWAILRYGHDFTVLAD

SEQ ID NO: 54720 - protein, 389 aa, unidentified
MKIYVGIDIAKLNHFAAAISSDGEIIIEPFKFTNDADGFQLLVSKLESFDKNSLIIGLESTAHYGDNLVRYLVTELYQVCVLNPIKTCQMRKNNVRKTKTDKVDTYVIAKTLMIQDNLRFVSFFDLDMMDLKALGRFRQKTIKQRTRLKIQLTTYVDQVFPEIQYFFKSGLHQHAVYALLKEAPSPKEIASMHMTHLANLLKVNSHGHFTKEQAKELRVLAQKSVGANDSAISIQITQTIQQIELLDSQLEKIEAEMTDIMKFNDSVIMTIPGIGYINGGMILGEIGDIHRFSNPNKLLAFAGLDPSVYQSGNFQAKTTRMSKRGSRVLRYALVNAAWNVVRNNATFKAYYDAKRAEGRSHYNALGHCAGKLVRVIWKMLTDNVEFNLK

SEQ ID NO: 54721 - protein, 401 aa, unidentified
MRVMYERVAGIDVNKDMIKVGIRGPGHRAWTRTSEVLEFRTFYGVLQTVARDLRKRGVTHAVMEASGVYTEPVYYALAEQDFEQVAVINPAHAKALKGHKTDAKDALRLAELFECGLLRGSYIPSQALKDLRDLTRYRTKTVQARTSEIQRLAKALESAGIKLDSVVSDLTGKSAGLMIESLIDGERRGQVLADLAIGRMRTAGKLADLSQALTGRFTEHHAALCRLHRDRIALFSAAVEDLEARIAVKATPCQRELELLKSIPGFGDAVAQARLAEIGPAPHEYFASHEKLASWVTLCPGNHMSAGKRKHGRTDDAGTYIKPMLVQAAWSAIKTDQDPEPAASQVPQAGAPLRWPEEPGRGEESDRRDRPHPADDRLPGAQERQAVPGPRLRLLHPAGVP

SEQ ID NO: 54722 - protein, 436 aa, unidentified
MAKVFIGVDPHQLSATIEVVDERETVLATGRFGTDKAGYAAMRKHVAAWPERVWAIEGSNGAGRPLAQRLLADGQDVVDVPAKLSARARLFDTGHNRKTDAHDAHAVAVVAVRTQGLRVLSYDEALEALRMLADRREELTRQRVQTVNRLQRLLSELVPGNGKKDLTALQAKAILASVRPRDLPGKTRRRLAVEQLAELVAVEKRIRALTAELKQMVKASGSGLMDLRGVGPVVAARVLADVGDIARFADRNRFASWTGTAPIEASSGEIVRHRLSRAGNRRLNHMIHIAATTQIRLETPGRAYYRRKLAAGKTRAEAMRCLKRRISDALYRQLLADAKTVHAAGPDAGPGGHRGATLHSSAAGSHPHTGTSDQPLPGPAHPTLPATKPHANPCAASAPRPSRRRAGAVKVERPTGRTTLTATSAGAHSAAPKPPS

SEQ ID NO: 54723 - protein, 428 aa, unidentified
MARHQDRWKRAKTLHLSSDVSGFKHLRRYLDKFSTLPTDFLILLEPTGGYYALTLLSYLIGEGYTVLQVENKAVKDYREKIFGSETKTDDTDARLMARVGFLHEMVGEEFSIQPVRLTNPDDAALRVMVRDLVKLQKEITRRFNQLQQVVAVTFPELKTFFTTSTARPAVRALLERFPTPQDLSAASPEEVADVLRAGRAYSHAKRADELLALAQSSAGVKVIGHHLWRQGWIIQQLPVLEQARAELIQQLRQATAGHPYTPVIESLPVKSPIWTAALIAVIGNVERFSNYAEFKAYMGWYPRVAQSGTSLNNSGLAKKAVRLSRNVLGQMTAVLLAPTVRTTPFREFYERLVARGMKPGTARGHMAGKLAVVLYGMLRTMTPYDEQKHRKALGLPDPQIESVESPVEAPLELVETLDDEQDILVEVA

SEQ ID NO: 54724 - protein, 384 aa, unidentified
MRYIALDVHQRYCEGAELLPGGKIRRFRVPTTREDIEGFARQLGPDVRLVMEATGNALWIYNLISPHAGRVLLANPLRTRAIAEARIKTDRLDAETLVRLLAADFIPEVWVPGPEQRQLRVLLQYRARLVQLRTRLKNTVHAVLARNGYQSPVSDLFGRRGRGFLKTLTLPQGETIILQSALGLIDALDKELKALEGELCARAKTMPQVRLLLGVPGLDVVSIMTILAEIGDVQRFSSPKRLASYAGLVPQVHASGKRRYTGHITRAGRSVLRWILVQVAHRAVRVPGPLQAFFSRLRARKGYKVAIVAAARKLLTLIWTLLTRGEPYRAADPLRTQVKERRMERRAVPYPVAQASDLARGVRRLVVEELPLPLAAEERACAFS

SEQ ID NO: 54725 - protein, 340 aa, unidentified
MGRYVGVDLHRNRFAVCTLAENGRHYHRSWWIKDLDKFAATLRSSDAVAVEVTTNTELFYKVVRPCVKHLAVVNPGQFKVISQSVKKTDRRDAEILAEFLSKDMLPEVRMKNEEQARVASLTKTRDLLVKQRTALKNKINNLLAAYGVLLPKESMSSQRRLREIPKYALNASTEVELRVLSDQVLSLNESIAKLERMISAEGPKLKGHRNLKSIKGIGDVGASILASVIGDVNDFSDAGKLASYFGIVPRVNRSNETEHHGRITKRGSKLGRTTLVQCALVAKRYSPYLAKYYERIKKRRGAGKAIIALARKFLSIIYLTLKNDWIFEDFPNFALVDDAA

SEQ ID NO: 54726 - protein, 318 aa, unidentified
MNDKIEFDQVIEKGCGIDIHKSVLVSTVQGKGIKTETRSYDAFTESIEQLRDWLKSLGITHVAMESTGVYWKPVYNILENDFEIVLVNARHLKNIPGDKTDKKDSRRIAKLLLAGLLKGSFIPPKPIREMRDLTRYKRRLIEQIASEKNRIHKFLEDANIKLSSVVSNMSGATATKLIDAMIEGEGRVEELAKLRHGKMKASEQELMVALTGNLTEHHRFMLKMVKQSIKDKELLISELDEQIDNKLKENEMVLDAELLSTIPGVDKEAAAYILSEIGNDMERFPDEQHLASWAGLSPGNNESAGKKKAQRLRMAISG

SEQ ID NO: 54727 - protein, 337 aa, unidentified
MIYRWFVGIDVSKAELAVCIFDAIENARYRLTVRNNPQGFAKLVRTLLARQVDVSQAVVCLENTGVYDDRLVAHLHENGWAVSIGKTTMLKSVRPEHHRKDDGFDADLAAEYAYRYQDKLRLHIPSGPVIEELRALYRERRRLITRRATLDQLLGEAHLYTHPTHNLVASWKRVSAFYKREIEELEACMFDLVQQDEDVHRRFRQMKGVEGFGEKTALMWVSLFFGQKRLNARHIASRFGHAPHGDQSGIMKKPDRSTGHGKGEVRRLLTMCAWSAGKNKPKFIAYKRKKLAEGKNRTLITNNIINKLIRVACAVWNQDGEFDPNYRSPFEKMTPAA

SEQ ID NO: 54728 - protein, 405 aa, unidentified
MPYILALDVSMGHSYSVLYKDDTCLFEDEIEHTQRGFHALLEEIQHLPERPLIVFEATGIYSRPVEKFFQDHHFSYCLLNPLEAKKQMEENTLRSWKTDKSDAHRLAQTHLKNQRQPKEVQSNFYLEMRDLARFYQEIEKKITRLRMDLHNCLQLTFPELEQFFSNRLTPYALTLIRLFPHPDFVLASTRTKIKNKLINETRKKISANRAEQKAGQIIHYAQCAYPAVEKDSIHCQKTIYYAELLQDLLEQKEALATQMIKKAEGSPCFLLYQTFPGIGALTAALLLGELGDITRFKTHKQLNAFVGIDIRRYHSGKYTGQDRINKRGNPKARKIIFFTIRNMIRQQRAAPNHIVDYYYKLKKQPIPKKDKVATVACMNKLLKCMHAMVRAHTEYDYAYAVSVDH

SEQ ID NO: 54729 - protein, 356 aa, unidentified
MIIIGCDFHTRFQQIAMLDTETGEVVEKKLEHESGEAKRFYEGLKEPTLVGIETTGYTRWFAEMLAELGHELAVGEAAAIRKKQARKQKYDRRDAQHLLNLLVKGDFPKIWLPPAEERDVRVLVEHRHQLVELRTRAQNGLQAIALSYGLRRRSRLWSKAGQKELQKIPLREGMRRRREDLLQLVRQLSAWIKELDQRIEQEVARREDAQRLMTHPGVGPQTALATVLVFGPVERFPDRQHLTSYLGLIPEEDSSGGRQRFGHLTKQGNRLMRFLLVEAAQTASRYDPRLRRAYRRLVFRKGAPIAKVAVARKLAIRLYIMLRDGIDYEEFCRRGPVPDGAGPGSHAGMLGDVALV

SEQ ID NO: 54730 - protein, 347 aa, unidentified
MHKVDRKEEYGAQERERRGIVGSCLGIDVSKASLDVVLLGEDENREAAQFENTRTGFNKLQRFLKKRVKTTLHACLEATGHYGDEVALFLYEAGYVVSVVNPAQVKSYGDSQLRRTKTDASDAALIADFCRTQKPAAWQPPAPEVRELQALLRHWEALIHMRQQEVNRLQAGIESPVVLEAIQTHISFLDQQIDDLRTRVRQHFDHYPQLRQQRDLLTSIPGIGELTAARLLAELPHWSAFSSPKQVAAFAGLSPQQRVSGTSVRGRTRLSKRGSARLRTALYMPAISAKQHNPVLKAFAQRLLAAGKAKMAVLAAVMRKLLLLAFAILKSGRPFDPNYAARFVLTT

SEQ ID NO: 54731 - protein, 344 aa, unidentified
MKNYAGLDVSLEETAIAIVDETGRTVREVKIASEIEAIDAWLGKTGIAIVRLGLEAGPLSSWLYAGLKERGWPAICIETRRLRAVTRAMPVKSDRKDAEAIARVMRTGWYRAVHVKSLVSQQLRVLLRHRKILQAKRQDLENELRGTLKNFGLKLGRVGRAKFAQRVGELVAGEPWLERLALPMLAARTALLESFGELHALVLRIVKADAVCRQLMTIPSIGAVNALAYKTGIDDPTRFRHSADVGPHFGLTPRRYQSGETEIVGSISKCGDAMVRGLLFEAAMTLLHRVKAASALKRWARALAKKIGTRKAAVALARRLAVIMHRMWLDGTDFNPNLIRAAAG

SEQ ID NO: 54732 - protein, 427 aa, unidentified
MIPAVLERVAGIDVHKKFLTVCVMMGPAYANPEVKKRKFGTLNAEVEELRAWLRELDCQPVVMESTGSYWKPVFNILDDGWFQVTLANPQQVKNLRGHKTDMKDCVWLAHLHRHGMIRASYIPPRAVRELRDLTRRRKQLIRNAADERNRIQKLLEEANVKLGNVLTDVLGASGTAILVALIQGQTSPEQMARLAKPQARKKIPQIQAALEGNRLTAAHRALLQQGLEHLAFLDEQIQQMEDSIQRKISASGFAQVNRRLQTVTALKADSAAVVLAEIGPDVRAFPNSKKLTSWAGVCPGNNESGGKRKSGRTTKGNPYLRDMLLEVAWGSSHKKNSAQQQRYLHLTPRKGHKRAILAVAHATLRAVYWVLSTGQDWVDQSQSPDTRQTSRLIRHHTRRLRRLRCILHPSNKKAPLELAENQELMDT

SEQ ID NO: 54733 - protein, 360 aa, unidentified
MISERTSVGLDVHARSTVAAAIDERSGELIQRRMGAGTEEIVAWVTSLPGPVAATYEAGPTGFGLARALTAAGVRAVVAAPSKLQRPVGDRVKTDMRDAVHLARLLRLGEIVEVTVPSVQAEAARDLVRAREDARGDLMSARHRVSKLLLRQGIQYAGGKAWTVAHDTWLRQQRFELTGLQAAFDAAYDAMVQAVDRRDRLDTAIKEMAADSEFTAVVDRLCCLRGVSTLTGFALAVEVGDWSRLDGHRIGAYVGLTPSESSSGASRALGGITKTGNGHARRLLIEAAWHHRPAYRPSSPIMRARWDRASAAARARGHAGNQRLHHRWQTFQARGKRTVVANAAIARELAGWCWSLAVMT

SEQ ID NO: 54734 - protein, 409 aa, unidentified
MRYYLGVDWADQEHAVWSLDDAGQKVAARMVPHTAEGLSEWGRELDEWRGQEIELWAAIERPEGRVVDMLLDHGVVVYPINPKALDRARDRFRQSGAKSDLFDARVLADFLRTDHAHLTALRPSSEAAQELKALTEDCQRLIRQQTRLVNQLTATLKAYYPRALDVAELPTALARGFLQAFPTPETVTRLTARQWQRWARAHRLRETRTAELWALLQQPQLPVPAHVVRAKARLMLALVAALTPVVEAIAAYREAIEDCFADMPAAGWARTLPIGEHGITVPTLWARLGDAPERWASFRHLQAQAGTVPVTKRSGKQQVVIFRFACDKQLRFVVDQVAFLSLQRSAWARAYYDQQRARGHRHRHALRALGAKWLKIIFVMWQRQVAYDESHHLATMARQALRHPEKKIA

SEQ ID NO: 54735 - protein, 387 aa, unidentified
MYFIGIDISKFKHDCAIIDEAGDTVTASWSFANNCEGFSLLKQLLDALDGQKKIGFESTGHYGHNLKLFLEANNFSFMEFNPLLVSKFVRSKSLRNTKTDSLDAVSIAQYLMTVEYKPYPPSFYHMDQLKSLTRFRDSLVRQHSRQLVELTNILDKVFPEFKPFFDGRFSATALYILTHYQSPEKIANMNAKSYEALRKKSRGKFSMVKFAQLKTLAKNTVGRSDAFLLKQMEITIDIENQLDAKIDEIESQILECIRALNPPILTIPGIGELTAAIILSEYGNINKFENPAQLLSFAGLEPGYYQSGLAEHQGHMVKHGSSHLRYAPMNACLPLITYEPVFAEYYAKKRAEGKPHRVALTHVAKKLLRVIFTLQTKNISYDPTLIR

SEQ ID NO: 54736 - protein, 344 aa, unidentified
MSIKVVGIDIAKNLFQVCVLSSDGQILSNRKVKRDKLLDTVRQLPEKTAIAMESCATSHHWGRIFQELGHSVALIPAQHVKPFVGRQKNDANDARAICEAFSRPDIHFVPVKSVEQQDLKAIRSVRKRLVENRTALSNQIRGLAAEYGVVFPLSIKALRSHLPIALEDAENDLSPVMRNLLQTLYCDFVSLSEEIDEMTQSVTMLSQQNPRYEAIRNIPGFGPILTAALISEVGTGHQFQNGRQFSAWCGLVPKQNSTGGKSCLGSLSKNGNRELRALLIHGARAVVRCGANKADSMGAWLRGLIARRGKAKAIVALANKLGRVAWHILAKNSEYDINQAFKPV

SEQ ID NO: 54737 - protein, 346 aa, unidentified
MANSVGIDLHRKRSHIAALDEHGVELFSRRIVNDPDTVVALLGELDGESKLALEATYGWEWLAELLEDHGYELHLAHPLRTKAIASARVKTDAVDARTLAHLLRADLLPEAYVAPRELRDLRDLLRQRVALTQMRTALKNRVHALLARHGLQHGQSKLFGTKTGEVFLEQVELREPARRRLEVLLRLIADFDREIEALAAEIDERAKADPRVKTLCQIKGIGRYTAMLVIAEVGEIERFRSARHLCAWAGLTPTVRSSDGKARLGHISRQGSLALRWALVEAAQKANLSGGPLRDGFERIAKRRGRKIAKVAVARKILTLCYYGLRDGEIRCIARRSSATTATAVA

SEQ ID NO: 54738 - protein, 334 aa, unidentified
MELKRIAIDTSKYLFTLHGVDHDDRVVLRRELRRDKLKAFFAALPPTEIVMEACGSSHHWGRLLIALGHVVKLIPPQYVKPFVKRGKNDRIDAEAINEAASRPSMRFVAVKGAEQQAATLILKTRDMLVRQRTQLINAVRGHAAEFGVIAAKGTARVEPLLARIAEDDTLPAAARAMLAVLGGQIATLDAQIAELETQMRAAHKANPLSRLLEQIPGIGPISALSLALTIDPAQFRSGRHLAAALGLTPREHSTGGKQRMGGISRAGDERLRRLLVVGATAVIRQAAAGRGKASAWLLNLLQRRPRKVVAVALANKMARVAWAMMTSGEAYRAA

SEQ ID NO: 54739 - protein, 344 aa, unidentified
MTAACQTCEFAAVTPGGRIIDRWQVATAIPELTEAIRSVRRPRTVVLEEGPLADWLYRSLAPAADAIIVCDPRRNALIAKDGDKDDPIDAEKLAQLARSGYLRPVHHSASPARALFKQRVALYHQRVGHRVAQANRVIWYLRRFGIMIREPVLAEAEKRAALMDRLPKGESVREDLTVLLESYDLAAEHVGQLRQRLIKQARGIDQIRRFTLLPGVKWIRAATFYAYVDTPWRFKSKSALWKYLGIGLERRHSGSGYERLGVPRHCHRPLKSMILGAAKSAVASRSNPFADRYERDLHAGCSPRIARRNVARSMAAVMWGMWKTERDYQPQWVGVPADALMVGS

SEQ ID NO: 54740 - protein, 414 aa, unidentified
MNDWWDDLPPSTYPLARHLAGRGSSWTVPIERRCELVIFVGVDWAEAHHDLYVADEAGRCLGKARVVEGVEGVARSHDLVGAHVEQPGDVVVGIGTDRGLFVGSLVAAGYEAYAINPLSVSRCRGRHGTSGAKPDPGDAKVLAELVRTDRHNHRPVAEVQSALRAGQLAAPGAVAEAMGAAVRSQVAVLSTMTAEVARLEAQLAPSFEAHPDAWVARSLPGLGTVLGARVPSESRDGPDRYASPKPRKNYAGTSPITRASGTKTTVPARHVRNLHLGNAAHLWAYSALTTPPPPGARASYDAQKARGASHNQALRPSGTASWAYCTAASPTASPTTGRSPGATGPGRSPRRLDALKPGCQRRGEQAGRLAAGYPHFGWRQPRQRLVKGRPVTRARPPACAGPLTSLLLTQDLTT

SEQ ID NO: 54741 - protein, 342 aa, unidentified
MEFEYFIGVDIASETFVATTLEKSLKPLLKAQAFDNNPDGFDDFVAWLSTAEIEPTQAVICMEATGVYAEALCYWLHAKGWWLAVQSPLEIKRAFAPVGHKTDAVDSRQIAEYAIRFTDKLRRWRPKKDLLEQIRVLLATREQFIGQRTAGKNQLRALCRKAVRTPLAEGLHQQNIQNLTKHIQEIESEISKLLKQDDDLYGQHLLLMTIPGVGLLLSAHTLIMTASLRSAHNPRVVSAWLGISPHEKRSGTSVFGRATSRRYGPATMRKLLHLAARSVRTHNPVFEKYFERKVAEGKPKKLVLNNISNKLVKIICAVLRENQPYISGYRSVNPNVLSLTKS

SEQ ID NO: 54742 - protein, 382 aa, unidentified
MDRIHDRCAGLDVHKKTVVACTRCTGPDGAVTSEVRTFGTMTADLLALSDWLDVHGVRHVAMESTGVYWKPIFNILEGHFTVMLVNAQRIKQVPGRKTDVKDAEWIAQLLQYGLLSPSFIPKPEIRAVRDLTRQRIELVREHATVANRIQKVLEDANIKLGCVASDVLGVSGRAMIQAIIAGQEDPNTLAELAKRSLRGKIPELKQALLGRVTDHHRFVLQVLLDHLDALDGLIARLDDRIVEAMKPVAEPASRLRAIPGVGQRATEVILGEIGPDMAAFPTAGHLSSWAGLCPGNNESAGKRRSGRTTKGSQWLRTVLVQSAWAASHTKETPFSACYQRWIKRMGKKKALVAVAHKILVVIWHLLKHETSYRERPAPAPAG

SEQ ID NO: 54743 - protein, 469 aa, unidentified
MIRLVGSLRLYPYNMLGCVLIRWKWIPIGKELSLMSNFIFENLFLSVGIDVGADFSWMSIALPNHTFVGKPFKILHSDLNSLAHAVSKIKEAEELYSLESRIFLESTGIYHYPLFCYLRDKGFCVSIINPIITKSSTNMNIRKVHNDRFDSKKAALIGLKPDLKVSLIPSDLALNLRNLSREYYDLMDNRSSYVNKLQGELRMVFPQYLNIFSKVTTNTSLTLLEKYTSPDAFLQASKDEIINSIRSTARFGLTYAFTKYDAIVQAATDASVFGSSVSSNFKRIRLYIRFIRQYDVEVSSLLDDMHQLVNANEGTDFVKQIRLIESFKGAGFLSAVSLMGEIGNFSAFNTPKQLFAYFGLDPAVRQSGKFEGTKISMSKRGSRIARRVIHTMALISISKNKDGSAKNPVLREYYLQKCVSKPKKVALGAIMHKVCNIIFAILRDEKSFEIITPEEHQNNYLKAKCDVAA

SEQ ID NO: 54744 - protein, 395 aa, unidentified
MFIVGIDVAKRSHEVCMITSDGQTVQRPFSIRNNCTGYNLMLEKIRKHTNIKSQIVFAMESTAHYWLALFTRLRKDGYHVILLNPIQTSAMRDMFIRKIKTDAKDSFIIAELIRFGRYAESNVAQDRLLALKELCRNRFYLVDMAGDLKRKLIALIDRVFPEYEAQFDTIFCKSSVALLKKYPTPQKLSNAHLDKLTELLWNSSNGHFGEWKARELKELARNSFGVEDCDGAYSTLILLMLDQIQSLSGKADALEKEISRLFQSFDTTVTTIPGVGPIIGAVILSEVGDISRFSSADKLAAYIGVDPSVNQSGEFQAAHAHMSKRGSPYLRRCIWMASQVAVQRDPMFHAYYEKKAAEGLKYMTIIGHVTRKMTAVVFAILRDHKVYEPVLPTAA

SEQ ID NO: 54745 - protein, 339 aa, unidentified
MTEISRIGLDLAKSVFEVHAVNAQEQVVLRRSLRRSQLLRWFARLPPCLIGLEACGTAYHWARELSALGHTVRLMPPSYCKPYVRRNKNDAADAAAICEAVGRPSMRFVPIKTLQQQSDAVTHKARELLMKQRTMAMNSLRGLMAEFGVVVPEGAHHISKLLLVLADPEDTSLPEVARAALNAMAEILSALNKQINALDQTIKATVRDNATARRLDTIPGFGPILSSAIAVIVSDPRHFNSGRDFAASLGLVPRQDGTGGKVKLGPISKRGNGYLRRLLVNGATAVLNGKNARNDPWRARMLDSKPKKLAAVALANKMARIAWAVMTRQEDFRPRATAA

SEQ ID NO: 54746 - protein, 431 aa, unidentified
MKVMYERVAGIDVHKDMIKVGVRSPGDKAWTRKTEILEYRTFYGVLQLMAADLRKRAVTHVVMEASGVYTEPVYYALCEQDFERVEVINPAHAKALKGHKTDAKDCARLAELYECGLLRGSYIPAAELKELRDLTRYRVKTVQARTSEIQRLGKALESGGIKIGSVVSDITGKSATAMIEALIDGERRGTVLADLAIGRMRTAGKLADLSMALAGRFTGHHAMLCRLHLDRLAVFDTAVSGLDERITARAVPWRREQDLLMSVPGFGDIVSQVWLAEIGPAPHQWFSTHEKLASWVTLSPGNNISAGKRRHGRTGDAGTYIKPMLVQAAWSAIRTPGRLQARYGRLVRRFGGAKNPAAKKKAIIAIAHTLLKIAYQVLKSGMPYQDLGADFYTQRESPQQRQAYLLRQLEKLNPGCTITISPPEAALTPGA

SEQ ID NO: 54747 - protein, 389 aa, unidentified
MAEVLRKLTGRAALDAGVVSGNGKKDGRGNTFGPNRDRLTVGVDLGDRWSQYCILGLEGETLAEGQLRTTQEDVGEFFRGLTTARVVVEVGTHSAWVQDVITECGHEVLVANPRLMEGSKRRKRKSDRIDANKLARLGRVDPQSLYPIRHRSREVRQDLVVLRARDALVSVRTELINTTRGLVKSMGARLPRCSSPSFAEKVKDAIPVEVGEALQPLVQLVETVNECIERYDERIEELGQKKYGHTTLLRQVKGVGPITSLAYVLTLEDPQRFASSREVGPYLGLVPKQEDSGDSQPQLGISKAGDRMLRRLLVGSSQYMLGAFGPDSDLRRYGLRLCEHGGKNAKKRAVVAVARKLAVLLHHLWVTGDVYEPLHQARAGTGTAPAAAA

SEQ ID NO: 54748 - protein, 308 aa, unidentified
MSPAVNKRRAKSVANSKAGISELLVWCVKQQVTTHELHAILEGTGVYHEQAALALADAGATVSIVNPAQVKDFGRSLGVRTKTDGVDSLVLARFGAMLTPRPWMPPAQEARVLQALLSRREAIAQDLQRERNRLEKADATDTPALIRQSIVTSITFLEQQLAKFQQDIDEHITKYPDLKADRDLLISIPAVGPQVGNHLLAVMHTHQFQSAEQLAAYLELVPVERQSGTSVLGRPRLSKVGPARVRAILYMAAVVGTQYNPHIKALYQRLQDRGKTKMSALGAAMRKLVHLCFGVLKTRRPYQANYAI

SEQ ID NO: 54749 - protein, 408 aa, unidentified
MKLFVGIDVSSKKLDVCFMDSEDQVLHETTLPNDINGASEIKEIVLKLNEIMQYDVIKVGMESTSVYSFHPATFLAEDAELKELGIEVIVQNPKAIARFKGLFEEDKTDTIDARRIADFLRLGLHGTTVIKEEKYVALQRLTRSRLQLVEQMTECKQHFLENLYYKCNTLTRDAETSVFGATMMDLLTESLSLGEIADMEVEDLAAILQQKGRGRFGDSEKLAKSINKAIRDSYRLGKVLEGSVDVVLATYAMMIKTLKQQIKELDKAIEALLEVIPESQCLLSIPGIGPTYCAGILAEIGQIERFEDQAKLAKYGGLYWKRKQSGSWESERTSLTRTGNHYLRYYLVEAANSVKNREPVYREYYYKKYNEVPKHKHKRALVLTARKLVRLVDVLLRNHQLYTPERSV

SEQ ID NO: 54750 - protein, 588 aa, unidentified
MLSASPSFSSLSSIGVGIDTARYGHRVSFLRPDRQPAAKPLTVLENQDGYGALQQRLEQLHQQYPHAHFHVRVDAAGQYAMNLERFLRSLALPMTISIGEPKRNKDYQKAHFPKRTTDDTESQAMARFAVVEQPKATPASPAAMDLLREIAGRLQAQVKQSTQTINRLHNLLARVFPELATITKDIAAGWVLQLLDKYPTAPRIAQARLSSLENIPYLPQDKAQAIHEAARRSVGSLQGEAAEELVRELVTQLRHCQASEHKLRQLLLSTHAELPPTGHVHLPSIPGIGAATAAVLTAKIASIDRFETPEHLVGYFGIFPQEASSGVNPQGQPVPQATMHMSHKGNDLVRAYLYNAAFSAIRHNPAVRALYRRLRAKGKRNDVALGHCMRKLLHLVFAVWKTHKPFDPQHYPWESAKASTDAELAAPNSANEKAVGHKREQVPTEKVVTTAPSNVRSPAPAVNTSPAVPERPTASSTPSPRPCIDFAFLRSQITLEQVLRHLGLFESLKGRAPQLRSCCPFHEGDRRRLTLSVHLDKNVFHCFHANCQAQGNALDFWARYRGLPIYEAAVDLAATFRLPRNREEATRP

SEQ ID NO: 54751 - protein, 414 aa, unidentified
MEAILECCCGLDIHKESIVACLLKGPITEGLKPGSEIREFGTLLKDLIELRKWLDEHKCQHVAMESTGIFWQPVYAVLENALSDEMHLLVVNARHMKNVPGKKTDMRDAEWIATLLRAGLLKGSFVPECDIRDLRQFTRYRKALIRDITSQKNRVEKLLQSSGFRLSVFLTDIFGNSGTAIMQQLVEVGFISGPSLEQCLRGRARQKADEILTNLNGVLSAPQRKLLKMQLDHLKDLEDNLREIEEQIHQDFSQFQAPIQLLDSIPGIDLTAAYAILAEIGQTMTAFPTAQHICSWAGLAPGNHQSAGKRKKQRVSQGNNYLKSMLCEVAWVIAGHKKMYLSTWYWRLKQKTDSKRAIVALARKLLVIIYTMLKTNTRFDEQKFLDRKEATSQKRIHRMVNELTRLGFAVSLPA

SEQ ID NO: 54752 - protein, 353 aa, unidentified
MTVYVAVDFHARQQTIRYCDSTDGEVHECELQHKGNQVREFYAQFQGKVIVALEASGYSAWFEELLESMGHEVWLGNPAEIRRKAPRRQKNDRRDADLILELMLKGDFPRLHRFRAESRLVLRQLRYRHKLVKVRTIAKNSLQAISLGAGDSQKRGLLSQRGQERLRSLVLPPVLGQQREEWLQMVAQLDQRIATLEATLEKSAASDEQIKLLRTHPGIGLLTGLVVRHTITPVARFTTTRQVVAYAGLDPVEDSSGSRVRVGSISKEGSRLLRFLLNEAGHTACRRDPDLKRFYQRLVHRRSRQKAKVAVARKLLVRSFIMLRDQIDYAEFLRRGVAARSARKTHRPAMPDL

SEQ ID NO: 54753 - protein, 310 aa, unidentified
MDAIYVGIDVSKDRLDVHVRPSGEAFAVTRDGKGLDALVERFRALSPTLIAVEATGGFETIVAAAVGGAGLPLVVVNPAQIRHFAQALGKRAKTDPIDAAVIALFAEAVKPELRPLPDEAQRLLSELVSRRRQIIEMIVAERQREKRVANTRIRKGISRHIRVLEKELPEIDGDIGTLVRGSPAWREKEDLLKSIPGIGDVLARTLLAELPELGTLTRREIASLAGLAPFTRQSGRWKGKSMIAGGRSAARWALYMAALVASRHNPLLKAFYRRLLAAGKPKMLALIAVARKLLTTLNAMLRDNKKWRHA

SEQ ID NO: 54754 - protein, 420 aa, unidentified
MERMVERCAGLDVHQATVVACVLINERGRRPRKELRTFGTMTHELEALRDWLVAERVTHVAMESTGVYWRPIHAVLEEHFTVIVGNARHIRNVPGRKTDVKDAEWIAELVCCGLIRPSFVPAKPLRELRELLRYRRKLTEAQAAERNRLQKQLEIANIKLGSVATNVFGVSGRAILRALIEGASSPVEMAGLARGRLRRKRDELAHALKGRLDDTQRFLLSMQLRRVEDIEILIKELDQHITGKLGPYQTELALLMQIPGVDWVVAAALIAEIGVDMSVFVSVHHLAAWAGLCPGSHESAGKRKNTTARKGNVHLRTMLVGAARPAARTKGSYFKDKYYRLKARRGSMRAALAIAHKILVAAYHMLARRVDYRELGEAYLDRIDQTRTAINLKRRLERLGYVVSILPQTTPSDAQATRPA

SEQ ID NO: 54755 - protein, 368 aa, unidentified
MGMATMVEQAEAGVTVGVDTHADVHVAAAIDQHGRLLGTTSVPSTAAGHAQLTAWAHGFGVVDQVGVEGTGSYGIGLTRHLLDQGVSVVEVVRPNRQTRRRRGKTDAIDAETAARSVLAGTALGTPKAADGAVEMIRTLRLVRRSAMKARTQAANQLRAVLVTAPQALRDRLRALSLPQLVDAAARCRPGPITGIEAASKLALKSLATRYQQLTTEITTLDGEIERLAHQAAPQLMAIKGVGADTAGALLAAAGDNPERLRSESAFAHLCGVAPIPASSGKTNRHRLNRAGNRDANRALYVLALGRLGYDERTRAYVPRRTTEGKTKREIIRCLKRYLAREVFTALLSSPSIAAMTTATPVVGPGFDA

SEQ ID NO: 54756 - protein, 339 aa, unidentified
MSKPIQPVQAMVFCGIDVSAATLNVAVQQENQRIEERVFDNTASGHKALTAWLQKGKLPARVSLEATGIYSLDLALALDRATGVEVAVLNPKLIHRFAQTLRRSKTDSADAQVLAEYSRRMPFTPWSAPEQSGLQLRTISRHIQGLVVEHTRQNNRLHAAEKSASTPRCVVSDLKRSMASLKLRITRLRREALELVRSDEAMRKRFDLLTGMPGIAAISALQLLGELTALSAEMSVRQWVAHSGLDPAHRESGTSVHKPSRISRAGNRHLRRALYMPALVAVRRDPHLKAFYETLLSRHKAKLQALIAVARKLLHAIYGIFKSQMPYDGSMLFPQLQIA

SEQ ID NO: 54757 - protein, 431 aa, unidentified
MTRRPDPLVSPDGHPEPEQRRDLIGARLCVTRHSIVRPLLLIGWKLLATAKGAHDMTMIGAERPDTEVETILGVDTHLDFHVAVDIDHLGRRLGESSVPTTVKGHERLLRWAERFGPVRCVGVEGTSSYGAGLARHLGAKGIDVLEVERPERRRRGSRRNLKKPDPSDAEAAARAVLAGESSGVPKSGDGTVEMIRALRAARRSAMKARTQAANQLQGLRVTAPEQLRQRLRGLSTKELISVAARFRLGDDPRDVPTATKFALRSVARRYEALSAEIAELEAHLERLVAQVAPELVSWAGIGTDSAATLLVVAGDNPQRLGSEASFASLCGVSPIEASSGKVVRYRLNRGGNREANRALYMICLARMRRDRRTKEYVARRTAESKSKREIIRCLKRYVAREVYRVLISCDARSSPTGPKAEVHIASGSSAA

SEQ ID NO: 54758 - protein, 413 aa, unidentified
MKQTYILAIDVAKHKVRAALSGADERLLFEKDLPVSAGGLRELLVRLREHVAEPEGLLVLLEATGMLHLNWSVALIRAGYAVVVINPLIARRLYTLGNSIRDNKSDPIDARQLCGIGRLHGEKLLSLYRFALKPERLCLQRLQSVRKAVRKSLSNLKKSYRSLLDVSFPELGRLLEIDGVGIRQLLSQAPTPCAIARMRRSSLEKNWMLRPKAAQLKKLAAESMADPELAQASRPALLAMLQSIEAMETRLRELDWQIEALTSQSVDPQTKALVESIPGFGALNAAKLLAFLPGEILHAGSNRQAAARLQAYMGNDPRVRQSGQWQGQTKMSKRGVEMLRTALFQCAFSASQHDPELRSFYQRKRAQGKHHEVALSHLMRILTRRLVAVLRSGQPYQPNYNSELKNAAQNTCH

SEQ ID NO: 54759 - protein, 341 aa, unidentified
MNYVGIDYHKKYSVATVISQGGAILKKGVILANRFDAFADFLKPFGEVTAVVEATRGWSVPVDILDQLVIKVLLAHPTKLKVIAEHAAKTDQIDSYVLALLARAGWIPEAYLRSRPNRDRQLILRVRCFHVRLRTSLKNRIHDLIDRQAEPVRINAQLYKDLFGKKGLAWLGSLQLAFPADILLKQLLAAYEVLSAQIRESDGLVKDLLKSDPNCQLIATVPGFGPFFSVLANTEIGVIQRFFNSSRLCSYAGIVPSTDSSGGKTRHGPIIKQSNHWLRWAFIEAVAPAVAADAGIRKFYESYRQTKGINVAKVVTARRLCCIVYRVLKQQSAYYQGVADR

SEQ ID NO: 54760 - protein, 346 aa, unidentified
MKFYTKQHKFFCGVDLHAKSMYLCILNKEGEIVLHRNIKTDPDVFLKTIVPYREDVVVAVECIFTWYWIADLCTEENIPFVLGHALYMKAIHGGKAKNDKVDSHKIAVLLRGGMMPMAYVYPSEMRSTRDLLRRRNHLARKRAELLAHVQNTNHQYNLPDTGKIAYKSKRKGVAERFPDISVQKSIELDLSLLNHYDQLLLRLEHELSLIAKVHDADSYFRLRSIPGIGRILGLVILYEIHDIDRFPRVQDFVSYCRLVKSAKESAGKKLGTSGKKIGNAHLKWAFSEAAVLFLRRNPEAVKYREKLARKHGKAKSLSILAHKLARAVYHMLKRKEVFHPQMFFAK

SEQ ID NO: 54761 - protein, 433 aa, unidentified
MESLFSITPTNTLHEHTTTLIVAIDIGGYEHHARAFDWRGIEQQKKAFKFKNDRYGFESFLSWIERIQWMSGFTEVMVGLEPTGHYWFALFDYLLSRNLRLVITSPISVKQTKEAATTSASKSDPEDPKAIAHVMISGNYQEIYRPQGNYAELRKAYTLRNSVMEQKKATANRIHAWASTYFPEWHKVYSSVQRIGFLTLLRRAPLPSDIVKLGVHGILHHWHECQLLGGISRNRAERLVEEAKRSVGVTEASEMARVEIQMLLQHYDLQEAQLTRLDKRLEELVEQYPGGKRLMQIPGIDLQIAAGFLAEVGDIRRFPSAAQLQSYAGLDILRNSSGKRRGQSRISKRGRNKLRRIMFVAALCVVNHTSEFRAVHQYYKHRTKNPLKAMQSLIAVACKLLRVFHVMLTKDVDYDPDKVTCGLVVKSSEKQVA

SEQ ID NO: 54762 - protein, 342 aa, unidentified
MDHYAGTDVSLEWSSVCVVDASGRIVQEGKVASDPAALIAWFGSLGYELTRIGLEAGPLSQWLYAAMKQAGLPVELLETRHVRDAFKAMPVKSDRNDARGIAQLMRLGWFRPVHCKSMEAQETRAVLTARKLLQNKLRDLEASLRGILRGFGLKVGKTTSKRFAERIKELVVGHPSLEVLSEALLAAHAVLLREFNGFERRVRTMARQDAKARLLMSTPGVGAIVALTFASAIDDPARFKSSKQVGAHFGLTPRKYQSGETDYTGRISKIGDKEVRTGLFESSHVILTKPVRGFALKSWAMRLAKRVGMKKAKVALARKLAVIMHRMLVDGTPFNFAAGAAA

SEQ ID NO: 54763 - protein, 347 aa, unidentified
MKQYVGLDVSQDLTHVCVVDQEGNKLWEGDCSSTPEGIGEAVKKHAPDAVKIGLESGHLSTWHWHGLNDMGLPAICIDAYHAHGVLRLQMNKTDKNDAHGIAQIMRCGWYKPVTIKSFENHESRALFRTRSNLVSMRTDVVNQIRGMLKTFGIIIKGIAGVSFENRIQEIIDEGTALAAPLQVQLDMLRTIKTKIDELDELVLDHAYACQKCRILMSIPGVGPMTAANFVLAVYEADRFEKSKSVGAYFGLTPRRRQSGEIDYNGRISKRGDRVIRHQLYEAANSILTRVKKPSSLQAWGLRIAKRSGMKKARIAVARKLAVIMHQMLQTGELFCFNPTTGEKAIYA

SEQ ID NO: 54764 - protein, 413 aa, unidentified
MEVIVERPAALDVHNASVTACVRAPGDGRRRRVEHVAEFQTTVQGLLALRDWLEAHEVEQVAMEATGVYWKPVWAVLEDRFECVLVNARHVKQVPGRKTDVRDAEWLCQLLEAGLLKPSLVPPKPVRTLRNLTRYRKSQIRDRQREMNRLHKVMQDTGIKLDTVATDMMGKSGRAMLDALVSGTTDPVVLADLARGQLRKKLPALRAALEGRFDSEHVLVVGRILAHIDYLDEAIDELSGAIEEQLGPFAPAVELLCTIPGVGRRAAEVIIAETGGDMTAFPTAKHLASWAGMCPGNDESAGKRRSGKTRKGSKWLSQTLVECAKSANRSKNTYLAAQYARLRARRGPNKATIAVCHSILTAVWHMLSTGETYADPGGDFFARRDPERTRKRLVGQLERLGYTVTLQQAAAAA

SEQ ID NO: 54765 - protein, 343 aa, unidentified
MEPYAGIDVSLEQSSVCVVDATGGIVREAKVASEPEALIAWFRGLGLEVARVGLEAGPLSQWLYAAMREAGLAVELLETRHVRDAFKAMPVKTDRKDARGIAQLMRLGWFRPVHCKSLPAQETRALLTARKLLQTKRLDVEMSLRGVLRGFGLKVGPTTPRSFAARIRELVEGHPTLTAVAEALLAAREALGEQLRGLEKHLRDRAREDERTRLLMTTPGVGVIVALTFVAAVDDPGRFRSSKAAGAHFGLTPRKYQSGETDVTGRISKIGDAGVRTALYEAANIILTRPVKGSALKSWAARLAVRAGMRKAKVALARKLAVVLHRMLADGKPFAAERAAAAA

SEQ ID NO: 54766 - protein, 372 aa, unidentified
MSNTVPSITVPSITVPSITVPSTGVIVGVDTHKRTYAAVAISALGARLGAITIPVNGKGYRALKTWAHSMGPVRAFGIEGTGSYGAGLSRFLCEHGHTVLEVNRPNRQLRHQKGKDDPLDAESAARAVLAGQATALPKSGTSTVEMIRHFKVARDTAVKGRTQAMQTLKAIIVSSPHALREQLDCLAGKMTLIRHVAALRPGPLTSTTASAKTSLRAIARRWLALDAEIKGHDAHLEQMTQQLAPELVQAHGMGAGTAAEMLLLVGDNPERIRSEGALAKLCGACPIPASSGKTSRHRLNRGGNRQANAALYRVVIVRMRGHQPTLDYIRRRTAEGKSKPEIIRCLKRFVAREIFGYLCRPPNAAPPGQMAA

SEQ ID NO: 54767 - protein, 460 aa, unidentified
MNKKTSKASKQKTIVEMPLVNPCSAGIDVGDTEHVVALPEGMARERVKKFGTMTCDVQAIIAWLKSYQIQTVAMESTGVYWKPLFTMLVQSGFEVYLVNSKHVKNVTGRKTDEDDAMWIQKLHSCGLLKSSYLPGDEQEALRTLVRYRKTLIQDMSRFINRMQKSLELMNIKFHTVINDITGKTGTAVVEAILAGERNPVNFLPLIDCRIKASHDTIQKSLEGNWRDEHLFTLKESFSFYKIYHQHVALCDAQIEKQLQRYEASRNDGEILTEQKHQTDTSRNCVKQKQKDKNHPKFNVRKYLERIHRTDVLAIYGLSDIGGLELLAETGTDLSKWENENHFVSWLNLCPNNKKSGGKLISSKLMRKKPNTASQAFRSAANAVQKSDHWLGDYFRRMKAKGGNKYAVVATANKIATIYYKMVRYKQEFNPLNLEKYQQKYKQAKIAYLERKLNELKQQVA

SEQ ID NO: 54768 - protein, 344 aa, unidentified
MATYYIGADVHCNNTELAIEQRGKIVARYSVPTTIPAISTVLSSLQGRKILAMEEGPMAGWLYRNLNEKVEKFVVAEPRRNKLITCEGDKDDRIDSGKLAILLRGNFLKAVHHTSDSHRAYLKHWINLYHDRIRDAVRDINKIRACCRMHGVRIPRKVVRNPAHRHEWLTELDNSVLQTQLQMLWIGYDATREQVSLAKKQFNLYAGKYPIIKNWCNLPGVGLVRATTIFAYLDTPWRFKNRAKLHKYCGVGLVRITSGKDKKGKPKSPRLKLPWAVNRRIKNAVIGAATSAIGQRDNVFKEYYERMLSDGINSTNAKHSVARKMVSTMSAMWKTNSQFDEKLV

SEQ ID NO: 54769 - protein, 373 aa, unidentified
MHQGQYAHDVAGLEELSARLGRHGPVTGIAIERSEGLLVESLQEQGHRLFCVSPKMSARARERYRVAPGKSDAFDAFVLADSLRHEHRHWRPLAVPSPQLAELRALTRDRERLVWNQRDTENQLRAIVMAYHPAVLELFSSLDRDISLAFLRDYPTPAQAGRIGTARMAAFCSRHGYSGRTSAEVLTARLRAHLLSGSPGTAAGKAFSMLLFVDQLELLNNQVRAITQRIRQLLTAHPDAPLFLSFPGMGEITASILLAEMGEDRNRFPTPDTLLAETGTAPVTRASGRSRTVRFRYAANKRMRHAVDWWAFVSVRENQWAGEAYQQARARGQLHSRALRGVGARWIRILWRCWTDGTTYDPGKHLKNPTTAG

SEQ ID NO: 54770 - protein, 340 aa, unidentified
MSEITTIGLDLAKHVFQVHGVDAQGRTVLRKRLRRGQVLAFFSRIPRCVVGLEACATAHYWGRELGALGHEVRLMPAQYVKAYIKRNKHDAADAEAICEAVQRPTMRFVSVKTAEQQATALLHRGREQLVRQRTMLVNALRAHLAEFGIVAAQGLRNVGELIAIVRDDGDTRLPDMARQVLQVLANQIEQIETAVAALERQLLAWHKTNPVSQRLASIPGIGPIIATAIAATVADPKVFRSGREFAAWLGLVPRQNSTGGKIRLGGITKRGNRYLRRLLINGASANLLRSKATKADPWVIGLRRRRPPLVVAVALANKTARIAWAVMLREKEYQPRAMAA

SEQ ID NO: 54771 - protein, 344 aa, unidentified
MTHYAALDVSLRSVHICVIDTEGKIKVETKLPSEVEDIRDFLEGLNLRIAAVGFEAGTLTQFLSYGLTAAGYEVICMEARQVKAALSAMRNKTDKHDARGIAQILRSGWYSEVHVKSLESHQIRALLSSRKAVLAKCVDLENEIRGLFKIFGIKLPPRLGHGSFDGAVRETIETDSALAHALLPLLDVRLELYKAFRELDNRTRKLAQQDEICCRLMTAPGVGFVTALTFKAAVDDPARFKRSRTVAAHFGLTPRRFQSGELDIEGHISRCGDREVRSALYTAANAMMTRSSRYSSLKAWGIQLAKKRGHRRAVIAVARKLAVILHRMWIDETQFHWSAEGQTA

SEQ ID NO: 54772 - protein, 339 aa, unidentified
MFIIGIDPHKRSHTAVAVDCSETVLDTIRVEADHHQRSRLLEWATRFEPRTWAVEGATGMGSMLAQQLVGAGEHVVDVPAKLSARVRLLERGRIDKTDPNDARAAAIVAWRTPALNVVTANDEHRVVLRLLADRDHQITAQRTRSICRLHALLCVLIEGGTAKSLTATKTEELLASVHIDGPITFERLTTARQLVDEVRALDAARAEVRRRHVAALEASKTTVTEVFGIGPLTAAIIVGRVGDVRRFQTAGHFARHNGTAPIEASSGPKTRHRLNPRGDRQLNHAIHMAAVTQVRNDTPGRGYYLRKQAEGKSRKEAMRALKRRISDAVYQRLIADARR

SEQ ID NO: 54773 - protein, 408 aa, unidentified
MEVIHERCAGLDVHKQTVVACTRISHGSRVQREVRRFGTSTRELLTLLDWLREAGCTHVAMEATGVYWKPVWHVLEADFQLVLANAAHIHNVPGRKSEVNDATWIADLLAHGLIRASFVPPAPIQELRDLTRTRKQLTREIVQHKQRLQKVLEDANVKLASVISDVVGANGRRMLKAMIAGEADPQKLAALASRALAASQQTLGEALQGRVTAHHRFLLRQHLQMIEHLEQVVAEFEAQIEAALQPFQAAIEHLLTIPGVSKTAAHVILAEIGAEMSCFPTAGHLLSWAGLCPTLNESAGKVMSRRLRKGAPWLKTLLVQCAWAAAHSKNNYLHAQFLRLRARRGPKKAVVAVAASILTIAYHLLRDRAPYRDLGPRYFTRLDRDRTAQRLARRIRELGYEVQVSRAA

SEQ ID NO: 54774 - protein, 308 aa, unidentified
MEIFVGIDVAKDRLDVHVHPVGERFHVVRDANGLAQLVERLRARSPTLVAVEATGGFEKIVVAELAAAKLPVWRANPAQVRAFAQALGRRAKTDTLDAATIAHYAEATRPQLRPLPDADTEQLADLITRRRQIIQMMVAERQRQKRAAPRLQKSIVRLLKALQKELSSLEQDLDETISGNPLWQAKEELLTSVPGVGKTLARTLLAEMPELGTLPRRPIAALAGVAPWTRRSGKWRGQSFIGGGRANVRAVLYMAALAAARFNPQLAIFYRRLRKAGKKPKEAIIAVARKLLTILNAILRDRQPWQSA

SEQ ID NO: 54775 - protein, 335 aa, unidentified
MIYVGLDVHKRTCYGTVTDDEGHIVKSGRFSNDSEGISEFMEGLEEAQIAMEAGYCWQPIYDRLVDAGHDVRLAHPQKVKAITEAKVKTDKVDSETLAHLLRAGLLPESYVPPRDIRELRDLVRRRAFLVGMRTKLKNRIHAELAKRSIDLGSPLFTRGGRELLGNLGLESVDQLLPVMEALDAQISQVSGSLRKMSGEDSRAQLLTTIPGVGYYVAMLLVSEIGDVNRFPNAEKLCSYAGLVPSVRRSGDATRHGGITKEGSRWMRWALIQAVHVHVRYDTDLSRFYRRLTRRKTRQEAVVATARKMLKVVYWMLRSGEPYHPEPGGYDPTEHR

SEQ ID NO: 54776 - protein, 341 aa, unidentified
MKTVTHVGVDLHQRFCYLTAVDASGKKLKQAQVVNQADALRAWLRQLPAPRQVVMEASGFWPAFRRAVGPEAERLVMVHPQRVKAIASARLKNDKVDSEVLAHLSRADLLPEAWMANQRTQQTRLLTRLRIALGQQRAKAKNQLQAVLHQEGFLKPVADVFGKKGRAWLASLALSPAGRVVVEVWLKVVDQMNQAILEQETALKGMAEQDIRAKWLETVPGIGPYSAMVILGEVGEIERFQSKRALASYAGLTPSVRESAGKRKRGGIGHHGSGTLRWILLQVAQVAARCSPAARAWYVRLRQRKPAQVALIALARKLLTAVWALLQHGVCFDESLFAHAG

SEQ ID NO: 54777 - protein, 339 aa, unidentified
MKVSTLGIDLAKNVFQLHGVGCNGQTVLKKKLTRDKFLPFLMQLEPCLIGMEACASSHHFARVLRQYGHEVKLIPPQYVKPYVKTNKTDAADAEAICEAVARPNMRFVQIKTAEQQAILVLHTERNILIRERTACANSMRAIWAEFGIIMPRTLSQLYKKIPEILEEYDNELSPFVRCSVARQLEHLQGVEDQITLIEQELSRWAKTQPACQRVMKVPGVGLMTATYLVASVGNGQQFHSAKQFAAWLGLVPREFSSGGKQRLGRISKRGDRYFRYLLVHGARAVAAVIERHKDNMPWLYRLLNKKAYNVAVVAQANKTARILWSMLVHHTEYRTLSVV

SEQ ID NO: 54778 - protein, 384 aa, unidentified
MNTTNKTSPNKKQTKPQALDQASAASKAKTIKLGIDVHAERFVVVRIIDGGTPQPPQRFSPAEFLVWAQKQLALAEELFSCYEAGPFGYSLHRQLTELGFRNHVVRPRDWDEYGKQVKTDQRDAKELALNLDRYVKGNRDAFCVVRVPTQAQEQARSLSRQRESLQQEKQRLAAQGRSHALYYGHRLQPGEWWREARWRTLAPQLPPIVSNLLEPLRRLIAAVEVELKARTTEVEGSAPVALPVGLGKLTSEILEREVGDWGRFKNRRQVASYTGMCPREDSSDTRRFQGSINKHGNRRLRPVLVECLWRLCRFQPDYRVVRKWQPLLLDPKTSKPRRKKIIVAMARSFAVDWWRVRTGRCQAAALGLKLQPSSTSQGQIPSAQ

SEQ ID NO: 54779 - protein, 357 aa, unidentified
MTESSDYESVQVFIGVDVGKDTHHAVAVNRSGNRLFDKALPNDENKLRSLISDLKQHGQILLVVDQPATIGALPVAVARSEGILVGYLPGLAMRRIADLHAGEAKTDARDAAIIAEAARTLPHALRTLKLADEQIAELSMLCGFDDDLAAQTTQASNRIRGLLTQIHPALERVLGPRLDHPAVLDLLQQYPSPEKLASLGEKKLATQLCKLAPRLGKRLAADITQALTEQTVVVPGTNAAVVVLPRLALQLITLRKQRDEVALEVEQRVLAHPLYPVLTSMPGVGVRTAARLLTEVACRAFASAAHLAAYAGLAPVTRRSGSSIRGEHPSRRGNKTLKRALFLSAFAALRDPISRAC

SEQ ID NO: 54780 - protein, 415 aa, unidentified
MALKIVYKICCGIDVYKNFVVACIAKTDKQGVTTYERHHFSTYTKGLKQLLKWLLDRNCKDVCMESTGKYWIPVYNVLEHDCSIVLAHPKYVKAIRGKKTDKKDAKWIADLFKHDLVSGSFMPPADIRQLRDLMRYRFKLTCFKSSEKNRYQNCLTVSNIQLGNVVSDTFGKSSQKIIAKILENPDDTSFDIGSLIHGSMKDKLPELELAIDGYITPEQAAKLKIIKEHFDNLEARKAELEELILALATPYQQEISIILTAPGFKNTFTAIGIISEIGTNMEAFPSAKHLCSWAGLTPTNNESAGKKKSVRVSKAGCYIKPLLVQCANAAIKSKKHPEIRDRYLRIKKRRGHKKAIIAIARMLLTALYHMLKNGENYNSDLYQKSDILPTTREITVEQAILMAQFQGFRIKSATE

SEQ ID NO: 54781 - protein, 344 aa, unidentified
MVSMTIGIDLGDIWSHYCTLSEDGEVIDRGRFRTNPSGVDKRFRDLEPVRVAMEAGTHSIWVSEQIRELGHEVMVANVRELRAISHSDRKSDKVDAEKVARYARLDPEILRPIAHRTVAQQETLTLIRARDVLVRLRTGAVNSVRGLAKPCGYRLPASSTLCFAKRCLAALPPGLSQALGPLLQQIADMTVKIKEYDRAIKQLTETEYPETQALIKVYGVGHLTALTFVLTLGNKERFQRSRDVGCYLGLRPKRSQSGESDPQLGITKAGNGYLRQLLVECANHVVGPHGKDSALRQWGLSLGARGGGHARRRAVVAVARKLAVLLHRIWITQEVYVPFYAAAA

SEQ ID NO: 54782 - protein, 436 aa, unidentified
MRGCRCSMIMGFTKPIEHFILQRKKVITMNTLYVGIDVSSKSNVVYLMLPNGDKHSNFSVANSHEGSTQLVKRILSALTSHSLDTVLIGLEATSVYGDNLVYFLREDATLAPFNRKIHVLNPKQVKKFHDAYNDLPKNDYVDSFVIADCLRFGRINKEVYLGDYRYKALQNLTRARFFAVQNLVKEKQRFMNVLFKKYSTMTQEKVFSDTFSTTALAVYDEFDSAEALANMDLHELTDFIIEKGKNRFPDPDAVAKAIQKAARSSYRLPKTVNDSVNQVLSISITSMKALESQIKEFDKAIKAQMELLPNVLISIPGIGPVYSAGIMAEIGDINRFDNQAALAKYAGLAWKQHQSGSFEAEVTRLIPSGNRFLKYYLYEAAFSLVRCDKEYSDFYHLKYKEVNRCQHKRALALTARKFVRLVFRLLKDNRLYVPAK

SEQ ID NO: 54783 - protein, 484 aa, unidentified
MPQKERSKRRLESRQVRVQEVIPVSKSRPYSCLSVKSIEIQQLVKTRVGQSPLAGVDVAKDSFVLVLHWPDGSFQRPWRIKSPSEISEAVAKLAELNQHCPVKVAMESSGTYGDALRQALADAQLPVVRVSGKAVKDQSESFDGVPSQHDGKDAAIIADLGRRGKSRDWQLGQASPLDQELRYWVRKLDRAQRIKQMHGGRIEALLARHWPEANAHLASGSATLAGALARWGDPARLAADPQAPVWLARVGGRYLTAQKIADLLESARTTVGVRMNRWERRELRELAKALLARRKTIARCRRRLKALTTDHPIIGAQAPAVGLISACVLWMCLGDPRNYSCAAAYRKAMGLNLVENSSGQQQSPLRLSKRGQRLSRKWMYFAALRQMKHPAVRTWVGHKKQRDGGKGSRAVTAVMRRLALAAWHVAVHGVEFNAVQLFPSGRFDKRPRPSLPRNIRTAAPAVEIAPATSSPIVRCAQERQGASP

SEQ ID NO: 54784 - protein, 392 aa, unidentified
MIYVGIDVAKDKLDCFITDSDGAVLFKPFTILNNREGFETLFQTIESLSGDLSKVKVGLEATGHYSYNLLGFLISKGLPTYIINPLHTNLYRKSLSLRKTKTDKVDSRTIATMMMSDVNLKSYSDTSYHNEELKSLTRYRFDKVKERAKLKSSVSRLVCILFPELEMLVPTLHMASVYALLSEFPGSSAVAAAHLTRLTNLLSEASKGRYGKDTAILFRETARTSVGSNMPAKSLELKHTIKLIEELTTEIDEIKAEIKQIMDKEIHSPILTIPGISYRMGAMIIAEIGDFSRFDSADKILAHAGMSPSTYQSGQLNNCYSHMEKRGSRYLRYALYNATKYVCYWGSSFGEYLEKKRSEGKHYNVALSHAAKKLVRLIYAMEKSGQPYSKTA

SEQ ID NO: 54785 - protein, 342 aa, unidentified
MYRIGLDYHTARSVLCILDGDGKIVKREQVPGGQGQLLDALGKVAAELGPFEVCFEATCGYGRLYEGLRAVAARVVVAHPGKLKLIYHTKRKNDRVDAEKLAKMLYAGLVPEVHVPGVDTRAWRMLIEHRCKSVAKRTAVKNAIRAILRTFGLDVPEGLSLWTRKGLKWLGQQTLPTEADALRRDLLAEELNETNRKIVRAEKALRRLADSHPGVAVLMTAPGVGIRTAEAVVAYVDDPQRFRKVRCVGSYFGLVPCQDASADKNRLGHITREGPSSVRQLLCEATWQGMMRSRHLKHYFERVMRQDPERKKIALIATAHHLLRCLLAMLRTGQAWQEAAAA

SEQ ID NO: 54786 - protein, 344 aa, unidentified
MTYYVALDVGVRTLALCIINEDGEVQLERSLPSDVEAIVECLSEFGGEIKAIGLEAGTLTQYLVYGLRAAGFRTIVMEARHVKSALGAMRNKTDRNDARGIAQILRTGWYQEVHVKSLESHYIRTLLTSRKALLRKCMDLENEVRGLLKVFGIRLPAGLQRGSFDKVVREPIDQNPALSHALSPLLDARNELYKSFLELDRRVKALANEDETCQLLRTIPGVGYITSLTFKAAIDDPCRFKRSKTVAAHFGLTPRRYQSGERDNQGRISKSGDADVRAALYSAANSMMTRAAAWSTLKAWGAKLIQAKGRRRGLVAVARKLAVIMHRMWVDGTPFTHRTQEIVN

SEQ ID NO: 54787 - protein, 453 aa, unidentified
MARVARKIKTKQGLRLKIVNPDAAGIDVADGEMQVCVPEDRDGENNRRFDSFTCDLREICAWLKACRITTVAMESTGVYWLNIFLMLQQEGFDVVLANPLQVKNLMDEKTDEADAEWLMLLHSYGMVKPCFQPDNVARQIRNLTRHRSTLITTAGREVQHMQKAMEQMNIKLSTVITDILGKSGMAIIRAIIDGNHNPNSLAQLADGRCRASKDTIAKSLDGTWDDDLLFVLKQSVELYDYYQKKVAECEREIERLMIRYSAQVDVEGAGKLSRSEKHTTYKNAPDIDVEKYGHALWGVNLMAMPGMGAGAILQLIGELGYDFVSKFDTCEKFCKWCNLSPNNKITGGKLISSHIPRRKNPVGQILRQCANTVKSEKSEMGAYFRRMKSKDGHMQAIVATAHKMARILYTMVKTKKEYNPSLVGCNEKELLERKIARTTRQLKKLNEKLEKVA

SEQ ID NO: 54788 - protein, 319 aa, unidentified
MNTNTKAHMRNAERNIGIDVGKYFLDICVYELGLHWQVENHTDGIKQLLIKLNRYRLTRIVVEATGGYERLLVEMAASKSMPIVVVQPIQVRQFAKAQGLFAKTDKIDARLIAQFGVVMKPPVRALPSRKVRLFRDLLARKRQLNETRTQELNRQQKAQKILEASHRRLLNLLDKEIQWINDRLHKEAGEVVEWQRTCEILLSAPGIGDGVAYTLLGELPELGQLSNRQISSLCGLAPFNRDSGKMKGRRRIRGGRAPIRTVLFMAMLSAIQHNPVMKEFYERLVAQGKNKKVALTACMRKMMTILNTMVRNNQEWQMN

SEQ ID NO: 54789 - protein, 399 aa, unidentified
MIYVGIDVAKDKHDCHIMRNDGEVVVDNFTFENSKTGFELFDRLVKQSKKRKEEVKIGLEYTGHYSQNILEHLKTQKYAVLPLNPLKVNMFRKSKTLRNTKTDKSDARYIAEVTAETEIEKRRHVSSDVRVLRSLTRYRYRVQKTMQVTKNRYRRVLQLVFPEFEKHFNVNYRSAIELIGRYSSPREVLSADKDRLVKNLDKLSYGRYGKRADELIQAAATSIGSSNAGDAYELKRLAKTISFLEDELSLLEEKLRAILDKLKSPILTIPGIGVNTGATILAEIGNVKNFPNDAKLLAFVGCEPTIYQSGKFVLTRTSMVKKGSKYLRNAVFQATKSAYVTDPVMRAYVDKKRASGKHFFVALSHGMKKMVRILYAVLSSGKPYEPPTTIKITEPCLTP

SEQ ID NO: 54790 - protein, 400 aa, unidentified
MLSIGIDVSKGKSTVCGMKPGGEIVYTPFEVQHTREGMSELVSLLRSSGEEVRAVLESTGSYHCPVVAALLENGIFVSVVNSLRMKRFCSQSIRKVKTDRIDAMQIALYGLAYWQELQPTKLPEDTYRELQLLARQYYQMTSLLIKAKVDFNAICDQVLPGMQELMSDHAGRHKLSDFVLRYRHTTHILEMGETRFRKDYCKWAEKKGYRNCERMAALIFATAQNGIPVLPNAPSTQIVITEAIRVLHTVEASRDAILTQMQALAKTLPEYSLVREMPCIGDTLAPRLIAEIGDVRRFHSKRALIAYAGIDAPPYQSGKFCANNRHISKRGNRYLRKTGYEVMQSYVMHKPANDPIFTFIEKKRGEGKSGKLAMVAGLNKFLRVYYGKVTELYRSLPAIE

SEQ ID NO: 54791 - protein, 344 aa, unidentified
MKISTIGLDLAKRVFAVHGIDEAGRVLVKRNLRRAQVLPFFAKLEPCLVGMEASAGAHYWGRELSRLGHTVKLMPAGYVKAYVKRGKTDAADAAAICEAVSRPTMRFVPLKSIEQQGILTLHRSRDVLVRQRTQITNVVRALCGEFGIVAATGKQPFKSLSAIIGDDGDGRLCREARLALKPLVDQLAQLERNLICVERELLMRHKADEDSRRLASVPGIGPITATALIASIGDPRRFRSGRDLSAWLGLTPQPRSSGGKHKLGNCSKQGNSYLRRLFVQGAQSLLFATRRKPNLPTGAWRRELLARRPVKVAAVAVANKNARIAWAVLVRGGVYRPAPLEERV

SEQ ID NO: 54792 - protein, 450 aa, unidentified
MSTIPAVPAAPEPVFVAFAAIDWGSKKHVVASVSAEGGRIEISQLDNTPEAVELWAANLRRRYPGGLIAVAIEQKRGAVIFMLSKYDHLVLYPVPPTMSAAYRRAFVPSGAKDDNGDTRLLLDLIRHHRDRLTPLHPDTRETRLLQFLTQDRRRLVEQKVRVVQQLTDCVSQYFPQLLTWFGPLDTPLIDALLQRWPTLQQLQHSHPGTLKRFFTEHRSWDDDRIAELIHKIHAAVVATDDPVVLEACSLKTTARLSQLAVLREQIAVYDKRIAAVTADHPDAPIFQSFPGAGAALAPRLIAVFGTDRSRWRDAADLQCFSGIAPILISSGNSRRIVMRRACPKFVRQTFHELATHAIRFCPWAKLLYEKHLHPDKKNHHACVRVVAFQLIRIALRCWLNREPYDERIFLAAQQRRNSPFAGKTGSDPAIEFETKAGFQKLTAKKPSGSR

SEQ ID NO: 54793 - protein, 356 aa, unidentified
MSRDVKYIGMDVHKEAIVIAVLSDGGKLVMESIIETKTSNLLQFIHGLRGELHVTWEEGTWAAWLYDLLKPHVHQMLVCDPRRNALLKEGNKSDKVDARKLADLLRTGMLRPVYHGEHGLRTLRELGRSYQTISKDLNRVMNRVKALYRGWSIPCAGTQVYAPRYRQEWLGKIEHAGVRRRAELLYQQLDGLQTLRRTLRPELLTESRKHKAAKLLRQIPCIGPIRAARLIALMQTPHRFRSKRQLWTYSGLGIETHDSAQYCYVNGQLQRSKKPQQIRGLNRNHNHEMKEIFKGAATRASCGVGPLRDFYVALLDKGMKPEMARLTLARKIAAIALTLWKKEERFDAEELKTQVA

SEQ ID NO: 54794 - protein, 350 aa, unidentified
MKKFIIGIDFSKETVDASIVQKEQPETLIAYTKFRNNLKGVDGLIAWAKSKVAQDGEIIFCGENTGTYSTLFSDELTDRGFIIWIEHSMNIVRGMGDVRGKDDKTDSLRIASYAARFYDKMKPYVRPKDETRVLKTLLAKRDRLKSFLKAEITNTKENPLMLQDSNIASSINEFFKRLEESLRKELKELERMILDVVMSSSEYAKNFNILTSMKGIGLINAVALIVYTDNFTKFNFNHRKIATYWGVVPFKNESGTSVRRGTHVSPKCNSWLKALLTEATLCAIRYNSRIKAYHDRLMARGKAIGIVLNNCKNKMLKILVAMVRDSKIYSDMDVSKDPHTTTTTSSIVVC

SEQ ID NO: 54795 - protein, 400 aa, unidentified
MLSIGIDVSKGKSTVCGMKPGGEIVYTPFEVQHTREGMSELVSLLRGSGEEVRVVLESTGSYHCPVVAALLENGIFVSVVNSLRMKRFCSQSIRRVKTDQIDAMQIALYGLAYWQELQPTRLPENTYRELQLLARQYYQMTSLLIKAKVDFNAICDQVLPGMQELMSDHAGRHKLSDFVLRYCHTTHILEMGETRFRKDYCKWAEKKGYRNHERMAALIFATAQNGIPVLPDAPSTQIVITEAIRVLHTVEASRDAILTQMQALAKTLPEYSLVREMPCIGDTLAPRLIAEIGDVRRFHSKRALIAYAGIDAPPYQSGKFCANNRHISKRGNRYLRKTGYEVMQSYVMHKPANDPIFTFIEKKRGEGKSGKLAMVAGLNKFLRVYYGKVTELYRSLPAIE

SEQ ID NO: 54796 - protein, 362 aa, unidentified
MTSIIYIGMDVHTTNYTLCCYTVDSDDAFAVVNVKPDYHEILKYMERVRSTRGGNCDFICGYEAGCLGYSLYHQLAKHGVACIILAPSTMPQQKGKSIKTDKRDAKNIAKCLAFNLYSPVYVPTAEDDAIKEYIRMRDDVKADLKRTKQQIISFCTRHGFHYEGKSRWTQAYFKWLDSLVFENALYKETLQEYLALYYTLDEKIAVYDARIEELAHQKRYEENVRKLCCFKGVSTHTALPLLVEVGDFHRFRTAQHFSAYLGLVPGESSSGEKVIHTNITKAGNSHLRTLLVESANSYSRGVVGKKSKVMKDKQGGNSPEIIAYADKANERLHRKFYKIAIRSKKNVAKQLLPESYHVSFGE

SEQ ID NO: 54797 - protein, 414 aa, unidentified
MNEQLIYFVGIDWGAENHRIVLLNQEGRRIEQYDAAHSGAGLADMVDHLRKCCRCSPSEVGVAIEVSWGAVVDTLMENGFSVYSINPKQVDRFRDRYTVAGAKDDSRDALVLASALRTDRKSFKRIQTDDPTIIRLRELSRLDEHLKAELRRATNCLWEQLHRYYPQILKLSSGADDLFVWDLLAKAPTPDKGAKLTGARIGQILARHRITRFTKEQVLEILRSTALHLAPGAAEAASEHVLLLLPRIIMLDQQVRDVNRRTARLVKDLPGNATTDTNVPKLRDIDLLLSMPGLGQVIAATMLSEASRPLRERDYEALRCYAGTAPVTKQSAKRKTVSMRRACSSRVRQAVFHWSGLSLMFDSRCRQHYDALRAAGHDHPRALRGVGDRLLSVLIAVLKSGSPFDQTLRRLRES

SEQ ID NO: 54798 - protein, 409 aa, unidentified
MDVVYQRCCGLDIHKKTVVACLLIPGPDGQPAKAVRTFSTVTEELLALAQWLEAAGCTHVAMESTGVYWKPVWNLLEDQFALLLVNARHVKAVPGRKTDVKDAEWLADLLRHGLLRGSFIPDRGQRELQELTRYRTSLVQERTAEVNRLQKTLEGANIKLGDVATDILGVSGRRILRALIDGATDAAVIAELAQGKLREKRPALARAVRGQIGPHQRFLLAQQLAHIEQLEATIAAVNAEIEARLLPVAAEQERLQTIPGVGVRTAQVLLAEVGPDVSRFPTAGHLASWAGMCPGNDESAGKRRSGQTRKGNRWLRSALIEAAHAAARTQGTYLASQYRRLTARRGAKKSAVAVGHSILVSAYHLLRDGESYHDLGAHYFDERDRQAVEHRLVRRLEALGHKVILEPAA

SEQ ID NO: 54799 - protein, 340 aa, unidentified
MTVMIGVDPHKGSHTAVAIDGDELELAKVKVRACRRQVDQLRDWAAPFEKRTWAVESAGGLGYLLSQQLLAAGETVLDVPATLAARVRLLGTGHSNKNDPNDARSVAVAALRAPGLGPVERADHAGVLRLLAKRNNELGRTRNKTACRLHALLCELVPGGIPNEINASAVERLLGEVTPTNPVEAARLDLAQEHLDDLRRLDGQMKASKKRIRQAVAASGTALTALFGVGPVVACMVIGHTGDVRRFRSSDHFASYNGTPPIEVSSGGRTVHRLSRRGNRQLNHAIHIAAITQIRNPGSVGRLFFERKVAEGKTKKEAVRALKRRISDAVYRQLLLDAGK

SEQ ID NO: 54800 - protein, 397 aa, unidentified
MLIVGIDVGKRNHEAAIIDEKGAIKGGKSFRFANSHEGIALLLGHINKHNPNKEEIVFGLEATGHYWLSLYDHLSQEGFKLHVINPIQTDSLRNFNIRSTKTDSVDSQLIANAVRMGNFPQTRLAEDDLLELKELGRLRLSHSSMVGDIKRRVISTLDRVFPEYETLFTDIFGATSIQLLSEYPTPEALASLETEKLAGIIASLSRGRFGMEKAQEIQSKAQNTFGNRFAQQALVLQIKQLLEQIKLVEEQMAELDAIIAQKVSTISPVATTIPGFGPVLGAVLVGEIGDIRRFDSAAKLVAFAGIDPSLRQSGEFEGSKIHMSKRGSPHLRRAIWMAAMNASKNDPTLKEYYQKKRAEGKHHMRALGAVCRKLCHIIFAVMRDNKPYQLTVQTPND

SEQ ID NO: 54801 - protein, 349 aa, unidentified
MRHIGVDLHKTNFVACFLAADDTQHLETFPLTREGLARFKRRLRKGDEVAVEVTQNVYYFYDQIKAAVARVALVDTYRFAIIATSKKKTDKADARALARFLKLGHLPEVPVPSEQVRKLRHLLQARETLVGMATKLKNMGHAALTRNGVALPRSAFASAGSRRRLAGREDLAEADRAILDSALRQLAAVEAEVSRLEAEIIGAGKGLPGLRRLLQVHGLNLLSAIALLAEVGDIALFEQSKQLVAYAGLASSVRQSNETTRRGAITKQGRKRLRTIVIRAVLSMASRTRTPLMEFYQKKKREKGTGKAICAAARKLLTIIFVMLKKGLDYWYLEDRLYNRKLRALDAAA

SEQ ID NO: 54802 - protein, 407 aa, unidentified
MDVVYPRCAGLDVHASSVTACARIAAGHEVTYQHRTVATTTAGLLDLAEWLSAAGCTHVAMEATGVYWKPVWHVLEGQFTLVLANAMHIRNVPGRKSDVNDATWIADLLAHGLIRSSFVPPAPIQELRDLTRTRKQLVGEIVRHTQRIQKALEDANLKLTRVVSDILGTSGRAILRALIAGETDPERLADLTTGRLKASRAQLVEALHGRVTAHHCFLIELHLTQIETLEAAVEKIERHLGDALAPFRAAVDLLTTMPGLSETAARVLVAEIGTDMTRFPTAGHLVSWAGLCPRLDTSAGKRHSTRIRHATPWLKTTLIQGAWAATRKKDSYLHAQFVRLKSRRGPKNAIVAVAASMLTAAYFMLRDGVEYADLGGAYFAHRDVEETKKRLLRRLRDLGVVVEVKAA

SEQ ID NO: 54803 - protein, 346 aa, unidentified
MMIIGCDYHPSWQQVSWVDTETGECGERKLVHATGEAKVFYQQLGAPALIGMEATGNSQWFIELVEDLGHAIWIGDAAQIRASYVRKQKTDKRDAAHILKLVVENRFPRLWTPDREQRDLRQLVLHRHKLVEIRSRVKNELQHLSMNKGMQKKATLWSQAGQKLLRQLPLKPWASCRREDLLGLLEMLNQQIGKLDQAVQKAAEEHPQARLLMTQPGVGPNTALAYVLTIGDVTRFPRGKQVASYLGLIPREESSGGRQKLGAITKQGNRLVRSLLVEAAQIAVRFDPGFRKQYLHRCHQKPKGVAKVAAARRLAVRLYWMLRTQTAYPEIVRIESSPRVPLVGAS

SEQ ID NO: 54804 - protein, 375 aa, unidentified
MTMMHHRDIRYLGLDVHKATISVAIAEQSGAPTTYGRIPNDPSAIRTLMTRLGGPQVELRVAYEAGPTGYALHRQLTKMDIPCMVVAPSLIPRQSGNKVKTDRRDALKLARLLRSGDLTPVWVPDEAHEALRGLVRARADAKADQLRAKHRLSKFLLRQGCWPPIGVRNWSQRYFTWLHQLEFEHLPDRVVFADYLAEVTAAAERIKRLEAALHQCAQSSSQVALIRALQAFRGIGFLSAVTLVAEAGDLRRFRTAPQFMAYAGIVPSESSSGGKQQRGSITKTGNSLLRHVLGEAAHHARHAPRVTSKVKQRQTDLPTEIIDLAWRAQVRLHTRYRHLSGRIGALKALTAIARELAGFVWAAGQVLQKEVPAAA

SEQ ID NO: 54805 - protein, 399 aa, unidentified
MARVWAGVDAGKTHHHCVVIDGDGGKLLSRRVANDEPELLVLISDVTALADEVTWAVDLPDGGAALLIGLLLDAGQELLYIPGRAVNRAAGGYRGEGKTDARDAAVIADQARMRRDLQPLRPGDELTAELKLLTARRADLVTDRTRLINRARGLLTSVFPALERALDLTTAGPLVLLTGFQTPAAIREAGEEGLEAWLRERKVRNAGKLAAAATAAAARQHAVLPAEKLTAQLIAAVAGEVMNLNGQVRDLDKLIEERFHRHELAPVIESMPGIGVLLGAEFLAVTGGDMSFFGTADRLAGFSGLAPAPRDSGRVRGNLHRPKRYNRTLNHVFYYSAMISIATCEESRRFYDRKRAEGKKHTQAVLALARRRVNVLWALIRDKRTYQAAPPRHASAEAA

SEQ ID NO: 54806 - protein, 424 aa, unidentified
MNLTQNDRLKQVTSDTLIVGVDVGSQTHFCRAFDWRGFELSRRVFKFSNTGTGFLTFLRWTEELMNKTEMKKVIVGCEPTGCYWLTFQKFLQDHDIQLVTVNPFTVNRSMELDDNSPEKSDLKDPKTIALLVKDGRYSISYLPSGVYAEIREAYVCRDQIMKQHVRLSNQIQGWLQKFFPEYFECYAEWDSTSGLMLLKEAPLPQDILKIGAGGINQIWRDAKVRAAGIKRAQTLVEAAQNSVGLEAGEAARLEIWVLVNDYILKAEQLKRLDEYLEEKVKEVPNVEKLLAIKGVGMSTVIGFTAEVGDIGRFTDPKQIQKLAGLEIVKKSSGKKKGQPRISKRGRRKLRRTMYESARALMQWNPAFQDVFLYYRNRTHKPLGSMQAKIAVACKAIRVFYVVLQTGCDFDEEKFRRDIIRPEAA

SEQ ID NO: 54807 - protein, 342 aa, unidentified
MKATTIGIDLAKHLFQLHGVDQHGKTVLKRQLKRDQMLSFFTNLPPSLIGMEACGSAHYWANKLQGMGHTVKLMAPQFVKPYVKTNKNDAADAEAICEAVTRPNMRFVPIKNGEQLAVLSLHRARQGFVKSRTAQANQIRGLLAEHGIIVPKGIAHISLRLPELLEDAENDLPGTFRQLIERLGEHLKELAKQVNELEEQIWCWHKENSASQKLAKMPGIGPLTASALVASIGDAKQFENGRQLAAWLGLVPKQHSSGGKQTLLGISKRGDIYLRTLLIHGARSVLRVAERKTEYAGSWLAGVMERRNHNVTVVALANKNARIIWALLAHEREYDADHAVAA

SEQ ID NO: 54808 - protein, 419 aa, unidentified
MKSTKANKVKKINDKTVIATLDIGKNVQYGYFRAPNGNDAKPFAFYNSKKSYNAFWQKLCQFKNKEGLEQIVIGFESTGPYAEPLFHFLRKKDVELVQVNPVHTKRVKELVGYSPNKTDKKDPRVIADVISLGHALTLVVPEGAAAHLRRLTQARERALKQRTATINQLQDLIFVIFPEFLSIMKGISTKTASYLIRHHPSADSICAIGVEALSAKIKQISRGRLGDERAQQLVAAAKNSVGINEGKESIILEIEHLNRRIENENRFIDKLEHQMADNLEHIAYSGSILSIKGIGTVTAAGLIGEVADFNKFETICEVMKLAGLDLYEISSGRHKGQRRISKRGRPLMRKLLFFAAINTVKSKGIMHEKYQQMLARGMLKMKALVAISRKLLGVIFAVVRDNSQYVQNYSGKYHYKLAA

SEQ ID NO: 54809 - protein, 315 aa, unidentified
MAQIVTAAGIDVSKAWLDIALYPEQDTATLHLERSAPDCFARLAGWLAQHEVGRIGLEASGGYETEVIDALAARGFTVIRFNACRIRKFAQVIGRLAKNDRADAKVIAHATAVLPVSQTGRRAKALDPLVEWLTYRQQLCDARQTCLNQLEHVRDATIRRQIQVHVAGLTRRIEAIGRTLAQLVAANPAWAEAARRLRTVPGVGPILAMSLLAFLPELGHLSGRKIAALVGIAPFDADSGTWHGRRHIRGGRGGLRDVLYMAALVAKRHNPVIAGFAKRLAGKPAKVIIVACMRKLLVILNAILCQGTDWRIQTA

SEQ ID NO: 54810 - protein, 388 aa, unidentified
MEVRLVDTTSTAHNDALARCLIAIELSKASWVVGVQTPLSNKTSQYRLTAGDWKSLLKLIERIRRQVGRELGRPVEMISCYEAGYDGFWLHRVLEAHGVRNYVLDPASLLVNRRARRAKTDRIDVERMLRALGRYLRGEPDACSAVRVPSVEQEDARRLHRERHRLVRERVQHVNRIKGLCATQGIYDYEPLRSDRKAQLEGLRSGDGRALPARLKAEIMRELHRLELVLKMIAQIEAERDAIVKEAAPSHLNAGKIKALAHLRSIGPEFATTLVGEVFYRSFDNRRQIGGYIGLAPSPFSSGATDRDQGISKAGNPKARSTAIELAWMWLRYQPDSALSIWFRQRVGDRKGRARRIAIVALARKLMVALWRYLETGLVPAGAVFKTC

SEQ ID NO: 54811 - protein, 335 aa, unidentified
MKKIHVGIDISKEKCNLCYRSGLKIVREEEISNEVKALKKAFKAALKALDASMDEVLVCAEYTGRYIYPLTVACQELDIFLWMDDPTRIKNSMGLTRGKNDAIDAARIAEYAYRYSDKAIRYHIPDAALVSMKDLLADREFLLIDKKRYQSQLTDQKKYMAPGDFKHKSSRWKKVIKSIDEQIAAIDTEIEALIAADPVLTRQKELLVSIDGIGERIAINMIAITGGFTRFQNARQFCSFAGLTPYKYDSGTSVRSKAKISKRANQTMKALLHMSAVNVATRMKAGEYKDYYERKLKEGKHVMCILNVLRAKLVHRMFSVIKRDTEYTKEYKPAC

SEQ ID NO: 54812 - protein, 342 aa, unidentified
MKYIGLDCHKKYDHATMIDTETGEIKAKRLIHLKEEFAEFIGERSDTRLVMESCWNWSKTYELVKDLVEEVTLAHPLKVRAIASAKIKTDAIDSRTLAELLIADLVPQAHLRKAENRIKQRVIRHRAFLIMMRTRLKCRIHDLVDSQPLSRDVIQAKPINIFSKKGMKWLCSLELTTEEERKMSDSYLRLLEAINREIASSNEMIKEIYDKDKDAQLLATIPGIGVTLAALISTEIDGIERFKSPSKLCSYAGLVPSTHSSGGKTYHGRITSEGNRWLRWGLIEAAVPASYGDAEIRRQLNDLRKIKSGNVAKTIMARRLLKIVYHVLRERRAYVPDYPSRL

SEQ ID NO: 54813 - protein, 347 aa, unidentified
MKRIAIDLAKSVYQVAESVQVGRVDRRKRLDAGAFARYVQEQIEPVEWVMEACGTAHHWGRLMQEKGHCVVLLHPRYVRPYRRRNKTDRNDCDAILEAARCQDIRPVPVKSVQQQQVQQLHKLREGWKKTRVQRINLLRGILREAGVEAPNGIKPFLRQACELIERPEVRALRGALQVVLAEINLYEQSMRECEEQLARWHADDEIVHKLDEVSGIGLLTASALKTAVGKPERFASGRHLSAWLGMTPSEYSSGERRRLGRISCKGNVYVRTLLIHGARAALLAAKRCKARTPERLTQLQSWALQTAERIGHNKAAVALANKLVRICWAVWCHERRFSGNWHSTKPA

SEQ ID NO: 54814 - protein, 474 aa, unidentified
MARTRNKPASPPVPGDAGAEVTDEPVQVIGRAAAIDVAKGSGMVCLRLPHESRAGRRTQKVWEVTATFAAVVALMDHLVCQGVERLVLESTSDYWRIWYYLAEAAGLEVWLVNARDVKHLPGRSKTDRLDCVWLCKLNEWGMLRRSFVPPEPVRDLRALTRLRANLTHDRVRHQNRIEKILEDSLLKVSSVISDLMGGSGRRFLQALADGERSPAALAALGDYRLHASKSELQEALTGRFRDIHGFEIGMLLKLIDDLSAKITELDERIEAQLENVPGLGGVCTSCGQPGPDGPCTGCGEPVLGVIARLDEITGIGRGAAQVIVAELGTDMTQFPTPGHAASWAKLTPRAIQSGAASKAGRTGKGNPYLRGATGAAVMTAARTETFLGARYRRHARRRGKQKAIVAGCRTIIEIAWRVIADPGFRYIELGPDYHDQLDPGRKTRDKIRQLEKLNPGMTVTLTPRPEPGGQAPAA

SEQ ID NO: 54815 - protein, 411 aa, unidentified
MELLVPRCAGLDVAKDEVVAYVRVPDGQGGRRQEVRTFPTFTSGLEALADWLTAEGVTQVVMEATGQYWKPVWYVLEETGFRLLLVNARHVKILPGRKTDVCDAAWLAELLEHGLLRGSFVPPAAIRQLRDLTRYRKRLIQTHSAECQRIQKTLEDAGIKLDSVAADVLGVSGRAMLAALVGGERDPEVLAELARGRLRTKLPQLRQALRGRFSDHHALLVGLSLAHLEHLEGAIAALDTEVDQVISPFARARDQLDTITGVGKRAAETIIAEIGVDMAVFPTAGHLASWAGRCPGNNRTGGKRRSGRPTKGNRWLGEVLTECAWAAARSRDTYLAAQYWRLARRIGKKKAAMAVGHSILVIAWHLLANDCDYQDLGGDFFVRRDADRARQRAVAQLQALGYRVTLEPLAA

SEQ ID NO: 54816 - protein, 343 aa, unidentified
MQTITTVGLDIAKSVFQVHCVDADGKVVLRRQLKRRYVLAFFQKLPPCLVGIEACASSHHWSRELQALGHTVRLMPPAYVKPYVKRQKNDAADAEAICEAVTRPNMRFVPTKTPEQQSCLTLHRTRHLFIRQQTAIINSIRAHLAEFGIVAPVGRNGVEELLEAVADPNDTRLPEMARACVAALGTQLLALKAQILAFDRRIMAWHRSNETSKRLDEIPGVGPALATALVASIADPKAFRSGRDFSAWIGLVPKQNSSGGKEKLGSISKRGDRYLRSLFTAGALAVIRYAKIHGTKHRPWLTALLARRPTKVAAIALANKIARMVWAMMTRGERYKEPVALAA

SEQ ID NO: 54817 - protein, 305 aa, unidentified
MKSYLGIDVSKLHLDLSHPAPAKRLANTEKAILPWLQSLPPETILVCEASGGYEALLLRLARSLHRPIIQLNARQVRDFARAKNRLAKTDRIDAGLIADFAQTFQPKPLPLPDPLQEQLLALVKHRSHLLTQITQNNNLTQTLTDKNLLRLIAKTVAFLQKQIAQLEALIQTKLAASPDLLAKVDRLQEVQGIGVLTATSLVALMPELGSLSDTQAAALAGVAPFNHDSGQLRGQRHIFGGRSQVRSVLYMAALVASRHNPVLRLLYLRLLTRGKAKKLALTALMRKLIVLANNLLKYPEFTLAS

SEQ ID NO: 54818 - protein, 404 aa, unidentified
MWYAGVDWADQHHDALVINEQGQQVGSIRVDHSLQGFAKLTTFLQQIIGSEPKEQMACIIETTHGLLIAALLEAGWPVYPVNPRTVDRRRSASGAKTDTIDAHLLAKTGRADFDDLHRLTPDSVQVAELKTLTRDQDGLIQMQTRLVNQLTACLKAYYPVALELFAKLQQHTTLVFLQTYPTPQAASAASQEQIASVLKQAGHPNPSKAAPAIFATLKLPHLTADAVTTRTKSRLMLALVSQLMPLLEQIAAYDKEITTLFLTHPDHEIFSSLPRAGKRLAPRLLAEVGDDRTRYVDAASLQALAGTSPVLFQSGMYSKAHRRLGCIKPLRNALHQFAWQTTQSEPWAMQYYQRKRAEGKSHTVALRALANVWVRIIFAMWLHHRCYEAITFETAQQRHARRAA

SEQ ID NO: 54819 - protein, 305 aa, unidentified
MISWVGIDISKSNLVVWVQPQKDGFEVPNTIEGFDVLVARLGQYTVGRVLLEATGGYERKVMAALQQASFSVLRINPRRARAFAVAMGKNAKTDPIDAAVLADFAEALHASREKPISPEREALRELIQLREHFVQQRDDNKRRLQQAQLPAVVEAIRDHIRYLQTQIKQLGKAIDQSMRELDAEKADQLISVKGIGTVATASLLVYLPELGELDRREIAALAGIAPYNDDSGNHSGKRQIYGGRARVRRALYMSCWVVIRHQADFKARYESLRERGKSAKVALIACMRILLIRLNAMLRDGTEWR

SEQ ID NO: 54820 - protein, 366 aa, unidentified
MKKGITFVGMDAHKVAIKLAVLLPGETKPVEWQLSNEKAAVRRMVRKVQRLAPGEVRFCYEAGPCGYALQRWIQDAGSVCTVIAPSLIPRKPGDRIKTDRRDARKLAELFRAGLLTEVHPPTPEDEAVRDLCRAREDAHEDLVRCRHRLSKMLLRRGWIWNGSKKAWGQGHRLWLRSLRFEQAADQVVLEDYLQAIEQVEQRLRGLDQHIEAVSQLPAYAEAVGTLRCFRGIDTLTAMGLVAELHDFMRFDSARGLMAFLGLVPSEFSSADSQRRGAITKAGNRHARRLLIEASWHYRHHPNAASLKRRRQGQPAEVVALADKAMYRLNRRFNRLLAKGKPRSKAVVAVARELAGFVWAALHSKAA

SEQ ID NO: 54821 - protein, 347 aa, unidentified
MLHVGLDLSRTRVDVHAVDEAGTAVLVTRAAPDAGGLASLVNRVGDLGQPVTAVIESMNGARFVHDQLELRGWTVEIADAVKVKGFAPLACKTDKIDAWVLAELSRRDLVPAIWLPSPGMRGDRERARWRLHLVRHRTALKNRIHATLMAFGHPSPVSDLFGVGGRRQLDHLQLPEPWAGDVVAALRLITVLDGEIDACEAALRKAGADHRYVPTLMTAPGIGWVLGYTIAAEIGDISRFPTPKKLVGYTGLCPSVDQSGGHDWRGSLAKNGPKYLRWAMIEGAVHAARHPVYSGRYQRTKTRLGRQRGPSVARVDIARKLTEAIWHMLTTGKPFAPAGATTTALAA

SEQ ID NO: 54822 - protein, 356 aa, unidentified
MESQDIKYVGIDCGKKSLEVVRIHSENSLKERRQFSTTETGINNLLKWLTQNDIVGLEAGTQSFRIAKSILNKGIQVIVLNPGDLATIYQSLKKTDKEDSLKIARLIQRYPMEELPVVPVPTDEEEDNRRLCTEQENWTRQLTQGKNRLHSLFTQAGLTEITKKHLRTKSSRETSVTLLPSRYQKEAERILQVLDLVEQNLKLIEEETKDALKKNPAYVQTIMSMPGIGMVTSLAIMSYMGDCKRFSSGKQAAYYAGLVPRVDISGDTVRYGKIVSRGCHSIRRVIVQAAWSLVRCQHGGKLKEFYERLYSKKGAKKSIIAVSRKMIEVLYSMIRTGALFDSMPEEVLHRKLLTIA

SEQ ID NO: 54823 - protein, 405 aa, unidentified
MSEGRFAGVDWASEEHAVCVVDERGRIVQGRRYRHDESGLRALCARLVRLGVALVALERPDGLLIERLLDAGLAVVAVHPNQVKANRPRYSVAGGKSDSFDSFVLAELARTDSHRFRVLVPDSDQTKALRAMTRARDSLVHTRVGLANQLRDQLATFWPGASKVFCSVDTQIALAFLKRYPTPADARGLGEQRLAGFLKRHGYSGRKPARELLARLRNGAEGRAGELETQARRQVVLALVSALEPIVARISELTIEIRHALDAHPDGAIFRSLFIAQDSWLSAATMIAEIGDCRDRYPTYRALAADAGQAPVAVESGKSKHAQFRWACDHRLRQAICTLADASRRHNPWAADIYQRAIARGASHTHATRILGRAWCQIIWRLWHDHDTYDPARHTALQRLIAAAA

SEQ ID NO: 54824 - protein, 389 aa, unidentified
MEYAVDLHSNNFLVGYYADKNNVKRKRYYFNKNGLDEFKKILTKDDIVAVESTINSYYFYDEIKPIVKEVKIVNTVRFKIISESSSKTDKKDVKNILDFLKLGILPEITIPSKFVRELRGLFSTYILLVKEKTANKNRIHSLLKDNGLFINKSDIFSVNIRKLIDEKQVNEIRKVQINTLLDEIELKEKSIERIKNQILTYSSKFKEELEILMSIPGISLFIGLAIMADIGDIKNFKNAKKLSAYLGIVPRVKESNRKVRTGKITKKGRKIARSFLSQVIFHFINSSEVYTEFYESKKKTKGSGKAIVAMMRKLVVVIYNMLKKNVKYYYVKEELHKRKLQEWIAFMKKFKAMSDDDWRNWDNRVRIKYDLRYRNEKLKKYAKKRLTLS

SEQ ID NO: 54825 - protein, 375 aa, unidentified
MEHRSEAFVAFDTAKLRNAVAIADAGRNGEVRYLGEFDNTEAATRKLVAKLASKHARLTFCYEAGPTGYGLYRLIKSIGHDCIVVAPSLIPSKPGDRVKTNRRDAVRLVKLLRAGELTPVWVPDERHEAMRDLVRARDTAVKDYRIKRQNVSSLLLRLGRHYPGKKTWGRAHINWLTGLKLEHCEQRIAFEEMLLAVRQVRERIERLEQAMRDAVADWTLAPVIEAVQAMRGIDMVGAVAFLAELGDLSRFENPRQLMAYLGLTPSERSTGESVKRGGITKAGNTRARRLLIEAAWSYRFPPRVSKDMQTRIGAAPRTAREIAWKAQMRLCGRFRTLTRKGKRPTIVVTAIARELSAFIWAINREVVGSHATANQ

SEQ ID NO: 54826 - protein, 325 aa, unidentified
MKSRVQIKHDSGILYVGIDVSKDKLAVYAGDLFEEEIDNTRRAIARMVKTIGRGVDRPIRFVLEETGCYSLPVHLELDRLGQQVCVVNPSRVRHYAIGCGVMAKTDRIDARIIRRFAEANDCEPTPIPSETRMLLRELIRTRGLLVKIRTMIQTLRKMTVSPSSRTLLGEVDRFLRTKIDKLEAEIVRHGKEDEEIERVSRKLDELPGVAALTATTIATLAPELGTLGKRRAASLIGLAPFVHDSGKYKGQRRIGGGRWDLRHALYMPVLTAVQKDATLRAFYRHLVDDRGKRKKIALAAAMRKMFIHMDRLIAGLNGKEEAMPT

SEQ ID NO: 54827 - protein, 397 aa, unidentified
MKPNSCGLDIASTSACVCVQNADGLVLHELNLPATREGEDRLIALLPAGTAIFMESTGRYHLRWARRLSAAGFPVYVLNALLAKRLMSAANALRQNKTDKIDARELAGIGRRDGAELGHYRFHEDAGRLGLRTLCQVRVHQRRLLTDTLKSAAGLLGTMLPEATFLSLAENRGLAALFLKIDSLARLQAMRLATLQTFACSKAEALHATLRQPLSAAGLFDALLPALQAQLRLIESLRDHQLTLLTAISTAVTAAKRDAEVALAQTIPGFGAKTTATIIACLPEDLRSWGRKQKVARKLQAYFGFDPKLKESGTWKGQVRMSKRGIELARTALFQAATCAMLHDPEMKAVFDRKRAEGKFYLVCVSHVMRIQLRRLVAVLYDRKPFVRHPLILAQPV

SEQ ID NO: 54828 - protein, 310 aa, unidentified
MSQEKVYVGVDVAKATIACCILKQHFTHANDPAGHLSLIERLGSLGRPVRVICEATGGYERELALALTKAGLEVSVVNPQRVRDFARARGRLAKTDKVDAAILADYGATMQPAMSTPSPQQAALAELISVRQDLIEQRTAEISRREHLRLPVLIEDSEQAQCRLEKRLAAVDKLIDQHIQADEQLAAKAVRLESVVGVGRVTVISLLALMPELGRVDRGQAAALAGVAPFSLDSGQYRGPRHIRGGRGALRRVLYMAAVSASQHNHILKAYYRSLIARGKPAKVALTAVMRKLIIVLNQLLRNPDFVLAG

SEQ ID NO: 54829 - protein, 375 aa, unidentified
MEDDITLYVGLDVHKDSITAAYALGMGEVELLGKIASKTDLDRLCKRLQSKARHIRVVYEAGPCGYGLYRELTSKGFDCMVCAPSLIPRKPGERVKTDRRDAVKLVRALRAGDLSAVYVPSEEDEAFRDLSRAWVSAKDDLKRARQRLKAFLLSHGVRYGGRADWGPAHRRWISAFAFDTAWQQLAFDEYRRAIEDRLAQCGRLEAALREAVINWRFYPAVLGLQAMRGVQFTTAIGILAEVGDLSRFVHPRQLMAWLGVTPAEHSSGEKRHQGSITKTGNSYARKLLIEAAWSYRHPARVSPEIQRRHECIPKAIVDRSWDAQVRLCRRYRRLAVRGKNPNIAVVAVARELSGFIWDISRLAMSLAIPNEARAT

SEQ ID NO: 54830 - protein, 332 aa, unidentified
MSMHPQGGVASRDHRPNSGIDVSKQHLDACWADVELRVANDASGHDALTAKLKAADVNLVMVEATGGYERGLVCALQGAGIAVVRVNPRQAREFSKSLGTLAKTDRVDARLLRDFADLISRHRDRSRFITPLVEVERQELAALTTRRRQLVEMRVAETNRLEQASKLTYRSIKRVIALLDKQIAQIDKDADDHLDRHFKSQRKLLDSVKGVGPVTILTLIAQLPELGLLNRRQISKLVGLAPLANDSGQRKGPRRIWGGRATVRAVLYMATLSAIRHNPVIRQFHGRLIAAGKAKKVAIVACMRKLLVILNAMLRDQAQWSAVKHLQLTERS

SEQ ID NO: 54831 - protein, 338 aa, unidentified
MEQRQYVAIDLHRRRSLIVRQNARGEQLSVVNIDNDPVALSLAMAEAGPNPEVAIEATYGWYWAVDVLEAQGANVHLVHPNGLAWDDRRVKSDYRDCVELLKRLRLGELPEAWIAPVGLRGLREMVRQRAKLVALRSGLKVQVHAVLAKHGLHPPVSDLWSQAGTEWVEALKLPAPYAFKVESLCELIDVYDRQVGQYERIIWDWLRDDVRYHAIQAVPGVGETLGAVFIAEIGDVGRFPSPEHLCSWAGLTPKLRESDVKSRAGHITKQGSPLVRWAAVEAVMRTRGTPKIKRDFERIAERRGKGIARVAAARKLLTLVYYGMRDGHIRCLEQADAG

SEQ ID NO: 54832 - protein, 347 aa, unidentified
MRIIKQNIGVDISKSTFDVRFVELYENHEVKYKLYKKFQNSSEGIELFVQWCKKQLDVNIDLHITMEATGVYYESLAYRMIEDDRFVVHVVLPNMAKKYFESLNTKNKTDKVDAKNLGLLGIERDLLIFKPKSFIYIHLRKLSREKEQLINERSSIKNQRHAETHSKFPLKKSITRYNNRIKYINNQILAVEDEITKLVSKDEYVSNKVKKIITIPGVGFHTIVGIIAETGGFETFTSIKQLTSYSGMDVRIMESGQWKGKSRISKRGNSHIRRLLYMPTLSTVRWAPKHKKKYERINEGKTNKMTGVIALQRSLLGLIYTLWKNDTEYNEDYQSNMSEINSYLEIS

SEQ ID NO: 54833 - protein, 442 aa, unidentified
MVPIDVGKSKAMALIADHYGEVVAAPFEFALTETGFAILAATIARAEAERSAEIIRVGVESAGHYHRTLVARLRSGGFEVVELNPAAVKEARSQQLLRRLKSDARDVGAMAELMIRGGGRAPAIRSDALATQAAWVGHRRRKVVARVALANQVIGHLDLVFPGLDGCYTDVLRAGSGHIIVTEICDPDRVQRLGAEGLRRFVARRGVRLSKPKATQVVEAAKVALRLPEAERAVRGHLLAADLALLDSLEAQIVAAETALGEVLADTPAAILMSLPGVSIVRASNYGAGIGDPDRFPNAAAAYRSAGLVPTMYQSSKRPRSGQHISREGSVELRSAIIELGRGLAQHDSDFGDYRRRLLSANKSPSVAAVAVGHRAHRLAFAMLRTQSPYDPDRWTKSVAAGMTVMAKTQRAHQNDVTCPPPKTSIIEGGDIFNLPARRVRA

SEQ ID NO: 54834 - protein, 340 aa, unidentified
MQPYFVGLDVHKQVIAYCVKTADGGIVTEGKIAATRAALDEWVQTVPRPWQGAMEATMFSHWIYWHLKPHAAELKMGHPAQMKAIFTGKNKSDKIDTRGISDLLRCNLLPECYVISPELGALRQQLRFRRLMIEQQVMFKNKTAGLLMEAGVEYERKRLHGKRYFAALLAQNEWIGKHMRPLLEYNREQIESLQDMDRRLLRMLEGHPRLQERIEALQEIDGVGPVTALTWALEVGSPERFSSLKKAMSYCGLTSAFRESAGKQKRGPISKQRNRHLQCALIEVAKIAPQNNEKLQETHRKALERGNHKNRATLAVARKLVAYLLAADRAFFQKSAAMPA

SEQ ID NO: 54835 - protein, 319 aa, unidentified
MMTYTTQTTLLYVGIDVSKETLAVATYPTTTVQVIPNDPNHCERLAHELAQQPVALVLLEASGGFEKPLVQALLRAGVPMAIVPTQRARYFAKSLRGNLKTDRRDAQMLARFASCYPVPETPDLPAVQAQLKELWARREQLTQQLEAEKKRLQVAMHPLVRSSLERTIAGVQEELAQIEAAIAMLVASDESLVQKAARLQTVVGVGRVVAFGLLAELPELGQVSHKVIAALAGLAPVRRESGQWRGYARIGGGRHRARRLLYLAAVVAVTHDARWKAVYEGVLAKGKPKKVALCAVARRLLVVMNAVVRDGRAYERVSE

SEQ ID NO: 54836 - protein, 346 aa, unidentified
MNQIIRIGMDTSKHIFQLHGVDAAEQPVLRKRLRRRQVVAFFAKLPPTVIGIEACGAAHYWARELRKLGHKVKLIAPQHVKPYVKRNKNDGRDAEGTCEAMGRPTMRFVPVKTAEQQAALMLVGIRERLIARRTQLSNAIRGYAAEFGLVAAKGLDKIEPLLAWVAQDENVPTLARELFAMQGREYTQLQVELKAIEARLKAWHRANACSQRLTQIPGLGPIGATALVMKTPDPRAFPSGRHFAAWLGLTPKDHSTAGKTRLGKITRAGDEFLRSVLVAGATAVIQQVRRGRGHPSRWLLALLKRKPPKLAAVALANKIARIAWKLMTTGESYDGAPMPRVSAVAA

SEQ ID NO: 54837 - protein, 414 aa, unidentified
MAGIINKSCGLDIHKQFLIATILSIFGEKKQLRFERTEEGILSLKKWVLTEKCDVVACESTSDFWVPIYDSLISHLTVIVGNARDMKAFTHKKTDKIDSEFIAQLALNNMIKPSRVFPKNQREFRSYIRLRHKLVQKRTDIKNVAHAILSSEMFRLNDVLTDIFGKNGIKIISGISSGKNVDQIIESLSPNVRKKSDKIREVLDSEMSLSAAIRIQTCLSLIKNIDEQINILEAEIFRYAYTNHNREMKLLMSSPGVGEISAATIIAEIGDFNDFSSGDKLASWLGLVPNVYQSADKYHNGRITKRGSKVARWILIQVAQAAARKNGSKLKEFFERKKKTIGHSKAIVALARKIVTILWHLITNDEMYEDELGYKKGEVQKRKIVESEEFSVDERVSILSEIFAIVKKEEPDIT

SEQ ID NO: 54838 - protein, 343 aa, unidentified
MELYVGLDVSLKETSICVVDGKGMIVSEGTVISEPDAIAEFVKGKAGSALRIGLETGPTATWLWHELRAHGLPVICIDARHAKAALSLQINKSDRNDALGLARIMQAGWYREVEVKSLPCHEVRALLKSRAQLVKIKRDLENQMRGLLKNLGLRIGKAGGRVFRSRVEELVGDRPLLHEAVGPLLAVREMVSRQIATLHRKLLDLARDDEESRRIMTVPGVGPITALAFVTAIDDPKRFARSRSVGAYFGLTPRRHASGEVDWSGRISKCGDGMVRSYLFEAAGVLLTRVPRWCALKAWGHRLWKRIGFKKAKIAVARKLAVILHRMWCDGTEYRRSTKEEAA

SEQ ID NO: 54839 - protein, 375 aa, unidentified
MKRDTRIWVGMDVHKDTIAVGWLRNDSPAEETREIPNDPRAIRKVFRRFAGEGDLRVCYEAGPCGYVVRRQLEAMGIGCDVVAPSLIPRRPGERIKTDRRDARTLARLSRAGELTSIHIPTAAEEAVRDLLRCREDLGEDVARQRHRLGTFLLRQGRLWREGRRAWTQRHWAWLRTQRFEDAATQRTFDEYLAHLDVSVDRRRALDAELSAVGEQAPWQPLVARLRCLRGIDTISALPLLAEIQDFHRFRSPRELMSFVGLTPSVQASGGHEQRGPITKIGNAHARRFLVEAAWHYRHRPHLAGRLRACTQQQPEAIRREALQARHRLHRRYWRLVNRGKLSQVAAVAVARELCGFIWALLVKHPLAAAPAGAVS

SEQ ID NO: 54840 - protein, 409 aa, unidentified
MEVVHTRCAGLDVHKKSVYACAIGCGTDGKKQQRVRSFGTVTADLLQLADWLRKQEVTHVAMEATGVYWRPVWAVLQDQFELLLVNPHHIKAIPGRKTDTKDCEWIADLLQHGLVRGSFVPPTDIQDLRDLTRYRAELRQSQNRVANRIQKMLEQANIKLSSVASNTLGVSGRRMIEAIIAGEDNPEQLAELARKRLREKLPELRLALQGHVRDHHRFLLKEFLDEWNALGDRITRIEQEIDCRIAPFEPAVTLWQSIPGMDRVTACNLVAEIGVNMAQFPSAQHLASWAGLCPGNRESAGKRMSGATRSGNKWLRRTLCQSAWAVTRKKNCYLSAQFKRLAARRGVKRAVMAVAHSMLIIAYTMLNTGQTYQELGGNYLEQTNKVQLQNYFLKRLRKLGLTVTVTAAA

SEQ ID NO: 54841 - protein, 347 aa, unidentified
MNSVGIDLHRNRSHIAVLDEHGELTLSKRIVNGRETFLELLGGLEGESQIAVEATYGWEWLAELLEDAGYDLHLAHPLRTRAIAAARVKTDAVDAKTLALLLRADLLPEAYVAPRELRDLRELLRHRIALTAMRSALKNRVHAILAKHGITREHSDLFGKGGRQFLAALELREAPRARLDSLIALICDFDREIDETTREIDQRAKADDRVEVLCQIRGIGPYTAMLIIAEVGEINRFPDARHLCAWAGLTPTVRSSDGKARLGHISRQGSPALRWALVEAAQKCMTGGGPLREQFERIAKRRGRKIAKVAVARQILTLSYYGLRDGEIRCLARRSRASAKEQLAAAA

SEQ ID NO: 54842 - protein, 372 aa, unidentified
MQQDSAVFVGLDTSKMKISVALAEEGRQGEVRFLGDIDHTPETVRRLVTKLAGKYGRLLFCYEAGPTGYGLQRQISALGHDCAVIAPSLIPKRPGERVKTNRRDAVTLARLHRAGELTRIWVPDPGHEAVRELVRAREAAMADLRTKRQHLQSFLLRHGRIYSGSRPWTQVHARWLSNLSFEHPAQYLVLREYRQAIDDAETRLERLTQHVAEVVSSWSMAPVVEAYQSMRGVAFLTAVTFVAEIGDVRRFETPRQLMAYLGLVPSERSTGAQVWRGPITKAGNPRARRVLIEGAWTYRYPARLSRPLQVRQESLPTVVRAIAWKAQLRLCARYRRLMAAGKRQTVVTTAIAREMAAFLWAIGHAVEPRPAA

SEQ ID NO: 54843 - protein, 358 aa, unidentified
MSHYRVGCDAHRRYSQFAILDEDGQLRHQVRVDHQAGAIGAFLENLPEGTPVALESVGNWYWIADEIEAAGCIPLLTHAAKAKVMMGNVNKTDKLDAKGLAKLLHLDSLPTVWLPPGEIRDERELHRTRMALSKLRTALKNRIHATLAKYGIASTEHSDIFVGAGRAWLKTTLSQLPPETGRCVAQELEALDGLQLQIAQSEERIRERIAQTPSIQRLKTLPGVGDILAIVIEREIGSIDRFGTAGQLASYAGVVPTVHASGGKTRFGHMRKPSNQYLKWAFVEAANVVVRHRRHPAWKTKYVCRVYDQVCQRKGHAIAVGAVARHLAEAAFWVLNRQQPYRPPAIRQVSPKQVQGRA

SEQ ID NO: 54844 - protein, 321 aa, unidentified
MADRTTYHQVLGCDVGKDSIVIFDSLSGTTHSLDNRPVALRRVLGELACEPANGVLLVCEATGGHEAGLLSLALQAGLAAHRADPRKARAFINSLRSQGKSDAIDAEGLTRYGLERGDRLPLWQPPSQSQQALQGLVRLRADLTDCRADYRRRLKAPGQGPDKDHIRAFIEDLNQRIKTLEADIKRRISQDAGLAETCSVIDDIPSCGAKTAITLAVLMPELGQINRRQAAALSGYAPHPNQSGKSDAYRRVRGGRREIKKALFMAALSASRFHPELKRNYQSLIARGKKPIVAISAIARKLITIINAKLRDARISQQQLC

SEQ ID NO: 54845 - protein, 409 aa, unidentified
MLFVGDDWAEDHHDVEVQDETGRRLGRARLPEGIVGIARLHELIVGFAGEDLCPEQVLIGIETDRGPWVAALVAAGYTVFAVNPRQVARYRERHATSGAKSDAGDAHALADMVRTDAHQLRPVAGDSALVEGIKIAARAHQNLIWDRHRQLLRLRSALREYFPAALEAFDDLAAADALDLLGAAPDPQRAARLSRARITAALRRARRRDIELKAERIQALLRAEQLSQPPALVAAYAATVQATVAVITAFTAQISALQGQVEAHFGRHPDVEIYRSQPGLGEILGARVLGEFGDDPHRYEGARARKNYAGSSPITRASGKKTVVLARFVRNQRLADALHQQAFCALRASPGARAYYDQQRARGAGHHAALRQLSNRLVGILHGCLKTRTLYDETTAWGHRDKQDQKAAA

SEQ ID NO: 54846 - protein, 311 aa, unidentified
MTTSSGRYVGIDVSKDRLDVAILGEQRCEQANNTRDGIAGLVEQMQALQPELIVVEATGGYQRGVVEGLFQAGLAVAVVNPARVRQFARACGLLAKTDKLDALVLAEFGQRVQPRRYEAKSEAGKQLSALLVRRRQLDEMLKAEQNRLRTLQPTVKSSVERMISYLKEEKKILDTQIQQFISEQEDWQDETEILGSAPGVGKVTTATLLADLPELGKMDRKKIAALVGVAPMNYDSGKKRGYRKTKGGRTDVRSVLYMSTLVATRYNPVIRAQYQQLLKRGKLKKVALTACMRKFLTILNAMLRDQQPFRV

SEQ ID NO: 54847 - protein, 489 aa, unidentified
MTKKIKRSGDDHAAKNKKKQIKINLINPLEKVRENVAGIDVGGEFHYVAAPDPKQGGKIVVNRFGSFTSNLQECVEWLKQCNIVSVAMEATGVYWTILFSMLREAGIEVILVNPRDFKKMKDKKTDVCDAEYLQLYHSYGLLEGAVIPEKMIAQLRTMTRLREQSVEDSAACIQRMQKALINMNLRLDNVLSDISGVTGMTIIRAILKGERDPKTLSLYRDKRCKKSEAEIEDSLKGFYQDDQVFALERAVRQYEFHLAEIQKCDQQIQTILSQFATHSNYRENPEEALLGTISTSKRRKSLLKPHEFSFDLKKEIMRITGVDLTLLPAFGVSTALGMIAETGLDMKIWKSDKHFVSWLGVAANNRVSGGLILKNSTKRKKKKAAIMLRMAVSGLYNESNDTAIGAFFRRKRAQIGAPKAITAAAAKLGRMYYHTMLTGKPFEEPGAQAYYEQQKEKYLRRIRKQVKQWGYKLTQEEAPAEAPVEVKSE

SEQ ID NO: 54848 - protein, 387 aa, unidentified
MPQPNDLSRSLAALDQDSTLIAVIEISQSSWLVAGLVPGINRQPLKKLAADETALVQLLYRWRDEATKAGRAIDRIAVAYEAGRDGFWLARWLRGQGIEAHVIHPTSVAVSREHRRAKTDRLDTELLTRAFLGWLRGEPRHCSMAMIPTLEEEDAKRPNRERENLVSERTRIVNRMKSTLARLGIRGFKPTLRKATERLDRLRTAEGRPLPPNTLAELRRDMARLHFVIDQIREIEAARLVRLEQNPEQASHAMVRLLAQVIGIGIETADMLVHEVFVRNLPDRKAVARYGGLTGSPDESGAKRREKGLARAGNARVRRGMIQLAWRFLMFQKESALAQWYRARTADARGATRKTMIVALARKLLVALWQLVTTGAVPQGVVLRRAA

SEQ ID NO: 54849 - protein, 330 aa, unidentified
MYLGIDTHKKYSQVAVVDGDGNLQDEIRLPNDRLNELAEEYAGGDAAIEASGNYRPIYEMLDEHLDVTLVNPSKNRIIADATVKTDRVDAKRLAHMLRADMLAESYVPPDEIRTLRDLVRTRKSLVEERTAEKNRVRAVLTRTDNTYDSELFGPTGREFLAELSLSDADRTIIEAHLSVINAYDEQIEALEETIEQKVLESPAAQRLLTIPGVGQYTAAVIVAEVGEIDRFDEDKQLVSYAGLDPTVHQSGDKEIRGGISKEGSAPLRWALVQCANIAVRCDEYLGNFYTRLEERKNHQIAIVATARKMLVSIFHMRQRKEPYDPPEVSA

SEQ ID NO: 54850 - protein, 343 aa, unidentified
MSEISTIGLDLAKNVFQVHAVDPLGGVVLRRQLRRGAVEKFFAQLAPCTVGMEACGSAHHWARVIGRYGHQVRLMPPAYVKPYVKRNKNDGRDAEAICEAVGRPTMRFVPVKSVEQQATLAVHGTRALLVRQRTMAANALRAALSEIGIVAAQGLKGLRELMARLEAPSVEIPEMMRGALLVLARHWQTLDADERALERQIAKAARADYEARRLMEVPGVGPIIASTVLAKVPDAKVFRSGRDFAAWIGLTGRDYGTGGKHRPGRISKQGDRMLRALFISGASAHLRQQKARGVGDPWLRELLARRPYKVAMVAFAAKTARVIWAMLVKGEVYRDRASASAAA

SEQ ID NO: 54851 - protein, 421 aa, unidentified
MSRSQRIVGFDCGEDTHSAVLLDTAGKYGKKFEVTNERGQIQELLAELILGIGPEAELVVSVESKRSHGRIVSDVAVELGCDLRQVNTVALNHYRDLEGQPRKDDDWDAYLAARMVFLEMGGARKAIVTTEEERTLSRLTRTHSRLVEDRKRNVARLRAVLLEVAPEMLHTSWKGPKPGSKAMQYMLERWPGFEGLEKAQLRSIEKILSRCRYGSRAADVAKLIRKAARGISVAEEERRAITFELDLLVQQIRFCNESVDQVYTKIARRVERDPVGEKLLEMHGFGPIITGVLVSELVPVARTSTEPKCATYAGVTPLSRKSGKSLDNDRLTQGVNQRILHALYTSSVVAIKNSAIDRAYYEKKLRDYAGHPKPHVAAFIALSRQRHKLVYKLITTDARYDKEILIASHLARLEQDRIAAA

SEQ ID NO: 54852 - protein, 374 aa, unidentified
MKNSITYVAMDTHKKQHKIAYQQPDQREIIEGTVLNTAREIKKMVKKIVHQAPGPVVFCYEAGVCGFVLKRQIEALGCRCYVIAPSLIPRKPGERVKTDRRDAKKLLSLFQAGLLTEVQAPDEAQEAARELTRLRETAQENLKRIRHQILKFLTRHGYVYTEGRHWTQKHLTWLHALEFAEPRLTQVFENYFAEMVYCQSRLQNLDQEVTQLAQSPAYREVVRLLCCFHGIDTLTAITLLTEIFTFGRFASPRQLMSYLGLTPGEDSSGDRQRKGAITKTGNARVRRLLNEAAWHYRHRYLPSRALQKRRAGQPAWAIAIAEAAGRRLSQRFRYLVNAGKLPTKANIAVARELIGFIWSLVTQYEARNPTVQTA

SEQ ID NO: 54853 - protein, 380 aa, unidentified
MENSSTETMIGKRLTVGIDVGDRYSRICVLDAEGEVAEAGFLMTEEAAFRSRFTGMAPCLTAMEASTHSPWLSRLIEDLGHECLVANPATLKGKNRKKSDKIDAEKLARWARSDPKLLEPIRHAGAEVQADMALIHSRRSLIEARTKLINRARGLVKSFGSRLPRCDADQFARKVKDCIPEALGGPIEPLLRMIAGLTEEIDALDKRVKAVAEKYSQATVPLMQVDSIGPLIATTYALTVRDPARFRKSRQVGAYLGLTPRQQSSGQREPELSITKAGNVYLRKLLINAANRVLGPFGSDCDLRRWGLKKAAGGKNAKKRAVVAVARKLAVLLHHLWLTGEKYEPLRRPEAAGEPSSPPALSLALPSRSVLRTPLRGFRP

SEQ ID NO: 54854 - protein, 355 aa, unidentified
MTEIRRLVTGGVDAHADSHHAVALDEQGQLLGDAVFATTARGYRELLAWLEGFGQVRLVGVESTGAYAAGLVRFLSVRAVAVVEVNQPHAHTRRRRGKSDPVDAEAAARKALAGEATVVPKLSSGIVESIRQLRVAREGAVKARTAALNQLSVLLVTAPGELRQQLAVRKTSRGKVSLCLRLRPDLARVHEPLQAAKLALRSVAERARELDRQISLLDQQLSGLVASAAPRTTSLLGISTQHGGQLLVSAGENIERLSSEAAFAHLCGASPIPASSGRTTRHRLNRGGDRNANRALYLIAVCRLRNCARTRAYAERRIAEGLSKKEIIRCLKRYIAREVYHTLRADLAALTRPRT

SEQ ID NO: 54855 - protein, 468 aa, unidentified
MKRWNFKSKSKAKRNVAPTKQPPNGGMPKIRPLVAGIDVGSEKHFVCAPTSDGGTEMRVFGTTTPDLQAILEWLQEAHVESVAMESTGVYWIPLYELLDSHGIEVILTDTRQFSRIPGRKTDAEDCQWIQQLHSCGLLQGCFRPQDIICHLRSLVREKAVFVAEQADWLRRMQKCMDQMNVRVHRAVSDINGTTGMAILRAIVAGERDPVQLAKLRDPRCQKSQATMAKELTGNWRADHLFNLEQGLKMYDTLANHIADYQREIQRRMEGLRCEKADRQPLPPVKNKEKAKAIKRRGQEPMRRVLHGMTGVDLTTIDGIGVETAEIIQSEYGIHLNEFPSEKQFVKHLRLAPRQSITGGKPQRKGKGKKSVTRTGQALKTGATSLRHSRTALGAYYRKVAAHKDSATAVFATARKMAQYAYRLLHYGQAYVDEGAIAFEKRYEAARLNRTAVTADQLGYKLVPKTAAA

SEQ ID NO: 54856 - protein, 355 aa, unidentified
MTDEKYIGLDVHQATISVAVVDSQGKVVMESILETKASTLLEFFGGLRGSLFVTFEEGTWAAWLYDLLKPHVTEVLVCNPRKIPLLKQGNKSDKIDARKLAERLRLHDLKPVYHGETGIRMLRELARSYLTVVKDLSRVMNRLKALYRSWAIPCAGRAVYYRRHRSEWLEKIPEAGTRRRAEQLYQQLDLLQHLRQQARRELLAESRKHAITAKLRKIPSLGPIRSALAVALIQTPHRFRSKRQLWTYSGLGLETRDSGEYHYVQGQVRRRKKQATIRGLNKDYNHDLKGLFKGAATRASVKPGPFQEFYQRSLAKGIKPTMVRLTLARKIAAITLTLWKKGEDFDINKLNSQAA

SEQ ID NO: 54857 - protein, 333 aa, unidentified
MNITTVGLDLAKNVFQVHGIDDEGKVIVCKTLRRRQMIPFFTKLEPCLVGIEACGTSHHWARQLSALGHEVKLMPPVYVKPYVKRGKTDAADAEAICEAVQRPTMRFVAIKSPEQQSVLFLHRTRDLMIRQRTQVINMIRAQLAEFGITLAKGIQHILKIVPQLIDGKVPDVPELAIKILSTLATQVEDLQVLICGLDKELKVWFRGSRVARRLETIPGIGLITATALAATVADPHQFTSGRKFAAWIGLTPKSNSSGGKERLGHISKMGDQYLRRLLVNGMTSQLRWIRSNPGSHRWAANLLTKKPPKLVAVAMANKAARIAWAVMTRDEIV

SEQ ID NO: 54858 - protein, 322 aa, unidentified
MEVVGAQNAGIDVSKQHLDYCFGSEQSRVENNESGWDALVAKLQAGSVGLVVLEATGGYERGVVCALQGAGIAVARMNPRQARDFAKSMGVLGKTDRVDARCLRDFADVLARHKDRDKYITVALEPHREALASLVVRRRQLVDMRVAEANRLDHATKLTARSIRSILKALDKQLAEIDDDIDQLLEEHFMAQRTLLDSAKGVGPVTVLTLTALLPELGRLQRRQITKLVGIAPLPFDSGQYKGKRRIWGGRAEVRSVLYMAALSAKQHNPVIRAFYERLVAAGKPAKVALVACMRKLITILNAMLRDGARWDAARHLQPVSA

SEQ ID NO: 54859 - protein, 352 aa, unidentified
MIIIGVDFHPEFQQIASVDTDAGEFQEKRLAHREEGENFYRALAGKKVRVGMEASGHARWFERLLSELQFELWIGDAAEIRTKRVRKQKTDRQDARLILQLLLEDRFPQIWVPSWENRDLRQLLWHRHRMVQARTRIMNQLQAVALNEGLRCKKRLWRERGRQQLESFRLAPWASRRRRDLLELLDRLNPTIAELTRAIEQEAEKCPPAQRLRTHPGVGALTALAFVLIIGEADRFHCGKQVASYLGLVPLEDSSGNRRRLGHITKQGSSILRFLLVEAAQVTVRSDPEWRSKYFHLAMRRGRKIAKVAMARKLAVCLYWMWRKGWNYEQLTKFGSHAGQPGNRHGVQSNTE

SEQ ID NO: 54860 - protein, 416 aa, unidentified
MELQRNKVCGIDVHKRFLIATILCRDGKKDTQRFSVTLEDLLKFRDWVIENGCEQVAIESTGIYWHPVHSVLEGKIDLIVANSYKIKHTPGRKTDVSDSEWIAELCLNGMIEPSRIFPKDDRELRRLTRAREGYVKQMTQEKNKIHQSLDSACIKLASVISDIFGKSGMYLLNCVLEGREIDDIIDGIPSGRLKKKADQIKESIKSRLDVSQVILIRGSLSLMKSIQERIDELDGEISARIQYRKNDLAIAMSIPGTGFVSATAILAEIGNYTDFKKPEQLAAWCGLVPSLYQSAEKTILGGITKQGSKHIRRMLIQVAYAISRTKDSKLKKFFLRIQAKKGSKVAAVALARKVLCILHHLLINQEMYIEDRDKKNMRQKPLIPPSPIEMSIQEMIDYIVRAGYVVTKSDSIGGFG

SEQ ID NO: 54861 - protein, 366 aa, unidentified
MGTYCGVDFHARQQLVKWCNTDDGEIHERQLWHQSIDEVREFYAQFKEEVIVGFETSGYSSWFEAMLEELGHQVWIGHATEIRRRARARQKTDRRDAELILDLLLKNEFPRIHRVSAASREVLRQLRYRHRLVQQRTRSYNSLQAITLGAGVSLKAKLRTRQGQERLLGLTVTETHSRQREEWLALIAQLNGYIERVETELELLAEADERVQLVRTHPGIGLLTGLCLVHTLSPVSRFANSRKVAAYVGLEPREYSSGERQHFGGISKAGSRLLRLLLVEAGHKAINKDAQLKQLYYRVMHRREKAKAKVAVARHLLVRTYIMLRDQIDYAEFVRRGVAVQSARVSYRPQVPEKLIERLASEQQSS

SEQ ID NO: 54862 - protein, 426 aa, unidentified
MWDAKRRVLKIKSLKHGIIQDKRGNVMRAVFGIDVSKTSSEVAILVNGEKVHGYSILNDAIGFNRLLGDLKTVHNPEIIFEATGVYSRCLQAFLEECGYAYTRLNPLEAKKQLDSLRVRKTDKIDAEKLAKSQLVHNRKPTYVQEEVYQHLRDLSRFYQNMTEDLVRAKNRLHKVLQVTFPELENLLSTPTGEQYWNLVMAFPCKEFVLSLSQSNLCEIIRQSTSKRISEKRIAYLTDKLIKLAKQSFCAVKKNSPMLEEVRYYAQELLRLSERRQVVLNDMVALAQPLPEYDILRSIPGIAEATATSIIGELGDIRRFQSTNQINAFIGIDLRHYESGNFLAKEHITKRGNPYARKILFKCIHNIASASHTNPCHIADFYEKRKRQSTIASTKPHTIASIHRLIRTMYYLITHNKLYDYSLTQNR

SEQ ID NO: 54863 - protein, 340 aa, unidentified
MGDITTIGLDLAKTVFQVHAVDEAGTVMMRKRLRRSQVLAFFAGIPPCLVGLEACATAHHWARELIALGHEARLMPPNYVKAYVKRNKHDVADAEAICEAVRRPSMRFVPVKTAEQQSALMMHRARDLLIRQRTMLVNALRGHLAEFGLIEAQGLHKVARLIAIVMDETDGRVPDVARQVLKMIVNQIEDTQTRIVGLETQVLAWHKSNPVSQRLATIPGIGPIIATAIAATVADPNIFRSGREFAAWLGLVPRQNSTGGKARLGGISKRGDSYLRRLLVNSAHTVLLCSKQAKTDLWLTSLLSRKPRLVVAVALANKTARVAWAVMSRQDIYRHAAVAA

SEQ ID NO: 54864 - protein, 410 aa, unidentified
MGYETLIRRAHVMTRKNTLKSLPTDTEFRVVGLDLAKSDVSVAAIPVDDNTPSLVDRMTYADLLDWAGKISPTLFAMEPCNGYSLLCLQLENLGHEIKVISGSTVSMWINTHLSGQKTDLNDAIALARLAVSDAELTPIRHKSITEIRIQTVQAVRQQLMSQRSKSIVSFKALAQQWGIPCAAGHRNLKKLRESIEAKVDLITRPVANAMLFLLDAVKSLDRQIGQLNQTLQELVMSDERGRLLQSVLGVGTQISARVITVVGNIERFNSPRSLVAYVGVAPRNFITGHKNLTKKKHGNCPDLSHKGQGKISRRGDKLLRSLFIQGAACLYMQFCKDQLPECQLKRWILKQLASQKPYGKLIVSLAAKLIRIVWAVLTYREKFNIQKAGMTRSMWSEMALETPLNKEVPA

SEQ ID NO: 54865 - protein, 385 aa, unidentified
MTNEMLQTNDTNTLATLTIRLLVAMEMSLKAWRLVMSPEGGTRKRVKTIEAGNYLALGQAVTEARERFKLPAQTAVVFCYEAGRDGFYPYRQLTEAGHEVWVIDSASIEVSRRKKQAKSDGIDGEKLAELMQRKARGEHKALRIVRVPSPEAEDERLLPREREIILQDLGRLRNQVESILFAHGYRDIPKTASGLKTWVAERRELAPQLRERLGREIERLTLLETQLHAVEKAMALKVKQEQGTGIAAVAGALMRLCGIGLVGAWVLSSEIFGWRQFRNRREVGAVLGLAPTPYSSGQDEREQGISKAGNRRARSMLVELSWLWLRYQPGSALAQWFKTRFGGGGKRMRRIGIVALARRLAIALWRYAAFGVVPEGATLKQAAKA

SEQ ID NO: 54866 - protein, 346 aa, unidentified
MEQSIRCGIDIAKLVFQIHGVNAKSGETAMVKKLARHEMLRFFANKPPMLIGIEACGGAHYWARELTKLGHTVKLMTPQYVAPYRRGGKNDANDAEAICEAVARPNMRFVSVKSESQQAVLVMHRMRGQWVRERTSQMNQIRSYLHEFGIVINQGRAALTKVFPEVAEDATLPLLFRQSIAELADTLLDLEKRIDALNKRIDSWSKQNNTAQALLTLCGVGSITASAAVATAGDVSVFKNGRQFAAWLGLVPKQNSSGGKTQLGPITKRGDCYLRTLLVQGARTVMIAAMKAKKAKQDNPMFEWIYTLQARRPSNVVAVAIAAKQARMLWAIMAKQQRAEAAGLAA

SEQ ID NO: 54867 - protein, 349 aa, unidentified
MARVSELFDHVVGVDTHAKSNTFALLETRTGAVTATAVFPTSTAGNRRAAQWVLRNGGGSVLAAVEGTSSYGSSITSVLQAEGIDVVEVRPLNHASRAHTGKNDAIDAEAAARHVLGQDVDRLARPRNAGRRSALRVLLSSRSIIDQQRTANRNALTALLRTNELDIDARRPLTDGQIRTIATWRLKATASIDAVTVARGEARRLAKTILEQSALLTENHRQLRELAEEIAPGLQNVQGVGPVTAAIIICAYSHHGRVRSESAFAALAGVAPLPASSGNTTRHRLSRTGDRQLNRAFEVIVRTRVTCDQSTKAYVARRKAEGMSTRDIRRCLKRYVCRSIYREVRTCLT

SEQ ID NO: 54868 - protein, 343 aa, unidentified
MYYIGLDVHKKTISYCVKDAAGRVHQEGKIGSTRRELDAWVRALPQPRMMAMEATIFTGWIYDHLLPHAEKVKVAHPLMLRAIAAAKRKNDRIDASKIADCLRCDFLPECHMAPTAIRDRRRILRYRHLVLRQAVQMKNRVSGLLMETGVSYNKLRLHRMGYFEQLLSSSDEISESIRPLLKLCREHIDRSIRLDTALLRSLERDPLLSERLRRLRTIPGVGPITALTWALEVGDTSRFCSIKQAISYCGLCSAEKSSADKTLRTPISKQRNKHIQQVLVEAARLAPRYSEELALLYERERQRGNANRATLAVARKMVAHMLAVERRNTDFVPAEEFKRTAAA

SEQ ID NO: 54869 - protein, 373 aa, unidentified
MSFLNEAYIGIDVAKLQNAVAIAEAGREGEIRYIGEVDASPESMKRLVVKFASKYARLHFCYEAGPTGYGLHRLITDLGHSCTVVAPSLIPRKASDRAKTNRRDATALARLLRAGELTSVWVPDPAHEAMRNRIRSRTVAVKTIRAHKQQVSAFLLRHSRIFPRHKHWGARYRLWLQQQYFEHPADQIVLQEYVEAVRIAEERLVRIERAIMEFLPGWHLAPIVDALQALRGIDLVVAVSFVVEIGDIRRFASPRQLMGYLGLVPEERSTGETVRRGSITKMGNPRIRQLLVESAWTYRFPPRIGAKKLQKLVRVSPKIREIAWKAQSRLSARFRAFSARGKKTTVTCTAVARELAGFMWAVAMEVQSPSPVT

SEQ ID NO: 54870 - protein, 353 aa, unidentified
MIVIGIDPHKSSHTATAVDRVTNTDLGSIRIDATLTGHKTLISWAKTWPERTWAVENAYGLGHHLAQWLLTLGEIVLDVPTTATARVRELSRGGRRKNDRIDAVAAACVAATQGDARPVDPEGPTEILALLDERRTNLSGSRTRIVNQLHALLRQLLTGGAPASLTAAAATALLQNFRTKSAVDRMRVGLCRDLIADIRRLDTQLAANEKQMSAALDEHGTRLREVDGIGAVTAARLIGRTGRPDRFPTAAAFANYNGSAPVQIASADTDRHRLSRYGDRQLNSALHTVAVVQIRMPASTGRAYYDKKITEGKKPAAARRALKRHLSDHVWRIMLSDERHRLRVTDNQPARAA

SEQ ID NO: 54871 - protein, 457 aa, unidentified
MGRKGKRTEGLEEAHPFTGMSQVNPNAAGADIGAVEIVVCVAGDENTQVVRAFGNYTVDLQAIGKWLKEYDVKTVAMESTGVYWIPLFEELERQGFDCLLISSRSLQRVAGRKSDITDAQWIQTLHSYGLLESSFRPQAELIALRTLLRHRNQLVEHRSPHILHMQKALLQMNVQLSQAVTDITGVTGLTILRAILAGERDPQELASMREPGCKKSAEEIGKALTGTWREEHLFILKQSVEMFDFYTKQIQACDEEIERVYGLTRPDWDAGEVKPLEQRKRSSHSKNRPHNPEGIRKHLKRISGVDLSVVDGFGVSLAQTVIMEVGTDMGKFPSEKHFCSWLGLAPKHEISGGKVLKNKTLKTKNRAGQAFRMAAQSVKQADCVFGVTYRRLKARLGPAQATVATAHAIARVVYRMLKYKLEYETISVEEYEKKYQTQQLKYMRKKAAKLGYQLIPA

SEQ ID NO: 54872 - protein, 353 aa, unidentified
MSSEKYVGLDVHKATIVAAVHDEAGKCLMTSIIETKAETIRAFIKGLTGAVRITFEEGTHATWLFDLIKPLVYEVVVCNPRHNILLQSGNKSDKIDANKLAELLRTGMLKPVYHESHGTQSLKQLAQCYETLVSDNIRVMNRIKALYRGRGIDCSGRGVYRESQRKDWLAKLKEPGTNSRAQLLYTQLESIKKLRGQARKELLKESRRQPASKLLTRVPGLGSVRVALIVATVVTPHRFRTKRQLWTYVGLAVVTKSSAEYELVGGQVRRRIKQSATRGLNRNYNRRLKKVFKGAALVATRSEPFASYYRDLIEKGTSPEIARVNIARKLAAIVLALWKRGEEYDQQRLKKSA

SEQ ID NO: 54873 - protein, 396 aa, unidentified
MLYLAIDQHKNYMTINIRNEQGDVLQKGQVSTAPADIDEFFAAFVKKAHKHRGYMSIVEVCGFNDWLLEKLKKTRCNEIVVIQPEHSALTKTDKRDADALGALLWNNRKRLQGGQRPNGIRRIFPADPTDAQVRQLANYRQHLLRQRTRVVNKIKGIINKHNLSHDAPTENSATQKFRKWIKAVQLPVVDRLEINMNIESLELYDKQVIEIESELVKRAEASKEKITDVYRLKAIPGISAMGAITLLSRIGDIKRFKNPDSLANYFGLTPGCHNTGGKHRVGGITKRGNAVARIVLNFAVNHIVRKDPAMKAWHKKIKNKKGAKTARVAVMRRLATIIWHMLRWGKPYQFRYDPPVVTLKKDDPRSSKEVLGGMGNRNHSRKKEGTPLKCRGKTKA

SEQ ID NO: 54874 - protein, 455 aa, unidentified
MSQRKRKPRKSKINVNSLPKHLRHINLHAAGIDIGSDRHLVAVPEGSDEVSVRQFATFTSDLHEIANWLEKCGVTTVAMESTGVYWIPLFEVLEERGFEVKLVDARHVKNVSGRKSDVLDCQWLQQLHTYGLLKGAFRPPNEICVMRSYARQKEMLTQASSMHIQHMQKALQQMNLLLHNVVSDITGVTGMRIIKAILAGERDPNVLALNRQEECRNSKETIAKSLVGNFRADHMFALKQAVELYETYQAKIAECEHALISHLGTQPDVTDDTPPDSGKRVRARERVRAGIDVREKLFKMTEVDLFAVPGLAADTLLTLGSEVGFDMSPWKSVKHFTSWLGICPGTKRSGGKTLDRRTKRNANRAAQAFRMAASSLARSQTALGAFYRRIRSRTDGRRAITATAHKIARIYYSMLTKGTTYVEAGQQVYEQMYRERRIKALKKQAHSLGFQLYPA

SEQ ID NO: 54875 - protein, 366 aa, unidentified
MGWMAPLRHLSAKLLSDRISSEWEPSMDEVTTIGLDLAKHVFQVHGVDAEGATVLRKQLRRAQVLAFFSRLGPCLVGLEACATAHYWARELRALGHEVRLMPAQYVKAYIKRNKHDAADAEAICEAVGRPTMRFVPVKTADQQAAQLLHRVREQLVRQRTMLVNALRAHLAEFGLVAAQGLRNVGELIAIVRDDGDKRLPAMARQVLQVLANQVEQIEAAIAALERQLLAWHKTNPVSQRLASIPGIGPIIATAIATTVADPTVFRSGREFAAWLGLVPRQNSTGGKTRLGGITKRGNRYLRRLLINGASANLLRSKATKADPWVIGLRQRRPPLVVAVALANKTARIAWAVMLREREYQPRAVAA

SEQ ID NO: 54876 - protein, 418 aa, unidentified
MDNRPPFLYQATVGIDWADQKHDVFVRFTNGDSYRRKIDSRPEAIQEWLLELRSVCAEGKIAIALEQRRGALFYQLCTHLNWIDLYPVNPHSLSSFRLTFFSSRAKDDPIDSQLLEELVRTHSDRLRPYRPESVTERKLDQYCRHRRSLLDLATKTKLKLISTLKQYFPLAVNLFAAVGMKSDIALSFLSRWPTLSELQRAKAHTVRSFFYAHNSRSQSRIEKRLQQIGQAHNVTDDLALIEPLVLTTKCLVGQLRQFNHAIKEFDHEIKELFKSHPDHFLFENFPGAGEQLAPRLLSLFGSDRARWADATDIQKYSGIAPVIERSGKSVWVHRRLSRPKFICQTFHEFAQQSVQHSSWAKQFYQHQRDSGKSHHSAIRALAFKWIRIICACWKANKPYDESFYLQALAGKNSPLPST

SEQ ID NO: 54877 - protein, 339 aa, unidentified
MQVVIGIDPHKASHTAVAIDGGEEPLSSVKVRATRRQLDQLLSWAEPFEKRTWAIESAGGLGYLLAQQLVARGESVLDVPPTLASRVRVLATKRSNKNDPNDALSVALAALRTPRLRVVEPANHAEVLRLLSKRNSDIVSHRIRVVCRLHALFQELAPGGIAKKMNASDAEAFLARLEPTTPTERIRYELATELYEELCRIETQHKASEKRIKEAVKASGTSVTQIYGVGPVLAAQLIGYSGDVRRFANRDAYASYNGTAPVEFSSGGRVVHRVSQRGNRMLNHAVHMTAITQIRQPTTQGRIYFERRVGERKTKREALRSLKRHVSNAIYRQLVLDAQ

SEQ ID NO: 54878 - protein, 422 aa, unidentified
MLEETNDTEEIIQRVAALDIGKAELVCCIRVPGEGERGKRLQEVRTYQTMTRSLLVLADRLGELGVTRVVMEATSDYWKAPFYLLEAAGFEVWLVNAKDVKHLPGRPKTDRLDAVWLCKVAERQMLRPSFVPPPAIRRLRDVARYRADLVAVRTAEKQRAEKLLEDAQIKLSVVASDIFGVSGRAMLAALVAGERNPKVLAQLARGRMRAKLSVLEEAFTGFFTDHHAFLLARMLARVDALDSDIAELDRKLEELIAPFAAAVDRLDEVTGVGRVAAQLILAEVGTDMARFPTAGHLASWAKFTPGVKESAGKKKGKSSTGHGNRYLARVLGEAAVAAGRTDTFLGERYRRIARRRGTKRAIVAVGRSILVIIWHLLADPTARFYDLGPGFYDTRVNAERKKRNHVRQLEALGYTVTLQPAA

SEQ ID NO: 54879 - protein, 315 aa, unidentified
MTNLKKSKTNVNVGIDVGKWFLDVCLYEKDLHWQVENNPEGVRKLLGRLGRYQVERLVMEATGRYQLLLAEQAFKKGLPVCIVKPLAVRRYAQALGKLAKTDKINAQVIAEFGARVEPIITLAKSKNLMLIKDLLSRRRQLVNMRTKELNRVKIMGKALEVSCKRIIRTLDLEIARMEKLLDRLIENESEWAEKKALLKTAPGIGDTMVYTLLADLPELGTMTNKQAAALVGVAPMNRDSGKMKGKRRIQGGRYSVRTTLYMATLSATLCNPIIKEFYQRLTAQGKHNKVALTACMRKFIVMLNAMVRDNCEWQY

SEQ ID NO: 54880 - protein, 417 aa, unidentified
MKGSEKSRGQERYVALDIHKEYVLAGGMNVEQEWVLPARRIEMGKFREWAEKNLCERDALVLETTTNVWDIYDIVAPVVSRTVVAHAGAVRQIAEARVKTDKEDVKRLIRLLIADIVPEVWAPPVAVRQLRALISYRWRLVKMSTAIQNRMHSLLHWHNIPAPQGKVDTGENRAWWEQLELSALENLRMKQEIKTLRLVREHIVEVEKELGRLSNSEQWGDQAVYLMQIPGVGIIVTMTILSAIGDIRRFESPKKLVGYAGLGAGVHDSGQKHRDKGITKFGRKELRWALVEASWQAIRSNPRWKAAYEELCKRKHPNQATVAIAHKLLVTVWYLLTRQEVYQQSSAEDLAYKMLTWAWHMDKNALQGMTNQQFAKYGLLRLGTGEDLTRIVRGGLPRRIASKEEALALKPDLLLRQ

SEQ ID NO: 54881 - protein, 348 aa, unidentified
MTLVGCDLHARDQQVAVLDTATGEIQERRLVHDGDSVEQFYTALPGPVTVGIESTGYALWFHALLRRLGHEVIVGDAAKIRAMVVRKTKTDRRDAAHLLDLLRHDRFPTVWLPEPAVRDQRPLLAHRMRLVRMRTMVKNGVHAIALNYRLALGPSLFTRAGVAQLQALSLPPHTACRRSESLELLSWLNTRIKGLDDQIGEAAHAHPEAQRLMTHPGVGPLSALATVLVLGAVTRFPTSKHVVSYVGLAPAIESSAGKHRLGRITKQGNALLRYVLGQAGQAAIKRDPDLNRLYYAVLHRRGRSRAKIAVARKLLVRLYVMLRDQIDYPTFLHRAPAAARRKEMTPTS

SEQ ID NO: 54882 - protein, 343 aa, unidentified
MQMVTTIGLDIAKSVFQVHGVDAAGQVVIRRQLKRRYVLAFFEKLLPCLVGIEACASSHHWSRELQSLGHTVRLMPPAYVKPYVKRQKNDTTDAEAICEAVMRPNMRFVPTKTIEQQSCLMLHRARHLFIRQQTAVINSIRAYLAEFGIVAPVGRRGVEQLLEVVADAADRRLPEIARVCLAALGSQLRRLKAQILEFDRRIMAWHRSNATSKRLDAIPGVGPALATALVASIADPKAFRSARDFSAWVGLVPTQNSSGGKDKLGSISKQGDRYLRSLFTTGALAVIRYAKIHGTRHRPWLTALLARRPTKVAAIALANKLARMAWAMMARNERYKEPAALTA

SEQ ID NO: 54883 - protein, 401 aa, unidentified
MNCVGIDVSKGKSMIAVMRPLGEMVIPPFEVGHTDAELCELSRRLGGLEGETRVVTEATGNYHLPVASFLYDSGFYVSVVNAMLVHGYGNNSLRRVKTDKKDAVKLANYGLDHWLTLPRYIPEDEVRLMLKTTCRQYQQCTKVQTMLKNNLISLLDTAFLDANRLFTSPTRADGSEKWVDFISAFWHCECVCELSEKAFTAKYQKWCKRHGYNFSQDKALDIYTSACGHFSVMPKNDTTKILVEQAVSQLQATSAALAALRNEMQSLAASLPEHPIVMGMFGVGPALGPQLMAEIGDVRRFHSKKALVAFAGIDAPPYQSGQMEIRSRSISKRGSAVLRRTLFLVMSAVLRCSPADEPVYQFMDRKRIEGKPYRVYMMASANKFLRIYYATVKQYLDSLEA

SEQ ID NO: 54884 - protein, 374 aa, unidentified
MENPQDTPDGLEAQTGGRLMTQTTTSRRRNPARTIGLDVSDRYTTVCVVDADGSVVERTRIGTTRDALQRRFGDLPRQRIVLETGTHSPWMARALAAWGHEPIVANARRLQLISANATKRDVVDAETLARLGRVDPQLLAPITHRTEQTQGHLALLRARDGLVRSRTQLINHVRGAVKSVGGRVPNVSAASFARQAVTALPALVAPVLAPMLDQIHRLTQQIRRYDGDLARLAATTYPATRQLRQPAGVGPLTALAYVLVLEDPTRFANGRCVGAYLGLAPGRDQSGQSDPQQHITKRGDALLRRLLVGSAHYILGPFGPDCDLRRWGLALAARGGRNAKKRAVVAVARKLAGLLHQLWRTGATYAPLHRAAQA

SEQ ID NO: 54885 - protein, 351 aa, unidentified
MGKIITDFSSVTTVGLDLAKHVFQVHCVDASGRVVVAKSVRRNKLLEFFASLPSCLVGLEACGSAHHWARELVKLGHDARLMPPAYVKAYVRRQKNDAADAAAICEAVSRPSMRFVPLRSLENQAALMHHRVREMLVAQRTQVLNAVRGHLAEIGVIAAQGPKNARDLAKLIATDEDTLPYLVRAALAPLVRQLDRLDEDIGLADDAIKAMAKADESARRLMSIPGIGPVTASAIAASMQDVSSFSGSREFSAYLGLTPRQNSSGGKERLGRVSKMGNRYLRKLLVVGAHAVLYNRKGHDDALRTWACKLMETKPFKLVAVALANKLARIAFAVMRDQTPYSAKPFSPAQA

SEQ ID NO: 54886 - protein, 359 aa, unidentified
MVKARTLVGLDVHAAKIVAAVLDVETGEVRSFRLPGDVGEAVGLCSGLARPVRATYEAGPTGYGLARALEQRGVSCLVCAPGKIPRAASDRVKTDRRDAEHLARLLLAGKLHAVRIPGPQEEALRDLVRAREDVRVDLMRARHRLSKLLLRHGLRFEDRAWTERHARWLATVELAQPAAQTTLIDYRGAVDALVHRRGELERAIIAAVPGSGWAELVGRLRCLRGIDTLSAVGLCCEIGDFARFARAGQVMSFVGLVPSEDSTGERRRLGSITKTGSRHARRLLVEAAWHYRNPPRLGRELAARQSGQPVEAVAISWSAQQRLHRTWRRMERRGKRRTVIAVAVARELAGFCWAIARTE

SEQ ID NO: 54887 - protein, 342 aa, unidentified
MQITTIGLDIAKNVFQVHGIDANEKVVVRKQLRRSQVIAFFKALPPCLIGMEACATAHYWARELTKLGHEVRLMPAKDVKAYLKRNKNDAADAAAICEAVRRPTMRFVRIKSAEQQGQLMQHRTRDVLIRQRTQIINALRAHLAELGIVAAKGDAGVNELLAIVADEADTRLPIDARASVIVLAAQLEALQTLIGSIEKRIKMQHRSNETSQRVETIPGIGVLGATAIVATAADPTVFRSGRDFAAWIGLVPRQDSTGGKQKLGPISKQGDRYLRRILIAGAIAVLRRAQENPGKYPWLTQLLARRPFKVVAVALANKMARTAWALMVHGGTYRAPELVEAA

SEQ ID NO: 54888 - protein, 408 aa, unidentified
MKVYMGIDWSQSKHDLCVLNPAGACLAQLVIAHAQEGFWQIEELRGQLGVSHAECTVGIETTHNLLVDFLWDQGYSPIYLLHPGLVKSSRGRFRQSAARSDPSDALLLAEILRTDQGRLLPWQPDQPLTRQIRVKINFVSFLTDNITRLTNWQRTLLLRYYPVAAELFSLLHSRIAQQFIRAFPSLQAAKELDLATLQAFARQHRYPRTDKLPALLAKLQQATLQAAPTITAACQTEAQALATLLLEMLAARKTLQREIRDLFLQHPDHAIYQSLPGTGAFLQPALLAKFGDDRQRLPTASRVQALAGTSPVTIRSGKRHSVQFRRACDHQFRHIAQQWARLSLRSSVWANAYYAQVRPRCHSDSHAFRCLANRWLAILWRLWQDRVPYDESYHLMQRARRSQPLEIG

SEQ ID NO: 54889 - protein, 319 aa, unidentified
MTAALAAGIDAGKRYLDIGIEPSRKHFRVANATAGIETVVTCLRGSGVRKVVLEAIGPFAQAAVKRLVAEGFEVGLINPRRIKAFREAEGRRAKTDKLDARLIARFAVQMTDELRPVPGESQQALKALATRRRQLVEMIAMEKTRLKQVLEPWLCESHRTAIAALSVERERIEADIKGRLAADQPAQRKMEILISLPGFGPTVATTLITDLPELGTLDRRAIASLAGLAPHPSQSGTSIGRNQIGGGRPCVRTALYMAGLVASRCHPRFRAEYKAMRADGKPAKVAIIAVARKLLVLANALVKHDTLYDPQHSPGQAIH

SEQ ID NO: 54890 - protein, 334 aa, unidentified
MYYSGIDLHTDNSYITTQDDTGSVVKQERTTNDPENVLTYFHSLLGPHIAVVESTSGWYWLNDLLQENGIELVLAHAKYLKAIAYAKVKTDKVDSQTLATLLRQNLIPRAHKISRELRGFRDTMRLRLRLVQQRTACLRRIDSIRVKFNTTAVPDPYRFQLSILEHTRDTFTCQISALEKSLHPVLIPNEDIQHLLSVPGIGKLTAFTIYLEIDGIARFASDKHFVSYCRLVPGADNSNRRVHHRSSKDGNKYLKIAFTEAAVHAIQFYPEFKAFAARLARRSNPAIARTVVAKELARIVYYLLKNNTPYRGFKGLPISRAKSLQWPRLPSPNA

SEQ ID NO: 54891 - protein, 404 aa, unidentified
MPELWAGTDAGKAEHHCTVIDANGTTLLSRRVPNSETELLELLGDVLGIADGGPVTWAVDLNSGGASLWIALLFSHGQKLLYIPGRTVHHASAAYRGSGKTDAKDAFIIADTARMRRDLQSLQELGEIAVDLRILTARRIDLAVDRTRAINRLRAQLLEYFPALERAFDLSTSKSALILLAGYQTPAALRRIGRSRLTTWLKNHGVRTSIAARSTAEAAVTAGEAQFTVVPGERTCARMVHTLAAAVTALDEEISELEAQIEARFREHPDAEVITSMPGIGMTLGAEFIAATGGDMSVFGSSDRLAGVAGLAPVPRDSGKVSGNLRRPRRYSRRLLRMFYLSAQVATVYCPESKRYYQRKRAEGKSHKQAVLALARRRLNVLWALLRDHKLFETAAARAGATAI

SEQ ID NO: 54892 - protein, 355 aa, unidentified
MNDAKYIGLDVHQATISVAVRDSRGNLVMEAILETKAETILQFIRGLHGSLSVTFEEGTWAAWLHDLLQPHVTRVLVCDPRKNALLKVGNKNDRIDARKLSELLYLNKLSSVYHGEPGIRTLKELARSYIAMTRDLTRVMSRLKAIYRSWAIPCAGQQVYAPRYRAEWLAKISEAGVRRRAELYYQQFDALAALRQQARRELLAEARKHPAMRLLRQIPSIGPIRAALLIALMQTPNRFRTKRQLWAYCGLALRTYTSGEYRFVGGQLKRSKKVLAVRGLNINHNHDLKNIFKGGATRAASTVGPFQDFYQACVARGVKPHLARLTLARKIAATTLLVWKKGVRFDAEHLKQQAA

SEQ ID NO: 54893 - protein, 491 aa, unidentified
MANRKISTFERLQRGKLSRKQCKELGRRLQSPNPGLEIIHRNAAGIDVGSGSHFVAVPPDRDTQPIREFGSWTAALHEMAAWLKSCAIDTVVVQATGVYWVVLSDVLEGAGLKVWVVNAQGTKNLPGRKSDVQECEWLRKLHTYGLLRNSYRPPEEIRGLHDLWRLRERLVADAGRAVQQMQKALTGMNLQLTNALSDISGVSGMAIIRAIVGGERDPWKLAQLRQPGVRASEAEIAENLRGTWREELLFELRQVVAHYDFLGKQVVELDQLLEKRMAAMPSREVATKGSPVAEKEEVPEGKRRGRKPKTKVKPPPKNAPAFDIGRELTRLLGVDLRTIDGVNIHIAQTVYTEVGPDLSAFPTEGNFTSWLGLTPMRSVSGGKVIKHEKKRVKNRLADALRMGASTLERSQSYLGARFRYLKARLDGRRAVKAMARYLACLIYRLMTKGQAWIDRGEAYFEQKKAERELRTLQNRAQKMGLQLVPLATVNA

SEQ ID NO: 54894 - protein, 369 aa, unidentified
MRNNSKKVSNVVTGKRTTGLDLGDQYSYYYTLDAAGENVESGRVKTTREGVEKRFGGQEAARVVIEAGTHSPWVSRLLAGLGHEVIVANARKVRLISDNDGKDDPVDAELLARLGRADVKLLSPIQHRGEEAQADLAVIRARDALVGARTQLVNQVRGAVKSLGSRLEKSSTRSFADKMGDQVPEALRAALEPVLEVIAEITNQIGGFDPQIRDRCQQKYPETKLLTAVPGVGALTALGYVLTLEDPHRFASSRAVGSFLGLRPSRDKSGQQDPELHITKAGDQLLRRLLVGSAQYILGPFGPDTDLRRWGLKRAGRGRKNAKKRAVVAVARKLGVLLHRLWVNGEVYQPLYQTERSVGVIAAAAGSVS

SEQ ID NO: 54895 - protein, 367 aa, unidentified
MDAIYIGVDFHARQQTICYLKTETGELVISELKHKDKEKVREFYAQFQGQVVIVGLEASGYSPWFEAMLEELSCEVWLGHATEIRRRARWRQKSDRRDAELIWDLMVHNEFPLLHQPAPQSREILRMLRYRQKLIKVRTMSKNSLQAIALQAGLAKGSRLFTKDGQAEFQASAMSPALQWQRDHWFELLKPLNEQLLETMVWFKAQSKDDPVIARLRTHPGIGLLTALCIWHTLQPVSRFRNQRKVVAYAGFDPMVRSSAERAIYLGISKAGSRMLRYLLVEAVHTAIRYDDDLKRFYKRVAERRGRPKAKVAAARKLLIRAYIMLRDEIDYAEFRRRAVAVGLPDEVKGQQKVPEVLIGQSTSPGA

SEQ ID NO: 54896 - protein, 340 aa, unidentified
MENVTLLGIDIAKNIFQLHGVDGKGRAVLRKRLTRDKLSETIANLPPCTIVMEACGGANHWCRRFTALGHITKLISPQFVKPFVKTNKNDRNDSEAICEAASRPSMRFVSPKSIEQEDIQLLHRVRSRLIQERTALVNQIRGLLIEFGIIIPQGINKVRKEIPEILENAENELSYSSRAIFSDLYEELLEKDKRINNYDKKIEAIFKTNSMCQKISQIEGVGPMSATAIVATIGDPKVFKNGRHFAAYLGLVPRQSSSGNKERLLGISKRGDIYIRTLLTHGGRTVVRHVGTKKDDKRSNWIKELKERRGANRAAVAVANKNARIIWALLAKNEEYRKAV

SEQ ID NO: 54897 - protein, 417 aa, unidentified
MLKIVNRNCAGIDVHKKVIVVTIAKTNEYDITDYQTKSFNTFTEDLIKCRDWLVSNGTLDVCMESTGKYWIPVFNVLEEKCKCIITHPKYVRTIQGKKTDKKDSIWIADMFKHGLVEPSFMPPADIRQLRDLVRYRNKLVNIRSGEKNRFQNSLTMSNVQIANVVTDVFGKTSQSILKLMLSNPSLTLDDITPLLRKNLKSSPEEILKSINGNFDESQSSKMNIVLKHYDSINECIDELEEQILKLALKYSAEINLLLTVPGIKEISAIFIIAEIGTNMNIFIDDKHLCSWAGLTPRCNESAKKKKSVRITKAGIYIKPLLVQCALCAIKDKSCPYIKARYESLKRRRGHKKAIIAIARLLLTSIYHILLTCEVFDYKRFENLMNKNFKSHKNIQNTPEEMISYLTNLGYNITLQNT

SEQ ID NO: 54898 - protein, 330 aa, unidentified
MKVAGIDVDSKKTVVACHLDDKKKKPQKFDNTPDGHLSIIKALQKAGVTRVCLEATGTYHLDLAVALHDAGFEVMVINPKAARRFFDALQNRSKTDSVDATMLAEFAQRMPFEPWQRPEDDALRLRAYARRIAALKATRTQAKNQLHAATQTALTPPALIDDIKLRIAQLDAQIATLQAHAKALIDAAQELREAFELLVSVTGIATASALQILAELCVLPPELSAKQWVAMAGLDPRHFQSGTSVNKKPRLAKAGNRYLRMALFMPALSASRHDPNMRAYFLHLVEDRGLKKIQAICAVMRQLLHAIHGMLKTRTPFDGARFYGAAETVS

SEQ ID NO: 54899 - protein, 358 aa, unidentified
MSTQITTSPKVYIGLDIHKKTWTVSIQTDLFLYKTYSMPSKSCDLEQYVTNNFHNHEVYLVYEVGCCGFSVARYFLNLGWNVLVVNPADVKTGNKERYQKTDALDAKNLSNQLKSGTLKGINIPTEDEDQFTSLARHRTQVTKKLRTTKLHIKSLLLFHAIEIPVEYDNSNWSNGFIEWLEKVKFSTTCGDLALQGKIRMYKFVKTEYLEIANQMRAYCRKSHKEDYNLLKSIPGIGGYLASVIIAECGDLRRFNTEGQFASFVGIVPGIHNSGGSEKCLGITPRSRSQLRSYLIEAAWMAVRKDLEMQQYYRKHQGKNVKSIIVKVAHKMTRRILAVIKTQTPYKINKNIVLEKSIA

SEQ ID NO: 54900 - protein, 343 aa, unidentified
MPHYVGLDVSQKTTAICVVDEQGKRLWRGVCATDPGAISARVSQHAGVDAKVGIETGSMTPWLVHGLRSAGLDVQCLDARKVKAALQMQLNKTDENDAEGLAQIMRTGWYRAVHVKSLDAHRARALLGARAQLVGMTTRLSNMIRGVLKTFGLLPGAGRGLRFDRKVEALLEGAPEIALVVRPLLATWRQLREQIAVFDKAVLQQVRADPICRLLMTVPGIGALSSLMYVSTVENPSRFSRSRAVGAHLGLTPRRYQSGETDRSGHISRCGDGLARTLMYEAAIVILHRVKRPLHLKDWAEAIERRSGSGKARVALARKLSVILHSVWRSGEPFRWSAPVMAA

SEQ ID NO: 54901 - protein, 309 aa, unidentified
MRTYTGIDVSKASLDVCVKDEFGTTLFSEKFHNTEEGVGLMKDSIPQESKVVIESTSSYHWLSCLELTSAGFEVSAINPLLTKKYERSSIRGAKTDSVDASRLADISRLEQGLPLFFDSRESLTRKRYQTLLARLMKTKQEISRSYKSALEALETVGVGIDIVEMETMIDAIDKAISSLKKMIEKDADDLAKEVAKTPGISLFQATVLSTAVSGRTFENRDQLIAFFGLDVRKRESGNWKGREHLSKRGNPFYRKILFQLGWSLWRHNKKYATYYESVKASGKHYFTCIIAIARKFLREFFRIYKTVSL

SEQ ID NO: 54902 - protein, 315 aa, unidentified
MEAAPVYIGIDGSKAQLDVAERPSGERAVMPHTEDSITTLVEQLRHRRLACLVLETTGGLEVLLASALAVAGIPVAVVNPRQVRDFAKATGQLAKTDAIDAQSLARFAEAVRPAPRPLPDEATQAFSALLTRRRQLIEILVAEQNRLQRAPRPIQRQIQAHLTWLKKQVAALDEDLTHRIQSTPIWREQEDLLRSVPGIGPVVSRTLLAELPELGTLTHKQIAALVGVAPLNRDSGTLRGRRTTWGGRAVVRAALYMSTLVATKHNPVMKVFYQRLRAAGKAPKVALVACMRKLVTILNAIVKRRTPWRLAAQNT

SEQ ID NO: 54903 - protein, 383 aa, unidentified
MAGQSLKQGGRVVADHSEAYVAFDTSKLRNAVAIAEAGRSGETRFLGEVDTTEAATVKLIKKLAAKYRRLTFCYEAGPTGYGLHRLITSLGHDCMVVAPSLIPKKAGDRVKTNRRDALDLVRQLRAGELTAVWVPDARHEAMRDLTRAREAAVDDLQRKRRQVLSLLLRLGRCYPGKRTWTKAHMHWLASQKLDHAEQRIAFEELLLAARQAQDRIARLELAIRTALPDWSLAPVVTALMAMRGIDLVSASALLAELGDLTRFQSPRELMGYLGLVPSEHSTGDKVRRGPITKAGNRRARRILVECSWSYRHPPRLGREKLARVAAAPAAAREIAWKAQARLCARYRALTRRGKRPTVVVTAIARELSGFIWAINRAVGAAIG

SEQ ID NO: 54904 - protein, 314 aa, unidentified
MQDVFIGIDVSKDTLDIAGTPGKAHLCIANGARDIRRWLKGLPQGAHVAMESTGRYHQLLARLAREAGLHVYILNPKHVWHAARGDGRRSKTDRIDAQVIAKFLQDHVADLHEWCPGTALQSEILVLERRRQCLQKHCSAMCSSMQDVGGLDDELAQFKQSLKSMLQAIELRIQLLVEQDEELTHKSALLTSVPGIGQATAASLAALFGRVPFKSSDSVVAFSGVDVRANDSGTHRGRRRLTKAGPAYLRKQVWLMGFVATHTKLYIPFYAALRGRGLDFTEAAMILGRRILRIAWAVWRTDKPFDPHLVGKQA

SEQ ID NO: 54905 - protein, 306 aa, unidentified
MEVIITNGCGLDVHQATVVACVQKQGHNKQIKTFGTTTEELGKLKQWIKSEDVTHIAMESTGVFWKPVFHVLEDKQWEILLVNARHIKKVPGRKTDVQDCEWICKLLRSGLLKGSFIPQDDIRQLRSLTRHQKTLQHQIQNEKNRVHKLLQECNIKITQVLSDIFGLAGMNILNDLAKGITDANKLAVYMEHNKQLLRKKDEAIACLKGKFTHTHQIMLGTMLNTIAFYQKQIEILDKEVEKLLKPYRLEHELLQTIPGVRAKAASHIIAELSSNMEAFPDEKHLSSWAGLCPGNNESAGKKKAPA

SEQ ID NO: 54906 - protein, 331 aa, unidentified
MKIKETIGIDISKLTFDVRIHSNQTFKVFENSFKGFEMMTYWAYKNSSFLKDEIMFIFEHTGLYSHNLSVFLTEQNIGYALVPGLEIKRSLGISRGKDDKIDATKIALYGYRLRDEIVPYNLPSQDVMSLKSLLSLRDRLVRQRAGYKASMKEQKRVLLKKDNKILFETQERMIISFSKQIKKIEKEMENIVKNNGQLKHLYELITSIKGVGSQTALFLITYTNAFTKFKDARKFASFCGIAPFPNSSGTSIRGRTKVSHLANKKIKSLLDLCAKSAIQYNPEMKAYYHKRIEKGKNKMSTINIIRNKIVSRVFAIVKRQTPYVNTMKFAA

SEQ ID NO: 54907 - protein, 338 aa, unidentified
MGTYAGIDLHSSNNYIGIMDQDHKRLFGRRLSNNLDKILMVLEPFKSDLKGVVVESTYNWYWLVDGLQEHGYTVHLANPSAIKQYEGIKHTDDRWDSFWLAQMKHLDILPEGYIYPKEQRAVRDLLRRRLFFVRHRTANILSLQSAITRNLGIKVSGNEIKKLDMDDACDLFDSSNLVFMAQNNISTIKHLRKIIKGIEKEVKSQVKFRKEFVMLTTIPGIGLILGLTIMLEVGDIGRFVKVGNYSSYCRCVGSKRLSNGKKKGENNKKNGNKYLAWAYVEAAHFAKRYIPKAQRFYQQKMAKANGAVATKALANKLARASYFIMRDQVPFDEDMLFR

SEQ ID NO: 54908 - protein, 352 aa, unidentified
MEQFIGCDAHKKFSVFVAVNEKGHAGEALRVAHDRELYREFLGRRPAHSSIAVEASGNYSWLVDEMERAGHRPKLANPLEAKRRMALTKKTDKLDAKGLAILLRNGTLPEVWIPPSELRDQRELLRLRIFLVRLRTRVKNRIHGTLARYNVQVPGADLFGVGARLRLGERLPELPMHSREAVEQELVTLDFLETQIDSAEKRLEAIMKVSVEADLLKTLPCVGKILSMVLMLEIGRVDRFPTAAHLASYAGLVPRVHSSGGHTRMGQVCGNVNRNLKWAFVETGNLVVINQRGFAGTHVARLYQRIKRAKNHQKAVVAVARHLAEAAWWVLTKQEVYREPQSTRNDLSSTHG

SEQ ID NO: 54909 - protein, 408 aa, unidentified
MKLFVGIDVSSLRLDVCFMDSEDRVLHEAPLPNDIVGASKIKEIILELAKAVHYDVIKVGMESTSVYSFHPATFLAEDTELKELGIEVIVQNPKAIARFKGLFEEDKTDIIDARRIAHFLRLGLNGTTVIKEEKYVALQRLTRSRYQLMEQMTECKQHFLENLYYKCNTLTRDAETSVFGAAMMDLLTESLSFGEIAEMEIEDLAAMLQQKGRGRFSNPEKLAKAINKAIRDSYRLGKVLESSVDIVLATYAMMIKTLKQQVKELDRAIERLLEVIPESQCLLGIPGIGQVYTAGILAEIGQIERFEDQAKVAKYAGLYWKRKQSGSYESERTSLTRTGNHYLRYYLVEAANSVKNREPVYNEYYYKKYNEVPKHKHKRALVLTARKLVRLVDVLLRNHQLYTPERSV

SEQ ID NO: 54910 - protein, 427 aa, unidentified
MTETNKYTDFAALIGLDWGWDSHAIALAPAGGPTQTSTLKHSAESLHQWLDELEKAYEGRAVAVAVEASKGAVVAALLERPWITVYPIHPATSTRQRSAFRPSGAKDDMPDALVLLFILQHHRDRLRPLQPDGEATRTLANLVEARRKAVDRRSLLANQLKSTLKNYFPQALDLVGEDMAIPLALDFLDKWPRLTDVQASKDITLKNFYYRHNIRRAELIQSRIDFRRSARLLTRDSAIIEVNVRIVRMLVAELRVLNEHITEFEQVIEEAFAEHPEKSFFRELPGAGPVLAPRLLTAFGTARDLFPDAASMQRYFGVAPVTEKSGGRRWIHWRWNAPKFLRQTFVEWAGQTVVFCPWAKAYYEQQRNKRAGHHAILRALAFKWLRILWRCWQTRQDYDQEKYLQQLEKRRSPIAARARQLALEMAA

SEQ ID NO: 54911 - protein, 408 aa, unidentified
MLEVKVERCAGIDVHKKFVMVCVMIGLAHQKPETEVRRFGTSVPELERLRAWLMEKGCTEVVMESTGSYWKPVFNILEGSVQVNLANAEKVKALRGKKTDPMDCRWLASLLRHGLIRPSFIPPRDIRELRDLTRRRRTLMREGASERNRVQKILEDANVKIGNVLTDVFGASGQAMLEALLENKLSAEEMANLAQGRLRRKIPQIVEALEGHAMSDHHRLLLRQILKHMAFIEDMVEELDKEIWEKLRPYERQIELACSIPGIGRDAAASILAETGMDMSDDGPFGSCHHLASWSGICPGNNESGGKRKSGRTRKANRWLRATLAQTAWAGIAKKDSAFRSRYFRLKPRRGPQRAATAVGHAQLIAVYWVLRNAEPYQEQVRTMDDHRRAAIIRHHLKRLNDLGYKPA

SEQ ID NO: 54912 - protein, 416 aa, unidentified
MSVALPEARFFTGIDWASAEHAVCVLDEAGKITAQFTIKHSAEGIASLVRRLARYGDPADLPVAIERPSGRLVDLLLEAGHPVVPVSPNAIKTWREGEVLSGAKSDAGDAAVIAEYLRLRSHRLAPAAPYSGETRALRTVVRTRDDLVQMRVAATNQLSALLEAHWPGATAIFADVESPISLEFLTRYPTPAAARHLGEKRMAAFLVKHGYCGRKPAAQLLDRLRQAPPGTADEALTEALRDAVLALVAVLRAVNGAVKDLDRSVAAHLGEHPDEKIFTSLPRSGQINAAQMLAEWGDCRQAYDGPDSVAALAGVTPVTRQSGKHRGVEFRWACNKRFRRAVTTFADNSRHASPWAAQVYADARAAGKDHPHAIRILARAWIRVIWPCWVNGVPYDPARHGAAAALAERTPSQSAA

SEQ ID NO: 54913 - protein, 347 aa, unidentified
MTIVEAARGVTGGVDTHRDVHVAAALDPLGGVLGAESFSTDSAGYKALLGWLETFGDVTKIGVEGTGSYGSGLARFLRRTGVEVIEVDRPDRQNRRRAGKSDPLDAIEAARAALSGRATGKPKSRDGAVEAIRVLVVAKRSARQARVKALIQMRHLGYTAPDHLRCRLKGLSVPALVAEGMKLRPSRSADPVTAATKASLSSLAHRISSLDDELAELDLRIETLLEASVPDLLGLFGVGRDTAAALVMTAGDNPERLHSEAAWAHLCGASPIPKGSGKKSGRFKAHDGGDRQANSALWRIVMVRIAHDAETQLYFERRTKEGRTKNEVIRILKRYVAREVYRYLPRG

SEQ ID NO: 54914 - protein, 449 aa, unidentified
MGKPQVIEDEEHGRVFERVAAVDVAKASGMVCTRRPPPRPGGRRASTVQEVPASMTAIRQLGARLVRERIEMVTLESTSDYWRIWYYVLEEAGLVVQLVNASQARNLPGRPKTDRLDAMWLARLTEMGLLRPSFVPPAPVRALRDYTRARTHLTQDRTRCWQRLEKLLEGALIKVSSVASKLTTLSAQDMVRALINGERDPVVLAGLARTRMRAKHDALVEALTGMFDDHHGELARMLLDQIGFCTDRIGALDAKIAAAAGQLPAAWGITAEGVTGPGAGTGPAAQVLPAVQRLAEIPGISEDLARSIIAETGLDMTRFPTAAHLVSWAGLAPVARQSGPRNRKPKKGQGDAYLKGHCTQAAAGAAKTDTFLGERLRRLSRKLGGTRARCAVGRSILVIIWHLLANPEARFADLGPDWHTRKTDRDRKTRTHLRGLQDLGYTVTITPAA

SEQ ID NO: 54915 - protein, 338 aa, unidentified
MAIFAGLDVSDKTTHVCVVADDGAIRKRDVVASDPDVLAKWLGKHCPDLVRVVLETGPLSTFLYHGLAERGIPVECICARHAKGVLAARVNKSDVHDAEGLAQLSRTGWFKRVHMKASATHIDRAALRIRAQLITTRVAMGNQLRGLLKLFGLRLGAARTPGKRRERLIALYQQRPDLEPLFAPLVASMEVIEEQLRASNRLLESRAAEDAVCSRLMSVPGVGPITALTFTASIEDPRRFARSEDVGAYAGLVPRRSQSGERDVRGHISKAGDPMLRRSLYEAANIMLCRVQRPFALQQWGQRIAESKGNKRARIAVARKLAVLLHSLWLNETEFRWA

SEQ ID NO: 54916 - protein, 345 aa, unidentified
MMKVMAGIDLHSNNVVIGVTEMDGKRVGHRKVPCELKEVVKFLAPFRERLEKVAVESTYNWYWLVDGLRALNYPVVLANPAAMEQYSGIKHADDTNDAFFLAELLRLNILPTGHIYDPQLRPVRDLLRRRMMLVRQRTALMLSFKSLHTRTTGQEMGLSQLKELKIKEAQQLYEHPANQLIAGMQIKHIEQLTESIAKIEKGVLGAARELPYYAKLTSLPGVGKILGMTITLEVGDIKRFVDAGHFASYCRTVEAKCTSNSKKKGANNSKCGNKYLSWAFVEAANFARRSDEQCRRWYERKAAKTSRVLATKALACKLAKAAWYLMAEQSDYDPKRMFGQPAKAK

SEQ ID NO: 54917 - protein, 449 aa, unidentified
MSRPQVIDDEEHERIHDKVAAIDVAKDAGVVCTRTPHPSRPGARRSRIWTVKARMNTIRALGRQLHKDGIEIVTLESTSDYWRIWFFVLEAAGLAVQLDGAAQAKNLPGRPKTDKLDAQWLARLTEMGLLRASFVPPKAIRDLRDYTRARTRLVQERTRCWQRLEKLLEGAQVKLSSVASKLTTVSAQDMIRAMIAGQRDPRVLAALARTGMKAKHDELVQALDGMSGDHHGELAQLLLDQIAGLDGKITQLGTRIEQAVTALPDAWGINAGGTTGPQAGTGPDAAVIPAVTRLAEIPGISENLARAVIAETGLDMRRFPTAGHLVSRAGLCPTARQSGPRTRAGKKGQGNTWLRGHLGQAAAGAARTATFLGERYHRIARRRGKAKAQVAVARSILVIIWHLLADPSARYTDLGYGYYQDRTDKDRKLRNHMRQIEALGFTVTLNKTA

SEQ ID NO: 54918 - protein, 354 aa, unidentified
MNSVRYIGMDVHRDTISVAVLDESGRLTMQSVLATRAGAVLDFIHGMRGTLHVTFEEGTHSAWLYDVLVRRVEKLVVCNPRKNALLKSGSKSDAIDARKLAELLRAGMLSAVYHGETSALEVQQIARSYSQLTEDTTRVMARLKAVFRGQAVSCAGKKLYGKRHRDQYLAQVSGGLRRRAEHLYQELDALQPLRHAVRRELLVECRKHAAAQWLQSVPFLGPIRAALLIGRVQTPHRFRTKRQFWTYCGLGLETRDSGEYRMVNGQVQRRRKPALIRGLNWNHNHEMKNLFKSTATTASVREGVWREFYLGLLDKGMRPEMARLTLARKIAAITLKIWKKGERFDAEHLKLQAA

SEQ ID NO: 54919 - protein, 413 aa, unidentified
MEPIVEKGCGLDVGQESVVACLMTGPAGEKPRKELRTFHTFTAELERMRDWLLAEGCTHVAMESTGPYWVPIYVVLEQAQRFELVVGNAHHIRNVPGRKTDVKDAEWLADLLRHGLIRKSFVPPRPFRDLRDLLRYRRALVNAGSAERNRLLKLLESANIKLASVASDVFGASGMLMLKALLRGGSTPDQMAELAKGRLRQKLEPLRLALRGNLDSHHRSMLETQIRRIEAAERDLVRLDQLIDARLEPYRDKHDLLIQIPGVDWVTAAVLIAELGIDMSVFPTAKHVAAWAGVCPGNNQTGGKAKRAAARKGNVYLKTALVQAAHAAAHTKGSYFKNKYFRLRARLGAKRAALAIGHKILTAAYHMLATGRAYAELGETYLDRRDKRSVARSLIRRLNHLGYTVLITEEATA

SEQ ID NO: 54920 - protein, 436 aa, unidentified
MSSKAYSARSVNLIQLSSLLKDRDRQDLWVGVDVGKMEVQVVLNWAADDFERPWKVVNPAQVGLLVEQFKQLALGRKLVVAMEPSGTYGDVLRQACTDAGIEVQRVSPKAAHDYAEVFDGVPSQHDGKDATVIAELARLGKSVPWSWKVVPQVEQEIEYEVDKMDASRRLQQMWCGRIEGRLARHWPELLRELKLTSPTLLKLLVEHGSPAALAEDGGAAVKLANWSHKNLSEERIAGIIQGARESVGVRPTATDRLRLSEYAHSASDARAQVKAAQKRLLELSAKVKVIQSLAGAVGNATACVLFVYLGDPSDYHCAAAYVKAMGLNLAERSSGMYKGRLKLSKRGSSAVRYWMYLAALRLVKKTSPVRPWYLKKRHRDGEEAGNALVGIMRRLALALYHVGALGEEFDAARLFPGQRKSFKSKCAAAMTTQKGD

SEQ ID NO: 54921 - protein, 407 aa, unidentified
MICVGIDVSKRKSTVCFMAPGDKIIRRPFDVKHTKEELQPLVDEIRVQAKYDEIKVVMESTGVYHLSIAYFLQQNGIFVSVANALKVANFNKAENFRHTKTDSIDSTNIARYGIAYWAKLPQFDLNGDKYFLLKRLCDAYLNFSEERSRILLQLQSQLEQTMPGIFDLFGGFDINSGKDKLLDFLERYCHIEDIIAKSEAEFVASYREWAKEKGYRSNESKAATIYAQAKNGIPSIPNNPIVRETIMWYVGLLRRADEALMASLTRMEDIAKDLPEYELVGEMGGVGRVTRVALIAQIGDVRRFKNKHSLICFAGLTPSIHESGKFRASQNHIVKKGPARLRKVLYQVMMSLVMHKIPKDDAVYRFIKKKEAEGKYKKVAKVAGMAKFLRIYYGRVMHLYRDLGFAA

SEQ ID NO: 54922 - protein, 412 aa, unidentified
MYPRVAAIDVGKKIVAVAVRTPGAQPGQRHQQVRKFKTFYPVLQQMVGWLVDQGVTHVAMEATGVYWRPVFHALCEAEQLELLLVNARHVKNVPGRKTDAKDAEWLAELCEVGLLRGSFIPPKEIAAIREVTRYRKKLTEARTSELQRLCKVLEDSGVKIDSVASSITTMSARAMVEALVAGERDPRVLAELALGRMRKKIPDLAMALSGRFTEQHALLARMHLEHVDHLTGMIQRLDTQIEQLVAPFAEQVRALRTIPGIGERTAQVLISEIGVEMSRFPTADHLASWVGLAPGNNESAGKHRKTKTRKGNRELREALVEAAWAAGRTNTYLGARFGRLHRRFGKQGGSKAAVAIAHNLIVIVWHVLHDRTDYRDLGADYFTRHDNPDVKKRRLVRQLQALGYAVDLTPAA

SEQ ID NO: 54923 - protein, 348 aa, unidentified
MGTIVRIGLDTSKSVFQLHGVDGMEQPVLRRKLRRGQVLEFFRRLPPAFVAMEACGASHYWARELRSLGHEVAMIPPQYVKPYVQRGKSDAADAEAICEAASRPKLRKNFVPVKSPEQQGALMLTRVRAQFISRRTQLANSIRGYAAEFGFTAPKGLSRLSQLLIDIKADATVPDLAIELIEALAAELARVDDQVVTLDKKLTQIHRSNEMSRRLATIPGIGPIGATLLSIKVVDARGFKSARNFAAWLGLTPKNHSTAGKNRLGVITRAGDGMLRTVLVAGATAVIADVRRRGSRSWPWLTDIITRKPPKLVAIALANKLARIAWKLMVTGERYRPASAVPIPAPPT

SEQ ID NO: 54924 - protein, 508 aa, unidentified
MDDIDDVGVFLSLDVGKSAHHEHGLTPAGKKVFDKQLPNSEPKLRAVFDKLAAKFGTVLVIVDQPASIGALPLTVARDAGCKVAYLPGLSMRRIADLYPGEAKTDAKDAAVIADAARTMPHTLRSLELTDEITAELTVLAGFDQDLAAEATRTSNRIRGLLTQFHPSLERVLGPRLDHPAVTWLLERYGSPAALRKAGRRRLVEVIRPKGPRMAARLIDEIFDALDEQTVVVPGTGTLDLVIPSLARSLAAVHEQRRALEAQIGQLLEAHPLCAVLTSIPGVAVRTAATLLVTVGDGTRFPTAAHLASYAGLAPTTKSSGTSIHGEHAPRGGNRQLKRAMFLSAFAALHAPASRTYYDNAGPEEKPTPRHSSAWPANASTCCSRCSATAPSTNPEPHASLDERHRGTPPGWERTGFRSSAERQLQDEGDGVLRGQGAAEAGRHVQDFAREQSVLQAGHLGGPSGSERHQSHLHGSSQHHHKGVYLYSRLLVRVCGRDGPEPGNDRLAR

SEQ ID NO: 54925 - protein, 315 aa, unidentified
MKAENDPELYVGIDINKAQLDVAIGQEGEEWQAANTASGIRSTVKRLAMLKPLLVVVESTGGLEKPLIEALQDAELAVAQVHPGRVRKFAAGIGWLAKTDRLDARLLAWFAFSARPHPKPRPTPAKEAMSELIRRRHQVVEMLTAERNRRSTCPPSMLEKLEEHIAWLTNERQRLTSEIETMLAEQAEFREKDAILQSTKGVGPIVSAVLQAELPELGCYSHKQIAALVGVAPFNKDSGHSHGKRKIKGGRSDVRSTLYLATMSAIRYNPVIRPHYEQLLKRGKVKKVAVIACMRKLLVILNAMVRDMRPWQQPS

SEQ ID NO: 54926 - protein, 423 aa, unidentified
MNDPTLCAGADVHLKEITLRAVDKLTSDEVIAPFNVANNLPGAQSVASRLAEVATRLGYTHIEIGYEATGMLWMPFHRFLRTCQLLQPFHLQQVCFNPKLVADFKDALVLRRPKDDDRDAFDIAARVRVGHWPDSYVPDDFWQGVRRLTRYRFKLSRNLSQEKMRFQAYAFLKCSDWKRVKAFSDVFGATSAALLTEFTAAELRQMTHDQLADLIAHRGHGRFYDPDATARAVQQALCTSYPIDCLMDEMVTATLATGWEHIRAIKRSMKRLEQHIARYIAPVPNPIITVKGLGPVITAGLLAEIADISRFPEHKHLAQYCGISWAKRSSGGFVSQNTRMTKVGNPYGRYYFVIGADKLRQFNLEYKAFYRRKYNEAATHKHKRALVLTARKLVRLVHALLTKNVPYVRPQMTVGLEEADLLQ

SEQ ID NO: 54927 - protein, 541 aa, unidentified
MPADKLGARGCGPFLGDNPSSPGRMIPSGKIYPLSHLLAVTNLVFLASRLSSNQGIGPMSQSKKTRKSPSRKKHRRIRKAQARIGKVAVKATAAATDAKPVPAPEVIHPHAAAIDVHSDNHVVCVGPDQVQTFGAYTVDLHAIADHLKQHGVTTVVLESTGVYWVPLFELLESRGFEVFLIEPSQGRHCGARPKTDVADCQWLQRLHTFGLLRPSFRPPESVLALRGYWRQRQMQVRYAASHVQHIQKALEQMNVKLTEVAADIMGMTGTRIMEALLQGERDAKKLASLRDPSCKKGEEEYAKALEGTWRPEHLFALKQAFALYQFHHQQITECDQRVEEELARLPNRAADKQFQPRPRRCGRKSNDVRFHATEPLFKALGVDLTLIDGIEVNTALVILAEIGVDVSRFPTEKHFASWLRLSPQLQESNHTRKKRSPRRGKNRLAQALRMAAQAVSRTKTPLAMFYHRIKGRLGGKGAITATAHKLALLVYRLLKYGVEYVRQSMEEYAAKVKEQLERSLRRKAAQLGYELVPKTPAAQPS

SEQ ID NO: 54928 - protein, 419 aa, unidentified
MSFKILKFNCCGLDVHKTWIYACIGITDSKNCTEYKQARFSSFTKGLNELCDWLAKYNCTDVCMESTGKYWIPVFNILEQHNLWVTLSHPKYTKPMKGNKTDRKDAKWICDLYMCGMVKPSFIPPADIRELRDLVRYRYKLTCMITGEKNRAQNCLTVSNLKLDDVFSDVFGKSSRSITEQILQHPGEKFDVAPFVHRLCKTPIEEIQAAVDGAISKEQAIKLRQCLDHIDELNKHISEVEQEILRLSDKYEATLNLIRTVPGFDKNPLTAIQVLSEIGGDMSVFPTAKHLVSWAGCCPRNDQSNQKIKSTRISRAGSYFKPVLVQVANALIKSKKHSEFTNRYKRIKARRGHKKAIIAICRMILTAIWHILSDLKPYTPEGFLESRPVKEEKVLSTSQALNLLKQRGYIIKDKPLAVS

SEQ ID NO: 54929 - protein, 319 aa, unidentified
MLHLGIDVAKAKLDCALRLANGKYRNKAVSNDTKGFEELVAWLAKHDAANVHVCMEATSIYWEASAEHLANQGMTVSVINPAQIKAFAASRLTRTKTDQVDARLIAEFCCERRPEAWEAPSMNEQVLRALVLRLDALQAMRTQEGNRLEVARNVVKADIESHIAWLDNEIKTLIKKIKDHLNNDPDMRNQQELLDSIPGIGERTIALLLAYSMRPGRFDNARQAAAFAGLDPRQHESGSSVRGKPRMSKIGHAILRKGLYMPAMVALHKTAWGRRFQERLKAAGKPGKLIIGAMMRKLVHVAFGVLKSGKPFDPALHFT

SEQ ID NO: 54930 - protein, 350 aa, unidentified
MVEHYIGVDLHKAFFQACAVDPFGQRCWEDRFPTTAAGIGAFLSRTARNVAVAVEASGPTWTFVDQLQGRLARVVVVDAAKTRWKAGYAAKTDRLDARRLADALRRDSVAAIYDPPPPIRELRELCRLRRNLVRTATGLKHRLHALLLRQGVVAPMTSSLWHGRGARWVATLTLPGRAGESLVSLRQVLADVTDQVDVVEAEVVREASRDPIVLALQQLPGIGPVLGLTIRAEIGEITRFPDPPHLASYAGVVPRVSQSGLRRARTGPITKQGSPWLRWALIEAAIHGVNRPDAIGRWARRLAVHKGGLKTRVAIARTLCAEIFATWPRTSALTASEVERLMTPTEGVPL

SEQ ID NO: 54931 - protein, 372 aa, unidentified
MQSTTKFVGLDVSKEKISVAIADVSGEAPRYYGSIPHTPAALRKLIKELGAAETLSFCYEAGPTGYETYRWITSMGAHCAVIAPSLIPKRSGDHVKTDRRDAEQLARLYRAGELTPVYVPEREDEALRELVRAREAAKEDAHRARQRILKFLLRHQIEPPATIKRRWTKKYRVWLGQLTFPYESMHVAFSEMLHALDEIEQRMGRLEKALVEQAATGSKASLIQALQSLRGIGLLTAITLAAEIGTFARFRSPAQLMAYLGLVPREYSTGLSTRRGSMTKAGNGRLRRTLVESAWSYRHRPAVKGDLAKRLDGMPADVQLLSWKAQERLHYKYRHLVFGKNKHKNVAVGAVARELIGFIWAVARTVEQPAAS

SEQ ID NO: 54932 - protein, 480 aa, unidentified
MNVKTNKTKKQANVENQAVNLLSKEELCKRIEGVEKELKSYTWRELETNGKFAKNDKLSFITDDMLIVGCDMGSETHYIRAIDIRGRELSRKAFEFSNTAEGFEAAKAWMLELAVQNRKSQIVLGLEPTGHYWFALAAWLITAGISVIQVNPYAVKQSKEIEDNSQLKEDRKDPKLIANLVKDGNYGMPYLPEEIYADMRRLSMFRDQLTEDRIRNINRLHRELKIYFPEYMDAFGKIDGSFALEVLKVSCIPSEITELGTEGLRNIWHEAKLRGCGYSRASEIVEYAEKSVGLKDGSSVGRETVKWFAKEIMKLDEQLAWIENTLHKKCMEIPYAENILEIKGVGENILAGIVAEMGDISRFDDVKEMQKLSGMSLVACSSGKHKGQTKISHRGRKRLRYWLFQAAKSAVSHAEEFKELHVYYTTRADNPLKKMQSLIVIACKILRVIYTILKTGRDYDPQKMLKDIKRPKAALAAKAA

SEQ ID NO: 54933 - protein, 301 aa, unidentified
MVGMTIGIDLGDIWSHYCTLSEDGEVIDRGRFRTNPSGVDKRFRDLEPVRVAMEAGTHSIWVSEQIRELGHEVMVANVRELRAISHSDRKSDKVDAEKVARYARLDPEILRPIAHRTVAQQETLTLIRARDVLVRLRTGAVNSVRGLAKPCGYRLPASSTLCFAKRCLAALPPGLSQALGPLLQQIADMTVKIKEYDRAIKQLTETEYPETQALIKVYGVGHLTALTFVLTLGNKERFQRSRDVGCYLGLRPKRSQSGESDPQLGITKAGNGYLRQLLVECANHVVGPHGKDSALRQWVSA

SEQ ID NO: 54934 - protein, 321 aa, unidentified
MSLYFLGIDVAKAKLDCTLRLPNGKSRAKVVPNSPEGFSQLTAWLDSKDALDTHVCMEATGVYWESIAQFLSTQGFTVSVVNPAQIKAYGASRLARTKTDAADARLIADFCAERNPPAWQPFSDDELALRALVLRLDALQTMRTQESNRLEVSRGAVRQGIQDHLNWLDGQIKSVTKAINDHIDANPGMKDKKALLDSIPGLGERTIAILLAFIGDPSRFGNSRQAAAFAGLDPRQHESGSSVKGKPRLSKVGHAFLRKALYMPAMVALYKTDWGKRFKDRLAASGKPAKLIIGAMMRKLLHVAFGVLKSEKKFDPALHNA

SEQ ID NO: 54935 - protein, 453 aa, unidentified
MPASKSSRGRSSAQLTTINPNAAGLDVGSTFHVVAVPADRDEQPVQTFRTFSGDLHRLADWLAETGIKTVAMESTGVYWIPVFEILEARGFEVLLVNARDVKNVPGRKTDVNDAQWLQQLHQHGLLRGSFRPRDGVVRLRAYLRHRERLIEYAASHVQHMQKALMQMNVQLHHVVSDVTGVTGMRIIRAIVSGTQAPERLAEFRDVRCAASEETIREALTGNYRPEHVFALRQALELYDFHQVKIAECDTEIEAVLHTLNEERTTPEQPLPSVRHAKGRNEPGFDARPALYTLLGGDLTQIHGFGPYTVLRLVAECGDDMRKWPTAKHFTSWLCLAPGNKISGGRLLSSKTRRSSNRAAALLRIAAVNVGKTPTALGAFYRRLAARTGKAKAVTATARKLAILFYKALRFGMTYVDSGASYYEERYRQRVIQNLHRRARDLGFTLVADSAANG

SEQ ID NO: 54936 - protein, 387 aa, unidentified
MKLFVGIDVSSEKLDVCFLTDDNQLSILSEISVANDIEGASFIRETILEFNNSYHFDQIVIGMESTSMYSFHPSMFFHEDEKLKKLNTLVTIENPFRVKQFSRMFDENKTDRNDALRIADFLRIQRFTTSPIKEEKYMALQRLTRTRYQLIKQLIRTKQHFLENLTYKCNTLAREMRDESTSLFSATLISLMTEDFTLDELAELPLEAFCDLLQEKGKGRFKQPEKIAKAIQRAITMSYRLGALAQESINVVLSVLVREIRALEKNIKELDKAIEQVIVVIPEYQCLTSIPGVGKVYAAGLIAEIGQIERFEDQTKLAKYAGLSWKVNQSGNYQSQNTPLTKQGNRYFRYYLVEAANSVKIIFLNTKLFIKVNIRRFQSINTNVHSS

SEQ ID NO: 54937 - protein, 382 aa, unidentified
MTGRWLRSFFGRDRFAKLLERVGLAGAAGGSSEVRFGLEATGHYGHALQHFLLARGAVVTSVNPAHTRRAKELLDGSPEKSDPKDAMLVAELVAQGRGRPLTMPMGVYAELRRLGKLREQLAAERIRHLNRYYGLVDLVFPELEGLVYDVRCLSIRRLLAAYPTAADVAAGSCAEICQLLWRVSIGHISAGRGQQIYAAAQRSVGVREGLSALRLQMRLALASLDSVSAQLAQVEQAQCEALTQIPYAAHLLTIPCLGPVTVATVLGETGDLRQYRSAEALIKLAGLNLYSLSSGTFQGRTRISKRGRPLLRHAVFLGALRMSKHGQPLAAFHDRLGDRLAGPQVAVAGCRKVLRLPYALARDGVSYAPDRLATMTSDQVAA

SEQ ID NO: 54938 - protein, 345 aa, unidentified
METMYYIGLDVHKKTISYCVKDGSGRIYGEGSIPATRLTLDMWMKTLPQPWTVAMEATIFTAWIYDHLQPHAAAVKVAHPLMLRAIAVAKKKNDRIDAKKIADCLRCDFLPECYMASTEIRERRRTLRYRNLLVRQAVQMKNKIAVLLMEAGVSYNKQKLHKVGYFRELLATNQDIDEGLKPLLRLCRETVVRLGKTESALVRSLQRDSLLMERVERLMTIPAVGPITALTWALEVGEVQRFSSIKKAISYCGLCGAERSSANITMRTPLSKQRNKHLQTVLIEAAKMAPRNSPELAMVYEQEKQKGNANRATLAVARKLVAYLVAVDRRQKEFLTVERENRTAA

SEQ ID NO: 54939 - protein, 310 aa, unidentified
MESIIVGIDVSSDRLDVAVRPSGAAFVVERNARGLDELIARLRELTPAIVAIEATGGFETVAAAALAGGGLPVVIVNPAQVRAFATALGQRAKTDPLDAAVIAHFAEATKPQVRPLPDEATRLLADLVTRRRQIIEMIGAERQREQRVTIPRLKKSISRLLKALEKELASLDHDIDNAIRNSPAWRDKENLLETVPGVGPVIARTLIAELPELGSLGRKEIAALAGLAPFTRQSGKWRGKSFIGGGRTAVRCALFMGALVGKRHNPILKAFFDRLVAAGKPKMVALIAVARKLLTILNAIVRDSRPWQIA

SEQ ID NO: 54940 - protein, 360 aa, unidentified
MKVQRTSVGLDVHARSVVACGLDGDTGEVFQRRLCPDHQEVLEWIKGLPTPVAVTYEAGPTGFGLARFLLAAGIMCLVAAPSKLQRPAGDRVKTDARDAAHLARLLHLGQIVEVTVPSVAQEAARDLVRAREDCRGDLMGARHRLSKLLLRQGIVYCGGQAWTGKHELWLRAQRFDNPALTLAYEAALDAMVACVHRRDRLDEAITTMAVDSEFTPVVARLGCLRGISTLTAFGLAVEIGDWHRLTGRSIGAYLGLVPCEYTSGATRVQGGVTKTGNGHARRLLVEAAWHHRVTYRPSRDLRRRWDAATPTARARAHAANHRLHTRWAGFDQRKKRAVVANAAIARELAGWCWSLAVMPD

SEQ ID NO: 54941 - protein, 446 aa, unidentified
MKKSSRMSVIHPHAAGVDIGAEFHVVAVPPDADAAPVRTFQRFTGDLHRMSGWLKTCHITTIAMESTGFYWLPAFEIPEAAGFNVILVNARDAKNVPGRKTDVNDAQWLQKLHSFGLLRASFRPEHDISVLRSYLRQRERLTEYRAAHIQHMQKALMQMNVQLHHAVSDITGVTGLSIVRAIVSGERDPSVLIQYRDVRCKKTPEVLQQALTGNWQPEHLFAPEQSVAFFDFYQEKIRECDDQIETSLLQLSTGTEEPEGVLPSARHRTKQPNQLSFDVRPLLWKITGADLTQIHGFGPYLALKFVAECGTDMNRWPDASHFTSWLCLSPGNKISGGKVLSSKTRRSSSRIAAALRLAATTIGRSDTALGAFYRRLSSRIGKAKAVTATARKLAILFYNALKYSQKYVDPGADYYEECYRNRVLDGLKRRAKSLGYSLQQDPELCV

SEQ ID NO: 54942 - protein, 371 aa, unidentified
MNSIVYVGMDVHKEQYILCCYSYDTDKVEYKQTIPSDYKLVLKYMEQIRSRYEGEVSFVCGYEAGCLGYSLYHQLKDHAVDCKILAPSTMAITNTHHVKTDKRDAANIARCLAFHTYSEVYVPDNDDNDVKEYIRMRDDQKLYLKKVKQQILAFVLRQGKRFEGGKTYWTIAHLKWLKTLELSDLQREALDEYLLTYEYLTEKISRFDERIEELASVERYEEKVKHMSCLLGIKTHTALSMIVEVGDFERFEKAPKFASFLGLVPSEDSSDTRVNRYSITKAGNSHLRRLLVEAAQSYTRGNVGHKSVALKQRQKGNPPEVIAYADKANERLRRRFYKMTLNKGVNRNVAATAIARELACFIWGMMTEHVS

SEQ ID NO: 54943 - protein, 438 aa, unidentified
MWWSSQWLLYLTLKGVLTMKVVYQTCCGVDVHKSFLVATIIKTTSGVEPSYQKKRFSTFNNSILQFKNWLIENQCRDVCMESTGKYWVPVFNLLEDDINVTIANPKWVKAVKGNKDDTKDSKWIGDLFRLGLVPGSYIPCKPIRILREFTRYRYKLTSCRTSEKNRYQNALTVCNVALDSVVSDIFGKSATSVIDYLIERSDNSINHEEIASRLLRSLKKKSDSVIESIEGYQMTDSQKYRMRLVRAHLDYITSTINDIDTMLDSLIAPYENAVQLLCTIPGVDRNSAITVISEIGTDMTPFSNSKRLCCWAGLTPGNNESAGKKKSVRITRAGVYLKPALVQVAHAAVKSDKSPYYKQKYERIMKRRGKKRAIIAIARMILTAIYQMLSTGEAWNPTDLYKIDIPEPLKEKQKEKAIKQAKKLLIREGILSESQLAS

SEQ ID NO: 54944 - protein, 391 aa, unidentified
MFYVGIDIAKNNHEASIIDSNGKLVTSSFSFSNSVKGLEKFKRIISSFLLSSNNCIIGMEATGHYWVSLYSFLVDLGFTCIAINPIQSDAFRKMYIRKTKNDSVDSFIIAQILRFGEFSVSHFSDEDTFALRNLSRYRFALVDEVTDWKRKLVAILDQVFPEYSSLFSNIYGVTSKELLSKYPLPEDMISISTNELAELLSKCSKGRFGIDKAKEIQDKASNSFGIKFALKSFSFQIKQIINQISFLEDQILDIEEEISSMLNSLCPVITTITGIGDILGASIFSEIGDISRFEKASQLVAYAGLDVAVKQSGNFNATDTKMSKRGSPYLRRAIWLAANVAAFKDPALSLYYQKLRQRGKAHGTAIGAVARKLTNIIFAVLRDNKAYVPNI

SEQ ID NO: 54945 - protein, 358 aa, unidentified
MVDKVTEAAVVGGVDTHKDLHVAAVVDQNNKVLGTQYFSTTRQGYRQMLAWMTSFGTLKRIGVECTGTYGSGLLRYFQNAGLEVLEVTAPDRMERRKRGKSDTIDAECAAHAAFSGVRTVTPKTRDGMIESLRVLKTCRKTAISARRVALQIIHSNIISAPDELREQLRNMTRMQLIRNLGSWRPDASEYRNVTNVYRISLKSLARRYLELHDEIADLDVMIAAIVDELAPELIKRNAIGYESASQLLITAGDNPQRLRSESGFAALCGVSPVPVSSGKTNRYRLNRGGDRAANSALHIIAIGRLRTDAKTKEYVARRVAEGHTKMEAIRCLKRYISREVYTLLRNQNRQVNSIPITA

SEQ ID NO: 54946 - protein, 359 aa, unidentified
MKILKQVVAADVDQRNLVVTLGRLNEDLSTQLYAHKVFANDKKGFTSLVNWVDKFTARELSVHFVMEATGVYHESFAYFLDLRGELVSVVLSNVTSNYRRTLELKTITDKTSSEVIARLALSRNLLLWHRPDAALKKLKQLTRERDQIVGERVLIKNQLHAEKAEAEPNQTSLSRMLKRIALLNKQEKEIQSEIQQMIRLHPGLKEEVNLICSIPGVGTLTAVTVLAETNGFDLIRNKRQLTSYAGLDVKEKQSGTSVKGKPKISKRGNRYLRKALYMPALAAIRSNERYKTVFARLVAKHGIKMKAAVAVQRKLLELMYIVHKSKTPYQHDYQLKCADLINQKGSQSITINHPSYQAG

SEQ ID NO: 54947 - protein, 405 aa, unidentified
MEIIIERGCGLDVHKGTVVACIMGTGIKKEIRTYLTVTNDLLRLKEWLRETGITHVAMESTGVYWKPVFNILEDNFEVILVNARHVKNVPGRKTDVQDSEWLCRLLRSGLVSGSFIPPRDIRELRDLTRHKRKLIQAITAEKQRVEKVLEDANIKLSSIASDTFGASGKRIIEELIKGKLRAEEMAELSKGRLRQKREGLKEALVGEVREHHKFMIKASLKHIRAMEKILSDIERKIQEKIDRQYKEEYALLQTIPGVKGEASTLIAEMGVDMERFPSEEHLSSWAGMSPGNNESGGKKKPGSTTYGNKCLKTMLTEFAWVASKTKGTYLRLKYHSLVGRKGKKKALVALGHKILIMCYHILKYRCAYKELVADYLDKRRKDKIARSYIKRLHHLGYEVILQEAV

SEQ ID NO: 54948 - protein, 464 aa, unidentified
MRTIGIDLAVTAAHKAIVMDDQQHYLTAAISFHTRASELDSLLARARQGTDSPDVQVVMEPTAMAWFPIAVYLERHQVPMYLVNCQEVADLRRYFRRHAKSDRIDARVLAKLPSVNPDQLHRLRLLSAPLLACQRGCKELERLSRLIVALKNQLQAIDRFAWPGLKPLVFKDPFSPAARWFREHWYDPQPVLKAGATAIDQQWQDRSGDPENQGDWTTELVRLAQQVVDLYGTEGRFLRFEYVQAEVTRLQATLTFLEDQFETVRLHTVRPLYRQLHPSRNLETIKGVGQDSAAVYLSFIGDPQRFATTRCLRGWSGMVPNSKQSANSQAKGLHITQAGPALIKKYLYLDAEIARQWDPQIAAIYYDQMVNKGKHHLQAICTCATHLLDRILIVLRDDRPYELRDVAGQPVTVEEARAIIAEHYTVPAEIRQRNNKRTRHERAAKLVEKQLIKQTRKEKLLKPD

SEQ ID NO: 54949 - protein, 348 aa, unidentified
MRVFVGLDVSLAKTAICVVDRDGGVVWQGKVTSEPGPLIERLAEWSGTIELAGIEACPLSEWLHRALREADIPAVCIETRHAQRFLSSRPVKTDKNDARGIAEMMRLGHYRPVHVKSPAAQAMRTTLAARMQLVAAQLQIEGTIRGLLRVYGLKIGAVHRNRFTARAGELLEMAAIPELSAAIEPLLRVRETMRTERKTADRNLAASARRSTTGRRLRTIPGVGPVTTLAYIATIDDPGRFDSAKAVGAHLGLTPRVYQSGEIDRSGQISKCGDRMLRHLLYEAASALMTRTRKWSRLRAWGISVAKRRGIKRATVAVARKLAVIMHRIWITGALFDFGRPAVTVGAA

SEQ ID NO: 54950 - protein, 425 aa, unidentified
MKNTFLSTLFVGIDVSSKTNVLCALDFQGNKLLNQKVLNNRPGAIAILDSILGCLSSNDLKYVVIAMESTSFYSTHIANFLSSSEELLPFKPLVYCLNPKSVANYRKSFVDMDKTDPLDAYVIADFARCGRITSSPWCGAQFLALQRLTRHRLHLVECITREKAYMVSNIYLKFSELAVLDKGDKPFSNTYGATSAAVLTDFLSLDDITYAPIEDLVAFVREKGKNRFSDPHETARILQKAARDSYRLDKVLYEPLNVAIASSFNVIKATQDEVKAIDKAIEKNIRGLNTTEYQSLASIPGIGPVLASGILAEIGTVTSFRSNDALAKYAGLTWRVNQSGNYSSDDTKMTKTGNRYLRYYLIEAANSVKNHLPEYKEYYYKKYGEVTTHQHKRALALTARKLVRLIFGLLTKNQIYSGDKVGEIK

SEQ ID NO: 54951 - protein, 332 aa, unidentified
MNMHLQGGVAKGGVRPNAGIDVSKQHLDVCCAGDERRVVNDAGGWDELTAMLRSGGVDLVVVEATGGYERGLVCALQDAGLCVARVNPRQARDFAKSMGVLAKTDQVDARTLRDFADVLARHANRSQYVTPMVEPMRQQLEELMTRRRQLVEMRVAEHNRLEHAGPRASRSIRSVLKLLDKQIAAVDQHIDDHMDRHFGAQRDLLDSVKGVGPVTILTLTAALPELGRLDRRQIAKLVGVAPLADDSGHRQGKRRIWGGRAQVRAVVYMAALVAMRHNPVIRAFYERLVAAGKPKKVAIVACMRKLLTILNAMLRDQAMWNAARHLQPSIGF

SEQ ID NO: 54952 - protein, 339 aa, unidentified
MELYAGLDLHSRNTYIGIMDKDFNRVFKKRVPNHLEHILQTLDPFRDQIKGFVVESTYNWYWLVDGLMDAGYSSAHLANPSAIKQYEGLKHSDDQHDAFFLAQLLILGILPQGYIYPKKGRPVRDLARKRMFLVQHKTAHILSLQSLLQRCCAIKIRANDMRHLTVEELELWLEEEHLVLSAQANLDSINFLKQKIKQLEKAIIQKVKLNKAFKYLLTVPGIGNILAMTIMLEVGDIKRFPKVGNFTSYCRCVPSRRLSDGKSKGHGNRKNGNRYLSWAFTEAVHLGRRYNERFRRYYNRKVAQANTSLATKALGNKLARICYYIMRDQVPFREELFCQ

SEQ ID NO: 54953 - protein, 355 aa, unidentified
MIQYKDIKKYVDSKLVFVGMDIHKRHWNLAFLCDGEFVETVRIRSDYLRLLHLLSKYSTARGISLVYEAGFCGFWLYRRLNADGYSCIVTPPTSIPKSTSKVKTDKRDCRKLASYLASDLLKAVYVPPQEVEADRRIFRRRLDLVDQMRASKNKIKSFLHLHEIDRPENIGKNWSKTYIAWLMLVDWEYNSDRFFFNHLLKVYLGQREDLAEVTKQLRYLSRSDKYHMSYQRLSKCKGVGLITGMMFLLELYDIVRFKRSDQLASYLGLTPSQYSSGEEVHMGHITRQGNYRARAMLVESAWTVIRYDPHLRNKYERIRAKGNNGKKAIVAVAHSLAIRLRRCLLDQTDYVIGVC

SEQ ID NO: 54954 - protein, 338 aa, unidentified
MKVIKQSVGIDVSKDTLEVKFKEQGPMGVKIKGSTRFDNTLKGFNRLLEWGTKREKTENVFYVLEATGIYHEDLLYFLNNEGKQVCVELPQRIKYFAKSKGVKTKNDKIDSGVIADYGLERTLKIWQPPSKEFKCLRDLSREHSALNDAKITAQNRLHAAIRSHEKDPRVIERLQAQIDFYNSQLDEIIKDIKSTVKKDKELSSKIKKIEIIKGLRVLTIVKVIAETGGFFLFNNINQLISYAGLDVIENQSGNHKGKTRISKKGNSNLRTALYMPALSAIRFDEKMKAFNKRIMENHQYKKQGIVAVMRKLLILIYTLWKKDEEYNPNYIYGNNQKK

SEQ ID NO: 54955 - protein, 438 aa, unidentified
MPTLAYLGLDVSQESARVCFLLADGEEPRPRWTIPNTQPGAEALSCELARLCFLYQVDQLRIGLEATGLLWWHLACALKDAEALAPFRPQIYALNPQLVETFRKNFGALPKSDHADAFLIAERIRYGRKLPSPFQLDTRYAPLQRLTRFRCHLVHNLVREKNYFLSFLFLTFSSYGQVAPFSDPFGATSCAVLEEFSTEDLAQHSLDDLATYLQDKGHGRFAEVQDVAASLQRAARDSYRLDKVLQEPLRLVLATTMASIRSLQQQLKTLDKTIAQELATIPQTLSSVPGLGPVWTAGLIAELGDIRRFDDQGAIAQYAGLTWPSAQSGEFAAEDTEMSKRGNSYLRYYLVEAANSVRTHCPEYTRYYAAKYAETPRHAHKRALVLTARKLVRLIDVLLREGRIYQPPQQRAPAPPATQPHNKRPGPQRRSKPLRAGT

SEQ ID NO: 54956 - protein, 422 aa, unidentified
MTMKVIYQTCCGVDVHKSFFIATIIKTTSGVEPSYHKKRFSTFNNSILQFKQWLIDNDCRDVCMESTGKYWIPVFNLLEDEINVTIANPKWVKAVKGNKDDKKDSKWIGDLFRLGLVPGSYIPCKPIRILREYTRYRYKLTSCKSSEKNRFQNALTVCNVALDSVVSDIFGKSATSIMDYLIEQSDNSINQVEISARLLRSLKKKSDSVIESIEGYQMSDSQKYRLRLIRAHMDYIISTINDIDTMIDSLVEPYENAIQLLCTIPGIQRNSAITIISEIGTDMSQFSSSKRLCCWAGLTPGNNESAGKKKSVRITRAGVYLKPALVQCAHAAVKCDKSPYYKLKYERIVKRRGKKRAIIAIARMILTAIYKMFETGEIWNPTDLYKVDMPEPLKEKQKAKAIKQALKLLKCEGVIPESLEAT

SEQ ID NO: 54957 - protein, 373 aa, unidentified
METIITYVGMDTHKKEHAIALHYPGQEEIVRLTVRNTSSEISKMVKRILKKAPGEVRFCYEAGVCGFDLKRKIEALGCKCAVIAPSLTPIKPGERIKTDRRDALKLLMMFKAGLLTEVYAPDPEQEAARELTRLRQSARKNLMTARHRLLKFLVRHGYIYHEGSHWTGKHFRWLGSLEFENPLMRDVFDSYFTEMQHCMQRLDSLDKEVEQLAESEPYKEIVGIVRCFYGIDTLTAISIITELFDLGRFANPGCLMSYLGLTPSESSSGEKQNKGPITKAGNKRVRRLLIEVSWHYRHPYHVSKALKERRKNQPQWAIDIADRAGQRLRKRYWYLINRGKMPCKATTAVARELAGFIWSVLREYQARNMEKVA

SEQ ID NO: 54958 - protein, 377 aa, unidentified
MPSENTILLAIELSASAWLVAYRLPKAEKCRLQRIAGGDTPALLALISGLRSRVTAELGSADVACCFEAGRDGVWLHRVLTAQGVAAYVLEPTSVLVNRRARRAKTDRLDAEGMVRVLASWLSGDQKICSMLRVPTPEQEDAKRRHREREHLVHDRVRIENRIEALLFTQGIRKRPSLRSWSRDLDALRTGDGRVLPPLLRAELDRLRRRLELVLELIRELEAEREATLSAAAGDRSNRQIAALQQIRGIGANFAAVLVHEVFYRGFENRRQLASYVGIAPTPHKSGTMDRDRGISRAGNPRARATLIQLAWLWLRYQPGSELAAWFRARVGALQGRTRRIAIVAIARKLLIALWRYVETGLIPAGITLQAELQASV

SEQ ID NO: 54959 - protein, 317 aa, unidentified
MEQTKGNTKVAGVDVGKAQLDAAVHGSEDLTRTANTPAGFGELIAWLKAREVGRVGLEATGGYERGVRAALEAAGFEVVVHQPLEVRLFARLKRRLAKNDRLDAALIASATAQVDAVRAAQDPRLTELAERLTAYEQVTDLAAQLKTALEHVSLKDLARNIRAQIASLTRLKGRLLAQVLSVIKAHADLLGRFRLLSSLPGVGPVVAATLVVRMPELGALHRGQAAALIGVAPFDRDSGQWKGLRFIVGGRARPRRMLYLAALAAKRCDPSLKAFAHQLAQRGKPAKLIVVAVMRKLIEAANLVLARAQPWAKQQPV

SEQ ID NO: 54960 - protein, 493 aa, unidentified
MRIASSSPAARRNAKNALKLKEQARKRAATATSPAAIEKLEPIHRRAAGIDIGSAENYVAVPPETIAPGESPVRVFGVFSQQQDTLVEWLRACQISTIAMEATGVYWLTLYDKLEAAGIEVYLVDPHGVKAVPGRKSDWMDCQWLQKLHTYGLLQRAFRPDAPIRRLRTLTRQRAELVCAAASQQQHMEKTLVCLNVQLGLVVSDLVGESGLAIIRAILAGERDPEVLVENRSARCTKATIQEMKQALQGTYNEEDLFVLQQSVDTWDFLQKQTENCDRKIELVLTAIPTAAVVELKVPPLPVPAAAEQPKKKGKGTAGKNAPDKDFTPMLRRICGVDLTQVMGLNLLSVLMLLGEIGTDMSRWRSAQAFCSWLGLCPGTKISGGKVLSRRTRKVNNRAATLLRMAAMVVGRTDTWVGQFYRRMKARKGGPKAVTATARKLACILYHMLKYQEEFVALDMGKYAANAQAHRIRYLNREAKKLGMELVEVQEAA

SEQ ID NO: 54961 - protein, 408 aa, unidentified
MPELDHRGPFAAVDWAKDAHAVSIVEESGAERLAEQFPNTEAGLRALTGALLEGGVERVAIERPDGLLVDRLLSAGLCVVAVHPNKLASARERHSASGKKSDGFDAFVLADLLRTDGHRFEALRPDGDETRALRALSRTREDLVGARVALANQLRAGLEAFWPGAAVIFAEVDSPIALAFLERYPSPADARRLGVRRLEGFLARHAYCGRRPAVELLARLRGAPEGRSGEAEVEARRQAVLSLVAGLRALVEQIGLLEAEIAGAVRAHADGAIFSSLFRSKATVTAARLIGEIGDVRERYRSADALAADAGMAPVSRSSGRSRVVTFRWACDKRLRNAVACLADTTRHHHPWAGSVYRRARARGCDHPHAIRILGRAWLRVIWRMWQDRVPYDPALHRGLQQLNPAGG

SEQ ID NO: 54962 - protein, 408 aa, unidentified
MNTLYVGIDVSSKSNVVYLMLPNGDKHSNFSVANSHEGSTLLVKKIYSALTSHSLDTVLIGLEATSVYGDNLVYFLREDATLAPFNRKIHVLNPKQVKKFHDTYNDLPKNDYVDSFVIADCLRFGRINKEVYMGEYRYKALQNLTRARFFAVQNLVKEKQRFMNVLFKKYSTMTQEKVFSDAFSTTALAVYDEFESAEALANMDLHELTDFIIEKGKNRFPDPVAVAKAIQKAARSSYRLPKTVNDSVNQVLSISITSMKALESQIKEFDKAIIALMELLPNVLISIPGIGPVYSAGIMAEIGDINRFDNQASLAKYAGLAWKQHQSGGFEAEVTRLIPSGNRFLKYYLCEAAFSLVRCDKEYSDFYHLKYKEVNRCQHKRALALTARKFVRLVFRLLKDNRLYCPAK

SEQ ID NO: 54963 - protein, 408 aa, unidentified
MGRSAEVVAPSSSIRTDGGCPVAQVNDLSRSLTAFDPLSSLVVVVEMSKASWLVSGVVPGVERQPLKKLEPDATALLRLIERWRNEALRAGRPISRIALAYEAGRDGFWLARWLIARGIEAHVIHSASVAVSRERKRAKTDRLDAAMLTRVFLGWLRGERGHCGMVAIPTMEEEDARRPSRERESLVNERTRIINRMKSTLARLGIRGFKPHLRKAPERLACLRTAEGAGLPVNIMDELRRDMARLALVREQITSIEKTRAERFRRAPDTGPHAMVLLLARVIGIGIETADMLVQEILSRKLRDRRAVARYAGLTGSPDESGLKSREKGLAKAGNARVRRGLIQLAWRFLMFQKDSALARWYRTRTEGPSGARKTTMIVALARKLLIALWRLVTIGEIPDGVELRPAA

SEQ ID NO: 54964 - protein, 344 aa, unidentified
MTYYTGLDVSLRSVSICIVDDQGQVTHEAKVAAEVSAIAKALRSFSVHVSLVGFEAGTLTQYLTYGLQQAGFDVVCLEARQVNAALSAMRNKTDRNDARGIARILRTGWYSRVHVKSIESHHIRALLSSRKAVLNKCVDLENELRGLLKVFGIRLAMKVPHGAYDGVVRPLIEADALLVRALLPLLEARQVLYRTFLKLDNEVKAIVRTDPVCQRLMTVPGVGVITALTFKAAVDDPSRFKSSRTVAAHFGLTPRRYQSGEMDNPGRISKAGDPDVRCALYTAAHALVSRSASWCTLKAWGKRLEKSRGHRRAVVAVARKLAVILHRMWIDGTDFRWGSMEATA

SEQ ID NO: 54965 - protein, 402 aa, unidentified
MRVLYERCCGLDVHKKSITACVLTPEGKEIRTFGTMTDDLEELVEWLKQKQVTHVAMESTGVYWKPIYNLLEAEPIDVLVVNAQHIKAVPGRKTDVKDAEWIADLLRHGLLIPDRAQRELRELVRYRRSLIEERARELNRIQKVLEGANIKLASVVSDINGVSAQRILRALIEGTDDPAVLAQLAKGRLKQKIGELRRALKGIMGPHQRMMLAEQCRHIEYLDEAIARLSREIEERTRPFHEALELMETIPGVGRQSAEQIIAEIGTDMSRFPTAAHVASWAGMAPGNHESAGKRLSGRTRKGNKKLRACLVECARAAARTKNTYLSAKYHRIAKRRGANRASVAVGRTILEIIYSVLTRKEPYRELGADYWDQQREAAIVRQTVKRLEGLGYEVKLEKTSA

SEQ ID NO: 54966 - protein, 348 aa, unidentified
MNLKRIGLDTSKAVFTLHGVGQDEKAILRRDMRRAEMEAFFAKLPPTHVALEACGGSHHWGRRLAAMGHTVQLIPPQYVKPFVRRGKNDRNDAEAISEAAARPDMPSVPVKSAEQQAEAIVLSARELLVRQRTQLVNAVRGHAAEFGIVAAKTISQLPGLLETVAAAETVPATAKEMLAFLGAQVTQLDAQIGELERRMKQQHKANPVSQLLAEVPGIGPIGALTLALTIDPGRFTSGRHFAAWLGLVPKQHSTGGRQRLGGISRAGNERLRQLLVVGAMAVIRFAKPGSKSASAWLLALLERKPRKVAAVALANKMARIVWAMMATGEAYRGSKKVATPAAGAAAAA

SEQ ID NO: 54967 - protein, 391 aa, unidentified
MVCVGIDVAKDKHDCCILDSDGMVRADCFTIPNNMDGFKQLLQTIRNCTKKSDKIKVGLEATGHYSYNILGFLLDNDLAVYVMNPLHTNLYRKSLSLRKTKTDRVDARTIATMLLSDVDLKSYTDTAYHNEELKSLTRYRFDKVRERAKLKQSVSRLVTILFPELEKLVPSLHIASVYSLLSEYPGAKQISEIHLTKLTNLLTTASKGRYGKDKAIQIRDAARTSIGSVMPAKSLELKHTIKLIRELTSEIDEIEDSIQQIMNELNLPILSIPGMGVNSAAVILAEIGDFSNFSSPDKILAYAGCSPSTYQSGKLTNCYAHMEKRGSRYLRYALYNATKYVCHWNPVFAEYLAKKRAEGKHYNVALSHATKKLVRLIYALQKSGKAYLTAA

SEQ ID NO: 54968 - protein, 412 aa, unidentified
MKKHTYRSKNVNKINFTQVKERLANEPVVFAIDIAKEKQYGLLSNASGTVSELIWWTHTEQTVELLSALKELECPLDIVIESTGTYGDALRFQFRDCGFEIYQMNAKRVKDASEIYDGVPSMHDAKSATIITRLHRDGLSKLWVELNDDERTMNALRREYDMHQSQYQRNQGRLEAYLSRHWPEVSYLLSLDSVTLEKLLIEYGSPASIAADAKNAANNMRLWGKHLLSDGKIEAVISSACNSLGQPCIESELRYLQALAKELQHSRLQQKQAKQALEESIKSKDDLRELGALIGMVTTAVLFSCHLDPRKYDCARSYQKALGLNLKEKSSGRHVGQLKITKRGSSVARSYLYFAALRLIKNNSVVKAWYLNKVDPRAKNKTVIAVMRKLSKSLWYVGRGDKFDATKLFTVA

SEQ ID NO: 54969 - protein, 322 aa, unidentified
MAMLSFGGIDVSKDRLDIIVLPDEQCSWVSNDAAGWAELVEQLRGSSITAIGVEASGGYERGVVRALLAAGMSVRQINPFKLRQFAKASGTLAKNDRLDARMIASFVAIMPTRPAQRQAPMIEQLAAMLTVRRQLSDHKVATENASRLLEGAMLQRLSRRRIAGLTADIDLLDQRLVEIVTADPALAHRFRLLTSMPGVGAVLACTLIALLPELGQMSRKQVAALVGLAPYDFDSGKLKGRRCIWGGRARVRHVLYMAALSASNWNPGLKAFHDRLEATGKKPKVVIVAVMRKMIITLNAMLRNETPWVDRSSGRHSVLTAR

SEQ ID NO: 54970 - protein, 403 aa, unidentified
MGLFAGIDWAQQEHSLCVIDDNGRPRSRFRVAHTSSGLADMLAKLRDLAAPAELPIAIERPTGALVDALVQAGHPVIPIHPNAVKAARPRYTAAGGKSDPGDAYLLADLLRTDGHRLHALRPLSDETRALRALVRSRDDLVAQRVALANQLRALLDSFWAGAAVIFRDVDSAIALAFLAQFPTPAQAARLGPKRLARFLARNAYCGRRSVEELLQRLRSAVVTDLGELEMEAKGEIVRTLVAVLETIVAQLHKLTAAVEHAVVEHSDGALITSFPRIGRVNAAQILAELGDDRARFSTDDQLAAEAGVAPVTHQSGKHRGVVFRWACNKRLRQALACWADNSRRASPWATTVYAAARARGCDHPHAIRILARAWIRVLWRCWQDRIRYDLERHTAAKRLATPA

SEQ ID NO: 54971 - protein, 477 aa, unidentified
MVATGLHGLNRKQRKELARRMRAQDPGLDIVHPHAAGIDIGNSSHYVAVRPDQDPDSVRRFECFTGDLHRLADWLQQCGVTTVAMQSTGVYWIPLYEILDARGLEVYLVNARHTKNLPGRKTDVQESQWLLKLHTYGLLRNSFHPSADIRIVRTYWRQRGGHVQAVSTCIQRMQKVLTQMNVQLANVISDLSGWTGQRIVRAILAGERDPQTLAALSHPGIHATRDQIARSLEGTWQSDLLFVLQQEVTMYDAYLQRIAECDQALEHHLKTFADKAIPDAPSDAESSSPVAPRQTRVKHRRKAGSHTPQFNLGHELHRISGVDLTRIDGIDVGVAQTVISEVGVDMTRWKTDAHFASWLGLCPDNRITGGKVIRKGTRHVINRAATALRLAATTLLRSQSYLGAQYRRLRARLGAPKAITAMAHKLARLVYRMLKWGHEYVDKGLQYYEERHRHQQIRLLQKRAAALGFLIVEPRIS

SEQ ID NO: 54972 - protein, 412 aa, unidentified
MQVVTERCAGLDVHQASVVACLLVCVPGMQPRKEVRSFGTMTHELEDLREWLQQEGVTHVGMESTGVYWRPVHTVLEGHFELIVGNARHIRNVPGRKTDVKDAEWIADLVCHGLIQPSFVPAKPLRALRELLRYRRKLVEGQSAERNRLQKLLETANIKLASVATDVLGVSGRAMLRALIEGTASPQQMAELARGRLRRKRAELVRALEGHIEAHHRVLLSMQLRRVEAAEQDIEALDQYIASQLAPYDAEMALLITIPGVDWVAAAALIAEIGTDMSVFLSGHHLAAWGGVCPSNHQSAGRHRNGRARKGNVHLRTTLVGAAMSAVRTKGSYLKDKYYRLKARRGAMRAALAIAHKILIAAYHMLTRRVGYRDLGEAYLDQRDRSRTAANLQRRLERLGYIVSIQPNQPAA

SEQ ID NO: 54973 - protein, 415 aa, unidentified
MSLKIVYKICCGIDVHKTFVVACIASTNDKGVTSYESHRFSTYTSGLKTLLQWLLNRNCKDVCMESTGKYWIPVYNILENDCSIVLAHPKYVKAIRGKKTDKKDAKWIADLFKHDLVAGSFMPPADIRQLRDLMRYRFKLTCFQSSEKNRLQNCLTVSNIQLGNVVSDTFGKSAQAILDKLLENPADTSFDLEPLVYKSLKKKLPQLRDAINGYITPEQVGKLKVIKAHYESLESRKAELEELILALAAPYQQELAILQTAPGIRSDFTAIGIISEIGTNMEAFPSAKHLCSWAGLTPTNNESAGKKKSVRVSKAGCYIKPLLVQCANAVVTSKKHPEIRNRYLRLKKRRGHKKAIIAIARMLLTALYHMLKNGENYNAELYRKSDLPPADWEITVEQAIIIARNQGYKIKSATA

SEQ ID NO: 54974 - protein, 461 aa, unidentified
MPGQNKKGQKRPDQKVVKLDSLKQLNLNAAGLDIGAAEIWVCVPEDRAEVPVRVFHTFTPDLHALADWLESCGVETVAMESTGVYWIPVYEILEARGFEVYLVNARHLKNVPTKKTDVLDCQWIQQLHTYGLLNASFRPEADMVALRAYIRHRDNLIRYRTGHIQHMQKALQLMNIQLTNVISDITGQTGMQIIRAIVVGEYDPVKLAQFRDPRCHSSQAELAKALSGHYQAEHLFALKQGLELYDFYNQQIQACDAQIEHKYTAIKPAAETQPQLPPPAPKQRRSKNEPAFDLHRYLYQLTGVDLTQIDGLDVLTVQQILTETGLDMSPWPTVKHFASWLTLAPHNAISGGKLLKSHTLKSTNRAAQAFRMAAQSAGRSDSALGAFYRRIRAKHAAPKAITATAHKIARIFYHMLKSKQPYQDPGQAYYEQKYRERVINNLKRKAKLLGLELVPLQPSVS

SEQ ID NO: 54975 - protein, 345 aa, unidentified
MNITTVGIDLAKNVFQVHAVDGRGKVVLRKQLKRSQVASFFVNLPPCLIGVEACASAHHWGRTLERFGHTVRLMAPQFVKPYVKTNKNDVADAEAICEAVNRPNMRFVPIKSIEQQAVLSMHRVRQGFVKARTAQANQIRGLLGEFGLVIPKGISHISARVPALLEDASNELPLAFRQLIDQLTGHLNSLGERVRDLEREIIDWHRSSELSRKLEKIPGIGPLAATALVASIADAKSFDNGRQVAAWIGLVPRQSSSGGKSKLLGISKRGDVYLRTLLIHGARSVISAAQRRSEIKNVWLANLLNRRHANIAAVALANKNARTVWALLAHSRDFRPDFATATTAA

SEQ ID NO: 54976 - protein, 397 aa, unidentified
MIAVGIDVSKSKSVVAILNADGTKHVTPFEVKHNIPELNALVKYLNELNENIVILMEYTGHYHYPILKKLNDEGFQVCLVNPFQMKKYGDTELRRMKTDKKDAIRIATYALEKSYQLVPYNSMEQKYEDLRLLARQYRQRMATLTFNKVHLVNLLDETMPGITSVLQLNTRDPDTSLIMLFIKKYKSYDYIRKMGKTRFMESYSKLLKKARNRRVDHLALSIYELALQSITTHGENTYTIMAQNQCLNLVAESQKAADEIITHMQSIAITIPEYDILRSMNGVGDRLGPLILAEIGDVRRFHSGKALNAYAGNDAPPYQSGNFESHNRHISKRGNAALRKYCFEVMQALKLLKPQDDPVYLFLTKKEQEGKPYNVAKMAGVNKFLRIYYARVMELEQ

SEQ ID NO: 54977 - protein, 338 aa, unidentified
MPLYGGIDLHANNSVVVLLNEQDQRIYHKRLPNDLATIVEQLAPYHADIEGLVVESTYNWYWLVDGLMDAGYRLHLANPAAIQQYSGLKYTDDHSDARWLAHLLRLGVLPEGYIYPKAQRPIRDLLRKRAHLVEQQTANVLSVQNIILRNTGARLSTNRIKSVSQAEVEALLPDADQALAVSSALAVLHCLAEQIKTVETRVRTRIQSTPLYELLQTVDGIGPILAQTILLETGDIGRFPSVGDYASYCRCVDSTKVSNGKRKGQGNVKNGNPYLAWAYAEAAHFARRFNLKVQRYYQRKQAQTNVPVAHKTVAHKLARACYHMMRHQVPFDAAKAFG

SEQ ID NO: 54978 - protein, 396 aa, unidentified
MTQFNAESASIHTVGAPIWPEQATIHSAYVGLDVHKETIAIAVAEPGRQKPVYEGEIANTPKRVERKIQQLSERYGGGLLQFVYEAGPCGYGLYRQVLTSGHDVQVVAPSRIPKAPGERIKTDRRDALKLARLARSGDLTPVWVPDTEQEAMRDLTRARDDMKAQERKARQQLNAFVLRHGHHWPKGKSRWTQTHFNWLESLRFEHDWQQVVLQEYIEAVKAASRRVADLTVQMERALPQWSLAPVVEALVALRGIDKVAAMVLLAELGDISRFDSPRQLMGFLGLVPSEHSSGSTRRQGGITLTGNSHARRMLVESAWSYRFPARQTMHLKRKAAGAPEEAKAVAWQAQKRLCGRYRDLTRAGKNTKLVCVAVARELAGFIWDIVWRVMPAAQAA

SEQ ID NO: 54979 - protein, 526 aa, unidentified
MVARFKKAKLRTSAGLGKRWIGKPAGRIQERVQAAGPERFGVVAVDCAKRRSKWMLCDFYGKVLVEPTSVEHTAGGLSAMTRRVAEACCAERLTDTVVAVEMTGIYHKPAYRAFRQAGFDTRIVHPFASNHFRRPLHPGDKTDDHDLEAIFHAAIKGYGLAPPPVGEAYQALQATSRHRHNLVKQRSRLMVQIRRLLHLTMPGFADLYEDDKLFHKSIALSVAERFTSPEAIRSAGTAGVARYLNDAKLRFQARSLDRIVAWASAAAEPAELAVIYTQQWRQLDALRRLCDEQIAATEREMAGFLVKTPYVLLLSVTGINVVSAARLAGEAGPIEHYTSARALNGRAGLYPSRYQSDEVDRTGGALVRQCNRKLRGAAMLVAENLIKCHPYYRGLSALWAAQDVDPRDRRCRVANRAMRMVYQLVGGRQVWRDKGVDREYVLHKLQEFHRVHRTPLEQALCDLNEAFAWLPKSTHAAEAKPLAELVRKPRRGPQRIGDLIVPLLLRLGVGVETDVESNTSEARSSG

SEQ ID NO: 54980 - protein, 364 aa, unidentified
MADYREAFVGIDVAKLKNAIAIAETGREGEVRFFGEVDTSATGMRRFVERIASRFGGVHFCYEAGPTGYGLYRLIRSLGHECTVVAQSLIPRKPGDRVKTNRRDAVSLARLLRAGELTAVWVPDESHEVRARSAAVETLRIHRQQVSAFMLKHGRTYPRKKGWTMRYLRWLQEQQFDHPAHQIALQEMVGAVRITRERVERLERTIEEFVSAWSLEPLVRALQTLRGIDLIVAVTFATEVGDVSRFETSRQLMGYLGLVPSERSTGETVRRGGITKAGNGRVRHMLVESAWTYRHPPKIGKTKLYRLEQTSPAVREIAWKAQTRLTARYRKLASRGKRTTVVCTAIARELVGFMWAVARQVQSA

SEQ ID NO: 54981 - protein, 358 aa, unidentified
MRIIGCDLHARQQTIAMLDSDTGELEEKTLEHEGDTVREFYSALPGPILVGIEATGSMQWFLELMEELGIECRVGHPQKIRKAETRKQKHDRRDARLLLTLLAENRFPTIWMPSSEQRDLRTLLRHRHQWVRLRSRVQHTLQSMALNHGLRRGRSLWSQAGQHALRALPLAPHASERRNALMTLYPRLQESIEELDRQVSEQTQQRPDARRLMTHPGVGPITALATEVFLGDPLRFSDGKAVASYIGMIPSEHSSGDRQRLGAMSKQGNALLRYLWCEAAMHAVERDPELKRFYRRKLVQKGLGKARVAAARKLGIRLWIMMRDQIDYQEFCRRGKARQESGGVHAGMPDRDSGPAAQ

SEQ ID NO: 54982 - protein, 393 aa, unidentified
MYLVGIDIGKLKHSFCLLEKETGEILVEPVFFENNRDGFNALLSSFKHLPQKDILIGMEDTGHYNLALLKFLLDRNYQVALINPVATNLTRKMQGGISTNDKLDTLTICDVLSSSQRVKSYRISKYSSFDLYEQKLLTREHHNLKEEENQLSNRLQKCIDVVFPEFNSLFKSKYGIVYMNILKEFGSADAIAHADIRTLRKCFDTGRGKHISLTAQELKEAARNSIGFPSSSEATQIKHLVARIELIKEQIAEIDKKIEEFSIQNNSPILSIPGISHFSGTSILAELGDIHNYSKPSQIIKFAGVAPLTYESSQFTAQHTAITKKGCKYLRKTLYQIITPVIQYNPVFKKFYLLKIAQGKGHRCAQGHCVRKLMRVIYHLLSTGTQFDPALLR

SEQ ID NO: 54983 - protein, 343 aa, unidentified
MQTVSTIGLDIAKSVFQVHGVDANGLVVVRRQLKRRYVLAFFEKLAPCLVGIEACASSHYWSRQLQALGHNVRLMPPAYVKPYVKRQKNDMADAEAICEAVTRANMRFVPTKTPEQQSGLVLHRTRHLFIRQQTSLINAIRGHLAEFGVTAPVGRKGVEELLRVIADPSDKRVPDVVRACLAALGSQLLSLKKQILDFDRMIMAWHRSNQTSQRLNCIPGVGPLLATALVASVADPKVFRSGRNFSAWIGLVPKQHSSGGRARLGSISKQGDRYLRGLFVAGALAVIRYAKLHGTKYRPWVAALLARRPTKVAAIALANKLARMAWAMMARGERYNYPAALRV

SEQ ID NO: 54984 - protein, 320 aa, unidentified
MKPAVTTAPAAVTYVGVDIAKRTLEVSPNPAWPSGEFANDPAGHRRLVKRLKKLSPPAHVICEATGGYERDLLASLHKAGILVSLINPRNARDFARAQGLLAKTDQIDAALLADYGVHLGPSPTPKAEPSQERLQALVGQRADLVGLRQQEANRAEHQRDPFVLRQTKSILEFLKKQLAALEEEIASVIAQDDKLKHKCQRLQEIQGVGPATAWVLLADMPELGSLESGQPAALAGVAPYNQDSGPWRGQRHICQGRPLVRRALYMAALVAARRNPVLRPVYERLRAAGKAPKVALVALMRKLVELANDLLKKPDLKLVE

SEQ ID NO: 54985 - protein, 319 aa, unidentified
MLHQAIVIGIDVSKAGYDVHVLPSQAAFRAAAGAAQIAALVRRLAALGPSAIALEASGGYERPLARALHAAGLVVYILPPARVRAFARATGQAAKTDRIDAAMIARFLALAGEKLEPYAPDPDRDRLSALIAHRRRLLAEQSGLESQLDTVTEPLVRRMIQARLRSIAAGILLIGKTIRARIAASPHLQARFVRLTAVKGVGPVLAASLIADMPELGRISAKAAAALLGVAPHARQSGASNRPGRCQGGRKSLRDTLYMATLSAVTARDPNLQPFYKRLREKGKPFKTALVAAMRKLITILNAIARTDPAFQPEQTTVA

SEQ ID NO: 54986 - protein, 337 aa, unidentified
MKLYAGIDLHSNNSVVVVIDEARNEQFRRKVPNDINYITEILSPYKAMLQGIVVESTYNWYWLVDGLMEADFKVHLANTAAIQQYSGLKYTDDNSDAHWLAELLRLNILPEGYIYPKEQRVIRDLMRKRMQLVQQRTLNILSIQGLYARHLNRSLKGDKIKKLTTEQIGLDFEMHVSLAVKSNLAVINCVEEQIDILEKTLKRAVCLTPAFTQLTSIDGIGLILALTIMLETGEINRFKTVGDYASYCRCIGGAKYSNGKKKGRSNSKNGNKFLSWAFTEAAHYGIRYNTTIKKYYQRKLAKTNKIIAIKTVAHKLSRACFYVLRDNVPFEVEKAFM

SEQ ID NO: 54987 - protein, 406 aa, unidentified
MTKNANATGRVIGLDAHPDTFTAALLRGSTPAAAWLEKTFNRVPLAQLTCWARQHTTPQDLFVLEASGNSFQVVRTLAASGRQALVLESCQMGKLKEAHANNDKISAVRIGKAYLAGTAKEVWVPDARTQERRDWFHAHRKAVKRTTQMRNRLRSYLSDHGVRFKRGMALAKGPAAGQQLHQLQDWTPRQWQVIEGLLMELRHADEQRAHWRSLIAQEVLADPHLLSIVRLCGVREMVAFALGALIGDIRRFSEPRKLVKYIGLNPAFDDSGEGTWHGGIAGHGRKDLRCLLIESAQAILRCAKNPLAQWGKKLLRRKGSINLTAGAMARKLAVAVWYLMMGRWTPLIDIDAPLALKVGKMITSVGAKGLKQLGKTRKALREEVHLSLKTGRIYQLDPNKKFIPAT

SEQ ID NO: 54988 - protein, 351 aa, unidentified
MSRKTDTVVAGTIGIDTGKNTLHLIGLDDKGAIVLREKLTRGRIAARLANVPQCLIGIEAGMATHCVARELIALGHDVKQVPPVYARPFRQGHKNDFRDAHAIAEAVQRPSTRCVPVKTDDQLDLQALHRVRSRLISERTAVINQIRGFLLEHGIPVRQGLRFLRQQLPDVLAKRTDVLSSRIIRIIEDLSGDWRRLDERIEHVTEEIEELARGTEGCRQLMTVPGIGPIIASAMVAAIGSGTAFARGRDFAAWLGLVPKQMSTGDRTILGRISKRGNRYLRTLFMQGARVILLRPANWAKHSFGPWLTAAAKRLHHNVLATALANKLARIAWTVLAQRRNYESRVIVDAA

SEQ ID NO: 54989 - protein, 308 aa, unidentified
MTCIGIGVDVSKDTLDIHAHQHKAELRTANNRVGWRQAIAWMSSFEPSQIVLEATGGYEQGALDAFYTAGLPVVRVNPRQARDFAKGTGQLAKTDRLDARMLAYMASVIKLHRYQPRSKQAQELHTYHQRRQQLVQMISAEKQRRRLMSNPVLRAGLERHITQMEADRAELDKVIASLLEGTLQAQVASTIKGMGPVAVSTLICEMGELGHLNRKAIARLYGMAPLARDSGQHKGKRTTWAGRSAPRSAMYMACLSAVRYDPILKPFYQRLVANGKPKKVAMVAAARKLTTMLNARMREALQAVAHPA

SEQ ID NO: 54990 - protein, 415 aa, unidentified
MQDVASTVYAGVDTHKDKHVLCLLDGLGRRTFVGEFPADADGYDALARAIGDPGTCPVVGVEGTASFGAGLTDRLQSLGFNVLEVLRPKRDGRRRGADKSDAVDAELAARHAAAGDGTSVPKSRDGWVEAVRPLVRARDIAVRITTETSNAAKSLVNTAPERIRAKYSGMGTKDMMRALSRKRAESGDPVADALMLSLRAIARTWREQDLRAAELETQIVELVRRNAPALLEVEGCGPLSVAELAIAAGDNPDRMDSEAAFASLCGACPIEASSGKTVRHRLNRGGNRRANHALHVIVLNRMKYDGKTKAYVERRTRDGKSKREVMRCLKRYVAREVYRALLHPSDARHQSGDVLKAGRTAAGLTQREVGAMLNVESVRISEIERDVRKHFETRDRYAHLLKELAKDPESSLDTQ

SEQ ID NO: 54991 - protein, 327 aa, unidentified
MIEHYIGVDLHQAFFQACAVTTTGARLWEERFPRSGAGIAALLARCDRRTALAVEASTPTWHFADALGDHVGDLRIVDPLKTKLKAGYAAKTDRLDARRLADALRRDSVVGIYYPPVAIRELRELCRYRHALVQVRTAVINRLRAVLLRQGVVDRRRLARTRSDAWLELLALPPRAAASVAGLRALLATVRAQVADAERDVLAAAAQDPIALALQTIPGVGPVLALLIRAEVGDLGRFPTPGHLASYAGLVPSVDNSARRVRYGRITRRGSPWLRWALVEAAIHGTRRTDRIGRWGRGLAVRKGAMKARVALARALCADVFRQWPIG

SEQ ID NO: 54992 - protein, 318 aa, unidentified
MTTVRSRFVIGIDVSKGWIDAHSLPDGQTWRVKNDPDALAKWVEKELPDGISLAVMEATGGIQTRVAAALAGAEIPVAVVNPKQVKDFARALGQRAKTDKLDARMIAEFGLRMEPSPRKAPDEAQALLTELVTRRRQLIATRAAERNRLTTVNAKSVRRNIETLISSLTKLVDKIEREINEQIQNNPTWTTNEKLLTSVPGIGVTTARILIGQLPELGTLSRRQVAALAGVAPFACDSGKSQGKRFVCGGRGRVRSGLHMAALSASKHNPVLKLFYNHLLAKGKSKKVALTAVLRRLLTMANAIIRDQKPWRQAQTRP

SEQ ID NO: 54993 - protein, 379 aa, unidentified
MKIITQNEKNLYVGIDVHKDTYSLCCFDFQRNELSDEITIRATTKGVIKYLEAIRKKHREEVLFACGYEAGPTGYGLCRGLQKAGYGCVVMAPTTMSNPDGKRRIKTDRIDARAISRILAYKSYSQVHLPSEEIKALKEYTRARYAKKRMLKKAKQELLSFLLRNGKTYPESGNYWTEKFFNWIKTVQFSKKWMQEAFNEYLAEVYSLKAKIERMDMKIREIAGLEIIKDKVDKLVCFSGIDVSTAVETVVEINDFTRFATAAQFVSYLGLCPGQDSSGKRKTMLPLTKAGNCRVRTLLCESAKAIKRTNPYGQKSGRILERQKNASPEIVAYADNATKRIRTKMKNLEECGKNYNVSSAAGARELACFVWGMMNGKIA

SEQ ID NO: 54994 - protein, 324 aa, unidentified
MIPDLQGGVRKMSDRYVGIDVSKSRLDVACSEGRSWSVANDAPGQVQLCEQLRTQGAKLVVLEATGGLERGIAAQLTAAGLELRVVNARQVRDFAKALGRLAKTDQLDAQVLVRFGQAMKLESRALVSEQVTAMQALVARRIQLIEMITMERNRLSTAHKGVKRSHLRIIRTLEQQLAETDKDLDQGLRESGIWQEKVELLETVPGIARVTSLSLLASLPELGTLNRRQISALAGLAPFNRDSGAWRGTRSIYGGRASARRALYMATLVGTKHNAVLRVFYQRLRAAGKPAKVALTACMRKMLTIINRMLKERRAWDPQLSSAA

SEQ ID NO: 54995 - protein, 349 aa, unidentified
MRKCSTVSFEGQVIFVGIDVHKESWVVNLRHCHRELDKFSMNPSPEMLAKYLKMNYPGAEYRSVYEAGFSGFWAHRRLCELGIENIVINPADVPTSGKERDRKNDAVDSRQLARKLENRTLEGIYIPPEDNLELRNLVRRETKLTGNITRVKNRIKGHLNFMGLKFGSWSGSSLKMMYADAAKRYDYALQSMLRELRFLREEKLHVIRDERRCLKRLKRDKVQKHLQSIPGVGFHTAVMLQAELWDLLRFEDKDSLSSYVGFAPRLVGSGEHEAVKSAGNRKKKQLHAILIQSAWRSVSYNLEIRARYGALLHKGASPQRAISIIGKKLLYALRAVWLQERDYMVSASE

SEQ ID NO: 54996 - protein, 412 aa, unidentified
MDVVYERCCGLDVHKRTVVACLLTPGPQGQPQKAVRTFGTMTGDVLALAEWLAAAGCSHVAMEGTGVYWQPIWNLLEDRFVLLLVNARHVKAVPGRKTDVKDAEWLADLLRYGLLAGSFVPDREQRELREVTRYRTALLRERAATANRLQKTLEAANLKLASVVTDITGKSSRAMLRALIAGETEPTRLPALAEGRLREKIPQLEQALVGRFGPHQRFLVAQQLDHLDFLDERIAQISAEVATRTQPLAAAVAQLDAIPGVGQRTAEVLVAEVGTNMERFPTADHLASWAGMCPGNRQSAGRQLSGKTRKGSPWLRAALAEAAQAAGRTKGSSLQAQYRRLAARRGKQRAMVAVGHTILRIAYHLLQDPASVYDERGAHDVTERTRQAIERDLVRRLQQLGNTVVLHPVGAT

SEQ ID NO: 54997 - protein, 428 aa, unidentified
MTHSEIKTTEFAAYIGIDWADQKHDICLREAGSNRIESLQIDHKPDSISNWVSGLRQRFQGRPIAIALEQKRGALLYSLMLYEFIILYPVNPHALASYREAFKTSGAKDDPVDADLLREMVYLHHDKLHPWTPDDPLTRELSLLVEYRRRLVDDKTRLTNRLQALLKQYFPQALDWAGELDTLRALEFLTRWPQLEAIQVATPEQVRDFYRQYYRLREKLPERLAEISAAQPLTRDKAVNNASITMVKGLLETLRGLIAAIEAFDQRIETCFEQHSDKDIFNSLPGAGAILAPRLLAAFGADRARYQSAKEIQCFSGIAPVTERSGKTKFVRRRLACPKFVRQSFHEFAKSSINWSVWARAYYDQQRRRGNKHNEAIRSLAYKWTRIIYRCWQDHKPYDESVYIAKLELRGSPLAKLIPTAAEQAEAS

SEQ ID NO: 54998 - protein, 402 aa, unidentified
MKYVGIDIGKMNHYASVIDGNNPATKPLKFNSVREGYDSFLAYLAKNDCIKTETIIGLEATGHYWLTLFEKLKHDGYTVYVLNPLQVDSHRNENIRGAKTDEIDCQLIAKVIQFGAGRSTNLPQEDLFALKQLCRFRIDLVKRTTQLKLKIITVLDQVFPEYQTIFKDIFCKTATELLKEYTTADMIAQEDLDKLTQVIRTVSKKQLSAEKAQELHAKAQNTFGIKYGLDAFSLKLRCLIAELEHLDREIALIEKEIEIAVTKQHTSLTSIPGVSITAAGTILGETVEYNKDNPDSRSFLAFAGLDPKIRDSGKYTGRMKMTKRGSPYLRYAINIAAFYAAFNEPMFVKVYKKQVGRGKPKGLALAYVAKKMAYVVAAILRTNEPFVPKGDEEQVIPVTLFA

SEQ ID NO: 54999 - protein, 418 aa, unidentified
MKVVYPICCGVDVHKTFLVATLITSQGITPHYSKKRFSTFNNSILEFKQWLIDNNCFDVCMESTGKYYVPVYNLLEDTIRITVANPKWVKAVKGNKDDTKDSKWIGDLFRLGLVPGSYIPDKSIRILREYTRYRSKLVSCKSSEKNRFQNAFTVCNVALDAVVSDMFGKSASSITDYLVSSDSFDPVHCSSLLQKSLKKKADTVTESIEGYQMTQEQKERIIMVRSHLEFVQQSIDKLDEKLDKMVAPYESAITLLRTIPGVERTSAITIISEIGTDMSQFANSKRLCCWAGLTPGNNESAGKKKSVRITRAGVYLKPALVQVAHAAVKSDKSPYYKIKYERLCKRRGKKRAIIAIARMILTAIYNMFVTGEEWNPSDLYKIDMPQAMLEKQKEKAIKQAVKLLISNNIIKAADITVA

SEQ ID NO: 55000 - protein, 367 aa, unidentified
MEKSSTVFVGMDVHKESIDITVAEPGGEVRRLGQIGGDRGSLLKMVRRQQSKGRKLVFVYEAGPCGFWIYREITALGHACMVVSPSLIPRRAGDHVKTDRRDSERLASLARAGELEAIHVPDIRDEAIRDLVRGRDDAVIAQRRVRQQLKALLLRNDIRYVGRTSWTGAHRRWLSELKLPEPAQRIVFEEYVDAITVATGRIERLTRAIETEVLTWRFAPVVSSLQAMRGIQFVHAVTLIAELGDLTRFHSARQLMGYLGLVPREDSSGEHRHQGSITKAGNSYARRALIEAAWAYRHPARVTRIIATRQAGIPKAVCDIAWRAQLRLSTKYRRLAARHLHHNKIVVALARELSGFVWAIGQSVKPQ

SEQ ID NO: 55001 - protein, 406 aa, unidentified
MISVGIDVSKGKSTICAIKPYGEVLMTPRDFKHTRDGLDSLIKQLSRFKEEIHIIMEATGNYHLPIYQYLKSKGYQIAVINPLEMKRYRCQGIRNPKTDKIDSMIIAQYGIDYWYRFKPNDDTEEKRQELRLLGIQYTQFMKTRVIRCQALCEILDRTMPGVYGFLDDFNRNNGQDKLCDFAEKYWHSDNITKYSEKAFIERYNSWLKKKGYRPNEKEARQLYSIAKNAIPTLDSKLPSTKLLVQEAVNVLREVDSSLYDILNQLKALSKDMPEYETVLSMKGIGETLAPRFIAEIGDPRRFHSAKALIAYAGIDAPPYQSGQFIGTKRHISKRGSSNLRKLGYELMDSVNKHKSSYIGDPICEYFMKKRNEGKPYRVAMVAAFNKFLRIYHSRVCEVLNEYDKTK

SEQ ID NO: 55002 - protein, 406 aa, unidentified
MSMSERVCGVDVHRDSLVATIMGDSLKEAGRFINDADGINGVKEWLKQYGCNRVVMESSGIYWVSLYLALEDAGFDVLLANAWRVKGIPGRKTDQSDSEWLAHLLGSGLVKPSYVPEKRVRELRELTRLRVKLVGTRTAFKNRCHKVLNRVNIRLGSRLSDLFGKAGKEILEGLMEGKTVDAILEHTENRWLRNRADEISAVVKGVLSQSDIFVLKQCVDMVNEVGEKILRVDAQIETLVNERDVDIVSSVPGVGRRSAAAITAEIGDAKRFLDGKKIASAAGLAPSVYQSAGKSLTGGITKQGSKWLRRSMVEVAHAAVKKRDSKLREFYLRVKARKGEKTAIVAVARKMLTIIHHLLVNGERYVEEGFEKRLRVNRTVRVGDVALQDMVAVLRGAGYVVRGPFG

SEQ ID NO: 55003 - protein, 347 aa, unidentified
MLHAGLDLSRSRLDVCVLDEGGERVAVTQCPPDADGLRTLVRSIGQAAGPVLAAIESMNGARFIHDTLELEGWEVAIADAQKVKGLAPLACKTDKIDAWVLAELSRRDLVPEIWLPTPGVRAERERARYRLHLVRHRVMLKNRIHATLLAFGKPCTTSDLFGLAGRDLLGRLEVPEPWHSNLISALTLIDTLDEEIAAKERELKAMGATHPYVELLQSVPGVAWVLGYTIASEIGDISRFASPKKLQGYTGLCPRVYQSGGKDLRGPLAKNGPKYLRWALIEAATHAASHPHFKDHYERTKQRLGRQRGSKVARVEVARELAKAIWHMCQTGSYFAPKRSHVAALVA

SEQ ID NO: 55004 - protein, 402 aa, unidentified
MAYDFVIGVDVGKYFHHACVLDPQGRQVLSKRINQHEGSLRKLFGQFLADNASVLVIVDQPNNIGRLTVTVAQDMGADVRYLPGLAMRQLSRIHVGNSKTDVRDAYVIAHAGLNLPDSLRSVDRVEEVFIQLKVLNGIDEDLARAYTRLINQMRSALVGTYPAFEHVLRGQMIHRKWILHLLAKYGGPTKIRRIGRTRLAAFARSHKARNPEPVIDAMLAAIHAQTVSIAGAEYAELGVAMSAKDALAKLENRKEIEAQVLKLIKDIPQTEILLSMPGIGPRSAAQILMTVGDMSDFPDAAHLASYAGLSPRTNQSGTSIMSNSPNRAGNKKLKNALWQSSFASIRFHERSRQFYERKRKEGKRHNAAVVALARRRLNVLFAMMRSGELYRDISTVQEVTAA

SEQ ID NO: 55005 - protein, 370 aa, unidentified
MSVRRILAKTIDTDLEYEAIGIDLAKNCVSAALLTTDGEVVCIDRLDYSELEKSAQALSSTTFAMEPCTEMNYLVQKLEAWGHRCLVIGGKNVQNYVENHYSGQKTDLNDAQALAFLAQDKQLRTIKAKDIEQQKYASLTTLREQYIKQYRQTIVSLKGICQAWGLNISKGISGKAQLKDLIENHAAFPEELRESLVDMVTHAQTTQKVLNKITKTLEVLAKNDKVCQLIQTIPGLGTICSCRLRATIGDIKRFKNPKDFPAYYGLVPRSIATGHNEKKGKITHRGDRTMRSLMVQAAGSLVNMATKGKLKSKQLTKWILKKQKEKMPWGKLVCAVAAKLLRIVRAILISSKPYNPKIAGVAKCSLPKGS

SEQ ID NO: 55006 - protein, 412 aa, unidentified
MDTIVAYIGLDWGDERHSVHLQTAEGAIEHFELEQKPAVLHEWVAQLQRRFGRGNIAVALEQRKGAVIHALLMYDCFILYPINPKALARYREAFRTSGAKDDPLDSALLLDLVVRHRDQLRAWVPDTVESRTLQALCEQRRKLVNQRVALTNRLTSLLKQYFPQALEWVGDVASVQACDFLTQWPTLAAVQRARPKTIQQFYRAHNCRKADVIEARLAAIASARPLTTDAAVVEPLSLSVHAYATQLRTLIAAIQTFDERIAAGFAAHADHDLFTSFPGAGDVCAPRLAAAFGTDRSRWDSAAELQAHSGIAPVTERSGKSLWVHHRLACPKFVKQTFHEFADQSIRFSRWARAYYDQQRARGNDHHAALRALAYKWIRILFRCWKERRPYDEDTYIDALRRRGSPLAKHFA

SEQ ID NO: 55007 - protein, 427 aa, unidentified
MDATESNRVAEFRQFKKRIRGSTEDLVVGLDIGKRKHHAFFGNGNGKTILKGLIVENSAEGFHHLLSQVDFYMQRDGFKSVAFGLEPTSVYHKPLAEHLIEQGHLVIYATNEAIKKNRSLIDGRWDKHDTKDSANVADLVAQGKCHYYDLPELRLRDLRSLLLLRKRLKKQEHSCRVRIRNNLVAQYFPELDGFWNHAAAENLAIVRGYLDPARIRQLSREEFIAKVATHNGGLRQQRRLREIWEAAGGSIGCRPGPAMQLEAELLVDTLQSIKQQLAHVEQAIQELATGFPEYGYLLSIPGFGPYVSAMTLAAIGNPHRFESRAQLIRLAGFDLCAHRSGEKSHTAVPVISKKGKADLRYALYQAALVASSLTRHFRSHYNRLLQGRQREKGIRTKMLVKIAAKMLVIAWTLMKRKEPFNPAYIQA

SEQ ID NO: 55008 - protein, 323 aa, unidentified
MAKRITICAGIDTGKRKLDVALDGSSEQMQVENTPEGYMGLVEWLRRQKVKRVGIEASGGYEQAVVAELRRKRFVVVVFQPAQVRAYAVFHLQRAKNDRIDAALIAACTAATKKIHPAPDPRLLPFAAHLTMIEQIGEDIAKLKNRIESCRHERIQKLWKEQIALLAKCRRAEFKALVAAIRKHRDLAARLDLIYSVGGSGMPTAVSILVRMPEIGQITREQAAALAGLAPYDDDSGDHVGVRHIEGGRERLRRALYTAALPASFRWNPQLMALYNRLIAAGKGHKRALIACARKLLVIINAVVARGTPWLAEPPKIASAPVT

SEQ ID NO: 55009 - protein, 412 aa, unidentified
MTEESFTWFVGVDWGSEKHHACILDTRGTVVGERQFPHSGVGLAELGDWLLSIAGTTATVAVAIEVPHGPVVDSLIDRGFVVHAINPKQLDRLRDRFSVAGAKDDRRDAYVLGDGIRTDRRLFRRLHVADPRIVELRAWSRLTEELQEERVRLGNRVQQQLWRYYPQMQKITNDLAAPWFLELWAMAPTPGKARQLRKSTVEQILKKHRIRRIDADTVLRMLREPAIKVAEGVAEAARIHLRSLIARLHVVNRELRQAEQKLDQLCAGIGETEGAPGECLQGQDIKILKSVPGIGRINLATLVCEASGPLRSRDYPALRTLCGAAPVTKRSGKSQIVVMRYAAHARLRETVYHWARTATQHDAKSRCRYAALRQRGHSHGRALRGVADRLLGLTCVLLQRQTMFDPHFGQAG

SEQ ID NO: 55010 - protein, 538 aa, unidentified
MAVSQVVALRGPDGLALLPPAALLGLAFERRADLPGPRRGVAQKRRERHTVLKSGMPATVFTGHQEEGPFMTVVMIGIDPHKASHTAVAISAAEEPLGELRVRACAAQAERLLAWAAAWPQRTWAVEGAGGLGHLLAQQLLGAGERVLDVQPKLGARVRLLTAGDSNKNDPNDARSVAIAALRSAGVREVRRDDHAAVLKIWSKRYRDLGRTRTQVACRLHAVLCELIPGGVSKAITAPAAARLLESIAPAGAVEAARCELAAAFAGDLRGIDARIRQTRAKLAAAIQATGTSLTGLFGVGPVIAAAVIGDVRDVSRFPGRDHFAACNGTAPIEVSSGPRKICRLSRRGNRRLGHAIHMAAVTQVRHSPSEGRAYYDKKLAEGKTPKEALRSLKRQVSNAIFACLQADARRAAARAGGPGGQQGNDSVASAAGSHPRHRLFGQATPGPGHHPTTAAVSPAPGPARGRGTAGHSPVDATLPPATPKVQAERPQRSEDERPGGTARRRPHSAARKAKNRPSSHSAPKAASHDAETTDGTP

SEQ ID NO: 55011 - protein, 344 aa, unidentified
MDHFAGLDVSVKETSVCIVDDTGKIVREVKVASEPEALLAVLSNPAYHFKRIGLEAGPLSQWLYSALAEAGLPVICVETRHMQAVLKAQINKTDRNDARGIAQMMRVGLYRPVHVKTLRSQKLRMLLTHRKLLQSKAIAIENDLRGTLRNFGLKVGMVGKVKFETRIKELVENLPDLAILVEPLLIVRRALREQVVILHRRLLAIVRDDEVCRRLMTTPGVGPVVALTYRATVDVPARFRKSKSVGAVFGLTCSKYQSGEIDRSGRISRCGDEMMRVMLYEAAQSMLRSKKWSWLKAWAMQIARRRGMKKAIVALARRLAVIMHRIWVDGTEFRWSREQAAAAA

SEQ ID NO: 55012 - protein, 351 aa, unidentified
MPRRSTVRAVTTIGIDMGKNTLHMVGLDSLGAIVLRERVSRGRITSRLANLPPCLIGIEAGMATHYVARELAALGHDVKQVPPAYAKPFRQGHKNDFRDAHAVAEAVQRPTTRFVPAKTNEQLDLQALHRVRSRLVSERTAVINQIRGFLLERGIIVRQGLRFLRHLLPDILAKRTDVLSPRMVRVVSDLVGDWRQLDERIETVTDEIETLAKSDDSCRRVMTVPGIGPLISSAMVAAIGNGTAFAKGRDYSAWLGLVPRQMSTGDRTILGRLSKRGNGYLRMLFMQAARVILLRPANWPKHGFGAWLVRAAQRLHPNVLAAALANKLARIAWTVLAQERSYEARVTRAAA

SEQ ID NO: 55013 - protein, 345 aa, unidentified
MTNIKRVGVDIAKTVFHIHAVDGRDKSVWEGKYNRKAWLQAIIKRVPNGALIGMEACASSHYWARELRGLGFVVKLIAPQFVKPYVKSNKNDRADAAAICEALGRPHMRFVAVKSILQQDIQAAHRIREELVCHRTAKANQIRGLVGEYGIVAPVGIGQLRRALPQWLEDGENGLTSDFRQLMFGMAEDLAALDERIEETTALMTRKVQSDPAAQRLMTIGGVGPIVASALLGALGDGRNFRKGPDFAASLGLSPRQHSTGGKPTLLGISKRGDSYLRKLLVHGARSVFRHAGTKEDKLSLWLMSLAKRKHANVAIVALANKIARIAWAVVHNEDTYNPSLAAGL

SEQ ID NO: 55014 - protein, 349 aa, unidentified
MTIIGGLDVHRAQITFDCIDTDTGEVSRGRIEPATRAAFGKWLRSSFQGRQDVKLAVEGCTGWRFMAEEMQLCGVEAHLAEPADTAALRGRKQRAKTDRSDARLLRELLVDGRLPESWIPPFHVLEVRALARMYLSLSAERQAWQQRIHAQVYHQGVPAIPALLTATGQAGLAQAELSAAGRRVIDIAWAMLEAVAQQMGPLKAQLEGLGRRLPGPRSLDALYGIGPLTAVVIWAEMGDCQRFRRSDQVVRLAGLDVTVWSSDSRRSAGHLSKQGAPALRWALYEAALTAARASSPDHDYYKAVHGRLQGRWAVLSVARKLVRRCYHTLREMGDAALAESTDSAFTPAA

SEQ ID NO: 55015 - protein, 343 aa, unidentified
MDHFAGLDVSVKEASLCIVDDTGRIVREVKVASEPEALLQVLKNPAYDFKRIGLEAGPLSQWLFGALGEAGLPVICVETRHMRAVLKAQINKTDRNDARGMAQMMRAGLYRPVHVKTIRSQKLRMLLTHRKLLQSKAIAIDNDLRATLRNFGLKVGTVGRAKFEARIKELVEDLPDLVVLVEPLLIVRRVLREQVGILHRRLLAIVRDDDVCRRLMTVPGVGPVVALTYRATVDVPARFRSSKAVGAVFGLTPAKHQSGEVDRTGAISRCGDEMMRMMLYEAAQIVLVRSTKWSWVKAWAMKIARHRGMKKAIVALARRLAVIMHRIWVDGTEFRWTRDVAAA

SEQ ID NO: 55016 - protein, 415 aa, unidentified
MSKGFIFSAFADDTRFFLPSGTKLTPIAEFRKYLQRQFTGFQRDVRSLVAWLQSLGVELVIMESTGIYWKSVYAALEAAGIPAHVVNARHVKNVPGRKTDIADSEWLAQLGRFGLVRPSFIPPKDLRELRLVSRYRQKLSQMQASEKNRLHKILDDAGIKLGAVVADIDGVSARAMVEGLIAGHPIEQLADLAKGVMRHKREVLELSLEGELTARHRFVLEHIQTHNRYLEAELATLDAYLIEAMAPYREYWQLLQTIPGIDEIAAAMILIEIGDDLSAFANAKHLASWAALCPGNHESAGKRKTGKTRKGNHAIRYLLCEAANAARRTKSALHEKYQSLVARRGHKKAIIAVAHQIIRTIYVLFTRRQAYRDSGFDYQAALVKKNAPRWIKALKKFGYWPTSDSTTHPVLVPAR

SEQ ID NO: 55017 - protein, 366 aa, unidentified
MTNNNITWVGMDTDADKAEVAVYRGWESEPAATFSVGMDRKGVKKLIERLKQESGEVRCVYEAGPCGYPLARTLHEAGIRCDVIAPSLTPRKPGDRVKTNRRDARNLARLYRAGELTVIDIPKESEEAVRDLTRAREDVREDLTRRQHRLSRFLLRHGYRYRQGHAWTQKHWAWIREIRFDDANLQTVFDESIRAVEQSQEQLKTYDARIEELAQQPPYAAKVGRYQVLRGVRTVTAMTIVAEGADLRRYATAPQFMGSTGLVPSEHSTGDRERRGRITKTGNAHLRRVLVEAAWHYRHHRISGAQIKKRRKGQPAALVTIAERADQRLYRKFHKLVDRYNKKPVIAAVAVARELAGFIWAIGQLE

SEQ ID NO: 55018 - protein, 345 aa, unidentified
MDHFAGLDVSVKETSICIVDDAGKIVREVKVASEPEALLAVLKNLAYHFKRIGLEAGPLSQWLFSALAEAGLPVICVETRHMQAVLKAQINKTDRNDARGIAQMMRAGLYRPVHVKTIRSQKLRMLLTHRKLLQSKAIAIENDLRGTLRNFGLKVGMVGKVKFEARIRELVENLPDLAVLVEPMLIVRRVVREQIVILHRRLLAIVRDDEVCRRLMTTPGVGPVVALTYRATVDVPARFRKSKAVGAVFGLTCAKYQSGEVDRNGRISRCGDEMMRVMLYEAAQSMLRSKKWSWLKAWAMQIARRRGMKKAIVALARRLAVIMHRIWVDGTEFRWTREQATAAAA

SEQ ID NO: 55019 - protein, 402 aa, unidentified
MRVGIDAHKMKCTTVMFDGDSVTGSFDFQTTRQGVYEFMEKVPEGSIAVIESSTTGKVLSRMLSGKYEVHMVAPPERKVSIKTDRRDAERIVMEDMLNYLRRCYIPSQYIENIRFVVTQQIQIGRRIARVKNQVHALLEMNMIQHELDDMADIFGVKGLKKLSKIQLPRQDMIALARYLEELKMYVSHHRQLDTEIARIAASDNDVQLLMTIPGINCFTAVAIKSRIGDDVSRFATKKHLCSYAGVVPKANNSGEYVSEHNHVKQGDIVLKYALTCAVRGAILANKNSSIKLFYQKISKKGVSPQKVQIAAARKVACIVWKVLSSKQPYTEQDDHMTKRKMKIMSSKAMRTIPTSVMPSKVSELVRNLADDIDILGRYHEDSGYIIGKDLSNKNRLKEDILR

SEQ ID NO: 55020 - protein, 400 aa, unidentified
MQMNAVGIDISKGKSTIAAISKTKDVIIAPQEFLHTDEGLHKIITTILALGKNTKVVMEATGHYHEPVAQALHKMRVCVSIVNPLLVFAYGDNSVRRVKTDKKDALKIARYCLDNWEELREYIPQEAIRQQLKLFSRQYNLCIKTVHTLENKLISLLDKTFPSAPGFFTSQKKKNGHQKWVDFVSTFWHADIVATTTASEFHKAYQNWCEQNHYRFSPHKAQEIYQKSQGLTTTLVRSVDTKLLITSAVMQVIALATTLAQIKAQLIYLSSLLPEYEYVRAFYGVGEVTAAQLIAEVGDVRRFHSGRALIAYAGIDPLPKQSGTYEKKSTKTSKRGSASLRKTLYQIVVTHLRHSPKGEAVYEFLNRKRTEGKPYFVYMTAAANKFLRIYYARIKGYLNG

SEQ ID NO: 55021 - protein, 410 aa, unidentified
MSRVVIGLDPHKRSATIEVLDSNEQQLTAGRFGTDSESYQRLLAAGRQFPRRIWAVEGCQGVGRHLAQRLVADGETVVDVPAKLSARARVFSTGQGRKTDATDAHSIAVVALRTRSLRQVRADDQTVALRLLADRRDELGAARTLTLNRLHRLLVELVPGGAKKALTARQARALLTDVPAGDVVRETCRQLAAELVDELEVIDTRIKTAKKQLAALVAETGSGLMRLNGIGPSGAARLLGDIGDVSRFPTKGHFASWNGTAPLDASSGEQTRHRLSRAGNRRINRALHIMAVVQLRHPGTDGRRYYDRRVAEGKTPMEAMRALKRRLSDVVYRQLVNDQRAQHATDGEQDTAAQRTGPEGHLGATTKSSAAGSNPNADASDKSLSEPVSPDATPTPDTSPDHATARSRRR

SEQ ID NO: 55022 - protein, 322 aa, unidentified
MQYIGIDVSKATFVVAYSSDKGGEIRTFNNTTAGIKQFIGTLPKDGSIHCVMEATGNYSALLLYMLNVAGITVSMENPLKVKNFARAMLSTVKTDKIDARLIALYGEKMNPQPFKVQGEAILRLRQKRTGIRQLTKQITAMSNLRGSLACLPVPDKGATHTVDETIKFLEKRRDRLQSELTDLVEVEFSRQLALLTTIKGIGITLATALILTTGGFTYFQNAKQVSRYLGICPTYEQSGTSVNIRGHINRNGDAYTRGLLYIAAWPASRFNAQCKETYTRLRQNGKPGKLAMIAVANKLVRQAFAVVAHDKEYIDGFVSNRP

SEQ ID NO: 55023 - protein, 412 aa, unidentified
MRKRTIEFDQVIERGCGLDVHRDTVVATVMGKGIQTETRTFGTTTSSLKELGEWLESLQVTDGAMESTGIYWKPVLHVLREYPLNLLVVNARHIKNVPGRKTDKVDSQWICKLLISGLLKGSFIPPENIQALRDLHRYKKKLVGIVASEKNRIIRVLEDANIKLSSVVSDTSGVTATKLINGLIEGRKDLEKLVSECYHRKLQCSPEQIVEAINGRLTPHLMFLLKSMQKHIQSVEEQIAEIDAEIEKHIKDFEKEIELLQTIPGVGKEGAIGIVAEIGVDMSVFPSEHHLASHSGMCPGNNESAGKKKSSRTRQGNKHLKATLTELAWGATRTKKSFYKAKYESLVVRRGKKRALIAIGHKILCASYHIIKNKEAFKELGYEYLAERKKKNRLEYLKRELKEHGYKIEKAV

SEQ ID NO: 55024 - protein, 422 aa, unidentified
MLEESLDDQQIIERVAALDIGKAELVCCVRLPGPGGSKRRLQEVITYSTMTPSLQVMAERLLDLGVTRVVMEATSDYWKPPFYLLEAHGLQTWLVNANDVKHLPGRPKTNRLDAVWLCKVAERQMIRPSFVPPPPIRRLRDLTRYRAALVSDCTGEKNRVEKLLEDAQIKLSVVASDIFGVSGRDMMAALIAGQRDPKVLAQLARSRMRVKIPQLEEAFVGRFGEHHRFLLAKMLQRVDAISADIAEVDARIDAEIAPFADTVARLDQIPGVGVTAARVIIAEVGLDMSRFPTSSHLTSWAKFAPGVKESAGRKKGRGSTGHGNRYLASALGEAAVGSARTDTFLGERYRRLARRRGSKKAMVAVGRSILVIVWQLLSDPNAHFHDLGPDFYANRLGADRTKRNHIRQLEALGYKVTLEPAA

SEQ ID NO: 55025 - protein, 349 aa, unidentified
MDNDTMTTIGCDLGDRSSHLCLLAPEGAVLRRAKIATTKKAFDKFFAGLEHSLIVLEVGTHSRWTSALLHELGHQCIIANPRHVRLIYAGTHKNDRLDAEALARLGRMDPTLLRPIKHRSGEAQAELSTLRARDALVRNRTRLIATVRGISKSAGFRLVACDADYFTRKVTLPPTLRPALGAMLQSIEELTAHIKDYDKQIAQLCAQHPETLLFQSVPGVGPITALAYALTLERPERFSTSRQAAAFVGLVPKQRQSGRHDPQLGITKAGDRFVRRLLVQCAHCILGVRGRDSDLRRFGLRLAAQGGKRAKKRAVVAVARKLAVLLHRLWVSGESYEPLRPVPERSHAA

SEQ ID NO: 55026 - protein, 503 aa, unidentified
MSLNDKETAVIVPPEDVVRNKLSGKARAKALARAQGRKRKKSKPRGRVGKSHRGGQAISTTPSLNQLEQVNRNAAGIDLAATVHYVAVPPGRDAEADVRCFETFTADLEAIADWLTSCGVDTVAMESTGVYWIPLYELLEQRGFEVLLINPADLKKFRRKTDVSDCQWLQTLHTFGLLRGSFRPEEKIVTLRSYLRHRDTLIKCATDEVRRMQKALDQMNVKLTQVISDITGMTGMAIIRSILAGERDPQRLAALRHVGCKNDVKTIALALEGNWREEQLFALRQALELYEVYLQKLKDVDGQIGVYLQTFEDRSEGQQLEPSRRKRALDPCLNSRDLVCKMTGVDLTEVDGIGGNAALQIVAEIGMDMSKWDTDKHFVSWLCLCPELHLSGGRRKSTKSHTQPSKNRAAAIFRICAQSLLNANCALGAFGRRMRAKKGGAHAVTAVARKLAIIVYHMLKDRRPYKDQGATYYEEKYRERMVANLRRRAKELGLELVPLPLSE

SEQ ID NO: 55027 - protein, 387 aa, unidentified
MPAITLHLGLDVHKDSITIAIAQAGLPREIRVFGTITNDLHALEKALTRIRKTHAGAPLEVAYEAGPCGFGIARRLQQLAVPCVVAAPSLIPKQPGSPFKTDQRDARSIARLLRAGELTGVYVPEPTDEAIRDLCRARTDAVDDLRRCRQRLKSFLLRHSYRYQGKANWSQPHMRYLRELVLPHPAMKAILEEYLQGIDAAHERVQRIEASMLTLLETWRLKPAVQALMAFRGFQLVAAMITVSELGDIHRFAHPRQLMTYLGLVSVEHSSGPRQRLGGISRCGNGHARWLLTECAEHYALPPKVSKELARRQEGQPPHVRALSWKAQNRLHLRFTRLLARRLQRNKAKVAVARELCGFVWALLRTQECYRQSTGGAASRSSTACAA

SEQ ID NO: 55028 - protein, 326 aa, unidentified
MSRIQEKKTITTATSPFIVIGVDVSKDQLDVYVSPAGNHQSFRNDAGGVAELVSFCRDYAADLVILEATGRYHRLAHETLHEAGIKAAVANPARSRSFARSVGRLAKTDRIDAQILAEYGERVRPPASTPPSKLRAKIAEITVARRQIVDEMTILKQQKSQAVDSIVVTQMDARIALCQRHCKDLEQLLAELIEEDDGIKRKHEILTSIPGIGLTTAATLISELNELGGANAKQIASLSGVAPMNRDSGSFRGKRRIGGGRKPVRDVMYMAAVVAIRWNKDMAAFYQRLKKAGKPFKVAITAVMRKLLILANTLLSENRLWSETQP

SEQ ID NO: 55029 - protein, 421 aa, unidentified
MTDDIEWYVGFDWASETHCACLMDRAGRVVGKREVAHAGADLAELCDWLIRKTGAEPGRIGVAIETPHGPVVETFLERGFAVFAINPKQLDRFRDRFTVAGAKDDSRDAQVLGDSLRTDSRAFRRLVIDDPVRIELREWSRIEDELKRERTRLANRVRDQLWRYYPQMLQLSEDLAEDWLLALWRRVPTPAKAAKASEATIQRILKAHRIRRIEAPEVVRILRQTPLTVAAGASEAASAHIRSLAERIGLINQQLKTAERKLEQLLTRLEQAAQDQAGQDQAGQMSEQRDVTILRSMPGIGRTNLATLLAEGSEPLGRRDYHVLRTLSGVAPVTRRSGKAWMVLRRLACNRRLRNALYHWARVATQHDPVSRQRYAALRGRGHSHGRALRSVGDRLLYVACTLLRRQVLFDPDHNSLEAAA

SEQ ID NO: 55030 - protein, 455 aa, unidentified
MSRKRTSKKSLPILNPDAAGIDIGATEIYVAVPADRDPEPVRNFGSFTADLDTLADWLLHCSINTVAMESTGVYWIPLFQILESRGLEVYLVNAKHVKNVPGRRTDVSDCQWLQFLHSVGLLRASFRPPQDICAIRSLLRHRDSLVEMATCHVQHIQKALDQMNLQLHHVIADITGTTGLAIVDAILDGQRDVEKLAQLRDPRIRADKETIAKSLVGDYRPEHLFTLQQSVTMYREYQKKIADCEGEMQRLMKDLPTQADPSKTLPTAKDSVRKCKVMKPARAVALREEAYRILGVDLTTIPGISVLHVQAILGEVGPDLSKFRSASAFSSWMGLCPDNDISGGKVLWRGTRKVRNRVAVTLRMAAQSLQHSQSALGDFYRRMRSKLGAPKAITAAAHKLARIVYHLLTTREAYDDSVFVKAEEKYRQRTEKRLRAQALSLGFNLVPAPALAASK

SEQ ID NO: 55031 - protein, 366 aa, unidentified
MKKHTAINQSLSADVSTCATISVDLAKKVFQVAGEDALGQVIFEDRVKSREAFQAFLQNLPTSVTVLVETGPGAQAWARLLQAQGNCVRILPAQLVANHRSGPKNDRNDALAILRAGRDCTICAVPVKSAAALAMQALHRARQGYVRRRTAVGNQIRGLLLEHGVAMAQGEMAISHLVPRILEDASQPLPDLLRELIAELQGEWHQQGERIKVLTGRLETAAKENETAKRLMTVRGVGPITATALLAKETAPERFANARQFAAYFGLVPSQNSSGEKVRLGKMSKHGDAYLRSLTIQGAHAVLKQIQPDSEQPDDQRLLRWMSRLGRKEAAVRLANRNLRILWVLLQNDQTYRRQPGNSLEAAMSH

SEQ ID NO: 55032 - protein, 350 aa, unidentified
MNKVTTLGIDLAKTVFQLHGVDLAGKVVWRREVRRAQLVKIVAQLEPCLIGIEACGGANYWARRFAEFGHQVKMMSPQFVKPYRKSDKNDRNDAEAICEAVTRPSMRFVAVKSVEQQDMLTMHRVREGLMKERVALINRIRGSLSEYGIVIAKDVSNLRRELPGILEDAENELTAAARQLFSELYEDLGAREQRIRQLEHSIRALGSQHDVVRRLQTVPGIGYLSATALYGTVGDAKHYKNGRQLAAWMGLVPRQSSSGGKQRLLGITKRGDKYLRKLLVHGARSITTRAERTPQPPDRWLNELRERRGKPRSYVAQANKTARIAWAIMAKGEVYRAPTAALAASAAVAA

SEQ ID NO: 55033 - protein, 347 aa, unidentified
MGIDPAFIMEVHDVKMLIKYYYMKYIGIDVSKATFVVAYSSEKSSKTCVFANTAVGIKKFMKTIDPSVHHCVMEATGNYSMLLVYLLSKAGYVVSMENPLKVKNFARTILSVIKTDEVDARLIAMYGERMQPAPYKIKDDALLKLKQKRTILRQLKKQLTANKNLLESFDVLPVKDRSCERALKRTIEFLEKQIKAMTTELEAFSNEKFKEQLDLLTSIKGVGVTIATALIVATGAFTYFNSAKQLTRYLGLSPTYQQSGTSVKFRGHINRNGDPYLRSNLYLAACSSLRCNKECMAFYNRMKAKGKPAKLAVVAVANKLVRQAFAVVTNNTPYEDGFISKNNKSSC

SEQ ID NO: 55034 - protein, 346 aa, unidentified
MEIHVIGIDLGKTVFHLVGLNQGGEVVVRKKFSRAQLLRFTSNLHVHLIGMEACGGAHFLGRALRAQGHEVRLMPAQYVKPYVKTNKNDFIDAEAIAEAVERPKMRFVPIKSDEQLDMQSLHRVRERWIVRRTAVVNQIRSLLLERGVTVRKGRKHLVAVLPGILEDPETDLSGPLRVLLAQLQWEMKHLENQIEEVDAVVVRTSGQDEACQRLLAIPGIGPLTATAIVSAIGNGAEFKKGRGFAAWLGLVPAQYSTGGKQKLLGISKGGNCYFRKLLVHGARAVLQTKDKQSSGLSTWLTQLTSRAHSNVAAVALANKLARMAWAVLAKGEAYRPPLLAAELVGQ

SEQ ID NO: 55035 - protein, 413 aa, unidentified
METYKVAGIDIHKNMLAVVVTDAGRVGEFRFERRKFGADAAHLQQLNQWLATQGVQEVVMESTAQYWKPVWQALEDDFHMELAQAHSNKAPKGRKRDFADAERLVRRFIAGELILSFVPDTEQRLWRTMTRAKQQLVRDRVRLKCQIDSFLAEGRIRLSSYVSDLLGVGPRRMLEAVAAGAANPMQIAALATEGLKATQEELAGALSAAATLNPIQRKMLSMFLERLDLIEKQIEELERNTAEALRVHQDAVKRLAEVPGLGAASALQIIAETGPVAKAFDSPEQLASWVGCCPGREESAEVSKNNRSPKGNRFMRTLLNQAAHAAVKTRGSAFEIRYRRLKGRIGHLKAIWAVAHSMCRVVWKILHDRVRYEERGEILNPKAAHQRKNRLIRHLRRLGYEVHLTPLTTAGIS

SEQ ID NO: 55036 - protein, 391 aa, unidentified
MLKYCVGIDVSKTELQCCISVIDQLQKVTVKASAKFTNTKTGFTRLHQWISTRHKNKEVPLVVVMEATGIYYEQIAMYLSGQHYTLSVVLPNKAKKYLQSTGLKSKNDKIDAQGLARMGAEQRLALWQPMDSYFYELRELTRQHQSLQELKTSVNNQLHASELGMYQNNLVINQLEALLITFDEQLHALAAAIDQHIADKEEVKHRVDNICKIKGVGTLTVAVLLAETNGFLLFENSRQLVSYAGYDVVENQSGNHRGKTKISKKGNSHIRRAMHMPAFCVVSCEQPPFVGLFNRTLQQHGQKMKSYVAVQKKLLVIIYALWKTNSAYELNYQPNKDQHTGEKEQVLSALPGLAQADPAAEQKNSASLPEQVALHKVNLLSNDRSLLPLCQ

SEQ ID NO: 55037 - protein, 337 aa, unidentified
MDYFAGLDISMDETHVCVLDREGVVIYESKTTSTAQSIANELVKAPSCRRIVFETGRMAPILFHGLSQLGFPVICVESRQAYQALRSLATHKTDRNDARGLAHLARTGFFKPVHVKSLSAHALRSLIIARKKLVGQRVTLENQIRGLAVVFGIRLPRALTRAFVNQALKASKGIAGLSAAMRGLIAARTAVMTAVAAIDADMRRMARASPACSRLMTIPGVGQLTALAFVAAIDDPSRIRRSRDVGAYLGLVPRRYQSGEVDYVGSISKCGDRRVRTLLYEAANVMLTRYKGQLKLKDWAFAIAKRSTMRKARVALARRLGIIMHAMLRDGTEFESA

SEQ ID NO: 55038 - protein, 338 aa, unidentified
MRVMALDVSKGKSYVVIYEEELCVAEWEIKHNQEGFNQLKSQLCKETTEVVFEATGVYSKQIESFFKTERISYCILNPLLAKKQTDGLRGNKTDKVDAHKLAQSHYRFDREKKNHQTSIYSEIHEVSILYDEVHANLIKQRVQLHAVLQQCFPEIETLYSSNLSKYALNIIERFPHPAYIKELSKTRIKNIILASTKKNISKEEALLKADQLIHLADVSYPAVDKDHFLVTKVQYRIKQIQQLFDTKERLSKKMIEQSKKLNEFSVLVSIPGIGPLTAALIISELGDIRRFSTSNQLNAYVGIDIRTHQSGTMRKKDRINKRGNARARKILFFTIRNH

SEQ ID NO: 55039 - protein, 424 aa, unidentified
MSWLTLDVLLLARLLLKLAVGPVLERKGDITMFYVGLDIAAEKHDCCIMTEERQVLKQFVFRNDAKGFEFLKKTLTKLAPTEEIKIGLENTGVYGSNLVQFLRRNGYKTYTFNPLLINKSIQATTLRKTKTDKADAKFLAQYLTWDNSQPDHDVSYHISELKSLSRLRFSLVQQRSKCKTQAKGVLAQVFPELTQVFSDVFGTTARTILSLCPSAQRIAAYPVPQLADLLRTTSRGQLGPEKAELLHALAVHSVGNSSIALELQLQIYLEQITQLSFHICRCEAALRTILAQMDSPITTIPGIGTVLGATILGEIGDIFRFSSPAKLLSFAGLEPSITCSGKSVSAPGRMVKHGSHYLRWAFGQAARCIILRDQTFAAYASKKRAEGKHFNVVCSHVAKKLVRLVFALLKNHSSFIPNYSSLAA

SEQ ID NO: 55040 - protein, 338 aa, unidentified
MGLNTEQIQPQLIQFALGFDVSKATITFFDTHSGEICTLENSKVALKAILKPYAGRLDTLAICEATGGYEDNLLDVLEDLAVPAHRADAARVKAFIRACGANAKTDAIDARHIAEYGLSRAQSLPRWRPSQPREAKIKLLVLRRTDLVSMRVQEENRLKAPRNKPIARDIAGHITEIKRRIEAIDKQIETIMSLDKRLKDRKAILQTVPGIGKVIAPVLLALMPELGHIDRKQAASLAGCAPHARDSGARKGRRFTKGGRRQLRPLLFTAAMAASHSKSHLATTYKRLLAAGEVKTHSSWRHHATHHRHRKCETQRIPHSPNTTDLMRKDVTFPRPIS

SEQ ID NO: 55041 - protein, 415 aa, unidentified
MKKHSKSAQRSEPSVKRAKARGPAQRDVKEVLAEVLGKLTGKLNAPAVSTSAKENHRANTVAPNRDRLTVGVDLGDRWSQYCILGLEGETLAEGQLRTTQEDVKEFFQALTAARVVVEVGTHSAWVQDVISEWGHEVLVANPRLMEGSKRRKRKSDRIDAHKLARLGRVDPQSLYPIRHRSREVRQDLVVLRARDALVSVRTELINTTRGLVKSMGTRLPRCSSPSFAEKVKDGIPDEVREALLPLVQLTETVNDGIARYDQKIEELGQKKYGHTTLLRQVKGVGPITSLAYVLTLEDPRRFSSSREVGPYLGLVPKQEDSGDSQPQLGISKAGDRMVRRLLVGSSQYMLGAFGPDTDLRRYGLRLCERGGKNAKKRAVVAVARKLAVLLHHLWVSGEVYQPLRLSKLRAMPAAA

SEQ ID NO: 55042 - protein, 457 aa, unidentified
MSKAKRSSRKRAISPVHPHAAAIDVGATTHVAAVGPDRDPEPVRSFGTFTADLHRLADWFERCGVRTVAMESTGVYWIPVYEVLEQRGFTVVLVNARDAKHVPGRKTDVSDAEWLRRLHEYGLLRASFHPEAGIAALRDYLRQRERLLDYAASHIQHMQKALTQMNLQLHHVVADITGASGLRIIRAIVGGERDPAVLAALRDHRCKASVETIRQALVGNYREEHVFALAQALERYDVYLAKVAACDARIAAVLDRLQAERPVPTAPLPAPRHQTRTPNAFAFPAREALHRILGVDLTRIHGLGPYLALKLVAECGTSLTAWPSAKHFTSWLCLAPSNKISGGKVLSTRTRRSNNRAAALLRLAAVAVGRTETALGAFYRRLSGRVGKAKAVTATARKIAVLFYNTVRHGMTYADPGASYYEERYRQRVLTNLRRRAKSLGYVLQVADPTAPVAEVS

SEQ ID NO: 55043 - protein, 364 aa, unidentified
MKIVGCDLHARQQSIAMVDTETGEFTEKRLMHEGNAVREFYTSLKGPVVVGIEATGAMQWFLELLEELGIECRVGHPAKIRAAETRKQKHDRRDAEVILDLLVMKDRFPDIWMPSTEQRDLRTLLRDRHQWVKMRTRLQHTLQAIALNHALREGRALWTAAGQRALQGLALPPYTDQRRDELLGLYIQLDKRILQLDKPVEREAQQRPHARRLLTHPGVGPVTALATEVFLGDPNRFATANQVASYIGMIPCEHSSGKRQRLGKLTKEGNSLLRYLWIEATLHAVVKDAELKRFYRRKLIQKGMGKARVAAGRKLGIRLWIMLRDEIDYEEFCRRGKLRQKGEAHAGMPDYNSGPARAVTGSTE

SEQ ID NO: 55044 - protein, 429 aa, unidentified
MIDIEETDEAVDLVERVCALDIGKAALTVCIRVPHDDKPGHRRQEVREHATTTRSLLDLAARLHAAGVTLVAMEATSDYWKPAFYLLEAEGFTCWLLNAKHVQNVPGRPKTDKLDAVWLAKVVERGMCRPSFVPPAPIRQLRDLTRYRRTLIRERTREKQRVEKLLEDAQIKLSSVASDIFGVSGRHMLQAMIAGQRDPKVLAQLARASMRAKLRQLEEALTGHFDDHHGFLCQMMLERIDDLSAKIQELTARIDQQVAPFAAQVAQLDAVTGIGGVCAQELIAELGVDMAVFPTAAHLVAWAKFAPQANTSAGKAKTAATGRGNPWLAATLGEIAVTAGRSNTFLGERYRRIAKRRGKQRALVAVGNSVLTIVWHLLADPEARYCDLGPDFYQSHSNRHRQEHNLIRQLQELTGKTVTLTPRPATPAA

SEQ ID NO: 55045 - protein, 415 aa, unidentified
MEVVHPRCAGIDVSKRDAKVCVRIQGTGGRRTSSTVTTWGAMTNQVLALRDHLAVQQVTVVVMEATGDYWRPFYYVLEADFQVMLVNARSVRNVPGRKTDVSDAQWLADLGAHGLVRASFVPPEPIRALRDLTRARTVITRERTREIQRLEKLLEDAGIKLSSVASEITGVSGRLMLQALIDSQGTADPGVLAEFAKGKMRPKIPILTEALNGRFTAHHAFMTRLYLDRVDAHTRDIQALSERIEALMEPFLPARDLLESIPGFSQILAEVFIAETGGDMTQFPTAGQLASWAGVSPGSNESAGRVKSSKTRPGNRYLKGALGVAALSVASSKNTYYSAKYRRLAATRGPMKALVAVEHAMLVTAWTLLSNREFYRDPGADYFTRHDPAKTRARAVKQLEALGYQVILQPQQRAG

SEQ ID NO: 55046 - protein, 410 aa, unidentified
MEVLYPRCAGLDVHKDTVVACLRTMVDGTARREVRTFKTTTKALLELSEWLASEGCTHIAMEATGVYWKPVWHILGDGEFELLLVNAAHVKNVPGRKTDVSDATWLADLLAHGLIRGSFVPDAQTQEMRGLLRTRKQLVRERTSHIQRLQKTLEDANIKLDSVIADIIGLSGRLMIEALIGGETDPDRLASLAHRRIKAPADVLREALRGRVTRHHRFLLRLHLQQIDALDVAIAGIDQEVDDNVEPFRIAIRLLTTIPGISDLSASIIIAEIGTDMSRFPTEGHLISWAGLCPGNDESAGKRRSTRMRKGAPWLKTALIQCAWAGVRKKGSYLQAQFYRLRARRGAKKAIGAVAASILTASYHMLANGTLYQDLGADHFDRRTKTAHTKRLVSRLQNLGYDVQITPQAA

SEQ ID NO: 55047 - protein, 409 aa, unidentified
MLKIVYPNCCGIDVHKTFVVAVIAITNNQGITEYHRKRFSTFTNGLTQLRDWLEYYSCFDVCMESTGKYWIPGFNILEEQTNVCLAHPKYVKAIRGKKTDKKDAQWIADLFKHDLVASSFIPQLKIRQLRDLFRYRMKLTQLQVGEKNRYQNYLTWSKLQIASVVSDVFGKSAQAIIKKILDNPQDKPSIEQLVHKRMKNKVQDLEIAMEGALPPEQAEKIRVIKAHYDALAICKEDLEQMIRELGQDYQHQVKLIQTVPGFKEDLSALRIISEIDCDMTVFDSAAKLCSWAGLVPANNESAGKKFSTRISKRGKYLKPFLVQVANAVVKSDKHPELRNKYLKLKKRRGHRKAIIAICRRLLVSVYQVLRKKEDYNPILQGLTQIRNPDKTMSVQDAVRFAQQHGFNVA

SEQ ID NO: 55048 - protein, 421 aa, unidentified
MMKVFSPQDFAVLIGIDWADKKHDICEYSHAKQQYQLSVISTKPESIDDWANDLKKRYPNQRIAVSCELKKGPLIYALSKYDHLTLFPINPITVAKYRKAFTNSGAKDDPTDAKIQTEILLQNMHKLRVLEPESSELRALAQLVENRRKLVQDRVRLTNRITATLKNYYPQVVEWFKEKHTTIFIDFIQKWPNLETVQRARENTLIAFFHAHHVRYNDTIEKRIKAIKTAHPLTNDPGVIDPNQLLVKGLIQQLKSLLEAIAEHDKEIKQRYNECTDQFIFDSFPGAGPVYAPRLLTSFGENRNRYENAGEMQRYAGIAPVLERSGKKSWTHWRYSCPKFMRQSFVEWAGESVRYSFWAKAYYEQEKEKGKPHQTIIRCLAFKWIRIIYRCWKNKKPYDESTYLNALKKRNSPLLEFAISR

SEQ ID NO: 55049 - protein, 314 aa, unidentified
MADLCSVGIDVSKAILDVAWSTNPTARWQTTNDDTGWTALVAHVRTGQPTLIVLEATGGYEIGAASALSTAGLPVAIVNPRQVRDFAKALGLLEKTDAIDAAVLASFGARIQPPPRPLPDDLQADLQALVTRRRQLVDMLTAERNRVALARGAVRKNVVAHIAWLEKQLGKTDRDLRTQIEASPMWRARDQLLQSVPGIGPATSARLLASLPELGTLSHRQISKLVGLAPLPDDSGRRHGYRRIQGGRADVRCDLYMATVTAITHNPTIRAAYRRWRAAGKLPKVALVAAMHKLLIHLNAMLRYQTPWHPPATA

SEQ ID NO: 55050 - protein, 352 aa, unidentified
MNQIKYIGMDVHMAMTVIAVLDSKGKLIAESIIETKGLAILDFIKSQRGVIHVTFEEGTQAAWLYDLIRPHVSRVIVCNPPKINQSENKGDKTDARRLAELLRLDSLKAVYHGEHSTQSLKELVYSYLAIVHDRTRIKNRLKALFRGRGISCPGDSVYSPKDRDYWRKQIDNEARRSRADRLWKQLDYLTALSEEAEKDLLKESRKHSAIKILRSIPGIGPLRSAIILGIAVTPHRFRTVKQFWNYCGMAVRTHATGEYEFVEGRVRRSRKQPLVRGLNRNYSRTLKEVFKGAALSVSAGPWKDQYEARVNEGIDPAIVRLALARKISSITLALWKKGERYDAKKLTFKHAA

SEQ ID NO: 55051 - protein, 340 aa, unidentified
MDNLDLLGLDIGKSTFHLIGHDAKGKEVLRKKFNRNRLLEFVARLKPCTIVMESCGGSHCLARKLMSFGHQVKLIAPQHVKPYVTGNKNDYIDAEAICEAASRPRARYVAIKTVEQQVLSTQHRLREALVGHRIQTINRIHGFLLEFGIALPATKAAMNQVHQILDDPAAELPQQLKSFIEHLLEEMKRLNDEIKAIDRSIKEQVEADDAGTRLMSIPGIGPIIASALLADVGDASNFHSSRDFAASLGLVPRQYSTGGQTVLLNISKRGDKYLRKLMIQGSRAVLVHIDKRTDALGTWCRDLLIRKHPNKVACALANKLARVVWAVLARGVSYNAQSMA

SEQ ID NO: 55052 - protein, 338 aa, unidentified
MFYVGVDLHKQSISLCVVELADRERKIIERRKFRCDEEEQMAEYFAKLGEYQLVVEATASYEWFVQLVEPTADRVLLAHPGHLRVIAQSKRKTDKLDAQTLAEFLALDQIPEAWRPTPRVRQHRTLVRHRNFVIGRSTSVKNKLRRILSHYNADLKNLFTQQGRKYLATIELSEADRFVTDLLCEELDQHSERLKTVDKQLKAFAKQASVAEQEARAVLASMPCVGPVTIDVVLAEAGDIRRFGSQRKATAYAGLAPGIRESAGKAKQLGITKQGSRLLRMILVETAWRLVNKTRRWGSLYEKLKVRCGAKKAIVAIARRVWCVMISILRSGQKYQPT

SEQ ID NO: 55053 - protein, 366 aa, unidentified
MRKNSTVVKNGSKIFKQPALTIGLDLGDRTSCYCVLDGLGNVIVERGVPTTPSGIRQAFGKMPRSRIALETGTHSPWVSRQLARMDHEVIVAHARNVRLIGESSRKDDQLDARTLARLARIDPGLLGPVRHRSAEAQIQLTVIRARAALVSTRTALVNAARGLTKSYGERLKKCGTEQMNRDSSEGLSPELRAALDPLLREIESLNERIKEYDQRIEQIAKEVHPEVARLKQVKGVGTLIALTYVLTLDDPRRFRHSRDVGCYLGLRPGRRNSGKSEPQLHISKEGDRYLRTLMVQGAHYILGPFGQDSDLRRWGLKLAERGGKNAKKRAVVAVARKLSVLLHKLWVSGEIYEPLRNNRKAVRAVA

SEQ ID NO: 55054 - protein, 392 aa, unidentified
MYRIIKIGMDVHSKNYTLCAMEPLIGEEDRIFANIQVTADYKNILMFIEQLKMKLGMSDEYDIQCGYEAGCLGYSLYNQLTAAGVKCVILAPTTMLTQQGKRVKTDARDALMIAQCLSYGGYHAVYIPTQEDDSVKEYLRMRDDHKEALKKIKQQINALCLRHGHHYEGTTWTIKHVTWLRKLELPSLYRETLDEYMASFDEQTAKIERFDQRIEELSSQEQYWEKVKKLCCFLGIKTHTALSLIVETGDFSRFAKGNTYAAFLGLAPGEHSSGEKTNRTGISKAGNRHLRQLLIEASRGICKGAVGHKSKELRARQNGNTAEVIAYADRGNTRLRSRYYKFIRHGKKKNVAVAATARELACFIWGMMTDNISYRMAEVHHSHLSVKGALPR

SEQ ID NO: 55055 - protein, 360 aa, unidentified
MRIIGCDLHARQQSVAMLDTQTGEVVNRTLMHEGDEVREFYSELPRPVLVGIEAIGPMQWFLDLLAQLGIECQVGDAAKIRAAEPRKQKHDRRDAELILKLLVEKRFPAIWMPSKELLDLRALLLHRHQWVRLRTQVQNALQAIALANGLRRGPGLWSYDGQAKIAFLPLPPHASLRRSSLQTQYRHMDEEIEKLTVQVAEQAEHRSGAQMLMTHPGVGPVTALATEVFLGDPQRFADGKALASYTGLIPQERSSGRRRRLGRISKQGNPLLRFLWNEAGAHAARRDPELRRFYRRKLVQKGMGKARVAVARKLGIRLWIMLRDQIDYQEFCRRGQKQSGAVCAGMPEVGNGANRHRPVE

SEQ ID NO: 55056 - protein, 370 aa, unidentified
MSPSRQVRANPDSFNVKGMAMTIVENPTITVTGGVDTHLEFHVAAAVDANGGVLGVETFDTTVGGFRRLVAWLAGFGEISLVGVEGTGSYGAGLARHLAGKGIDVVEVDRPNRQARHRAGKSDAVDAIAAARAALAGTATGIPKSRTGNIEAIRVLTIARRSAASEWIAIVTQIRHVVFCAPDEIRARFLSLSPITLVRTTAALKPRRSDPDIVRYTTLSTLRELGRRALFVREQKMRLNAEMRPLIREVAPSLLEIRGVGYDVAAKLLIAAGDNPHRIRSEAAWAHLCGVAPIPASSGKVQRHRLNRGGNRQANSALYRIVLTRMSNDERTKDYVARRTAEGKTMGEIARILKRYVAREVYPHLPATMT

SEQ ID NO: 55057 - protein, 422 aa, unidentified
MKSQAARVVGFDCGEEEHVAVLLDERGEPEQRLTVRNRRDRIEETLAKLMLRVGGEAELVVVVESKRAHGRLVAAEAGRLGCQVVQVNTVALNHFRELEGQPRKDDEWDAFLAARMCYLRLRGCRELVEVTEEERALSRLTRTYERLTQDRTRHVHQLRAVLLELAPEVLHSSWAGPKTDSRAMTSILQRWPGFEGLERAQLRSLEKILRQCRYGQRAHDVAVLVRDMARRISVDPEERAAITFELDSVLGQIAACNASLERLYAEIERRVKAHPLGPKLMEMHGVGPIIAGILLSELLPVARTATEAKSATYAGVTPLGRKSGKSLDTAHLAQGVNKRILHALYTSSVVAIKHSAIDRAYYTKKVQGYAGHPKPHVAAFIALSRQRHKVIFKLMTTDARYDKEALIASHLARLEEARKALA

SEQ ID NO: 55058 - protein, 403 aa, unidentified
MNAVGIDVSKGKSMVTILRPFGEIVSSPFEIKHTSSDIHSLIKLIHSIEGESRVVMEHTGRYYEALAHQLSAADLFVSAVNPKLVKDFNNDSLRKIKSDKADSVKIARYALDKWQSLEPYSITDELRAQLKVMNRQFHFYVKQKTAMKNNLIGLIDQTYPNANTYFNSPTRSDGSQKWVDFVSTYWHVDCIRKMSLNAFVEHYQNWCKRKKYAFNKSKAEEIYTKTKELVPVFPKNEITKHIIRQAIDQLNSTSVTVETIRTLMNETASKLPEYSIVMQFKGIGPSLGPQLMAEIGDVTRFTHKGALTAFAGVDPGVNESGSYAQKSVPTSKRGSSNLRKTLFQVMDVLIKTMPQDDPVYQFMDRKRTQGKPYYVYMTAGANKFLRIYYGRVKEYLSDLSDPN

SEQ ID NO: 55059 - protein, 311 aa, unidentified
MSESQVFVGIDVAQATLEVAVRPTGEAWQIANDEIAFGDLVERMCALKPSLIVLEATGGIHLPVVAALAAVKLPVVALNPRQVRDFAKATGKLAKTDRIDAQVLAHFAEAVRPEVRPLPDAATQQLAMLVARRRQLMEMRVAEQNRSRGAPARIRLQIRDHIAWLNRQLDELDRELGQRVRSSSVWRERDDLLRSTPGVGPVLSTTLLADLPELGTVSHKEIAALVGLAPLNQDSGKKRGKRVIRGGRASVRAALYMATLVATRRNPVIHAFYQRLLAMHKPKKLALTPCMHSAADHPQRHGPTTRSLVFA

SEQ ID NO: 55060 - protein, 356 aa, unidentified
MFANKVSRKTKKDNSSLTEIESYDHYIALDWSEKNMAIARMSKKDTEPRIIDVPSDIRELKFYLTNLKGKKILTIEETTTSQWLYVELYDYADRIFICDPYRNRLLTDGPKTDRIDAGKLCKLLKNGMMKEVYHSTSELYELRKLVSYYDDEVRAGVRLLNQKSALYRAENKSWKKKEELEASRVNKFIVARLDEKIESYREKKKKYEEEFEKISKKTKVLRSLKSIPGLGPISSVTILSIVIDGRRFKSSNHYLVYCGLVKHEKLSGGRSYGRRLPRYSRRLKGVYVSAAVRVASTENPMREYYKYLLNEKKLPVYNAKNALARYIAKISLGIIKSGEKYKPYKWREDKKGKEAA

SEQ ID NO: 55061 - protein, 314 aa, unidentified
MAMHATRPVIGIDTAKEELVIQHDDEKRHLAVDNNPAAIRQWLAGLPKGCDIAIEATSTYHMEITERAHAKGHHVYVVDGYRLKNYREGVGGRAKTDLTDAQLLARYLRKEKDELRRWMPPPKAYRTLQSLLRRRAALVKARTALRQSLSAEPLLKTALATLLKQIDRIDHLIQKRLREAAHAAGLRDQVQRCQAIDGIGELTATALVMAFLRGDFRNSDAFVAFLGLDVRVRDSGKLKGKRRLTKQGDTEVRRLLHCSAMSGARHPTWKAFYQRYRDRGLKTTQALVILARKLARVAFALMKHQENYCAPRLS

SEQ ID NO: 55062 - protein, 345 aa, unidentified
MEQIATIGLDLAKQVFQVHGAEADGSPVINRRLRRANVLTFFEKLSPCLVGLEACGGAHFWAREIAKLGHDVRLIPPSYVKPFVKRGKTDAADAEAICEAVVRKSMRFVPIKSADQQAAAMVLKTRELLVRQRTQAINALRAHLAELGIVAGTGTARASTLIAIVRNTQDTRLPSAARLALSELANQIEWTKRRIDELERTIVAEAKRDQDMRRLATIPGVGAIISASIKALVPDPKGFRSGRHFAAWLGLTPKPHSSGGRERLGRISKMGNTTLRSLLILGATSVLRHARHRTDASSWLGAILARRPFKVVATALANKMARIIWALLTKGGEYKSGDAIRAASA

SEQ ID NO: 55063 - protein, 319 aa, unidentified
MDNLSHGRVIGIDVSRDWLDLHCLPDGHRFRVPNAPVGHAAVADLARDRDAIVCFESTGGQEWQLWALLETEGVAARQVPPAQVKAFAQSRGTRAKTDRIDAELIARFFVFRPEAGRSLPAEKLRLLRALTSKRSQMVEIRKRLLAQIRAHQKLGTAAMFEDVDSELTQRIDSLIRELEDRIARAIASDDRLLETVGVLRSIPGIGPVASAMLIAEMPEIGTITGEEAAALTGLAPVAHDSGTLRGKRAIAGGRRALRHVMFQAALVAAHHNPSLRFFADRLRNAGKPHKVIITAVARKLVTIANALCKSRQKWIATTT

SEQ ID NO: 55064 - protein, 329 aa, unidentified
MVVAGIDVGAKSLMVAIDKDGKPTQPQSFANTPQGHQQLLKDLREAKVKRVVLEATGTYHLDLAIALDEAQELEVMVVNPRASKRYAEARMSRTKTDAVDAVLLCGFARHMPFKPWRCPPEHVLALRACSRLLASLGQQRTQVKNRLHAFMQSRSTPEFVLKEIRQGIEQVETQIRRLETQTLALIEMHPALATVYARLLSVKGIGTKSAIQLMGELLVLPDDMAAKQWVAMAGLDPREHRSGSSIEKKARITKAGNKYLRMALYMPALAATRHEPHVRAYYQHLIEERGLKKIQAVCAVMRKLLHAIHGMLRHDADFDGTRFYQRAGT

SEQ ID NO: 55065 - protein, 341 aa, unidentified
MQITTIGFDIAKNVFQIHGIDAAEKVVIRKQLRRGQVLKFFAALPPCLVGTEACATAHYWARELTKLGHEVRLMPAKDVKAYVKRNKNDAADAEATCEAVRRPTMRFVPVKSAEQQAQLMQHRARDLLIRQRTQVINALRAHLAELGITAAQGRDGIRDLLAIIADEADARLPIDARASLMVLAAQLQALQTLIGSIEKRIVARHRSSEASKRLQTIPGVGILGASAIATIVTEPKAFRSGRDFAAWVGLVPRQDSTGGKRKLGPISKQGDRYLRRILVVGAHAVLKRARLHPQKYPWLTQLLARRPFKVVAIALANKMARIAWAVLAKGGTYRVPRLAAA

SEQ ID NO: 55066 - protein, 388 aa, unidentified
MKARTVNNLPPAATHDDAVRCLLAIELSKKSWIVAVNTPLSDKISRYTLEACDWKGLLDLCERIRTRIAREMKKPVEIISCYEAGYDGFWLHRLLEAHGIRNYVIDPASLQVDRRARRAKTDRVDVERMLRSLLAYLRGEPKVWSIVRVPSVAEEYDRRLHRERDRLINERVQHVNRIKGLLAIHGIYDYQPLRGDRVQRLGQLHAADGQTLPPRLKAEILRELQRLELAIAMIKTIEAERDAIASAKTGHRSAKKVQDLAKIKSIGPEVATALVGEVFYRSFDNRKQLASYVGLTPAHFQSGAMSRDQGISKAGNAKARTVMIELAWLWLRHQPDSPLSVWFRERVGKLKGRIRRITIVAVARKLLIALWRYLENGMVPEGAILKVK

SEQ ID NO: 55067 - protein, 341 aa, unidentified
MNIKRIGIDLAKQVFQVHGVDHHEKSVLRKQLRRNQMLNYFAKLSPCLIGIEACSSSHYWARQLLKLGHTVKLIAPQFVKPYVKGNKNDANDAEAICEAAARPNMRFVAIKTIEQQDIQAVHRIRSGLVQQRTAKVNQIRGLLAEYGIVVERRVEKLRKALPLLLEDAENGLSIDFRALLQSLQQDLIALDDRVSEMDKKIQQLASSNATAKRLQQIPGIGPITATALVCSIGDAKQFKRGRDLAAWLGLTPRQHSSGGKGCLLGISKRGDAYIRTLLIHGARAVLKVADKKDDPRSRWIQSLCSRRNKNIAAVALANKNARIVWALLTKETDFLPEGKPA

SEQ ID NO: 55068 - protein, 343 aa, unidentified
MQTITTIGLDIAKSVFQVHGVDAAGQVVIRRQLKRRYVLAFFEKLSPCLVGIEACASSHHWSRELQALGHTVRLMPPAYVKPYVKRQKNDATDAEAISEAVTRANMRFVPTKRPEQQSCLMLHRTRHLFIRQQTAVINAIRAHLAEFGIVAPVGRKGVEELLHVVADPNDKRVPEVVRACLAALGNQLLSLKKQILESDRMIMVWHRSNEASKRLHYIPGVGPLLATALVASVADPGTFRSGRNFSAWIGLVPKQHSSGGKDRLGSISKQGDRYLRSLFVAGALSVIRYAKIHGTKHRPWLTALLARRPTKVAAIALANKLARMAWAMMARGERYRNPVALAA

SEQ ID NO: 55069 - protein, 338 aa, unidentified
MNMRNSISLGIEPKEIDMETHEIKFDQTVSVGCGIDVHKAIIVATISKGQNDYQTREFDAFTSSLTALRDWCKQEGVTHVAMESTGVYWKPVFNILEEDFEVILVNARHVKNVPGQKTDKKDSKWIAKLLLAGLLKGSFIPPEDIRELRDSVRYHGNQVQEISREKNRAIRILEDANIKLSMVLTDVHGSSGLKIIRDIYNGVTDPEKLIQHIHGNVKADKEMIKKALEGRVTKHHRVMLKFILDGIATREKQLAKLEQYIDTLAAKYAVQIELLQTIDGVGKDSAISIISEIGVDMDQFPNEQALSSWAGLCPGSNESAGKKKASEHLKEINTLNLD

SEQ ID NO: 55070 - protein, 416 aa, unidentified
MNTPDYTALVALDWGDQEHAFALQRGAQREAGTIPASAESLHGWLEQLGQSCGHRPVALALEAGKNAVLHALAAYPWLTIHPVHPATSERFREAFTPSGAKSDLPDAEVLLTILTQHRDQLRPLVLDTTETRALAALTEVRRNAVDHRTQLSNELRSTLKLYFPQALELCGDDLWTPLALDFLERWPELALLQRAKPATLQRFYTAHNSRRQEVIADRVALIGQARPLTTDRAVIAPAVLQVRLLVAVLRPLQQHLAGIEAEIATAFAAHPEVELFRNLPGAGPALAPRLLVAFGTDRTRYPDAASLQKYAGVAPVTERSGRQLWIHWRWNAPKFLRQTFVEWAGQTIPKCAWAKAYYLRQKGAGKRHQSILRSLAFKWIRILWRCWQDRIPYDEARYTAALHHRKSPLALSLHAA

SEQ ID NO: 55071 - protein, 350 aa, unidentified
MLIIGCDYHPGFQQIAYVDTETGELQERRLRHPEEAEKFYRDLWERKLRVRVGMEASGHARWFERLLAELSFELWIGDAAEIKAKRVRKQKTDRQDAQHILKLLLKDDFPKIWVPSWENRDLRQLLWHRHRMVQTRTRIMNQLQAVAINEGVRCKKRLWREAGRKQLESLPLAQWASRRRQDLLEVLDRINPTIAELTQAIEDEAEKCSEARRLMTHPGVGALTAVAFVLIIGEANRFGCGKQIASYLGLVPAEDSSGERRRLGHISKQGNSLLRFLLVEAAQATARSDGRWRNQFFHLAKRRGRKIAKVAMARRLAVRLYWMWRRGWNYEQLQSFGSHAGQPGNPHGVQ

SEQ ID NO: 55072 - protein, 348 aa, unidentified
MRFYTNSHPYYCGIDLHARMLYVCILDDKGETVTHKKINAGPDELMKLVKPYIGNIVIGVECMHCWYWVADWCDVQGIDFVLGHALYMKAIHGGKTKNDKIDSFKIAKLLRGGNFPLAYQYPQDMRATRDLLRRRTRLVRYAGELKAHVKNTASQYNLPDLNRLNLRYENNREQVRELFPDQMVQTSVDLDLDLVSFFDKELRKIEWKLKKHAQKFNSKEFSLLKTVPGIGDILSLTIVYEIGDISRFDSVQKFASYCRLVKCKAESAGKVYGTQGNKIGNAHLKWAFSEAAVLFLRGNDDAKRYLQKLQRRMPKSKALSVLAHKLGRAAYYMLKTGSVFDEARLLKG

SEQ ID NO: 55073 - protein, 393 aa, unidentified
MYLVGIDIGKLKHSFCLLEKETGEILVEPVFFKNNRDGFNALLSSFKHLPQKDILIGMEDTGHYNLALLKFLLDRNYQVALINPVATNLTRKMQGGISKNDKLDTLTICDVLASNQRVKSYRISKYSSFDLYEQKLLTREHHNLKEEENQLLNRLQKCIDVVFPEFNSLFKSKYGIVYMNILKEFGSADAIAHADIRTLRKCFDTGRGKHISLTAQELKEAARNSIGFPSASEATQIKHLVARIELIKEQIAEIDKKIEEFSIQNNSPILSIPGISHFSGTSILAELGDIHNYSKPSQIIKFAGVAPLTYESSQFTAQHTAITKKGCKYLRKTLYQIITPVIQYNPVFRKFYLLKIAQGKGHRCAQGHCVRKLMRVIYHLLSTGTQFDPALLR

SEQ ID NO: 55074 - protein, 344 aa, unidentified
MDHFAGLDVSVKETSICIVDDTGKIVREVKVASEPEDLLQILSNPTYHFKRIGLEAGPLSQWLFSALAEAGLPVICVETRHMRAVLKAQINKTDRNDARGMAQMMRAGLYRPVHVKTLRSQKLRMLLTHRKLLQSKAIAIDNDLRGTLRNFGLKVGVVRTVKFEARIRELVANFPDIAAMVEPLLIVRRTVREQFCVLHRKLLAIVRDDEVCRRLMTTPGVGPVVSLTYRATVDVPARFHKSKSVGAVFGLTCAKYQSGEVDWSGRISRCGDEMMRVMLYEAAQAMMRSKKWSWLKAWAMQIARRRGKKKAIVALARRLAVIMHRIWVDGTEFRWTREQAAVAA

SEQ ID NO: 55075 - protein, 309 aa, unidentified
MDTTVVGIDVSKDRLDVHVHPDGTALSFSRDASGIEALIGKLAGLVLQSVAVEATGGFETVVVASLAAAGLPVVVVNPAYVRAYAKALGKRAKTDPIDAQVIAQFAAAAKPQVRPLPDAATQALADLVARRRQIIHMIVAEGQREERASPRARKSIARMLKTLRAELSVIDAEIDESVRGSSIWCEKEKLLDSVPGVGSVTVRSLLADLPELGSLDRRQIAALVGVAPFTRESGKWRGKSFIGGGRASVRAVLFMAAMTAMRWNPTLRAFHQRLRAAGKPKMVALIAVARKLLTILNAIIRDNKPWQTA

SEQ ID NO: 55076 - protein, 310 aa, unidentified
MICAGCDVSKTKLDIALYPGAAFLSVAYDEAGLKQLDAFLKKHRVARVGFEASGGYEWRLLAHLRRGPVPAARFQPGQIRHFAKSRLQWAKNDRLDAALIAAFTASIEELPPLPDARFDELNAEMTYLEQLEARIANLKTMAETTILARLKRLHEQDITRLEARRKARIALIARQAAEDATLAHRLDLLVSIKGIGLRTALSLAIRLPELGSIGRGEIAALIGVAPYDDDSGGRRGRRHIRAGRTRLRKSLFMSAFTASQHNPDLRGHYLRLRAAGKHHLLAIVAVTRKLAILANAVIARGTPWTPVHAR

SEQ ID NO: 55077 - protein, 344 aa, unidentified
MVTTIGIDPHKATHTAVAIDETEQVLGELTVPADRYQTPRLMEWASHLDGDGRVWAVEAAGGLGHLLSQQLITHGEQVVDVPAVLASRVRVLGSGRSDKNDPNDARSVAIAALRQPGLARVRREDQAQVLRMLAKRHLELTSLRTQAACRLHAVLMQLRPGGIPKRLSTNKARRALQGMRTLDPVGEQRRAIARTHLADIRRLDRDIKANKALIRQAVAATDTTVTDVYGVGPIVAAFLIGYTGDPTRFATADHYAAYNGTAPIEVSSGGKTRHRLSMRGNRTLNHAIHMAAVTQIRFNTPGRVYYDRKIAEGKTKKEALRALKRRISNAVYRQLATDQQRATR

SEQ ID NO: 55078 - protein, 420 aa, unidentified
MNKIKPKRPYAVNKKVLIATVDGGKEKNYGYFRYPDGTDVKSLPFENNGKGFHEFLERITSAARTHGLEGIIVGFESTGPYMEPLTQFLKSKRGIRLVQVNPMHTKRLKELSGNSPLKTDRKDPKVIADIIELGHALTVVIPEGPAAELRRLTQGRERTITSRTRLFNQLQCLLASVFPEFLQVMKDVTTASAQHLLMHHPTPQDIASLGETALATVLRKVSRGKLREDRARALFEASSASVGIKDGRDSMLLEIRLILETIVSYDRFIEDSEAEMVRQLEQIPYSRIILSLKGIGPVTAAGLIGEVGDFTKFGTISEVMKLAGLDLYEVSSGKHRGKLRISKRGRPLMRKLLYLAALSAVRKGGVMHAWYQRALNRGMQKTKALVAVSRKLLGLIFALVRNHSVYVENYVKPIPLQEAA

SEQ ID NO: 55079 - protein, 586 aa, unidentified
MLPESSHAPQGPATPRAERTVGVGIDVSRYGHYAAFLRDDLQTAADELAFAESAQGYEQLRARLELIARRFGGHGAVRFLVRIDVAGQYADNLIHFLRRLGQTLPIAVSCGDPQRNKNYRVAVFGSQKSDPIEARAAARFAVTERPAATTAVADELRVLRQSAGRLQAVVRQRTRLINQLHHLLALTFPELALLIKDIAAGWVLELVHRYPTAKQLAKASESDVGNIAYLPDKHISPLLAAARSSIASLDGPAAEELVRDQVRQLRDAGARQKRLEILLSDAYHRLPEDNHLATIPGIGDVTAAILTAFIVDIDRFNHPNKLVKYFGVMPIEASSGIDRDGRARGPKRYVMCRRGNDLVRRYLWMAALSAVRHNPAVRALYARVVRKHPQHKAIAIGHGMRKLIHIAFAVWKTGRPFNPNYYPWHAPAHVEPAEAAMDTALAPNEQAAGLNPVVPALPEVTAACPESLPHDSPVDERTALDFAHLKRQLPIAAVLDHLGLTPRLRGPGAQRRCACPIHRGDGRGRTFSVHLEQNVFQCFDAKCAAKGDVIDLWACVKKMPLRDAALDLVRTFHLEPSPRGTEKRNG

SEQ ID NO: 55080 - protein, 343 aa, unidentified
MKTVTTIGLDIAKSVFQVHGIDAAGKVVIRKQLKRGRVLPFFMKLPPCLVGIEACASSHHWARRLTALGHEVKLMPPAYVKPYVKRQKNDAADAEAICEAVQRPSMRFVPIKSPEQQAGLALHRTRHLLIRQLTATTNSIRAHLAELGIVAPVGRRGVDALIALVRSDEDGRIPALMRACLMTLSLQAQALKEQIRILDRRLLDWHRSSELSKRLDAIPGVGPALATALVASVADPKAFRCGRDFAAWIGLVPKQNSSGGRERLGNITKAGDRYIRSLFCAGALAVIRFVKIHGAKHRPWLTSLMDRRPIKVAAIALANKLARMAWALMAKGESYKEPVALAR

SEQ ID NO: 55081 - protein, 336 aa, unidentified
MTIIRIGLDTSKHVFQLHGVDETEQPVLRRQLQRSEIAKFFAKLAPTRIGLEACGASHHWARVLRGLGHEVMLIPPQYIKAYVKRGKNDAIDAEAICEAMSRPTMRFVPVKTAEQQAALTMLGVRDLLVKQRTMLINAVRGHAAEFGVTAVKGPQQVLELLRRLASGEGVPALAREMLAMLAGQIEAVNAKLKAIEARLMAWHRQDQTSQCLATIPGIGPIGGVSFALKVPDAKVFRSGRHFAAWVGITPREDSTAGKHRPGRISRAGDEDLRRLLVLGATAVIQQAKAGRAAPWLLELLARKPKKLAAVALANKMARIIWAMMVSGETYRRPTVA

SEQ ID NO: 55082 - protein, 328 aa, unidentified
MFYLGMDVAKAKLDCCLLLDEASGKRKTKAVSNTKSGIVDLLAWVAKQNVSPGVLHVVMEATGVYHEQAAMALADVGITVSIVNPAQVKDFGRGLAVRTKTDGVDSFVLARYGALLKPAAWTPPAPEARMLQALLSRREAISQDLQRERNRQEKADATDTPDRIRQSLSDSIEFLVKQLAELQRDIDQHIDRHPTLKDDMTLLQSIPAVGPQVGGNLLSVMHSHEFNSAEQLAAYLGLVPVERQSGSSVMGRARLSKAGPARIRAVLYMAAVVATRHNPHVKAVYDRLLARGKSKMSALGAAMRKLVHLCFGVLKTRKPYQHNYAKIA

SEQ ID NO: 55083 - protein, 596 aa, unidentified
MLPQHQSVPQSPRRIGVGIDTSRYGHYAVFLTDDLQPAADELAFAESALGYALLQQRLQDIGARYQTVVFVVRLDVAGPYADNLLHFLHRLATPHADSPDAAEPLALTISCGDPQRNKNYRAAFFGSHKSDPVEARAAARFAVAERPRSDKSLSRELRILRQVAGRLQAVVRQRTRLINQLHHLVALTFPELALLTKDVAVGWTLELLHRYPSAAALAQATPATLQAIPYLPDALVAPLLQQAQTSIASLTGATVDALLRDQVRQLRDSTARQKRLESLLVSAYRALPQTNHLDSIPGIGAVTAAVLTAFLVDIDRFATAGKLVAYFGVLPIEASSGVDRDGQPRSPRRFIMSRRGNDLVRRYLWMAALSAIRFNPAVRALYARVVAKHPQHKAIAVGHAMRKLLHLVFAICKSGRPFDRSHYPWQTPAHVATTDNDVSTDAPISDNDVSVESQAAGHKPDVLPAAKVVTAACADNVGEAAAVGESNAVDFAHVKRQLSLAQVLDQLGLLARLRGSGPQRRGPCPLHRGDGRGRTFSVNLEADVFQCFDKGCGQKGDLIDLWSALHGLSLREAALDLVRTFGLEPCARPATEKRNG

SEQ ID NO: 55084 - protein, 356 aa, unidentified
MDRNLKYVGIDGHSTSCVFHVVSAEGKTRLRATVPTESGAVRKLMMDIGPNCEVVFEEGEMSSWLYKQIKGLANRVVVCNPRELRSGRKSNKSDRIDAEKLARWLLRGDVTKPVYKEFDGAEKLFHLVRTYNTLVTDRTRAKNRIKSLLRSQAMPARGTKVFAATPREKMLAKMTASGARERAKTLFKQTEMLTVLIKEAERSMVAELNRHRAAKILQSIPGIGNIRSAHLIAAIRRPERFRRNRQLWTYGGLAVVRRGSSETDYVDGVARKRLNATQTRGLNRNFSHPVKAALKGAAVSASTDGDLVPYYEALIARGLKPELAKVTLARKIATLVLVLWKKGETFDVKKLNSKSV

SEQ ID NO: 55085 - protein, 393 aa, unidentified
MGPSKGNKACSVDQSPSPIYHIEHNLKLKACIYKVNTRSIKTVPLNDLLQIEKENAMTKTLYIGIDVSKSKLDTSTTINPKHILAFSTFENNPTSFKKLYNWVNEQKKKFRLVKMHFCIESTGIYSEEIAEYLQEQKNTIVSVVNPAQTKAFACSILLRTKNDKVDSKMLAFYCCINNPKEMVKPSEELIKLKKLARYESFLIDYCACLKTKLSSEKDLLIRGSIISLISCLNNQINDIERLIMEHINNFKDLKKSFDLLNSIKNIGAKTAYRILTEIIPEEELTVKAQIAHAGLAPSQKLSGTSIHGKPKISKIGNSRLRKYLYMPTVGAIVNNPLIREFYERLISKGKCEMLALTACMRKLLAIAIGVLRNKQPFDLNWAMKKQLEYANVA

SEQ ID NO: 55086 - protein, 342 aa, unidentified
MKFYCGIDLSARDCQVCVIDEQLKVLVQQKLGNELPKICRLLEPYKANLKIVVESTFNWYWLIDGLQAEGFEVVLAHTLGLYLITGAKVKTDRRDAYSLAKLLLVGAVPTAYIYPVETRPVRDLLRRRMHLVQVRAGEYGSLRRLLLRQGILSSKQQEIKTATEAELEQWFEHPLVRLHASQELRRIELYSQQIAELEKTILALAQTAPSYDRLLKLPGVGQTIALTILYEVGELTRFANPKVFSSYCRVVPGIAQSGSVSGRGRASKQGNHYLKAAFSQAAVHAVRCYPKVRRYYERQLKRHQGRGRQMICYNIIAHKLAQAAFHVLKEQIEYREELLFGP

SEQ ID NO: 55087 - protein, 339 aa, unidentified
MALYAGMDLHSRDTYLGVLDHKFKRVFHKRLNNDLSLILSTLEPFREELQGIVVESTFNWYWLVDGLMDAGYRGLHLANPCAVKQYEGLKYSDDRHDAFWLAHLLVLGILPEGYIYPKKDRPVRDLLRKRSFLVRQRTSLILSLQSMIVRHNAERLSGREIKGLKISDLKDLFKEEHLVLSAEASVSTISFLSHQINQIHKAVKKKAKLNKSFEYLRTVPGIGEILALTIMLEVGDISRFKKVGNFASYARCVPTERLSAGKRKGKGNRKNGNRYLCWAFVEASNFSRRYNEKFRRYHQKKSARTNNIIATKAISNKLARICYYIMRDQVPFDDEAIFC

SEQ ID NO: 55088 - protein, 347 aa, unidentified
MKILALDLGKYKSVGCDYERESGAHRFKAIGTTPAVLQRLVEETKPDRVVIEVCNIAGWVCDLFRGMGVEVQVANTSDDAWRWRKVKKKNDRCDALKAAQLSAVNQLREVHIPVIEVRQWRALIAYRQQLVRRRGKVKNHIRDLLLREGQILPRGAKCWTQLGLARLTTMAQPLSAVGLRELWRGELDMELRQLAAVQKEIDVIEEKLNAIGAADPRVQLLRTIPGVGPRLSEAIVALLDRPERFRKPSEVSAYIGMVPKELDSGETERRGRITRHGSRLVRSLLVEVAWAGLRYNPWVRETYQRISGGKKSRKKIAIVAVGRRLLVRCWAMLRDGTTWQWASTKAA

SEQ ID NO: 55089 - protein, 343 aa, unidentified
MKLSRVGVDLAKNVYQLHGVDRHGKTVWKRRLRRGQWLQALLEKTEPSCEIGMEACTGAHHWARELQSRGYTVRLIAPQFVKPYIKSNKNDANDAEAICEAMSRPTMRFVTVKSVEQQDIQATHRVRTELKEQRVAKANQIRGLVAEYGLVAPQTLLALRRAIPCWLEDADNGLADHFRSLLHGLWGDLVALDDRMIELDKQIKTLADSNEVTQRLQQLRGVGPLVATALVATVGTGEQYKKGRQMAAALGLTPRQSSSGDKQRLLGISKRGDVYLRTILIHGARAVVSQAKHRDDRLSQWVTSISKRSHPNVAAVALANKTARMAWAMLRNDSNYDPDFAIS

SEQ ID NO: 55090 - protein, 456 aa, unidentified
MAEHASKKRDSKIRQLNPNAAGIDIGSQKHYVAVPADRDNEPVRSFGCLTPDLHQMAKWLKSCRIETIAMESTGVYWVPVVAVLESYGFDVKLVDAYKVKNVPGRKTDVKDCQWLAELHRFGLLSGAFRPDKQIQVLRSYWRHRSTLVEACSTQIHLMQKAMEQMNIQLHKVITDITGVTGMKIIRSIIAGERNAVRLAGMKHPLVKSSTETIAKALTGEYRQEHLFTLKQALEIYDVYQDKIAECDRQIEEYMKTFEHKAEANDLESKLGKNNRTKRRKNQPNFDLRTRLFEMTGVDLTQIDGIETMTAQTVISECGFDMSVFPTEKHFTSWLGLCPNNQITGGKVRKRSTRKVQNRAARALRLAAQSLHSSKSALGAFYRRMRARLGAPKAITATAHKLAKLVYRMLKHGMDYVDSGQKYYENQYRERVIKNLTKRVREMGYAVVCTNTGQLVS

SEQ ID NO: 55091 - protein, 406 aa, unidentified
MRVAVGIDVAKEFHWVAIVLADGGKVLWSQRVDNDPDSIDGLIEHLRAVTAEHGADQGELTVGIDLMGGVASLLTAMLLEAGIPLVHVPGLVVNRARRASKGGEAKSDPRDAQTIADQLRLRDDWRVVDRPDELSIDLRLLVSRRRELVVEQTRRLNRLRETLTSLFPGLERVVDVTNLSGLQLLARYTTPTEIRKAGRRRIIEHLLRHGVRRTHAEPLVDKTITAAQAQRTVVPGEARLAEFVREFATEAITVRRRITELDHEISDVLDTHPDAALIRSLPGMGATLTAEFLAEAGDLTRFATADQLAAAAGLAPVLQQSGKTRYLRRATTGSRTLKFVFYQSAFCAIQRDPASKAFYARKRAEGKRHHQALIALARRRINVLFALLRTRTPYQPNHTRETATAA

SEQ ID NO: 55092 - protein, 327 aa, unidentified
MRQAKSLTEKAKTTVAFDVCKAALDVHIRVDGKAFQVPNTYEGFDQIALVLADYDVSLLLMESTGGYEDAAACNFQSLGYDVAVINPRHGRNFAMAMGKLAKTDRIDAAILADFAAVIDSRSDRARFIKPPTDEERKFLSQMVARRRQVVDLLSTEKQRLSHADDYAKQSINKVVAFIESQLDEINKDVSFYLKKNYSGLSKMLSEIPGIGELSVGLLVGDVPELGQIGNRQLSAVIGVAPFNHDSGKMRGKRCISGGRQNVRNVLFMGVMSATRYNPVIKAFYDRLINKGKPKRVAYIACVHKLLRIINAMVRDGTSFNPDLHAVS

SEQ ID NO: 55093 - protein, 327 aa, unidentified
MLGIDTSKNMLQCALRDPVNHKVLWNKPFHNDADGVSLLLEQTPGDIPWVIEPTGRFSLSVVRQAQAAGRCVLLAPPRKAKLYLQSLQSRAKTDKLDAKGLAQFGLSRKLSPYPVKAEPQELVDQLLSARKGISNSITRLQLQADELPHAREALRNAISGLKAELQALDKQIAARVAQEPSLAIAKELRKVPGIGPVTAAAVSSRLTAKSFAHPDQFVAYIGLDIDIRQSGTRKGQHGLTHQGDAELRRLLFCCAKSSIVAKDSPFKTQYEREKAKGLSPTAALCAVARKIAKLCWSLYRHNTAYDPDRVYKAPERSGKQQSLADEN

SEQ ID NO: 55094 - protein, 434 aa, unidentified
MPTHYTTLFVTLDIGKNVNWLAAYAGFDLKPVIPPLEVLSDRSGFERVIAEIDRLLGSGQYNQVVLGHEPTGIYHQGWARALAEHYAAHRDGRVQPPLEYRLINPLVSKRRREQSNNGRKRKSDKIDLLAMALCLRDGQGQPAFVPTAADLQFQLWSQSYCQLFQDQHRLALRLLAQLDRLWPGAVVNLKRFRQMHPTLEPPVPLILSRPLERERVRAILAHCPNPHDFLALGQEGIQAFYRQHLGRCGPATAQLAFQVVSQALLPPPDIADPLARQLQADFQRYLALEQQLHTLAEQTQTLVPGSPAEVLTTIPGLSTFLAARYLAYLGQPQRFTSAAQVWAFAGFDPVIEQSGDFRRVGHISKKGSPGLRNTLYQIGFHTSQHLPAITRAKQSALKRGLGQVGATLHAANKANRLCFHLLYHQLPFDPNRSR

SEQ ID NO: 55095 - protein, 343 aa, unidentified
MSEISMIGLDLAKNVFQVHGVDASGKVVLQRQLRRSAVEKFFAKLLPCRVGMEACGSAHHWARLIGRYGHDVKLMPPAYVKPYVKRNKNDCRDAEAICEAMSRPTMRFVAVKSVEQQAMLSVHTTRALLVKQRTMVANALRAQLSELGIVAAQGHKGLHELMARLQAPSQEIPEMMRGALLVLAGQWQSLDANERALEKQIVKAARCDPDACRLMEAPSVGPIIASMALAKVSDASVFRSSRDFAAWVGLTGRDHGTGGKHRPGPISKQGDRVLRTLLINGASAHLRQQMRRGVSDPWLRELLARRPYKVAMVAFAAKTARIIWAMLATGETYRDRVSASAAA

SEQ ID NO: 55096 - protein, 418 aa, unidentified
MKKDSDSRKKSEPTTKRVKSRGPMRRDTKEVLAELVGKLKEKLDPKKVAATSAGDGYPRGELRPNLDRLTVGVDLGDQWSHYCILGLEGETVVEGQLRTTREDITEFFQALNSARVVFEVGTHSPWVQEVIGGCGHEVLVANPRLMEGSKRRKRKNDRIDANKLARLGRVDPQSLHPIQHRSREVRQDLVVLRARDALVAARTELINATRGLVKSMGTRLPKCSSASFAEKVEGTVPAELRDALLPLVRMTAALSDCIQEYEEKIEQLGREKYGHTALLRQVKGVGPITALAYVLTLENPDRFVKSRDVGPYLGLVPKQEDSGESQPQLGISKAGDTMMRQLLVGSAHYILGPFGPDTDLRRYGLRLCERGGKNAKKRAAVAVARKLAVLLHCLWVSGEVYEPLRQGMSATMTPAGAA

SEQ ID NO: 55097 - protein, 407 aa, unidentified
MAAVMIGVDPHKGSHTAVAIGADEELLGHLRVRASVTQAGRLVAWAAAWPERTWAVEGAGGLGHLLAQQLVAAGERVLDVQPKLGARVRLLATGASNKNDPNDAFSVAVAALRSKTRRPVTADDHGAVLRVWSRRHRDLGRAKNQAACRLHAVLCELVPGGVPDEITAARAIRILDRSTPSGAVGQARFDLATELLDDMRRLDAQIRESQKKLAVAVKASGTSLTGLFGVGPFIAATVIGDVADVARFATRDHFAAYNGTAPIEVSSGNRKIYRLSLRGNRRINHAIHMAAITQIRHSHSDGRAYYDKKIAEGKTHKEALRSLKRQISNAIYRCLQTDARQGAAAARAKGPGGQPGNDSDSSAAGSHPERRLFGQATPGPSPTLRAATPAGRTTPPKQTSKKTRRSA

SEQ ID NO: 55098 - protein, 478 aa, unidentified
MAEGEDRQGPGSPEPVGESGQLSNEQEPVTKITNSRMHIFQTFCHYPERRAEEKMNSRVQIACGLDVHRSKIVGSIVTCEGDQETRTFTTTIEDTLALKDWILTHECERVAMEATGIYWYPIYNLLEEHITVQVANPLFIKGIPGRKTDQLDAEWIATLCLNGLVKPSFVPGLQVRNRRDLVRTLQRLIQTRTRHKNRVHKVMVRAGIRIGAHLSDLFGPSGLRILHGLLEGQAIDTILKNLKNAKINKKRDELANSICGTLDENDVYLIRLELDAIGSINHLIDDLKQRISHLMIPMMDDLTVLMTIPGIGYDSAVNILAEIGDIHQFPSGKHLVSWAGLAPGLNESAGKQTPGHITKRGSKSLRTSLIEPAQSITGMMRNNQLKRFFSRMRGKLGYKPAIIALARKLLMLVHHLLINHEAYFEENFPPKKPAKIVPPSFLSMSPDQILNLLSEAIAELSDVNRAEFVRKLNRIGTG

SEQ ID NO: 55099 - protein, 368 aa, unidentified
MFTERTGVGLDVHARSVAAAAIDTVTGEVIERRLGGDYGSVVDLARRLEAGHGPLRITYEAGPTGFGLARDLAAAGLTVQVAAPSRLLRPAGQRVKTDRTDAMLLARLTINDDIVAVRVPTMSQESARDLVRARDDARADLMRARHRLSKMMLRRGWVYPGRTTWGPAHDAWLRRIRANDVPALGSGAAAAFDDAYDAVAHALARRDRLDEAITALAADSEFTATTTRLSCLRGISTLTGFALAVEIGDWNRFTGATIASYLGLVPCEHSSGQTRSQGGITKTGNTHARRLLIESARRHKPAYRPGPGLRAAWAKAPAVVAERADRGNRRLHRRWTALAARHKRHAVANTAIARELAGWCWSLATMDA

SEQ ID NO: 55100 - protein, 339 aa, unidentified
MGRFVGVDLHRNSFLVCFFDAEKGEKKFRNYYLCCIRKFLMDLEEDDLVAVEATVNARFFKKEVEKKVGKVIVVDPYKFKVISESVKKTDKRDAELIAFYLSKGMLPEVRMKKEEIAEVESLAHTRDKLVKLRTALKNKVHNILRMYGIETNREFLSSEKGLEQALSYEIGDTAKVELKVCIDQIRSLTKSIEEIEETLVNKGKNMKGFKNITSIKGIGEKSGTILLSVIGDINDFKSRKQLDAYFGIVPRVNNSNETIRHGKITKRGSKLGRTTLVQCALIAIKYSKYLAKYYNKLKAKKGSGKAIIATARKLLGIIYDTLKYELEFEDFSNFVFKTA

SEQ ID NO: 55101 - protein, 358 aa, unidentified
MVDKVTEAAVVGGVDTHKDLHVAAVVDQNNKVLGTQFFSTTRQGYRQMLAWMTSFGALKRIGVECTGTYGSGLLRYLQNAGLDVLEVTAPDRMERRKRGKSDTIDAECAAHAAFSGIRTVTPKTRNGMIESLRVLKTCRKTAISARRVALQIIHSNIISAPDELREQLRNMTSMQLIRTLGSWRPDASEYRNVTNVYRISLKSLARRYLELHDEIADLDVMIAAIVDELAPELIKRNAIGYESASQLLITAGDNPQRLRSESGFAALCGVSPVPVSSGKTNRYRLNRGGDRAANSALHIIAIGRLRTDAKTKEYVARRVAEGHTKMEAIRCLKRYISREVYTLLRNQNRRINSIPITA

SEQ ID NO: 55102 - protein, 351 aa, unidentified
MLIIGCDFHTRYQQIAMAEETTGELLLEQRLDHESGAARAFYRSLQGPVRVGIEATGPIHWFERLLRELGHELWIGDSAKIRASEVRKQKTDERDAALILDLLLAKRFPRIGVPTPAERDLRQLLWHRHKLVRLRTMLGNQLHFLAMSQGLCRKKKLFTKKGRAELGNLTLGPWASRRREELLKLLGQLDPPIAELDRAVLEEAQRRDDAVRLMTHPGIGPVNALAFVLTIGPVTRFPCSRKIASYLGLNPTEESSGGRRRLGGISKQGNTMVRWLLIEAVHHAVRQDPALRQDYQRLKFRRGHAVAKVAIARKLAVRMYWMLRSGADYARLVRRQGSPGATLMNAGSSLG

SEQ ID NO: 55103 - protein, 355 aa, unidentified
MTSTKYIGMDVHKESISIAVMNSAGKVVMECVIETKASVILQFLNGLSGDLHVTFEEGTAAAWLYDLLKPHVARLVVCNPRRNALLKVGNKSDRIDARKLAELLRGNQLQPVYHGEHGLRVLKELVRSYLTISKDLARVMTRVKALYRSWGIPCSGTQVYSRLYRVTWLSKLTEPGVRLRAVFYFQQLDALRTLRQEVRRELLAESKKHKVWKRLCEIPSIGPIRAAVALGILQTPHRFRTKRQLWSISGFAIETRSSADHRPVNGRLQKVKKRVSIRGLNQNHNHDLKNLFKGAAVSASTKPGPFQEFYAALLARGMRPEMARLTLARKIATIVLIVWKRGVNFDAQYLKPQTV

SEQ ID NO: 55104 - protein, 419 aa, unidentified
MNTLNTASFTAFIGIDWADAKHDICIQSASSDEREFDVIPHQVERIDEWAQVMRSRFGSPIAVAVELSKGPIVYALQKHDCFVIFPVNPSTLAKYREAFQPSRAKDDPTDAELAVDLILHHPERFKPLQPQSVEIRVLASLAEQRRHMVDDKIRTTNRLRVALKQYYPQMLEWFDHIDTPLFCDFVTRWPTLLQVKRARKSTLRKFFHEHNMRFEQVVERRLNAIKIATPLTLDEAVVVPHRLQALVYVEQLRVMLNAIKQFDIEIESVAKQHEDYVLFTALPGAGPSLAPRLLVAFGEQRDRFKSAADIQKYSGVAPVTERSGKKHWVHWRWQCPTFLRQTFVEWAAQTINKSYWAGEFYRQQRAKGSTYQAAVRALAFKWIRILYRCWQTRTPYDEVVYLKALERRGSPLLTKAKVA

SEQ ID NO: 55105 - protein, 340 aa, unidentified
MNNISIVGIDLAKHVFQLHAVDDSGHKVFSKKVKRDQLRTVIANLPPCLVAMEACGSAHYWAREIRQLGHEAHLLPPQAVKPFIQGHKNDARDAAGIAEAAARPATRRVAVKTQEQQSLQALHRVRSRLVRARTAVGNELRGLLNEFGIIVAQGHRVIRQGDIRRLLDERHTQLGMALCDVMHDLLDEWQALDTRVAEYDKRLGAYVQATPSVKQLMSVPGIGPVNATLLFSHMGDPRRFPNGRQFSASIGLVPRQYSSGGKNVLKSITKRGNSEVRRQLVHGARAALRQFQRQEHPDRLAQWIIRLAARVGQRKAIVALANKMARICWSILAHQRTYQA

SEQ ID NO: 55106 - protein, 397 aa, unidentified
MIAVGIDVSKSKSTVAILNGDGSIRAKPFDVHHVADELQALVDYIKRTSEPPTILMEPTSHYHYPLLKAFQEAEFPVCLINPYQMKKYGDTELRKAKTDKRDSLRIAQYALEKSYSLIPYTPQDQKYEDLRFLSRQYSQRISALTVAKVQLLSLLDETMPGITTILPLKSRDPDNCVLLRFIKRFKSFDVIRKMGKTRFLDSYQVLVKKTKDRFAGSKGLAIYELVLNSITTRGENPLSAMTQDQCVDLVSTAQKAADEINLQMRTIADTIPEYKVLRSMAGVGDRLGPIILGEIGDIRRFHSGKALNAYAGNDAPPYQSGQFESRNRHISKRGNPALRKACFEVVQALKLTKPQDDPVYLFLLKKEQEGKPYNVAKMAAVNKFLRIYYARAMELYK

SEQ ID NO: 55107 - protein, 305 aa, unidentified
MISWVGIDISKSNLVVWVQPQKEGFEIPNTSEGFVELIKRLSCYEVGRVLLEATGGYERQVMAALQQANLQVLRINPRRARAFAVAMGKNAKTDPIDAAVLADFAEVLHGSHEKVISPEREALRELIQLREHFVQQRDDNKRRLQQAQLPTVVSATKDLIRYLQAQIKALEKHLVQSMFDLDEEKSRRLMSVKGIGKVAAASLLVYLPELGELDRREVAALAGIAPYNDDSGNHNGKRQIYGGRARVRHALYMSSWVVIRFQADFKTRYEALRERGKSAKVALIACMRILLIRLNAMLRDGTEWR

SEQ ID NO: 55108 - protein, 360 aa, unidentified
MAQVRTWVGLDVHAAKVVAAIADADSAELRVQRLGGETVAVAEFCAALPAPVRVAYEAGPTGFGLARELAGRGIGCTVAAPGKIERPAQDRVKTDRRDAGRLVRLLMIGGLHPVRVPTPAEEAMRDLVRAREDVRGDLMRARHRVAKLLLRHDLRFEGNNWTQRHLDWLGRVELPEAVAQTVLHDGIGAIDALLARRSSLESQMAALVEGSPWEQTVAHLRCLRGIDTLSALGLCAEVGDFERFARPAQLMSYLGLVPSENSSGERRRQGAITKSGSRHARRLLVEAAWHYRRAPRKGRELRRRQEGQPPAVCAISWKAQQRLHRSWVRLDHERGKRRTLCAVAVARELAGFCWAVSVAD

SEQ ID NO: 55109 - protein, 415 aa, unidentified
MDILFTHCAGLDVHKKTIVACVLLSSPEGMQRSIKHFATTMAGLETLDAWLTGLAVTHVAMESTGVYWKPVFNVLSSHLEVWVVNARDMKQVPGRKTDVCDAEWICKLMSFGLLKRSYIPVVEQRDLRDLTRYRRRLVEERTSASNRLEKILEDSNIKLSAVVSKLQGVSARAMIEALIAGETDTAKIANLAKASLRSKIPELEAALVGQIREHHRFMWRELLYHLDELNVRIAAINERIAEYTAPHEQLIQRLSTIPGISRWTAEVILAEIGSDVTHFPTAHHLASWACLCPGNNISANKRRTGKTRRGQNWLRPALVEAAWTTSHTKTYFGSQFHRLRARRGDKRAAVAVAHSILIVVYHLLANPEAVYTELGADYFTKRNAEQEQRRAVRKLETLGYVVNLTPVPAAAAAPG

SEQ ID NO: 55110 - protein, 318 aa, unidentified
MTGQVRFRRKLSRQQFRHFMAEQPPAIVIMEACGSAHYWAREMTSLGHEVKLIAPQYVRPFVKRQKNDAADAEAIVIAAQRPEMRFVEPKSEAQQARAVLFRARERLVRQRTEMVKALRAVLYEFGHIVPRGMVQLTRMQEIAEAPNSDLPKLVREECLNLVEQIADLTRKIDARTKTAKELASEADMARRLQTMPGVGPLTALAVEAFAPAMESFKCGRDFAAWLGLVPRQHSSGGKDRLGRVSKAGQVDIRRLLIIGASAMTRLTWLGRKAIRPNTWLARMAERKPKMLVAIALANKMARGIWAMLTKGEDYKVPA

SEQ ID NO: 55111 - protein, 316 aa, unidentified
MNAVTGLVVGIDVAKDLLEVATSAGEHWQVGNDPQGQEALRDRLQAGQAELIVLEATGGFEVALVAVLAQAGLPAVVVNPRQVRQFARSLGRLAKTDAIDAEVLVQFGVHVAPEIRPLPDEQTRLLEALLARRRQLLGMIQAERNRLLLAVGPVRTDLKQHIAFLVRRLKDIDRDLEGRLRASPLWREREKLLRAVPGVGRQLLLAVCASLPELGRVPARQLAALVGVAPYNCDSGTLRGQRHCWGGRAHVRQVLYMATLAATRYNPVIGPHYARLVAAGKPRKVALVACMRRLLVILNAMARDSTPWNPQLAMAK

SEQ ID NO: 55112 - protein, 339 aa, unidentified
MKLYGGIDLHSTNSVVVVLDEQDRVLLERRVTNDLQRVKDLLAPFREALCGVVVESTYNWYWLVDGLMAAGYRVRLANTAAIKQYEGLKYSDDAHDARWLAHLLRLSILPTGYIYPKGARAVRDLARRRMRLVQQRSLNLLAVQTTLERELGRRVSANAIKRTGSEVALLHGVEEPNVGSSLTANLAVMRCLDAQIERLEREIVSQVKLAAQFEPLKSVAGVGQILALTIMLETGEIGRFAKVGNFASYARCVQAKRLSNGKKKGEGNAKCGNKHLAWAFIEAAHFAVRYYPKVKRFYERKRAKSNAIVAIKACAHKLARAAYHVMRTQQPFDIDRAFA

SEQ ID NO: 55113 - protein, 425 aa, unidentified
MSTTLFTGIDISLRKATCCFLNQNGKVLKRIFEVDNNISGFEKLQEQIETLIPANEISLVCIGLEATSMYGFHLLDYFSSTAFKYPVEVRLYQVNAKYVSKFKKAFPEKEKTDMVDCRVIAEYLRFGRLPAEYKPECLFLPLRRLVRYRYHLVKNLEKEKKIYMANLFLKFPGWVQNKPIGPLGKTALDVTGEFTLDQLAEMPLEQLAVFVAKAGKNRSPDPAAIASEIQKAARESYRIRPELASSVTFILASISRTISALKDNLKQVDKAILEESKGFINPLISIKGIGPVYSAGILACAGDVKRFASHDQLARYAGLVWKRKQTGNTESEEKRIVRECDKYLRYYLVEAANSLRMHNEKYRMFYQKKYQEVPKHKHKRAIVLSARKLVRLVFALLSKNQLYDPLWVPQSPRMSGLNQNCQRAN

SEQ ID NO: 55114 - protein, 446 aa, unidentified
MPAPKKRSPAPAPRVVQPHAAGIDVGSEAHVVAVPVDRDPQPVRTFGVFTADLRRLADWLKKCGVTSVVLESTGVYWMSLCDFLEEQGFEVLVIDPRALARNLKKKTDVSDAAWLQELHAVGLLKSCFRPAPAVRALRTLWRHRDHVVTEAARLLQMMHKVLVQMNVHLHLVVADLAGATGLRILRAIAQGQRDPQTLAALRDPNCKKTREEIAKALEGTWDPAHLFELKQLLKAWDFYQNQLHVCDKEYDKAAGKMPDQTQGRPLPEPEKQPFQRRNSPTAFDSDALIFKMTGVRLTEVDGLGPNTVLTVLSETGPDLAAKFATDKHFAAWTTLAPRKHQSGKRTKFPAQTASRVAKAFRLAARALLNCKSVLGNFLRRLRARLGIGTAIRATACKLAKLFYRLITKGEAYRRESTAAEEAKHHERQVRALERKARELGLQVMPI

SEQ ID NO: 55115 - protein, 342 aa, unidentified
MKIMTGIDLHSNNVLCGLMDEDGRRVMHKKLPCQLSEILKMLEPYKERIAQVAVESTYNWYWLVDGLEDHGYPVVLANPARMKQYDGLKHTDDVSDAYFLCELMRLGILPTSHLYDRQTRPVRDLLRRRMLLVQLRTSLILSFKSLNERTLDQRVPLRGVKTMSVKEARARFTAPADQLLGGEQIGLMGQFQESIARIEKHILAAIKEWPTFQRVQDVPGIGRILGLTIALETGDPKHFTDAGNFASYCRCVKSLRQSNSKKKGENNRKNGNRYLAWAFVEAAHFACQHDERCRRFYERKKQKTNSVVATKALACKLAKAAWHVMHDDAPYDPQRVFGGGKE

SEQ ID NO: 55116 - protein, 347 aa, unidentified
MKAPQYYVGIDIASASFTCSVGKMEGRWQIVVRPASFANEYDSFSAYLNWLHDHEVKPDNSVICMEATGVYNEVLAHFLCANGYTVAIEPPLKVKRAFKPEGHKSDPVDSTQIAEYAYRFWDELSQWTPRKEILEQIKTLLTTREQFVVERSGHQNALQALKRKQVRTLMAEKMHEKAIEELKRHAQEIEAEIQHLIDQDPDLRNLATLLISIPGVGALLAAHMLLLFKSAPEPYNPKSLAAFIGICPYESSSGTSVRGPSTSRHYGPPALRKLLHLAAMSIATHQQQFRLYYLRKVKEGKPKQLVINNLANKLIKIMVAVARTRTKFIPNYCSVNPALLKMALTKS

SEQ ID NO: 55117 - protein, 394 aa, unidentified
MIPRYIGMDIHKDYAVIATVDRDQEVLLPPSRVEMDQLAEWAAECLTPQDEVVLEATSNAWPVVDLLRQHASVVRVANPYQTKLIAQARIKNDKVDALALAQLLAARFIPEVWVPQQSVRENRALAAHRHTLQEQCTQVKNRLHGLLRRHNLRCPEQGLFSTAGLAWLDEQDLPWVEELQVRHLVSQITFLQDQLDETDRIIARQSTQDPRVPHLMQLTGVGYFAAFAILAAIGNIARFPSPGKLAAYAGLAPGLHQSGNHSYSRPITKEGRSLLRWLLVEVAWSAVRWDDHWRTLYDRIARRRGPRIAIVAIARRLLVVIWHLLTDHSAYFYLRPQTYITKLQQWAYRIGRDHLPAPNSRQFVLNHLRRLNLPHLADSLTTVHRNGRLSVSPT

SEQ ID NO: 55118 - protein, 347 aa, unidentified
MKIATVGLDLAKTLFQVHGVDSQGHIVVRKQLRRADVLPFFAKLELCVVGMEACGSSHYWGRELTKLGHTVCLIAPQFVRPYVKTNKTDAADAEAICEAVSRPHMRFVPIKTQAHQTMLSLHRARAGLVKSRTALANQIRGLLSEFGIVLPQGIRLLGQRAIEALSNREYEHCEQFRTLIQLLVEHLRELGNKAAELEGRIRAMHRMDEAGQLLETIPGVGPLTASALAASIGNPRAFRDGRELAAWLGLVPRQHSSGGKPHLLGISKRGDTALRTLLIHAARAVIRMAATKPEMADSWVMKLCRRRHKNIATVALAAKNARTAWALLVRKQVYQVSHIPIRSGVTV

SEQ ID NO: 55119 - protein, 375 aa, unidentified
MYCGIDVSKDKSNVCILDKDKKIIVEFEIRHNKEGFEKLEQHLTQDTTIAMETTSSYCRALYSFLKGKYQVSYVDNVQMKNFTRLHHPHRKNDRVDARSIAEYLTFDFKKINPVKNDELKDLVRLYYKSVKQLSRHKHSFKSQLSIIFPELEKNFYIKRTKAVAYMLIKYPTPKAIAEATDEEIYQALIEKLNKTSKFTPDYAKRLRAVAKESVGVIDYPTSCFLYTLKLLLFYQDLVDDLKKKMEEKVKETPYGPLLNEYGYNAISLSSIVGEIGDVRRFSNHKKFVKYIGLDVSEKQSGSSQSVNCYITKQGNKYLRHLFYNMVLNHLAYKTKYAEFFYRLKESGKHAKKCMVATARKLAIRAYFDLLKCHNQ

SEQ ID NO: 55120 - protein, 400 aa, unidentified
MDKDRIVAGLDVHKDTIYLCVMDNTEAVIFAKVYGTLTPDLELVCSEMVSHGVTEAAMESTSTYWVPVWNALCESMSLKLVNPYFIKQLPGRKSDVKDAQWIAECLLKNLIRGSFVPDKTVQDMRKYNRRIFDLNEDLTYNSNKQDAALQRCGFRLSNYVSRVNGKSYQKCVRAIITGITDPEELVKLIHGKTLRKYGRNIIKDAVTGDFHQADICLLKQYAELIGVIERQIEECRNALISMCQEHFPKQFKRLQSIPGVKERAASAIIAETGADMKPFEKATNLVGWCGLKPRNDISNNKVKSNRTTHGNRFLRQILIEISWVASRTRNCFFSNFSYVQCTQRHKNKMKIQVAIARKLLVAVWHMLTKDEDFIDVYLKRLEKQAEWQNDLQALESLLVG

SEQ ID NO: 55121 - protein, 425 aa, unidentified
MNNTQNKKITQVTDDTLIVGVDIGSESHWARAILARGYEVSKKPFHFDNTEEGFERFVTWAYGLEAENKLKKIVIACEPTGHYWFNLYDFLKKYDVKLVLVAPQHVKHSKEMDDNTQRKDDRKDPIVIAKLVPEGRYMEPYIPEGIYAELRAAFNRRCDLSEALTRNSNRMTRWFDVYFPEYRTVFKGSDALSGYMVLKRAPLPADILELGVKGICQIWREAKLRGAGEKRAQKLVDAATQSIGLKGGPAVRQELWQLIEERELLDKQHSDIMALIEEILKQIPGADRLLSVPGAGVVTVAGFLSEVGDINRFSDPKQIQKLAGLAVVENSSGKRKGLPGISRRGRSRLRWVLYLAAMSMVKNNKEMKTYHRYYTTRKKNPLKKIQSLMAIAGRIARIFYGILKNGTDYDPMIVMRDFNKEKAIA

SEQ ID NO: 55122 - protein, 365 aa, unidentified
MQKISTMRTSGENIFQGQLTIGLDLGDRFSAYCVLNEAGEIVLEHKLATTPEAMKQVFVSMPRCRIAMETGTHSPWVSRVLTALGHEVIVGHAQKVRLITKSRRKDDRLDARTLARLARIDPELLSPVKHRSAQAQLHLTEVRARAVLVSARTALVNAARGLVKSYGERLRKCDTRQIRREASSGLSAELRKALEPLLQEIESLNERIKEYDRRIEKMANQTYPETALLKQVKGVGDLIATTYVLTLEDPHRFRKSRDAGCFVGLQPGRRNSGESEPQMRISKEGDEYLRTLLVQGAHYILGPFGEDSDLRRWGQKLAERGGKNGKKRAVVAVARKLAVLLHRLWVSGEVYEPLRNSQKAMNAAA

SEQ ID NO: 55123 - protein, 334 aa, unidentified
MQFVGIDVSAKTLVVCLQPPTPKAAPQQLTFDNTREGHRKLGRRLTKSRRPTRVALEATGLYSLDIALALAQQPGVEVMVVNPRSLRDFARADLRRSKTDAVDAQVLLEYVQRMRFQPWQPPSPESLELRAIGRRLADLTDLITQEKNRLHAAGFVASLAPAVIRDIQTHLQHLEAQLKALEREACQLIRSHPHLREDFQLLVSTPGIATKSAIQLLGELSVLPEDMGPRQWVAHAGIDPRSHDSGSSVHKPAQMSRCGNHHLRRFLFMPALVAVCRDPNVKAFYDELLARGKKPLQALVAVMRKLLHSLHGMLRHRSPFEGQKFRTLKTAPAP

SEQ ID NO: 55124 - protein, 369 aa, unidentified
MNETTTRYLGLDAHAATVTVAVAEETGPPALYGTVPNQPAAIRKLVASLSRSSQLVAAYEAGPTGYDLYRQLLELGVQTIVVAPSLTPTRPGDRVKTDARDALSLARLLRSGDLTPVWVPDREHEALRDLVRAREDAKVHLLQTRHHLSKFLLRHGIRPPAGCSNWTLRYYTWLRQLRFELVAERLAFEDYLSAEQAARDRMGRLEAAIRECISESRLLPLVTGLQCLRGIAFLSAVIIAVEVGDFRRFRAAPSFMAYTGLVPSEHSSGEARRRAHITHTGNAHLRHVLIQAAHNARYRPSGRAEFRRRLEGGPPDLIELALRAQARLHDRYWHLQRRLGSAKAVTAVARELAGFAWAVGCRMEISACA

SEQ ID NO: 55125 - protein, 389 aa, unidentified
MFYLGIDIGKNTHVASLIDDKKKVIFKAFSFSNSIDGANSLLEKLSPFIQSLEIGMEATGHYWLSIYSFLVEKNLSVHVINPIQTDGWRNGIEIRKRKTDIIDSILIADLLRYGDFLETSLSNEDYLSLRNLTRFRSYLISSVSDLKRKTIAVLDQVFPEYASSFSNIFGKSSKEILMSISTPQDFENITADKLEKVLENITMKKFAKRKIDELSSKATNSFGVKFCLDSFSLQIKLLIEQISFIESQVITVEQEISILMEKINSPITSIPGIGPITGAIILGEIGDISRFSNPSKLVAYAGLDAVISQSGEFESTSNRMSKRGSPYLRKALFQSALRAEFCDSVFSNYYQKKISQGKHHLVATNAVARKLCHIIFAILNKNESYLSQM

SEQ ID NO: 55126 - protein, 342 aa, unidentified
MMKKQCVGIDISKDHLDCCIGCIDSDQNHKLQNNKRFSNNETGFKALLNWVSDLQVTENLMYVMEATGVYYENLIYYLTENDCKASVLLPNMVKHYVKSLNIKTKTDKVDAEVLCRLGLERRLGFWQKPSGIMRELKFLSREYREIKYKINQVKNQLHARFYSYQCPESTEQRLKRQIALLETQALEIEAEIRTLVMTDRSFYDKIQRVCTIPGVSFITVVCVVAETNAFALISNSKQLTSYAGLDIQQNQSGSREGKTRISKKGNSFIRYALYMPALCASRFNPSMKSFYRNLTERKPAKKIAVTAVARKLLCLIYVLWKKEEEFNINYEENKNTDRVSPV

SEQ ID NO: 55127 - protein, 408 aa, unidentified
MESQIIFGIDVSSKSSTVCVVNDRIKQGESFRISNDSFGYQKLYEQLNQYLITPLVVFEATGVYSLSLQAFLEDYHIKYLKLNPLKAKKLMDNNLRHNKTDKVDAYRLALIQFNAPQKLRDPQPREYHELQNASRYYEELTRSIVTTKNQLHRNLQSTFPQIEEILSHPSGRIYWALVSLFPHAGYVLEKNETQVTQMLNSISGIGQQRARYLTTRLYAFAREAYPYDSKDSIIVRAIQRNISNLFSLQQERDYVINYMEKLAKAVNARALSIYLSIPGVARITAVRLVAELGDLRRFSTSAQIDAFVGIDPGRYQSGEKDSSLGITKHGNHIARKILYRVITQMETVKATQPCHITDYYDKKKRSSNRQGYKKIAIASVHKLIRTMFALIKHDQLYDYNIATKNKRL

SEQ ID NO: 55128 - protein, 338 aa, unidentified
MAIVTLGIDLAKNVFALHGVDATGKTVLQRPSVPRGKLLELVASLPPCLVGMEACSGAHHWARLFQAHGHTVRLMAPKFVAPYRLSGKRGKNDAADAAAICEAVTRPSMRFVPIKSLQQQSELMVHRARQGFVAQRTATLNRIRGLLSELGIVLPLKAATVRREAMLSLEDLPGWANTVIGDLLSEVHRLDERIAQYDRHVEQIAKQSEPARQLMQLPGVGATTATALVSMIGRGQEFKCGRQLSAWLGLVPGQYSSGGKQRLGRITKAGDPYLRMLLILGARSVLQSAKDKRDAVSRWAVQLAARVGYWKAVVAIAAKNARMCWAVLQRGEKFKLPA

SEQ ID NO: 55129 - protein, 332 aa, unidentified
MNYVGIDVASKELSVVFCVNGKHRKAQSFENKAEDFKRLTALIQKLSGETIVCMEATGVHHFDLAVALSRAERIKVMVINPKAAHNFAKALNQRSKTDSIDADVLASYAERMEFVSWVRPSEEALCLRALARRISAIGKMKAQLKNQLYSLTATEETPDIVITQTKTLIETLEEQINSFRSSALEIINKNDEIQKKYTLIVSVKGIADASAVQLLGELLSLPAELTVKQWVAYAGLDPRQFESGTSVSKRTRISKAGNRYIRQALYMPALVACRSEPNVASYYDHLQNKRGLKKIQAICAVMRKLLHAIYGMLHNNMPFDGDKFFKMEVANT

SEQ ID NO: 55130 - protein, 452 aa, unidentified
MEQPQEVEDEAYERVYERVAAIDVAKATGVVCTRVPGEGPSGRRSMHVWTVSATMAAVTELGDHLRCQGIEVVTVESTSDYWRVWYVVLEAAGLKVQLVNARAVKNVPGRAKTDKKDAVWLAKLTERGMLQPSFVPPYDIRRLRDYTRLRADLVHDRARYWQRLEKLLERALVKISSVASTLDTQSVRAMLEALIAGERNPKVIADLAIGKMRAKRKELAEALNGKFEDHHAELARMLLDQIDALTRQIDQLSARASELIAQIHAAWGVNADGTTGPQAGRGQDAAVLPAVARLDEITGCGIISAQAIIAEIGLDMSVFGTPGRLVSWARRCPQTRQSGKKNTAGSPGKGDPWLNGPLGEIAASASRTDTFLGERYRRLAKRRGKRKAQAAIARSILVIIFHLLADPAARFRDLGSSYYDERISAERKIRNHVRQLEALGLTVTITPAEQAA

SEQ ID NO: 55131 - protein, 348 aa, unidentified
MDHIGIDVHKRESQIYILAEDGEVIEHRIRTEPERFAAVLGSRPRARVLIEASTDSEWVARCLEALGHEVIVADPNFAPMYATRSRKVKTDRRDARALAEACRLGAYRPAHRLSDPQRHVRGRLGVRDALVHTRTRYISVVRALLRQHGYRVPSGSADSFIDRVRRLPLPGRLRSVVAPLLAVMGPLNQQLAYSDATIEHLAGQDPRVPRLRSVPGVGPVTTAAFLAAVDDAQRFRHAHQLEAYLGLVPREYSSGETQRRGPITKAGPSRVRWLLIQAARSILRCRPPAAEALWIWALRIAARRGKHVAVVALARRLAGILYALLRDGTVYAPRRPAAPLDPVAALHA

SEQ ID NO: 55132 - protein, 454 aa, unidentified
MKKEDQSTASAPKFKKKKFSQGLPVYNPHAAGIDIGDTKHDVAISDGLGGHEVREYLSYTEDLAHLVAWLVSEGITTVAMESTGVYWLNLYLMLEEAGIEPYLVNARYVKNVTGRKKDDTDAIWLQKLHSCGLLQKSFQPEPEIRVLRTYVRQRKNLITIASDSVRRMQKALELMNIKLHAVISDILGKTGLEMVVAILNGETEPDELLKLKDPRIKASDEEIRKSLAGIWKEEYLFMLRQAYDAYMFYQSQIKSCEEKIKEHLLRQTAKVLEGDITEMGAAKKKPKKNQLCFNAQDMLKAIVGVDLCEIEGISEVSCLELISEIGTDMSKWKSSKHIAAWFNLAPNTKITGGKIISSKMQKKKNHAGQTLRMAASTLSKSKSPMGDYSRKMKARLGKRAGVVATAHKLARIIYTMIKEQRPYDKDIIRNDQEKWKAKRIKILEKQLDQLKKAA

SEQ ID NO: 55133 - protein, 386 aa, unidentified
MPKPADLNRCLAPLDQDHTIIAVIEMSQSSWLVAGIVPGIARHPLKKLAPDQDALLKLLHRWRAEAGQAGREISRIAVAFEAGRDGFWLARWLRAHGIEAHVIHPTSVAVSREHRRAKTDRLDTALLKRVFLGWLRGEPEHCHMAAIPTLEDEDARRPTRERECLVGERTRIVNRIKAALVRLGVRGFKPTVRNALEHLDALRTPEGTALPPNTRAELHRDMARLHFVTEQIQQIEAARGERLEQAGAGPNAMVRLLAQVVGVGIETADMLVHEVLSRNLRDRRAVARYAGLTGSPDESGSRRREKGLAKAGNARVRRGMIQLAWRFLLHQKESALAQWYRARTAEARGSTRKTLIVALARKLLIALWRMVTTGEAPHGVALRPAA

SEQ ID NO: 55134 - protein, 331 aa, unidentified
MLKVDTCGIDVGSKEFVLTLHREGKSEPVRRTFSNGESGRRAVCRYLPKPGHVVRVCLESTGNYGLDLAVDLDATDGVEVMVANPRAVRRFAQALMTRNKTDRIDGDVLEQFAARMPFTAWHKPSQTAMELRGISRRIKTLTCVCAAEKNRLHAAKASKTIPAIVRRDIQDSIARHQRSIARLTKEALEVITKEPELKNNFALMLTAKGIGRKSAIQILGELAVLPKDMDGRQRVAHAGLDPRCEKSGTSVDKKPRISKAGNMYLRSALFMPALSARRHSPHLKAFADHLKARGKQPMQIVVALMRKLLVGISAMLKNHQPYDGNKLFALP

SEQ ID NO: 55135 - protein, 449 aa, unidentified
MGKQKRSAVVLEPDAAGIDIGAEEIYVAVPPDRDEESTRKFNTFTRDLNALAEWLERCRVRTVAMESTGVYWIPLFQILEERGFTVYLVNAHYLKSVPGRKSDVSDCQWIQYLHSVGLLRTSFRPPDHICAVRALWRHRASLLQMAAEHTLHMQKALSQMNLQIHHVLSDITGMSGLAILDAILAGERDPAELAKLCHVRVRSPRETVARALEGDYRPEHLFTLRQSLDGYRFHQKLISDLDCEITRLMQTLPSAAKNSAPPMTRTKRTAYRRQGNDPSFDLRGELYRIAGVDLTDIPGVSTVTAQVILTEVGPDVSRFRHASAFASWLGLCPEKRVSGGKVLSCRTRRVAHRAATALRLGAHALSRAKGYFGEFFRRMRSKLGTASAITATAHKIARVIYHVLLTKEPYSETVFYQCEEQSRERAQLRLRRYAHQLGFQLRPIASSDQ

SEQ ID NO: 55136 - protein, 365 aa, unidentified
MQFVGVDLHTNRFTCCYRTEKQEKKKTATFELTGYGLAQFYQTLTDETYVLVEATNPTFAFVRLIEPLVKEVIIANTYELKQISLARKNTDKIDADILCRILKMQVLSGEQAVSPVTVPPVTIQDLRSLFTTYRLYRKQTTQIKNRVHSLLKEKLYGFTQEEIFGKKDREKIRNLENGTAMAFQINQLLDNLAYMEVQIDELEDKIKEHAEPYMREIAILTSMKGIGVFTAIAVIADIIEVSRFKNSKAFTSYLRSAPKVSNSNTSKPTLGINKKGRKLAATLITQSLNHVLSASPKLNRWYEHLTQLKKKGLVRTGLRRRVFAEMYQMLKKGEYHYGRDSRMHEAKMLQYKRFLEKRKNLLKTA

SEQ ID NO: 55137 - protein, 360 aa, unidentified
MQTQATKLNFEGQNFFVGIDVHLKSWTVSIVTDHLTHKTFTQPASAEVLSNYLKRNFPGGIYHSVYEAGFCGFWSHYMLTEMGINSIVTNPADVPTTQKEHLQKDDPTDSRKLARSLRSGELSAIYIPDPSTLEDRSLVRMRATLIKDMTRFKQRIKSFLYFYGISYPKEFERSGSHWSKRFMKWLNEEVSLQHDSGTHTLKILVQEAEQQRKLLLEVLYKIHSLASGEKYAKNIALLRSIPGIGFITAMTFLTEIEKVDRFEDTDHFAGFVGMIPNRHSSGEKDKNGEMTFRGQDNLRRSLIESSWIAVRFDPALMMSYHSYIKRMEPNKAIIRIARKVLNRMYYVLKNKKEYVSGIVK

SEQ ID NO: 55138 - protein, 343 aa, unidentified
MKIYALGINLGKTVFHLVGLDSSGQVVVRKRCSRTQLLAFTGNLEVQVIGMEACSGAHFLGRALREQGHEVRLMPAQYVKPYVQTNKSDFLDAEAIAEAVQRPRMRFVPIKTEEQLDLQALHRVRERWVMRRTAVVNQIRSLLLERGLTVPKGRSHLDEQLPRILQDAELNLSDSFRVLLAQLKLELEQLAARIEQMDSVIQKTAKENEACQRLTEIPGVGPVTATALIAAVGNASAFRKGRNLSAWMGIVPREYSTGGKQKLLGISKRGNKYLRRLFIQGARSVLQQRHKQAPGLSDWLAQLLGRTHQNVVVVALANKLVRMAWAVLCKNERYRAPVLAVTT

SEQ ID NO: 55139 - protein, 455 aa, unidentified
MPRKSAKASFDLTRHIQGAAAIDIGSRMHMAAVSPEAAKDPIRSFGTFTSDLHALAEWFKECKVTSVAMESTGVYWIPVYEILEQHGFDVILVNARYAKNVPGRKTDVSDAGWLQQLHSYGLLRGSFRPQADIAALRAYLRQRERLVEYAAGHIQHMQKALMEMNLQLHHVVSDITGVTGMQIIRAIVGGERDPETLAAKRDVRCRSSAEVISAALMGNYRDEHVFALTQALELYDIYQERIMACDRRMEGLLLLLSHVSAKPAADLPKPRIKTKQVSAPSFDVRGILYRLLGVDLTQIHGIGVSLALKLVAECGTDLRAWPSAKHFTSWLCIAPGNKISGGKLLSSRTRRSSSRAAALLRLAATTLGRSDTALGAFYRRLSARVGKAKAVTATARKIAVLFYNTLRYGMVYADPGAGHYDEIHRKRVVSNLHRRAQSLGFVLHPIPVATEPAVS

SEQ ID NO: 55140 - protein, 340 aa, unidentified
MHTTIIGLDIAKSVFQLHAEDASGKVLWKKRLRREELEPFLRKLPPALIGMEACGSAHHWGRVISALGHEVRLMHAKYVKAYVKRGKSDVRDAEAICEAVQRPNMRFVPIKSVEQQIDRSLERARDLLVKQRTQLMNATRGLLAEFGVIARVGLRGFKTLSDKVDAGDAAIPKPLLTAVKPLLEQWRGLHASIDELEERLVKRARSDERMRRLMKIPGVGPFTAHALVTAIGDPRRFSTGRDFAAWAGLTPLTDSSAEKTRIGHISRQGDHSLRRLLVLGAANMARHAKVKPSEARAWLLGIIGRRPVKVAMVAQAAKTARIAWALLRSGENYRGSMVAA

SEQ ID NO: 55141 - protein, 347 aa, unidentified
MNRIFIGIDVHQRQSYYCALDKRGSCLGHESISTDRKSLKELVRRYAAVGDVHVAIETGGSTWWVAGVLKESGADVHAVNAHELKLIAHSKRKTDKYDSKVLADLLRCEGLPERVHMPGEATMRLRSMLRTRKWLVRQRAQAMTRAKAVMRHVGVAVKPRMFHTANSWEEVLGSHPDLEALIRTMYEMWTMSSIQLKGMERLLGNILPADEERMAILLSIPGIGPVTAWTLIACVEDIGRFKRADQLVAYAGLVPSENSSGDRQRTGSITKRGRSDLRDVYIQAAWATLRSSHPGTAYMKRFFYRIMHRRCSQVAIVALAKKLLIISYHVLKQRTPFAIDRYEAKAA

SEQ ID NO: 55142 - protein, 335 aa, unidentified
MNYKLFAGIDISKLKTDVVFFLAEDPDECFHGTFANSDAGYTEMITWIHHLTKLSISDMFFCAEDTGIYALPACTFFSEQGGNLWVENALRLKRSLGLKRGKSDKADAAAIAEYGFIHRRKALLFIMPSKTISKIKYLLSCRRQLVKQQTALKNVCGELEEFDRESAEYTLQIRKDLIKEYDNKINLLEEKLLCCVKEDALLEKQYKLVNSVYCIGPQTAMFIVVLTQGFTLFNDSRKFACYCGLAPFGKKSGTTLNTKPKVSHLANKRIKTLLTMCALNTIKKDNEFKRYYDRKIKEGKHHSSILNVLRNKLVSRAFSAVANDRPYIKNYQLVA

SEQ ID NO: 55143 - protein, 421 aa, unidentified
MRYIGLDVHREFCEVAIAEEGRVRSAGRIRTRRAELELFAQSLGADDEVALESTGGAVAIARILEAHVARVVVVNTKKLRQISEAKTKTDRLDARRLAELLAAGYLAEVWCPDEPTRALRRLVARRAQLVRQRSRAKNEIAAALQRNLLDRPGVYDVAGERGRRFLEGVELPDDERQTVEGCLRQIDFLDAEIAAVNRALAEAAVASEQMRRLITVPGVNLQTAATFMACVGDIARFRDSRKLVSYLGLDPRVRQSGEEPARHGHISKEGAAEARHMLCEAAWVVVRYPSPLRAFGERIKARRGAGIATVAVARKLVVLFWQLLTKQQDYAFGRPSLTRKKLRQLELAAGAERGKGQPGIWAANKAQREAELELARQAETAYRRLVADWQPKGAGATQGRAFSKPSSGKQRGRASVPDPAL

SEQ ID NO: 55144 - protein, 351 aa, unidentified
MNEITTVGVDLAKEVIVVCAGDGSGHTMFFKQFSFAGFSVWAANLPPCTIGMEACSSSNHWARVLSAYGHRPKLMAAEFVKPFRKSQGAKNDRNDAQAILCAVREPNMRFVSAKSLEQQSILASHRLRQGWHAERTALLNRTRGLLAEFGIWLGRSSAAVYRGLPRLSQEEAVPAPVRALLTQVYEHLQQLDEQIARCEAQIRLHAKKSEAAQRLTAVTGIGPITASAVVATVGNARDFRNGRQMAAWAGLVPRQSSSGGKERLGSITRRGDRYLRALLTQGARSTMQSALIRAPQKRSRLEQWIVDLRHRVGYHKTLVAIANKHARICWAILAKGESYDPQAWQRIARAA

SEQ ID NO: 55145 - protein, 355 aa, unidentified
MTSTKYIGLDVHKESISIAVLNSAGKVVMECVIETKASTILQFIHGLGGDVHLTFEEGTWAGWLYDLLKPHVTELVVCNPRKNALLKEGSKSDRIDARKLAELLHMSKLSSVYHGEHGLRMLKELSRSYLTISKDLGRVMNRLKALYRGWAIPCAGTQVYALRYRSEWLSKITEAGVRRRAELYYQQLDALRLVRQQARKELLVEARKHRATKLLRQIPGIGPLRAAHLVAVMQTPHRFRTKRQLWTYSGLGLETHDSAQYRVVEQQLQRSKKSVTLRGLNTNHNHDLKDIFKGAAMRASTAAGPLRDFYEALLAKGRKPTMARLTLARKIAAITLIVWKKEVRFDANYLKQQAA

SEQ ID NO: 55146 - protein, 455 aa, unidentified
MARRTNRFDEVQRYVAGIDLAGHADHYVCGPRKDDGTHDIEHFGTTTNEILRMVAWLKERKVVSVAMESTSVYWIYVYDMLEKAGIGCLLVDTRTVKMVPGRKSDVKDCQWLQKLHSCGLLRGAFRPPEEFNAVRSVIRESENVRQMRTQSIQSIQKSLDQMNVRVHHAVSDIDGVTGMRILAAIVGGERDPRVLAKLRDKRCRKSEAEIVEELTGNWREEHLFNLKQAYDTLCFLDERIADYDRQVRDMYAKIAAKFPPVEPPPGGTGPKKPKDKDDAKAKADLARICGGFDMTKIDGIGYDNAAAILSELGPCLDAFPTESHFVSYVGVAPALGKSAGKNVSSRKKHKNTSRVGLVLKLAASTLTRSESSLGARLRCTRSRTCSRTAIKDVAREMAKRIYRGLRFGQAYVDEGEQAYLERTRERTIKSMKKKILKLGISALGISAKELGIFAA

SEQ ID NO: 55147 - protein, 346 aa, unidentified
MLYAGLDLSRKRLDFHLLDREGATVEVGACPPDADGLRGLTERVDRHGAPIRAAIESMNGARFVHDQLELAGWQVEIADAQKVKGLAPLACKTDRIDAWVLAQLARRDLVPAIWLPDPQVRAERERARWRLHLVRHRSSLKQRVHAVLLTHGTPSPVSDLFGVRGRQLLARLGLPEPWQATIEASLRLIDDLDREIGDCERELRRLGADHRYVPLLCTVPGISWVLAYTIAAELGDINRFPTPRKLAGYTGLCPRVYQSGDRDLRGPLAKQGPRYLRWALVEAATHACTHPVYRQRYQQTKARIGKQRGAKVAQIDLARRLSEAIWHMLSRNEAFAPKGATDPLAA

SEQ ID NO: 55148 - protein, 418 aa, unidentified
MEAIYIGIDWGSRVHAVCVLGLTRERLLEQEISHDGAAIRKFVEQVLKLVDGDASRIVAAMEAPRGTMVEALLDRGAQVFSISPRQLERFRDRYSPAGAKDDALDAYVIADTLLSDRKFYRRIQLPQPELIRLRQLSRTYDSLTEQVKALASQVLEQLNRYYPQLLRLSDAWHETAWLWELFDLAPTPQRAASLHQAKVKQLLKSHHVRRYKYTEILTELSKEPLHVAPGVVDAAAEHIATLLPILRLVHQQRSACSLQIKKLLDQARKAEEDNPERPHRDAALLLSLPGMGIHNGAAMLAEASTALQERDYQSLRKLCGAAPVSKRTGGRSNRPQVSFRRACNPRLREAIYHWARVATQRDARSKAHYATLRSKGHTHGRALRGVADRLLKLLVSMLSSGQLYDPARGSARLAPGSP

SEQ ID NO: 55149 - protein, 410 aa, unidentified
MERLIDRCCGLDVHKKTVTACVRVPGANGAREQHVRTFGTTTADLLSLRDWLEAFQVTQVAMESTGVYWKPVFYVLEETAICVLANAAQIAQVPGRKTDVKDCVWIAQLLEHGLIRESFVPPAPIRELRDLTRYRKAVIQERTREANRLHKVLEDAGIKLASVASRVLGVSGRTMLDALVAGTTDPAVLADLARGRLRKKLPALRQALVGRFRGHHAFLVAQILAHLDYLDEAIEAVSTQIDTVIVPFADDLTRLDTIPGVNKRTAEVLIAELGVDMRVFPTAGHLASWAGLCPGNNESAGKHRSGRTRKGNRWLRGALIEAALSAGTHSAPGALAARYRRVMQHRGHKKAVVAVAHAILVTVYHLLARQTNYKNLGADYYDRRHAERVRRRAIHTLERQGFRVTLEPAA

SEQ ID NO: 55150 - protein, 386 aa, unidentified
MSQTTQQPSGLFYIGIDFHKHYSVFCVIDGRNTILERGRIDHKIPTAFELLIKRYPGCRVVFETTMNWHWLYEVLEAHLDHNDIVLANAYKTRIIAEAQVKTDKVDAHILAKLLRGDLISTVHIPSKSTRERKEVLRQRCFFVRQRTMLRNRIQRLLSAQHNLQLPQCSDLFGKKGISALCKLKLPDPAGLLLRQQLEVLESLKIRIAEDEATLKKMLEATPELDFVLSIPGMGPILAAVVVSEVDDISRFPSAQKLCGYAGLCPTTSSSGGKTNNGRLMRACNKWLRWAFVEAAWVSVGCSPYFGNYYKRKRTMGKKANTAIIATARLMARICWQLLTEKRAYESFPPAQKLQGQPEEKPRASSCSIKENKDFAMPKDTFPSRSD

SEQ ID NO: 55151 - protein, 342 aa, unidentified
MYYIGLDVHKKTISYCVKDASGRVHQEGKLGATRCELDIWMRTLPQPWTVAMEATIFTGWIYDHLHPHATEIKVAHPLMLRAIAAAKKKNDRVDASKIADCLRCDFLPECYMASTEIRDRRRTLRYRCLLVRQMVQTKNRISGLLMETGVTYNKRRLHKVGYFRELLASNEEVNESIRPLLRLSRDTIARLQKTERALVSSLQRDPLLAERIRRLRTVPGVGPITALTWALEMGEISRFGSIRQAISYCGLCGDERSSAEKSIRTPISKQRNKNIQFVLIEAAKLAPRQDHDLALLYEREKQKGNANRATLAVARKMVAYLLAVDRGQRDFVPAEDCRCDAA

SEQ ID NO: 55152 - protein, 341 aa, unidentified
MQIHSIGIDLGKTTFHLVALGASGKVLVKKKFTQKQLLAYTANLQTSLIGLEACSGAHFLGRALRKQGHEVRLIAAQFVKPFVKSNKNDFIDAEAIAEAVERKNMRFVPIKTDDQLDLQAIHRVRDRLVSRRTAVINQIRAFLLERGLVFAKRPAQLKTAMADVLENAEADLTPMMRNLINVLWEEWKIVDQQIEELGDELERISAADAGCTRIRKIPGIGPVVATAIVAAIGNGAAFRKGREFAAWLGIVPRQYSTGGNTRLLGISKRGNVYLRKILIHGARAAVLRIKRDRAPIGAWLDRLDARAHKNIVIVAMANKIARIAWAVLSSGNEYRPAAVPA

SEQ ID NO: 55153 - protein, 411 aa, unidentified
MNAVGIDVSKRKSTVTIRQPGDKVILAPRDYQHTQSSINELIATIKSLGGETKVCMEHTGRYYEAVASWLSAAGIFVSAVNPWLIKDFGNDSIRAPKTDKADAKKIARFTLDRWANLRQYSRMDELRNQLKTMNRQFSFYMDQKTAMKNNLIALLDQTFPGANSFFDSPARPDGSQKWVDFVYTYWHVDCVRGKSPAAFTEHYKSWCKRKGYNFSASKAEEVYHAASDLIAVFPKDDNTKMLVRQAVSVLNVTSETVEALRVKMDQTASQMPEYDVVLGMDGVGPTLGPQLIAEIGDVTRFEHRGALTAFAGVDPRKKESGDYERRSNPTTKKGSPHLRKTLFQIMEGLIQRSPQDNPVYVFMDKKRAEGKPYYVYMTAGANKFLRIYYGKVNAFLSPKGDAEAEADESDS

SEQ ID NO: 55154 - protein, 470 aa, unidentified
MQLPSPARLLGIDLGITSDHTAVVVDDAGRVRARRRARSTVASLTALEAAALAGADPGTHLVVVVEPTGPAWLPVAVFYGRRGHTVLRVTSAKAADLRRFLSRHAKSNGIDAETLARLPLVAPSGLVPVELGSAARASLDRRVRAVARLTADIGRRKNRIRALAQAMVPTIGAALSEGLNHTDLAVLERYADPRALLAAGPARLTRLIAKTSRGQLGVAKAEALRTAAAEALGLWDGDSAAAFADLAAEVASEVRLVRAAEAERACHERARNAALSRVDPAGLAASLPGFGPVGTSQLVATTGRPGRFPHASAFKAFTGLTPRANQTGQTDRKHQPMTKAGPRALRSQLLQSADTARKLDPQLAAVYHVQMTERGATHRKALCVVAARLAERAWLTLARGEPYIICDLAGQPVTPEQAKQLIAAQFTIPTEVRRRRRSSTKAGKVPHAALKAQVKSQHEAGHEATFPPQA

SEQ ID NO: 55155 - protein, 391 aa, unidentified
MQSVTSATAVATTALANDITLFGSLELSKSKWVVTINSPGSEKFSKHVVEGGDGAGLLDLISRSRAKAEQRYGVRVKAIVIQEAGLDGFWIHRLLLANGIESQVVDAASIAVDRRHRRAKTDSIDGETLLRALMAWARGERRVCSMIRAPSPEEEDRRRLTRERGTLLKERIQHTNRIRGLLSGQGIRDYNPLRRDRFERLEALPTGDGRELPPMLKAEIRRELDRIAVVTTQLAAVERARDALIRTEAEERNNPAAQLLKLKGMGPEFASLLWLESLFRSFGNRRQVAAYAGLAPSPWQSGGVERDQGISKSGNRRLRHTMIELAWFWLRHQPASALSRWFQARVGAGKGRVRRIAIVALARKLLVALWRYVAQGVVPEGAAFKAACPAA

SEQ ID NO: 55156 - protein, 309 aa, unidentified
MSTNNPVIYVGLDIGKDSLQVNLQNQNFPVPNTRPGHRKLMAQLKALAQPLLVVCEATGGYEQAIVAALHQTGIPVTIVEPARVRHFAKACALRAKTDRIDAALLAEFGRQTTPRAQTPPPPNTGALRELTRHRLQLQAMAQNVVQQARHLTLPALRQQNAALLRQLRGHLQKLQKQIDALLQQDAALQTKAQSLRQVAGIGPKTIVSLLAEMPELGKLNRAQAAALAGVAPHARESGRWQGKRFIGGGRPLARKALYMAALVASRYNPTLKIRYQSLIARGKAPKVALVALMRHLIIHLNSLLKPLAV

SEQ ID NO: 55157 - protein, 335 aa, unidentified
MYYLGIDLHKDESHVAVLDDDAEVVEEIRVTNANLDDVAEEYAGAKAALEATSNYYTVYDTLDEHLDVVVADPTQTKAIGYAEVKNDRLDAKLLAQLRRAGMIAESYVPSEELRERRALVRGRKRLVEKRTDFKNEVHALLDKHGITYDWDPFSVNGREILAGEDFSLGVVGDQLMESFLSIIDELTSQIEELESLIEDTAASLEETQLLMTIPGVSFYSSLLITSEIGEIDRFNEAKQVVSYAGLDPVVRESPDSRTEGSISKRGSGDLRWILVQCVQTAVHRCNDPYLGRFYARLKQRKNHQIAIVATARKLLVSIFHMLEREEVYDPPEVSA

SEQ ID NO: 55158 - protein, 338 aa, unidentified
MELKRIAIDTSKSVFTLHGVDAAGEVRLRKDLSRGKLLEFFAKLPPTEVALEACGGSHHWGRELQRLGHEVRLLPPQYVKPFVKRAKNDRNDAAAISEAAARPGIRAVPVKSAETQAALLVLRTRELLVDQRTQAINALRSHAAEFGVVAAKGIARVQPLLDAVAAAGLPAPAPAMLALLGARIGELDTQIATLDEQLQAMHKAHPVSQLLAGIPGVGPLTAMTLALTIDPGHYASGRHLAASIGLTPQEHSTGGKQRMGGISRAGDERLRRLLVTGAMAVIRFAKPGAKSATAWLLALLARKPRKVAAVALANKMARIAWAMMSRGEVYRRPSTAAA

SEQ ID NO: 55159 - protein, 318 aa, unidentified
MAQNGTIVGIDVSKLKIDGFIRSLQIGLSQPSTPEGEEKMIAWLQENGVQVAVMEASGGYEKRWATALRMAGITVRIVDPKRVRHFAKSAGQLAKNDPIDAKMIAWFAETFAGAVGQPHEPEHEEIDLLVTARAGLLNVQTQIENQGEHHQLPTVVKAQQAILKTIRAQIAKLDAAIAAKIETSPRLARRAEIIASVPGLGGQTVAGITAWLPELGQISNKTAAALVGIAPYDDDSGEHKGKRVIKGGRRKLRNLLYMPTMGAATQHNPVLKAYYQRLRAKGKEPKVALVACMRKLIVILNTMLAHDETWKPQARATT

SEQ ID NO: 55160 - protein, 354 aa, unidentified
MKYFAGLDVSLEETAICVVDEVGRMIKEARAASEPDALHVTLASFNLSFERVGLEACSLTAWLHGELRSAGWPAICIESRHAKAAMGAMPNKTDRNDAHAIAQIMRTGWFKAVHVKTPICRSWRSLLVARRAVLNEMRTIENVVRAILRETGLKLGTPARKDFIVRARELIAGEQTLASMIEPLLEILGTMLREFARLTKQVVTIVRDEPICRRLMSAPGVGPLTALAFRATIDRPERFRKSRDVGAHLGLTPRRYQSGETDIKGHVSRCGDELVRTALYEAAHSLLIRSKKWSSLRAWGMKIAKHRGMARARVAVARKLATILHRMWIDNAEFRFGQEHNIAPTVKAIAGAAA

SEQ ID NO: 55161 - protein, 338 aa, unidentified
MTCIGFDHHKKWTQAAAVDDQGKIIREMRVLNDNSSLKGFLKGLPQPLKGVVEAGPTWGWIYDTLTELGVKMIVANPSAVRAIAEAKIKTDKIDARMLATLLRVGLIPEVYVPTEEVRSQKMLWRERIWLVRMHVRLKNRIHRLLNHYHLEVPEFSDLFGAAGRRFLEELKLPEPGNRILNAQLKLLQSYRLQIEEVQRWAVKATQGHPNRAYLESLPGFGKVFAPIVALEIDDPKRFASPGKLASYCGLVPSLYSSGGKSWQGGIGKEGNHWLKWAFIEAAWAAIRSSAYFRVVYQRLRQRKTAQVSIIACARRLCEIAYHLLKERRCYEERPYRCA

SEQ ID NO: 55162 - protein, 354 aa, unidentified
MIIVGCDYHPSFQQIAFVDTETGELKEQRLVHREGAEEFYRALAGTGQRVCVGMEASGHARWFERLLEEPKIELWMGDAEVIRAKRGRKPKTDREDALHILNLLLTGDFPKIWVPSWENRDLRQLLWHRHRMVQARTRIMNQLQAVALNEGLLCRKKLWRERGRQQLEAFRLAPWASRRRHDLLELLDRLNPTITELSQAIEREVEKCPAAQQLMTHPGVGPLTALAFVLIIGDADRFQCGKQVASYLGLVPLEDSSGNRRRLGHITKQGSSILRFLLVEAAQVTVRSLPEWRRKYAHLMMRRGRKTAKVAMAGRLAIRLFWMMRQGWNYQQWSKFGSHAGQPGNRHGVPSNIE

SEQ ID NO: 55163 - protein, 350 aa, unidentified
MVVVGADVHKRSHTFVAVDVAGRKLGEITVKAVSEGHDKAVRWAQERFGSELKWAIEDCRHLSARLEIDLLDAGQQVVRVAPKMMAEQRRIARTRGKSDPIDALAVARAAVREPDLPVAAHDEASRELKLLVDHREDLVRQRTSTVNRFRWHLHRIDPTIDPAPKALNIAKTRTRLRALLADIDGIDARLARELLEDIDALSRRADALEKEITVLVGQQEPQLLELPGCGALTAAEIVGETAGIDRFAHEAKYAMHAGVAPIPVWSGRTRGRVRMSKSGNRQLNAALHRIAITQVRLGGLGRAYYDKRLAAGDTRTEALRCLKRRLARVVFNTLRKCPSTAAAPAYAAAA

SEQ ID NO: 55164 - protein, 411 aa, unidentified
MEHIVARCAGLDVHKESVEACVRRIEANGRVHSETRHWGTMTRDLLEMADWLEAEGVTDVAMESTGVFWKPIFNILESRFVVLLVNARHLKQVPGRKSDVRDCQWIAQLLQCGLLKGSFIPPRPQRDLRDLTRHRTQLVEAKTRTINRIQKVLEDANIKLASVASDVMGVSGRAMIQRLIGGETNPCKLADLAQRQLRGKIPDLEKALEGKLTNHHRFLLKLLWKELSQQEELITELDSKIEEHTRPHAAEIERLDAVPGVDRRVAEVLLAEVGPDMNPFPSDEHLSSWAGMCPGNEESAGKRHRKRITPGSRWLKQTLAQAAWAASHTKNTYLASQYRRLAGRRGKKRALIAVGHSMLVIYYHMLKAGTSYADLGGNFFDRLEPKRLTHYYLKRLERLGYKVSLETSDMG

SEQ ID NO: 55165 - protein, 387 aa, unidentified
MLLDHPTDGPAAIRTQFGAIFVSLELSRSTWLVTSLSPGKGEKMSKYMITAGDVAELLKLFAELKRKAQSRTGESYPIITIQEAGLDGFWLHRVLRQEGIESHVVDPASIATPRRRRRPKTDRLDGETLLRTLLAYKRGEPRVCAMVVAPTPEEEDRRRVCRERQMLIAERTRHLNRIKGLLFAQGVSDYAPLRRNRRTRLEALRTGDGRLLPAHVKAQIGRELDRLELLLEQIKQVEAEQDALVAAKADAGALATPEPVAMLLALKGIGANFAAVLWLEAFYRHFANRRQVAAYAGLAATPWRSGTIEREQGVSKAGNPRLRTTMIQLAWLWLRHQPQSALARWFKAHSQRGRKSAIVALARKLLVALWKYVTQGVVIEGAVMKRA

SEQ ID NO: 55166 - protein, 411 aa, unidentified
MRLFAGDDWAEDHHDIEVMDAAGKVLAKRRLPEGAAGMSQLHELIGRFLPEDADEVEVVIGIETDRGPWVAALVAAGYTVFPVNPLQASRYRERHGVSGAKSDQGDSHMLADMVRTDSHQLRPAAGDSPEAAGVKVVARTHKTLIWDRTRQVQRLRHQLREYFPAAIEAFEDLDAPDVLELLGKAPDPARAARLTRAQISAALKRARRRNIADKTDAILAALRGEHLTQPAALTVAYAATVRSLVAVITTLNEQAKLLEEQVKEHFGRHPDAEIYQSQPGIGAILGARVLGEFGDDPRRYVSAKSRKNYGGTSPITRASGKKKVVAARFIRNDRLIGALMSWAFASLNASPGARAFYDQQRAKGLEHNDALRRLANRLVGILHGCLKTRTLYDEATAWGHRENLPQSSVAA

SEQ ID NO: 55167 - protein, 331 aa, unidentified
MKFEEVIGIDVSKLTLDACIHSQQIFTQVPNTKKGYGKLLSWATKSTGCSMDNVLFCFEHTGMYSYALACYLSEKQMKYIMVPGLEIKRSLGIQRGKNDRVDAMRIAQYAYRRREEVTTYQLPEKAINKIRQLLSLREKLVKQCAGYEASLKDLSDFNESSENKLVVSIQRNMVKALAREIEKVEKEIDSVLDASPDIMHNYKLITSITGVGRQTALYLIVVTNNFLSFNDHRKLASYAGVAPFPHTSGTSIRGKTKVSPLANRKLKSLLSACAISAIRHDPEMKIYFNRRSEMGKHKMNSINAVRNKLLARVFAVIRRGTPYVPLCQYAA

SEQ ID NO: 55168 - protein, 335 aa, unidentified
MKKYLFHVGIDISKSKLDVVILDNQASKICNHFIIENNLKGIASILKEFKRQKVDLSTVLFCCENTGVYTFPLSCFLSENKLDYWIVPAIEIKRSKGISRGKNDKTDAKDIAWYSIRHIDKLKLTELPEKEILQLKLLFTEREKVMKSFKLFEATKENEDFMPKQIYKSIVGINSKTIKFLKATLKTIEKEMMDIISNQIQLKNQFELVKSVPGIGDKTAIYLLIITKGFTAFDNARKFACYAGTAPFEHTSGSSIKGRTKVNHMADKKMKAILQMCALVAVKHDPQLKQYYNKKKEEGKNAMLVLNNVKCKILSRVFAVINRQTPYINTYKFAC

SEQ ID NO: 55169 - protein, 309 aa, unidentified
MPTYIGIDISKSNLDAADGKKDRRFAYTSAGTAELLVWLGSWSEVCVICEATGGYEATLVTALYAAQIQVCVVNPRRVRDFARAQGLLAKTDRLDAQILRQFGEYFKPRATGVRAHPRLHALVGRHRQLTMALVSARQQDILLDEPLLRSLGQEHQELLRRQLEQIEKLIASTLQSEVTLSKPAAQLQSVPGIGVQTSAVLLAWLPELGRLSHRQIAALVGVAPFNQESGQWRGQRHIAHGRAQLRHALWMPTLVAVRYNPLLKAFYQRLRAKAKPAKVALTACLHKLLNLLNALLRDGTSWNPSRFPS

SEQ ID NO: 55170 - protein, 386 aa, unidentified
MQKLNDLSRCLTPLEPDSTLIAVVEMSLSSWLVAGIVPGVERQPLKKLAVDESVLLKLLHRWREEAEKAGYMIKRIAVAFEAGGDGFWLARWLRARDIEVHVIHTSSVAVSREHRRAKTDRLDSELLKRAFLGWLRGERDHCKMVAIPTIIDEDGKRPNRERESLVGEQSRIINRIKATLVRLGIRGFNPKLKKAAERLEGLRTPEGELIPPNTLSELYRDMERRRLVRDQIRQIESARLDRLEHAPGEGAHAMVRLLARVMGIGIETADMLVQEVLSRNLRDRRAVARYAGLTGSPDESGKKRREKGLARSGNARVRRGMIQLAWRFLLFQKDSALAQWFRARTENARGTRKTMIVALARKLLIALWRLVREDVMPDGVILRPAQ

SEQ ID NO: 55171 - protein, 350 aa, unidentified
MKYSATTIGLDIAKHSFYAVGVDKGRHEVLKRKLTRAQVVTFFRAHPPASIGIEACAGAHYWARTLNALGHDVRLIAAQHVSRRVVGNKNDYRDAQVIAELRGNPEMPFVPINTEPQQDIQMLHRVRERLVTHRTALVLQIRGLLGEYGAVFAPGVRSLRQGLAQVLGGEHLSLSASALETFADLYEQLQQLDEQVRGYDQRIQLLAQQDETVARLMAMPGIGPLNGTALLASLGTARHFRAGRIFALNLGLTPREFSTGGKQRLFGISKRGDRYLRTLLIHGARSALRCAEGKPDRLLQWALRLKEAKGFNVAACALANKLARVAWALVAHDRQYQPQGVTVTASTAHE

SEQ ID NO: 55172 - protein, 439 aa, unidentified
MGEGMEVVYPRCAGLDIHLKTVAACRITVDGRGKVAREVRTFRTMTADLLALSRWLAEGEVTHVAMESTGVYWKPVFNLLEHNFHLLLVNAQHIKAVPGRKTDVRDCEWIAALLRHGLLKASFVPERYQRELRELTRYRATLIGERAAEVNRLQKTLEGANSKLGAVITNVAGVSGRAMLDAIVGGATEGQAPALAQLARGAMRRKIADLEAALDGRVGSHQRFLVARQLAHLDDLDTLIAELDAELAERLAPHAELVERLDGIPGIGRRAAEVILAEIGADMGRFPSADHLTAWAGLAPATHVSGGKRRQAGTRKGDRALRSVLVEAAMAAGRSKTTALGTRYRRLAARRGKKKAAVAVARHLLIIAYHLIKDGGAYQEHGAGSLDARTKERTRDRLLQRLRTLGYDVTVTPQPPPVPASAAPPDVPPPRPEPDDAAA

SEQ ID NO: 55173 - protein, 343 aa, unidentified
MQAITTIGLDIAKSVFQVHGVDAEGNVVLRRQLKRRYVLAFFQKLPPCLVGIEACASSHHWSRALQGLGHRVRLMPPAYVKPYVKRQKNDSADAEAICEAVARPNMRFVETKTPEQQSCLMLHRARHLFIRQQTAVINSIRAYLAEFGIVAPVGRKGVDQLLDVVANTTDKRLPEVARACVAAFGAQLHMLKAQILEFDRLIMAWHRSSEASKRLDEIPGVGPALATALVASVADPKAFRSGRDFSAWIGLVPKQHSSAGKERLGNISKQGDRYLRSLFTTGALAVIRYAKIHGSRHRPWLTALLARRPTKVAAIALANKIARMAWAIMARGERYKEPVALAA

SEQ ID NO: 55174 - protein, 429 aa, unidentified
MSEEKSLELRISVDVGYRRHSVAMGLSSGEVLEEFEIDHRPEGFQEFFSRIEAQRKKRNCAVSVAMEGYNGYARPLDSLVRERGYRLYNLNNLKFARFKEIFPGAAKSDRIDARKGLELFQLSDHLALAKEVLQEVSGTAPENEILKRLTRRRRRLVNERVRVVNNLQADLQAVCPGLLEITGEASNQWFLNFLLSADTLPQLARLKRSTLLKIPSVGVKSAAIIEHWQKRAHFSQEVEWVSEMIQEDAKRCLELDEKIKRLQAKIAEVAKNSKIAKTLRSIPGFGAVCTSELAGEIGTIERFASEGSLSLYLGMSMLDNSSGKYQGTKAPKHVNTRAKAAMMIGVDRHRKYVPESQRYYEKKRSEGKKHNQAIRALGRHLARIIYKMLKQEREYEIRPEKGDTKAKVGPRSFVKTKIRRPKISSKETK

SEQ ID NO: 55175 - protein, 535 aa, unidentified
MLGNQGCFAEPGRRTGHILTRGLNDHRGISVTTHVDLPDGNDWLHPHQGGIFLYGFATGYSSSRIAWDLQAVPLLKYEALYFGIDIGKAKHVAGFVSSTLLERHERFEACPALAFDNSRRGFHALFERLRGLAQVEHCFVLMEKTGHYHKPLQQYLQELDIPVYLVHVQERPKGMLKTDKRDALSLANHLYSQLELGVQFSSKTQLVRRAVPSTPAAAQLKGLIRHRYELVRESTQRKNKLTAICDELFPEFVQILHDPNLPTALALRERFPTPQAIATASFTVLQEVRRKTRFLSDNKLLELQELAMNSIGIKDLVRQRSLVLEQSQLIRELRLLQEHIEQLNGEIKTIVENAREAQILASMGIGPIQVATIIAAIGSIENFPNAGSLKSYFGWAPVVAQSGKTMDQTTQTHGGTRTIKQMMFLIVTMVIRQETEWAILYQRLVQTKCPYDDRRGVRTGKLRVIGRVAGQMIETMYALLKTDAEVLSKVPQGKEPPPPFLYDPELHRKHREGHYRPLKSSPRPQVITLLPDLQK

SEQ ID NO: 55176 - protein, 355 aa, unidentified
MTSIKYIGMDVHTESTSIAVRNSIGKIVMECVIETKASTLLQFLDGLRGDLRVVFEEGTWATWLYDLLKPHVTEVLVCNTRKNAVRKGSKSDRIDARKLSEQLYMNNVKSVYHGEHGMRMMKELARSYLTITRDLTRVMNRIKALYRSWGIPCNGNEVYASRYRAEWLAKISEAAVRRRAEHYYQQLDALRPLRQEARRDLLVESRKHKIWKLLRLIPAIGPIRAAILIAVMQTPHRFRTKRHLWTYSGLGLETYDSAEYRAVQGQLERSRKQATVRGLNKDYNHDLKDIFKGAAMRASTAAGPLRDFYENLVAKGRKPTMARLTLARKIAAITLIVWKKEVRFDANYLKPQQAA

SEQ ID NO: 55177 - protein, 374 aa, unidentified
MTNVEVFFAKGKPIYVGMDVHKKDWTVHVVCHGEAIYHATVSPDPKQLIARLKSFGAKEVHTVYEAGPTGYWLHEALVSAGIDSMVTPPSLVPRIGGRMKTDRRDSIKLATMLAGGFLKRVHVLSPQQRAHRQLLGTRNQIERHRKQTQAQMKSMLLFHGKRTPVGLLERWSEAHVQWLADLEWDFPALKVSMAALVDLFRHLDKQLKAMNEQIEALAQTDKYRERVALLTQIPGMGVYSAMTILIELQDVERFHRAEQLASYLGLTPSQHSSGERIHLGEITRCGNPRLRTRFVESSWTLIRYDMAVRATYDRIKHQSGSGKKAIVAIARRLALRVRRILLDHEPYHYGDGTRPQYAKDKRRAIRRFTITRTV

SEQ ID NO: 55178 - protein, 318 aa, unidentified
MESQVSFSQVVSRGCGIDVHKKTVVATIDGEGLRKETREYGTFTRSLTELRDWLLEKGITHIAMESTGVYWKPVYHVLEPTGIKVWIVNARHIKYVPGHKTDKQDSAWICKLLLAGLLKPSYIPAREQRELRDLTRYRTKMIQHIASEKNRIIRVLEDCNVKLSSVLSNTQGVVGTKLIGKLCEGKNITMADIDEVYHRKLEASKEDLYEACQGLLTGHHIYLLQTIQKDIASTETVIESLNTRIRDMLKDYENVVENLRAVPGLSTKTAEDLVAEIGLDMSVFPTEKHLASWAGMCPGNNESAGKKKAGAPATGTNR

SEQ ID NO: 55179 - protein, 353 aa, unidentified
MQNKKLYLGFDVSSKTIEIYGRMADSDEGKNIQIKNTKASIKKFMEKLPDPGNTVIAMETGFDSPWMSDMISAYGCEVIVAHARELALIWGSAAKCDRRDAEMLARLACFDKKLLHPIKHADAESRNDLCVIKARDTLVRMKVTLINTIRDLLRSGGADVSGLTPENLTKEASKILPVELQPALNGLLTQLCHIREEVKRYDRIVIRLCKKYPATTKVRQIRGVGPITALSFVLVIGDPKRFSSAERLAAYLGLVPRRDQSGEVEKQLGITKQGNSFIRRYLIQGANYILGHFGKDCDLKTHGMKIAARGGKIAKRKATVAVARKLAGLMYTLWLNDEVYDPHYKQNHRRKIA

SEQ ID NO: 55180 - protein, 351 aa, unidentified
MSHTLNSTVTVIGIDIGKNSFHVVGLDVRGGIVLRQKWSRSQVEVRLANMPACLIGMEACVGAHHLSRKLKALGHDARLMPARYVRPYSKGQKNDFRDAEAIAEAVQRPTMKFVATKTVDQLDLQALHRVRERLVSQRTGIMNQIRAFLLERGIAVRQGRWFLRAELPRILAMPPDVLSPRMVRIISGLAADWRLLDERIEQLSGEITELAKQDSGCERLMSVPGIGPLISSAMVAAIGTGDVFSKGRDFAAWLGLVPKQISTGDRTILGKISKRGNRYLRTLFVQAAWVVLVKVKPSRWEGHGLKHWIEAANKRLHRNVLAIALANKLARIAWSVLARGRAFEANRLQVA

SEQ ID NO: 55181 - protein, 336 aa, unidentified
MSKKVTLKQCLGIDVSMKKIDCCLSFYTEDLKIKVVATSGYENNPDGFVKLREWLNRKQDNSLALHVNMEATGTYHEEAAYFLAGVGYRLSVIQPTKGKQYAKSLDEKNKTDKIDAGMLARMGLERELMPWSRPNEQLRRLKRMSRERIGLIRDRNALTNQLHALNHSFDAFRDSVERLKERVALATKQLGEIELQMRELTDSDPELSKRTKHVITIPGVNFVTAITVIAETDGFANVGNRRQLVSYVGLDVVMKESGTLSWRPHISKRGNAYIRAGLYMAAVSSIIHNKTLKTYFNRLKDNGKPGKTGIVALERKLLVLIYTLYKNGQDYSPDHR

SEQ ID NO: 55182 - protein, 412 aa, unidentified
MDVVVERCAGLDVGKDEVVACVRTPSPSGRGRSSELRTFLTFTSGLEELADWLSASGVVEVVMEATGQYWKPIWYVLEERGFDLRLVNVKHVKMVPGRKTDVADAAWLAQLLEHGLLGGSFVPPAPIRELRDLTRYRKRLIQTHTAEQQRVQKVLEDAGIKLDSVASDVLGVSGRAMLRALIAGERDPDTLAELARGVLRKKIPTLRLALRGRFRDHHATMLRVIVDHVEYLESAIADLDREIDRVIAPFSEARDRLDTITGVGKRSAECIIAEIGVDMTRFPTAAHLASWAGMCPGNNITGGKQRSSRTTNGNRWLGEILHQCADSARHTRDTYLAAQYWRLRRRMGHRKAVVAVGHSIIVISWHLLTDNCDYDDLGGDWFTRRTDTDKRRDHLIRQLHDLGYGVTLTKVA

SEQ ID NO: 55183 - protein, 368 aa, unidentified
MKHSIIFVGLDVHKDSIDIALADDGRNGDVRSYGAIGGDLDSLDKAIRKFRRSDVELRFVYEAGPCGYEIYRHLIAQGFHCDVIAPSMMPKRSGDRIKTDRRDAVTLARLYRSGELTPVYVPREDDEAMRDLVRGREDAVNATRKARQRLSAFVLRHGFRYAGRNAWTAVHLRWLADIKMPHPAQQIALQEYIHSVEESSERVDRLTEQILKLIPTWRLAPVVAALQALRGVAPVVASTMVVEIGDMRRFENPRQLMAYLGLVPSENSSGQTTKRGGITKTGNGHARRALIEAAQAYSHPARVSKVLRNRQQGLPREIKEISWNAQVRLCGRFRKLMARGKNRNRTVAAIARELSGFMWAIAREVPAA

SEQ ID NO: 55184 - protein, 350 aa, unidentified
MIVIGADTHKNTHALAAIDAGTGEVRGEREIPADEKGHRDALRWAHKLDSEVVWALEDCRHVSHHLERALVTSGDRVIRVSPRLMGESRRGERQPGKSDQIDARAIARAVLRDGVEQFPSAHLDEQAMEIRLLSDHRHNQVTQITRLTNRLRWNLVILDPALEASIPARKMDFPCHLNRVTRRLRAMKPSARVRIAKEQIRVIRDLSRQATLLERELHSLIADYRPELLAEVGCGTITAAILIGQTAGAERFATDAQFARMAGVAPIPASSGKRERHRLHRGGNRRMNHALHIIALTRARRDPKTKAYLQRKEAEGKSWMEAMRCLKRQLARHFHRLLLRPPASCYSLCA

SEQ ID NO: 55185 - protein, 350 aa, unidentified
MMIIGCDFHPSWQQVSWLDSETGETGERNLVHAAGEAKTFYGQLAGPVLIGMEATGNSQWFIELVQDLGHEVWIGDAAQIRASYVRKQKTDKRDATHILKLVVEGRFPRLWTPDREQRDLRQLVLHRHKLVMIRSRVKNELQHLAMNQGVQKKARLWSQAGQKLLRDLPLAGWAASRRANLLELMKLLDRQIAELDGALQQAAEANPQARLLMTQPGVGPVTALGFVLTIGDVSRFPRGKQVASYLGLIPREHSSGGRQRLGAISKQGNRFLRQMLVEAAHSGVRPDEGFRKQYQHRCHRKPKGVAKVAAARKLAVRLYWMLRTNIGYPEIVHIESSPMVPLVDKIRPKP

SEQ ID NO: 55186 - protein, 334 aa, unidentified
MWHIGIDLHRQSIVLAAVHDSGEVTPPRRLDCSDTVEIVAAFQELQPFRAVVEATGTYRWLYKLLSPLGTVLLAHPLRLYAMVARRSKTDRLDAQLLANLLRLNQIPLAYIPSEEYQLLRDLTRYRTTLSRQVAQANLHLRQILARENINPPYKYPFGPRGLYWFSRQDFGAVGNQGRDHALERLRWTSEQCDAVDEKLKALQPSYPQCETLLELKGIGLFTALLIIGEFGDVTRFRRAKQAAAYTGLTTRVFQSGEHTRTGHVSKQGSSWLRWVLVEASMKLVSADTRLANFYQRIRRRSGTKIARVAAARKLAEICWKRLVRWQRLRPAQAA

SEQ ID NO: 55187 - protein, 356 aa, unidentified
MLYSGVDLHRRLVVICTVDESGSLLARKSMKTQPELITNYFHQWPDDHRAVVECTTGWYWFCDLLHSLGIDVVLAHAKYLKAISYAKVKTDAVDALTLAQLLRMGYIPEAHQMPPEYRAIRDLLRQRMVMEHKRTNIIQRIHSILAQFNITKLPLSPYQTGFADFLNGCALPEEYRMTLSMYHQQCVQATEHRKQLEKYFKARLRPTPAVQLLMSIPGIGDITGSIIAMETGEIHRFADAKHYCSYCRLVPGAKDSGGKHSHRSGSKDGNQYLKYAFTEAAIKAMMFYPEIKHFAARLQRRATKAIARTVVAKELAKITYYVLTRQQEFKTFKGIEINKLRDWPRARKPVRLTGGA

SEQ ID NO: 55188 - protein, 432 aa, unidentified
MGYERIAWTSDDEAGDVTPVAGLDLGKAELACCVQRLDPDHPGRQVQQVSTWSTTTNSLTELAGELVTVGVQLVAMEATSDYWKPVFYRLEAHGLNVIVVNAKHFKHLPGRPKTDKLDSQWLARLAGKGLLRPSFVPPADIRALRDLTRDRADLVDQRTGNKNRVEKLLEDACIKLSSVVSDTFGTSGRAMMEALIAGQRDPQVLAEMALGRLRSKKNALVEALTGMFTDRHGFRLRMLLDRIDALSSDIGKLDKAIDLALEPYERQRHQLAGIPGVGRTNAAAIIAEIGVDMTRFPTAGNLASWAKYAPGVNESAGKSKGSHATGKGNKYLARALGQSAVAARLTKTFLGDRYRRLSRRIGPPKAQTAVGRSILVGAWHLLQNPTAEWIDLGPDHHTHTHNPDRIKQTHLKALEALGYNVTLTPQQKSFSD

SEQ ID NO: 55189 - protein, 412 aa, unidentified
MDQIHDRVAGLDVHRDSVVACLRHIGPRGGIARERQQFATTTAALALLAEWLEARQTELVAMEATGVYWKPVYYSLEGRFTVWLCNARHVKKVPGRKTDLSDAEWLADVAAHGMVRPSFVPPPPVRELRELTRYRKTQVDVRVAEIQRLEKVLQDAGIKLTSVASKVLTQSGRAMIEALIAGERDPAVVADLAKGKMRPKIAALTEALEGHFGDHHAVAAHRILAHLDFLDATIAALSEQIDMRTVAFESVYKLLDPVPGFDRPSIDVTVAETGADMTRFPSPGDLSSWAGVCPGNHESAGKRRRVATTPGNPWLRRTLIECARAAVRTKGSDFGAQYRQVAHRRGPNKAAVAVAHSLTELIWHLLTTGEVFRTSATTTSAAATIATTELTGSSPSSSSSASASPSPQPATA

SEQ ID NO: 55190 - protein, 387 aa, unidentified
MKYVGVDLHKHLIVLCVCVLAGGRPKVVKRARFASNDSEKIRAFFRESGPFQAVVEATAAYEWFFQLIEDLADRLVLAHPKKLRVIAESTRKSDKIDAEVLATFLALDMIPQAYRPTPRIRQHRVLVRHRCWLQRRITSVKCKLRNVLGHYNADIAGLFTREGDKYLATVALSPADRFSVQALREQLALFQRQLQEAEQQLEQFARTGPLPEREARAVLDTIEQVGQVTIDVVLSELGDWRRFRSQKAVTAFGGLDPGFRKSADKCHELHISKDGSRLLRWAVIQAAWRLTLHSPRWRATLERLHANTGSKKKAIVGVARHLLCLMFAMLQSSRPYELLGVANGNQRRPEAQGSQGGLSSRSAEFAGGSLCESGPLTTGSSSLFQER

SEQ ID NO: 55191 - protein, 413 aa, unidentified
MSVTDAPEPPRPTAGVDWATDDHAVAIVDPDGEQTHRFPVTHDAAGLRTLVRKLLAAGVAEVGIERPDGPVVDALRAAGLTVYVIPPGQLKNLRSRYGSAGNKDDRFDAYVLADVVRTDRRRLRPLLVDAPATTALRQSVRARRDLVAHRVAVANQLRAHLQIVFPGAVGLFADIDSDISLRFLERFPTQDRADWLSPKRLAAWLSSVGYSGRTLPETLHTRLRDAPTGATGPAGDTAATVTAAFVAVLRTLTTQIQALAAQIAEQLDLHPDAPIFTSLPRSGRVRAARLLAEIGDARGRFPTADSLACLAGVAPSTRQSGKVEVVSFRWGADRQLRDAICDFAGDSRHANPWAADLYQRARNRGHDHPHAVRVLARAWVDIIWACWTSHSPYDPDRHGALQRILNQDQPAAA

SEQ ID NO: 55192 - protein, 338 aa, unidentified
MNKVITIGLDLAKRVFQVHGVDEAGAVVVRRTVRRSQLVSYFSRLPPCVVGMEACATAHYWGQGLGELGHTVRLIPPAYAKAYVRRNKNDAADAAAICEAVSRPSMRFVPIKTAEQQAAAGIHKVREQLMKQRTMLINGLRGLMAEFGIVVAEGPQHVGDLVAVLADASDRRVPAPLHAGLVTMAAALAGLEQHLEAIDRQIADWGRGNQTCRHLITIPGFGPILSSAMAAVVVNPALFASGRDFAASLGLVPRQESTGGKARLGPISKRGNGYLRRLLVNGAMSVLSSKRAKGDPWLVRLLETKHRMVAAVALANKMARIAWAVMVRQEDFHFQPAA

SEQ ID NO: 55193 - protein, 346 aa, unidentified
MKYFAGLDVSLEEIAICVVDEAGAMVREARIPSEPEALVAFFQGSGLVLERIGLEACSLSAWLHESLVAAGLPAVCIETRRAKAAMGAMPNKTDRNDARGLAQIIRTGWYRAVHVKSPACRSWRALLTARRLLLNKMRDLENGLRAVLREAGLKLGTPTRKEFAARVRELTAADPGLSVLAEPLLTIIAAMTRELAQLTKRVLEIVRDEPVCRRLMGVPGVGPLTALTFRATIDQPERFRHSRDVGAHLGLTPKRYQSGETDVQGAISRCGDELARTALYEAAHSLLVRSRRWSALRAWGMQVAKRRGMARARIAVARKLATILHRMWADGTEFRWGKEGTMPAAA

SEQ ID NO: 55194 - protein, 349 aa, unidentified
MSGKDAGSYKRHRDDPTRMYPSLDLHKVYSQAVLMDTHGVVGREERIENRAENMEKFSDGLLPSTQVVIESSSTCYRVFQILCKKHRVVLANPLKTKAIASAKLKTDKVEVLKLANHLRGGYIAESYIPPSRTMELKELVRNSANLVRMKTNMKNRIHGYLLLMNSVPIDAKPFSKEFIQGLRKIDDLKVPGYLRLLESIDAEVHEAFKVVSREAADDEGAKLLMTISGISFYSALLLVSNVRDVTRFPDSNSLAAYAGLVPSMHSSGGTTFHGRITKIGSPYLRWIQGHCTRINIRNGLLYMSFTSCVFSLHKLALSAHMQPILPWILFRSVLNLAESCPNADVKTHE

SEQ ID NO: 55195 - protein, 428 aa, unidentified
MKNRNVQKLKAIIPGTLIVGVDIAKKTQWARFVDYRGLELRKALKFKNHKNGFDSILASIKEICKKRRLDNIIIGMEPTGHYWKPLTNYLLIHEVNVVMVNPYHTKRAKELDDNSQTKSDKKDALTIARLVRDGRYYEVYMPQDIFAELRVLSNSRISLMKRSNALKNTITAVMDEYFPEIVTVFKYPLKGKAAMQILKSCPFPSLILKLGIEGVLAEIKKAVKKTVGRKKASQLVETAKSSIGVGYGLVSAKLKLELMIEELELLSKQLEQLEKAMEKVLADTEYGELILSIPGIGVVTAASLLGEIGDPMRFDHPRQICKMAGYNLIEDSSGKNKSKTKISKRGRKNLRSVLYQMARTMVAVNREMKELYQYLKTRHNNPLKKKQALVVISKKIVTVIYNLIKKQTGYQAELVFNKFRKNQMKQVA

SEQ ID NO: 55196 - protein, 345 aa, unidentified
MENMYYIGLDVHKKTISYCVKDGSGRIYAEAEIPATRLDLDMWMKTLPQPWTVAMEATIFTAWIYDHLKPHAAAVKVAHPLMLRAIAAAKKKNDRIDAHKIADCLRCDFLPECYMASTEIRERRRTLRYQNLLVRQAVQMKNKIAVLLMEAGVSYNKQKLHKVGYFRDLLATNQDIDEGLKPLLRLCRETVVRLGKIESVLVRSLQRDSLLRERVERLMTIPAVGPITALTWALEVGDVQRFSSIKKAISYCGLCGAENSSANVIKRTPLSKQRNKHLQTTLIEAAKMAPRNSVDLAMLYDREKQKDNANRATLAVARKLVAYLVAVDRRQKDFLVVASENRTAA

SEQ ID NO: 55197 - protein, 410 aa, unidentified
MEPILMSCAGMDVHEKKVDVCIAHGAFDKPPKFEIRTFSTMTSDLEELMSWLKKYDVTTIGMESTGVYWKPIFNVMEGQFEIVLANAQRLKAIPRKKTDIMDCKRIANLLRYGLLPNSFIPPKEIRELRDLNRTRRKLVGMMTSEKNRLVKVLESANIKLSSVVTKIYGVSSLALIRSLLEKNKLSREEISKMAKGKLKKKVDLLEKAVNGKLTDHHRFLLEMHLQNIDYLAKQIKKLDDEIEKKMVPFQKESKLIQTIPGISEVNASAILAEIGADMSQFPDEAHLSSWAGVCPGNNESAGKKKSGKTQKGNSFLKGSLTEAAWAASKTKNTSYNAFYHNLVRRKGKKKTLVALAHRMLIDIYFVLKTGEPYQDMGADAIHERTSRRKERSMIRSLEKAGYSVTKAATA

SEQ ID NO: 55198 - protein, 360 aa, unidentified
MNSLPATVGDFYRYVVGVDTHAATHSYAIIEAPNGGLIDQNVFPTSPAGLRRAREWIARRTEGDLDGVLIAVEGTGSYGAVLSDVLQQVGYRVVEAPTPRRARARGKTDALDALLAARSSLVMPLTTLRDRRTGDLQSALQVLTGARDQQNADRLRCINALTALVRTHDLGIDARRALTGMQIATIASWRRREETLGTATARAEATRLAKQITTLERDLAENRERITHLVETTAPELLDLPGVGAVTAAVILTVWSHPGRIRNEAAFAMIAGVCPIPASSGNTTRHRLNRGGDRRLNRALNTIVLTRMRTDPATRTYIERRQSEGKTSREIRRCLKRYISRQIFRSLTVAHPVPDAAAAA

SEQ ID NO: 55199 - protein, 412 aa, unidentified
MSVTDPTEPVERPRPTGGVDWAKDDHAVAVVAPDGQQTLRFSITHDAAGLRTMIKRLLAADVAEVGIERPDGPVVDALRAAGLTVFVIPPGQLKNLRSRYGSAGNKDDRFDAYVLADVVRTDRRRLRPLLVDTPATTALRQTVRARKDLVTHRVAVANQLRAHLQICFPAAVGLFADIDSEITLRFLERFPTQDRADWLSPKRWTAWLASVGYSGRTLPETLHQRLTAAPAGATGPAADTAAAFVAVLRTLTTQIEALAARIAEQLDLHPDSPIFTSLPRSGRVRAARLLAEIGDARGRFPTADSLACLAGVAPSTRQSGKVEVVSFRWGADRQLRDALCDFAGDSRHANPWAAELYQRARARGHDHPHAVRVLARAWVDIIWVCWTTHSPYDPDKHRALQRILNQDQPTAA

SEQ ID NO: 55200 - protein, 339 aa, unidentified
MQLYAAVDLHSSNCVPVVLDEQGKRVFSKRVPNRPASAIVDALAPYREQLVGVAVESTPNWYWLERTLRLADFKVELVNTAAVEQYGGKKHSDDFSDAEHLADLMRMNRLPTAYICPEKDRALRDLARKRSQLVRQRTSQLLSAHNLIARDIGEHVTGNALKALTAGAVNAMALLADQKTALKATLAVERCLDNQIERLERAILAQTRPREDFRWLKTVSGIGDVLGMTVALESGDMTRFRTAGNFASYARMVDTARISNGKKKGSGNARCGNRYLAWAFMEAAHHAIAHDPVIRRWYQRKCAKCHKVVAMKAVAHKLARASFHVVTQKTQFDARRAFG

SEQ ID NO: 55201 - protein, 387 aa, unidentified
MAQVNDLSRSLTAFDPISTLVVVVEMSKASWLVSGVVPGVERQPLKKLEPDATALLRLIERWRNEAVRAGRPISRIALAYEAGRDGFWLARWLIARGIDAHVIHSASVAVSRERKRAKTDRLDAAMLMRVFLGWLRGERGHCGMVAIPTMEEEDARRPSRERESLVDERSRITNRMKSALARLGVRGFKPHLRKAPERLADLRTAEGTGLPANIIEEFRRDMARLALVREQISSIEKTRAERLERAPDTGPHAMVRLLARVIGIGIETADMLVQEILSRKLRDRRAVARYAGLTGSPDESGLKRREKGLAKAGNARVRRGLIQLAWRFLMFQKNSALAQWYRTRTEGPSGARKTTMIVALARKLLIALWRLVTTGEVPDGVELRPAA

SEQ ID NO: 55202 - protein, 356 aa, unidentified
MAEGTWVGLDVHARKVVAGVLDAGTGELRSWRAPVVPVEMVEWLQQFPGPVRVAYEAGPTGYGLARACERAGIACTVAAPSKIPHASGDRVKTDRRDAERLARLLRLGELVAVRVPEPHEEAARDLVRAREDARGELMRARHRLSKLLLRHGLVYDSSAWTLAHDAWLRRQRFDSRPLQLALEESYNAAMQAKARRDLLDQAIAELAGEPPFAEIVGRLCCLRGIGTLTALALTVELGDWTRFRPQSLGPFLGLTPSEDSTGERRRLGAITKTGNTHARRLLVEAAWQQRRPLRESATLAKRRQGQPAAVCSRADQSARRLHQRWHALERRGKRRTIVAVAVARELAGHCWALATM

SEQ ID NO: 55203 - protein, 360 aa, unidentified
MHATTVAVDLAKSVFQIVVADDQWRIIDPQRLTRSQFERWFVNRSVGLVVMEACGSPHHWARWLGDLGIEVSLLPAQYVRAYVRRNKTDATDAAALLEAARASDIRPVRVKSVEQQALQGLHRIRSLWMGTRTSRINALRGFCREFGITIAQGARTGVETISRVLADPRSAVPELIRHTASMLLEEIRLLETRIAQVERELASVARDSPACTLLLSVPGIGLLTATALVAATSGDVTHFQDARHFSGWFGLTPREYSSGSSRYLGRISKKGDRYLRMLLTHGARSVLRAAKVAQGAGKELQGVRRWALDVQARSNHNKATCALANKLARICYATLRDHKPFDEAARLNRKERRQSFAMPD

SEQ ID NO: 55204 - protein, 340 aa, unidentified
MKLYGAIDLHSTNNVTVVIDEQDRVVYQKRLPNDLALVLKELCVYQAELEGIVVESTYNWYWLVDGLMEQGYKVHLANTAAIQQYEGLKYTDDHSDARWLAHLLRLGVLPEGHIYPKAERPVRDLLRKRSQLVRQRTTNLLSIQNLMTRNTGSSLSANQIKGLDVQQVDELLPNGDLALAVKANLSVMCSADEQTKIVERTVTQRVKLSPQFSFLKTVPGIGQILALTIMLETGDIRRFSSVGNFASYCRCVGSQKISNGKRKGKGNTKNGNKYLAWAFVEAAHFAIQFNSKIKSFYQRKKAKTKVVVAIKAVAHKLCRACYYIMRDRVPFNITKAFGQK

SEQ ID NO: 55205 - protein, 362 aa, unidentified
MRIIGCDLHARQQTLAMLDTITGEVVNLTLKHEGNNVREFYSTLPRPVRVGIEATGSMQWFLKLMEELGIECLVGHPATIRAAEPRKQKNDRRDADLILKLLVENRFPTIWMPSQELQDLRSLLRHRHQWVRLRTRIQNALQSIALANGLRRGPALWSHEGQSRIASLPLAPHTAYRRSELQAMYEKFEAEIEKLNQRVEEQACGRAGARLLMTHPGVGPVTALATEVFLGDPARFADSKALASYAGMIPREYSSGGRQRLGGLSKQGNPLLRFLWGEAGAHAVRRDPELQRFYRRKLVQKGLGKASVAVARKLGIRLWIMLRDQIEYKEFCRRGQKQQKSSDACAGMPETPYGATSHRPVD

SEQ ID NO: 55206 - protein, 344 aa, unidentified
MQIAVIGLDLAKNVFQVHGIDDAGQAVLKRKLRRSEVLPFFAGLDAALVGIEACHTAHYWGREIAALGHDVRLMPPQFVKPYVKSQKNDAADAEAIAEAVQRPTMRFVPIKSADQQAVLMLHRTRDLLIRQRSSLISAIRAHFAEFGIVVGQGIRNVERLLALLETAGDQRLPALAAEMLGILAAQLRYVAEQVKEVEVKLLAWHRADETSRRLQSVPGLGPITASAIVATVGDPKQFKSGRQFAAWLGLVPQQRSSGGKERLGGISKRGDGYIRRLLVHGARAIVGWRKRSATHKTPWIERLLARRPTNVATVAYANKLARIAWAIMMHGNRYNPALAFATIP

SEQ ID NO: 55207 - protein, 371 aa, unidentified
MEHIRFVGLDIHKERISIAVAESGRSGAVEYLGEISNDSVAIGKLCDRLRRSGKMLAFCYEAGPCGYGVYRQLIRLGHRCDVVAPSLIPIKSGDRVKTNRRDATMLARLHRAGELTPVWVPDADHEAMRDLIRLRSVVRQIVTRARQHLQGFLLRHGRKHGRGIAWRMAYRRWLSTLAFEHPAQQVAFQDYVDAVMDAERRLQRVGEQIFSLLPEWNLRPVVDALQAMRGIALINAVVLVAEVGDFTRFSNPRQLMAYFGLVPGERSSGETIRRGGITKTGNTHARRALVEGAWAYRMKARIGRHKVDRIDALPKIIRDIGWKAQVRLCTRYRRLRARGKTANVVNVAIAREMVGFIWSIACTIQSAPKTA

SEQ ID NO: 55208 - protein, 387 aa, unidentified
MAKVDDLSRSLTALDQGETLICVVELSRSSWLIGGMVPGVERQPLKKLEPDAPGLIRVIERWRDEAIRAERMITRIVLAYEAGRDGFWLARWLRARGVEVHVIHSTSVAVSREHRRAKTDRLDTAMLMRVFLGWLRGERGHCSMVAVPTIDEEDAKRPGRERESLVGERTRIINRMKAALARLGIRGFKPELRNAPARLETLRTPEEVMLPPNTLGEIRRDMARLDVIREQIKTIEQARLESIGRAPDQPAHAMVRLLARVIGVGIESADMLVREVLLRGFRDRRAVARYAGLTGAPDESGAKRREKGLAKSGNSRVRRGLIQLAWRFLLFQRNSALARWYVERTSGIKGARKTTMIVALARKLLIALWRLATTGLVPDGVVLRSAV

SEQ ID NO: 55209 - protein, 324 aa, unidentified
MDVHKNYSYAAVVDELGEIKEEVRIENTKESLEQFASKYKGAKAVIEATNNYRFIYDILEKYMNVKLAHPYKTRAIAEARIKNDKLDAKMLAHLLRANLIAESYVPPKEVRELRDLTRTRKALIEDRNRLKNRVHAILSRNGIIDYPNPFTKKGREYLEDLDLPEIDREILNSYLSIIDGINEEIKKIDRIIQEKAKEDDDAILLTTIPGISYYSALLIKAEIGDINRFPNKFKLISYAGLCPSIKQSGNKEIRGHITKQGSRMLRWILIQCANVAIRHDDYLRNFYLRIKRRRGHNIAIVATARKMLVCIYYMLKRKEVYNPR

SEQ ID NO: 55210 - protein, 340 aa, unidentified
MPLYGGIDLHANNSVVVLLNDQDQVIYQKRLPNHLPTILEPLNLHHGELEGVVVESTYNWYWLVDGLMEAGYRVHLANPAAMQQYSGLKYTDDPSDARWLAHLLRLGVLPEGYIYPKTERAVRDLLRKRAHLVRQHTANILSVQNILARNTGARFSGKRIQELTKQELTTLLADETQVLAVTSSLVVLDCLRQQIKTLEKTVHKHLHHTPSYEQLLTVQGIGAILAQTITLETGAISRFPSVGHYASYCRCVDSAKISNGKRKGTGNVRNGNPYLAWAYMEAAQFALRFQPEAQRFYQRKLAKSRNNTILARKAVAHKLARACYYLMRDCVPYEATKTFG

SEQ ID NO: 55211 - protein, 380 aa, unidentified
MSPVTTHAREFTSTTPVLHLAFELADLRWKLAFTPGLGQRPRVRTVPARDLDAVRQEITRALARFDLPATTPVVSCYEAGRDGFWLHRALTAMGIANQIVDSASIEINRRLRRAKADRLDAEKLVLMLGRATQGDPRVWRVVRVPSEADEAARQLSRELDAVTHDRTQVLNRMHGLLTTEGVHLALTGDVPAALPALRRWDGTPLPAELLERLARDWRQVEALTARRAALQAQRRRDVTTGTTPAHAQMRQLAQLSAVGMATATVLVREFFGWRAFRNRRQVGGCAGLTATPFQTGGTHHEQGISKAGNRRVRTVMIELAWGWLRYQPQSELSAWYQAYVGTGGPRHRRVGIVALARKLLIALWRYLETGTVPAGARLKA

SEQ ID NO: 55212 - protein, 397 aa, unidentified
MIAVGIDISKAKSTVAVIDSDGTVLASPFTMAHTQPEMEAFVTYLKGLGEPTTILMEYTGHYHYPVLKKLQDEGFPVCIVNPYQMKKYGDVEIHKAKTDKKDALRIAAYALEKSYKLVPYSSMEQKYEDLKFLSRQYSQRITYVAKLKVQLIALLDQTMPGITRILPLNSRNPEKCALLLFIKRFKSFDEIQRIGKARFLASYDVLAKKTSERSASSKGLSIYELAVDSITTRGEDPYIWLSQNQCVDLLSTTQNAADEIISQMRNIAETIPEYKVLRAMRGVGDRLGPIILAEIGDIRRFHSGKALNSYAGNDAPPYQSGQFESRNRHISKRGSSALRKACYEVMQALKLTKPQDDPVYLFMLKKEQEGKPFNVAKMAGVNKFLRIYYARAMELYK

SEQ ID NO: 55213 - protein, 323 aa, unidentified
MQGKVSFQEDAMPVFYAGVDVSKEWLDIHLHPLGESRRFCNDKTGIRQLKRLLARHRLASIVMEATGKFHRPAHRSLWLDGFAVAVVDPLRARMFARACGYLAKTDRLDARFLALLAESLRPPADTPPSPHVEALQELVNARSAAKCDITALQNRSKTATTALLRGELNRLVRRLEQHVERLDKEIERRVGEDPQLYRKAEILTSIPGIGRVTALALMAGMDELGSCSGKQAAMLAGLAPIANDSGARTGRRSIRAGRPAPRRALYMAALSACRYNPALARFADTLKAAGKPAKVILVAVMRKLLVLANCLLSHDRLWTPNPP

SEQ ID NO: 55214 - protein, 347 aa, unidentified
MSVYVGIDVHRKRSQIAIAGEDGKVAVNRNVVNGSDAMRRLTGSLPAGTPVAFEAAYGWGWLAAMLEEQGLELHMVHPLRCKAIASARLKNDKVDAAILAQLLRADLLPEAWIAPPEIRDLRALIRHRVSLVRLRTRMQNRIHAVAADHGHDRPASYWTGPGRAWLQGLDLPPVARSLIGSCLAVIDDLGPQIAAADAQLRGYARSDPRVPVLTALPGVGPFTDLVIIAETGDITRFPSARKLASWTGLTPTVRGSDLKVRHGHISKQGSPVLRWALNQAAQTTRRHPDFAPAWNTIAARRGPKIATTAIARKLACRSWHLLTEHAASQPPPAGTATANPPPARIAA

SEQ ID NO: 55215 - protein, 352 aa, unidentified
MNKILRNLDKEEEIFIGLDIHKKRWHLTIRTTDVELFSGSIPGKWNALKAQLEKLNNWPVKAVYEAGYSGFWLHDNLIEYGVECIVTPPSLIPLEYGNKVKTDRRDSGKLALLLAKGLLKRIHVPSQEECYHRQVVRRRRQLVRDRVRIQNRIKAELQLYGIDLPQPTGKWSRVYLENLSRIRFGDHWMQQSFNTLLEQYLFYDNLISRQTALVKELSEKSQYKEKVKILCSIPGVGILVAMEVLLELLDVSRFQRADQIAAYVGLTPSQYSSSDKIRMGRITCIGKNSLRALLIQSSWQLIRKDGAMQAKYEKLKARSGGKRAIVAIARTLLIRIRRLLLDNMPYAVGVIR

SEQ ID NO: 55216 - protein, 368 aa, unidentified
MKVTVRYVGLDVHADTIVIAVAEEGRAAAKVLGTIPHCWKALYTRLKALATKGKLLICYEAGPTGYVLYRKLLSAGFEVQVIAPSLIPQKSGQGVKTDRRDAAALAHFLRSGDLTQVWVPDEACEALRDLSRAREAAKKTELAARQQLGKFLLRHGRRWELSTWTKKHLDWIRGQKFEYAAQNRVLADALRAVEDATARVERLEIDLEELAPQVQHLWPIIRALQAVRGIAFVSAVTLISELGDLKRFGSARQLMAYLGLVPSEHSSGLTQRRGSITKSGNSHARRILVEAAHHAPRPTTTSKILRQRQLGLAPEVIRIANKAQQRLHRRFMALYQKGKSKPKVVVAIARELAGFLWAIAQQPQLLAA

SEQ ID NO: 55217 - protein, 404 aa, unidentified
MDVVYSHVCGLDVHKKTVVACILTPNEKEIRTFSTMTDDLLQMVDWIKSKGCTHAAMESTGSYWKPVYNLLETEEIQTLVVNAQHIKHVPGRKTDVKDAEWIASLLRHGLLRGSFIPPRDQRELRELIRYRRSLIDERARETNRIQKVLEGANIKLSSVASDILGKSARSMLEALIAGNEDPEALSELALRRLKNKKQDLQRALKGLIGPHQRLMLQTQLRHIDELDRLIQQLDEEIKRRMLPFEEALERLDTIPGVARRTAEQIVAETGTDMSRYPSAAHLCSWAGLAPGNNESAGKRKSGRTTKGNPKLRRALVEAARAAARTKNTYLSSLYHRIAARRGANRAAVAVAHRILVIVYHLLKDKQNYNELGPQYYEERRREQIAKQALRKLQSLGYNMKSECE

SEQ ID NO: 55218 - protein, 355 aa, unidentified
MHKITSNFAGQTIYVGMDVHKDSWNLGIHLNDMFVKNVHQKPNPSVMANYLRKQYPGARYKAVYEAGKFGFWIQRQLTSLGIECLVVNPADIPKSQKDTLQKTDLRDARNLGLRLQSGVLNGIHIPDEQQEADRVFFRHRKRIWKDLTRCKNRIKGSLAFSGIDIPEQYDNASWSHNFINWLKALDCRQVSRRAALNYMISHMEFLRRELLSISTAIRKMMREQRYKTNYYLLRSIPGIGPLTAASLLVEIGDVKRFPDFYHLNSFVGLLPMEHSSGETESKGTLTVRRHRQLRSDLVESAWTAKRTDPAMALYFQEQVKRKDSKIVIIKIARKLLNRIRFVLLNQQPYEYGIVK

SEQ ID NO: 55219 - protein, 386 aa, unidentified
MARKRTLSTLDTSIAYAVGLDLAKTDVALAAFDSDHKEPYLIDRIPYDKLYELLANMAPTLVAMEPCSGAHQIAEQIQELGHEVMMISGRHVQAWVKDHCNGQKTDLNDAFAILNLAYDRWLTPIRGKTREECRLLALQASYRQLKGQRTKTMVHVKATLHAWGFPIRAGSFNQKALHELIDANREAFGDEVVETLHLMINRVHDLDHDIATVLKLLTEATQRDPRASLLRSIPGFGVLTTSRWCAVVGDIARFDSPKQTMAFIGLVPNNRITGHHTETSSGREARGQGKMSKRGDKMLRSLCILGAGALCLMVRNDRLPDCPFVASIKERLASPRPWFKVLVYVAAKLVRIATALLKYGETFSFEKAGISKAVLKQWELEKAKAA

SEQ ID NO: 55220 - protein, 318 aa, unidentified
MVPLEAILERCAGVDVHQDNLVVCFLSGSLDKKPTKEFETFGTTTKELLRLQDWLEERQCVEVAMESTGVYWKPLWNILEGNCKLTLANPERIKNVPGKKTDYNDAEWIAQLHRCGLITQSFVPDEPIRDLRDLTRYRKKLIQNVTQEKNRIHKILQDANIKLTTFITDIFGVSGRKLLDSIVDGEVLDEKRIREMVSGKVKSKVPDLIDALNGRLRLHHRNMLRRHLNHMGYLQEEIQTLEAEIETLISKYDEEMKLLVTIPGISHDAAASIVAEIGTDMTKFPTEAQLSSWAGVCPANHISNGKKKVKRTDEEIEG

SEQ ID NO: 55221 - protein, 349 aa, unidentified
MIARPDAACFVGIDLHKDTLTACVLRGRDREVTYKKLACKCRDQIRSFFASLPQPSAVAIETVGFYRWLWTELEPLVGQLVLCDARGARALAGRRIKTDREDALNVALLLADGRLPLAWAPPENVQVLRNWTRHRNGLTRQHAKVLHHVKSTLNRLNFLGPVRLDAAALQRYLLAGVERFTADDLTMLWQHQRRLVEIEQDRAQSERRISELMRAPEFSRLREILESVPGVGLVISATVIAEIGDFSRFPDSKAIGRYAGLTPTVYASGNSSRLGHISKTGAPDLRWVLQQAAWTAIRCDAGFKKTWLRIAKTAGKKAAAVAIARKILVLMWTLQRKDEPYKSRDPVAA

SEQ ID NO: 55222 - protein, 422 aa, unidentified
MNTERIDSGEIAAFVGIDWADGEHEVCLMVADGGPPERSCLKQSPEALSEWAHALRDRFGGRKIAVAIEQRKGPLIYALMSYEWLVLYPVNPKSLARYREAFSVSNAKCDQTDAELLMEMVRSHRDRLRVWLPEDEDTRLLQMLVEERRRVVDQVTRLTNRLTSVLKEYYPQALEWAGELKSEQALDFLSKWPTLEDLKRARAATVEKFYHQHGVRNKEKLQGRLAGIGAARHLTRDRAVVRASTMKMRVTVEQLRVLLKATREFDVQIEELFEQHPDASLFKSFPCAGKVLAPRLASAFGTDRQRWDDAAEVQKFSGIAPVTRASGQTRVVEKRRACPKFLRQTFMEYAAQSVKKSLWARCYYTAMRAKGVKHRAALRALAYKWIRIMFRCWKERIAYSEEAHQAALVRANSPLASRLAGA

SEQ ID NO: 55223 - protein, 379 aa, unidentified
MKAITLYIGLDVHKDSITIAIAQDGRQGEIRLYGTITNDLHALEKVLAKIRKPHPKARLEVGYEAGPCGFGIARRLKQLKTPCLVAAPSLIPKKPGAPFKTDKRDARSLARLLRAGDLTAVYIPEPTDEAIRDLCRARTDAVDDLRRCRQRLKSFLLRHGYRYQGKANWSQPHMRYLRELVLPHPAMKTILEEYLQGIDAAHERVGRVEASMLALLEDWRLKPAVDALMAFRGFQLVAAMITVSELGDIHRFDHPRQLMTYLGLVSTEHSSGPKQHLGGISRCGNGHARWLLVECAQHYALPPKVSKDLSRRQQGQPAAVRALSWKAQNRLHLRFMRLHARRLLRNKIKVAVARELCGFIWALLRTCDCYRAADGGATS

SEQ ID NO: 55224 - protein, 346 aa, unidentified
MNYVGIDLHKKTIVLCVMNHDRKILCRRTLACCDPEAIAAVFRGLRPFRAVVEATASYDWLVTLIEPLADRVVLANPTKLRVIAESAKKTDRLDAQVLAEFLARDMVPEAHRPTPRQREHRALVRHRQFLKRQATALRNKIRRVLADSNADRRDLFTAAGWAAALAQVARDTDRFVLGQLRAAWEAVGAQVREVNRRLKAFAQAAPPREAEARAVLASAIGVGPVTTDVVLSELGDVRRFRSQKAVTAYAGLAPRVRQSGGKGKDLGITKAGSPLLRWALVEAAWRAVRHSAAWRRVYEGIKRRAGGKKAIVAVARRLLGVLYALLRDGVRYDPLKVGAPPPRPAA

SEQ ID NO: 55225 - protein, 509 aa, unidentified
MTDCSMAKPAHITGRSISANCLAASMVGKKGVTNYGTFLFFMFRECPFGSLSCHKFLSVRLPTKEFYFMKKLRVNTAGIDIGSKKIFLAVEGEPVRSFETFTEDFRHARDYLLSKGIETVAMEATGVYWVILYEMLEESGLDVWLVDGRQTKQVPGRKTDVKDCQWIQQLHSYGLLNRCFVPDEQVKEIRAYQRMREDHIRTAAMHVNHMQKALTEMNIRIKEVISQIHGASGIAIIKAILEGERNPEKLLSLCHKSIIEKKAHLVLKALEGHYTEAGLFALGQAYQAYLFYQQQISACDKKIQEAMEQANNYHQDKGIRDDIESAQGRKPVRHNKPQVDHLGGHLLKIFTGKDATNLPGITDYTWLQLYAETGSNLLKWCTEKHFTSWLGLSPGQHESGKKKNTRNKKYRPKAGQIFRQIAQSLIESKKIALGAFGRKLKAKRGAGIAVKATARKLAVLYWRLMVKGLDYTEKGIKDYEQKVNLQKERWLSKAAKEMGYQLVANQYVE

SEQ ID NO: 55226 - protein, 338 aa, unidentified
MHITTLGIDVAKNVFQLHGVDARGRAVLSRRVTRSQLVHAVASLPPCVIGMEACGSAHHWGRAFAQLGHTVKLMHPKYVKPYVKTNKNDGRDAEAICEAVSRPTMRFVSIKTVEQADLQAVHRTRSLFVKHRTAVINQIRGLLAEYGLVVAPSPEKVRPTLVRVLDDAESGLTACARETFSELYEQLTELDSRIERVTHRVERVYRAHPVCQKLAAVPGIGPLTATALVATVGRPQAFRNGRHLAAWLGLVPRQYSSGGKERLGGISKRGSRYVRTLLIHGARAVVQRAERRTDTQGRWLCALKHRKGTHVAAVALANKNARVIWALLAHDEEYRSPA

SEQ ID NO: 55227 - protein, 391 aa, unidentified
MVFAGIDVAKDKHDCFIVNSDGEVLFDVFAIPNNMKGFEDLLFKIKGVEKNVDNIKVGLEATGHYSCNILGFLKNKGLTTIVINPLYTSLSRKSISLRKTKTDKADAHTIASIIMSDVSLKPYSDQLYHNEDLKSLTRYRFDKVAQRAKLKQSISRLVNILFPELETLVSTLHGKAIYELLLEFPSAQHIASANLKHLTHLLNTSSKGRFKRVTADEIREAARQSIASYLPAKSLELKHTIKLIRELTLEISEIEDEIKNIMDAIGSPILSIPGIGQNLGAMIIAENGDFSRFDNADKILAFAGCSPSTYQSGQLYSPHAKMEKRGSRYLRWALINAARFVCNWEPTFAAYLAKKRSEGKHYYVALSHAAKKLVRVLYHLEITGELYRPAN

SEQ ID NO: 55228 - protein, 392 aa, unidentified
MRISVGIDIAKEKHWVTVLDADGAVQIDHELRNTPVEIASLADRLAAFGGTVRIGIDVIGGIAGLAEAMLAQAGFTLVHVPGLAVNRARQGTVGGENKSDPRDVRAIADQVRTRSDLRPVEPATEIDLEIRLLAGRRRDLVEAQTQRLARLHDLLVGIFPGLEACLDLKTKGPLHLLTLYVTPAELRAAGRKRLVRHLQAAGGLPNPDALADRALAAAVEQAFAVPAERMTARLIRELAAEALASRARLLEVDRELEALLERHPDAALIRSLPGMGVVLTAELIAEAGNLSRFRSADALASAAGIAPVLRQSGRTRFLRRPNGGNKGLKRIFYQSAFCSLGHRDSRAFYDRKRREGKRHHQAVIALARRRVNVLWAVVHSRTPFQQGFKTAA

SEQ ID NO: 55229 - protein, 438 aa, unidentified
MQVVYRRCAGLDVHKDSITATILVFPEEGERQVRTQEFRTYWKDLQRLAQWLRSSLVECVAMESTGVYWKPVWNILEKTLKLVLANPYQIKNIPSQKTDRRDSVWIADLLAHGLIKPSFVPPPEIRRLRDLTRLRVQVTGEHTRVHNRIHKVLEDANIKLDTVLSDLLGVSGRAMLRGLIQGRTDPGWLADYARGSLRGKREELELVLRGRVTDHHRYLLAELMDELEFLENRLARLDQQLSTCMQPFQAQVERLCGIPGVDLLTAWTLIAELGADMSVFPDAAHVASWAGLCPGNRESGGKRLSSRMKKGNRWVRRALCQAAWAVTRKRDCHLTALFYRLTARLGVKKAIVAVAHQILVTAFSILRDQSEYRELGGDFFDQQHPQRTQNRLVRRLERLGLQVVITPAKPLPDPAAPVRPRGRPCKCLERGIACKHKG

SEQ ID NO: 55230 - protein, 362 aa, unidentified
MRIIGCDLHARQQTVAMLDTKTGELVNMTLTHEDNNVREFYSKLPRPVRVGIEATGSMQWFLNLMEELGIECLVGHPAVIRAAEPRKQKHDRRDADLILKLLVENRFPAIWLPSAELLDLRALLRHRHQWVRMRTRIQNALQAIALANGLRRGSSLWSQAGQDAIASLPLGPHTAYRRSELQAMYVKFETEIEKLNQRVEEQASERAGARLLMTHPGVGPITALATEVFLGDPARFADSKALASYVGLIPREYSSGGRQRLGGLTKQGNPLLRFLWGEAGAHAVRRDPELKRFYRRKLIQKGFGKTSVAVARKLGIRLWIMLRDQIDYNEFCRRGQKQQKSSDACAGMPETPNGADSHRPVD

SEQ ID NO: 55231 - protein, 460 aa, unidentified
MGAKARLSRKSGRAVREAAKLDTLEQINLNAAGLDIGAEEIYVCVPEGRDAETSVRVFGTYTAHLCALADWLERCEVDTVAMESTGVYWIPAFEILEARGFEVYLVNARQIKNVSGRKSDVLDCQWIQQLHTYGLLRGSFRPEAEMCALRAYLRHRDSLIRYRSAHIQHMQKALQQMNVQLTQAVSDITGVTGMHIIRAIVAGERDPQVLAQHRNPRCVKSKQDIAQALTGNYRTEHVFALKQALELYDFYTQQIVACDAEIERQYSAIKPQVDVEATPLPPVTKSRSKSAPTFDACTQLYRVSGVDLTQVDGIDEALAQEIISEIGVEMDPWPTVKHFASWLRLAPRNDVSGGKVLRSTTGKTGSRASQAFRLAAQAVHHSDSALGAFYRRMKSKYGAAQATAATAHKIARIVYHMLKYKEEYVDSGAAYYEERCRERAIKNLERKATRLGMKVVPIIA

SEQ ID NO: 55232 - protein, 355 aa, unidentified
MTSTKYIGMDVHKESISIAVRNDAGKIVMECVVETKASMILQFIDGLRGDVHVTLEEGTWAAWLYDLLKPHVTKVVVCDPRRNALLQEGNQNDRVDARKLAELLHNNQLRSVYHGDHGLRTLKELVRSYLTITQDLSRVMTRVKAIYRSWAIPCTGKQVYAPRHRAEWLAKINEPGVRRRAEFYYQQLDALRSLRQEVRRELLAESKKHQAWKLLCQIPSIGPIRAAVLLGILQTPHRFRTKRQLWAYGGVGIETSSSADHHVVKGQLERKKKQVEIRGLNRNYNHDLKNLFKGAAIVAATKPGPFAEFYAELLAKGMRQEMARLTLARKIATIVLIVWKRGVSFDAQHLKPQTA

SEQ ID NO: 55233 - protein, 415 aa, unidentified
MSRFNKIVYPICCGMDVHRDFLIACVASTNDVGVTTYESKRFSTFAGSLRDLCAWLAACNCKDVCMESTGKYWFHIHRALEKSCNVVVTHPKFVKAIKGKKTDKKDAQWIADLFKHDFVRGSFIPPEDIRSLRDLCRYWCKLTSYTTGEKNRFQNCLTVSGFKLDAVFTNVFGKSASAVIEQLLAYPGQELDVRQFVDGRCKTPVKEIQAAVDGEFAPEQADKLRIIRSHMDFLEELKRRLEIAILAIADKYPAHMELLLTVPGIADRLTAARIIGEIGVNMSVFETSKHLTSWAGLTPQNAESAGKKKTTRIGKAGIYIKPLLVQIAIAASRSDKYPELKLKRLILKKRRGGKKATIAIARRLLTAIYHMFARGVEYQPFVTADKPPKLRHLTPQQALKLVAKMGYTITELETA

SEQ ID NO: 55234 - protein, 342 aa, unidentified
MKDTIIGVDLAKRVFHVHGATMAGQLMFRRKLSREQFRSFMAEQLACVVVFEACGSASYWAREMEALGHEVKLIAPQYVRPFVKRQKNDAADAEAIVTAARQPNMRFVPPKTEGQQAKAVLFRGRERLVHQRTELVNALRGVLYEFGHVFPQGLIHLNLIEELVKNPACDLPMLIIEECQDMLRQIAAKTEQIEAKTKKLKALAAETDAARRLQTMPGVGPMTALAIEAFAPDMAQFKCGRDFAAWLGLVPRQHSSGGKNRLGRVSKAGQADIRRLLIIGAMTQIMDRARHKIPADSWIGRMLARKPRMLVGIALANKMARQIWAMLVKKEDYRNPAIADAA

SEQ ID NO: 55235 - protein, 475 aa, unidentified
MQVVYERCAAIDLHKKTAVTTIMITHPDGRVEEHLRTFSTMTSDLLALDDWLRSHGVEVVAMESTGIFWRPVFNLLEEGRTIILVNAQHMKAVPGRKTDVKDSQWLADLLRHGLLSASFIPPAPIRQLRDLTRYRKTLVQERAQEINRLQKVLETANIKLASVATDVLGKSGRDMLDALIKGSQDPDALAELARGRLRGKLPALRLALEGRVEPHHQFLLQQILAHTDFLEQSIEKVQQEIDDRLVAYQDAVTLIQSLPVQLQAGAATVIAEIGVDMTCFPSDAHLASWAGVCPGNCESAGKRKSGKTTKGNPYLRGVLCEMAWIVARMKDNYLSAFYHRIARRRGKKRAIIAVAHKILVIIYHMLKDNKPYQDLGADYFDQLDADRIEHRAVQRLEQLGYNVTLSKEDGASHPKEPEGTDTKQKTTSKTSRLKAADTSPKPKAASKTLKQQAHDIIANKTTQKEVLNKTSQALA

SEQ ID NO: 55236 - protein, 370 aa, unidentified
MRKSIMYVGMDQHKESIEIATAEEGRNGEVRRYGRIDGETESLDRVVRKLVASGKELRFVYEAGPYGYHLYRHLRRQGLACKVVAPSMIPKKSSDRVKTDRRDAVNLARLERAGELTAVYVPQLEDEAMRDLSRAREDAKRAETRARQQLLALLLRHGLKYSGKTAWSQLHLRWLARIKLPQPAQQIAFQEYVEAISEAAGRVERLTTQIRTLLPEWRMAPVVEALQALRGVSLVTAVITVAEIGDLTRFTNPRQLMAYLGLVPSEHSSGPRRRLGAITKAGNSHLRRVLVESAWAYRLPARVTPIIRRRQEQLPKAVCDIAWRAQLRLCARYRRLTTRGKTKQLVVTAIARELVAFMWAIAREVEVTSA

SEQ ID NO: 55237 - protein, 373 aa, unidentified
MNYSTVYVGMDVHKESFSLCCYTNENEKSEYPQNVDAHYSKIINYIEAMRFHYGDDAAFICGYEAGCLGFTLYHQLASHGIKCVILAPTTMLKPQGKKKVKTDKRDAVLIARCLAHHDYSAVHVPTEKDEQTKEYIRMRCDHKTALKKVKQQILAFCLRHNYRYEDGSNHWTDKHLKWLRSLKPEGLYGEILQEYLLTYDTLSDKIERLDKRIEELAADDVYKENVHKLTCFLGIKTQTALSVITETGDFKRFASAQHYASYLGLVPGEDSSGDDQNRLGITKAGNRHLRMLLIEASQSYSRGQIGYKSKTLKQRQSGNDPAIIAYADKANERLRRRYYKLVLGKSKKHNVAKTAIARELACYIWGMMTENIA

SEQ ID NO: 55238 - protein, 345 aa, unidentified
MPIVGGLDIHRKQITFDYLDTVTGEVNRGQIAPADREHVQAWLARFAGRGDAAFAVEGCAGWRYVSEELAAAGIAAHLGEPADTAALRGRKRHAKTDKTDARHLRTLLAEGRLPECWIPPAHILEYRALLETYHDLRTAHTAWVQRIHAVFFHQGAPPLSDGALRTEAGLAKLRAAAAAHLPAAGQQQVATAVDMIAATEARMGPLRRQLRDAAAHLTGAKVLAARLYGVGPFTALALTCWLGGADRFSSSRKAVRFTGLDITVHSSDRKGPPGRLSRQGPPVLRWAVYEAGKTHARTAAPDHACYAQVKDRKNSKRACLSEARKIVRQACHILTELGDDALTAA

SEQ ID NO: 55239 - protein, 368 aa, unidentified
MKQVTTYVGIDAHKKDLFIAMLIGNQTTPVTWQLANEPQAVRRLVRKLEREAPGPVQVCYEAGPCGYALQRQMTTARVTCQVIAPALIPRKPGERIKTNRRDARKLAELLRAGLLTEVRPPTPEEEAVRDLCRARDDAREDLQRCHHRLGKLLLRRGLHFSGRNWTQAHRRWVDGLEWTHAAERVVVDDYWLAIDHLAARLIELDARLTEIAQAEPYREPVGWLRCFRGIDTLTAILILAELHDFRRFQSPRALMAYLGLVPGEDSTGEKHRRGRITRTGNTLVRRLLVETAWHYQHRPGIGVALTRRRKGQPRHVIAIADKAQQRLCRRFRKLAEEHEPAPKIAVAIARELAGFVWAALQPGAMAVK

SEQ ID NO: 55240 - protein, 327 aa, unidentified
MSKKRNKVCGIDVHKRFLVASILDNEGNCETKRFEQDLDELISLKNWILDSGCESVAMESTAEYWRPAYGILNPEINITIGNAYHMKGIPGKKTDVLDSQWIAELELNNLITPSRVFTGDLYELRTLTRARNKMVNNSTVFKNKILHQLDVCSIRLCTVLKDVFGKSGYALLKGIVERKTQDEIIKALPAKTRKIAPVFFEQIPEYIPDSAIFLIDSMLKIYDNLQVEIKRIEERIKFYLKDKENELRILMSVPEIGIIIGSNLLAEIGDIHDFPTADKLVKWAGLTPSVYQSANTNYTGSSRNMVPIIFDGLLLKLHTLRLEDQGN

SEQ ID NO: 55241 - protein, 353 aa, unidentified
MPRSTSLSVATMGIDIGKNSFHVVGLDQRGAIVVRQRWTRSQIRARLANMSPCLIGMEACVGAHHLSRRLHSLGHDARLMPAKYVKPYRKGQKNDFRDAEAIAEAVQRPTMRFVATKTADQLDLQALHRVRARLVSQRTGIINQIRAFLLERGIAVRQGLRFLRAQLPEVLGKRTDVLSDRMVHVIEDLAADWRRLDERIQGLSGEIEIVASQDPGCKRLMTVPGIGPIISSAMVAAIGSGAVFSNGRDFGAWLGLVPRQISTGDRTILGKVSKQGNRYLRVLFVQAAWVVLIKPQIWERYGLKQWITAAKRRLHPNVLAIALANKLARIAWAVLSKDCDFKCEKTDEMPRCA

SEQ ID NO: 55242 - protein, 321 aa, unidentified
MEHTRFVGLDIHKERISIAVAESGRSGAVEYLGEIANEPSAISKLCDRLRRPGKPLAFCYEAGPCGYGVHRQLTSLGHRCDVVAPSLIPTKAGDRVKTNRRDATMLARLHRAGELTPVWVPDADHEAMRDLIRLRSVIRQIATRARQHLQGFLLRHGRKHGRGTAWRMAYRRWLSTLAFEHPAQQIAFQDYVDAVMDAERRLKRVEEQIFSLLPEWTLRPVVDALQAMRGIALINAVVLVTEVGDFTRFSNPRQLMAYFGMVPGERSSGETTRRGGITKTGNTHARRALVEGAWAYRMKARIGRHKVDRIEALPKDVREIG

SEQ ID NO: 55243 - protein, 343 aa, unidentified
MKVTTIGFDLAKNVFQVHGVDERGHVVVRKQLRRDQVAIFFGKLPACLVGMEACGSAHHWARKLQGFGHCVRLISPQFVKPYVKSNKTDAADAEAICEAVTRPNMRFVPIKTMEQQAVLSVHRVRQGFVKARTAQANQIRGLLTEFGLVVPQGIANVMRGVPQLVDAATDLPAPMRQLVARLLENMKVLDRQVKELEAQIKAWHLGSELSRKLEKIPGIGALAASALVASIADARSFKNGRQLAAWLGLVPKQDSSGGKHKLLGMSKRGDSYLRTLLIHGARSAIVAAQKKGKPTVWLSGLLLRRHPNVAAVALANKNARTIWALLAHDREFRSDYMPRPVTA

SEQ ID NO: 55244 - protein, 325 aa, unidentified
MNDAICSAWLGVDVSKAKFDVALLRQGKYKSRVFANDAAGFAQLLQWLDGHDARAVAVCMEATGSYFEALASFLSDQGLRVSVVNPLVVAAFAKTELSRGKTDAGDAKLIARYASERHPGPWQPPTREVRTLRDLVRRLEALHDLRTQESNRLGVAGEAVRASIQAVLDTLNAQIEAVRRQIQDHIDRHPDLRDRARLLDSIPGIGPATIATLLAEIDFDAFTSARAAAAFCGLTPRPMESGTSLKRPTRLSKIGSARLRRALYMPAMVACTHNPVIKAFYLRLQSNGCTPKQAVCAAMRKLVHLAFGVLKSGKPFDQSLHLASA

SEQ ID NO: 55245 - protein, 341 aa, unidentified
MWIIGCDYHPRFQQIAMVNTEGGELEQRRLEHPQEAEQFYRGLRGQKVRVGMEASGHARWFERLLAELGFELWIGHPGAVRAAAPRKQKTDARDAEHLLQLLLSGQLAKMRVWVPTAEQRDLRQLVLHRHRLVQMRTRVKNQLRSVALNEGMGRKPGLWSRKGQEQFRGLVLPAWTERRRQDNLELLGELEQRTLPLDQAVGEQAGQRPEVARLMSHPGVGPVTALAFVLTIGDPTRFACGKQVASYLGLIPSEYSSGGRQRLGHISKQGNALLRSLLVEAAHVAARVEPDLGRYYRRLAMKKHRSLAAVAVARKLALRLWWMWRRECNYAQWRASGSHAG

SEQ ID NO: 55246 - protein, 405 aa, unidentified
MGYYAGLDWGGASHAVCIINDTGRVIERFEVRHEAEGIAELTSRLSRMAPAAEMPIAIERPSGLLVDSLVAAGYPLVPIHPNVVKACRPRYRAAGGKSDPGDGFMRADILRTDGHRFRRLAPCSDDIKALRAVVRGRDDLVAQRLVLANQLRALLESFWPGAAAIFADIDSPIALAFVRRYPTPDSAAHLGEKRMKAFMAQHRYSGRRSAGELLDRLRRAPTGLAGDCEADAKGELVRALASLLAGLQAQIAQLSSRLEHTIAELPDGQIVMSFPRAGRICAAQILAELGDVRSRFQTEAQLAAEAGVCPVTHQSGKSRGVVFRWACNHRLRAAITCFADNSRHSSKWAAHIYQRARARGCDHPHATRILARAWVRILWRAWTGRTKYDPARHQAALDFAKAAEG

SEQ ID NO: 55247 - protein, 321 aa, unidentified
MNKYKEIYGIDISKSVFDVYGSETGHDQFKNDEQGFKSFLRHIPKGALVVMEATGYYHYRLAQFLYKSGKLVSVVNPLSVKRFIQMKLAKVKTDKSDAKAICENGQMNEVPLYTALDEVQSECLQLFRLLDSYLKQRTASKNKLHGEETLGIPSKYVYRSLNRNVKHLQKEIAAIEERLLELVKQDQQHQLTLLKSIPGMGVKTALFLIVVTDGFKKFETASQLCSYVGITPTIRESGSSVRGRSRISKVGNKKLRNLLFLCAFSACKHNKACREIYERLVAKGKSKKLALIAVSNKLLKQAFAIAKSRRSYDENFVSKLD

SEQ ID NO: 55248 - protein, 452 aa, unidentified
MAQGSGLTRGDRNRNRKIAVLRQVVRRDRAVLAVDLGEDKQAAVLVDHEGRVLARKTVTAKAHRLGALLEWAAGQAARAGFAGLVVACEPTGHRWKALMGLADAAGAGFVCVQPLAVHREREKDDYTRDKTDHRDAYLIGRLAVRLDCYLPERAEEAWARLRHLGARRSALVADVVCCTQQVSDLLACAWPAALATAARPLESTTWLAAMGVVTDRCCGDPARLRTMGYEKFLAAVRRELPRWGAKRVYHKIVTGLWDALADRGGVAAQRRGALERVHLVMADWRSLLARQADTEGRMCAVLDELGLTGLVTSIDGLSAVGAAVILAETGELSRFATSRAVVKHAGLNPAENTSATLAGRTRISRRGRPGLRTAAWRAAWPGLRHNRVLAARYAHLTGRDSGTRLSDGQARAACAAALLRWLWAVITRRQAWDARIAAGLIPARAVTAPAAA

SEQ ID NO: 55249 - protein, 470 aa, unidentified
MPDTPNQSHTAISIPQEAAATGTPTPRRFAAFIGIDWGDKKHAWALQVEGSAQVERGEILHTPEAIEEWAAELRRRFPTGRLAVALEQSRGPLVFALTKYENFTLYPIHPTSAADYRKIFRPSGAKSDGPDAAMHLDMLLRHRDKLRPLNPDTVETRMLQFLVEDRRQLVDQRTQISNRLVADLKSYYPQVLEWFEQPYAPVALDFLERWPTLDELQKARATTLHQFLKQHKCRDQAKNQTRVEAMRGAVAATHDTAVVTAGRWAVCAAVRLLRDLNRSIQEYDRKTEELAQAHPDFAIFDSLPGAGAALVPRLIAAFGTQRDRYESAAEIQKYSGIAPVTEDSGHQHWVHWRWSCPKFLRQSFHEWAAQSAQQCDWAAAYYQAQREGKNKSHHAAVRSLAYKWIRIVFRCWKDRRPYEDSRYELALIRRKQATPASPKPSPFELPIQWTSCGSFKKLALKTHNKSDKVY

SEQ ID NO: 55250 - protein, 348 aa, unidentified
MTIIVEQDRTITGGVDTHLDMHVAAAIDQLGALLGTEAFEANRAGEADLVCWLGSFGTVTRVGVEGTGSYGAGLARLLAVDSDVEVVEVDRPNRQLRRREGKTDTLDAIEAARAAQSGRALGQAKSRDGNVEAIRALTVAKRSAQSTKVQALNQMRHLGFTAPDPLRERLAGLSAAKLVAEAASLRPRPGGDPVVFATKTSLRILGRRVLALDAEKTELDAHLTVLVTETAPELLAAYGVGVDTAAQLLVAAGDNPQRLRSEASWAHLCGVAPIQASSGKVTRYRLNRGGDRRANHALWRIAMTRMSSDPRTKAYVIRRTEEGKTKSEIIRILKRYIAREIYALLPRN

SEQ ID NO: 55251 - protein, 331 aa, unidentified
MDEHSTKARLDSQSSDLFWGVDIAASKLDLGCFSRSHVQTFENSDAGIASLLNEVSAQPVALIVVEATGGYETSLLIRLVDAGLPVALVNPRQLRAFATAVGELAKTDAIDARVIARFGHDVRPPIRPFPTEKQRFFADLAGRRRQLIELRTAEKNRRQQTTQPQLLTSIDAVIQVLDEQLAAFDKQIEEQIQADVAWQQRDRVVRSFKGIAGGTSRALIADLPELGLLSHKQIGKLVGVAPLNRDSGKQRGKRVTTGGRRTVRSALYMAAFNAMRCNPVIKSFYHRLRQAGKSFKVAITACMHKILTILNAIVRDNKLWTAPHENPALTT

SEQ ID NO: 55252 - protein, 391 aa, unidentified
MILVGIDVAKDKHDCFIMTSEGEVLAKSFTIQNAMEGFNMLYQRILSVTDSPDEVKIGLEATGHYSYNILGYLLDKGFTPFVINPLHTNLYRKSLTLRKTKTDKVDAHNIASMLMSDVNLKPYSDTLYSNEELKSLTRYRFDKVKQRAKLKTSISRLVTILFPELEKLVPTLHIKSVYTLLREFPSAEAIANAHLRKLSNLLHASSKGRYTKETAISFRIAAKNSIGSYMPAKSLELKHTIKLIEELTTEIGEIEKEIKNIMLKINSPILSIPGIGYSLAAQIISEIGDFKNFDSPDKILAFAGLSPSTYQSGNLYSSNSKMEKRGSRYLRYALFNAAMFVCHWEPTFASYLAKKRSEGKHYYVAISHAVKKLVRVIFHLEKTGEKYTAVY

SEQ ID NO: 55253 - protein, 311 aa, unidentified
MTETNIGIDISKDHLDVHRLPGDERRRFDNSKAGHKALIRWIGDTPARVVYEPTGYYHRALERALAAAGMPIAKVNPRQARRFAEATGNLAKTDALDAAMLTRMGAVLSLEARPVPSGIINDLRDLRTARNALIKDQVAALTRAKAITLPLLKRHNAARLKQIEAQREAVDAEVNALIQGDPDLAQRFAILCSIPGIAEVSAAMLLIEMPELGSLDEKQVAALAGLAPIARQSGNWKGKSFIRGGRQQLRQGLYMPALVAIRFNADLKTKYEQLIKAGKAPKQAITAVMRKLIILANALLKKGRQWQLRAA

SEQ ID NO: 55254 - protein, 421 aa, unidentified
MSVEQTVQARRAPAEATTPTHGRVTAGVDWASEDHAIAVVDDQGRPVDRFSITHTGPELRRLVTRLRRWGVCEVAIERPDGPVVEALLEADLTVFVIDPKQVKNMRGRYGSAGNKDDRFDAYVLADVLRTDRARMRPLTRDSEQTISLRMSVRARQDLVHARVAMGNQLRAHLEITFPGVIKLFRDIDSHITLAFLRRFPSQDKADWLSAARLANWLRSIGYNHQVNAPRLWVHLRDAPRGTTGAEAADRAQVTLTLVAALTALKAQIRALDDLIADQLAHHPDAAIFTSLPKSGTVRAARLLAEIGDARGRFPTPESLVCLAGAAPSTKQSGKVKVVTFRWAADRQLRGAVIDFAGDSHHANPWAADLYQRAIARGHDHPHATRILARAWLHIIWRCWQDHVPYDPAIHRALQRVLAQQA

SEQ ID NO: 55255 - protein, 474 aa, unidentified
MARAARRQGGSQSRKGHAKGARSAQLEQLNLHAAGIDVGADAHWVAVPPDRDERPVQCFGAFTADLYALAAWLRQCQIETVVMESTGVYWIALFEVLEERGFDVKLVDPHTGRQVPGRKTDVKDCQWLQELHTYGLLRGAFRPEDEVCVLRSYLRQRSMLVTMASRAVQHMQKALEQMNLKLTEVVSDITGKTGMTIIRAILAGERDPQLLATYRDKRCQHDQATIAKALTGHWRAEHLFALQQAVDQYDFLAQQLRACDGHIEGCLQAFVPDMETDASPSPPVRTWRSSRSNPLSFDVQAYLEAMTGVDLTQIDGIDSLTALKVMSEIGLDMTRWPTSKHFAAWLGLCPGNKITGGKRYRIRSKPSANRAATALRLAAQGVANSHSALGAYYRRMRARLGAPKAITATAHKLARLVYSMLRYGTAYVDAGQQAYERRFPRSEIGPRSRRRPLSATQHHPTPSLIDISWHCNEP

SEQ ID NO: 55256 - protein, 388 aa, unidentified
MRRSNQDRIVGLDVHPDSFAGAILQGTDPWKARVVSTSTRVALPLLEKWALRHTREEDILVMEASGNAFCVAERLRALKRKVVILDSHRAGKVGKTYCATDRVDAIKIARIYLSALSPVVWQPDAKTRERREVFSAYQAVVKEGMRLKQQLKSMLNEHCVRLEKGFRLSHPSAIGRLLQRRKWSEAQKMLLSQLHAGLVGARVRRQRLRHYMAQEILAEKELLRLTRLCGINLITLYGLIAAIGDIQRFANARKLSTYFGLNPTVEQSGNYEGSGALKRHGRGAIRALLVQSAKKLLQVDNPLQKWGLALAARRGRNKAAVAIARKLCVAVWHVMQGHVIGAIERMDTLHTKLHKLATELGVPTIKQLGYETKEAFVQKKLYVLRSYA

SEQ ID NO: 55257 - protein, 401 aa, unidentified
MTAVRSKAWIGVDIGKTHHWVCAVDESGQKLLSLKVLNDEAQIIEVIAAVKAVAPDRVWAIDILGTPSALLVALLAKADEQVRYASGRVVAAMSTAYSGEGKTDAKDAYIIAETVRIRSDLSVIDADADLVRTLGVLTGYRADLVADRVRMINRMRDLLTSVFPALEREFDFASCKGALVLLSGYATPEAIRRMGEARLSRWLRQRRVRGYADVAARAVAAAQTQQTVLPGQDVAASIVAELANSVLVQHERLKVLEQQIQDAFAQHPQADVIESIPGFGPVLGASLLVAAGELAAYPTAGHLAAAAGLVPVPNDSGRRAGNLHKPRRYSRPLRHAFYLSAQTSMMRAGPNRDYYLKKRDQGRTHSQAVIALARRRIDVLWALLRDNRTWTPAPPARAQAA

SEQ ID NO: 55258 - protein, 346 aa, unidentified
MNKGKDIVLVVDYHLESLQVRRLDEATGKERSFQVGNDSSRILSVVHRAQGEARGRGGKVVWIMESTTGWARVKDLLAGRAKFLLANVLQMPLPPKARRRKTDKIDTARMLREYRNGSLPLAYQPDRALREVRRLVDTRQDLVRRQTALKNWISHYVSHETWRSSKNLWSGRGLLRLRTMPLTPMDRRLMDVKLEELHQVWALLSKVEEEMAAVQKAWPAAQRLDRVYGIGMVSAVTILAYVGPIDRFGDAEELISFAGLAPGTHRSDGRGRDLKIGGGGTHSQLRYFLIEATRWLKEIPRYAGAYERKLDRRGKKVARIVVARMFLRSIYRMLRTGEEFAAEAVA

SEQ ID NO: 55259 - protein, 345 aa, unidentified
MEQISRIGMDTSKHIFQLHGVNTAEQPVLRKKLRRKEMFAFLETLAPTVIAIEACGASHHCARQLQSFGHSVKLIAPQLVKPYLKRGKNDAADAEALCEAMCRPTMRFVPVKTAEQQAALMLIGVRDRLIRNRTQLSNAIRGYAGEFGLTAAKGKAHLNPLLERIRADESLPTLARELFAAQGVEYAQLQAQIDHVDARLIAWHRADECSRRLTKIPGVGPIGAVLLTMKTPEPELFLSGRQFAAWIGLTPKDHSTAGKAKLGGITRAGDEALRSVLVVGATTVIQHAQRGGRPSPWLTELLKRKPPKLAAVALANKMARIAWKLMVTGENYAAKTAPVTLPDAA

SEQ ID NO: 55260 - protein, 418 aa, unidentified
MEKHNNSRKKSEQPSKRGKSRGPVQRDTKEVLAELVEKLKEKLDPKKAAATSGGEEHPRGELRPNLDRLTVGVDLGDQWSHYCILGLEGETLAEGQVRTTPQDVAEFFQGLNAARVVLEVGTHSAWTRDVICSFGHEVLVANPRLMEGSKRRKRKNDRIDANKLARLGRVDPQSLHPMQHRSAEVRQDLVLLRARDALVAARTELINATRGLVKSMGARLPKCSSPSFAQKVEEAVPAEIGEALLPLVRMTAALSECIEGYDEKIEKLASEKYGHTALLRQIKGVGPITSLAYVLTLENPERFVKSRDVGPYLGLVPKQEDSGESQPQLGISKAGDRMVRRLLVGSAHYILGPFGPDTDLRRYGLRLCERGGKNAKKRAAVAVARKLAVLLHRLWVSGEVYEPLRQGRSATTAHAVAA

SEQ ID NO: 55261 - protein, 407 aa, unidentified
MLFVGDDWAEDHHDVCLQDAQGRVLAARRLPEGVAGITRLHELVAGHLDGDDPSQVVVAIETDRGPWVRALVAAGYRVYAVNPKQAARHREVVAVSGKKDGTFDAATLADMGRTRRHQLREVAAGSDEAEAVKVAARAHQKLVWERTRHALRMRSALREYFPAALEAYGPLTLTGTDTLELLAKAPEPAAAARLTIAQISAALKRARRRDVAGKARQIRAALREQHLGQPEIVTEACAAGVRASAAVIAVLNEQVKVMEARVESFFRRHPDAGVYLSQPGIGVITGARMLGEFGDAPGRYADVKARRNYAATSPLTIASGKKKTVHARFIRNDHLVNAMHDQAFASISASPGARAYYDELRSREIDHTDALRRVANRQAGILHGCLKTGTGYDEHTAWGHRSQPAAA

SEQ ID NO: 55262 - protein, 399 aa, unidentified
MIHVGIDIGKNRHAAAAVDEAGVCVMPPRFLTQDAGGFASLFGALDGLGGAASVAVGMEATGHYWKVLRHALASRGYRVDVINPPITSREASADVRGRKSDKLDALAIANVMRRGDYSPAPAELPASDALKSLTRYRRTLVARCTDAKLRLTSALDVAFPEAAKTLGDLFGAASLAVIKAFPSARLAAAADIRRLTSLFAKASGGQLGREAAKAYREAARHSLSLTIHNEGEEFVIARIVDEIRAVTARIEEVERRILAEPQPVIAGILGSIRGAGKIQPMVVAAELGDLSRFAGADMARKVLAYAGSEPRVRESGTWKGRAKISKRGSRALRNALYLMAGTIRLHSPCFNEVYKRQVAKGKHHGVALGHVVRKIVDVMCGMYKTNTLFVPPQTKATPC

SEQ ID NO: 55263 - protein, 326 aa, unidentified
MLADELDFVVGVDTHRDRHMLSVVAAPTGAVVAQRSVAASGRGYVQALRFANEQAQGARVWAIEGAGHYGAGLARYLSGRREAVLEAGRSPRGERRLQGKDDGLDATRAARAALGNDELALPRAGQRREALRLLLVARRSAVEVRRRGLVQLRSVIVTAPDRLREELQALPERRLLERCSHFRRSSSLPVDELAAKLVLRTLARRIEAATAEANELEREILAHIRALAPRLLDEAGIVARLAGVAPVPASSGQTIRHRLSRGGDRQLNRALHTIVLQRRQHDATTQAYIARRVAEGKTRRDATRLLKRYLARHLYRLLQQTEPLMT

SEQ ID NO: 55264 - protein, 347 aa, unidentified
MLIIGCDFHPGFQQVAIFDNLTGEVQEKRLQHRGEAEQFYRSLAGQEVRVGMEACGHYPWFERLLAELGMELWFGDAARVRASVVRKQKTDRRDAEHLLNLLRQDRFPRIWVPSLEVRDVRQLLVHRHKQVQARTRTKNQLQAMALSHGVQKKWKLWTKAGRAELEQLPLLPYAAERRKRLLEALDGLEAEISELDRRVAEEAGQRPEAVRLMTHPGVGAVTALAMVLTLGPAERFGSAKQVGSYFGLIPSEESSGGKQRLGRISKQGSSFLRFLLVEAGQTAARLDPQLKRFYRRLAVRKNRSVAKVAVARKLATRLYLMLREDWTYAQLSQAVMQVSPSHSVAGE

SEQ ID NO: 55265 - protein, 329 aa, unidentified
MKKDWYVGIDVSKKWLDVAIFVENSELKGYSHTQVNNCKAGYKDLLGWLREHDVDASTCTYGMEHTGFYSDGLQHFLDKKGYKYTMLEPAVIKHYPIQPREKNDRLDAAKIADYLFRFKETIKLSRVPDKTMEELRNLHRERKFYVEDRVVYLNRKQVVGKEEAKRLDKIISLLDKQVESIEEKIRDIIRNDESLMESYLYLTSITGIAFVNAVNAIVITQNFTVFKTARDYASYIGVSPHTKKSGTTVRWKPKPYKHCDLTAKADISQAAKIAIVHDVELKRFFERKCNGKEDADTIRKAMNAVKFKLVLRMFAVVKQKHEYRQFTTI

SEQ ID NO: 55266 - protein, 352 aa, unidentified
MNSPFTIGIDLAKEVFAVCVLDECGAVRERRVLRRAAFERWAVQAPAGTIAMESCSSAHHWGRWFSARGHAVRLIAPEFVTPFRKGGKNDAADAEAIAVAARQPTMRFVTIKTVEQQAILSWHRARQGWVDERTALINRLRGLLAEFGIVLGRSRSTLRTALPRLTEDARLPVQVRALLLEAREQFTVLDVRVARCDAEIAAHLVDNAPAQRLRALLGIGPLTASALVATVSNASSFKNGRQFGAWLGLTPLQHSSGGKSRLGKVTRHGDGYLRGLLVQGARSALQSALRCLPERLSRLGRWIVELFHRKGYHKTLVAIANKHARMLWAMLAHDETYDPLAWQRDRAPAATV

SEQ ID NO: 55267 - protein, 351 aa, unidentified
MSKCITIGMDLGNEKHAVCALDESGQILFRKDIDNKPEVLEPFFREHAGATVAMETGLCCRWISALAKACGCEAVVCNARKLSAIWQNQHKNDENDALLLAQLTRADRRLVHPVALRDDEHHEIVQIIELRAVAVAQRTQAVNAVRGLCKACGVFIPGCDASCFHKVAADAIPRETAWKFRPMLRHLKETESLIRRYDKMLIKYAGAHFGEEVELLQTIPGVGTVTACAFVAFVDDVRRFRKARDAGVYFGLTPAQDKSRTQDKPKRITKAGNGIMRGLLVNAANYILRKSSPDTALKRHGMAICARGGKVAKRKAKVAVARKLAVVMFAMLRSGRPYEDAALSSSNGLVA

SEQ ID NO: 55268 - protein, 371 aa, unidentified
MEHTRFIGLDIHKERISIAVAESGRSGAVEYLGEVANDPGAISKLCDRLGRPGRPLAFCYEAGPCGYGVYRQLKSLGHRCDVVAPSLIPMKPGDRVKTDRRDATMLARLHRAGELTPVWVPDADHEAMRDLIRLRSVVRQIVTRTRQHLQGFLLRHGRKHGQGTAWRMAYRRWLSTLAFQHPAQQIAFQDYVDAVMDAERRLQRVEEQISCLLPEWNLRPVVDALQAMRGIALINAVVLVAEVGDFTRFSSPRQLMAYFGLVPGEQSSGETIRHTGITKTGNSHARRALVEGAWAYRMKPRIGRHKVDRIEALPKIVRDIGWKAQVRLCARYRRLSARGKNANVVNIAIAREMVGFIWSIACTIQSAPRTA

SEQ ID NO: 55269 - protein, 342 aa, unidentified
MQVTTIGLDIAKNVFQVHGIDAAEKVVVRKQLRRGQMLAFFKALPPCLVGMEACATSHCWARELTKLGHQVRLMPAKDVKAYVKRNKNDAADAEAICEAVRRPTMRFVQIKTVEQQGRLMLHRARDLLMRQRTQLINALRAHMAELGIVAAQGREGVKELLKIIACEQDARLPVDAHASLVVLAAGLQALQTMIGSIERRIIAQHRSDEASKRLRSIPGIGIVGATAIAATVPDPKVFRSGRDFAAWIGIVPRQDSTGGKPKLGPISKRGDQYLRRILVVGAHAVLKRARHQPEKYPWVTRLLARKPFRVVAVAVANKMARVAWVLLARGGSYRAPALVVAA

SEQ ID NO: 55270 - protein, 410 aa, unidentified
MELLHRRCCGLDVHKETVVACLRLVADGKVTTEVRTFQTITSDLLRLSEWLAANECTHVAMEATGVYWKPVWHILDDAEFALVLANAAHVKNVPGRKTDINDATWLAELLAHGLIRASFVPDTQTQEMRNLLRTRKQLVREQSSHVLRVQKILEDANIKLDSVLTDLMGKSGRAMLEALIAGETNPVKLASLADRRAKASPEEFREALRGRVTKHHRFLLRLHLNQIDALDAAMATVDAQVEANLGPFRTAVELLISIPGIKNLGAHVIVSEIGIDMSRFPSHAHLISWAGICPRNDESAGKRRSNRLRKGAPWLKTTLVQCAWAAVKKKDSYLQAQFYRIKARRGPKKAIMAVTASILTAIYHMLKDGTMYKDLGRNHFDRRSTDQQKNRLVKRLTELGYAVEIKPLAA

SEQ ID NO: 55271 - protein, 427 aa, unidentified
MSYRIAGIDVHKRMIVVVVADVDVAGDYEFERRQYGSTPAQLRLLAAWLVEQGVEEVVMESTAQYWKPVWASLERYWKPICEKREGAGPMSGSLHLAQAQSNRGARGRKNDFADAERLVRRLVAEELTLSFVPDAEQRLWRTVMRTRYQLRCNQVQLQNRLEALLEEAHLKLSSLVSDLLGLSGRRMLQAVAEGETDPAVVAARADCRLRATQEQLCDALGAYQELHPVYRRLLKTALEEWERIEAQIAQLGQEMASLIGPQQEQVQRLAEVPGLGVDSGQQILAEVGASAATFPSDRALASWVGACPGEEQTAGVNRNRRSPKGNRHLRRILNQAAHAAVKLKGSIFALLYRRYVVRLGHNQTIAVIAHRLCRLIWKILHEGVRYDERGPAVSQRAQQRRTARMIRQLRSLGYSVELLHAAAGVPA

SEQ ID NO: 55272 - protein, 486 aa, unidentified
MNCVGIDVSKGKSMIAVMRPLGEVVIPPFEVGHTESELCELSKLLGNLDGETRVVMETTGNYHFPVASFLYDSGFYVSVVNAMLVHSYGNNSLRRAKTDKKDAIKLANYGLDHWLTLPRYIPEDDVRLMLKTTYRQYQQCAKVQTMLKNNLISLLDTAFPDANRLFASPARADGSEKWVDFVAAFPHCECVCGLPERVFTAKYQKWCRKHGYNFNQDKALDIYASACGHFSVMPRTDTAKLLVVQAVSQLRAASASLAALRNEMQSLAASLPEYPVVMGMFGVGPALGPQLMAEIGDVRRFHSKKALVAFAGIDAPPYQSGQLEVRSRSISKRGSSALRRTLFLVMSVVLQRSPADEPVYQFMDRKRAEGKPYRVYGRDPQAHGYAYPYMIFANMQKLGVTSVRTVVKVGDTISDVKEGVNAGVWTVGVVEGSSELGLSQEEFEALTPQEREAACRKVEESFREAGAQFVIKNLSQLPELICALGN

SEQ ID NO: 55273 - protein, 392 aa, unidentified
MEVQDETGRRLAKARLPEGISGIARLHAVVGRFLPEDVDAAEVKIGIETDRGPWVAALVASGYQVYAINPLQSARARQGNGVSGAKSDAGDAHVLADLVRTHSHQLRTVAGDSKQAGAVKVLTRMHQSLIWDRTRQVLRLRSSLREFFPAALEAYEDLDSPDVLELLTKAPEPNSAARLTRAQITAALKRAHRRDRDTKTTAIMAALRTEHLTQPPLIAAAYGATVRALAALITTSNEQITALEGPVEACFGQHPDAEIYLSQPGLGPILGARVLAEFGDDPTRYAGARARKNYAGTSPITRASGKKKVVLARYVRNNRLADALHQQAFSALSGSPGARAYYDALRDRDISYNAALRQLGNRLVGILHGCLKTHTSYNEATAWNQHTQRVAA

SEQ ID NO: 55274 - protein, 506 aa, unidentified
MPATVFAHVEKEGHSMAAVMIGIDPHKASHTAVAIGAAEEPLGQLQVRASASQAERLLGWAAAWPERAWAIEGAGGLGHLLAQQLLAAGERVLDVPPKLGARVRLLATGDTNKNDPNDARSVAVAVAALRSAGVRAARRDDHAAVLRVWSKRHRDLGRTRTQVVCRLHAVLCDLVAGGASKHITAAHAARLVELITPSGAVEAARCELAAAFTEDLRGIDDRIRRTRKKLAIAVQAAGTSLTGLFGVGPVIAAAVIGDVRAVARFPGRDHFAAYNGTAPIEVSSGDRKVYRLSRRGNRRLNHAIHMAAVTQIRHRHSEGRAYFDKKLAEGKTRKEALRALKRQISDAIFARLQADARRAAAGVKGPGGQPGNDSDSSAAGSHPAHRLFGQATPGPRHHPTTAARIRGRAGRSPAAATLPPATPQVQVERPQRKRGRTTWGCSEAAATLGRGEGHEAKLRGEAPALEDHLTCREKDRPNPLTQTQRGFRSGRQSDRWPGRLRRARTG

SEQ ID NO: 55275 - protein, 351 aa, unidentified
MRSINKQIQGEELFVGIDLHKHRWHVTIRAADVEIFSNSIAGRWQELKKVLNRYSGCRIHAVYEAGFLGFWLFDHLTQSGVDCIVTPPSLIPQEHGNRVKTDRLDSRKLARLLAKGLLKSIWVPNAEERFHRQVIRRRRQLVGDRVRTQNRIKSELCFYGIDLPAAHGQWCKVYFENLQRIRFKNRWMQQSFNQLLEQYEFLCTQIDKQTQLLKQLSQLPLYRDRVKILRSIPGIGLLTAMEILLELQDVSRFRRAEQLAAYVGLTPSQYSSADKIRMGRITRMGKNAVRSALVESCWHLIRKDKAMRKKYEQIKARAGGKRAIVAVSRKLILCIRRLLLDNRPYEYEPVR

SEQ ID NO: 55276 - protein, 310 aa, unidentified
MKQTIVYIGIDVAKAHLDVAWQKRLRRFDNDKAGRATLVKWIKQKQSDPVQVICEASGGYEQELLDALAEADLAFSLVQATRVRQYARAAGILAKTDKVDARVLARFGAAMRPEPTSPRSAAQKLLRELEAQRRHLSDLLVAEQNRLEQLNDEKLRRLTRALMGTLKKQIALIDSRIATLIMQDQELCQKAQKLTSVKGVGERTAALLLAQMPELGTLNRREAAALAGLAPFNRDSGTMRGKRLIFGGRQAVRHGLYMAALVASRRNPILSSFYRRLRIKDKPHKVALTAVMRKLLLALNQALTPNQSFT

SEQ ID NO: 55277 - protein, 410 aa, unidentified
MEVLYPHCAGLDVHKDTVVACVRHMANGSVKREVRSFKTTTKELLALSDWLASEGCTHVAMEATGVYWKPVWHVLSDGDFTLVLANAAHVKNVPGRKTDVNDATWLADLLAHGLIRGSFVPDEQTQEMRSLLRTRKQLVRECSSHVQRLQKTLEDANIKLDSVISDIMGLSGRAMIEALIAGESDPDRLAQLAHRRIKASPEALREALRGRITRHHRFLLRLHLQQIDAINAAIGDVDQEVDQQVEPFRDAIQLLTTIPGIDELSARVILAEIGRDMSRFATAGHLISWAGLCPKNDESAGKRRSTRMRKGAPWLKTTLVQCAWVASRRKASYLQVQFHRLRARRGAKKAIGAVAASILTCVYHMLISGEFYRDLGPDHFDRRTKARHTLRLVTRLQNLGYAVQISPLAA

SEQ ID NO: 55278 - protein, 367 aa, unidentified
MKKISTVATKQAKNFPQQKLTIGLDLGDRWSWYCVLDEAGKIRLEQRVSTTPKAMGEVFGGMPRCRIALEIGTHSPWISRLLSALGHEVIVANARKVRLIAESRKKDDRLDAQTLARLARIDPQLLYPVKHRSVQAQADLTVIRARAGLVRTRTALVNTARGLAKSYGERLRGCNVRNLNPEKAEGLSPELQAALEPLLKAIESLSERIVEYNERIESLAQHSYPQVALLKQIKGVGPLIGLTFLLTLEDPHRFRKSRDVGCYLGLQPGRRNSGQSEPQMHISKEGDPYLRTLLVQGAQHILGPFGPDCDLRRWGLKLAERGGSNGKKRAIVATARKLAVLLHHLWVSGEVYKPLHNSSPTTVAAAA

SEQ ID NO: 55279 - protein, 426 aa, unidentified
MNTDEVTRYQQFRQFRNEIKKSIDYLVIGIDVAKDKHYSFFGSARGETFLRRLIFENSITGFEKLKNRIESIQAARGKQKVVLGLEPTGNYHKALGQWLIGQGYQLVLVTGRAVKENRETLDGRWDKNDTKDSANVADLVAQGKCQFYENPDPQIIQLRNLLSLRKRLKREEHSLRMRIRNSLVCKYFPEMDLYWGSCLQENLSIVRYFLDPTKIAAMTFRDFVIKVSTKDRGDRQLKRLRKIYDAAADSIGCPVGPGAEFEADMLVERLLGVQKRIAETMRGVKEVAEQFASYKKLQTIPGIGPYICALIIATIGDPNRFKSYKQVIRLAGLDLNAKRSGKRSNLAVPVISKRGDADLRYGLYQAALIASCRNEHFIKYYTRTLKGRERERGIRTKMRVKLASKLLIIAWTLMKKSEEFDPSLLT

SEQ ID NO: 55280 - protein, 341 aa, unidentified
MGEVSTIGLDIAKSAFQVHGVDVAGSVVIRRRISRAKVLEYFGGLPRCLVGIEACPSAHHWGRELQALGHLVRLIPPSYVKAYLKRSKNDANDAAAICEAVTRPSMRFVPIKTKEQQTVLMLHRTRQLLVRQRTMLSNALRGHLAELGFVSAKGRNGTAELLRIIADGRVSPAVSGILEVLARQYSAIGTEIASIDKNIMVLHRACEASRRLAEIPGIGPIGATALVAEIGDWKAFGSGRSLAAWIGLVPKQHTTGGKDRLGSITKQGNRYLRWLLVVGAMAVIRYARKHGTAKRPWLGRLMERRPTKVAAVALANKIARMAWAIMVRDERYKEPKLLLAS

SEQ ID NO: 55281 - protein, 327 aa, unidentified
MILGIDISKEHFDVALLNPDAAGKDDKAHHQRFANEPVGFEALAAWLERQGVTSSLHACMEATGTYFEALALFLHERGHLVSVVNPSATSAFAKSQLSRTKTDKVDAALIARFCRTQRPAGWVPAAVELRELQALVRRLEALEQMLRMEANRLAAGVSSASVRTSLEEHIRYLEEQMKCTRQLIHEHIQRHPSLKQQSDLLTSIPGIAEATAAALLAELSDMQHFGEARQVAAFAGLVPRIRQSGKSVGKYAGLSKIGSGRIRKTLFFPAMVAMRFNPCVRALAERLREKGKAKMLIVGAAMRKLLCIAYGVLKSAQPFDPLWLKAA

SEQ ID NO: 55282 - protein, 343 aa, unidentified
MEYGAIDLHTKESEIRIIDEKGVVVFERRIATTRARLTDVFGCRAPLRILLESGTGSEWVAHHLEELGHKVVVADPNYTPMYGQRTRRIKTDRRDVAALAEANRLGMYRAAHRVSAPQRDVRRRLRVREQLVHVRRQAINLLRAQLRSEGVRVPTGAAETFAGRFRASEAPAAVREAMAPLLELLVALAPLLSQAEQWTRHAAKADPVARRLMTAPGVGPVVALAFQATVDDVGRFATPGAVTSYLGLVPCEDSSGERQRKGAITKAGPSRMRVLLIQSAWHLWRSPAGSATLHAWARRLGDRRGRRIAVVALARRLARILWAMWRDGRDFEPARVGRLAVAA

SEQ ID NO: 55283 - protein, 413 aa, unidentified
METGRKGRIQTRKENIIYVGIDLHKETHTAVMLDCWNQKLGEITFENKPSEFHKLTRKVGRFVTEEKTAVYGLENAYGYGRALAVWLLEKGYTVKDVNTALSYAQRKSVPMYQKNDSYDAEAVALVLINMLDKLPNAVPDDAYWTLSQLVNRRDNICSHQQRLKNQLHEQLCVAYPSYKQFFGDISRRTALYFWLMYPSPEHLKGKTAEELAAELRPVSHNNCSVKRAEKILELVCTDGQTTREHQESRDAITRSIAGDLEHYREQLEIVETAIETMLPSFKCTLMTMPGVDVTTAANMLSEIGDINRFPNANKLAKFAGICPINFSSAGKGKDMCPKQGNRRLQAIFYFMAIQMIQISTNGTPRNKIFREYYLRRVAEGKNKQQALICIARRLVNIVYGMLKNHTEYREPEQ

SEQ ID NO: 55284 - protein, 329 aa, unidentified
MKKSITPIGTPVGVDVHKRSCKVVELNHGEIKVRKSIANTREEWLEMLTELPPDAEIGLEVSTAGYFAMSVLEEAGWRERAHWVHTAGIDSNRRQKNDRLDAERLARKLAAHHLDPLPEAWFPPPEIRALRLRTRQRCWLAQLRTKAKNHLQSLLAMQGLQAPGTDPFGAAGKKWLAGQTLPIPLGESIPQIQHLLQLLEEEIESSEKYLQAVDGQFPQLALLRTIPGIGPILSAVIWSEIGTIERFRSAKALANATGLVASYYDSGDVQVSGPITRQGSRWLRWAFVTAANVAIQYRNPFARRYHRLRRGKKPNVAKAAIAHSLARCV

SEQ ID NO: 55285 - protein, 431 aa, unidentified
MKNRTSQRIEEITIGTLIVGVDVAKETHWARFVDYRGVEHGKAISFKNNRKGYESIVIKIHEIIKLKTLRYPIDTIIIGMEPTGHYWKPLANYLIHKGYRVVCVNPYHTKKSKELDDNSPTASDKKDAITIARLVKDGRFFNPYLPNGIYGELRGLSNTRVSVIKRVSAIKNTIIAILDEYFPEIWTVFKYPLTGKASRHILKNCPLPTLILELGEDGVLGEIKKAVKRTVGIKKVRELIVAAKDSIGVRNGLDTARFRLRWLLEELELYENQLNETEQAMEHILYQTGYAQQLLEIKGIGVVSASSFLGEVGDPLRFQNARQISNYAGYNLVEDSSGKSKSGTCISKRGRKQLRSILYKMAFTMVGQNAEMKELYQYLITRKDNPLKKKQALIVVSKKIITVIYSLLKKQESYKPELVLGMVRKKILLAA

SEQ ID NO: 55286 - protein, 356 aa, unidentified
MSYLIKLDFAGQHIYIGLDVHKKSWSVCILTHQLEHKTFTQPPDPVVLVNYLKRNFPGATYHAVYEAGYSGFWAHDRLRELGVDCIVVNPADVPTKNKERKRKRDKIDCRKLARSLRSGELTGIYVPTRINVEDRSLLRTRRNMVKKQTRCKNQIKAMLLFYGIHIPPEMHQGNWSRRFIAWIEAIQMEKASGNVALKVHLEELHHIRRIVVNLNRSIRALSRTDEYRENVRLSKLAPGISILSAMTFLTELYHISRFRSLDQLASYVGLIPDTDSSGEKDTTTGITKRRNRVLRGILIEGAWIAARKDPALTMAFEKLCTRMKKTHAIVYIARKLLNRIRYILKNQMEYVPAVVQ

SEQ ID NO: 55287 - protein, 390 aa, unidentified
MRYFIGIDVAKFKHTACVIDTYGIVLVESFDFTNDIIGFQSLLKNIKPFLKKKHLVGMEDTGHYGDNLRNFLLEKQYKVVMLNPIVTSHIRKASNKAKNDRIDCFVIANTMMNPNFYRDQHAQSIDYATVRQLTRMHHTHTEEINRYKCQLQKSIDIVFPEFNSLLNTKYSKTYLEILDTYHSAYTIANTDIRLLRNTLKNVGVGRSVSISAEQLKKAAKESIGQHNLAIEMDIPFLISLIRRLTSILGEIDKKIEEFSHQLNSPILDISGISHFSAMSIISELGDITYFSSEKKLIKFAGVNPCVYESGTYSMTHTRLEKKGSKYLRKTLYQIIDVVIRFNPIFQAFYQKKISQGKSYRCAQGHCIRKLLRVIYKILSTGENFDSTKLK

SEQ ID NO: 55288 - protein, 313 aa, unidentified
MEVVYRCCCGIDVHKNLIVACLRKGGRQELREFGTMTGEIKVLANWLTEAGCEMTAMESTGPYWKPLYNLFELLGLDTMIVNAAHMKAVPGRKTDSKDAEWIAELLQHGLLRASFVPSREQRELRELTRYRKSIIEERSRELNRLQKVLEGANIKLGSVVADIHSKSARRLLERLAAGETMDDSEEISKLLHKSLLSKLDEIVAALDGIVTPLQRALLAQILDHIDDLDKRIQELDRMAETYMAQFQPAIAEVCQMPGIARRSAEVILAETGIDMSRFPSAAHLCSWAVGSARATTRVPGSGITARHARGIRR

SEQ ID NO: 55289 - protein, 417 aa, unidentified
MFKIFRKNCCGLDVHKTWIYACIGITDTNGLTEYKQARFSSFSKGLRELSDWLAKYTCSEVCMESSGKYWIPVFNILEKSCFVTLAHPKYTKPQKGNKTDVKDAKWICDLFMCDMIKPSFIPSLEIRQLRDLIRYRTKLTNMLTGEKNRAQNCLTVSNLKLDDVFSDVFGKSSRSITNYLLDHPGESFDVSPFIDGRCKTPVDEIQAAVDGAISHEQAVKLRQCLAHIDELEAHRNEIEQEIILIAEPFSAVLDFLYTIPGLNKNPMTAIAILSEIGPDMSVFSSSKHLVSWAGCCPRNDQSAGKVKSTRISRAGCYLKPLLVQIANNLVKSKKHPEFKERYHRIKSHRGHKKAIIAVCKMLLTAIWHVLNKLEPYNPEGFLEHRPMNESKVLTKAQALELFRKRGYTIIDDTVVNS

SEQ ID NO: 55290 - protein, 347 aa, unidentified
MEVHVIGIDLGKTVFHLVGLNPKGEVVVRKKFSRAQLLRFTSNLRVHLIGMEACGGAHFLGRALRAQGHEVRLMPAQYVKPYVKTNKNDYIDAEAIAEAVERPKMRFVPIKSDDQLDMQSLHRVRERWIIRRTAVVNQIRSLLLERGVTVRTGRKQLVAALPGILEDPDTDLSGPLRVLLAQLQWEMKQLEHQIEEVDAVVVSASGESEACQRLETIPGIGPLTATAIVSAIGNGAEFKKGRGFAAWLGLVPAQYSTGGKQKLLGISKRGNRYLRKLLVHGARAVLQMKDKQSPGLSTWLTQLTSRAHSNVAAVALANKMARIAWAVLAKGEAYRPPLLAGEELACN

SEQ ID NO: 55291 - protein, 343 aa, unidentified
MNFVGIDLHKKTISVCVVNQERKVLTRKTLACLPAEKIREFFAGLGPFQAVVEATASYEWLWLLLEPLANRLVLAHPKKLRVIAESTRKSDRLDAQVLAEFLALDMIPEAYRPTPRQRQHRALVRQRFYWRKRIVAVKNRIRRVLSDYNADRRDLLSSEGLAFLKEVAVSATDRFILNQLLAEWEGHERQLMQLTKELKAFAKKAPQPEQEARAVLATIPAVGPVTIDVVVSELGPIERFRSAKRVVAYAGLAPGQRESAGHSRDLGITKDGSRYLRWALVEGAWRLIRRSAHWRAVYEGIHKRRGKKKAIVAVARRLLTVMAALLRSGQAYAFAAEPAGARG

SEQ ID NO: 55292 - protein, 344 aa, unidentified
MKYFIGLDVSLQETAICLINEDGIVISEGKAASEPGDLARWIATTGLTMTRVGLEAGPLSPWLYVGLRAAGLPAICIETRRMKGATATMAIKTDRNDARAIAHAMRVGWFTTVHIKTAESQELRLLLSNRRTLLEKRVAIDNEIRGTLKAFGLKLGAVTVAAFEARVLELLADRSRLQAMVRPMLAARAALRQQCEVLHRMVLKTVRANAVCQRLLSVPGVGPIVALTYATGVDDPARFAHARDLGPHFGLTPRKYASGEIDHNGSITKAGDGAVREALVQAALTLLTRVERWSVLKAWGMAIAKRRGLRRAIVAVARKLAIVMHRIWVDGTTFTWSREAATSA

SEQ ID NO: 55293 - protein, 428 aa, unidentified
MNKLNNNRLKEFRQLKEEIRGSKEYVIVGIDIAKDKHNAFFGTATGKTLFKGLVFENNREGFEKLVVQAEAIKVQNGLKKVVYGMEPTANYHKPLGEYLIKGGHGVVLVSGFAVKRNRGTLDGRWDKHDMKDAANVADLISQGKCQYYEYPTEGLRDLRNLLSLKRRLKRQEHGMRVRIRNHLIAQYYPEMDGYYGRSEREGLAVVRWCLSPQVIAGMKYEEFRRLVGGRYRSLCQEQRLRAIWEEAGSSIGCKVGKAVSFEGKMMVEMVKGIREAIGETEVKIKDICEQYPSYAYLLTIPGFGPDVASKVLGAIGDPFRFQRGSQVLNLAGLDLSADRSGRRSEGVTPVISKKGKAELRYALYQAALIASVRNRYFIEYYTNKLRGREKEKGIKTKMRVKLAAKLLIIAWTLMKKGELFDPKHLNRG

SEQ ID NO: 55294 - protein, 317 aa, unidentified
MEQVQSNTKVAGVDVGKDWLDVAVHGLEDSGRWPNTGAGVSAVIGWLKAREVGRVGMEATAGYERVLRSALDATGLEVVVHQPIEVKLFAKLTRRRAKNDKLDARLIAAATARVDTVRAASDPRLMDLAERLTAYEQITDQAAELKTFMEHVTLKDLAADLQAQIDILTRLKTRLLSGVLQRIRTHPDLLARYRLLLSLPGVGPVVAATLSVRMPELGAMKRGQAASLIGVAPFDRDSGQYRGQRFIAGGRSRPRRMLYLAALAAKRWDPALKAFAQRLLDDGKPPKVAIVAVMRKLIEAANLVLQRGQPWIRQQPA

SEQ ID NO: 55295 - protein, 315 aa, unidentified
MQKLLNIGVDVAKDAVVVGCNEQGSAVRSIPNQRTALTVWLASLPKPSRIGMEATGCYHELLADLAYQSGHTVFVLNPKDTRHYAQAVGLRAKTDRVDALLIARLIAHEHARLHPYHPATCAQRQLGRLLRRRAQLVKLKGALKQSMKGMTGLARDTSALVAQMDALIAKLEQGMDTLIASMPGTQEDRRKLETINGVGTVVSAALIEPLTRLPFRSADAFVAFTGLDPRPRDSGRKAGRRRLSKRGPAELRRLLFNAAMAAARTQVWKPIYEHYRAHGLPTTAALVVIARKIARIAWSIHRYHTSFDPQRLKTP

SEQ ID NO: 55296 - protein, 435 aa, unidentified
MKVKAVSVFRERGLRAGVSRRAEPQCLVGNANIERKTDTMKSYILLKPEPVQSQISIAPAVAKPFVLFIGLDVHNDSIAVSIAPGDSAEVRRYGILGGEHDDVLKLVKKLQAAHPGATLKFCYEAGPRGFALCRCLRSHGLDCILVCPSQVPRKPGERVKTDRRDADQLARLFRAGELTGIYVPEPVDEAMRDLIRARFQVGKAQHRARQQLKMYLLRHNRRYAGKSSWSPAHLRYLAQIKMPFPVQQIVFQEMLEVISEATGRLERYDQEIERAVPGWRWEPVVRALMSLRGMALLHAATLVAELGDFNRFEHPGQLMGYLGLVPSEHTTGNDRQQGGITKMGNAPARRALVEAAWQYRAPARLSPHLKKRQEGLPKAITDIAWKAQLRLSHRYHHLTRVGKKKSQVAVTAVARELAGFVWAIARQVQPRPVKP

SEQ ID NO: 55297 - protein, 426 aa, unidentified
MKYRIAGIDVHKRMLAVVIADVAVDGEFQFERRKVGTSPSELCRLADWLAAEQVEEVVMESTAQYWRPVWAALEQRWRPKRLQESTGARSGQLHLAQAQSNRGAAGRKKDFPDAERLVKRLTAQELRLSFVPDAEQRLWRTIMRRKHQLTRNRVQFQNRLECLLEEAHIKLSSLVSDLLGKSARRMLQAVAEGASSPEDIAALADRRLRATAQQLSDALGACRDIHPVYRQLLKMALEELKLIEEQIDKLDQQMAQLLSAQQDVVQRLAEVPGLGADSAQQIIAEVGPSAAAFPSAKHLASWVGVCPGEEESAGVNYSHRSPKGNRQMKGLLNQAANAAVRTKGSIFELIYRRLVPRLGHAQAIGAIAHRLCRLIWLILYKAIRYEERGPAVSRSKTERRAVLMIRELRRLGYRVEPTGGQAGNPA

SEQ ID NO: 55298 - protein, 348 aa, unidentified
MRLAKITKKYYCGIDIHAIKMVVCIKNQKGKTLLHQELPSKMEPLLEILKPYKPDVAVACESTFNWYWLADGCRKHSIPFYLGHALYMKHIHGGKQKDDWIDSRKIADLFRVGMLPLAYDYPEKMRTTRDLLRRRHRFVNLRASLYRHIKMYMYQQGINDFPPKVTHHKSQRRDILKNFKNPDALMTLHTDIDLIDRLDRNIMDIENQVRKQAIYHDRKILRLLQTIDGLGDMLSLTLLYEIHKINRFKTAQRFSSYSRVVIIDWRSAGKSYRGKNNKIGNPYLRWAFGQVACLSVKYYPEIKKYSNKLKKKYGKKKAFSRLAHKFCVAIYYMIKNNEPFDVKKFVTA

SEQ ID NO: 55299 - protein, 365 aa, unidentified
MREQDERDKITIGLDLGDRRHRFCALDKEGQVIEEGTLSNTRECLGELSSRYAGALIVMEAGCHSPWISRYFEAMGCEVVVSNPRKTRAIYQHERKSDRRDALMLARIARMDQALLYPVRHGSEQAQQDLLRIKLRDSLVRARVGVINSLRFTLKSLGYTIANPSTERFHKVIEGQIPDSMSTVIAPSVRALEELSLRIKLLDREIIALTRTEYPETAWLEQIPGVGPITALYFVLKIGDPARFERVRDVGAFIGLCPRRDQSGENDPQLRISKRGDVYLRRLLVSAAQYILGPFGPPSALRQYGLTLAAGGTSRAKKRAVVAVARKLAVLLLTLWKNKSAYQAFPSHDEEKMRTSDSERLRSIA

SEQ ID NO: 55300 - protein, 406 aa, unidentified
MQVYIGIDWSEQKHDVVFMNTAGATLAQFEIPHSAEGFLQFDETRWRMKLGTKDCVVGLETAHNLLIDFLWSRGYSKVYVVPPTTVKSNRKRFSSSAARSDPGDAIVIADSLRTDHGRLQPWRPDSLPTRKIQAKVSLINHLTKSARRLTNRLRAVLLRYYPAVLNMFSSWPTKIALEFVRAFPTPEEAENLSPDEFQRFARQHRYPNPKRLPACFARLQAPQPEATQDTVEIYKDEAVLLATMLLNVIRVKQTALRELKSIFREHPDHAIFDSLPGAGDFLAPALLAKFGDDRKRFPTPASVQALAGTCPVTDQSGKRRIIKFRRACDREFRAITQQWSIASLERSVWANAYWQRTRTRCRYSSLAYRRLANRWLAIAWKLWQTGQAYDEAYHLQQRALRSKRSR

SEQ ID NO: 55301 - protein, 344 aa, unidentified
MSIVRTAAVTGGVDTHADSHVAAALDGIGGLLGVSEFPATPAGYARLLGWLQSFGTVCLVGIEGTGSYGAGLARHICAAGIRVVEVDRSDRQDRRRKGKSDPLDAVSAARAALSGRASGALRGRDGQVEAIRALMVAKRTARAQRTQTINQARALIITGPDDIRTRFTGQTPAELVAELASLRPRPGSMVRYHTLLSLRELGRRAQYLDGQLARLGQLITPLVTDRAPGLLSLFGVGPDTAAMLLIAAGDHPGRLRSEAAWAHLCAAAPIPASSGKVARHRLNRGGDRQANHALWRIVITRMGSHPPTRAYVARRSKEGLSKPEIIRCLKRYAARETYRHLRPS

SEQ ID NO: 55302 - protein, 356 aa, unidentified
MTTQQKQSCMFVGIDVHKDTHTAVGISPYGEKLFEITVGNYQKDFETLEEKVKEHSGVLSPYIGLEDVRGYGERLAGYLYEKYPVYHVPSVLVDRLRQNTTHPEKSDSLDARGVAKVMIQSIDTLLPYTISKESEKAKQLKEVSVDREDLVLERARLKNQVHTLLYRIYNTEYEQRFKDLFSIKALTYWRNAKPKCDPYLLKTMKRKVRRLLDIHTEVVDLEKDMAQLLKDNYTIQTASGCGVVLASTIVGEIGDINRFHSPGALSKYAGCSPRERSSGKKVRHVKSRSGNRRLNCAFHRMALSQISRMGNDRAKQYFKRKISEGKSKSQALVCLRRQMVNIVWMMLKHKTIYRND

SEQ ID NO: 55303 - protein, 431 aa, unidentified
MKGGDFMKNNFMSTLFVGIDVSSKTNVLCALNFQGNKLLKLQALNNQPGAESILDSILDCLNSNSLKYVVIALESTSFYSTHIANFLSSNEELMFYKPLVYCLNPKSVANYRKSFVDIDKTDPLDAYVIADFARVGRITCEPWRGAQFLALQRLSRHRLHIVECITREKTYMVSNIYLKFSELAVLDKNELPFSNTYGTASAAVLTEFLSLDDITYSSIEELVAFISAKGKNRFSNPIETAKLLQKAARDSYRLDKVLYEPLNTSISSSFNLIKAFDDEIKTIDKAIEKTIKGLNTTEYQSLTSIPGIGPVLASGILAEIGTITSFSSHDALAKYAGLTWRVNQSGNYSADDTRMTKTGNKYLRYYLIEAANSVKNNIPEYREFYNKKYGEVTTHCHKRALALTSRKLVRLIFGLLTKNQIYSKDKVGDMQ

SEQ ID NO: 55304 - protein, 351 aa, unidentified
MMLIGVDYHPSFQTIAFFVEETGEYDEQELNHSDGQAEKFYRDLKRRGICVRVGMEATGYSRWFERLLAELGFELWIGDPAEIKAKRVKKQKFDREDARLLLRLLRENNFPQIWVPDPENRDLRQLLWHRHRLVQMRTRIMNQLHALAMNEGYRWKKKLFSELGRTQFEKLALGPWASRRRQELLELLDRMNPTIDELTAAVEREARKRPEAMRLMTHPGVGALTALAYVLIIGTPTRFQRGKQIGTYVGMIPCEDSSARKQRLGHISKQGNSLLRFLLVEAAQAAARVNPHWRRRYMHLAMRRHKSIAKVAMGRRLAVRLYWMWRNGCEYSPSVEFGSYAGQLGTRNGVK

SEQ ID NO: 55305 - protein, 422 aa, unidentified
MNEDVYYERCAGIDVHKKFLVVCLRIGSKAEVKTYGTLTHEIREMVVWLKANGCEMAAMESSGSYWKPIYNIFEQEGLPVMVCNAYHIKNVPGRKTDVNDAQWIAKCLSQGMLNPSFVPDREQRELRDMTRFRKSQIEERARNINRLQKFLEGANIKVGSWLSDVEGKSATLLLELVIGKPDFTVDDVATCMHGNMKSTAEELYLSLEGYMTLTQREFFAHIMAVIREQTAQIEKTDAMIQRSLSANYKAAVEALDVIPGIGRVSAEQIIAETGTDMSHFKNQNRLSKWAGVCPGNNESGGKRKSGKTPPGNKTLKSTLTQCAQSAKKNKNSFFKAQYNRLVTSRGKNRATMAVAHSLLIAIYFVLCGNEFKDLGVDYYMQFNREKKINSHVKQLSKLGVTIPDNILRDVLPRPPEPKGRSA

SEQ ID NO: 55306 - protein, 382 aa, unidentified
MSANGITFVGMDAHKKMISVAMLLPEKNQPVEWQVANEPAAIRRLAKKLGREAEGEVRCCYEAGPCGYALQRELEAAGGLVCEVVAPSLIPVKPGERIKTDRRDARKLAELLRADLLTAVHAPSVDEEAVRDLCRCREDAQEDLGRARQRMGKFLLRRALIFTVSKRAWGQLHRQWLRGLTFEHPADQAVFGDYLLAIEQLEERVRTLVTGLTEAAQRDPYREPVGWLRCFRGIDTVTAITLVAELHDVRRFPSARELMAYLGLVPSEYSTGLSRHRGSITKTGNRHARRVLVETAWHYRHRAKSGETLRQRRQGQPARVIALADRAQERLCRRYRHLLERGKPTQKVVVAIARELVGFLWAALVPATVAEHASVRVQHHDS

SEQ ID NO: 55307 - protein, 340 aa, unidentified
MKISTVGLDIAKQVFQVHGVNEQGKIVLQKRLKRREMAEFFANLPPCLVGMEACGTSHYWGRQLAGFGHTVKLMTPRFVKPYLNREKNDANDAAAICEAVGRPSMRFVPLKSAEQQALLVLHRARSGLVRARTGASNQVRGLLLEFGITLRIGRREVAARLPEILEDAENGLPPVAREGLAVLGRQLKDLEQRIAEIEHAISVWHQSQEASVRLAAIPGIGVFSATALVATAGDATVFKNGRQFAAWLGLVPKQHSSGGRIRLAGISKRGDRYLRTLLIQGAHAVLRHRSPRADTWLDHLVQRRHPNVAAVAIANKNARLAWALLAHQRQYQSDFVSCAP

SEQ ID NO: 55308 - protein, 343 aa, unidentified
MKIIRVGVDLAKNVFQVHGVDRCEKVVWRKKLSRPEWLPALLEKIEPGCEIGMEACGGAHHWARELQKRGFVVKLIAPQFVKPYVKSNKNDANDAEAICEAMSRPNMRFVTVKTVEQQDLQAIHRIRAELCDQRRAKGNQIRGLCGEYGLVASRELLQLKAAIPCWLEDLDNGLTYRFRRLLRSLWFDLLQLDLRVKELDQEIQVAADTDPVACRLQQMRGVGPVIATAIVANVGDAKQFCNGRQMAASLGLTPRQNSSGGKTRLLGITKRGDAQLRTLLIHGARSVLRTAASKDDRLSRWVTHLAQTRHHNIAAVALANKMARIAWAMLTKGTDYHPGTVPA

SEQ ID NO: 55309 - protein, 422 aa, unidentified
MRRKESVMNSFAQHTHFAGFDWAKQQHDVVLLDRDGRIVEDFAFGHDAAGWAEFRQRMQKYPSVAVVIETSQGAAVGELVRSEVTVYPVHPKAAKEYRKRHLPSGTKTNYVDAWTLADALRLDGHGWRALSAQDPLVAELRLLCRDEVELITQRTALVNQLQAGLYEYYPAALEAFDDWTQPFTWAFVKAFPTPQKLVSGGRRQQLKFLHAHRLWRADTAEVRLAIFARAEQFCGEPAVTRAKSLLVLSLVAVLTTLEAHLVAYRTEIEKRFAEHPDHDVFGSLPGVGGKLAPRLLSEVGSDRKQYPAAQSLQCVAGTAPVSYESGKVRRAKIRWHCDRQFRHTVHLWADCSRKVCAWAQAYYQAHREQGHSHACALRCLGQRWLKILWRMWQDRRPYDETMHALNQQRHGSWVLQFKPKKA

SEQ ID NO: 55310 - protein, 371 aa, unidentified
MNTVINIGIDVHKDSYSLCSYSFATKQAFGQTKIASNSNLVIKYVRKLQESQPNVEVLCGYEAGPTGYGLYRDLEKAGIGCVIMAPTTLPKASGNHVKNDRLDAMELSKHLAFGTYSAVHVPTSEDEAVKNYTRLRNTRVDALKKAKQNLLSFLLRSGRVFSEGRSYWTHTHYAWLKRQQFIDPVDQETFNEYLQEVYDQQDKVDRYNQRIEQLSQLEAYRDKVARLRCFRGIETHTALSLVSEIGDFSRFANAQQFSSYLGLVPGEDSSGQREKRGGITKAGNTRLRLLLIEGANATLRSSLYGQKSKRLKARQDGNEADVIAYADKANRRLHRVYNNLTNRGVIKNKATVAVARELSCFIWGMMNNKID

SEQ ID NO: 55311 - protein, 337 aa, unidentified
MSEITVIGLDLAKHVFQVHGADPDGRPVLRKRLRRGQVLEFFASLSPCCAGSHYWGRELQALGHEVRLIPPQYVKPYVKTNKNDAIDAEAISEALTRPTMRFTAVKSAEQQSVLMLHRTRELLVRQRTMLVNALRGHCGEFGIVAAQGLSRAGDLIKRIEDPADTALPDLARQALQCLTSQIRAIQEQIALIEKKLLAWHSSCGASRRLAEIPGVGLMTATAVVASVGNATQFRSARQFAAWLGLVPQQHSSGGKERLGHISKRGDGYIRRLLVHGARAHLSWSRRKKQIRSAWLTGLLARRPTNVALLAMANKTARIAWAMLSRGERYQEMIAAAA

SEQ ID NO: 55312 - protein, 398 aa, unidentified
MLHDHPSVGPTAIRTQFGAIFVSLELSRSKWVVTSLSPGNGEKMSQYSLTAGDIGGLLTRFADLKRKARERTGSDYPIITIHEAGLDGFWVHRVLQNEGIESHVVDAASIATSRRRRRAKTDKIDGEALLRALLAFKRGEPRVCAMVVAPSPEEEDRRRLCRERQTLLNERIVHTNRIKGLLFAQGITDYAPLRRDRRKRLEGLRTGDGRPLPVHLKTQISRELDRLELLIDQIRSVEAEHEALLAAESMAAPEAGPAKAGSEAEPRNAVAMLLTVKGIGDHSAAILWSEGLSRQFSNRRQIAAYAGLAATPWRSGAVMHEQGLSKAGNPRLRTLMVQLAWLWLRHQPQSALARWFNTRGERGRKGSIVALARKLLIALWKYVTQGVVIEGAALKPAA

SEQ ID NO: 55313 - protein, 426 aa, unidentified
MKNRTNQRLEEIAVGMLIVGVDVAKSVQWARFVDYRGIEVGKAVSFRNDRQGFEYIVAKMEALCKDKFEKVIIGMEPTGHYWKTLANYLVKAGYKVVGVNPYHTKKSKELDDNSPTKCDKKDAITIARLVKDGRYFDPYLPQDVYAELRVLSNTRVSILKRSSAVKNTITAVLDEYFPEIVKVFKNPLKGKASRQILKSCPFPTFILSLGADAVLGEIKKVVKKTVGMKKVAQLIETAKESIGVEYGLESAKLRMNCLISELEMIENNLNEVEISMEKMLEATGYAEKMLSVKGIGVVTAASFIGEVGDPLRFESDRQISKYAGYNLTEDSSGKNKSGTCISKRGRKQLRSILYKMAFTMVGQNAEMKELYRYLLTRENNPLKKKQALVVISKKIITVIYSMLKKQETYKPELVLGTVRKEMLLAA

SEQ ID NO: 55314 - protein, 356 aa, unidentified
MPVYIGVDFHARQQTLSYLTTKDGEIHRLRLEHTPDDPRHENVRAFYSQFEDAVIVGFEAGGYSRWFENMLEKLGHEVWVGDATQIRRLAIRKQKNDRLDANHLLDLMISGRFPRLVRRSHDSSEVLRQMGYRHQLVKMRTMAKNSLRAIAIGAGLTVRSPLHSERGRARLETLDLSPMEAQQATGLIELIDHLNKEIKRVEEWLAEPAADDQRVLLLRTQHGIGLLTSLALVHTLEPVGRFSNGRKVAAYVGMDPVENSSGDRKQIGSISKAGSKLLRFLLGEAAQVAIKKDEDLKNLFRRVQKRRNTPKATVAVARKLLVRGFIMLRDQIDADEFRRRGVEVRSSRVASGPRSA

SEQ ID NO: 55315 - protein, 462 aa, unidentified
MPERNDRETGESKRRQLQGLPVIRRNVAGVDLGSERHWVCGPTQDGNGREIASFGATTPELLRLAEWLKARQVESVAMESTGVYWIAPHEVLEAQGLQVFLVDTRQLARVPGRDKKTDPSDCEWIQRLHSCGLLRGSFRPEEAVCMLRTLVRDKANLVAESGDWLRRMQKSLDQMNVRVHRAVSDIDGVTGMAILRAIAAGERDAQKLAQLRDRRCNKTQQEIAEQLTGHWREDHLFSLQQALKMYDAVQERIAAYEQEILRQLEEMEEPGQRGQSAPPLNNANKAKAIKRRGQEAKRQGLYRMSGVDITQIDAIGVETVEVVLSEYGPDLSRFPTEKEFVAHVTLAPRVPSSGGKPLKKKKRNSASTRVAAALRMAALSLRHSQTALGAYYRKLAQRLGGDVAVFATARKLATLIYRLLRWGQPYMDEGIEAYEKRYRQQRVKSLTAKAKDLGYELTAVNA

SEQ ID NO: 55316 - protein, 317 aa, unidentified
MSEVTTIKIFVGIDVSKSNLDVAINPSGEILRLANDPTSIESVVKKLRPLSPERIVVESTGGIEKPLVAALAEAQLNVAMVNPRRVRDYARAMGRLAKTDRIDCMVLAAFAANVDTRLTPLKTDEQQLMSALLARRRQLVQMLIEEKNRLASSPTTLRKEIKAHIDYIEKRITRCDDDIDKLITNSELWRAKDELLQSVPGVGPVVSHTLLAGLPELGTIDRKKIGTLMGLAPLNCDSGKHRGKRHIAAGRATVRSVLYMGTLTAIRVNPVIKAFYDRLLAANKPKKVAIIACMHKLITILNAMLKSNSPWRTVEQP

SEQ ID NO: 55317 - protein, 404 aa, unidentified
MNAVGIDVSKGKSTVTIRKPGGKVVLAPRDYKHNRSAINALINEIKSLEGETKVCMECTGRYYEPMATWLSNAGIFVSTVNPMLIKDFSDASLRTPKTDKADSQKIARYTLDRWDKLKQYGLMDETRNQLKTMNRQFDYYMEQKTSMKNNLISLLDQTFPGANDLFTSPPRADGSQKWVDFVYTYWHVDCVTGKSLDAFTEHYRNWCSRKGYGFSAKRAKEIYEISKDLIAVLPKNETTKLIIHNAVDQVNSISKTVETLRSKLYDTAATLPEFPVVMAMDGIGHTLGPQLMAEIGDVTRFKHRGALTAFAGVDPGNNQSGQYTQKSVRTSKKGSPHLRKTLFQVMDGLIKRSPSDNDVYLFMAKKRAEGKPYYVYMTAGANKFLRIYYGRVNEYLNSLNQETH

SEQ ID NO: 55318 - protein, 348 aa, unidentified
MRFYTKTHKHYCGIDLHARKMFICIIDGEGKVLVHRNINCNPDEFLRIIAPYREGLVVGVECMFAWYWLFDLCRKEQIEFALGHALYMKAIHGGKAKSDKIDAHKIAALLRGGTFPIAYGYPPEMRATRDLMRRRNFMVRKRAELIAHIQNTATQYNLPELGFNLACESNRHEAAELFHDPEVRKIIDIDIAMIDSYDDALKILELDIEKTAKKHDKHALLLLRSILGIGPILSLVLLYEIHDINRFETVQQFASYCRLVKCAHESAGKKKGTGGAKIGNAHLKWAFSEATILFIRYNAPAKKMVEDLAKIHGKGKAISILSHKLARAIYHMLKSNKPFDRDKFFATA

SEQ ID NO: 55319 - protein, 398 aa, unidentified
MGVAVGVDIAKEFHWAAASDTSTGEILLSRRVENEPIAIDELIGELGRLGATHGRVTVGIDVLGGIAGLLVAMLAEAGVELVHVPGLAVNRAREGTAGGEHKSDPRDAAVIAELVRTRRDLRALEPAEEIDIEIRLLVGRRRDLVGDQTRRIGRLRDLLVSIHPGLERIIDPTQKSSLWLLSRYVTPSEIRRAGRKRLIDYLARAGGLPRRHIEQLVDTVLAASKAQQLSVPGERVTAEIIRELALELRQLRERLITLDHELEATLDRHPDAALIRSLPGMGATLTAEFIAEAGNLNRFPTPDHLAAAAGLAPVLKQSGKVRYLKRPTGGNKTLKRVFYQSAFCSLSNPASRTFYDRKRAEGKRHHQAVIALARRRVNVLHAILRDRRPFEIKLAKTA

SEQ ID NO: 55320 - protein, 383 aa, unidentified
MTKSSNLYVGMDVHKETIDIALAEGDGRQEVRHYGSIGGDLVVLDQAVRKLQATGKTLHFVYEAGPCGYVIYRHLAGKGLDCVVVAPSMIPRRSGDRVKTDRRDAEMLARLHRAGELSAVYVPHPEDEAVRDLTRAREDAKEAQTRARHQLKAFLLRSGIRYAGKTAWTPAHVRWIARIKLDQPVQQIVFQEYVNAVTAASERLERVEGNLRDAVGEWRRKPVVEALQALRGVQLVVAATLAAEIGQIERFDNPRQLMAYLGLVPSEYSSGPSTRRGSITKCGNTHARRMLTEAAWAYRQPARITPIIARRQDKLAKNIRNIAWKAQVRLCKRYRTLRARGKEHNKVITAIARELSGFVWAIAREVSAVAPQHGLSTGAALRA

SEQ ID NO: 55321 - protein, 374 aa, unidentified
MGKLIRVKGLKQLKAVVGIQTIGLDLGDRFSQFCAVGGKGEILQEGRVPTTVAGMRRFFGGMEPVTVAVETGTHSPWVSRLLFSFGHKVLVAHARKLRLIYENRNKRDEVDARYLARIARVDPELLYPVRHRGESAQKDLAVLRSREALVAARTQMVNHVRGSVKSFGARLPSCSTPAFPKRAAEHVPESLKTALLPVLDCVAQLTEQIKEFDRRIHALIEESYPEARRLMQVQGVGEITSLAYVLTLEDAGRFERSRTVGAYLGLVPAKDRSGESDPQLRITKEGNALLRRLLVQCAHYILGAFGSDSDLRGHGLRIAERGGKNAKKRAVVAVARKLAVVLHRLWRTGEIYQPLYNTERKSKRVGSGEKAMAG

SEQ ID NO: 55322 - protein, 453 aa, unidentified
MGKRSIRLEQIEVIHPHAAGLDIGAEEIFACVPPDRVGETVQSFGTFTPDLIRLADWLSAHRVDTVAMESTGIYWIPIFEVLEARGFQVYLVNGRAIKHVPGRKSDVQDCQWIQKLHALGLLNASFRPAAEMSALRTYLRHRAQLVEHRAAHILHMQKALLQMNIQLVQVLSDITGETGMAIVRAIVAGERDGVKLAQHRDCRCQSAEATIAKALTGTWKAEHLFALKQALELYDFYSGQVTACDVQIEHHYAQMQASQNVPTEKRTPARRKKSKNRPPFDVESEIVRLTGVDLAAVDGLGPALAQTILSEIGTVMSKWATVKQFASWLGLAPHNDISGGKVLRSRTLPTNNRAGQAFRQAAVAVSRSSSAFGAYYRRKRAQGGPQFAQVATAHKIARTVYHLLKYQVQYADIGTEGFERKQRERDVATLQKRAAKLGFTLTANEVAPTQGTT

SEQ ID NO: 55323 - protein, 316 aa, unidentified
MTHNTINVAGIDTGKAKLDIALSPGGQELQVDNSPDGHAALAAWLTEHGVIHAGIEASGGYEAAIIEHLHAQGIAITRFQPAQVRSYAGYRLQRAKNDKIDARMIAACTHDAEPTIVHEPRFSALAEQLTWLEQIEDDLTRAKTRAEAFRQDRQRELIAAEIARLKQLRSVEIRALVKAVRAHKDLARRLTLIQSVEGIGERTALAILIRMPEIGTLSREQVASLAGLAPFDRESGKCQRSRRIFGGRERLRRSLYAAALPAAFQWNEVLIGLYQRLTAAGKPHKVAMIACARKLLIYANTVVKRDQPWIAKTRTT

SEQ ID NO: 55324 - protein, 408 aa, unidentified
MFTILLEDGPLFATYTVPVTREALTAFAERQLGAEDRLAMEATTNTWAVAGVLRPFVQEIVIGNPLRVRAIAEAKIKTDKVDSRVLAELLRCDYLPMVWQPDKETQRLRRLTHRRAALVSDRTRLKNRLHSILHHTLVPLPDGHLFSKKGIAWLRQVPLAQEEALARDSDWRLLELTELEIAELDELLVREAWQDEKVRLVMSIPGIDYTVAQTCLAAMGDVSRFANAKKLAAYLGLNPSTRQSGGHCYHGKITKQGNAHARWLLVQAAQYLGQYRGPLGQTMRKIIRRKNRSVAVVACARKLAVLLWHVLSSGEPFRYAPPKSLQAKFSRLRAGHGSAPQRGSGQGHTAVSAIWTRPDASPAFAFPSAGGKWSARDRSAGQGGKSHAGTEQAGGFLPRTASTFSHRG

SEQ ID NO: 55325 - protein, 392 aa, unidentified
MTAVVIGVDPHKRSNTALVLDARENVLAQQRFANDRDGYRELKRFARSWRDRTWAVEGARGVGLSLAQRLAAEGEPVMNVPAKLSARVRALGGGSGRKTDDTDAYAVAVAGLRSKNLELVQPDDVVTVLKMLADRRQQLVEQRITAINRLHQLLQELLPGGASRRLTATKAKQILASVRPRDQVGKSRKQLALEHLADVTELDTKLKAMAQRIEAVLAEQPSAVTEIRGIGAVTTAVIIGEVGDVRRFPSKDHFASYTGTAPIDASSGDTTRHRLNRGGNRRLNWALHVAAVVQMSRPGPGQDYYRRKRAAGKSSMEALRCLKRRLSDVVFRALLDDLEHRQQEAGPEGHSGATLQSSASDPTPMVSPSDQSQPGPASTDATRRQPRTKVPA

SEQ ID NO: 55326 - protein, 317 aa, unidentified
MSTPPLFVGIDVSKAHLDVALRPTGTAFRLANSATGIAELVARLKPLAPTLIVLEATGGYELPAVAACLAAGLPIVAVNPRQARDFAKGVGKLAKTDPIDAAVLAHFAEAVRPPVRPQAPAERQALDALLTRRQQLIAIRVMETNRLAVATDAALKAGLTRHLAWLDSELADVGRCLDEAVQASPAWRDQDALLQSIPGIGPTTSRTLLAALPELGTISGGRAAALAGLAPYAQDSGKLKGVRTIRGGRPEVRRMLYLAALSAARHGGPLKEFYDRLRARGKRGKVAMIAVARKLVTIANAVLRTQTPWTPALAQTR

SEQ ID NO: 55327 - protein, 364 aa, unidentified
MGPNRTSVGLDVHARSVVACGLDGQTGELFERRLCPDHSEIISWIRGLPGPVGVTYEAGPTGFGLARFLTGQGIDCQVAAPSKLQRPSGDRVKTDVRDARHLARLLHLGEIVAVTVPSVEQEAARDLVRAREDVRGDLMAARHRLSKLLLRQGIVYSGGTAWTGTHDRWLRAQRRASVFATAGLGTAFDIAYDTLLATTARRDRLDAAIAEMAAASEFTPIVTRLGCLRGIATLTAFGLAVEIGDWHRLTGRSIGAYLGLVPTEYSSGSSRSLGPITKTGNGHARRLLIEAAWHHRPPNRIGAELRRRQDAASPAARDRGQRANRRLHDRWVQFNLRRKRAVVANTAIARELAGWCWSLAVLDD

SEQ ID NO: 55328 - protein, 350 aa, unidentified
MLRKFDTAVVTIGIDPGKNTLHLVGLDARGEIVLREKVARAKIVSRLANVPPCLIGIEAGMGTHYVTRELRALDHDVRQVPPVYAKPFRQTHKNDFRDAHAVAEAVQRPTTRCVPPKTDEQLDLQALHRVRYRLVGQRTAIINQIRCFLLEHGITVRQQLHWLRHALPDILAQRTDVLSPRMVRILEDLAQDWRHLDDRIEAVSGEIEALSKNTELCLNLMTIPGIGPIISSAVVAAIGDGAAFARGRDFAAWLGLVPRQISTGDRTILGRITKRGNRYLRMLFLQAARVVLLRPKNWMQHSFGPWLAAAAQRLHHNVLATALANKLARIAWSVLIQHRKYEARLSVAAT

SEQ ID NO: 55329 - protein, 434 aa, unidentified
MTLINFVAANQKYYAFNLLSVFIMVFWSVQYLLQHLLVQTQLSDQLLQPLILILQLPQTPQFRHARPGKFFLPVNGMDYLLPLRLTVRNVLTGRITMNIVFLGIDLAKNVFQLCGVNQAGKPVYTKRTGRKELLQTLANIPACLIGIEASTGAFYWQREFEKLGHKVKIISPQYVKPFVRGQKNDGNDAQAIAVALMQPTMQFVPPKSPEQQDVQALHRARQRIVNHRTATVCQIRGLLLDRGIPIGSAVSRARRAIPLILEDAENGLSSRMRRTIAELYDLFNDLGRRIHFFDKEIETVFRQSEACQRIAKVKGIGPKTATAVVAAIGKGTEFKNGRHFAAWLGLVPRQHSSGDRQVLMNMTKKGDKHLRTLFIHGARAVVRVATNNNDGHMNQWVNQLKERRGFNKTTVAVANKNARIIWSMLRNETEYQVV

SEQ ID NO: 55330 - protein, 411 aa, unidentified
MELLHPRCAGLDVAKDEVVACVRVPDGQGGRAQEVRTFQTFTSGLEALAGWLAGEGVTQVVMEATGQYWKPVWYVLEERGFALMLVNARHVKILPGRKTDVCDAAWLAELLEHGLLRGSFVPPVPIRELRDLTRYRKRLIQAHSAEVQRIQKILEDAGIKLDSVAADVLGVSGRAMLAALVAGERDPGVLAELAKGRLRAKLPQLRQALRGRFSDHHALLVRLALAHLEQLEASIAELDTHIDRVLAPFARTRDQLDTITGVGKRAAETIIAEIGVDMTVFPTAGHLASWAGRCPGNNLTGGKRRSGKPSRGNRWLGEMLTECAWAAARSRDTYLSAQFWRLARRIGKKKAAMAVGHSILVIAWHLLTNDCDYQDLGGDYFVRRDTDRQRQRAVAQLQALGYRVALEPLAA

SEQ ID NO: 55331 - protein, 360 aa, unidentified
MEVGQEVVLHPVVGGVDTHKDLHVAAVVDEHDRVLGTRCFATTRQGYRQMLAWMRSFGQLRCVGIEATGTYGAGLLRSMQNAGVEVLEVTAPDKPDRRKRGKNDDLDAQNAAHAAFAGKRTVTPRSRDGMIESLRVLKACRKTAVVARRIALQMIQNTIVCAPDGLREALRQMTRMQLVRTLAAWRPDLTDYRNVDSAYRISLKSLGRRYVELHDEIADLDVMIAAIVDELAPNLVARNSIGHAGAAQLLLTAGDNPERLHSEAGFAALCGVSPVPASSGKTTRHRLNRGGDRAANSALHIIAIGRLRTDPRTKAYMAKRVAEGHSKLEVIRCLKRYIAREVFTLISHRQKEINQARITA

SEQ ID NO: 55332 - protein, 376 aa, unidentified
MLHHCSAEEWLEPDAGRLACPVLRGRRRRNAPPLPDQLAEADAQYRVRRRERLTRTRFTQWMSNHPRCQVVMEACGSAHHWARVLGSCGHEVRLLPAQHVRAYVRRSKTDAADAAALIEASRCEEIKPVAVKSVEQQVLQQLHRLRTQWQDARKARICSLRGMLREFGIDIPLGATRGIAAIREALEIADNGVPDALRPYVCEVLKEIGELALKAKGVERSLRDLTREDPTVKRLEQIPGVGLIVATAMRAAVADIHRFPSGRHLACWLGITAKEHSSGERRRLGRISKQGDVYLRTQLIHGARSALLAAKSAACKGLELDRLRRWALETEKRVGHNKAAVALANKLARIMWATWKYDRDFNGSWKHPSAAMNKTA

SEQ ID NO: 55333 - protein, 402 aa, unidentified
MPNIEIGVDFMVKENFIYVGIDLHKETHTAVMIDCYNQKLGEITFPNRPADFPKLVTKVKKCNTDAKEVVYGLENAYGYGRPLAVWLIDKGYFVKDVNTAISHRQAKHRGAMYRKSDSDDAEAIALATLNMLDKLPDACPNDAYWSLGQLVHRRDNIMKQRTRLVNQLHEQLCIAYPSYKQFFNDISRPTALYFWEHYPSRKYLKGKSVEDLRTELVPVSHNRCSTKNCEKILDAVASDKVKNNAYQDARDMVTLSIVSDLQHYDSQLAEVDKMLEQMYKMLGCTLTTIPGVNVITAVKILAEIGDIKRFSNANKLAQFAGIAPLHLSSSGKGKDVATKQGNRRLQVTIYFLAIQMVQLSSKGTPRNPVVRAYYEKRKAEGKTSQQALICISRRLISIIYGM

SEQ ID NO: 55334 - protein, 355 aa, unidentified
MKRLHQSNKVNFEGQIFFIGIDVHKKSWTVTIRLNGMELKTFTMKPDAEKLQKLLKRNYPGGHYFSVYEAGFSGYWLHYELKALGFHNIVVSPGDVPLSNKEKSYKDDAVDSRKLARELENNSLKPIYVPTPEQSATRQISRLYALQSKENKKVKLRIKSFLNYLGIEIPVEVGDRWSNRFINWLEHLELENDGNRYYLDQLIKDLKSRRKDILTTLKIIRNTYAVLPLIKRLRTIPGVGLITAFTFYAEIMDMHRFANENKLASYVGLIPSVRSSGSKVRVLGLNHRQNKLLKFRIIESAWSAVKVDPALTASYMDYLKRMPKQKAIIKIARKLLNRMRSVWLNQEEYEIGRMQ

SEQ ID NO: 55335 - protein, 349 aa, unidentified
MEKTTIAIDIAKKVFQVHKVDPETGEITRKRLDRREVAPYFAQLKPCGIAMEACGTAQHWARLFRTQGHNVKLISPQFVKAFVKTNKNDVADAQAIWTAAHQPEMRTVPVKSEEQQAILALHAVRERFKKTRTAAVNQLHGLMGEYGIDLPKGWRTMLPKAAAALDDDGSSVPAILRPQLREQLDEVRELTEKIDSVEAQLSAWKRREEDCMRIAAIPGVGLLTATAMVATVGDDAKVFRSGREFAAWLGLVPRQSGTGGKTKLFRISKRGDVYLRTLLMHGARSVIVANTGKMSPDPWLGNLVAKKAFNVATAALANKMARQIWALLAHKRDYQPSRSPVNVAEVAEA

SEQ ID NO: 55336 - protein, 338 aa, unidentified
MPTDQTGQTYALFVGVDIAAQTAMVATQRPGAKASRSFTIEQTPEGYTSLLRQLQATGFVPCQVLVVMEATGSYWMSLATRLVHEGFAVSVINPAQAHHFAKALLKRAKTDAIDAQTLAQLAMILQPEPWTPPPQIYYALQQRLAQRDDLLNLRQQVRNQLHALVQHPEVIAEVRARMESLLATFASQLTEVESEITAALSQDSAWAAAATRLQSIKGVGWVTAAWTLVTTLNLTSCDTVDALTAYAGLAPMPRQSGSSVWHRPSIGHTGNGRLRTAFYMATLSAAQHNPVIKAFYTRLREVGKPEKVARCAAARKLLHIAWAVVKKDQPFDPNYALG

SEQ ID NO: 55337 - protein, 346 aa, unidentified
MYRNKDIILAVDYHAENTEVRWLNCHTGEERRTNIPTARASILRLVEKAVAEAAEVGGKVIWIMESTTGWARVKELIGKRVRFIMANVLQMPLPPKAYRRKSDKIDTGRILREFLNGSLPQSYHPAAWWRQVRRLVDSRQDLVERQTAVKNWISHFLHHETWYDRRKLWTQKGMRRLRALRFSPADRMLLDLKLQELEELADRRKQMEAAMQAVYDRWPEAQRVDEVRGIGMVTAVSILAHIGPIERFPTAEDLISYAGLAPGHRQSDDTRHNGKIGGGGTDSHLRYLLIESMQWVCQIPRYRSAFDRAADKHGTNIARIIVARMLLRSIFKMLRDGVRFNQVPAA

SEQ ID NO: 55338 - protein, 370 aa, unidentified
MTQCIKMQYVGLDVHKDSIVIAVAEEGRKPGRVVGTVPYDMKALRKVLDKLGPRSSVSCCYEAGPTGYGLARALKATGWTCEVIAPSLVPKKSGERIKTDRRDAVKLAQNHRSGELVPVFIPDPQCEAIRDLERARDAAKKAERVARHQLSKFLLRNERRFPGKTSWTPAHLAWIAKQTFSEPAQQHVLADGLATVEAATLRVEQLTQRLRELTETWHLAPLVKAFQALRGVEFVTAVTLAAEVGDFRRFARAVDFMGYVGLIPSEQTTGNTRRLGPITKTGNAHLRHVLVEAAWHYRRQPRISKALRDRSVGIAPGVCAIAWKAQKRLHHKLNRLIGRGKNPCEAATAAARELAGFIWAIAREEKLLAS

SEQ ID NO: 55339 - protein, 354 aa, unidentified
MITMTRTSESTAPTGGLLLAFELGQRSWKLGFTVGMGQRPRIRQMPAGAVSALVTEIERAKKRFGLSSDTPVTSCYEAGRDGFWLHRYLVAYGITNYVVDSSSIEVNRRARRAKTDRLDLAGLLSLLARYVLGDRRAWRVVRVPTVAEEDARHLPRTLEALTQDRSRLMSRLKSLLTTQGVSLPIDGQFLKQLKAAHLWDGTPLPPGLHERLTRTWTQLRDVNGQIRDLKALRLTRPENLTPATSHIRNRRELGALVGLVPAPYQSGETDYDQGITRAGNAHVRRVIVQLAWGWIRHQPDSALTHWYQQRFGAGGKRLRKIGIVALARKLLIALWRYLETGAVPDGAQLKPMEV

SEQ ID NO: 55340 - protein, 353 aa, unidentified
MGRKKMKMDINNPNASGIDVGSRSHFVAVGQEESETKEFGVYSKDNEALADWLEECDIQTVALESTGTYWQNLYLVLQQRGFEVILTNGKFTKNIKGRKTDVQDCQWIQKLHSLGLLTGSFLPDDETEQLKTHCRQRTAWLEQGGAVIQKMQKFLCLLNLRLDIAVTDIAGLTGLKIINAVCNGITDPNELAKLVHRNCKKSPEEIALALNCNHRKDLLFGLKQENKMYLTIREKLVECDEHMKVFIDQHLNNNPEKKQLKAPKKNYRKKNKNAPKNMNMNQIAYQYFNGVDLMSIEGVSDRNVIALMSELGPEGFKKFPTHKHFTSWLRLAPNNKISGGKKLSRRVGKGSNK

SEQ ID NO: 55341 - protein, 340 aa, unidentified
MNHYAGIDVSLECSSVCVVDASGKIICEGKVASEPEALISWLALVGVSLARVGLEAGPLSQWLFAALRQAGLAVELLETRHVRDAFKAMPVKTDRKDARGIAQLMRLGWFRPVHCKSMAAQETRAVLTARKLVQAKLHDVEMSLRGILRGFGLKVGKTTPRRFEGRIKELVGGHPSLEVVVAALLAVRAVLWREFDALEKRVRSMARDDARARLLTSVPGVGAIVALTFASAIDDPARFKSSKSVGAHFGMTPRKYQSGETDVSGRISKIGDGGVRTAVYEAANVILTRPVKGCTSLKSWAMKLAKRAGMQKAKVALARKLTVIMHKMLADGTTFTNRPA

SEQ ID NO: 55342 - protein, 367 aa, unidentified
MDSVTAAAEKIYLGMDTSIATIVVGVLRPGSEVPVVEAIPNDAESVRRLAGKFPDRRLLAACYEAGPGGYELHRLLVSMGVACDVVAPSLIPRGAGERVKTDRRDAVHLALLHRAGLLTPVRVPSPEEEAIRDLVRTQADLADDRKRMMQRINALLTRHGRVWKTARWTADHRTWLERQSFAEPPLQAALRTYLAALDAREAELAVLERQLRDCWAGVEWLAPAVRRLGCYRGIAELTALTLAAEVTDFRRFGSARAFMGFTGLTPSEYSSGARTRRAGITKADPQLIRSARVGLGLPAPARDRGHAAAPPAGRLPADPRQILEGAAAAACHLHQTDPARQDSHGRGDRGRPRARRVRLGRDDQLNR

SEQ ID NO: 55343 - protein, 412 aa, unidentified
MDVIYTCGCGLDVHQKTVAACLITSTEGPEPVKEIRTFRTMTADLLALADWLQEAGCPHVAMERTGVYWRPVSNLLEGQFELLVVNAQHIKTVPGRTTDVKDAAWIAELLRPGLLRGSFIPSKPQRQLRELTRSRSTLVQDHARTLNRLQAVLEDANLKLASVVTDIYGVSARAMLAAILAGQRDVETLADLARGRLRAKRDQLKEALEGRVTAPHSFVLTEPLSTLESLDEAIARLSAEMDQRLTAEQTAIALLDTIPGVGQRAAESLSAEMGTDMSRFPSAKHLASWAGMGPGNHESGGKRLSGKTRQGNRWLRQSLVEIAHVASKTKNTSLAAQYKRLAARRGKKRALIAVGHTVFIIAYTLLTRQQPSQDLGAVYCDQREQQRVARRLVQRLERLGYEVSLQPKALAS

SEQ ID NO: 55344 - protein, 346 aa, unidentified
MEHYAGIDVSLELSSVCVVDAQGKIVRETKVASEPEALVAFFASLGFAVKRIGLEAGPLSAWLHAGLKRAGFDTVLLETRHVKAALSAMMVKTDRKDARGLAQLIRMGWFRPVHAKSMGSQEVRALLVARKQLLGRLIDVELSIRGILRGFGLKVGVVTRKGFEGRIRELVTGHITLERIAGAMLSARATLKVEYEKLHKIVLTIVREDAVCRRLMTVPSVGPLVAITYKSAMDDPNRIAKSKAAGALFGLTPKKYQSGEKDVTGGITRTGDEMVRTALYEAANVLLARITRFSKLKRWGMDVAKRRGSKRAKVALARKIAVILHRMWVDGTTYRWTNAHPTAVQV

SEQ ID NO: 55345 - protein, 325 aa, unidentified
MKIIGCDFHPGYQQIAMLDLATGEMVEKALSHERKEEARAFYAGLGGSVRVGIEAIGQSQWFERTLAELGHEVWIGDAAKIRASCERKQKTDRRDAELLLRLLAEDRFPRIWVPTAAERDGRQLLLHRHKLVRIRTQVKNQLQALALNQGVQRKWKLWSKTGRKQLELLPLLPWASRRRAELLQLLDQLEASIAELDRAVAEQAKARPAAQRLMTHPGVGPVTALAFTLTMGPAERFSRGKQVASYLGLIPSEHSSGGRQQRLGHISKQGNPFLRGLLVEAAQSAVRHEPEMRRAYQRLAQRKCRGLAKVAMARKLAVRLYWMLR

SEQ ID NO: 55346 - protein, 404 aa, unidentified
MKRNKNVAQSYIRREPVMKKNTLYVGLDVHAETIAVAVAEGEREGEVRSLGIVANRPDSISKLMKKLQKEHKNISVCYEAGPCGYTVYWQLVVMGVSCDVIAPTLIPTKAGDKVKTDRRDALKLARLFRAGELTSVWVPDRALEALRDLVRAREAAKKDQRTARHRLQKFLLRHGICKQDKLTNWTQKHLLWIKTLKFEESSLELVFQDYLHEVEHQRDRLVALDAAIDKAVESSPEHIREVVAALQLLRGVAKVTAVGVVVEVGNFSRFCGPSKLMAYTGVVSSEYSTGGPGKRKQGGITKTGNSHLRRLITEAAWAYRYKPSVNQRIQKCQGEVSLELVTELKEISWKAQRRLHERYKSLMNAGKAKQVAITAVGRELLGFIWSIAVTVEKHQAAKKTEKVA

SEQ ID NO: 55347 - protein, 340 aa, unidentified
MEIKTLGIDLAKSVFQLHGVDADGAVVLQKKLRRGAVLDFLGKLEPCLIGMEACATSHHWAREIAALGHDVRLISPSYVKPYVKRQKNDAADAEAICEAVTRPNMRFVPVKTDAQQSVLVLHRSRDLMMRQRTMTLNALRAHLAEFGIIAAQGPRKVVELVAELRDNETHKVPEVARVGLLALAAQLDSLATAIRNIERQLLAWHRHNPASQRLETIPGVGIITATALAASVPDPSVFKSGRQFAAFLGLVPRQNSSGGKYRLGHISKMGNGYLRRLLVVGATSVTRRAETTDTQTGAWVRSLLGRKPTRLVTVAIANKTARTAWAMLTRQESYRASAMA

SEQ ID NO: 55348 - protein, 359 aa, unidentified
MKHYIGLDVSLKTTSICVLNEQAKIVREECVTTDPHDIARTITQIGVNVEIVGLETGGTSHWLVKELMKHKLPVICIDARKMAAAISIRTNKTDKNDAREIANALRTGYYKEVHQKQDVTVATKTLLTVRRALIDQRTQTINCIRGILRAQGKLDCGSSQNKKKFIEAVKSALQNLPDEVKMSINALLHTFEPCCNEIEKIDEKIEALTNDDEDIKLFKTIPGVGSVTALTYKLEIDDPSRFKKSRSVGAYAGMTPKQYSSGDTKKQGGISKTGSSELRMLLSEAAMRMMYNTKTWSRLKLFGLKIKKKHGHKKAVVALGRKLAVIMHRMWIDHKPFEYGDVEQKEVAKLLQKRSRNRN

SEQ ID NO: 55349 - protein, 401 aa, unidentified
MNAVGIDVSKGKSMVCVMRPFGEVVLEPFEVLHTAQNLNDLAGKLKALDGETRVVLEATGNYHKPVAFVLHDAGLFVSVVNPVLIHDYDNNSLRRVKTDRKDAVKIANYTLDKWTRLRQYLPEDDTRLALKNCYRQYQQAVAVRTMLKNNLISSLDLTFPDANKLFSSPAKSNGCEKWVDFIGDFWHSECVSSLSSDAFAKKYLKWCQKHGYNFTRSKSDTIYACAVNAASLPKSPTSKLLIQQQVAQLKAVSQSVAAFQQEMLRLSQQLPEFDTVMEMYGVGPSLGPQLMAEIGDVRRFSSKKSLIAFAGIEPQPNDSGKIMGNDKGISKVGSAVLRRTLFLIMTVILQTQPQDEPVFQFMNKKRSEGKPYKVYMMASANKFLRIYYARVKAVMDSKHSK

SEQ ID NO: 55350 - protein, 412 aa, unidentified
MEVVHERCAGIDIGKKFAVVTIRLAGSGRRKVEVITRRYEAMTPSVLALREDLIAAGVTGVVMESTGQYWKPFYYALEGAGFDLVLGNAREIRNMPGRKSDVSDSRWLAELGAHGLVRPSFVPEPAVRQLRDLTRDRTALLRLRAKVLTRIQEVLEDAGIKLTSVASDINGVSSRAILNAMIAGERDPVTLAGLARGRLKAKHETLVEALAGRLEQVHTFRLEQLLAEADHLQVTADRYTEAIDEALGPYRPFRDLICTIPGVSTIVADVITAETGADMSQFPTPKQLCSWAGVTPGSNESAGVVRQGRTGHGNKHLKGVLGIAAMSLSRNRNTYLAARHHRIAARRGRMRALVATQHKILETIWHMATTNTPYHDLGGDYFLRRDPARATRRALAQLHHLGYDITLTPTAS

SEQ ID NO: 55351 - protein, 355 aa, unidentified
MKYYTSTTQFNCGIDLHAHQMYVCLMDRDGHKLVHTNIRNNDFNFFLKLVAPYRHDLTVCCECMFGWYWLADACANAGLHFVLAHALYLKAIHGGKNKNDRIDSEKLAHLLRSNFIPPGYVYPAAQRPLRALLRQRLNFVWQRAQLLTRIQSHQQAHNWQSPPPTSTHRDRWQEHLLAHEANPVYQLTLQNHIALIGHYDAQIAAVESQLKKLTRAHAHRDFSLLQTVAGIGEHLGLTLLYEIGDITRFPTVKDFLSYCRLVKGTVASAGKIKGLRGAKLGNPYLRWAFGEAAIIAKRDPALIGPLYQRLEARLNGNKFKANTVLAIKLARAVYFMLKNQTVFDPQRLVAALAHN

SEQ ID NO: 55352 - protein, 389 aa, unidentified
MKIFVGIDIAKLNHFAAAISSDGEIILEPFKFTNDADGFQLLVSKLESFDKNSIIIGLESTAHYGDNLVRYLVTELYQVCVLNPIKTCQMRKNNIRKTKTDKVDTYVIAKTLMMQDDLRFVSFYDLDMMDLKALGRFRQKTIKQRTRLKIQLTTYVDQVFPEIQYFFKSGLHQNAVYALLKEAPSPKEIVSMHMTHLANLLKVNSHGHFTKEQAKELRVLAQKSVGANDSAISIQITQTIQQIELLDSQLDKIEAEMTDIMKFNDSVIMTIPGIGYINGGMILGEIGDIHRFSNPNKLLAFAGLDPSVYQSGNFQAKTTRMSKRGSRVLRYALVNAAWNVVRNNATFKAYYDAKRAEGRSHYNALGHCAGKLVRVIWKMLTDKVEFNLE

SEQ ID NO: 55353 - protein, 350 aa, unidentified
MTMRNKPRDAAVYGIDIGKNLFHVVGVDASGAPVQRVRFRRDTLLQFFERAAPAIVGMEACPGSQWLARKIQSLGHTVRIVPAQFVKPYVKSNKNDVIDAEAIAEAVTRPTMRFVEIKTTEQSDIQSLHRARDGMVMSRTRMICQMRAFCLEFGVAIRQGAGVFKIDMPRALADETNDLSPAMRRLLSGLFDDLLALEKRIAEITREIEAVVDRDDVARRLLTIPGVGPLGASALLAAVGHGQQFKKARDMAAWLGLVPKQYSTGGRSTLMGISKRGNAYVRRLLIHGARSCMMHLDRSRNRLGAWIDQLQTRMHVNKVVVALANKIARIAWVIINRPGVLYERVDPAFA

SEQ ID NO: 55354 - protein, 310 aa, unidentified
MDAIYVGVDVSKDRLDVHARPSGEAFVVSRDGKGLEELVERLGQLAPALVAVEATGGFETIVAAAIAGASLPLAVVNPAQIRHFAQAVGKRAKTDPVDAAVIAHFAEAVRPAPRALPDEAARLLGELVGRRRQIIDMIVAERQREKRATNVRVRKSLARHLAVLEKELREIDADIDTLVRGSPVWRAKEDLLASVPGIGKTIARTLIAELPEPGMLGRRQIASLAGLAPYTRQSGRWRGRSMIAGGRSSVRSVAFLAALVATRHNPPLKGFYQSLLHLGKPKMVALIAVARKLLTILNAILRDNRPWQNA

SEQ ID NO: 55355 - protein, 343 aa, unidentified
MTEVSTIGLDLAKNVFQVHGVDVAGETVIRRQLRRRQVLPFFRKQPPCLVGIEACATSHYWAREIGALGHEVRIMPANYVKPYVKRNKNDAADAEAICEAVTRPSMRFVAVKTAEQQSVLMDHRTRELLVRQRTMLVNAIRAHMAEFGVVARVGLPQVKELLAVIAEPGDERIPPLARTCLEGLARQLLSLEREITTTEQRIHAWHRANEVSQRLATIPGIGPITASALAASIADPSVFRSGRELAAWIGLVPRQTSTGGKQRLGRISKAGDHYLRWLLVAGAMTVIRHGRRTNFEKNPWLGDLVARKPTKLAAVALANKNARTAWALLANGGTCRQPAVTTA

SEQ ID NO: 55356 - protein, 344 aa, unidentified
MNTIKVVGIDIAKSVFQVCVWMADGSVAWNRKISRQKLLHMLRQFPPQTLIAMEACSTSHFWGRTLISMGYDVKLIPTQHVKAFARHQKNDANDALAICETACRPGIHFVSVKTTEQQDIKALRSARQLIVEQRTALANQLRALLAEYGVIIPAGLQRLQQQLPEVLEDGDNTITFTLRRLLSLLREDMQMLTERIDVLDKELAELSSQQVAYHHLLTIPGVGPLIAAAVVSEVDATQFSSGRELSAWCGLVPQQHSSGGKQRLSSMTKNGNRNLRTLIIHGARAVMRCVQKRDDSLGRWVKAIELRRGFLKATVALANKLTRIIWRVLTDSVDFSMSRAFAGS

SEQ ID NO: 55357 - protein, 340 aa, unidentified
MAIVMGLDQHRAQITAEWIDTDTGEISRMRVAPADRAAVCRFLERFSGQQLEVALEATTGWRFVVEELRAVGAKVHLAEPAETSALRGPKQHAKSDRADARHLRELLLTGRLPECWIPPDHILDLRAQVRLRHTLVDERGEWQQRIRAVLYHHGLPRRSDLDLLTAAGRDWLTELSLAAAARDQITVALRMISALDTEIPAIDKQLHGYARRQPGCRALMSHYGIGELTSVAILAELGDCRRFSSSRYAVRYGGLDITVHASDRRRAPGHLSRQGPPVLGWALYEAAQAATRPSSPDHAYYRQAAQRLGHNRACLAIARNLLKRSYHTLKELGDQALAPA

SEQ ID NO: 55358 - protein, 369 aa, unidentified
MKKNSKNSKENARRKALEARSRKTRLTVGIDLGDEWSRCCFLDDKGEIVEECGVKTTREAMKARFGGLKPALIAIEVGAHSRWVSQLLKELGHEVIVANARELRAITGSDRKSDKVDAEKLARYARVDRRILRPLQHRGEEAQVDLLVLRGRAVLVKTRTQIVNSVRGMVKSFGYRMPPSSAEHFAQLKNQVPALLRESLAPMMEALEQVQKKIEDYDERVKKLATEKYPETKVLRQIWGVGEITTVSFVLTIEDKERFGKSRDVGPYLGLRPRRNQSSESDPELRITKAGDCFLRSLLVECAQKILTKKAPDTALKQFGMRIEARGKKKAKKRAIIAVARKLAVLLHKLWVTGEVYEPFPGAKQRKAA

SEQ ID NO: 55359 - protein, 442 aa, unidentified
MAQRNRPLLVTHPDAAGIDIGSAAHFVAVPADRDEQSVREFSSLTCDLQATADWLKRCGVTSVAMESTGVYWIALYELLEARGFEVLLVNARHVKNVSGRKSDVLDCQWLQQLHSYGLLRGAFRPGETVCALRSLTRQRAMLLRGQGRCVQHMQKALTQMNIQLANVISDIAGASGQKIIRAIVAGERNARILAAMKDRRIRASAEQIAKSLEGTWRAEHLFALKQALDAFDFHGQQRTQCDEAIEAQLQTLHTHAGEPGPSKRRGRARNAPRFDLRTQLFQICGVDLTRIDGIDVTTALAVVSEVGPDLSRFASVKHFTSWLGLCPGTKISGGKILSGKSKRTANRAAQALKLAAAALKSSQSALGAYYRRMCARLDRAKAVTAAAHKLARLVYFMLTKGEEYTDQGQDYFEERYRERVLRQLQKRAEKLGMRLAPVENPA

SEQ ID NO: 55360 - protein, 346 aa, unidentified
MSSFTIGVDIAKRVFQVHVVDSNGEVQAARKLRRSEFLDFLSKLPPSLIGMESCSSAHHWARELSAMGHEVKLMNPMYVKPYIKRGKNDAVDAEAICEAVTRPTMRFVPIKSVDQQSVLMVHRTRSLLIKQRTMLVNALRGHLAELGIVAPVGIERIAELVDRVTGREGDEIGIPPLVRSLVEVFSQQITVITEEVKALEKSLRSWHRTSEASQRLATIPGVGEITATALAATVPDPSFFQSGRAFAAWLGLTPRSNSSGGKERNGRITKAGDRHLRTLLVLGATSVIRRVRAGQPTPIYGWVNRLLGKKPARLASVALANKLARIAWAVMARSTDYQPQRAALAL

SEQ ID NO: 55361 - protein, 362 aa, unidentified
MAGMDLHGNNVMVGIVDAQGARLQHRRLGCELPEIIEFLAPYKTELESIAVESTFNWYWLVDGLRAAGFPVVLANPAKIDQYGGIKHADDKNDAYFLAELQRLKILPTGYIYDPELRPVRDLLRRRMSLMRQRTTLFLSAKSLHQRTTGRALELRRLKAMEPEEAVALYTHPANQLIARIQKEHIDSLDQSIRQIEKAVMKVALQQPYYQRLQTMPGVGIILGLTISMEVGNIDRFAGPGQFASYCRTVDAKRVSNGKTKGENNQKCGNKYLAWAFVEAAHGARRFDTACRRWYDRKAGKRCPTVATKALACKLAKAAWYVMAKGEEYQAGRVFPGLTEPKAEEISGEQASARKGVGPNPED

SEQ ID NO: 55362 - protein, 401 aa, unidentified
MSGLKGSFGCFVGIDISKDKFDTCGITGDEVKLFQFSATMDRKGFDKLKGHIASVSGSSVLIGMESTASYHVNLFSYLVSEGYNVILIDPLLISNYVKMQLRKTKTDKKDAVVIAQFLRTNGDSLIQRVTSSLISDLRDLARQRESLVDEMTALKIEIKRLLNITFPELEHMVGIFTKSILKLLQRYPSAFALRDADLGQLSQTLIADSYGHKREAFATELIKTAHASIGSSSSAKEMILKQKIALLLHLEGALQEITDVLIEMSRKLMEEDINIMTSIKGIGDKTGVNFLIEMGCDISQYDRSGKIIAMAGLDPAVYQSGNHEGKGRITKRGNRHLRRVIWLMTTRVIHYSDIFKAYYLRRRKEGLPYKMAVLATAHKLIRVIYAMLTQRTSFCPQANSL

SEQ ID NO: 55363 - protein, 355 aa, unidentified
MERYIGMDVHAASCTLAVISEKGRRLKDFPVETNGQALVEAIRMIPGHKHLVMEEGLQSAWLYETLSPHVDELVVAGITTSRGPKSDKRDAYGLAEKLRVGNLDKHVFKAPRQFTRLREFSRTHMTLVGDVVRTQARIKSAYRSRGVLVTGIDVYSSRRREEWLKQLPSATKIRATRLYSHLDFLLEQKKQAESDLLREAKKHPIVKILETAPGFGPIRAARLVPIVITPHRFRTKRQFWSYCGLGIVTRSSSDWVQTADGAWIKSRVPQTRGLSRQHNHFLKSIFKGAATTVVTQRNKDPIHARYERLLDGGTKPTLAKLSLARMIAATVLRMWKNEEEYDPGRAGLPIKARKG

SEQ ID NO: 55364 - protein, 347 aa, unidentified
MDVSLIASVGIDLGKTTFHLVALDCHAKVILRRKLSRTQLLAYTANLPWSIIGMEACSGAHFFAAKLRNQGHEVKLIPGQFVKPFVKTNKNDFNDAEAIAEAVTRQNMRFVPIKTDDQLDLQALHRVRDRLVHRRTALINQIRGFLLERGIAFPKGPANLRKQMPVILEDAERNITARMRRLLDDLWQEWKQLEANITKISEEIEHISHEDQGCRRLRQIPGVGPLVSTAMVAAIGNGAAFRNGRDFAAWLGLVPRQHSTGGKPRLFGISKRGNTYLRRMFVHGARAVLLRVKYDTGGLGQWVHQLEARTARNKVIVAIANKLARIAWAVLFNQQDYRATAAAAVAA

SEQ ID NO: 55365 - protein, 343 aa, unidentified
MEYYVGLDVSLKQTSICVVDQTGSVVREGVVDSDPEAISVYVRSKAPGAVRIGLETGPTSTWLWTELKRFGLPVICIDARHAKAVLKMQINKNDRNDAIGIARIIQTGWFKEVHVKDIDSHSVRALLASRALLVKIKRDLENHVRGLLKNLGLVIGRATFNVFAARAEELIEGRPDLVAAVRPLLEARNAVEQQVSELDRKVMKLARRDAQVQRFMTVPGVGPITALAFKATIDDPARFARSRSVGAYVGLTSRRHASGEIDWSGRISKCGDAMLRSYLFEAAGVLLTRVPKWSTVKAWGMRLAKRNGLRKAKVAVARKLAVILHRMWIDGTEFNWSKKEIAA

SEQ ID NO: 55366 - protein, 338 aa, unidentified
MEITTLGIDLAKLNFQLHGINHYGKVVLTKKVTRNKLLEVVAKLPCCLIGMEACASSHYWAREFERFGHQVKLMSPRFVKPYVKTNKNDFRDAEAICEAVTRPTMRFVPIKTVEQEDIQALHRSRSLLIKNRTALINQIRGLLAEYGLVIPKSAAKVRPMLIRILENQHEQLTSFGRETFFDLYDQLVDLEKRIEKMHQRLEVHFKKHPVCQKIAAIPGIGQLTATALLAAVSYPQAFKNGRHLSAWLGLVPRQYSSGGKEVLGKLSKRGNRYLRTLLIHGARAVVYRSENKKDSLSLWTNNLKRKKGTNVAAVALANKNARVVWALLAHDDIYRKAA

SEQ ID NO: 55367 - protein, 390 aa, unidentified
MFYLGIDIGKFHHAAALLTHEGKVVATLSSFPNTHDGFQELLTLITCHLPAGEELRIGMEATGPYWIPLAEWLKTKGWPPVVLNPIKTSSLRNYGVRGSKTDNIDSVLIANALRFEGSQPQKVSPKHSEELRHLTRLRADMVKDRTRLVLRVTSQLDRLFPELLCSFSKTTSPSCLALLAEVPTPDRVLALGEEKLTALLRKASGGKLGVARAKEILGKAASSIGVSSPALEEVLVLLLEQINLIDRQLKALDRRIADLYDQAGLFFTTIGGVGILTAATILGEFGSVDRFTKATQMVAFAGVDPKLRNSGQHQGQVHISKRGSPYLRRALYLACQGAVRNDGHFKSIFQRHRDNGKSYKEAIVAVMNRFIHVLYAVWRDNRPYSPLTPA

SEQ ID NO: 55368 - protein, 346 aa, unidentified
MTHFVGLDVSVKETAVCVVDEAGEVVCEQKVPSEPDDIVTLLTSIGVDYGRVGIEAGPLSQWLVNGMAEAGLPVICVETRHMKSLLKAQQINKSDRHDARGIAQMMRVGLFKPVHVKTLASQEKRMLLTACKLVQRKMLDVDADLRGILRNFGLKVGVVGQAGFETRIRELVEGLPRLAAIVEPMLTIRRIMRQEFTRLHKLLLDIVRRDPVCRRLMTVPGVGAVVALTYRATVDQPQRFVHSRAVGAHVGLTPRSHQSGEIDYDGGISKAGDTMLRTMLYEAAQVLLTQHGHWSWLKAWGMRVAQRRGQRRAIVAVARRLAVILHRMWIDGTDFRWGSEPAAAGA

SEQ ID NO: 55369 - protein, 367 aa, unidentified
MEPIYIGVDFHSRRQTICYLKTETGELVITELKHQDKERVRAFYQQFPGPVIVGLEASGYSPWFEAMLEELGREVWLGDATEIRRRARWRYKDDRRDAELIWDLMVHHEFPRLHQPAPQSREILRMLRYRQKLIKVRTMTKNSLQAIALQAGLAKGKQLFTAAGQVEFKAVAMSPVLQYQRDHWFELLKPLNQELLETMKWCKAAAKGDAAITRLRTHPGIGLLTALCLQHTLQPVSRFRNQRKVVAYAGFDPMVRRSAESVIRLGISKAGSRMLRYLTVEAVQTAIRHDEDLKRFYKRLAERRGRPKAKVAAARKLLIRAYIMMRDEIDYAEFRRRAVAVRLARCSQGPPSSVPEVLIGQSTSPGA

SEQ ID NO: 55370 - protein, 331 aa, unidentified
MNYIGMDIHKQFTFAVVKDEQGKEIAKEKFDNSKENFSKFLEIYYPDKTKIVIESTCVWEYIYEILEAMHYDVKLANPIRTRAIAEARIKTDRVDASTLADLLRANLVAESYIPPKEIRRLREITRERRTFVKQTTQIKNKIHAILIKRGVKLPSTTLCMSTMLWLKDKFEIGDIIHRYANILEYHKEELKLIDDKIKNIANENKDAKLLMTIPGIAGLRSMDILAEIGEIGRFPTADKLCSYAGLVPSVHQSGNTLRFGRLIQQASKSLKGTLIETSWNIIRTKESNPLQDFYKKLAKKKGKQKAICATARKLCCVIHAMLRKQKEFMVL

SEQ ID NO: 55371 - protein, 342 aa, unidentified
MSTIKTIGVDLAKNVFSIHGVDAYGKCVLRKTVKRNKLLDTFAKLSPCLIGMEACSGAHHWARELLKLGHNPKIMASKFVIPYRQNEKNDANDAEAICEAVSRPKTRFVTIKSEEQQAVLCLHRIRQGLIETRTATINQLRGLLSEFGIVMPQGRYSAQNTIGSVLEDAENGLPILARELLQYLSSKIQNLNLEVLHYDRRVSALVREMASAKALMDIPGVGEHSASAIVATVNDAKQFGSSRQFAAWIGLVPRQHSTGGHVHLGRISKRGEKHIRTLLIHGARAVIARCKEKTDRNSIWLNQLVERRGYKRAAVALAAKNARIIWALLTTGKEYKINYVNG

SEQ ID NO: 55372 - protein, 315 aa, unidentified
MDEQRTVFVGIDVSKDRLDVHLRPSGEAFCVPREGKGMDDLVIRLQRLSVALVVLEATGGFEATVAAALAGVGLPLCVVNPRQIRDFARAMGRLAKTDTLDAEVIALFAERVRPQARPLREPERVHLAELVGRRRQIIEMIGMETNRGRQAIDKPLARRLARHVAYLQKELDAIDHDIGDAIKHSPAWREAEALLKSVPCIGDVTARTLLAELPELGTVSRHQVAALVGVAPINRDSGLTRGRRAIAGGRTSVRAVLYMAALTATRRRSPFRAFYDQLTARGRPKKVALVAVMRKLLTILNAILRDHTPWRPLNA

SEQ ID NO: 55373 - protein, 348 aa, unidentified
MDDITTIGLDIAKNVFQLHGVDAQGQVVLRKALRRANMIAFFTKLPPCLIGMEACATAHHWARTLMELGHEVRLISPAYVKPFVKRQKNDAADAAAICEAVVRPSMRFVSVKSKQQQATLMLHSARELLISHRTALMNALRGHFAELGIVVAQGARNVTELVLILEGNGQGLNEEGLPETMRLALQPLAAALIGVEAEIAKLDKEILAIHRRNDVSLRLATIPGVGPITASFLSASIPDPGLFEGGREFAAFLGLVPRQYSSGGKPRLGRISKMGNRHLRKLLVVGAHAALYSIKNGKTKSPLADWARALLAKKPFKLVAVALANKMARIAWAIMTRTGHYQPNLATQ

SEQ ID NO: 55374 - protein, 360 aa, unidentified
MNATQRNKLDFKGQNIYIGIDVHLKSWSVSVLSENAVLKKFSQNPEPEALHKFLAANYPGASYHSVYEAGFSGFWIHERLTALGITNIVVNPADVPTMNKEKLRKTDAVDCGKLARELRSGTLKGIYVPAPQMLEIRSLIRLRNSIVKDSTREKNRIKSLLRFHGIEIPEKFLNPNSYWTKAFLQWLREVKLTTEYGRKALDLHIDQYIRLREMLLQETRTIRALSREESFAEPLRLLMTVPGIGITTGISFITEIDDIVRFKNADRLASYIGLIPMCHSSGEKDGVGDITIRKHAILRCNIIEAAWKAVRFDPALTMAYEQYRQRMNAQKAIVKIAHKLVNRIYFVLKRKQEYVPCVVG

SEQ ID NO: 55375 - protein, 343 aa, unidentified
MQAVSTIGLDIAKSVFQVHGVDTEGKVVVRQQLKRGRVVPFFRKLPPCVVGIEACASSHHWARELQALGHTVRLMPPAYVKPYVKRQKNDAADAEAICEAVQRPNMRFVPIKTSDQQAGLMLHRSRHLFIRQQTALINSIRAFLAELGIVAPVGRNGLDELLSIISAGKNTRIPAPARTCLIALQIQLNALREQIRILDRRILGWQRTDETAKRLGALPGVGPALATALVASVADPKAFRSGRDFSAWVGLVPKQNSTGGKDKLGSITKQGDRYLRSLFTVGALSVIKYAKIHGTKHRPWLARLLERRPTKVAAIALANKLARMAWAMMATGERYREPIALAR

SEQ ID NO: 55376 - protein, 403 aa, unidentified
MIVGIDVAKDKHYAFFGTATGKTLLKRLIFENNIDGYSMLLARTEAIRVQNCLSEIVFGLEPTGNYHKPLATHLIRCDHNVVLVSGVAVKRNRELLDGRWDKHDTKCAANIADLISQGKCLFYEYPLPDINELRNLLSLRKRLKKEDHSLRMRIRNNLLAKYFPELDRFYGQCETENLAIVRWCLEPGKIAGMEFNKFFQIVTTRERGIAQKQRLRKIHTLSSESVGCPMGQASEFEAQVLVDKLKQVRQVIKKTEDLIKDVSIGLPEYSWMLTIPGFGPYVSSIVLATIGDPFRFNNRKQVLKMSGYDLNANRSGKTSLSAVPVISKKGSSALRYALYQAAFVASTRNSYFINYYTNLLRGREREQGIKTKMRVKLAAKMLIIAWTLMKKKEPFNPNYLNKK

SEQ ID NO: 55377 - protein, 411 aa, unidentified
MNNTLYVGIDVSSKTNVTYIMKPDGSKHSSFTIQNSQDGAMKLSKKIVSAINSLSLKDLAIGLEATSVYGDNLVCFLREDFNLSKYNRKIHVLNPKQVKKFKDAYNDLPKNDEVDSFIVADALRFGRINKEVYMDDYRHMALRNLTRARFFAVQNLTKEKQRFLNYLFMKHSSLAQEKVFSDTFSATALAVYEEFDSPDTLAYMDLHDLTEYIKEKGRNRFPDPDAVAKAIQKAARSSYRLPKTVNDSVNQVLSISITSMKAMEEQIKTFDKAIAQQMELIPNTLISIKGIGPVISAGIIAEIGNINRFPNQAALAKYAGLAWTKYQSGEFEAQYTRLIKSGNRFLRYYLGEGAFSLVRCDTEFKRFYDLKYKEVNRFQHKRALALTARKFVRLVYRLLKDNRLYTPPERY

SEQ ID NO: 55378 - protein, 424 aa, unidentified
MVAADEKNYVYVVRIVTVYRPAWISNSLTFPRMVWDKAAEPRRPRTAGLALAETMKQASQSGAIGVVREYRTPEPRKEACLMHYVGLDVHAKRSSLCILNGDGKVVKREMVHGPWPAAVERLREVGASAGGPLSVCYEAGCGYGPLHDALSPLAAHVAVAHPGALRLIFKAKKKHDRVDSDKLATLLYLGQVPAVHVPSADVRQWRKLIELRQSLLAGRVREKNRVRAVLRNHAVAVPKRPGLWTKKGAAWLASVRLPQGERLAVDLASEAIASANARLARVEAELAKYAAAHPGVALLMTIPGVGVRTAEAFVAYVDDPSRFARVRQVGSYFGLVPTLDSSAGRDRRGHITREGPGTVRKLLTEAAWQSVWRDPASRALFERVTRGKADRRKIAAVAVAHRLCRVMAAMLRTGEAYRAARASE

SEQ ID NO: 55379 - protein, 314 aa, unidentified
MSQNNSATIHAGLDIHKVTLQLQFQNQGHELPNTAPGHRRLLKLLRAAAQPVQVLCEASGGYERAVLAVLEKAAVAYTLLNARQVRDFARARGTRAKTDRIDAEVLAAYGAALRPAATLPPPAYDRALQEHVRCRQRLLQLLINLRLQAQSLTIASLQRTTRAAIRALEKQLKAVETRLVGLQKTQPELDTKVTKLTQVMGVGRQTAWSVLAELPELGRLGRRQAASLAGLAPHPRESGSWKGRRCIGGGRPAVRKGLYMAALAAARKNPQLKAFYQRLRAAGKPAKVALTAVMRKLLILLNSILKNPNFALAH

SEQ ID NO: 55380 - protein, 390 aa, unidentified
MIYVGIDVAKDKHDCCILDDEGRKVYPIFTISNDKVGFDELYSRIEEVATDKAEIKVGLEATGHYSNNLLASLVDKGFPTYVINPLHTNLYRKGLSLRKTKTDKVDASSIAMMLLADRTLKPYSDTSYHNEELKSLTRYRFDKVHERSKLKTSLARLVSILFPELEKLVPTLHLNSVYLLLEELPGATHIASCHLTHLKKLLEASSRGRYGRDKAIEIRNAAIDSVGTPMAAKSMELVHTIQLIRMLSEEIDEIEESIKLIMDKLDSPIMTIPGISYRMGAVILAEVGDFKRFDNADKILAYAGLSPSTYQSGQLDSSHSHMEKRGSRYLRYALINATRYVCKWDESFGIYLGRKMSEGKHYNVAVSHATKKLIRTIYRMELTGSAYSPS

SEQ ID NO: 55381 - protein, 322 aa, unidentified
MSQPNPLCVGIDVSKATLDIATSSDVAQFTVSNDSDGFNAIITGLRRHSVALVLMEATGGLEVAVACSLQAEGFEVAVVNPRQARDFARAMGYLAKTDRIDARVLTQMAEVINRHPERKRFIRALPDAERQALAAMVVRRRQLIAMLVAERNRLYPSHPQNKKSINTIIKALEDELARLEKDMNSHIRNHFKEIAERLSSIKGVGTMTVSAMLAEIPELGTLSRREISALIGVAPVNRDSGTMRGRRTIFGGRAGVRSALYMAALVATRFNPVIKTFYVRLLAAGKAKKVALVACMRKLLTILNAMLRKNEEWDESYHHVAP

SEQ ID NO: 55382 - protein, 403 aa, unidentified
MRSVLSIDVANGKSEVLLITEYGEVLIEPYEVKHCLSEFNLLKEKIDNFNLNNLTIFMESTSTYHLPIQRFFTKNNYNVQVINPILGKNNTRNLRKTKTDIEDCYNLADLFFKNTVKIHTKTMNDIYSSMIELSRQEKHLTESLVRSKNRFKQIIANAFPEYLKCFTASDIYGETSLNFIKEFPHADIIKSKRIDALTNNIYKSTKRYLPYSKCLNKAKKIKELANNSYPGIDVNSCEVKNLINIIEIISYSDAKLSEVKQDIIKLAKQTPYFNIINSIYGVGETSTAQIIAELGDINRFENIKQLNAFCGLDPTIIQSGKSINYNGPISKRGNRNARKILFITCCSIIRSSVLHNVDNDLLLYYRKKQAENKHFKECIIACSTKLLRTIFAMCKNNSLYVQK

SEQ ID NO: 55383 - protein, 341 aa, unidentified
MQITTIGLDIAKNVFQIHGIDAAEKVIVRKQLRRGQVMAFFEALAPCLVGMEACATSHHWARELTKLGHEVRLMPAKDVKAYVKRNKNDAADAEAICEAVRRPTMRFVRIKSAEQQGQLMLHRARDLLMRQRTQVINALRAHLAEFGITAAQGREGIKELLAIVAQEEGLRLPSDAHASLTILAAQLQAVQTMIGSLEKRIVAQHRSNEASKRLETIPGIGVIGATTIAAVVPDPRVFRSGRDFAAWIGIVPRQDSTGGKQKLGPISKQGDQYLRRILIVGAHAVLRRARQQPEKYPWLTQLLARRPFKVVAVALANKMARIAWALLAKGGTYRAPQLVAA

SEQ ID NO: 55384 - protein, 411 aa, unidentified
MQIVYERCAGLDVHKKSVVACLLFPEHGQQRKERQTFSTMTHDVVRLRDWLKEHDCACVAMESTGVFWKPIYNVLEEHLQVFVVNAQHIKAVPGRKTDIKDAEWIADLLQHGLLRPSFIPPAWQRRLRDLTRSRSRLTEERSRVIARLQKVLEDANIKLASVASDVMGTSAQQMLHALVKGELSPTAMAELARGRMRAKREQLAQALTGHLQPHHGFLIAEHLAHIDSLDEAIHRLSAEIAQRLGLYEEILVRLETIPGVKRRLAEIILAEIGPEMSHFPSAGHLASWAGMCPGNHESAGKRLSGKTRKGSQWLRTALVEAAHAASHCKECYLSAHYHHIAVRRGKKRAAVALGHTLLIIIYHVIAEKKEYAELGGDYLDQLDRQGKEKRLVRQLQKLGFEVALTPHAQNS

SEQ ID NO: 55385 - protein, 403 aa, unidentified
MNAVGIDVSKGKSMVAIMRPFGEIVSTPFEIKHTSSDINSLIEIINSVEGESRIVMEHTGRYYEALAHELSAANLFVSAINPKLIKDFDNDSLRKVKSDKADSVKIARYALDKWQNLKQYSVMDELRIQLKTMNRQFGFYTKHKTAMKNNLIGILDQTYPGVNSYFDSPARSDGSQKWVDFASTYWHVDCVRKMSLNAFIDHYQKWCKRKKYNFSQSKAEEIYGKAKELVPVLPKDELTKLIIKQAVDQLNSASTTVEELRTLMNETASKLPEYSIVMNMKGVGPSLGPQLMAEIGDVSRFTHKGAITAFAGVDPGVNESGTHEQRSVPTSKRGPADLRKTLFQVMDVLIKTMPQDDPVYQFLDKKRAQGKPYYVYMTAGANKFLRIYYGRVKEYLATLPESD

SEQ ID NO: 55386 - protein, 452 aa, unidentified
MPELGPLGSVRGALSNERPYRDPRACVLADASSRPGLFLRRPCSWRARRPSFRLAAPYEPSLSVTSTSGANPTLATPPSFACRVGVDGPLSASLSQTEGVADLRRWRTSVEKIARIGMDTSKHVFQLHGVDANELVVLRRKLRRTEMLAFFAAREPTVIGIEACAGSHHWARELSALGHEVKLLAPQLVKPYVKRSKNDAADAEALCEAMSRPSMRFVPAKTTDQQAALMLVALRDRLVRTRTQLTNAIRGHAAEFGLIAAKGLDKVEPLLVRIAMDESLPALARAIFTVHAEEYAALGARLRVVEAELMAWHRANATSRRLSAIPGIGPVIASLLVMKTPDPHAFRSGRAFAAWLGLTPKDHSTAGKTRHGGITRAGDEALRSALVVGATAVINQARRRDKATAWLAGLLARKPAKLVAVALANKMARIAWKLMVSGEIYATGRMGATTAA

SEQ ID NO: 55387 - protein, 344 aa, unidentified
MRIASIGIDLGKTTFHLVALGERNKVLVRKKFSRGQLLAYTANLPSSLIGMEACAGSHFLGTTLREQGHQVRLIPAQFVKPYRKSNKNDFLDAEAIAEAVTKENMRFVPIKSQDQLDLQAMHRVRDRLVQRRTALINEIRGFLLERGIIFAAHPIHLRNNLPGVIEDAEQNLSPRLRWLLDRLWQEWKQIESDVQAISQEIERISDEDVRCRQLRQIPGFGPLVSTATVAAIGNGAAFRRGRDFAAWVGVVPRQYSTGGKARLYGISKRGNIYLRRMLIHGARAVLFRIKHDTGGFGQWVHRLAQRAPRNKVIVAIANKLARIAWAVLSSGKDYRHQPLRPAAA

SEQ ID NO: 55388 - protein, 379 aa, unidentified
MSTGEGFRQCVGIDISKEKFTASLYMYDRLSDEGCCTGSIDFTNTKQGFNQMVKWSRKEALKGHPLTYLMEPTGVYYEPLAYHLNKIGQTLYVVLPNKARKFCEAEGIKTKTDAMDARCLALMGCTSRNLRPWSPPKAIYHELRQLTRFRADLCKLRTSVTNRQESLQHMEGASKNVQKGCEKLVAEIDKLMEKNEKDILAKIAEDKELEARINRIATVKGIRVPTVTCIVAETQGFHLIENRKQLTSYAGLDVMAKQSGKEDPKHAISKKGNANIRAVLYMPALSAAHCNRQAKAAYGRICQKHPKEKMIGITAVMRRLLLLVYTLWKSGEEYDENKDVNSKPKKKEHALDHTQEDCILNTNEPVDWNATDENGQPPF

SEQ ID NO: 55389 - protein, 413 aa, unidentified
MDVLHPRCCGLDVHKSSISACILLREAGRVEKHQRRFGAMTQELQELAEWLRQFGVTQVAMESSGVYWKPVWNILEGQFRVVLANAQHIKNVPGRKTDQKDAEWIAQLLQYGLLRASYIPCEIIRDLRDLTRMRASLSQEASRISSRIQKVLEDANLKLASVATNVLGKSGRAMLEDIISGENNPEHLASLALGHLRAKIPQLRLALEGKIRFHHRFLLRRLLDQIQFLEHEIALLDERLEDIGRQRPDLAQAVARWDTIPGIDQVAAWALLAEIGDNMAQFPTAEHLASWAALCPGNHESAGKRLRGTTRQGSPWLRRMACQCAWAAARTKNTYLSSQFRRLAARRGKKRAIIAVAHTLIVIAYHLQKNQSNYEDLGGNYFDLLHSDGLKRYLVKRLQQLGNKVTLEQMEAA

SEQ ID NO: 55390 - protein, 366 aa, unidentified
MAITHVALDDSKRVIVAGILRPEATQPDVREVPNEPRQVRRLFERLLQAGPVRACYEAGVSGYDLYRQLTALGVDCVVVAPALTPRRPGERVKTDRRDAAKLVRLFRAGELTSIHVPTEAEEGVRDLTRCRDDVRADVVRWRHRVLKLLGRHGRVYQAGKNWSQAHWSWIRSQRFDNPVLTRTLEASLEALDQALRRRADLDRAIESIASEPAYRVAVDALRCFRGINTLSAMILVAEIVDFQRFRRPRALMGYLGLVPSEYSSGDRHRRGALTKAGNTHARRVLVEAAWHYRHRPALSARLARQTAAQPPVVVAQAWRAQQRLHRRYRHLVGHGKRPTVAVTALARELVGFVWAAMTRTPADVAA

SEQ ID NO: 55391 - protein, 387 aa, unidentified
MQTITDRPEAPTAIRNDLGGIFVSLELSRSTWLITSLSPGGEKMSKYSVRGGDVAGLLERFAQLQKKAQARTGRNFPIIVIQEAGLDGFWIHRVLQNEGIESHVVDPASVATSRRRRRAKTDRIDGEALLRTLLAYKRGEPRVCAMVKAPTPEEEDRRRLCRERKVLTNERVRHVNRIKGLLFCQGVFGYEPLRRNRRQRLDELRTGDGRPLPKHLKAQISRELDRLELLLEQIKAVETERDALLAAQQVVAPAPASMLLDFNGIGPEFTAVLWLEGLFRHFDNRRQIASYAGLAPTPWKSGSIDHEQGVSKAGNPRLRTTLIQLAWLWLRHQPQSALALWFKERVTRNGGRLKKTTIVALARKLLVALWKYVTAGVVIEGAVMKAA

SEQ ID NO: 55392 - protein, 351 aa, unidentified
MMIIGCDYHPSMQQIAWCDDQNQERGERRLEHNSGEAEKFYRELKQRGVQVRVGIEACGHTRWFERLLAELQIELWLGNPAKIAAQRVRKQKTDRGDAQQLLQLLLEDRFPKLWTPSAENRDLRQLLWHRHRLVQMRTRVKNQLQAMALNEGVQRHSRLWSKPGRAQLESFQLAPWAARRREDLLRLLDQLTPQIAELSRAVEQEAERRPEVRRLMAHPGVGPITALAFVLVLGSPQRFRCGKQVGSYLGLIPCEASSGGKQRLGHLSKQGNTLLRYLLVEAAQAAVRCDAQWRRRFVHLAMRRQRNIAIAAMARKLAVSLYWLWRNAETSSAASQPGSHVGQLDNHSGVS

SEQ ID NO: 55393 - protein, 418 aa, unidentified
MLRTGELVRLFVGDDWAEDHHDVELMDAAGRVLAKRRLPEGAAGMARLHELTGQHLGDDPDAAEVVIGIETDRGPWVAALVAAGYTVYAVNPLQASRYRERHGVSGAKSDGGDAHMLTDMVRTDSHQLRAVAGDSADAAGIKVLARTHKTLIWERTRQVQRLRYQLREYFPAALEAFADLDATDTLELLGKAPEPARAARLTRAQVSAALKRARRRDIPGKATAVLAALRSEQLGQPPALTAAYAATVRSLIAVITVLNEQVKALQGQVEENFGRHPDAEIYRSQPGMGAILGARVLGEFGDDTHRYADGKARRNYAGTSPVTRASGKKKVVAARFIHNDRLIDALMAQAFAALNASPGARALYDAERARGTEHNAALRKLANRLVGILHGCLKTRTLYDEATAWSHRQNLPQSSVAA

SEQ ID NO: 55394 - protein, 343 aa, unidentified
MEAYAGRQFVGIDLHRRRTVIVRITEGGEVLEAVRIVNDVERLASVMVRAGQCPEVVLEATYGWYWAVDALQAGGANVHLAHPLGVKAFEYRRVKNDFRDAQDLADLLRMGRLPEAWIAPPATRELRELVRHRAKLVKLRSHCKAEVHAVLAKCGVQVLMSDLFGAAGTELLDGLDLPAPYAARIASLRRLMDDLDFEVSLFAGIIRGRMAHEPGYTAVQKIPGIGPTLGAVLVAEIGDITRFASADKLTCWAGLTPKHHESDTHVRRGRITKQGSRLVRWAAIESVKTVPKTSLVGVLRERVADRRGRNIGSVAAARRQLELVFYALRDGRVRALEPLPEAA

SEQ ID NO: 55395 - protein, 387 aa, unidentified
MAQVNDLSRSLTAFDPISTLVLVVEMSKAKWLVSGAVPGVERQPLKKLEADATALLRLIERWRNEAVRAGRPISRIALAYEAGRDGFWLARWLIARGIEGHVIHSASVAVSRERKRAKTDRLDAAMLMRVFLGWLRGERGHCGMVAIPTMEEEDARRPSRERECLVNERSRITNRMKSALARLGVRGFKPHLRKAPERLAGLRTAEDTDLPANIIEELRRDMARLALLREQINSIEKTRAARLERAPDTGPHAMVRLLARVIGIGIETADMLVREILSRRLRDRRAVARYAGLTGSPDESGLKRREKGLAKAGNARVRRGLIQLAWRFLVFQKDSALARWYRTRTEGPSGARKTTMIVALARKLLIALWRLVTTGEVPDGVALRPAP

SEQ ID NO: 55396 - protein, 368 aa, unidentified
MNQVIRIGVDTSKSVFQVHGVDAAEQPILRKKLRRRDVLPFFAKLPPTRIGLEACGGSHRWAREFAALGHEAVLLPPQYVKPYVMRGKNDAADAEAICEAMSRPRVQARFVPVKTAERQAAQMLVGMRDRLVRTRTQVSNAIRGYAAEFGLVAAKGVDKIEPLLARIAGDPGVPELAKDLFAAHGVEYAQLQARLREIDAKLAAWHRGNELSKRLAEVPTIGLITASRLAIKVTNPKAFRSGRDFAAWIGLTPKDHSTAGKQRLGVITRAGDESLRQGLVLGATAVIKQIRKGCPDASPWLIELVKRKPPKLAAVALANKTARIAWKLMVSGEPYRPEAGSRRFVPATGSVAPGSHRQGRCAPPSAVA

SEQ ID NO: 55397 - protein, 412 aa, unidentified
MGKSNIEYEQVIDRGCGLDVHRDTVVTTVMGKGIKTETRTFGTTTSSLNELGVWLESLKVTDGAMESTGVYWKPVLHVLRAYPLNLIVVNARHIKNVPGRKTDKADSQWICKLLISGLLKGSFIPPENIQELRDLHRYKKKLIGTVASEKNRIIRVLEDANIKLSSVVSDTSGVTASYLIKGLIEGRKDLENLITECYHGKLQASPKQIKEAITGRLTAHHAFILKSMQKHIISVEEQIAEIDVEIDRYIKDFEKEIELLQTIPGVGKGGAIGIVAEIGVDMDVFPSEHHLASHSGMCPGNNETAGKKKSTRTRHGNKHLKATLTELAWGATRTKKSYYKAKYESMIARRGKKRALIAIGHKILCASYHIIKNKEAFKDLGYEYLAERKKKNRLEYLKRELKEHGYKIEKAA

SEQ ID NO: 55398 - protein, 423 aa, unidentified
MNAMFDWYVGIDWASEVHQVCLVDATGTVRGERAVRHGGAELAALVDWLVATTGADPARIAVALEMPHGPVVETLLERGFAVHAINPKPLDRFRDRFSVAGAKDDRRDARVLGDSLRTDTRCFRRLHPDDPVMVELRERLRMAEECRQERTRLTNRVREQLWRYYPRFLELGDDLGAAWFRELWALAPTPARAARVREATVAKLLKRRRIRRLDAAAVLRRLRRPALGVAPGTVDAACAHIGALRERLRLVNRQIAAAEKRIDAILAELAAPPEAPETPETAPGQPPQQSDAAILLSLPGVGRTVCATLLVEAGALLKAADHGALRALCGVAPVTKRSGKSCVVVMRHACSQRLREAVYHWARVAVQHDATSKARYRALRQAGHSHGRAVRTVGDRLLETACAMLRHRSLYDPQYAGRMRQAA

SEQ ID NO: 55399 - protein, 451 aa, unidentified
MSASRKAQLQAESLKRVNPNAAGLDIGSQEIWACVPQDRDAQPVGQFDTFTPDLYALADWLAACQVDRVAMESTGVYWIPIYEILEERGFQVQVVNARHLKDVPGRKSDVQDCQWIQRLHTYGLLEGSFRPEGEMCALRAYLRHRGMLLEHRAAHIQHMQKALLQMNVQLTQVLSDITGTTGQAIIRAIVAGERDPVQLARFRDGRCKSSRGEIAKALTGNYRGEHLFALKQALALYDSYTEQLGECDGEIERQFQAIKPVWPEEQPPLDHEDKKGSHSKNAPAYDARTLLYQVTGVDLVAITGLNAITVQTIVSEIGTDMSKWPSQKHFCSWLGLAPHHDISGGKVLRRGTLKTRNRAGQAFRLAAQGVSRSHSGFGAFYRRLRAKVGPKAAIVATAHKLARTFYHMLKHRTPFHDLSAEEYEQRAREREIANLRKKASKLGMALVESPA

SEQ ID NO: 55400 - protein, 373 aa, unidentified
MPTNLRYVGLDVHAETIAVAVAEPDGEVPFLGMIPNRPEAVAKLIRKLGPREHLRACYEAGPCGYVLYWQLTRLGVPCDVVAPTLVPTKPGDRIKTDRRDAVKLARCYRSGDLTPVWVPDAAHEALRDLVRAREAAKQDQLRARHRLGKFLLRHGIRPPAGVKPWMQRHRRWLDSVGFELGAQRATIADYLHEVDHAVARLERLERALDEAVAAAPAAQRAVIAALQCLRGIRQVTAATIVSELGPLSRFPHPRQLMGYSGTVPSEHSSGDRVHRGAITKTGNAHLRRVLVEAAWAYRFMPKCAKGLRQRQRGQPEAITDIAWKAQQRLCTRYRRLLARGKPTPHVITAVARELVGFIWAIGVAVERGQPTAA

SEQ ID NO: 55401 - protein, 407 aa, unidentified
MIFAGVDWAEAHHDVHIQDEEGRRLGGGRLPDGIEGIARFHELVAARADDPGEVVIGIETDRGLFAAALVAAEYQVFAVNPMSVSRYRDRHKVSGAKSDPGDAKVLADLVRTDRHNHRRVIPDTELAEAVKVLARAHQSMIWNRRRQLNQLRSALREFYPAALAAFDDLASGDAIEVLKVAPEPALGAALSKTQIAAALRRGGRTRRIDERAAAIQAALRGPQLQPPPVIAAAMGTSVAALVPVIGEMTRQITGLEQQLAADFEQHPDAEVVRSLPGLGTILGARVLGESGDVPDRYADDKSRRNYAGTAPITRASGTRRVVLARHARNKRLADAIYLWAFAALTASPGARTLYDRRRAAGDTHHQALRALGNRLVGFLHGCLATRTLYDEDIAWARYTVSTHTKAA

SEQ ID NO: 55402 - protein, 346 aa, unidentified
MGKSITDLSSVTTVGLDLAKHVFQVHGVDASGRVVVAKAIRRNKLLEFFASLPACLVGLEASGSAHHWARELITLGHEARMMPPAYVKPYIRRQKNDASDASAICEAVTRPSMRFVGVRSRENQAALMRHKAREMLVTQRTQLLNGLRGHLTEVGVIAPQGLRCARELAELIEACDETIPFEVCEALAPLVVQLRNLDEAIAQLDRIIAKLAQKDETARRLMSIPGFGPITASAMAATIQDTSSFAGPREFAAFLGLTPKQNSSGGKPKLGRISKMGNRYLRKLLVVGAHAVLFHRKPHTDPLRMWAKRLIEKKPFKLVAVALANKMARIAFAIMRGTTVYREIPA

SEQ ID NO: 55403 - protein, 348 aa, unidentified
MPLYGGIDLHSNSNQSAILDEDWKRIMRRKLDNDPDLILRFWEPYKPDLAGIVVESTYNWYWLVDLLQDNGYRVHLANTAAIQKYSGLKHADDNHDAFWLAELLLLGILPEGYIFPKEVRALRDLLRKRLHFVRVRTALILSLQNIITRNCGTKVSSNHLKALKEDRAQGYLQDNEDLLLAGSASKAAIDALTRQIRRIEGAVVKKLNLQAPYTQLLTLPGVGQVVASTVTLETGPIERFSKVGCYASYCRKVDSRWTSNEKVKGHGNKKNGNKYLAWAFGEAAERARKFHKASREFYQQKLRQKKHPALAHGALAHKLARAAFYILRDNVPFDHEKMFGYPEEPLDN

SEQ ID NO: 55404 - protein, 348 aa, unidentified
MKHFAGLDVSLEETAICVVDEAGTLVREARVPSEPEALVAFFQGSGLALERIGLEACSLSAWLHEGLVAAGLPAVCIETRRAKAAMGAMPNKTDRNDARGLAQIIRTGWYRAVHVKSPTCRSWRALLAARRLVLNKMRDLENGLRALLREAGLKLGTPARKEFAARVRELTAADPVLSVLSVLSEPLLTIIAAMTRELAQLTKRVLDIVRDEPVCRRLMGVPGVGPLTALAFRATIDRPERFRHSRDVGAHLGLTPKRYQSGETDVQGGISRCGDELARTALYEAAHSLLIRSRKWSTLRAWGMQVAKRRGMARARIAVARKLAAILHRMWADGTEFRWGKEGPMPAA

SEQ ID NO: 55405 - protein, 347 aa, unidentified
MQHLAIDLGSRESQICIRSAAGDIVSERKLPTARLPGFLAKQPQSRVILETCAEAFMIADAAIEHGHEVRVVPATLVRTLGVGERRQKTDQRDARKLSEVSTRIDLPSVHVPSASSRERKMLCNSRKNLIDARTKLISFVRGQLRLRAIVIRGRARNTFPSVVRDLLVSDCDGLPVHLDRVLQTIEALNTQLDALDEELITVAKQDPVCQRLMTVPGVGPVIAIRFTAVVDQPERFHSAHHLMSYLGLTPGENSSSMRVQRTGITKAGASDLRCALIQGAWSIMRTKNNNPMMTWATGLAQRRNRFVAVTALARKLAGVLWAIWIKGTIYQPNLLAAPSAESTLDVM

SEQ ID NO: 55406 - protein, 361 aa, unidentified
MKKHTQDLIAEVPRGCSQVGITIGIDLGDVWSHYCTLNEDGEVVDRGRFRTNPSSVDKWFTDLPRVRIAMEAGTHSIWISEQLQELGHEVIVANVRELRAISHSDRKSDQVDAEKLARFARLDPKILRPIAHRTVAQQEALTLIRARNLIVRLRTAAVNAVRGLAKPCGYRLPASSTLCFAKRCMAVLPPGLVQALGPVLEQIADMTLKIKAYDRAIKKLTETEYPETMALTKVYGVGQLTALTYVLTLGSKERFQRSRDVGCYLGLRPRRSQSGERDPQLGITKAGNVYLRSLLVECANHVLGRHGKDSSLRDWGLHLASRGGKQSRNRAIVAVARKLAVLLHRIWVTQEPYVPFYAAAA

SEQ ID NO: 55407 - protein, 325 aa, unidentified
MYAALDLHKKYSNAVVMDEDGAVIREERFENDPATMEGFSDSLVRGTNVVIESSSTWYWAYQVLAKRHRVVLSNPVKTKAIASAKVKTDKVDTLTLVNLLRGGYIAECYVPSKQIMGLRGLVRYRANLVRLRSNVKNRIHAYLLMNNIRLEGTPFSKHFIEQVRGIDDGRVQGYLKIIDCLNTEIHEASRVISDEALNNEDAKLLMTMPGIGFYSALLIVSEIGDVNRFAGSHNLDAYAGLAPSTHSSGGRTYHGRIMKTGSPYLRWVLNQCVRANLRSDTDGRLAKFYARLAKKKGDAKAVVATSSKMLRIIYWMLREKQPYHG

SEQ ID NO: 55408 - protein, 416 aa, unidentified
MKKNSNSSVKKEPKARQAKAQRIVQREAKEVLAELVEKLRGKLEVKATSASPAEAGPRAELGPNMDRLTVGVDLGDQWSHYCILGLQGETLSEGQLQTRGAEVAEFFQALPPARVVMEVGTHSPWMQEIIAGEGHEVVVANPRLMEGSKRRKRKNDRIDAKKLARLGRVDPQSLHPIRHRSREVREDLVVLRAREALVAARTELINATRGLVKSMGTRLPKCSSPSFGQKVKDAIPEKVRAALLPLVQFADALSDSIQSYDQKIEELSSEKYGHTKLLRQVKGVGPITALAYVLTLENPEHFAKSRDVGPYLGLVPKQEDSGESQPQLGISKAGDTMVRKLLVGSAQYILGPFGPDSDLRRYGLRLCERGGKNAKKRAAVAVARKLAVLLHRLWVSGEVYEPLGYASSRVMAQQAA

SEQ ID NO: 55409 - protein, 321 aa, unidentified
MQTNNAVVYAGVDVAKATLQLHLQGQQSEFRNTPKGLLQLVAQLQTVPSVQVVCEATGGYERALVKVLHQGQIPVSVTNPARVRAAAQAQGQRAKTDRIDARGLTDYGQRYQPKGTPPVSAIQEQLVDLAQWLKQLIHGRALAKTQAEHHQNPFVRRQHAKLMTHLESQIEAVEKQIEALIEQDAALQQRVTCLDKIQGVGPRTAWMVLAHMPELGQLNRQEVAALAGLAPWTRESGTMKGMRCIGGGRPEVRLALYMAALSAARCNPVLRILYKRLRAKGKLPKVALTAVMRRLLTYMNHCIKALPSETAGAQTEELKAA

SEQ ID NO: 55410 - protein, 405 aa, unidentified
MLEISAFLFGALIFFVSFFYQGLMYEIGFCKCVNLKLNNFHKHIKTETMVQSKTLDFSGTTIFCGIDVHKKNWRINIQDSEFELEDFSQNPDAVLLHSHLIRKYPGAKYKVCYEAGFSGFSAQRWLSQNGVDCLVLNAADVATNHKEKRQKNDKIDARKLCEYLQTKKVRSVFIPEVHWEHSRSLVRLRERIVSNQTRCKNRVWQLLHFSGLSLPKGYEAGQYWSKNFINELECLDCGSDVLKTTLKLYIRDFQQTRALLLEATKNIRELCKSPLYEKDIILIKSIPGIGAINAAIILFELQDVTRFKHFDHLCSYVGLVPDTSDSGDKKIAKGITSRSNHNLRTALVESSWTVIRKDPALLMKYKEYCKRMDKNKAIIRVAKHLLSRINYVLKNKKEYVSGVVA

SEQ ID NO: 55411 - protein, 483 aa, unidentified
MKSKTQEKSKRATNHPTQHHWNEMNRKQRREMMRKMQSEDLSLEVIHPDAAGIDIGNETHYVAVPPSRDSQPVRRFGCTTAELKAMAAWLKQCRIRTVAMQSTGVYWISVYDILEQAGLEVYLVNARDTKNLPGRKSDVQESQWLMKLHTYGLLRNSFRPVQEIRTMRTYWRQRNDLVQSAGRHIQRIQRVLTQMNLQLANVLSDRSGMTGQTIIKAILKGERDPYKLAGFRDPRVKASAEQIARSLEGNWQEDQLFVLQQEQDSYEFCQKQMAECDRHLDQYLQHSEDRSHGAPLPEEKRKERLKKRKNANKPQFDLREGLFRMTGTDLTRIDGIDVMTATTVISEAGWDMSKWETENHFVSWLRLCPDNRISGEKIIGKGRLRTNNRATLALKMAASTLRLTNTYLGAQFRRLRTKLGSPIAIKAMAAKLARLVYRMLRSGMKYVDRGAEFYDAEHRQRQIKHLKWKAAKLGCQIVHAPTA

SEQ ID NO: 55412 - protein, 316 aa, unidentified
MNSQVFVGLDVSKQHLDVAVRPHNRHFVTLNNDFGIKQLVKRLAALKPQLIVLEASGGYEFLVTAALAEAQLPVALVNPQAVRKFAGATGKLAKTDKIDAQVLAHFAEALRPEPRPLPDQAHQVLKAALQRRQQVVKMIGQEENRLEKTFIPTVRRDIQAHLTWLRQRLTALNRDLDDQIRQSPLWQDRDRLFQSVPGIGPLVSRTVIAQMPEIGTLPGKKAAALVGVAPYNRDSGRFRGKRMIRGGRSYLRRMLYIAAVVASRFNPVIRAFYQRLVAAGKPKKVALTACMRKLVLILNAMVKHNQPWNQFIAQVP

SEQ ID NO: 55413 - protein, 413 aa, unidentified
MAEETISWFAGVDWGSERHQVCLLDARGTTVGEREFPHSGEGLAELGDWLLSMASAASTVAVAIEVPHGPVVDALIDRGFVVYAINPKQLDRLRDRFSVAGAKDDRRDAYVQADGLRTDRRLFRHLQVADPRLIELRAWSRLAEELQAERVRLSNRVRHQLWRYYPQMQKLSNDLAAPWFLELWTIASTPAKAGRLRKSTVERLLKQYRIRRIDAETVLRILREPAIKVAEGVAEAASIHMRSLVARLRIVNRELREAERKLDEVCTAVSEIEQTSGESLQRRDVAILRSMPGIGRINLATLLSEASGPLSRRDYEGLRTLSGAAPVTKRSGKSLIVVRRYAAHVRLRDTVYHWARVATQRDPKCRARYTALRKRGHSHGRALRSVADRLLALACVLLQRQTLFDPHFGRPAT

SEQ ID NO: 55414 - protein, 444 aa, unidentified
MISKAYRATRVNEVDWDRLARGKEGVGITLGVDVGKHTLWPVCRWADGRFERPWRVKNPEEVPALVALVQRMSTGRKLAVALESSGTYGDALRQALADAQIDLVRVSNKASHDYAEVFDGVPSQHDGKDAAVIAELAALGKAQPWAYQPASPWEQELTYWVEWMVAHRQILTTWQGRLEGLLARHWPEATEVLKLSSGTLLRVLKQYGDPKALAADSEAAQRLARWGRAFLSPEKIEHLLAGARSSVGVRVGDWQRRQIQDYAEHALAARREAERAQRHLRGLAEGHAVLQAQGKVVGVPTACVLWASTGDPRNYHAASAYRKAMGLNLVERSSGQYQGRLRISKRGSARTRQWLYFAALRLVQNCGVRPWYEAKKARDQDDARRVIVAVMRKLAMALYHVGVRNEEFRPRRLFGPICGRGGSSAEPRFGARNQREAEGVSARG

SEQ ID NO: 55415 - protein, 372 aa, unidentified
MTQSNILFIGMDVHKQSIVLSLADDDRTEVRRYGSIGGTLTDFKKLLRKLVSTNKSLFFCYEAGPCGYSLYRFIVSQGHQCIVVAPSLIPKKPGDKVKTDKRDADQLVRLLRAGELTPVYVPNAEDEAIRDLSRAREDAVLVMKSARQRLKSFLLRHNHRFDGSANWSEKHLRWLAECVSLAFPAQQIVFQEYVNATTEAKQRVTRLEDEILFHTKQWRLYPVVEALMAMRGVRMVVAVTIIAELGDLTRFENPKQLMSFLGLTPSEYSSGERQKRGAITKTGNQHARRVLVEAGWAYRFPAKVSKEMQKRQENVPLTIRDIAWKAQIRLTKRFRVMANKGKPNNVIVVAMARELAAFMWSIAQHTPILPRD

SEQ ID NO: 55416 - protein, 417 aa, unidentified
MAEEIEWFVGIDWASQTHQVCLVDAHGECLGERAVAHGGPGIEELCDWLITRTGATPEVIGVAIEMTQGPIVEALLERGFCVYGINPKQLDRFRDRFTVAGAKDDRRDAHVLGDSLRTDRHAFRPLSNDEPVIVKLREWSRMADDLQQERNRLASRMREQLWRYYPQMLELADDLAADWFLDLWSRAPTPAMAVRLRETTIERFVKAHRLRRWQASEVLSILKQKPLSVAPGVVEAASDHIRTLTVRIRLVNQQLKAAHRKLDELCAQLIPSEEDEPGQQCEQRDVVILRSMPGLGRIILAVLLAEVWQPLRRRDYHALRSLSGVAPVTRRSGKTRVVVRRYACNKRLANALYHWARLATQHDALSRRRYAALRRRGHSHGRALRTVADRLLSVACTLLEQQTLFDPTYEVRDAASG

SEQ ID NO: 55417 - protein, 358 aa, unidentified
MQRNEISFKGQKIFIGIDVHAKSWKVAIAPEVGAVKCHSQKPSAKELFDFLKKNYPDGEYKAVYESGFSGFSTYYALTEVGIDCIVIHAADVPTTQYEEVMKTDRIDAAKLARSLKAGQLRGNYVPEKQCIDDRSVVRIRRTIQKQLGGYKSRVKHLLHCHGVEMPERFSKVHTHWSMAFITWLKNDVELMSDTRMSLDLLIRQVEVIRGTLLEATQQLRKMSQTERYKRRCDLLRTIPGIGPIVSMCILTEVCDVKRFNNENEFAAYLGLVPTSHSSGEKTVHGEKTFRGNKQLGPMVVEAAWVAIGWDAGLGSKYFQYKKRMQPQEAIVRIARKLSNIIFSVLKNEKEYVPYNTGN

SEQ ID NO: 55418 - protein, 388 aa, unidentified
MPTIDQPVQPSAIRTDLGAIFVSLELSHSTWLITSLSAGNGEKMSKHSVSAGSHTELFARFAHLQERSRMRTGHSHPIIVIQEAGLDGFWLHRILEREGIESHVVDPASIATSRRSRRAKTDRLDGETLVRTLLAYKRREPRVCAMVKAPSPEEEDRRRVCRERKALTVERVGHVNRIKGLLFSQGITDYEPVRRDRRARLEKLRTGDGRELPTYLKAQLCRELDRLELVLEQIKTVEAERDALIAAQSAMIKPSPVTMLLDIKGIGAECAAILWSEGLFRHFDNRRQLAAYAGLAPTPWRSGTINREQGISKAGNPRLRTTLIQVAWLWLRHQPKSALTQWFEERVKHNNGRFKKSTIVALARKLLVALWKYVTTGVVIQGVVMKTA

SEQ ID NO: 55419 - protein, 398 aa, unidentified
MTRKNTLKSLPTDTEFRVVGLDLAKSDVSVAAIPIDDNTPSLVDRMTYADLLDWAGKISPTLFAMEPCNGYSLLCLQLENLGHEIKVISGSTVSMWINTHLSGQKTDLNDAIALARLAVSDAELTPIRHKSITEIRIQTVQAVRQQLMSQRSKSIVSFKALAQQWGIPCAAGHRNLKKLRESIEAKVDLITRPVANAMLFLLDAVKSLDRQIGQLNQTLQELVMSDERGRLLQSVLGVGTQISARVITVVGNVERFNSPRSLVAYVGVAPRNFITGHKNLTKKKHGNCPDLSHKGQGKISRRGDKLLRSLFIQGAACLYMQFCKDQLPERQLKRWILKQLASQKPYGKLIVSLAAKLIRIVWAVLTYGEKFNIQKAGMTRSMWSGMALETSLNKEVPA

SEQ ID NO: 55420 - protein, 312 aa, unidentified
MAKDTIGIDVSKDRLDAFWHSQDVARSLPNTVEGFTQLCTWLGEDNAVLVVFEATGAYHRGLERYLSLAGQRFIKVNPKQARRFAQAIGRLAKTDRVDAKMLARMGVVLDLAPQDIEGEDVHDLKELLTARRALVKDQITAKTRLATASNLLVKDQLRRRIDDIDTDIKALDQVIARIAKQRGTLDARIRRLMTIPGIGRLTATTLVIDMPELGHLESKKIAALAGLAPMTQQSGKWQGKERIIGGRASLRRAIYMPALVAIRFNHDFRDKYQQLVTAGKAKKVAITAIMRRIIVLANTLLREGRDWQPKRP

SEQ ID NO: 55421 - protein, 375 aa, unidentified
MANVRFVGLDVHAETIVVAVAETAGEVRSLGMIPNRPEAVRRLVRKLGPPEQLRMCYEAGPTGYVLYWQLIGLGVHCDVVAPSLVPTKAGDRVKTDRRDAEKLARAYRAGDLTPVWVPDAEHEALRDLVRALESSKKAQLRARHRLGKFLLRQGRRRPTHLKMAWTAGHIDWIRAVRFESTLHQIVLADYLHEVERGAARIAHLNQAILEAIRTAPPQMRAVIQALQALRGVAAVSAATIVAEVGQLSRFENPRQLMGYSGLVPSEYTTGSRRRLGAITKTGNAHLRRVVIEAAWAYRFGPAVRGPLKARQDGLDPVITEIAWRAQKRLHDRYRTLAAKGKNNNQVITAVGRELLGFIWDIARTVERQVPIAATA

SEQ ID NO: 55422 - protein, 349 aa, unidentified
MTVYVAVDFHAREQTISYCDTADGEIHRLKLRHQHDDVRAFYEQFTGEVIVAFEASGYSAWFEQMLAEIGHMIWLGNPAAIRRKAPRRQKNDRRDADLMLDLLLKGDFPRVHGFSEESRTVLRQLRYRHKLVKVRTIAKNSVQAIGINAGLPLKRRLLTDKGVAQLQALRLSPALAQQRDEWLELITLMNERIATVEKALQERTQDDAEIALLRSHPGIGLLTALALRYTLLPISRFSTTRQATAYAGLDCMEDSSSERRRMGSISKAGSKLLRFLLNEAGQTAARRDPELQRFYKRLRHRRDKPKAKVAVARKLLVRSFIMLRDQIDYAEFVRRGVAARVARESHSPK

SEQ ID NO: 55423 - protein, 414 aa, unidentified
MALTRWVGRAIGLDVHRDFCAVAICEEGEVRAAGRVPSTPADLELLAQSLAPTDRVALEVTGSCWEVARILEPHVDRVVVVSPDDTGITQARAKTDRLDARTLARLLWSGELESVWMPDERCRVLRRRLARREQSVRARTRAKNEIHAVLQRRLQGKPPCSDLFGVKGRQWLAGLELPLEERESVDAAMRHVEFLDTEIAAAERLIAQQALAWPEIRRLMTVPGVNLVCAATFIAAVGDPRRFLSSRKLVAYLGLDPRVRQSGDAPARSGRISKRGSAAARWALVEAAWSVVLQPGPLHGFYDRTRARRGHGKAIVATARKLAILFWHMLTRGEDYAHQQPSLTRKKLRRLEITAGAPKRVKAARGVWSANVAIRQAERQLAEQAEASYRRLVKDQQTGAPATKTGASATPERA

SEQ ID NO: 55424 - protein, 354 aa, unidentified
MQYIAFDSHKRYTYAVVEEKEKGRVMEKRIEHRRGEIGAFLSQCEVGSPVALETIGSWYWIVDEIEAAGMLPRLVNARKAKMMIASSKKTDRLDAKGLNTLQRTGTLPTVWIPSSELRDIRELYRTRMVLTQMVIRLKNRILSCFSKYGISFDETSDAFNIKGRASLEAALEILPTQTCFAVKELLRQLDLLQEAVKEFEARMLQVQSNDPEIKLLQTIPGVGPILSYVIAYETGDIHRFPSASCFASYAGTTPSVHASGGKVRYGHTPSDVNHYLHWAFIEAANVISMRHEVLRFRHTARLYERLRQAKGHDIAVGAVARHLAEATYWILTTKTAYREPNQNKQVVVVSSKEG

SEQ ID NO: 55425 - protein, 441 aa, unidentified
MKGLAVLDEKAAGIDVGSERMHVSIGGSAGCVFGTMTCDLQALRDHLLAHQVHKVALEATGVYWLSLYGVLELAGLDVCVVNGRHVRNLPGRKTDLSDCQWLSSLHAHGLLRSGFVPPAKVRRLQDYVRLRGDQVTMAASHIQHMQKAMERMNIKFHSVISSLVGVSGLKVVRSILSGERDPEVLLSLCDKQIRKHKSNAIKESLRGSYVPEHLFALKQALMGWEFYQERIGECDDEISSALKEMGGDPDDPSVPLKGKPSSANTPDIEGLHRMLVQVCGGEDVTVIPGMGDHSLLQVVSEVGTDLSAWPSAKHFTAWSGLAPGSKQSGKRNRNEKRRCNRTGRLFCTMARSLAQSVDKGLGGAYRRLRARRGGLIANKALARKLAELFWRAMTRGLAFVEHGLKAYNAKVRESENQRLNKLAQRQGFTLVPITPVGAPSQ

SEQ ID NO: 55426 - protein, 400 aa, unidentified
MPYHGGLDWGGAAHAVCVVDATGRIVARIEARHDAAGLADMLARLKRVAPPAELPVAIERPSGLIVDALVEAGHPVIPIHPNVVKACRPRYRAAGGKSDPGDAYMLADILRTDGHRFRPLMPLSDDIRALRALVRARDDLVSQRVTLANQLRSLLEGFWPGAATVFAAIDSPIALAFVSRYPTPDSASRLGEKRMASFMAQHAYSGRRTPAELLARLRAAPTGLASNAEAKAKGEVVRALASLLERLVGEIAKLSSRVEHAVAELPDGKIVMSFPRAGRINAAQILAELGDVRERFPTEDQFAAEAGVAPVTHASGKSRGVVFRWACNKNLRQAITCFADNSRHASSWAADIYARARQRGCKHAHAVRILARAWVRVLWRAWQDGTGYDPAKHKAAARIA

SEQ ID NO: 55427 - protein, 387 aa, unidentified
MSTLPCFVWRGLVTASKGEGSVDVADGICFVGLDVHARKTAGAAVVLGSGEVFRAQIPGSPLEAIDWMQSLPGPVRAVYEAGPTGFGLARAARAAGLEVMVCSPGAIPRQPGDRIKTDMRDALKLARLHAAGQLRPVTVPSVELEALRDLVRAREDLRGDLMAARHRISKLLLRRGLVYAGHGHPWESQRHAAWLGSIRLAEPLSQVVLGEYLGCHEVLLARRDRLDRLIDEQSREPEWAALIGRLRCLRGVDTLTAVGLLSEVGEFSAFSHPKQLASFLGLVPSEDSTGERRRQGAITKAGSSHARRLLIEAAWHYRRRPAVSLTLRRRQNGQPPAAIEVAWRAQLRLSGRWAHLDARRAKRRTTVAVAVARELACFVWEIARLPD

SEQ ID NO: 55428 - protein, 356 aa, unidentified
MQKTDPAEIIIGVDTHKEAHTAVAINGLGACLGAITLLASRRGYQELETWARSFGFVRAFGIEGTGSYGAGLTRFLQERGHSVIEVNRPNRQIRHQHGKNDPLDAENAARAVLSGQARAAPKSGTSLVEMIRHLKVARDTAVKSRTQAMVTLKTIIVNAPAALRESLDGLTGKMTLIRHLAALRPGAMTSPTASAKATLRALARRWLMLDAEIKSHDADLDALTTACAPTLKEAHGMSTGTAAEMLILVGDNPERIRSEAAFAKLCGACPIPASSGKTSRHRLNRGGHRQANAALYRVVIIRMRSHPPTLDYVRRRTAEGKGKMEIIRCLKRFVAREIFGYLCRARGDPTTVHSTS

SEQ ID NO: 55429 - protein, 338 aa, unidentified
MEYKRISIDTSKHVFTIHGVDEKERPVLRYDLRRAQIERFFARLAPTEVALEACAGAHHWGRRLIALGHRVKLIPPQYVKPFVKRGKNDRNDAEAISEAASRPTMPLVPVKTVAEQAATVIVKHREMLVGQRTQAINALRGHAAEFGIVAAKGKGNVEALLAVLAAEPTIPEIAKAMFAEMGRHVADLDVKIVAVDRQLLEQHKGNPVSQRLAAIPGVGPITAITMALSVNPAHFESGRHFAAWLGLTPREHSTGGKHRLGRISKAGNERLRQLLVVGATAVIRVAKPGRQSATAWLLGVLERRPRKVAAVALANKVARIIWAMMARGEAYRHQPASA

SEQ ID NO: 55430 - protein, 439 aa, unidentified
MTTPSLPVLDPSAAAIDVGSEQLHVSVAGGPPKVFGTTTGQLHELRDWLKTQGVKSVAMEATGIYWLCPYDVLEQAGLEVVVVNGKYVKNLPGRKTDMKDCQWQATLHAHGLLKPGFVPPAHIRRLQDYLRVRTDHITMAGSHEQHMQKALDRMNLKIHEVLSDLTGASGLKMVEAIVQGERNPTVLLALCDPQVQKNKAGRLRAALEGTWKEEHLFALRQAYELWQFYQKKIGECDRAIEKVLQEIAGPEDPTKPAPPTAKRGGVNAPQIAGLHSMLWRLCGHKDLTALPGVADYVLLQLLAEVGTDLGHDWQTEKHFTAWLGLAPGSRQSGKRRGSQKRGRNRAGRLFCVIARSVGRSVDKALGGFYRRLKGRRGGLVANLALARKLAELFWRLMVHGITYVEQGLRKYEEKVAQTEQRLLQKLARKHNMVLQPKVA

SEQ ID NO: 55431 - protein, 399 aa, unidentified
MSAQKFIGIDVSKDSFTAAIFLPEENSLSIHSFPLNHQGLHNFYNLINSNPSPIIALESSGPYSSLLLGNLQNQGFEPNLLNPLRIKKFASSFSLRPTKTDSVDAKHIALFLASSCQPISSIQSQPDPQRQGLALLARHLESLSQQIAAIKCQIRQLLHFLFPELPDKINPFSKFALHLLLHYPSAQAVRKASPQAILETLKKATSKKGRRVHLSVARFKRLAENSIGLSDPARELLLRSLIRHLFSLQEEFRILSRHFIWQAKEYAPSAWKILLSIPGLGELSAAIIIAEIGDISRFPNAKKLVAYVGFDPSVYESGKTHRRSRISKRGNPHLRRILFIVAQQVVRRTQTFRSYYQRLRSRGKAYRQAMVAVAAKLLRVIYALLTRGTPFQDNYSPNS

SEQ ID NO: 55432 - protein, 339 aa, unidentified
MAECCFLAIDIAKNVFQLHGAASNGSIVFRRRLMRDQLPEFIAKLPACVIAMEACASAHHWAREFRRFGHDVRLISPQFVRPFVKGSKNDGNDAEAICEAMQRPNMRFVPVKTIEQQDIQSLHRVRSRLVSERTALVCQIRGILAERGIVFAKALTRVRREVPVIAQDLNNPLTPILRTMLTELMDELSALDVRIKRFDHHIDAVFQSNEACQRIARIEGVGPKTATAFVAAIGDPHEFKNGRHFAAWLGLVPRQRSSGDRQLLLGITKRGDKYLRTLLVHGARAVLRTAPKKNDAKHAWALEVASRRGAPKAIVAIANKMARVIWVLLAKKEDYCPAV

SEQ ID NO: 55433 - protein, 390 aa, unidentified
MIYVGIDVAKDKHDCCILGSDGEVLFSPFTIQNSLQGFDELYDKICSLSSDSSEIKVGLEATGHYHMNLLRSLLDNGLASYVINPLHTNLFRKGQSLRKTKTDKVDASSIAMMLLTDRTLKPYSDSSYHNEELKSLTRYRFNKVYERSRLKVSISRLVSILFPELEKLVPTLHISSVYALLSEYPGASYIASANLTHLKHLLSKSSKGHYGRDMAIAIRDAATSSIGTIIPAKSMELKHTIRLAEVLTEEIDEIEATINSVMKTLESPITSIPGINTRMGAMILAEIGDFSRFENADQILAYAGLSPSTYQSGQLTASYSHMEKRGSRYLRYALFNATRFVCLWDPTFRAYLAKKKAEGKHYNVAISHACKKLVRTIYRMQLTGEPYHKA

SEQ ID NO: 55434 - protein, 430 aa, unidentified
MKSNTQNVKIEAITEKTLVLGIDVGSETHYARAFDYRGVEYSKKPFKFSNTEAGFVTFKAWVLDIKEKHGKDKVIPGMEPTGHYWFNLGKFLQDNEMKPVLVNPHHVKKSKELDDNHPTKNDRKDPKVIAGLVREGRYMIPYLPDGVYADLRTASNIRFQLQAELTRIQNRINRWFNIYFPEYKTVYGKPDAKSGILILKEAPLPEDILTLGIDGVNQIWRDAKLRAVGKARAKTLIEAAEHSVGSKEGAVSARMEIRMLLEDYESRNIRLQEVMGLIEGLVNQIPMAEKLLEIKGVGIKTVSGFLAEVGDIRRFNDPKELQKLAGLALVENSSGKHKGKTTISRRGRKRLRYLLFEVAMSLVAKNPEFRELHNYYTTRRLNPLKKMQSLMAIAAKLLRVFYAILTKGVGYDPKKMVNDIRRPAAYAQAA

SEQ ID NO: 55435 - protein, 344 aa, unidentified
MSLIVGLDIAKHVFQVHAIDSSGEPVHRRKLRRGEVLGFFSKLEPSVIGIEACGTAHFWARALGELGHEVRLMAPHYVKPYVKRGKTDAADAEAICEAVTRPTMRFVPVKTNEQQAVQMVHRSRSVLVRQHTMLVNAIRSHLAEFGLVAGLGVAKTMALVNEVINASADECPVPEIARTVIRCMKEQTAILDQQIRQLDATLLAWHRESTASRLLATIPGIGIVTATILAASVPNPGYFGSGRAFAAWLGLTPRSNSSGGKERLGRITKMGNRYIRTLLVVGATSVIRSARMKDGSWLTTWTRALLEKKPPRLVTVALANKMARVVWAVLTRGESFRLNLASVA

SEQ ID NO: 55436 - protein, 333 aa, unidentified
MNNSETAFLPCGIEISFKVLVINLSGKAPCEFANTPDGHQCLIRMLQLAGSEIHVCMEATGLYGLDLALALHAAGIAFMIANPRSVRNFARAMMQRSKTDKLDAIVLREYAARMPFEPWRPPSPQALHLMAIAHRIQALTRMITAEKNRLHAASLSRALPAVVRHDLARSIQSLERALKRLTLAALELVMSDPQLARRNELLLSVPGIGVTSALNVLAEILRLGPDCGVRQWVAFAGLDPRHYTSGTSVAKKTIISKSGNAHLRRALYMPALVTVQHEPHFRGFYQHLVARGKTKLQAIVAVMRKLLHAIYGMFKHNQLFDGSKVYALETSCA

SEQ ID NO: 55437 - protein, 442 aa, unidentified
MSNAVYSSQSEFAAFVGIDWADRKHVWALQVSDSLLFEQGELDHTPEAVEQWAAALARRFPGRLVAIAVEQSRGALCFMLSKYEHLVLYPVHPNSLASYRKSFRPSGAKDDPDDASLLLDLLVRHRDRLRRLNPDTVETRTLQFLVEDRRKLVDERTRISNRLTDYLKLYFPQMLDWFDQVRSPLMVDMLERWPTLEELQRAKASSLRQFLTRHNCRSQSKIQERLERIRRAVPATRDAAVLTAGRSAVTTLVQLLRQLNGAIRAYDEQIQQRAQNHPDFAIFDSLPGAGPALVPRLMVALGTQRDRYQSAYQIQCYSGIAPVVESSGQQLWVHWRWCCPKFLRQSFHEWALHSIGFSDWARAYYDQQRSHGKSHHTAVRALAFKWIRVLFRCWQDRTPYDETKYSHALQQRCRKPASPQPVAVDLQLKKVAGFWKLSANPS

SEQ ID NO: 55438 - protein, 375 aa, unidentified
MNNNNTLYVGLDVHKESITVAYAINSEPVELMGKIGTSPTDIQNLCKRLRSKSSQVSIVYEAGPCGYGLYRRLVKSGFDCMVCAPSLIPKKPGERVKTDRRDAIRLVRSLRAGDLSAVYVPGIEDEAFRDLARAWASARDDLRHARQRLKSFLLVHGVHYVGRADWGPAHRRWLSKYSFESPWRQLAFDEHRRTIEDRQAQCERLESALKEAVTEWRLYPVVEALQAMRGIQFITAVGLISELGDLTRFEHPRQLMSWFGITPSEYSSGGSRHQGSITKAGNSYARKLLVEAAWSYRHPARISPAIQKRQENLPRPVIDRAWDAQLRLCKRYRKLQAKGKNVNITIVAVARELAGFIWDMGRIAISVAQQPQCHK

SEQ ID NO: 55439 - protein, 360 aa, unidentified
MAKNSIARPSPAQVVVGVDTHKDTHVARAKDHLGRRLGERIVPATTAGYRDLLSWAHGYGQVSAWGIEGTGSYGAGLARYLLARGETVVEVIRPNRQHRRHHGKSDPADADAAASAVISGDARGLPKAGNGAVEMIRSLRIARSTAIKARTQASNALKALVVTAPEELRASLRGLSTIKLVRACARLRPGQLDDPLSATKMALRTLARRHEALEAEVKALDAAVRPLVTKAAPELVALFGVGPDSAGALLVAAGDNPDRLCSEAAFSMLCGSSPIEASSGKVKRHRLNRGGDRQANSALYHVVMSRLRWDKATQEYMARRIKEGRTKREVIRCLKRYVAREVFVVLTAMQANTNTAIPAA

SEQ ID NO: 55440 - protein, 344 aa, unidentified
MPVYIGCDIHPHSQTVAWCDLKTGEIRTARFEHTDRKGMKRFYGKFKGEQAIVGVEACGAYAWFEELLTEAGHELVVGDAAKIRKMAPSRHKTDRKDAEHIMDLLMAGRFPALWRRPRENEEVLKELRYRHGLVKQRTFICNRLQAIAKDAGLGRFKMLTPRGRRLLNEAKLCAVSVGIRESWMALLDQVEGQIKEVEKRLEQRAKADKDASRLMTHSGIGTLTSLCLTHTLGDVKRFQNSRQVTAFVGLDPVEKSSGDKVRLGSISKAGSALLRFLLVQAAQSAVKKDARLRSFYQQVARRRGKAIAKVATARKLCTRAYIMLRDEIDYEEFSRRGAKIGLHE

SEQ ID NO: 55441 - protein, 343 aa, unidentified
MYYIGLDVHKKTISYCVKDAAGCVHQEGKIGSTRRELDTWVRTLPQPRTIAMEATMFSGWIYDHLLPHAAAVKVAHPLMLRAIAAAKKKNDRIDAGKIADCLRCDFLPECHMAPTAIRERRRVLRYRHLLVRQMAQTKNRVSGLLMETGVEHNRSRLHKVGYFRRLMATDSEIDDSIRPLLKLSRDTIQRCQRTEYALVSSLERDPLLKERIRRLRTVPGVGPITALNWALEMGEISRFRSIRQAVSYCGLCGDERSSGDKVMRMPLSRQRNKHIQHVLVEAAKLAPRLSPELALVHQKAMERSNNRNRATLAVARKIVAWLLAVDRENREFIPAEQRETEAA

SEQ ID NO: 55442 - protein, 341 aa, unidentified
MAQVTTIGLDIAKHVFQAHGADAAGQVVFRKRITRGKLINFLAAQSPCIVAMEACAGAHYWAREISKLGHSVRLMAPAYVKPFVKRQKNDAADAEAVCEAVQRPSMRFVPAKTEEQQANTIVFRARDLLVRQRTQCVNALRGHLLEYGYAFSQGLSQIASLVALIEDPGSSLPEGVRSILKLLVDTFTGLEAQIAVLDAEINRRSKTDPAARRLMTIPGIGPIVSTAITALAPAAHSFAAGRDFAAWLGLTPRQRSTGGKQKLGAITKRGERTIRRLLIIGASAVVRQASRRGAPKGTWLAQMLARKPKMLVTVALANKMARIVWALLVKGGSYRAPVAAA

SEQ ID NO: 55443 - protein, 332 aa, unidentified
MKKIIHFIGIDVSKETLDIALIRNNDKSNIYSSKVTNNKTGFKKMKQWLKVENVSLQEAVFCIEHTGMYSKPIGQFILSLQGNLWMEMSLKIIRSMGVQRGKNDKIDAMRIALYAQRCQDEMKLYEPPRPIIEKLRTLLQLRKRLINSRNSLQVPCNELTTIDEQAGKEATRLIKSSVSALEKNIDVINEEIDQLIASDEQLAHEFEIGTSVPGIARITLAYIICFTNEFKNYSGGKQLACYCGVVPFEYTSGKSVKGKPHVHNMANKFLKKLLHMGAIAAVTYYDEFKCYYKRKVEEGKPKMLVLNNVRNKMVLRLAAVIKNNKPYQKIAA

SEQ ID NO: 55444 - protein, 337 aa, unidentified
MKYQWFAGIDVSKLQLDITVYKGSERVFYKAISNTVKEIVLFLRQLIQKEKISMDDCLFCMEHTGIYNSNILKVMEEQKLSVCLESSVQIKQSGGLQRGKNDKIDSDRIALYAYKNKDFLKLWKPERSVIGQLRRLSSMRERLLNAKKQLNAGLSEDKKFGNKYLNKQMAACCRSTIMAIEHDIKKTETAIEAVIESDDQLRNLYRIIESVPGVGKVTATEIIINTNEFKRISDPRKYACYAGVAPFEHSSGISVRGKTRVSKKANLKAKSLLHMTSLVASRFSEDLKAYYERKVAEGKNKMSILNAIKNKIIHRIFACVNQNRLYQKNYVFNLVES

SEQ ID NO: 55445 - protein, 368 aa, unidentified
MKSYTIEAAPAASAKELKTQRAPKAKRIAVGADVHLRGYQVARKIDNAVIGGVVNLRSETELLLYVEKQWEQAEEVVVVYEAGPLGYGLYRALEARGVKCLVCAPDSTQQKRKRRKNNQIDARTLTSNLFNYLNGNEAALQLVRVPTPEQEQARLASRQHDQLVKERKRMGAKGNALLLSQGFGSWKNWWRPKALSRLKELLPGWLFEMLHNWTDLLRALDVKIQAAKATLARRCSGPRPKGAGAASLAQLQSEVLDWGLYPARRKIACLAGMVPSEWSTGEDQRRGSITKVGVAAIRRIITEMVWRIVLFQPQYPPVQKWQEALRSTNRTLKKKAVVAIGRQLMVDLWRLQTGRTTAEELNLVMIGS

SEQ ID NO: 55446 - protein, 346 aa, unidentified
MKQITIVGLDLAKQVFQVHGVGPDGIAVVKRQLRRSEVLAYFGKLPPCLIGMEACGGAHYWAREISALGHEVRLMPPCYVKAYLKRGKTDAADAEAICEAVTRPTMRFVPIKSAVQQAAAMMLKTRDLLVRQRSQAINALRSHLSELGIVTGLGVGKVSLLIEIVRDTSDERLPKAARLALCELSDQIEALTGRIVSLESEIVAEVRQDEEMRRLTTIPGVGPISAASIKALVPDPKGFVSGRHFAAWLGLTPKPCSSGGKERLGGISRMGNTTLRTLLILGATTVLRHVRRGATTSAWVTALLARRPFKVAAVALANKMARIVWALLTRGGAYRKNEVVSGMAGA

SEQ ID NO: 55447 - protein, 410 aa, unidentified
MNHEGRMIERYDAAHSGKDLANLVDRIRKTCPGPAIQTGIALEVSWGALVETLAEAGFSVFSINPKQSDRFRDRHTAAGAKDDSRDALVLASALRTDPKSFKRVQVDDPSTIRLRELSRLDQELKNDLHRAANQLWEQLHRYFPQMLKFSSGADDPFVWALLIEAPMPAKAAMLKVSRVGQILKSHRIRRFTADQVVTILKEPSLQPAPGAAEAASEHVLLLLPRLALLNEQIRDVARRTAKLLKDFPQNADLNGIVPEHRDVDLLLSLPGLGQTIASTILAEASRPIRERDYDALRCYAGSAPVTKQSGKRRIVSMRRACSERVRQAVFHWSGRSIMVDSRSRQHYDRLRAAGHGHARALRGVGDRLLAVLTAILQSGRPYDASLRGTSTSTLTKPAGPSNASCKIGKH

SEQ ID NO: 55448 - protein, 325 aa, unidentified
MQVLYTRCAGLDVHKDTIVACVRCVSPPIHQEVRSFGSTTTELLALADWLAEHGCTHVAMEATGVYWKPVWHVLEDEFELVLANAAHIRNVPGRKTDVNDAMWIADLLAHGLIRSSFVPPQAIQQLRDLTRTTMLKLHLQIVDALERTLTELDTAVGKALAPIRQRARLLTTMPGVSDLTASVLVAEIGVDMTRFPSAGHLISWAGLCPRSDESAGKRRSTRVRKSGTWLKTALVTAAWAAVRVKTSYLRAQFLRIKARRGAKKAILAVAASMLTAAFHMLREGTEYADLGSEHFDRQDKSKTIRRLLKRLQDLGCHVAEPAHAM

SEQ ID NO: 55449 - protein, 342 aa, unidentified
MNLPVRIGMDTSKSVFQLHGVDENEVVVVRRQFRRAEMIRYFERLPPVLVAIESCGSSHHWARLLQSFGHEVKLIPPQYVKAYVKRGKNDAADAEALCEAVTRPSMRFVPVKSKERQAACMLMTVRERLVSVKSQLSNAFRSYAAEFGIVGPAGRQNVTALIKRVLEDDSLPEMARDLFRLQAEEYAAVQARLAKIEAKLMMWHREDDVSRRIATIPGVGPIGSSMLSMKAPPPETFRSGRDFAAWLGLTPKDHSTGGRQRHGGITKAGDSARRSTLIVGATALLRHIRKGRHKPTPWLASLLERKPPKLVAVALANKFARIAWRLMISGGVYNRPVAAMPI

SEQ ID NO: 55450 - protein, 323 aa, unidentified
MTVYIGIDIASKKFDAAELRDGAYRCKTFENTPTGFTALYNWLKTDSIPDIHVCLDATGSYGTALATFLYEKSLKVSVVNPARIKGFAASELTRTKTDKADSRLIARFCKAAQPDPWRPVPAPVRKLQVLVRRIGALNGMLRMECNRRENADIDAQESVERMITHLKMELKSVRQAIKEHISNVPELKKQNDLLLSIPGIGAVSASLILSFMASKDFTKAKEVTAFLGLNPRHHQSGTSVRGKTRMSKMGDAKLRCALYMPALVALKHNPDIRAFGLRLLAAGKPRMLVVGAIMRKLIHIIFGVLKSGTGFSSRVTVNAGFNQ

SEQ ID NO: 55451 - protein, 393 aa, unidentified
MVSVGIDVAKDKHDCFILNSEGEVLADVFTISNNREGFETLLHTIQSCAGSSERIKVGLEATGHYSYNILGFLLDYGLPTYVINPLHTNLYRKSLSLRQTKTDRIDARTIATMLMSDVDLKSYTNTAYNNEELKSLTRYRFDKVRERAKLKTSIARLVNILFPELEFLVPVLHMPSVYALLSEFPGAKQIAEAHLTHLKSVLHDASKGHYSREKAEEIREAARHSIGSFMPAKSLELQHTIRLIRELDHAISEIEAAIKTIVDEMAPPILTIPGINYRMGAMILAEIGDISRFASPDQLLAYAGLSPSTYESGKLVASGSYSHMEKRGSRYLRYALFNAARFVCNWDPVFAAYLSKKRAEGKHYNVAISHATKKLVRVIYALQTSGQAYHIAV

SEQ ID NO: 55452 - protein, 410 aa, unidentified
MQVIYERCCGLDVHKKSVTACIITPEGKETRTFGTMTRDLLEMISWLETKGVTQVAMESTGVYWKPIYNLLEETGIQPLVVNARDIKNVPGRKTDVKDAEWIADLLRHGLLRGSFIPSRGQRELRELVRYRRSLVEEQSREANRIQKLLEGANIKLGDVVTDVLGKTGREILECLVKGETDPEKLAGLARGRLKKKRDQLVEALVGIIGPHQRMMLEIQLRHIDFLDREIARLDKEIEERMRPFAEALERIDEIHGLGRRSSEEILAETGTDMSRFPSDAHLASWAGICPGNNESAGKRLSGKTRKGNPHLRAALVRAARAAARTKGTYLSALYHRLAARRGANRAAIAVGHAILVIIYHLLKKGTRYQDLGSDYFDKLAEKAVVSRTVARLEALGYKVTLEKKEDETAA

SEQ ID NO: 55453 - protein, 331 aa, unidentified
MSHIIGIDVSKATLDCAYLCDPDQDKAKRKSCQNKLGCFESLVAWVETLSGVPRQSLAFVIEPTNVYHEQLVQFLHSKGTTVYLVNPGRVRKFAEGIGILSKNDVIDADLLARYGLMAKNLIVFEPAPQEVNDLRSLLNRLDVLEKNLRRELNRREKAGKSLTFHRLEQQSITRSIKRHEAEIVFFKDAARGCVNASPWLQRGVELLSTVPGVGERTAWLMMVILSSRQFHCAAEVASFLGLNPIEKRSGKSEYRKPRLSKSGSSHYRQALYFPAMVATRRNPDVQALYERLVVAGKPKMCALGAAMRKLVHICYGVYKNQQPYQPLVSPP

SEQ ID NO: 55454 - protein, 374 aa, unidentified
MKNVCGLDVHKDSIFMCIIKKNGDKVEEKFGVLTPELDRLRDLLVYHSVGDIAMESTSIYWVPIWRVLYSDFNIKIVNPYFIKQLPGRKTDVKDAQWIATVLQKELIKGSFIPDPIIQELRLYDRRIFYLNRNLQHAEQNIDLILQRCNIRLSNYVSDIGGKSMQKVIDSIIEGKTDPDILLLLVHKRTRNKHGDEVIKAALTGVISKTDRMMLKLSREETCMYERQIEECYVEMNSICQTYFSQEIELLQTIPGIKKDSAMRIVAEIGVDMKAFITASAIVGWAGLKPRNDESAGKIKGRKTLHGNKFLRVLLVQCAWAACRTKGSRFFYKYQTLTKRMNHNKALLANARKILVIIWNILSKKQPFTTTYIAA

SEQ ID NO: 55455 - protein, 453 aa, unidentified
MEKPLIPVFDEIRRNVAGIDLAWRAETYVCGPRREDGEFDIEAFGTTTPELHRILIWLKDRKVESVAMESTSVYWIPLTDLLEANGIEVVLVDARMVRMVPGRKSDIEDCQWLQKLHSCGLLRGAFRPPEAIAAVRSILREKDSLTAMRTQAIQQMQKSLDQMNIRVHHAVSDIDGKTGTAIVKAIVDGERNPAKLAEFRDRRCKKSGAEIAEYLTGTWREEHLFTLGQAFKILQCLDERLAEYDTKASEMFAALAAASGNPPPPPLPKDRRLTRKERNHSEGKATLCQIMGFDVTSIDGIEYDTARIIASEVGTKIGSFPTEKHFASYLGLAPSLSKSAGKKVRQKKRGKNKSRSGGALRMAAASLHKSQTELGAHLRSVARRTDKKTAIKSTARRIAHLIYRGVRYGKEYIDRGADAFESRLRDRTVNTIKKLIKSHNINTSEISEAFMTV

SEQ ID NO: 55456 - protein, 348 aa, unidentified
MLADQLDYVVGVDPHRDTHALAIVDVRTGGVVVEASVEASSIGYARALELARGQAPGRRSFAIEGAGSFGAGLSRFLSGQGERVLEVGRLRRERRSGGKNDALDAIRAARSVLAESRAAEPRAGGEREALRALMAAREGAVNARRAALCQLRALLITTPESLRSELRPLTRAQLLRRLGSVRPDRRRDVELRGTLRALRALARRVRQLTSEERELADEIERLARALAPQLLEQAGVGPLTAAQLVISWSHQGRIRNEAAFARLAGCAPIPASSGQTIRYRLDRGGDRRLNRALHMILVTRRRSHPATIAYIERRVQEGKSSREASRCLKRYLARNLYRLLEQGAPLAA

SEQ ID NO: 55457 - protein, 344 aa, unidentified
MGYFVGLDVSLRSCALCIVDTKGNVVLERELACEIDDIVECLSDCAFPIERIGFEAGTMSQYLYFGLEAAGFDVVCMEARQVNAALSAMRNKTDKNDARGIAHVLRTGWFSPVHMKSREAHGHRALLSTRKALLKKTMDLANEVRGLLKIFGIRLPKTVKHGSFDDVVRPMILIDDVLAHALVPLLDARVVLYQHFLEMDRRVKRAASHDEVCMRLMTVPGVGPIAALTFKSAVDDPTRFKRSRTVGAHFGLTPRRYQSGEHDNPGRISKAGDRDVRAALYAAANALLMRTMAGSQIKSWGMRLMRTKGRRRAVVAVARKLAVLLHRMWIDGTEFRQEQVGGTA

SEQ ID NO: 55458 - protein, 471 aa, unidentified
MSRTKSTIPSLAQGEIRSTQGLPVVNPHAAGADIGAQQIFVCIPGPDQTQIVRSFGIYTADLHTLADWLVENGIQTIAMESTGVYWIPLFEVLEDHGIHCCLISGNLARRLPARHKTDVLDCQWIQTLHSLGLLTESFRPDADLIALRSLLRHRAQLVEHRSPHILHMQKALTQMNIRLDQAVSDVTGQTGLAIIRAIVAGERDPHKLAALRNPRCKKTEDEIAQALTGTWREEHLFVLKQSLEFYDFYTRQIEACDLEIERTYAAIRPDWPDPNPDDQEPLPPNKRGSHSKNLSKESPVHVRQHLRRITGIDLTAVDGLSLDLAQKIVSEIGTDMSRFPTEKHFCSWLKLSPNNQITGGKIIRSSTGKSHNRARQAFLQAAASVAQSDCAFGAFYRRLKARVGPAQAQVATAHKIARVVYHLLKYQVEYRQTTAQEYEQQFREREIRHLQRKAARLGFSLTPIPEAGSVS

SEQ ID NO: 55459 - protein, 339 aa, unidentified
MDQVNTIGFDTAKHVFQVHGTDAQGRVFRRKLRRKEVISYFASLPPSVIGMEACGGAHYWARQLQALGHEVRLMPPAYVKPYVKRGKNDAIDAEACWEAVGRPTMRFVAIKSEEQQSVLMLHRARDLLIGQRTQTSNALRGHLAELGIIAKQGRGGTDELLALVEGHEEGQLPELARTALLVLADQLRELRVQINKIEREIHAWHRSNATSRRLETAPGVGPITASAMVATVPDPSRFKSGRQFAAWIGLTPNEDSTGGKQRLGHITRAGDPYLRRLLVVGAHAVLRHSGNAKSAPTKWAAELLGRKPYTVAAVALANKMARVIWAMMMKEEAFRAVSA

SEQ ID NO: 55460 - protein, 401 aa, unidentified
MKRLSGGIDVGSESHHITILDEEDHILYNQKVSHKLNEFTESVKQFKKIEKKEKGEISFALEGKNGYSAPFDRILLDQGFTLYNVDNLKLKRFRQAFAGEWKDDQRDALMLSKMLKLKEHINSQREKVFIKIEKPSPLTESLKLLSRHQQTLIDEKVRLVNRLRKKLLEVCPQILELGKAKSKKLIAILTKYPDFSKYKRITLCSLLKIKGIGEKGAFFLLKRLNHIEYMPGLTDIYKTIIFSCAKRILELQEEIKDIDKSLDEIGEKNKEVNHLKTIPGVATKLASRLIGEIGDINRFPSEKQLAIYCGIACVDNNSGKVTKAKAVYKANKICKQTLITMAGGSIRLSPQCKFYYLKKRAEGKSHNHTLRCLARQLIKVIYKMLTEDRDYMIRKELRKVA

SEQ ID NO: 55461 - protein, 324 aa, unidentified
MQTQSIGVDVGKTELVASIRDSDGNSAMPALFPNSSVGLKKFLVYLKTNNISSDDPILFESTGPYHWRACRTLADEGYFIKVANPLHTKQIARLSIRKRKTDKVDSQNLAFLASQNYGYRFVETEAMAKRKAMVRHYWKLRQSATDHLRHDRYMKEYRGINDESVSKFMIKRCEALKKIIVKKWDKGNDIKYLDSIPGITPFLAATILAELLPLERFKTIDQIVAFSGLDPSVKQTGGKAGHHGHISKRGSPTLREALFLAAFGSFQREPMKSIYVRYKARGLHHNTILCILGRKILRIAVSLLKKRRIFDATKLSTVDDLTGT

SEQ ID NO: 55462 - protein, 354 aa, unidentified
MHYVGVDYHKRSSYVTVVDERGRVVKQGQIANTQEALVAALEGIEGEMAAVLEAGRNWPVMYDLLERLVDEVTLAHPAKVPVIAEAKVKTDRIDSRMLAQLLRADLIPTAYVPGKVTQEQRRQLRHRMFLVRLRTMLKNRFHILIDRHPELSAQAQGFSDLFGKGGRQWLREIAVPGVDAQLLAEHLELLEIIEARVKASDGWVSQLSRRDGRARLLATLPGIGDFFALLLAVEIDDVRRFCRAQKLCAYAGVVPSTYASGGYTHHGRITKQGNKWIRWACIEAVYPAIRTDPALAALYERLKPAKGANVAKVAVAKRLLTIAYRLLTESRPYRPATQPVRTRRRVSPAAPVSA

SEQ ID NO: 55463 - protein, 326 aa, unidentified
MHILGIDLAKKTFDVTLLTPAGARHHHTFPNTPSGFRGLWRWVSAHGATSVRACMEATNVYWEALAQYLVEHDATVHVVNPARIKGYAQSQMLRNKTDKQDSATIAAFCAAHDLSAWVPPTAAQRKLRALVRHRDDLIASRIQQTNRLEDTTDEDVRASLETVVATIVSQLTAIQQQITAHLQAHAELGEQHDLMDAVPGIGPVTAQKLVAEFYDLASYTSAKAVGADAGLTPANYESGTSVRRRPRLSKIGKASVRAALYMPAITVMSRNREFKAFAARLAARGKSYGVILGAVMRKLLHIIYGVVKHKAPYDPQKVLGSAASTT

SEQ ID NO: 55464 - protein, 449 aa, unidentified
MIRTGSDADQKIGPAARSFAADAHDRIMVRTSTNLPNTDPMQVEATNTGKARSPPHSIEGSDQMHHVINISGPEQTGTGADYAILFVSLELSRSTWVATSLAPASKKMSKHTLVGGNGRDLLDLLARLKARAEQRIAAAVKVVTIHEIGLDGFWVHRLLDANGIESHVVDPASIAVPRRHRRAKTDTIDGETLLRTLMAWQRGEPRVCAMTVPPTPSEEDHRRVSREREALLRERIRHTNRVRGLLFGQGINNYNPLHKNRRERLKELQTGDGRPLPARLKAEILREIDRLELVLRQISEVEAERDEMLRSAEASSPAALLMRIKGIGTEFATVLYVEGLFRHFENRRQLAAYAGLAPSPWKSGSIDHEQGISKAGNPRLRTTMIELAWMWVRYQPDSALSRWFRDRVGSERGRTRRIAIVALARKLLIALSRYVSHGEIPAGAVMKAV

SEQ ID NO: 55465 - protein, 310 aa, unidentified
MEHTTWVGIDVSKDRLDVHVLPSGEAWATTRDADGLAELCRRLQGMAGVVAVEATGGYESIVAASLSSAGLPLVVVNPAQVRAYAKALGQRAKTDPIDARVIARFAEATKPEVRPLPDQATRMLADMLARRRQIVDMIVSETLRLQRSELPRVRKSIERILVALRRELGDVDHDIDSTMRGSPIWREKEDLLASVPGVGRIVARTLVAELPELGTLGRKKMGALAGLAPFTRKSGKWVGQTRIGGGRPAVRTALFLAAQVAKRCNPLFKAFFQRLLARGKSKMAATIAVAHKLLTILNAILRDKKPWQIA

SEQ ID NO: 55466 - protein, 389 aa, unidentified
MVVQQIAPVAESQFAPVFVALELSRSKWLAGIGTPQKWTVRRREIEGGDFDGLLALLGRIAADEERRSGLPVKVHVGFEAGRDGHWLYRALKSAGYEVYEIEPASVSVDRRARRVKSDGVDVDKLVRTLSRYVRGELDACRMVEVPSEAEEDAKRPHREYERLVKEQTSHRNRVKALLFAQGVRDFDPMAPDRLARLAALPIMPRLKSELVRECRRLAAIIADIAEIEAEMAAAVVPCKNASRQSAVAPIPSHVQAKAAQLFKLKSIGVHFSTVLAGEVYYRSFRNGRGVGQYIGLAPSPFQSGDMAHDQGIAKAGNKRARTAMIELAWLWRRYQPDSALSKWFRERVGDKKGRVKRIAIVAMARKLAVALWRYLETGLVPEGAVLKRA

SEQ ID NO: 55467 - protein, 407 aa, unidentified
MQVLYPRCAGLDIHKDIIVACVRCVSAPEHREVQRFYSTTKGLLALSDWLAVHGCSHVAMEATGVYWKPVWHVLEGSFELVLGNAAHIRNVPGRKTDVNDATWIADLLAHGLIRSSFVPPAAIQELRDLTRTRKQLTREIAQHCLRVQKVLEDANLKLGSVLSDVLGGSGRAILKAIISGENDPVLLAALAQGHARKKTSELREALRGRITSHHRTMLALHLQLIDALEHALTELDAAVGLALTPIRQHVQLLRTIPGVGDLTARVLVAEIGVDMTRFPDSAHLISWAGLCPRNDESAGKRRSTRVRKSGTWLKTALVTAAWAAVRTKNSYLFAQFTRVKARRGSKKAIIAVAASMLTAAWHMLRNGVEYADLGADYFTRHDMQSTVKRLLKRLTDLGYPVQPASPS

SEQ ID NO: 55468 - protein, 352 aa, unidentified
MIVLGADTHKSSHTIAAVDAATGQLLGEKTIVVGARGFGSLVVWARGLAGERAWALEDCRHVSGALERFLIGRGERVVRVSTRLMATSRRSGRERGKSDSIDSIAVARAALREGLDELPTAQLDGPELELRLLVDHRERLVRQRVGLNNTLQWHLHDLWPELVLPGGALFSRKWSSRIGRRLARAEQTMRVRIARDELRRQRELTQAITVLEVEIAALVAQVAPQLLTEPGFGPLTAAKLVGEIAGADRFASDAKLARAAGLAPIPVSSGRTNRHRLDRGGNRQVNAAIHRVAVTRARCHPETRDYVARKTAEGKTHREAIRCLKRHLARRIWQLLRAPHPGQGTPPSPSTS

SEQ ID NO: 55469 - protein, 354 aa, unidentified
MTILAQIIDAAVGVDTHRDTHEAEITSPTGAVLATTQVPNTSAGFIRLLDWITEHAPGPNVVVAVEGTRSYGIGLTRSLTAAGLTVLECEQPTTTARRGKGKTDAIDAHLAALFVLRQDDRHLPTPRADGIREGLRILLSARSELTTTSTAQTNRLRALLLTGDDEDRDTARRALTDTALAGLARRRRPTSTHPHERVRHGELRRLAVALREASRALKANRAQMLELLHEIAPGLTDRPGVGPVSAAQTVVSFSHPGRVRNDAAFAALAGTSPLAASSGQRTRHRLNRGGDRALNRAVHTIALTRMRSCPRTRSYVARRTAEGKTTREIRRVLKRYITRELYRALSHPPELDNT

SEQ ID NO: 55470 - protein, 344 aa, unidentified
MKTKATVLKQSIGNDFSKNEFVVCFWQHLSDNHKRIKSSRTFKNTLKGFQLFIDWVEKHRNPNLEVSIILEPTGVYHENFMYYLEEHTDYKQSLVVGNQTKAFAQSLGIQTKTDKVDAKVLGRLGLEREDLRVWRPFSPNLRIIKQLCRERVYLIEDKTALSNRKHALQSSFDPNGEELDRLLERIETIDQQVKEIESRIRQGVKADEKLQEPIAKICAIKGLRLITVATIVAEMNGFVLFTNRSQVVSYCGYDIVQRQSGISINGKTKISKRGNRYIRRALYFPAIVAGRHEPTFMALYDRVLDRSGIKMKAAVAVQRKLLVIVYALFTKNGTMRKCMGLYKY

SEQ ID NO: 55471 - protein, 321 aa, unidentified
MVYIGIDISKNNFVVAYPSTNGYSTKTFPNSTAGVRTFIATLSVAEHHCVMEATGNYCFLLLYLLHQSSIAVSLVNPKQIKHFARMMMAVTKTDEKDACMIAMYGEKMNPPIYKMPSQSIILLKQKKTVIRQLRKQLVASKNLRGSLIVLPYRDKACVRTLDKTIDFLTKQIEQLEAELADIASSEFDKQLKALTSIKGIGITLATALILTTGGFTYFDNAKQLSRFIGICPTYQQSGTSVNIKGHINRNGDEHLRSLLYVASWIALRYNASCRECYLRLKANGKPSKVALIAVANKLVRQAFAIATTDSTYIDGFISTKK

SEQ ID NO: 55472 - protein, 273 aa, unidentified
MKQEMHVLGIDIAKRVFHAVGMDNTGNVVYRKRLSRHDLMPFIAKLSPVRIGIEACGGAHYWARRFRAYGHEVKLMAPQFVKPYVKSNKNDSRDAEAIAEAVTRPTMRFVPIKDVNQQDIQALHRVRERLISERTALVNEVHGLLHEYGIVMPKGVAKFRQAVVGKLESEKDKLTPLSQEMFWKLVEEFAALEAQLAYYPEKLEALAQTHPECQRLMTIPGIGPLTATALVAAVSDASAFKNGRQFAAWLGLVPRQYSTGGKERLLGISNQWC

SEQ ID NO: 55473 - protein, 391 aa, unidentified
MDKGWVGIDAGKGFHWAVVLDADGEILLSRRVENEEADLWALVEETLGFGLELTWAIDQPGGAVALFLALLWDRNQRVLYVPGIAVDRARDAHRGESKTDARDARLIADQARMRRDLSALVPGDELLAELALLVARRRDLVTDRTRTITRLRDVLLALFPGLERALDLGDKGPLLLVARYQTSRAVRGAGRKRVEAYLKKQGVRGAAKLAEKAIVAAKKQSVNLPAESVAAEIVAGLAREALVLKERIVELDRALERRFLTHSLAEILVSLPGMGTLLGAELLVAVGDPRDAFTDAGRLAAYAGLVPAARDSGKRTGNNRRMRGGNKMLKRVFYQSAFASLRTPASRAFYNRKRKEGKRHTQALIALARRRVDVLWAMIRDEERFNPPVTA

SEQ ID NO: 55474 - protein, 355 aa, unidentified
MKYYTSTTQFNCGIDLHARQMYVCVMDRDGKKLVHTNIRNNDFEFFLKLVAPYRHDLTVCAECMFGWYWLADACQAAGLTFVLAHALYLKAIHGGKNKNDRIDSEKLTHLLRTNLIPPAYAYPAQKRPLRALLRQRILYVWNRSELLSRIQSHQLAHNRPTFRQTPYNRDAWTEQLLAHEDHPARQFALQNDLALIGHYDAQLAIIEKELLKLTKQTANRDFTLLQTTPGIGEYLGLTILHEIGDIARFPTVKDFISYCRLVKGTVASAGKIKGLRGAKLGNPYLRWAFGEAAVIAKRDHAVLGPLAQRLEARMNGNKFKANTVLAIKLARAVYFMLKSHTVFDADRLVAALSRN

SEQ ID NO: 55475 - protein, 320 aa, unidentified
MRNAVGLDISKLTFDATAIVGNAEYSAKFDNDSKGLDQFSDRLKSLGCQNLHICMEATGNYYEEVADYFAQYYSVYVVNPLKISKYAESRFKRTKTGKQDAKLIAQYCRSAKESELVKRQKPTDEQYRLSRMTAAYAQIKSECAAMKNRHHAAKDEEAAKAYAQIIKAMNEQLEVLKEKIKEQTEKPNCKEGVKRLETIPAIGRMTAAVLFHHLTSSKFETSNKFAAFAGLSPQQKESGTSVRGKGKLTKFGNRKLRAVLFMPAMVAYRIRAFPGFIKRLEEKKKPKKVIIAALMRKLTVIAYHVHKKGGDYDPSRYKSA

SEQ ID NO: 55476 - protein, 443 aa, unidentified
MSRKKVTHLRGERGQDFANRMRGIPSEQILCVSLDISKYFHEVMIHNGLGEIVRPTFEIDMMQSGCDQLCQAIEQARVQTSAQVVLIGMEPTSHYFENLARHLLKRALPVTLINSFAVKQNREQRLMRREKTDEIDVAAIGDLLRRGEGTLYKPPTEIYLQLQQLDRVRLSKARIAGMLKNQIIGHLDRIFPGLIVFGEEAQKRYPPLFETNFWTCSTLQRLIRICPNPHRLAQMDPSALVQLFHERQSRLGLKSAARIIARAQETLLPDPLLVDIRAELLQHDLELLDELQSHLAVLEQRLAELLATTPYAVWAKLKGLSVVQVASLAAAIGDPANYSEAAQIFRRSGLVSGRNDSGRRQRKGQGSPVLKAGDVYLRRALMNAIATLLLHQPVLIRYYQQLKKSKPDGVARVATARRLVGILWATLRDQYPTTLLCCKGADM

SEQ ID NO: 55477 - protein, 366 aa, unidentified
MAINISNHKQEKNHNSSEKLSYEGKKVFVGIDVHKRTYSVVTVVEGMVVKKWRTVASPEKLAQQLVRYFPGASIETAYEAGFSGFVLHRVLEKAGIHNIVVNPGSIEVAIHNRVKTDKRDALKIATLLEAGRLKGIRVPSPQQEQQRLLTRTREQLVQERSALKNKIRMKCHQMGLIDPNDRREMSHKLVVEILALTPSPEFSLIIKAYWSVWKSIETQIKKIERKLNEQAKTDPNETIYRSAPGIGPLSSRILSHELGDLSQFANERQLFSYTGLTPSEFSSGDTVRKGHITRQGNKRVRYILNEAAWRAIKQDRDLKEFFDRLAPRTGKKRAIVAVARKLIGRLRAAFKTGQPYQMNPISLQPA

SEQ ID NO: 55478 - protein, 461 aa, unidentified
MAKRMRTRAGGTKGKRGLARLHPHAAGIDVGASEHYVAVPPGADSKGRDVRSFGSFTCDLRELADWLQACGVTTVAMESTGVYWIPLYELLESRGVEVQLVDPRELKRVPGRKTDVLDCQWLQELHTFGLLSGAFRPPEQVAALRAYVRQRDMLVRYASDHVQHMQKAMTQMNVKLDRVVTDITGVTGMSIIRAIIAGERDPRALASLRMPGCRNDEATIAKALEGTWRAEHLFALAQAVELYDIYQEKLRQCDMAIEAHLKRFDDRSGGGTVDGGRARRRKNQPHFDLRGLLVRATGVDLTRIEGLEATTVLKVVSEIGTDMSPWPTAKHFASWLGLCPGSKTSGGRNRSSRTKPSANRAAAALRLAAQSLHRSRSWLGAFLRRKAAQKDMPKAITATAHKLARLIYSMLRYGTEYVLRTQEQYEEVHRTRTLAALTHTAKRLGYALVPRDPTKPASSLA

SEQ ID NO: 55479 - protein, 346 aa, unidentified
MMLIGCDFHPSWQQVSWLDVETGETGEQKLVHAGGEAKQFYEQLAAPVLIGMETTGNSQWFIELVEDLGHEIWIGDAAQIRASYVRKQKTDKRDAAHILKLLVEGRFPRLWTPDREQRDLRQLVLHRHKLVLIRSRVKNELQHLSLNKGMQRKRRLWSQAGQQLLRELPLKKWAACRREDLLGLLTMLDEQIGKLDGAVEHAAEENPQSKLLMTQPGVGPNTALAFVLTIGDVGRFPRGKQVASYLGLIPREESSGGRQKLGVITKQGNRMLRMLLVEAAQAAVRYDPQFRKEYLHRCHKKPKAVAKVAAARKLAVRLYWMLRTNVAYPEIVRIESSSGLPLVGAS

SEQ ID NO: 55480 - protein, 426 aa, unidentified
MRFIALDVHRDFCEVAIAEGGAVRLAGRVRTDPGELQLFAESLGPDDEVVLEATGNALPIARILEPHVARVVLANPKAVKGLTQAGPKTDKADARALARLLAGGLVPEVWAVDEPTRVLRRRIARRAQLVKQRTREKNQVHAILIRNLKGRPPVSDLFGVEGRRWLAEQKLPADEREMVEACLRQIDFLDQEVAAVDRALAELALASPEMRRLMTLPGVSSVTAAALLAAIGDVARFPTSRRLVSYLGLDPASGSRAPSPPRHGRISKQGPGEVRHLLVEAAWHAARTYGPLRAFYERVRSRRGAQVAVVAVARKLCVLAWHMLVRGEDYAFARPSLVREKLRRVELLVGAQRRQGRRNPVRVFATAEQHRLEKELARQAELAYRRLVQDWQPAMKTGAGAALGHASCGPSSGQAARQDTAPHPAL

SEQ ID NO: 55481 - protein, 334 aa, unidentified
MENIALIGIDLGKNSFHIHCQDRRGKAVYRKKFTRPKLIEFLATCPATTIAMEACGGSHFMARKLEGLGHSPKLISPQFVRPFVKSNKNDFVDAEAICEAASRPSMRFVQPRTESQQAMRALHRVRESLVQDKVKTTNQMHAFLLEFGISVPRGAAVISRLSTILEDNSLPLYLSQLLLKLQQHYHYLVEQIKDLESQLKRKLDEDEVGQRLLSIPCVGTLTASTISTEIGDGKQYASSRDFAAATGLVPRQYSTGGRTTLLGISKRGNKKIRTLLVQCARVFIQKLEHQSGKLADWVRELLCRKSNFVVTCALANKLARIAWALTARQQTYEA

SEQ ID NO: 55482 - protein, 346 aa, unidentified
MQYDAGIDVSLEQSSVCVVDAAGKIVKEAKVATDPYVLVTFFKGLGFPVTRIGLEAGPLSQWLYAGLIQAGFDVVLLETRHVKAALSAMVVKTDRKDARGIAQLIRMGWFRAVHAKSASSQEIRALLTARRLLLDKLRDVELSLRGVLRGFGLKLGKVMQRAFETRVRELVANHPMLQQITRSMLLARATLQREHNVLHKALLKIVRRDKVCRQFMTAPGVGPIVAITYKTAVDDPHRIKKSKGAGPLFGLTPKRYQSGETDVIGGISRVGDAMVRAMLYEAANVLLSRTTRFSALKRWGLAVAKRRGMKRAKVAVARKIAVILHRMWIDGTSFRWSNKEKAVAHA

SEQ ID NO: 55483 - protein, 410 aa, unidentified
MEAIVECCAGLDVHQATVVACLNRGPAGKRSSKEIRTYGTTCQELRELRDWLKGSGCSLVAMESTGVYWKPVHAELEGHFELIVGNAHHIKNVPGRKTDVKDCDWISDLARHGLIANSFVPPRPIRDLRDLTRYRRKLVEAQAAERNRLIKLLESASIKLSGVISDVFGVSGRAMLRALIEGDQSPAEMAQLAQRRMKRKQPELARALDGHVDEHHRFLLRLQLQRITAAEADLAQLDERLREKLAPYDEELGRLMQIPGVDWVTASALIAEIGVDMSVFHGAAHLAAWAGLCPGNHESAGRQKSAKTRKGNVWLKTAMVTAAIAAGKTRRSYFAAKYRRLTARRGKMRAAVAIAHKILVAAYHMLAQRSDYRELGADYLDRLHHHRTAINLPNRLRAMGYDVQITAKAA

SEQ ID NO: 55484 - protein, 359 aa, unidentified
MLVERTSVGLDVHARSVAAAAIDGVTGELKRARLTPSHDHIRSWLGELAGPVAVAYEAGPTGFGLSRSLTALGIRCVVAAPSKLQRPSGDRVKTDARDAVHLARLLRLGELTAVCVPSVDQEAARDLVRAREDCRGDLMRARHRLSKLLLRQGIVYCGGNAWTDAHDRWLRRQRFDSPATTTAFESDYDTILTVAARRDRLDNTIAELAADSEFTPVVRRLACLRGISTLTAFALAVEIGDWHRFTGNTIGSFIGLVPSEHSSGASRVHGSITKTGNTHARRLLVEAAWHHRASYRPGKTMHQRWELAPAAARARGDAGNRRLHARWITFNLRRKRPVIANVAIARELAGWCWSLAVMD

SEQ ID NO: 55485 - protein, 340 aa, unidentified
MDKLDFVGIEVSAEKLVVAVQREGTRKNWKTFLNTAAGHQALIRSLASPGRTVRAVLESTGLYGLDAALALHKAGIEVMVANPRAVRHFAHALMKRSKNDRLDAEVLMEFAARMPFRAWEPPRPAALQLHAIARRLEALTEMQTAEQARLQALQATGTTPSALLRDLARSLRSLRRALARLSGEALKIIEQDPGLKLRFQLLISAHGSIAETSAIRILAELALLSDDLDVRQCVAYAGLDPRECTSGTSVHKKVRISKAGNAHLRRALYMPALVAIRHQPHLRAFYQHLRAQGKPKMVALVAVMRKLLHAIYGMFKYQQEFDGSKIYRLPEAEISTKEAA

SEQ ID NO: 55486 - protein, 426 aa, unidentified
MKEKIDYLSTLFVGIDIASRIHVISALDFNQDFFIKMKPVQNTQEGAALLESMIVDVLKVNHPFKYVVIAMESTGFYGVHLANYLSASDLLAPFSVRVYCLNPKEVKNYKKSFNDIGKNDGIDSFVIADFARVGRISIRPWRGSQYLALQRLTRHRMHITECISREKTYMLNNIFLKFSEYALLRDGEHPFSNKYGAAAEAIFTEFTTNEDIVNSSVEDLVAFINTKSRGRIADPEETAKIVQAAARNSYRLDKCLYEPLTISIASSFNCISSFEKELKAIDKAILQTVQGLNPEEYTVLNSIPGIGKVYSAGILAEIGSVRAFQNANALAKYCGIVWNDNDSGDFEAKDKRMSKAGNSYLRYYIIEATGSVIRHCPEYERFYQKKYAETRNHQHKRALALISRKFIRLFYGLLDKSQLYSPEKSR

SEQ ID NO: 55487 - protein, 385 aa, unidentified
MLKLDRTDAPATDEYATVYVAFELSKAKWKLGVLLPGRGKLSRYTIDGGDLAALSSRLADARAKAGRCGKPVRILSCYEAGFDGHWLHRWLSQQGVINHEIDPSSIEVSRRARRAKTDRIDLEKMMRALLAHLRGEPRALSVVHVPTEEEEDRKRRTRERERLLKERTAHTNRIKGLLHAQGVRDAMPMKRGFIAGLATLRTGDGRALAPRLKEEIVREHERLCLVNKQLGELEAKSKAELRRAAPGSAEAKIVQLIDLRGIGLASSQQLVNEVFYRSFANRRQVGSCFGLTGTPYDSGESQRDQGISKAGNRRARTLAIELAWLWVMHQPDSELTRWFRARVRDLKGRIRRISIVALARKLMVALWRYLTTGVVPTGAVLRPGV

SEQ ID NO: 55488 - protein, 387 aa, unidentified
MVMDAVDQPAAPAPRRPWGVAGIDPHKRTFTAAGLDERGGLHGVASFDTSEQGLAVALAWLGEVGFDLDRVGVEGSAWLGHQVAASLAAAGYDVREVQASRTAERRRRRRRAKTDAEDAQAIARETLAHPDLPPAGKQHAPDPDWEELVALRNQRRSLIAQRRRLLNEAESVLVGLPLVVRAVLPDTSQVRPRLRALAQGAADQLELTGADRVHLAWLAASAADIGRLDQRIGQLDQRIPAVLARHCCTLTEEVGIAAVGAMELLVEVGDPTRFTTEARFARWCGAAPVAVSSGEGDGEPERHRLDLGGNRRVNSVLHTMHITQARCHQPAKDYLGGKRAEHKTAREARRAHKRLLANVIIRRMWADHQRRRSPTLNLSNPTTPNAA

SEQ ID NO: 55489 - protein, 385 aa, unidentified
MLYIGIDIAKNKHDLACINENGEIMIANFKFANSYQGFVQLKLRLEQLSPLTQDIQIALESTGHYNYNIVTFLRELGYNVFTYNPLIIKEFAKSQSLRKTKTDRKDALLIARKLRSDVTPERYQTDSIVDELKELTRYQNRLIQSRSKCKNLYVRLLDIIFPELHGIVSNLHNQFIYELLTHYPSPQKIARARFSSLLKIKRLTADKAHQIQEEAKKTIGKASPALVLELGQLIETIKHYDKQINQTQEEINRLMNDLNSPITSITGIGTRLGAIILAEIKNIHNFKNPNQLQAFAGLDPAIYQSGQMDNTGHMVKRGSSYLRYALIQAAKLISIYSPHFKAYLKLKISQGKHYNVAVTHVAKKLTRIIFHLLKTNQQFDETKLR

SEQ ID NO: 55490 - protein, 347 aa, unidentified
MRPKLLMENDYILRQCVGIDVSKETLVVTMCMFSFAEEAHYSDVKTFKNNKTGFNQLVKWSRKEAYTDKPLRYVMEATGVYHEELANHLVKIGCTVIIMMPNKAREFAIWEGMISKNDTIDSRALALVGCVKRSMRPWQPSKEIYHELRAMTRFAQDTKKLRLALKNHLEALEHSHQAEKSIVKHYEAMVSYLDKRLKMNLKNMKEKVASDEALNKKVENIITAPSLGFTSVITVIAETNGFALIQNRKQLTSYAGFDVKDNQSGNVEGTSRISKKGNSRIRAILYMPAVQAQLRSRHLKEAYDRIVQKHPDKKMIAVTAMERRLLLLIYALWKSDKPYDEDHDKKK

SEQ ID NO: 55491 - protein, 415 aa, unidentified
MKVVYPICCGVDVHKSFLVGTIVSTTGGVEPHYQKKRFSTYNNDLHRFCDWLLSNGCKNVCMESTGKYWVPVFNILEERGITTTIANPKWVKAAKGNKDDTKDSKWIGDLFRLGLVPGSFIPSKEIRVLREFTRYRYKLVSMKSSEKNRFQNAFTVCNVALDSVVSDMFGKSATAITDYLISADSFDAEYCTSLLQRSLKKKADSVIESIEGYSITDEQKLRMRIVRSHLDYIQSAIAEVDSAIDAMVTQHEGLIALLQTIPGVDRNSAITIISEIGTDMEQFGSSKRLCCWAGLTPGNNESAGKKKSVRITRAGVYLKPALVQVAHAAVKATDNSYYRLKFEQISKRRGKKRAIIAIARMILTAVFQMMSTGEVWNPTDLFKVDMPQALKEKQLEKAIKQATRFLEKQGVFTPA

SEQ ID NO: 55492 - protein, 422 aa, unidentified
MHGKARHMHTFEQLTHFAGFDWAKDHHDAVILDRQGATVQSITFAHTAEGWAQWRELIKAYPALGVAIETNQGAAVDQLLQYALTVYPMQPKAAERYRDRHQPSGSKTDQHDAWAFADALRVDGQHWRPLAPEDPLTEELRLLCRDEVELITQRTALVNQLQQALYEYYPAALEAFDDWTLAYTWDFVVAYPTPEQLVKAGKRKWEKFLHSHKLWRPHTAEKRLEIFGRADQFCGTAAVTRAKSRLAVSTAKVLHSLQKQLEEYRQAIEQLFARHPDHDLFGSLPGAGEKLAPRLLSEVGSDRQEYPEPQALQCMAGTAPVSFESGQTRRAKIRWHCNRHLRHAVHLWSDCSRRYCAWAQAYYEAQREKGKSHACALRCLGQRWLKILWKMWQNHQAYDENIHALNQKRHGSWILQLKPKTP

SEQ ID NO: 55493 - protein, 358 aa, unidentified
MVQSKGINFNGQNIYIGIDVHLKSWSVTIITESGYKRTHSQKPSAKELFEHLKKHYPNGKYQAVYESGFSGYSTYYALKEYGIKCMIIHAADVPTSQYENVMKTDAIDSEKLAKSLKGGLLRGIYVRDKEELDDRSLIRLPKTLQKQLGGYKSRVKHLLYNNGISYPDCFENSRSHWSNRFIYWLENEVRLLSSTRLSLDLLIDQVKLFRKNLLKATRMVRDLSKKPQYSRQYENLISIPGIGLVTAMCLLTEIGDVSRFHNQREFASFLGLIPSCHSSGENIYNMEKTFRGNKHLGPLVIESAWVSIRHDKAMSMAYGAYCKRMKGQEAIIRIARKMSNRILSVLKSGKKYQYDKVR

SEQ ID NO: 55494 - protein, 389 aa, unidentified
MSAFAPLSEAADVKRRPPIYDGVDAPPTASMCQSGCVQHHLREASVLEVSIIGLDIAKHVFHIHGADERGRAVLSKRISRGKLLDFFAAQPSCKVALEACGGAHHWARQLTQLGHEVRLIPPAYVKPFVKRQKNDAIDAEAICEAAQRPSMRFVAVKSEEQQAAGLLFRTRDLLVRQRTQLINAIRGHLTEYGWIAPKGPSHVARLADLIEEEEMASSLPEAALAMFRLMLDLLAGLNGKIADLDKEIARRAREDEVSRRLMTIPGIGPISATAIAALAPPAETFAKGRDFAAWLGLTPLQRSTGGKQKLGATSKMGERTLRRLLIIGSSAVVQQASKRGAPKGSWLEQMLARKPRMLVTIALANKMARIVWALLVKQENYRAPVTARA

SEQ ID NO: 55495 - protein, 356 aa, unidentified
MARAIFAGLDTGVETTSICVIDGEGALVQQGCCRSDPRAIHHEVRWMRRRRLATVSLEAGGTAIARGLRSLGYKVDIYETRQLSKFLKVRRNKTDPNDARGIAEAARLGRRTLSRVHLKSLECQALQSLLVFRRRVIKQRIAAVNLLCRQLELYGGRVNRSEAVKHLPARARAEIGRIFGRRRTTLVEELHRLVGACERLRGEQAYFDAVLREEVATNEVCQRLMTIPGVGPVCALNFYAVIDDPERFPRTRKVGSYFGLAPRLHESGLAVHRARISKMGNCAARAILVQAAICFMKSKHRDDQLYEWALRIEQRSGKLPSRVALARKLATIMLAIWKSGEVYRPMVLPSGAVLLD

SEQ ID NO: 55496 - protein, 385 aa, unidentified
MFQFSGSTQAAVDYDSTIIGALELSEKKWVLAVQLPGVSRHSRHALEACGDGLASFVERLKAKCAAAGRKIGRVILTHEAGRDGFWLARFLSRRGIEVHVIQPSSLPVDRRARRAKTDIIDVEMLLRTLMAWLRGEPRVCSMVPIPSEADEEARRAYREREDLTGERRSIVNKIDGILATLGIKAYKALRRDRREQLTSMQQPDGDPIPQKAKARIERLLDRLELVLKLIEQVEAARDAVLKKDRPADEAERMIRSLTELRSIGPDFATLLVREAFVRQFRNRRALGGYVGLGGTPFSSGGSEREQGIGKDGNRRLRAAMVELAWMWLRWQPDSALSIWFRARVGAMGGRVKKVMIVALARKLLVALWRYVKDGVIPEGAKMKPA

SEQ ID NO: 55497 - protein, 390 aa, unidentified
MVKLPTASAVGAKVSVANRSANRVRREIDRAEVFKAVTKRDPRRTCGKIPDSRLSRRRAKRSPSSHLQDGEKTMSEALFVGIDVAKDSVEVASCPPELRLSAPNKASGFRQLLDALKPREIALVVLEATGGYERPLAAELAQAGFNVVVVNPRQVRDFARGLGEYAKTDPIDASVLARFAQVVHPKPRPRSSDTQGALAELVSRRRQLTGLLTAETNRLETMREKHVVASIRRVIKTLQDQIRQLDDLINEHIQSDDGLRQKDQILRSARGVGPHTSAMILGHLPEIGRLNRQEIAALVGVAPWDLRSGKYVGKARIWGGRKEVRCALYMAALSAMRCNPHIRAIAERLRKAGKCFKVIITACMRKLLITLNTLVRNNSPWQSDFQLKNA

SEQ ID NO: 55498 - protein, 374 aa, unidentified
MIGAERPDTEVETILGVDTHLDFHVAVAVDHLGSYLGESSVPTNVEGYERLLRWAEGFGPVRCAGVEGTSSYGAGLTRHLRAMGIEVLEVERPKHRRRSSRSNLQKSDPSDAEAAARAVLAGEASGVPKSGDGTVEMIRVLRAARRSAIKARTQAANQLQGMRVTAPEQLRRRLRGLSTKELVYVAARFRLADDPRDVPTATKFALRSVARRYQALSREIDELEAHLDRLVGQVAPELVSLPGIGTDNAATLLVVAGDNPQRLRSEASFANLCGVAPIEASSGKVVRHRLNRGGNREANRALYMTCLARMRRDQRTKEYVVRRTQEGKSKREIIRCLKRYVAREVYRVLISCGARSSPTGPKEEAQIAAGSNAA

SEQ ID NO: 55499 - protein, 352 aa, unidentified
MELEEVPMTIVGGLDIHRKQITFDYVDTVTGRVRRGRIAPADREHLAGWLAQRFPGRPDVEFALEGCTGWRYVAEELAAAGVGAHVAEPADTAALRGGRRHAKTDRTDSRHLRELLADERLPQCWIPPAQVLECRALLELYRDLRVEHTAWVQRIHAVLFHQGAGALTVPALRSQAGLVELSEQAADLSSAGKMQVVTALEMLAVLDEQLVQVRRQLLAAARHLRGARVLTARLYGVGPITALALCCWLAGAGRFSSARKAVRFAGLDVTVHSSDGKRSPGHLSRQGPSVLRWCLYEAGKTHARGSAPDHAYYAQVKDRIDGKRAALSEGRKIVRQACHLLSELGDDALTQV

SEQ ID NO: 55500 - protein, 312 aa, unidentified
MSEPLYVGLDVSKHHLDLAFEPARPLQRVAHTDEGIATLVAQLQALRPALIVLEATGGYETDIATALALAALPVTLVNPRQVRDFARAIGRLAKTDALDAHVLALFAARGRPAPRPLPDEAQQTLAALVTRRRQLVEMLTAERLRLPLAKGPIRRDVQAHIHWLEQRVSDTNKDLRAALKASPLWHATTRLLQSVPGIGPTTAAVLIAELPELGHLTRQQLAALVGVAPLNHDSGQHRGIRTIWGGRAHVRHALYMATLVATRYNPVIRVFYRHLLAAGKPKLVALVASMRKLLTILNAMIKSQQPWAPAHP

SEQ ID NO: 55501 - protein, 332 aa, unidentified
MDIVYLSIIHQNKNAMSTVSFEQVILRGCGLDVHKDVVVATISGEGLSTETRSYKTFSSSLTELKEWLLSNGITHAAMESTGVYWKPVYKILECPRMKVWVVNARHIKYVPGHKTDKKDSAWICKLLLAGLLKPSYIPEREQRELRDLTRYRNKLIQHVSSNKNRIVRILEDCNIKLSSVMSHLDGVVATKLIDILIDKGHVTMDDIACVYHKRLEASPELLYQACEGFIEPHHTYMLQTIRKDIEQTESIISDLTSRIKEVLSPYENVIDLLRKIPGLDRKTVEDLIAEIGVDMEVFPTEKHLASWAGICPGNNESAGKKKVEEPLMATNS

SEQ ID NO: 55502 - protein, 309 aa, unidentified
MICGVDISRDWLEAELRSKQAHSCFANDAQGIALLAEFCRQHQVQLVAMEATGGYERQAFALLSAEAIAVAIVNPRQVRAFARAMGYLEKTDRIDPGVIAHYAEVKQCVGLKPASLEQQRLRALVTRLRQLTELRASQRNQRLLVEDGWTQNNIAELLKFLNQQIRQLEVAIVELIAADPLWRQLDQSFRTIKGVADRTVARLMAEMPEMGLLSNKKIGKLAGLAPLAADSGQTRGKRTIQGGRRCVREILYVVASVVARHEPDFVAFRQRLLATGKAKKVVRIALAHKLLTRLNAKARLVRQQFPIPA

SEQ ID NO: 55503 - protein, 432 aa, unidentified
MDIVHPRVAGIDVHKKVAWVAVRLPGEAPGERKVVTKRFKTFWRPLQKMAAWLAELGVTDAAMESTGVYWWPVYHALAGAGIQVCVCNAAHMRNVPGRKRDIADCQWIAELHEHGLLRPSFIPAAEVAALRQRTRYRKRLIEQRTAEGQRLAKVLEDAGIKIDSVASRLLGKSGREMIEALIAGERNPGRLADLARGVLRRKADELQMACDGRFTGGHAQMCRLHLDAYDHLTATIAELDVLIAEAAAPFAAVITRLMTIPGIGRRTAEVIVAETGGDMTRFASAARLAAWAGLAPGDNESAGKRKHAAARQGNRHLRAAMTEAAWATARTRTRPGARIRRLARRFGKGHEKKAAIAVARTLICIAWAVIARGQDYADAGEDYYDQRDQRNREHLIRHHQQALTRLGYQVTLIPPGDGTPPPGGGPSQQPAA

SEQ ID NO: 55504 - protein, 361 aa, unidentified
MRTITIGVDLAKLLFSICEVDPSGRVLQRKDLRRDAFAAWLAQLPAGTVVAMEACSGAHHWARRCLAYGLVPKLMAAQFVKPFRKSSTTKNDRNDAEAVATAARQGNMRFVPVKSVDQQARLAWHRVREGHKTEALAAGNRLRGLLAEFGIVVAKNDHALRRALADLSALPELPATMLALLEDLNRHWQQVRDRIADCDKRIANHAKLDERSVRAQQLIGIGPLTADAVVATVGSAREFKNGRQMSAWLGLTPTQHSSGGRTRLGEISCRGDSYLRTLLIQGARSSLQRAQAVSRQRATPEQLWIQSLSTRMPLGKLLVAIANKHARQLWAMLARDEHYDADAWAKHPMAQRPKAAKTAPC

SEQ ID NO: 55505 - protein, 386 aa, unidentified
MKRNDLSRSLVAFDQASTLVAVVELSLGSWLVAGLVPHLSRQPLKKLRSDPEALLGLLSRWRDQATKAGGRIKRIVLAFEAGRDGFWLARWLRARGIETYVIHPSSIPVSREHRRAKTDRLDAGLLMRAVLGWLRGEPKHCSMAAIPTIAEEDARRPNRERETLVREQTRAINRIKSTLIRFGIRTFKAKLRQASKRLEELRGPEGEPLPPNTMAEVRRDLARLQVIRGQIREIERARLERLKRAPRQGTHPMMRMLARILGIGIETADMLVHEVLTRKLRDQRGVARYGGLTGSPDESGSKRREKGLARAGNARVRRGMIQLAWRWLMFQNKSVLTKWYRARTAGGKPGLRKAMIVALARKLLIALWRYVTIGEVPAGAVLRPAT

SEQ ID NO: 55506 - protein, 421 aa, unidentified
MSKGRYRVRDCQGVDWSQLGERACAGGVIVAVDVAKEDFVAAVVRASGELLERIKWRHPEQTRLVLDGLVALQAHGELVVVMESSGSYGDALRWQLQVRGIDVYRVSSKQVHDSAEVYDGVASLHDAKAADLIALLHRHGRSRPWPQLDEQRRSLSAQVQRLEQLKGHQQRQRNRLEALLSRHWPELPGLIDRNSVTLAALVAAIGSPLYLCAFDHRGAAVIRSASHGKLDALRIDAILDSARTTLGVPCLSEENAQLRALGNDLLATHQAIHQLTQALQAQVAEDDALQPMSEVIGAVGSAVLHTHLGAPSAYPSAQSYLKAMGLNLREYSSGKHQGRLRITKRGAPQVRYYLYFAALRLIAQQPGVARWFRAKSQRPGACKGKHVVELMRRLAKGLWHQGQGEVFAIDKLVSAPPPCGG

SEQ ID NO: 55507 - protein, 359 aa, unidentified
MVKNSMLIIGLDLGDRCSYLTILDQDGELIEESRLPTTKASLQGKFSNLQPCRVAMEVGAHSRWASQLLKDLGHDVLVANARKLRAIYHNPRKGDRADAETLARLARLDPALLSPIHHRSPQAQADLAVLRSRDAVVRSRTLLINHARDIVKASGSRLPSCSADSFAHKVAPDIPESLRPALAPILDTIASLTQQIRAYDRKIEELCSERYLETKMLREISGVGPLTSLAFILTLENPDRFRRSREVGPTLGLVPRRDQSGDKDPQLRITKTGDPYLRRLLVGSAQYILGPFGPDCDLRRWGLRLAERGGKNAKKRAVIAVARKLAVLLHRLWKTGEIYDPSYHARKHDQAPEAIAAVA

SEQ ID NO: 55508 - protein, 417 aa, unidentified
MAMKIVRFNCCGMDVHKNLVVATIGITDRKTNVTEYFQRSFSTLNSDLYRLKDWLRSHHCSDVCMESTGKYWIPIFNILEDEINVHLTHPKYVKAIKGKKTDKKDSKWICDLFKHDLIKFSFIPPKEIRELREIARYRYKLVCMRSSERNRYQNCMTVSNVGLASVVSDPFGKTASNIMKEVMKSNVIDDDKILKLVHKNCKNKDKILDSLHGYRIESDQRFKMEKSLDHMEYLDQLIDSCEVELIKRAYPFRRSFQHITQIKGISALSAILIISEIGIDMSQFGSDKQLVSWAGLSPANNESAGKKKSVRISKAGQYLKPLLVQCALSAIKDKTSYFGRKYSNIKKRRGHKKAIIAIARMMLVSIYHMILTGEEFQPTDHESLMSPKSNTDQSLTVEKALNFLKRSGIDISSILVN

SEQ ID NO: 55509 - protein, 367 aa, unidentified
MKKVSTAARKQSRNFSQQKLTIGLDLGDRSSCYCVLDETGSIVLEQRVATTPKALPAAFGAMPRSRIALETGMHSPWVSRLLSGLGHEVIVAHARNVRLIGEIRRKDDRLDAQTLARLARIDPELLSPVKHRSAKAQADLTVIRARAGLVRARTALVNTARGLAKSYGERLRGCNVRNMNPEKAEGLSPELRAALQPLLAGLESLSEQIREYNERIENLAQESYPQVALLKQIKGVGTLIALTFLLTLEDPHRFRKSRDVGCYLGLQPGRRNSGQSEPQMHISKEGDPYLRTLLVQGAQHILGPFGPDCDLRRWGLKLAERGGKSGKKRAIIATARKLAVLLHHLWVSGEVYDPLHNSSRVAIAAAA

SEQ ID NO: 55510 - protein, 333 aa, unidentified
MSQQVWAGVEVSAKTLLLAWALEDQRPTLKEFPNTPRGHQALTRQLTRQKHSVRVCLESTGVYGLDLAVALDAAAGVEVMQANPRAVRRFAEARFQRQKTDAHDARLLVEFVRRMPFQRWQRPAVSALELRVISRRIETLKDTMVAEKNRRHALAATETTPAGILAITDRTISQMEESIAELRQMARTTIDADPQLARRFELLVSVRGIGERSAITLLGELAVLAPDLDARQWAALAGLAPRLCQSGSSVYRRRGVGHAGNKYLKRALFMPALTAIRFVPELRDFRDRLISRGLKHIQAVVAVMRKLLHIVHALFRDDRAFQLLAPAQRKTAV

SEQ ID NO: 55511 - protein, 341 aa, unidentified
MKHPDMKKSYFLGIDVAKNSCKFALLKANGSCLWSGQFENNSSSIQRWLALLGTRKLDRRKILFGFEATGVYSHALLLHLQQLELAACQLNPAQVKYFGVSVNRRTKNDPADARLIAYFLLERQPVATRTLNPIEHQLKVLVHEREALSIDLVRERNRAEKHALSPFKTPPMLAEQRAERLLKLKTWIKDLDAALKELIDSDPVLCAKAQLLCSIPGIAFCTAAKILSQVAGKEFQSAHQLALYAGLTPKENQSGLLKGKTTLCKIGNAFLRKALFMPATVATRCCQPIRLWAQQIQSRRPELSKLAIRCAVMHKLIRIIFGVLKNQTPFNPNFGSFSHAA

SEQ ID NO: 55512 - protein, 320 aa, unidentified
MLSFCGIDVSKDRLDVMVLPDEYSSSVPNDPAGWAILVEQLRGFSITAIGIEASGGYERGAVRSLQAAGMPVRQVNPFKLRQFAKASGVLAKNDPLDARMIASFVGIMPTRPAQRTTPAAEQLVEMLAVRRQLSAEKTAAENASRLLEDLMLQRLSRRRIARLAADIELLDKRLVEIVATDATLAHRYRLLTSMPGVGPVLACTLIALLPELGGMSRKQVAALVGVAPYAFESGTLKGRRCIWGGRANVRQVLYMAAMSASNWNPVLKLFHDRLKGAGKLPKVVIVAVMRKMITTLNAMVRDDIGWADRLSGRHSVTTAR

SEQ ID NO: 55513 - protein, 342 aa, unidentified
MDHFAGLDVSVKETSVCIVDETGRIVREARVASEPGALLAVLRNPAYHLKRLGLEAGPLSQWLYSALTEAELPVVCVETRHMRAVLKAQINKTDRNDARGIAQMMRVGLYRPVHVKTLRSQKLRMLLTHRKLLQSKAIAIENDLRGTLRNFGLKVGTAGKVRFEARIKELVENQPDLAELVEPLLIVRRALREQIVILHRRLLAIVRDDEVCRRLMTVPGVGPVVALTYRATVDVAARLRKSKAVGAVFGLTCSKYQSGEIDRSGRISRCGDEMMRVMLYEAAQSMLRSTRWSWLKAWAMQIARRRGMKKAIVALARRLAVIMHRIWIDGTEFRWTREAAVA

SEQ ID NO: 55514 - protein, 400 aa, unidentified
MDPHLCVGVDVGCKAHRVGIADPDGQILEEFDVPHSSEGFDHFFNRVERHRKALGLPVAVAMEGFNGYARPLDRLVQQKGYRLYNVNNLKLARFKEIFPGAAKTDRIDTHKILELFRLKDHLPMAKDALQEVMVVPPVNEKLKRLSRRRRHLVVEKTRVLNRMQTDLQAVCPELLAITHNASNVWFLRFLTFRDDLRQLSRLRRATVLKIPSVGRKYARIIQDWQQHAKFSSEVEYVGAMIIEDAKRILELRHQIHVLDGAMEELAQGSEIARRLSTIDGFGKTSTAELAGEIGSLERFRSEASLALYVGMCPLTHQSGQMSRTRSPRQVNRHCKAAMMTAVARHIACVPESRAYYDRKRAQGKTHNQAIRALGRHMVRVIWSMLKNEHDYELRGDLPVT

SEQ ID NO: 55515 - protein, 415 aa, unidentified
MALKIVYKICCGIDVHKTFVVACIASTNDKGVTSYESHRFSTYTSGLKTLLQWLLDRNCKDVCMESTGKYWIPVYNILEKDCSIVLAHPKYVKAIRGKKTDKKDAKWIADLFKHDLVAGSFMPPADIRQLRDLMRYRFKLTCFKSSEKNRLQNCLTVSNIQLGNVVSDTFGKSAQAILDKLLENPADTSFDLEPLVFKSLKKKLPELRDAIDGYITTEQAGKLKVIKAHYENLESRKAELEELILALAAPYQQELAILQTAPGISSPFTAIGIISETGTNMEAFPSAKHLCSWAGLTPTNNESAGKKKSVRVSKAGCYIKPLLVQCANAVVKSTKHPEMRNRYLRLKKRRGHKKAIIAIARMLLTALYHMLKNGENYNAELYRKSDLPPVNREITVEQALMIARNQGYKIKSATA

SEQ ID NO: 55516 - protein, 430 aa, unidentified
MKKNNSNSQTNSDRAGKPGKARGPVQRDAKEVVAELVARLSQKLEPRSAGARAGEARQQDLPGPNRDRLTVGVDLGDKWSNFCIVGLDGEKLTEGELRTTQEDFAELFKLMAAARVVMEVGTHSAWARDVVASCGHEVLVANPRQMEGPKRRKRKNDRIDAHKLARIGRMDPQSLFPVEHRSVKVRQDLVAVRARDALVAARTQLINTTRGLVKSMGGRLPKCSSPSFPHKVEEALPAEVREVLLPLVRLVETLSDGIAAYDKKMEKLGSEKYPQTKLLRQVKGVGPITALAYILTLENPERFAQSRDVGPYLGLVPKQEDSGDSQPQLRITKMGDMMLRRLLVGSAHYILGPFGPDTDLRRYGIRLSERGGKNAKKRAVVAVARKLAVLLHSLWVSGEVYEPLRHALPKATEEEAVRHAPAEATEKEAA

SEQ ID NO: 55517 - protein, 356 aa, unidentified
MSTITLGVDLAKNVFSVCAMDGAGHVLERREFKREAFAVWLSQRPAGTVVAMEACSGAHHWARRCVEYGLQPRLMAAQLVKPYRKSQRSKNDRNDAEAIATAARQGNMRFVPIKTIDQQARLSWHRVREGYKAESLAIGNRLRGLLAEFGIVMGKSDKALRRVLADLDAHTALPAEFRELVRSVDAHWTQVRTAFDACDARIEAHARDDERCVRLRAIVGVGALTADALIASLGKAQEFRNGRQLAAWLGMVPTQHSSGGHTRLGAISCRGDGYLRTLLIQGARSSLQRAKAVATEKATPEQRWIRSLAARLSFGKVLVAIANKHARQLWVMLAHEVDYDPCACQRHPMHRPAQLA

SEQ ID NO: 55518 - protein, 316 aa, unidentified
MLANVSFVGIDVAKAHLDIAVRPHGESWSTPRDEQSLAPLVARLQELQPTLIVLEATGGLEIPVVAVLATAQLPVVVVNPRQVRDFAKATGKLAKTDRIDAHLLAHFAEAVRPAVRSLPNEAQQAVSALLSRRRQVIEMLVAEKNRRSSARKPMAERIARHVLWLEQELAQLDDDLHTAIRQSPVWRETEQTLRSAPGIGPVTAMTLVMELPELGTLDRKQIAALVGVAPLNRDSGTLRGKRLVWGGRAHVRASLYMATLSAVRYNTVIRSFYQRLCAAGKAKKVALTACMHKLLIILNAMIRDKTPWREPARLTD

SEQ ID NO: 55519 - protein, 452 aa, unidentified
MARPRKTKVQKIRPTINPFAAAADIGAREIYVAVPVELSPTPVRRFETFTDELKSLVTWLVELKITTVALEATSVYWIPLAELLEEAKIAVCLVNPRHVQNVSGRKSDVMDCQWLQYLHSVGLLRAAFRPAAQVRAVRALWRHRAALVKQTGWYIQHMHKALDQMNLQVHHILTDITGQTGTAIVEAILAGERDPKKLAAFRDRRVKASVATLQQALTGDYRREHLFCLRQAYEAYQFTGQQIAQVDKELEAEMARLLPPPAAEANPPASQPHPGVPAKSPTAYPVQSYLSALCGVDLTTIPGIGALTAHCIWAELGADLSAFPTSKHFCSWLSLCPDNRTSAGQCLSTKTRASANRVAHALRMAAQSCHRANHELGDYYRKMRARLGSAEGLVATAHKIARIVYAVLTTRQPYDPALAAAAQAQTQQRRLSRLHAMAKNLGFQLVPDQQTA

SEQ ID NO: 55520 - protein, 351 aa, unidentified
MSMNYVGLDIHKKTISYCVRQCDGAIVDEGTLAATRAALDAWVSKLPLPWMVGMEATLFTGWIYDHLSKYQVTIKVAHSAMLKAICAGKRKNDRVDAQKLSDLLRCDYFPECHIAPAVLRDRRRVLRYRNMLVRQSTQTKNRIGALLMETGVPYNKEKLHQKRYFNQLLGDQKSVMPENLPSLLRLGRNVVDALGQMDRQLIKALHSDHVLADRVARLRSVPGVGPILALTWALEMGDIKRFPSIKAAVSYCGLCGAEKNSAGKQQRTPISKQRNKHLQTTLIEAAKVAPRWHPEFAALYNREKDKGNRNRATLAVARKLVAYLLAIDRSERPFAQTAIQTGVAAGVGAIH

SEQ ID NO: 55521 - protein, 340 aa, unidentified
MLHVGIDMHKRFSQVTVMDDAGRVVYSGKLMHDRRDAMAEFFRRLGPDAVVTIEATRGWYWLYEFVEAFGIQVKLAHPLGVRVIAAAKVKNDKIDSRMLAYLERGGLLPESYIPPREVRDQREALRYRIAQVRIRAILKNRVHAILDKLGISHKYTDLFGLAGLAFLKTVEMRQVYRQELDGYLATIEYLDGKIKEATQAIRVLLKPDPRVKLLMTIPGVGELTAYLLLSEIGDIKRFATARKLCSYAGITPIVRESAGHRWEGHISKTGSRYIRWAIVEAAQLAPRQDAALLEFYGRIGKRRGPKRARVAVGRKLLVAVWQVLTYEQEYRYNCLATYHG

SEQ ID NO: 55522 - protein, 338 aa, unidentified
MTIVMGLDQHRAQVTADWLDTETGELKRGRIAPADRTGVARFLSRFGGQELDVALEATTGWRFVVEELHRIGARVHLAEPAETAARRGKKKHAKNDRADARHLRELLMVGRLPESWIAPEHILDLRARVRLRHTLGEQRSEWQQRIQAVLYHHGCPQRRSLMVGDGREWLASQPLTATAREQVAVALGMIDALQAQIAPLESHLRAYARRQSGCRALMAHYGIGELTAVTILAELGDCRRFSSSRHAVRYAGMDITVHESDQRRAPGHLSRQGPPALRWALYEAAQVARRPAGPDRCYYEQAAERLGGNRACLSVARRLLKRSYHTLRELGQEALQPA

SEQ ID NO: 55523 - protein, 427 aa, unidentified
MPYRIAGIDVHKRMLTVVVSDVEVRGEYEFERRQYGSTPSHLRSLAAWLVEKEVEEVVMESTAQYWKPVWATLEQYWKPLQQAREGARPMSGMLHLAQAQSNRGPRGRKNDFADPERLVKRLVAGELVLSFVPSAEQRLWRSVMRTKYQLRCNQVQLQNRLEALLEEAHLKLSSLVSDLLGLSGRRMLTAIAEGETDPGVVAARADYRLRATPEELRDALAACGELHPVYRRLLKTAMEEWQRTEAEITRLGQEMATLLAAHQEQIKRLAEVPGLGVDSGQQIIAEVGASAATFPSAKALASWVGECPGEEESAGVNHNRRSPKGNRLLRRILNQSANAAVKVKGSVFAILYRRYVVRFGHNKTIAVIAHRLCRLVWKILHEGVRYEERGPAVQQKSIQRRTARMIRQLRDLGYRIELAKHPAPVQA

SEQ ID NO: 55524 - protein, 386 aa, unidentified
MSHDQPSVVSTTATRSHHGAILASLELSTSRWLVTSLLPGTEKLSRHTLRAGDADQLLGLFARLRGKAERRLGGPVEIITIQEAGLDGFWLHRLLERAGIRSHVVDAASIPVPRRGRRAKSDKLDGESLWRTLAAWLRGEPRVCSMVRPPSPEQEDQRRLGREYDTLTRERTRQSNRIRGLLAAQGIRGYNPLLRNRRAALAKLTTGDGRPLGAQLVRELMRALDRIELLMAQLAQIKAERRQLLKGAAADPVAAQLSTLKGIGPSSATTLALEAFFRSFDNRRQLAAFAGLAATPWRSGKVEHEQGISKAGNKRIRRTMIEIAWLWLRHQCRSALSQWFFTRCAEGTHGKRNRCVFIVALARKLIVAIWRFVSFGEIPEGAMLKA

SEQ ID NO: 55525 - protein, 412 aa, unidentified
MQVIHARCAGLDVHKKTVVACVMITALDGTLQQETKTFATTTADLLALSDWLRSYGVTHVAMESTGVYWKPVYNLLEGLFELLVVNAQHIKAVPGRKTDVKDAEWIADLLRHGLLRGSYIPARSQRELRELTRHRSNLVERRARSVNELQKCLESTNIKLGDVVADLTGVSAREMLQQLLAGETNPELLAELARGRMRQKKPLLQKALQGKVERHHRLILSQLLAEIDWCDEQIAEVGLEIGARLAAHEELLQRLDEIPGVNRRIAQVIVAEVGTDVKPFPSDKHLVAWAGMCPGNNQSGGKRRYSRTRPGNRYLKTVLVEAAHAASRKKKSYLQAKYHRLAGRRGKKRAKVAVARTILQSIYFIIHRGTRFQDLGDNYYDRRNPDKLARRLALRIEKLGFRVNVAPLEKAA

SEQ ID NO: 55526 - protein, 338 aa, unidentified
MSIVTVGIDLAKNVFAVHGVNEAGRAELVRPAVPREKLHELIASLPPCVIGMEACSGAHHWARLFQASDHTVRLIAPKFVTPYRMSGRRSKNDAADAAAICEAVQRPHMRFVPIKTLDQQSHLMVHRARQGFVEQRTATLNRIRGLLAEFGIVLPLKAATVRRRAGECLEELPGWANTVIGDLLSEIGRLDERIAQYDQHIRHIARQDSRAQRLTRLNGVGETTATCLVAMIGNGHDFDCGRQFAAWLGLVPGQYSSGGKARLGRITKAGDPYLRSLLVMGARAVLAAAKNKTDTLSRWAMALQQRRGYWKAVVAIAAKNARMAWAVLRRGEAFVLPT

SEQ ID NO: 55527 - protein, 318 aa, unidentified
MFIGIDVAKDTLVVAARPTGTLETVANSAAGLQPLLTTWREHPPTLIVVEATGGYEVLVVLTLSLAGLPVSVVNPRQVRDFAKGTGQLAKTDAIDAHVLAHFAELMQPPVRPLADAETRALEALVARREQLRLMLEAERQRLTQPAAHAPAVRTSLEHTIAFLQQQLAHTDDEIGTAVAAHPVWAARSALLQSVPGVGPMIAQALLGWLPELGHLTRQQIGKLVGVAPFNRDSGRYRGTRRIAGGRAAVRAKLYMGALVAMRYNARIKAFYLRLLANGKPKKVALVACMHKLLTILNQIVRTAMPWDASHHMAAPQLA

SEQ ID NO: 55528 - protein, 332 aa, unidentified
MLTDQSDVVIGVDTHAERHALALLEAGTARTLAFAEVAACREGYREALRIARRRAQAGRVWALEGSGSYGAGLARFLAARGERVLEVERPPAQGPRGRQKADALDAERAARAVLSGLAGSVPRRGEAREALRQLLVTREGAVAVRRAGLNELRALLLTAPEPLRERLRRLSRGALLARCAALRPDRRGGLERFASALALRSCARRVRAASAEAAALEREIERLVGRLAPALLAQPEIGPVSAAALLLAWSHPGRLRSEAAFARLAGAAPIPASSGKVVRVRLDRGGDRRLNRALHTSLHRTPAERGQEPARGDPLSQALPGPLALSPAGGPA

SEQ ID NO: 55529 - protein, 455 aa, unidentified
MKMGIAKEKASLYNKATQTYKEAINMIRNYSTQREKTERITEKTLIIGIDIASRRHYAQALTWRKVEVTKGLYFYNERQGFEEFLEWVNHAKQKMGASNIIVAMEPTGHYYFALEEYLEKLGIEVVIVNARDVNQMGQYYHNHRSKNDPRDAMLIGYLCSEGRYAVTTRPKEGPYAELRELTVRREQLVKKQMASINELHCLFTQLFPEHKQIKTSGISEALLVIFLELQTLEAIQAAGWEGLYDILKRHKKYQIGKDKVKQIHALSISSIGIKRKVKATQTVLTSVIEEYRFYQQQIKAIDNDIIAQLNEMDVAKRLMAIPGIGPIITATFLAEVGDIANFKSAKQILKLAGYAICTNESGNHKGTRRTSKMGRKRLKKIIYQASLATISNNDDINQIYMYYTQERKEPLKKMKAVIAIGCKLVRIFFSLLKYNHHYDGQKMLSDIKRPQGQMA

SEQ ID NO: 55530 - protein, 343 aa, unidentified
MQAVTTIGLDIAKSVFQVHGVDAEGKAVIRRQLKRRDILAFFQKLPSCLIGIEACASSHHWSRELQALGHTVRLMPPAYVKPYVKRHKNDAADAEAICEAVTRANMRFVATKTPEQQSCLMLHRTRHLFIRQQTAVINSIRAHLAEFGIVAPVGRNGVEELLGVVADPSDKRVPEVARACIAALGAQLRVLKVQILEFDRMINAWHRSSETSKRLDEIPGVGPALATALVASVADPKAFRSGRDFSAWIGLVPKQHSSGGKDKLGNISKQGDRYLRSLFTAGALAVIRYAKIHGTKHRPWLTALLARRPTKVAAIALANKIARMAWAMMAKGERYKEPVALAA

SEQ ID NO: 55531 - protein, 484 aa, unidentified
MALPSFAVDPGGERLRHLSCEDCSETAPLLGPGEGPTPRRVSSREDWSISTTPCLPDPPSMRVAKEGAGVLGVGIDWAEEFHDVALGTVAKGVTDQFRIEHSPAGVARLIERCLALEPDPAEIGVVLETRHGLLVEALLDAGFSVVPVNLDLVARRRGPARKKDDAEDARICCLLALDRHAGLRTLIPHGQWGGELRAIARDDERAARDQRRLLNRLRADLQTTYPAALALAGDDLGAPTMLRLLQRWPTQAELAGASRAELVSFARAGRHGWPERFADRVSTALSTPSLPTRDYLVHAKAAGIRLATVPLLALHDTRRAWQQRMSQLLRGPRTGRDHSTRDPDPGNTFPGGEIYLSMPGLGDRLAARVAGEIGEHITQFNSPNALQCYAGTAPVTRRSGKHDFVVARRLAHNHYLGAAVHQWAFCSLSRSGWAREFFDAKIAAGKAHHAALRALSNRWLEILWHCLTKGVLYDENVHQANRAT

SEQ ID NO: 55532 - protein, 450 aa, unidentified
MKSKKQNNQSLPVLNANAAGIDIGASFHVAALPPDRNIEPVKTFKAFTSDIVQMADWLIKNSISTVAMESTGVYWVPVFEILQERGLHVILSNARDTRSVPGRKTDVNDAQWIQRLHACGLLRASFHPTAQISELRSYLRVRERLLDYAAAHIQHMQKALTFMNIQLNLVVADITGVTGMKIIRAIISGEKDAKVLSEMRDCRCKSSRETIQAALEGNYQPEHIFALRQAIIMYDAYQVQVKECDVEVENLLIELTKSTPTPQEPLPNPRHKTRQPNQLNFDVRQALYSLIGTDLTQIHGLGPYLALRLISECGTDMSKWPTAKHFTSWLTLCPGSKISGGKILSSHSRKSNNRIVAHLRLAATTVGRTNTALGAFYRRLAARIGKAKAVTATARKIAILFYNAMRYGVKYQDPGADQYEQKYRDRVIKNLRRKAEEFGYSLEAHAESVS

SEQ ID NO: 55533 - protein, 405 aa, unidentified
MKKVIKVCGLDVHKDTIFACIKSGNYQSEVKQFSTMTCGLAELNHWLKGEQVSKVAMESTGIYWMPVWRALEDDFELLLVNPYFIKQMPGRKTDVQDAQWIAILLEKKLLRGSVVPEKTIRVLRSYLRRYAQLQGQTTRCLQQIEKQLSQCNIKIASLSSTIGSKTVIDIVESISKGKYAPEQLFALVHGRIVKRHGEKVKQSLEGIIEEHDVFLLRQIHEDYLHIERQCNELLAQAQKIADVHYKEQLELLQTIPGIKQLSAVIIFAELGGNIKLFETARRLTGWCGLRPKNDESAGKIKSRSITKGNKYLRRILVQTAWAASRTKTCYLKTKFEQLSVRKSSKKALIAIARKQLVIIWNVLTKQEVYQEPKIKLSAQQISRKQKYYQEKLSKLQLLQDIEKAV

SEQ ID NO: 55534 - protein, 489 aa, unidentified
MKSKRQEKTNNQPTQHHWHEMNRKQRREMMRKIQSEDLRLEVIHPDAAGIDIGNESHYAAVPPGRDSQPVRRFGCTTAELKAMAAWLRHCGICTVAMQSTGVYWVAVFDILEETGFEVFLVNARDTKNLPGRKSDVQESQWLMKLHTYGLLRNSFRPSQEIRVMRTYWRQRNDLVQSASRHILRIQKALTQMNLQLANVLTDISGATGQAIIKAILAGERNPHKLAEFRDPRVKASEEQIAQSLEGNWQPDLLFLLKQEQDGYEFCQRQIAECDRQLAQYLQQREDRSQGAPLPEEKRKGRLKKKRGNKPRFDLRKGLFRMTGTDLTRIDGIDVMTATTVISEAGYDMSKWKTENHFVSWLRLCPDNRISGGKVIGKGRLPTNNPISIALKMAATTLRQSKTYLGAQFRRLRTRLGAPIAIKAMAAKLARLVYRMLRYGMKYVDQGAAFYEAQHRQVQIKQLKWKAAKLGFLKWKAAKLGFQIVQAPAA

SEQ ID NO: 55535 - protein, 368 aa, unidentified
MEDDITLFIGLDVHKDSIAVAAANTGRSAPRFIGTCAPNMKELGKTLAHLGTPSHALLAYEAGPTGFALARELAAHGWRCQVVAVSKTPRRPGERIKTDRRDALSLAGYLRSGELTPVTIPDARDEAVRDLSRAREDAVRARLKARHQLKAMLLRHGKPYTGKTSWGPTHDKFLSRIAFEHPAQQIAWAEYRSAVLEAGQRVDRITQALREQVLHWRLGKVVQALMCFKGIDFVAAVTLVSELGDLHRFEHPKQLMAYLGLVPSEFSSGASRSQGSITKTGNSHVRRMLVEAAWCYRYSARMSRPVTERQQGQPRSVCEVAWRAQLRLCTRYRRLSARGMHANKICVAVARELAAFLWEAGRLVDYPA

SEQ ID NO: 55536 - protein, 323 aa, unidentified
MSKVIGIDISKQTFDVSFLKENKKWEHKVYHNNKTGFKQLIKAVGLNNTFVMEASGPYYLQLANFLHEKGVKVSVVNPLVIKRYSQMKMIRAKTDKKDAQIIASYGVEQPLKYWEPTDDTIYKMQQIDTLIDSYQKQLTMLNNQLEAFTSSGKTDANAKKSINKMIKNLKTEIEKLQKRNKELAEKEYAETMELLKSIPGIGDKTAIMFLIITNNFSKFEHYKQLIAYVGFSPRIYQSGTSVNGKGHINKIGNSKARKVLYMASWSAKRHNKQAIEMYERLKFKGKPERVIKVAIANKLIKQAFAIVNSGKKYDENYTKKFGF

SEQ ID NO: 55537 - protein, 429 aa, unidentified
MKKSLRSRPVLAKGRAVVGIDVGKRKHAATALSPQGEVIAQLASFPNTRQGVDRLENEVLRKAGGPGKVLVGMEATGHYWMCLYHELTRRGYTCVVVNPLQTNARSSARIRKTRTDKIDSLTIARLILSGEAKATRVPNPKTTELRLLVRHHRRLIHAAGDMERYAHTLVDRVFPEYADVFCKVFLSSSQQLIREIGLTPTKLVEHAEQVRELLRRAGRGRIAPETIDQLLAAAKQSIGTRQAEDLAEAQLRSIFDYLATVRQQIADIEKQIDERVAPLASPLFSLGLGSALVATIHAETDPIGDFASPEQYVAYAGLDPSLHDSGDTIHRRGKISKRGSPLLRHALFLAAFVVCRRHDYFRRIYRKHLSRGKKHRNALVIVARRLARVIWRLLTDGRPFTARSPKIVSPVTKPRKSAKSTRKAVVARV

SEQ ID NO: 55538 - protein, 350 aa, unidentified
MKIVGCDFHPSYQQIAVLDTETGEVLEKKLMHGNGEAERFYRELQGPALIGMEATGNARWFELLVEKLGHELWIGDAAKIRASYVRKQKTDKRDAAHILKLLVEKRFPRLWVPDGQQRDLRQLLTHRHKLVSVRTRLKTELQHLALNQGVQKKRQLWNENGRALLASLPLQGWTQQRRKDLLQLLAVVEPQIVQLDKAVEQAAKTDAQAVLLMSQPGVGPITALAFSVTIGDVSRFERSKQVSSYLGLIPTEHSSGSKRRLGSISKQGNVFLRALLVEAAQSVVRHDPGFRKEYQHRCHHKVKGIAKVAAARKLAVRLYWMLKSNKSYSELVLNGGSPRHPVAAKAKPLT

SEQ ID NO: 55539 - protein, 344 aa, unidentified
MQITTIGLDLAKNVFQVHCVDATDQVVVRKSLRRSQVLPFFAKLPACLVGMEACGTSHHWARELIKLGHKVRLMPPAYVKPYVKRGKTDAADAEACCEAVTRPTMRFVPVKSPAQQAALSIHRARDLLVKQRTQLINMIRGLLADFGIDIPKELERALLMARQIIDGKTPAVPIEAAKIVATLSQQALDIHLRIREIDHDLAVCLRGNDVARRLMTIPGIGPVGATALAASVTDPHQFRSGRQFAAWLGLTPLQKSSGGKERLGHITKMGDKYLRKLLIVGMTSLVRRAKYNPGKIDPRLADLLARKPTRVATVAMANRTARVIWAIMTRGETYRTGHRPALAV

SEQ ID NO: 55540 - protein, 420 aa, unidentified
MTKRRYRSTKVNQVNWAQIAEQAGEQKVVFAVDVAKEKFVGALMKPDRTVLKTIQWQHPEQTPELMHGLLSHLGAQRLEVAMEPSGTYGDPLRCLFVTHGVAVFRLSPKRVHDSAEVFDGVPSLHDAKAAYQIGRLHLDGVSRRWEERSEQRRELTAQIAVLNLHQERLQSSRNRLEAQLSRHWPELAEVLDLSSVTLMSLVAAYGSPARVAAHAEEARRLMHRSSGGGLRREKIEGVLEAARQTLGMPCLEAERMLLQTLAQDMLDNHRAVQRAEQALAAQVDADATLHGLASVVGKTTAAVLVSTQGRPQDYPDAGSYLKSLGLNLKERSSGKFQGQLKITKRGPGIARLYLYFAALRWLYRDPIIQAWYQRKVARDGGHKGKAIVAIMRKLAKALWYVAQGVAFDSRKLFNLKALAA

SEQ ID NO: 55541 - protein, 370 aa, unidentified
MLDTTTFVGLDVHARSIKAVSLDVMTGEVRAATFGYDAGAVAEWVRSVDPGARCVYESGVTGFDLQKRLSGLGVDCVVGAVSKMIKPSADRGRKNDRNDAEFLARMLSVGNVVEVWVPDDECEAARDLTRALEDARDDLSRAKQRLSKFLLRHGLVFDERTPTGRRKGNWTRAHWSWIESIRFAEGADNDVLAYYVDAVRRAAEEKARLEGLVEAEARKPRWRKRVDSLRCLKGVDTASAADLVFEAGEFSRFRNARSFAAWVGLTPSEHSSGESDRRGAITKAGNKHLRKTLVEAAWHYLTCSGRPKDLAKGQAPDRGARRHAAKGVRRLVERREALLARGVHGNKANVATARELACWVWAVGLMAEEA

SEQ ID NO: 55542 - protein, 410 aa, unidentified
MQLYCGIDWATEHHDIAIIDGDGRVVTRRRVDNDAAGFAELLTLLAQAGDTPGSPIPVGIETDHGLWVAALRATGRAIYPINPLAASRYRARHTVSGAKSDATDAVLLANIVRTDRDAHRPLPADTELAQAIRVLARAQQDAVWARQQIGNQIRDLLKDFYPAALVAFAELPSGGLARADARTILAAATTPAQGAKLTPARLRRLLVKAGRRRDLDRDIERLRQVFTDTYLHQPPQVEAAMGIQLTALLRQFDAACTAADDLAEAATAHFERHPDAAIITSFPGLGNLTGARVLAEIGDDRARFTDARGLKAYAGSAPITRASGKKTVVLHRHIKNRRLAAVGPIWALASLRASPGARRHFDNRRAAGDWNHQAQRNLFNKFLGQLHHCLQTRRLYNEHQAFPPPLDLAA

SEQ ID NO: 55543 - protein, 350 aa, unidentified
MEKRITTFVGLDVSDKFTEMCVLDGKGAVVDQDRMRTTKGSLEKRLSKFQDARVILEVGTHSRWMAELIGTLGHEVIVANPRQVRLIWKRRTKTDRSDALVLARLGRLDVDLLAPVQHRSRGAQVDLACARSRDILVRNRSQLISHVRGMLKPFGHRVRDCSSNTFVDEAEAVVPAELVPALGPVLAVMRVLNEQIAAQDRQIEQLVTTVHPATKRLTQVPGVGSITALAYYLTIEDPTRFKKSRFVAAFLGLVPGKNQSGESDPQQHITKTGDPFVRKLLVQCAQYMLGPLGPDSELKRWGLALAGRGGKNAKKRAVVAVARKLAVLLHRLWLSGAPYQPLGYGKAHAG

SEQ ID NO: 55544 - protein, 360 aa, unidentified
MRHEITKETFKDQSFYVGIDYHKKSWKVTILGEQYEHKTMSQDPNAEILVRYLKRNFPGATYRAVYEAGFSGFKTCRELNQLGVNCMVIHPADVPTNQKERLQKTDKADSRKLARALKNKELEAIDVPEPELEADRALIRQRFRLVKDISRTKNRVKSLLFQFSIPIPEHISAAQSRHWSKAYTNWLKELPVEMNSLRQVIDNYISVAESQRKELLMVNKQVRRLSLMQGYQSNYTLLLSVPGIGITTAMTFLTQVGDIRRFERLDDLCNYIGLVPRMYGSGDKMQTGKMIHRGRKELKIMLIEASWEAIRKDPALMLKYNELIKTMHKNKAIVRIARKLLGRICFVLKNQQPYELSVVK

SEQ ID NO: 55545 - protein, 332 aa, unidentified
MHLDERPLPQHHFGGDAMASIGEKRVTIGVDPHPGSHTATAVSHLGEVLGSITVGSDAEGCQRLRRWAELHSHRCWAIEGAGNRFMAPLVAELLNDGEQVYAIPPSMTAQYRSRRGRKKDDKVDAENAAKALLANPGITKYLPTRYEQRLKELTRSYQRLSHQLKASRMAAKTINDSLVSQVTLNVVGALEDALTTLKREIEKTVKKVAPDLLEILGVGPIVASVVLAEAGRVTRFANRDHFVAFAGCAPIRWESGAHQTVRVNPGGNRRLNWAAHIIVISRLRIDKNTKAYRDRKLAEGKTQRQVIRLLKTYACRELYRNLIRRQLPTLTT

SEQ ID NO: 55546 - protein, 356 aa, unidentified
MTRIAQLEPTRVTVGVDTHRDVHVAVALDQLGRRLGEIELATTRAGYQRLLAWAERFGAVEAFGIEGTGCYGAGLARHLRARKVLVIEVMRPNRQTRRRKGKSDPTDAEAAARAVLSAEAAGSPKAGDDLVEMIRVLRVARSTAMKARTQAINALRSLLVTAPPELRDELRALSTSRLVDKAARLRPGPLDSPLTASKLALRHLARRYQALEAEITSLDTQLAQLTAAASPRLVEAFGVGADTAGALLVAAGDNPERLRSEAAFSMLCGSSPINASSGKTNRHRLNRGGNRQANAALHRIVLVRMRYHQPTRTYVDRRTSEGKSKREIMRCLKRYVAREVYTALAQPGEQKLARAA

SEQ ID NO: 55547 - protein, 366 aa, unidentified
MNYCGIDLHSNRFTCCFLYEDGNREKITFDVSADAIEKFKSMLNLNTSVIIEASTNTFKFAESIKDLVNEIVIVNTYKMKLIPMSGKKTDKVDAEKLAVYLKMCSASGENLIRPVYIPDDSIQDLRSLFTTHNLIKRHIGAIKNRIHSLLKQHLQPFTKEYIFGKKTRALVRAIAINSVADYQLNLLFEELEAKEKLLEDIENRIKIEGAKYIEEIKILTSMTGISVLTALAIIADIATIERFPNAKHFTSYLRTAPEVDSSNETVIIKGTNKSGRKLSVTLLSQALNHFRDSNPRLKYWYNKKEEYHFKKGKLRMALCRKVFAEIYHMLDKCEYHYYRNAELHNKKMNEYYKFLEVNGVVLKKTA

SEQ ID NO: 55548 - protein, 447 aa, unidentified
MKTEPEEIPDADHELIIERVAAIDVAKASGKVCLRLPRPGRPGHRVSRVWDVEATTAAVCELADHLVAGQIERVTVESTSDYWRIWYYLLEAAGLSVQLVNARDVKNVPGRPKSDKLDSVWLAKLTEKGLLRPSFVPPAPIRQLRDYTRLRVDLTRERSRYWQRLEKLLEDALIKVSAVASTLDTLSVRDMLEALIAGERDPRRLADLARGRMKTKRAALIEALTGRFDDHHGELARMLLDQIDALSGQINTLTIRIDQLLATIANEVPGHDDGDSGAGGQPSADLTVVQRLTEIPGIGPTGAQVILAEIGLDMSRFPTAAHLVSWAKLCPRTIQSGAIQRPGKTGKGNPYLKGALGEAAAAAAKTNTFLGERYRRIVKRRGKLKALVAVARSILVIIWNLLSDNHARFRDLGPDYHATRINTERKLRNHIAQLAALGYHVTVEPAA

SEQ ID NO: 55549 - protein, 429 aa, unidentified
MSNFFNDFVVGIDVSSKSSVITILMPGGEAYGKKINITNDLKGFDKLLLILTDITENFSKRPKIFMESTGLYHMPLLNYFNKNNFECYVINPIHTKNFAKQSIRKVKNDKVDSLRIAQLAQSPTFFSESFFDEDIFLLKKLCREYDSLVSHRAHYKKKVLSSLNLVFPKFNDIFSDTFSAVPLAILSNYPTYKDFLSAHKSDVVTLMKSTVSHSSEWADKKYKLIYTTAKEAEMLKLPTTCLGTELTCFINIIKTFSKSIDDLKEQILIFHKQIPNFEDNAKLLCTHPEVGLLSAISFLAEIGDIKNFSSPKKLVAFLGVDTSVSQSGAFTSTHNKLTKRGSNLARKILYNLAIASIKTLRNGASANPVLLTYYNKLIKSKPKKIAICAVMHKLINHFFAILRDKKAFELRLPETHKQIYIDKNLLVVI

SEQ ID NO: 55550 - protein, 418 aa, unidentified
MKKHSKSSQRSEPSLKRTKARGPVQRDAKEVLAEVLEKLRGKLDAPAVSTSAKENRRGNTVGPNLDRLTVGVDLGDRWSQYCILGLEGETLAEGQLRTTQEDIREFFQALTVARVVIEVGTHSAWVQDVMTEWGHEVLVANPRLMEGSKRRKRKSDRIDANKLARLGRVDPQSLYPIRHRSREVRQDLVVLRARDALVSVRTELINTARGLVKSMGTRLPRCSSPSFAEKVKDAIPVEVREALLPLVQLTETVNDCIARYDQKIEELGQKKYGHTTLLRQVKGVGPITSLAYVLTLEDPQRFSSSREVGPYLGLVPKQEDSGDSQPQLGISKAGDRMLRRLLVGSSQYMLGAFGPDTDLRRYGLRLCERGGKNAKKRAVVAVARKLAVLLHHLWVTGDVYEPLHHTGAETRTAQAAAA

SEQ ID NO: 55551 - protein, 346 aa, unidentified
MKVTTFAVDLAKYKFQVHGFDARAEKRLAKTLKRSEFLAFFGDRAERCEVVMEACGGAHHWARELERLGYRVRLIAPQFVKPFVMGNKNDANDADAIFEASERPKVRAVAVKSIAQQDALLVHATREQWIKWRTALVNQIRGELAERGIVFGKQIGVLRKALVGLLAAPLAGEMTGLFRDWLSQRLQDWHQIDERIAGCDDQIQQHVRTDPACGQILEVCGIGPITASATLAAIGHARPFRSSRHLASWMGLTPKEHSSGERRHLGTLTKRGDGYLRKLFVHGGRSAVRMVGAKIKAGKLLNDRERWIHALVTRRGFNKACVAVAAKNARIVWALLTSGQDYRVPV

SEQ ID NO: 55552 - protein, 345 aa, unidentified
MNTGKDIVLVVDYHAENIVYRWFNEATGEELAGKYSTGREEILRQVEEARSAVVPDGEVVWIMESTTGWARVKELLEGKVRFVLANVLQMPLPPKARRRKTDKIDTGRLLREYLSGRLPQSFTPARWWREVRRLVDFRQDLVERSTALKNQVTSLLSHETWRSRENLWSGKGLKRLAAAELSPGDRALVALKLQQLELLDCQRATIEKGMQEIYRQWPEAQWVDEIRGIGMIMAVSILAHIGPIERFATAEDLIGYAGLAPGTRQSDSTLHHGRIGGGGTDGHLRYLLIEAATWLCQIPRYRTTYERIVQRRGRRIGRIVVARMVLRSIHKMLTAQVRFNPGKAA

SEQ ID NO: 55553 - protein, 333 aa, unidentified
MMYVGLDVHKKICFGTVLDGEGEVVRQGKFANDFKDLYDFMDGLEGASVVMEAGYCWQPLYDALEEAGHDVKLAHPKEVKALSRKKTDKVDSEILAHLLRTGLLPESYVPPREIRELRDRVRRRAFLVRMRTKVKNRIRAELIKRRIRLGEDPWTRKGRLLLQALELEAVDQVLPVLDTLDRQIAEMSRDLRRMCGENPQARLLTTIPGVGYYIALLIVSEIGDVNRFPDSGSLCSYAGLVPMVWRSGGTTHHGSITKEGSGWLRWALTQAVHAHLRHETNLTRFYRRLARKKTKQVAAMATARKMLKVIYWMLRNNEPYHPGPGVVNPVRRD

SEQ ID NO: 55554 - protein, 324 aa, unidentified
MSDATVGVDVSKETLDASSARGQRRQGKIFPNGPDGWKQMLSWIKAMGSKQAHVCMEATGRHSLGVALALHDAGHVVSVVNPAQIRDFARTKLGRNKTDKVDAILIREYAELFKPEPWVPPSPAMRRLCELQTVRAGIVSNRAEWKNRAGSGLGDITATSVAAATIEYFTSQLKAIDQAIANTIDQDPELRGRRDLLLSVIGVGETLAASLLAEMPELGVLRRSGEMVAYAGLNPSHHRSGTSIDRPTRISKIGNAALRSSLYMPALSAMRFNPAVAALVSRLKSAGRLKPKQIVVAAMRKLLVLCFGVLKTGKPFDPAIAMPA

SEQ ID NO: 55555 - protein, 435 aa, unidentified
MCSMLRFVGLDVHKRVLQICILDAQGKVLLEERLEEFDREKLLEFARTKLTPQDRVALEATTNTWAVVRLLRPFVAEVVASNPLATKAIAQAKVKTDKIDARVLAQLLRCDFLPSVWQPDEATSLLRELTSRRTALVQDRTAVRNRIHSLLAVRLLNVPCDELFGPAGRAWLAGLSAEDLDAQGRLILDADLRLHDAIQREVETLEDEMARRGYSDARVKLLMTLPGVDVTAAETLLAALGDVSRFPTADHAASYVGLTPSTRQSADRSYHGPITKRGNSHARWMLVQAAHHVGKHPGPLGHFFRKLAKRKNYNVAVVAAARKLVAIAVNMLIHNEPYRYATPASTSQKLAKLRVRATGERRRGGSPKGQKSQALVPGGGRTIKSLQRVCQDEGLPELRELTPGEQRTVNESGAAEHVAGIRRDRVVRRASSSAK

SEQ ID NO: 55556 - protein, 385 aa, unidentified
MTATTRRFDPIALENMLCLSFELGEGSWTLSFTSGFGAPVHRRRVATRDRDAVLQQIAATKERLGLAAGCRVVSCYEAGRDGFWLHRFLEAHGIENLVVDSSSIEVSRRSRRAKTDRLDGESLLDLLLRHLAGSQKKVFSVVRVPTVEQEDRRHLHRELRSAKQDRTRVTNRMKGLLANQGLPLDLKRDVPTQLASLRQWDGRPLPEGLRARLCREWERVVLYTALIERLEAERREILQRGKDPVLEKVRQLNLLRGIGTNSAWLYGMELFGWREFRNRKQVGAIVGLTPTPHASGMQERERGMSKAGNRHVRAMAIEIAWGWLRFQPRSALSQWYQHRFGRGSKRLRKIGIVALARKLLIELWRYLETGVVPEGAELKTDVRVR

SEQ ID NO: 55557 - protein, 452 aa, unidentified
MNPSKAKLELVYPHTAGIDIGSERHYVAVGQGKDHVRSFGCFTRDITEMATWLRSEGIVGVVMESTGSYWIPVFEILESQGFRVALVNASHVKNAPGRKSDVQDCQWLQKIYSVGLLRDSFIPTESIRRLRSYARLKEDHIRRASSHIQHMHKAFDQMNIKIHQVLSETAGVSSMKVMKAIVAGERSASALLSLCSTSIKRHKESEVLQSLEGNYRQEHIFALKQAIAGYEFYMQQVEECDREIEVLLQALTATTESTPSDSSGGSSSNQSNASRPLKRIRRRDPGYNLEGQLEKLTSGVNLSVLPGMTAYNSLQLLAEIGTDMSRWPTSKHFTSWLGLSPGSQSSGKKKGKSRTKRLGTSASTILRIASRNIGRSKTALGAFYRRISSIKDAPTAITATARKLAVQIYNLLKFKKEYHEFGSQEYEDRYNKLKFKNLENKAGKLGYKLIKV

SEQ ID NO: 55558 - protein, 317 aa, unidentified
MNGSDALYLGIDLSKNWLDAHLLPTNQTWHVATDAAALEAWAAALPRGLTLIVMEATGGLEIAVAALLTQHGFPVAIINPRQIRDFAKALNLLAKSDALDARVIALFAQRVQPEVRPLRNEQAQELDELLTRRRQLVEMLAAEKNRLAQARSKAVRISVTNAIDWLERQVEKRDKEIDRLIKSSPLWREREELLRSVPGVGPGTARTITSELPELGKLEHRQIAALVGVAPFVHQSGKWRGKSFCSGGRAHVRTMLYMAACSASRFNPVIREFYERLKAQGKPFKVAIVACMRKLLVMLNAMARNNKTWGQKTLQPS

SEQ ID NO: 55559 - protein, 347 aa, unidentified
MKRIAVDLAKSIYQVAESVRSGQVVQRKRLNREAFRRYIQEQAEPVEWVMEACGTAHYWGRLAQSLGHQVKLLHPRYVRPYRRRNKTDRNDCDAMLEAARCTDIYPVPVKSRDQQQLQQLHGLRETWKKSRTQRINLLRGMLREAGIEAPASTAAFIRAASELVDQPELASLSRLLHIVLAEINLYEQCMAECEQQLKCWHAGDEIVRKLDEVSGIGLLTASALTAAVGKPERFASGRQLSAWLGMTPREFSSGNSRKLGHISRQGNVYVRTLLIHGSRAALLAAQRCQARTPEKLTQLQRWAVQTVARIGHNKAAVALANKLVRICWAVWCHERRFNGNWQSVRPA

SEQ ID NO: 55560 - protein, 418 aa, unidentified
MALSVAVELPGVEVLFPENFHYNFANLGGYSCLLELSLTDKELRTFGTMTADLLALADWIKAKGCTHVAMESTGVYWKPIYNILEHYNLEDVLVVNAQHIKTVPGRKTDVKDAEWIADLLRHGLLKGSFIQNREQRELKELIGYRKSLVEERAREVNRIQKVLEGAGIKLTSVATDITGVSGRSILNAIVSGVEEPTFLASLCRGKLKNKREQMERALLGMVGKHQRMLISIQLQHIDCLDRQIARLDQEIEEQMRPFEQEITLLDAIPGIGVRSAQVILACIGTDMSRFPTASHIASWAGLCPGNNESAGKRRKAKTTKGNPLLRTTLIQAAKSASHTKDTYLSAQYHRITARRGANKAAVAVAHSMLVIIYCMLKHHTPYQEMGTDYFAKINAKAIAKRAIKQLEMLGYQVKIEAA

SEQ ID NO: 55561 - protein, 325 aa, unidentified
MQKQTIIGIDVSAATLDICINGNQQKSVVIKNEQAAIRKFFNSYQKECLIIGMENTGRYNWALYEVLKDLNHRVYVISPLHLKKSMGLVRGKNDRIDAIRIAAFTSKNYTEIPEWKPSSPTVQKLKILLTERNARVKTRRQLFKQQHDYAKMKHLGLDRSLQKLNLQQLNLIDKQLAHIENEIEMLIKTDEQMNQQAKLIRSVPGAGKVLTWMMLAKTEGFTTITEPRKMACYSGVVPFSNQSGTSLKGRERVSSFADKAIKAVLHLAAMSAIRLKNELREYYLRKVAEGKNKMSALNAVRNKIVHRIFAVVKNQIPYKPNLLLS

SEQ ID NO: 55562 - protein, 420 aa, unidentified
MTRRKSTPPEVALVAIDVAKHRNEVLIEAVRGRRRRRMTILNTRADHDKLITSLQAMHKPIVVGLEPTGNYHRALAHRLIGAGFGVRLISSMALARTREALHNGWDKNDPKDAQVILHMLQIGATMVYQDPLAAGINDLQELSKTHEVVSKAKTEIWHRLLTHYLPLYFPEIERFVGNSRSDWFLAFLERFPTPASVTAMAKEDFAEAAWDVVGRKVSKARLLGDIYETACSSAALPVLLDSPAIAMFRLVLAEARNLIQQRNIIEAHAHELLREQPDYLRLRQVPGIGPIHALTILAEAGDLRRFRHHRQFLKFCGLDLATHQSGQFRGQTRLSKYGNARLRRTFWLAAQVAIRQRDNSLRDCFGRHVAKDRENKDLRRKATVAVASKIARVAHALIKTGTDYRPFPEAPVPSGRTLPL

SEQ ID NO: 55563 - protein, 348 aa, unidentified
MTMTIVEAARGVTGGVDTHLDVHVAAALDPLGALLGSESFETTTAGYKSLLAWLESFGEVAKVGMEGTGSYGAGLARFLRKADIKVIDVNQPNRAERRRNGKSDPLDAIEAARAALGGRATSISKTKDGPVEAIRVLVVAKRSACQARVKALTQMRHLVITAPDQLRCRFKGLTVVALVSEASRLRSSRSGDPVAAAHKASLSSLAHRIQSLEEEIAELEQRIESLLVVTAPELLARFGVGPDTAAALLVSAGDNPERLHSEAAWAHLCGVAPISASSGKTTRHRLDRGGDRHANSALWRIVMVRIAHDPNTTAYFERKVKEGRSKRDVIRLLKRYVAREMYHYLPRG

SEQ ID NO: 55564 - protein, 344 aa, unidentified
MEISTIGLDLAKNVFQVHGVDARGKVVVRKALRRSQMLPFFEQLPPCLIGIEACGTSHYWARELIKLGHEVRLMPPAYVKPYVKRGKTDAADAEAICEAVTRPTMRFVPVKSQEQQAALSMHRTRDLFVKQRTQLVNMMRGLLAEFGIDIPQGINRALEKARAVVDGEVPDVPFDAVRIIERLSQQALDIHVQVREIERDLIAWQRQSDVATRLMTIPGIGPIEATALAASVNDPSQFRSGRQFAAWLGLTPLQKSSGGKERLGRISKMGDRYLRKLLVVGMTAVVRNAKRKPEAVDPNVLALLARKPARVVTVALANKTARIVWAIMARGEVYRERHVPALAA

SEQ ID NO: 55565 - protein, 345 aa, unidentified
MKYFAGLDVSLEETAICVVDESGRIVKETRVASEPEALSRALREVGLPLERIGLEACSLTAWLHDGLHAEGLPAICIETRAANAAMKTMPKKTDRNDARALAQIMRTGWYRQVHVKSRQCRLWRSLLVARRTVLNEMRSIENVVRAMLREAGVKLGTPSRATFAGRVRELVGADAEVMATVEPLLAILSAMLKEFTRLTKQVLDIVRKEEVCRRLMSAPGVGPITALTFRATIDRPERFGSSRAVGAHLGLTPARYQSGETDIQGKVSRCGDELARTALYEAAHSLLVRSKKWSSLRAWGMNIARRRGMARARVAVARKLAVILHRMWADATEFRFGKEPAALAA

SEQ ID NO: 55566 - protein, 370 aa, unidentified
MRNKILYVGLDVHKKTIDAAVATGRSNGKVRSYGKINSTLDALDKLTAKLQKPGVELRFVYEAGPCGYQIYRHLSSKDIHCSVVAPSMIPKRSGDRIKTDRRDAINLVRLFRAGELTSIYVPSVDDEAIRDLVRCRDDMRRLERKARQRLLAFLLRHGHQYSGKKHWTKGFYTWLAMIKFSHRAQQITLQEYIDTTNECGERIKRITQQIQTQIETWERLPFVKAYQALRGVSFIVAVTVVAEIGDMNRFPTPKQLMAYLGLIPSEHSSGNTVRRGPITKTGNSHVRRVLIEAAWTYKMPARVSTILLKRQQGLPKSVRDISWKAQTRLCARYRRLIARGKSRQTVITAIARELGAFMWAIDKQMQVAKA

SEQ ID NO: 55567 - protein, 350 aa, unidentified
MTTLARSVTGGVDTHLDVHVAAALDEKGTLLGVEYFETTRRGYKKLLAWFENFGPVVLVGVEGTSSYGAGLTRHLHAEGIAVVEVDRPNRQRRRRKGKSDPEDAISAARAAFSGDACGAAKTQDGNVEAIRVIRVARLSARRARTQALNQMRSLISTAPDPIREELRHLSVARLLERVASFRPGTKTDVVSLTKWTLRTLARRAIELEDEVKAFDAILEPLVAETAPELVSTLGIGTDSAAALLVAAGDNPHRLRSEAAFAHLCGTSPIDASSGKHERHRLNRSGDRQANSALWHIVITRMVYDPRTTAYIERRMKEGLTKKEAFRCLKRYIAREVYGLLPMDRLTLDSP

SEQ ID NO: 55568 - protein, 342 aa, unidentified
MNQYVGLDVSLEETKIHVLDEAGGRVWRGKCASHPDELETTICKHAPGAVRIGLETGPLTTWLWTELSKRRLPMVCLDARQAQRALDMRANKTDANDADGLAHLVRAGWYKEVRVKSRDAMLSKAVSAARRQLLDISTNLSNQVRGLMKTFGLVVPKGKGRIFEANVRRLLDEEHALAAVVLPLLEAWCAIRNRAAELDRLLLRKVRDDANCRRLMTAPGIGAVVAASYVAAIESPANFKHARDVGAWVGLTPRRFQSGEMDYDGHISRRGDERLRALLYEAATVILTRVRAASALRSWALALKKRLGFKRAAVALARKLAVVLHVMWKTRKNFDPNHRLAA

SEQ ID NO: 55569 - protein, 340 aa, unidentified
MNITTIGIDLAKSVFQVHGTDERGKAVLSKVLRRPQMMKFFTLMPPCLIGMEACGGAHFWARKLTELGHTVKLMAPQFVKPYVKTNKNDARDAEAICEAVGRANMRFVGIKTPEQQALLALHRARQGFVKARTAQGNQIRGLLTELGCAIPKGRGQLPSHVADILEDAENGLSGMSRELFARLLQHLRHLDAQVQALEAQIKAWHKEDATSRRLEQIPGIGPLSASALVASIGNARTFQSGRQLSAWLGLVPRQHSSGGKPTLLGISKRGDVYLRTLLIHGARSILRHKPSDWGTTLAKRRHPNIAAVALANKNARIVWALLAHGRSFQANYHDAPRQAA

SEQ ID NO: 55570 - protein, 375 aa, unidentified
MQAAQVTGYEVGTVLYMAMELSQRSWKLGFSDGKRQRQKSIEARDRRRLLEEVALAKSKLKLPGDAKVVCCFEAGRDGHWLYRWLVSEGVEVLEIDSSSIETARGRKHVKTDRVDVEKLLDLLLRYCLGFRKALRVVRVPDASAEAAQRLHREDEYLLKQRGRVGNRIKGLLATQGVSGVSLRGDFGAWLETVRLWHGAGLSAELKSELRRLHAQYTLFDGQLRELAGAYAEELSAQTPVAETRRRLERLKSVGPKSSRLLAGEVFAWRCFANGKQVGAMAGLTPTPAQSGDSCTEQGISKAGSRRVRRVMVELAWLWLRWQPKSALSRWFQRRFAAGGKRLRRIGIVAMARKLLIALWRYVEQGVLPEGAVFKA

SEQ ID NO: 55571 - protein, 329 aa, unidentified
MHKRFWVCCVLNGKGEEVGMKRLRPDSNLLVEWLKGFKERFSVCFEASTGYGYLYERLTVCASEVVVAHPGHLRLVFGSKRKNDRIDARKLARLLLIGAVPKVHVPRPPVRSFRAAVRARQRLVDECTRCKNAIRALLDANGIRAPKSLWSRAGRRWLAGVEFGDRLSAERRDLLVEALEQATARRKRLERILDRLTRHDRAVVLLRTIPGVGIRTAQAMVAYIDEAKRFPRNKFVGSYFGLVPREHTSGGRKRLGHITKNGPAVARRLLNQAAWQAIARSPEVRAFFERVCRDDPKRRKIAIVATMHYLVRVMHAMLRTGEPWRPLAR

SEQ ID NO: 55572 - protein, 421 aa, unidentified
MALCPHHWKIGETICNDPQVCRIVDLPVYYELETNNCNRDYRIQIGGHYMNYNTVYVGMDVHKESFTLCSCKYEDEKASHYQRTPASYKNVLRYLAFLRTIYGEDTRFVCGYEAGCLGYSLYHQLENFNVECVILAPTTMLEQRSKRRIKTDKRDAEIIARSLAQHNYSPVHIPTETDNQTKEFIRMRDDHKAELKKIKQQILSFCLRQGYQYDGSGNWTAKHVKWLRSLKPAGLYKEILDEYLLTYTILTDKLNRLDQRIEELASKEEYKESVSKLTCFLGIKTHTALSVIVEVGDFQRFVSARKFAGYLGLVPGQHSSGDDRNGLGITKAGNTHVRRLLVESAQSYTRGKIGYKSRVLRSRQAGNSPQVINYADRANERLRRRYYKMVLKDGKKYNIAKTAIARELACFIWGMMTDNIY

SEQ ID NO: 55573 - protein, 349 aa, unidentified
MIIGCDFHPRYQQIAMMDTETGELTERRLEHENGEAQAFYASLAKPARVGMEATGYGQWFERMLAEQGHELWIGHASEIRAGVVRKQKTDARDAAHLLRLLVEKRFPRIWVPSPAERDARQLLRHRHKLVCFRVSVKNQLHGLAMSQGICRKKKLFTAKGREELEKLSLGPWASRRRQELFGMLDRFNPVIDELDRAVQQQAENHADAARLMTQPGVGPVTALAFVLTLGPVARFPRGKHVVSYLGLNPKERSSGDKQHTYSISKQGNTMMRWLLVEAAQTAVRYDPELLRLYQRLKFRRGASVAKVAVARKLAVKLYWMLRATASVAQRAPMQGSSGGTLIPHVGSKF

SEQ ID NO: 55574 - protein, 323 aa, unidentified
MTKIICGVDVSSCDLHARIGREGAEHSFANSHEGIAELAEFCRQQGVQLVAMEATGGYEKPAFLQLWARGFPVAILNPRAVRRFAEGMGLLEKTDRIDTGVIAWFAEVKGSRPCTPASAEQEHLKALVTRLRQLTELQTSQRNQRLLVQDATVLASFTQILALLAAQIRTLETTIAEMIAADPLWQQLDQAFRAIKGVADRTVSRLMAEMPELGTLSNKAAAKLAGLAPLARDSGSVKGKRPIRGGRAGVRAILFVVASVVRRHEPDFAAFDQRLRAAGKPKKVILIALAHKLLVRLNAKARQVRSGLATVPERAPNLGVAVS

SEQ ID NO: 55575 - protein, 460 aa, unidentified
MTKKSKKQSTKPGRRSNRSFPLINANAAGIDVGATAHYVAVPADRDEQSVRRFGAFTEDLHALAKWLKQCGVQTVAMESTGVYWIPLYQILEEYGFRVKLVNARAVKHVPGRKSDVCDCQWLQQLESFGLLNGSFRPEARICVLRSYMRQRETLVQDAASQVQHMQKAMTQMNLQLHHVISDLVGVTGLAIVRAILAGERDQLKLAALKDWRIKSDENTIAKALVGDYRAEHLFALRQALELYDYHQEKIAECDQEILREMQSMETRATEPAPAKRKKRSSPNPFNFDSPAELHRIMGVDLTRIDGINEGTAQLILSELGLDLYKKWPTEAQFTSWLGVCPYNEISGGKVLRRGTRKVVNRVAHALRMCAQSLLKSKSALGAFARRLRSRRDKKIAITATAHKLARLIYRMLKFGGEYVDIGQEKYEERYRATVIKSLERKARYLGFQLVANQPATTVVP

SEQ ID NO: 55576 - protein, 309 aa, unidentified
MKQSVVYIGIDVAKAHLDVAWAGTFRRLPNERSGHAALVRWIKQSATPVQLICEASGGYEQALLESLEKSEVKVTLVQAVRVRQYARAAGILAKTDRIDAKVLAAFGSAMQPQPTSPLSAEQKRLRQYEAQRRHLGRILVAEENRLAQLSCAELRTLSRSLISKIKNQIKTLDRRIGELIAQDQTLCVKAQKLTAISGVGARTAALLLAQMPELGQLNRRQAAALAGLAPFNHDSGSIRGKRAIFGGRRALRSGLYMAALSAARFNPILSRFYQRLRAKGKPHKLALTAVMRKLLLALNHSLKPERILA

SEQ ID NO: 55577 - protein, 353 aa, unidentified
MAHRKRARVIVGVDTHRDLHVARAKDTLGRALGEITIPASAKGYRALVSWSRRLGEIQAFGVEGTGCYGAGLARHLRAEGEVVIEVIRPNRQARRRRGKSDPADAEAAASAVLSGEASGIPKAGDATVEMIRALRVARQTAIRARTQAINALHALVVTAPEELRQDLRALPGRRLVRTCASFRTGELTDPLSATKAALRSLARRHEALSAEVRELDRELGRLTNQACPKLLGIFGTGPDTAGALLLAAGDNPERVHSEAAFAKLCGVSPVEASSGKTMRHRLNRAGDRHANAALYRIVMVRLRQRHQATIDYMARRTADGKSKREVIRCLKRYVAREVYRTLTETDSATSIAR

SEQ ID NO: 55578 - protein, 482 aa, unidentified
MKKRNIYQNQSQELLTLFEEAGNSAKVMCVPIDYAKTDHVVMFCNGHGGIVRKPFSVKNSPLGVDYLTDQVIRLCKSRGISKRHVFFGGEDVGSFAANFVTTLRSQGWLVAGVNAHDAKKQRANLQASTDRLDLMGIASMLLNRRANSCPAQSGIYWNLRTVVRHRQKLVKLTTEVRNRIHGVVDRLFPGFLDEEKSGISPFSKSSLWLMQARFSTPQIRRRKRSTLIKGLRKLGAKNPELTAAKLQQYAAQVLKPPQEYIATLQFSLAQHVKHFSCLQDNIDQLEKEMAVGLAQTQGAFLTSFRGIGIVLASGVTSEIGNPYEQAPLNNLVSYTGIIPRVKQTGGPQGESYSGKVSKRCNRILKNYVVQSASHLGLHGPQELMADYKRREAAGQHADFGMGRRFLRIAMCLMRTSQIYLPPRLREPEAKLQERADYYLMNWPNLHEKWRKSGALKVAFDKNMPLGQWRNIVQQLYKIKLAL

SEQ ID NO: 55579 - protein, 464 aa, unidentified
MRAGKQLWRNRKEKKEWGRRLQSEDPGLEVVHPHAAGIDVGNSTHYVAVRPDRDPEPVRRFECFTADLHRLADWLQSCGVKTVAMQSTGVYWIPLYEILEEHGLEVYLVNARHTKNLPGRKTDVQESQWLLKLHTYGLLNNSFQPVSEIRVLRTYWRQRGEHVRGAATCIQRMQKALTQMNVQLANVISDISGLTGQAIIRAIVAGERNPLKLAMLSDPRVHASHEEIAKSLEGNWRSELLFVLHQELDMYDTYQKRIAECDQRLQKHLASFTRPLSIRPPTQKLKTKKPAAKNAPRFDLSSELQRVTGVDLTRIDGIDVMVAQTLLSEVGLDMSRWTTESHFASWLGLCPDNRISGDKVLSRGTRRVVNRAATALRQAANTLMRSRSYLGAQYRRLRTKLGAPKAITAMAHRLARLVYRMLKYGQTYVDKGTEYYEERFRQQQIQLLRKRAAKLGLQVAEIHA

SEQ ID NO: 55580 - protein, 394 aa, unidentified
MFFIGIDIAKRKHDAVVIDNNGTVIQKAFSFSNSLEGYNKLISIIKKITSDKTDIVFAMESTSHYWLALYSKLIKDGYLVHVINPIQSNALRGLFIRQAKTDPIDALIIAEVVRFGKFSSTNFPKEKILFLREMCRNRLYMVDSVSDLKRKVTALIDQVFPEYDKIFSDIFLVSSMAILLKYPTPTKLIRAKESTLTNILSKASGNHFGSEKAKEILLAAKNTFGIDDTYDTYSTLIKKYLNQIKFIQKDIAEIEKKISDIMQEIGSTITTIPGVSTILGAIILSEIGDVSRFNSPNKLAAFAGIDPSIKQSGDYSSIRNHMSKRGSPYLRRALWMACTTSIQFDPMFKEYYLKKRSEGKSYMTTLGHISKKLITVIFAILRDNKKYEPVITAA

SEQ ID NO: 55581 - protein, 446 aa, unidentified
MKKSSRMSVIHPHAAGVDIGAEFHVVAVPPDADAAPVRTFQRFTGDLHRMSDWLKTCHITTIAMESTGAYWLPAFEIPEAAGFNVILVNARDAKNVPGRKTDVNDTQWLQKLHSFGLLRASFRPEHDISVLRSYLRQRERLTEYRAAHIQHMQKALMQMNVQLHHAVSDITGVTGLSIVRAIVSGERDPSVLIQYRDVRCKKTPEVLQQALTGNWQPEHLFAPEQSVAFFDFYQEKIRECDDQIETSLLQLSTGTEEPEGVLPSARHRTKQPNQLSFDVRPLLWKITGADLTQIHGFGPYLALKFVAECGTDMNRWPDASHFTSWLCLSPGNKISGGKVLSSKTRRSSSRIAAALRLAATTIGRSDTALGAFYRRLSSRIGKAKAVTATARKLAILFYNALKYSQKYVDPGADYYEERYRNRVLDGLKRRAKSLGYSLQQDPELCV

SEQ ID NO: 55582 - protein, 415 aa, unidentified
MDLVHPRCAGIDVSKRDAKVCIRVAGRGRAGAKSTVTTWGAVTNQVLALREHLVAAQVTLVVMEATSDYWKPFYYLLEDGPFEVMLVNARHVKNLPGRKTDVSDSAWLAQLGAHGLVRGSFVPPEPIRQLRDLTRTRTTIVRGRAREIQRLEKLLEDAGIKLSSVASDISGVSGRAMLDALIAGQRDPAVLADLAKRRLRSKIPELTEALTGRFGDHHGFLAQLHLDLIDQHSHAIDELTARIEVVMEPFRGFRDLIVTIPGVSTGVADVIIAETGADMTRFPTAGHLASWAGTCPGSNESAGRVKSTHTRPGNPYLKGALGIAAMSAARSKDTYLSAKYRRIAARRGPVKAIVAVEHAILIATWNMCTNGAFYSDPGGDFYARRNPDKTKNRAIDQLQKMGYTVTLSPQHPDAG

SEQ ID NO: 55583 - protein, 413 aa, unidentified
MVFWSVQYLLQHLLVQTQVSHQLLQPLILILQLPQTPQFRHARPGKFFLPVNGMDYFLPLRLTVRNVLTRRITMNIVFLGIDLAKNVFQLCGLNQAGKPVYTKRTGRKELLQTLANIPACLIGIEASTGAFYWQRELEKLGHKVKVISPQYVRPFVRGQKNDGNDAQAIAVALMQPTMQFVPPKSPEQQDIQALHRARQRIVNHRTATVCQIRGLLLDRGIPIGSAVSRARRAIPLILEDAENGLSSRMRRTIAELYDLFNDLGRRIHFFDKEIETVFRQSEACPRIAKVKGIGPKTATAVVAAIGKGTEFKNGRHFAAWLGLVPRQHSSGDRQVLMNMTKKGDKHLRTLFIHGARAVVRVATNNNDGHMNQWVNQLKERRGFNKTTVAVANKNARIIWSMLRNDTGYQVVCN

SEQ ID NO: 55584 - protein, 345 aa, unidentified
MGPMYYIGLDVHKQKISYCAKDVGGKIYAEGWIPATRFDLDRWMKTLPQPWSAALEATMFTGWIYDHLKPHAAELKVAHPLMLRAIAAAKKKNDRIDANKICDCLRCDFLPESYMAPTAIRERRRTLRYRSLLVRQMVQMKNKIGMLLMEAGVSYNKRKLHKAGYFRELLASNPDVDESLRSLLRQCRETVVRLSKTENALIRSLQQDRLLAERVERLMSIPAIGPITALTWALEIGEVQRFSSIKKAVSYCGLCGDQHSSADRVQRTPLSKQRNKHLQTTLIEAAKMAPRYSPTLALLYDKEGQKGNANRATLAVARKLVAYLMAVARGQTHFLVIDQETRTAA

SEQ ID NO: 55585 - protein, 418 aa, unidentified
MIDDVRWFAGIDWATQSHRVGLLDVEGRHVSERDFAHGGAGLTELRDWLLEKTKAAPGQIAVAIETPHGPVVETLLDHAFQVFAINPKQLDRFRDRFTVAGAKDDSRDARVLGSALRTDRHAFRRLVVDDPLVIELREWSRMADELQQERTRLANRVRQQLWRYYPQAVELTDDVADDWFLALWQQVPTPVTAAEVPEEAITRILKDHRIRRLDATTVLQTLRKTPLFVAPGTTEAACAHIRAVAARLSLVNQQIKQTHRALDGLCAKLEAATESPSGQNREQHDVMILRSWPGIGRIVLATLLTEATEPLRRRDYHALRALAGTAPVTRRSGKQCFVIRRLACNKRLQNAVHHWSRVAIQHDTAARRRYDALRRRGHGHARALRTVGDRLLYALCTTLERQMPYNPNCQTAQVTVGL

SEQ ID NO: 55586 - protein, 310 aa, unidentified
MSMNNIPVYVGIDIAKDTFQYHINPNLQGNLPNSQDGFKRLLRLLDGRTVHLICEATGGYEQPLIAFCADQKLSASVVDPARVRHFIMGKGQRAKTDKIDAAMLALFGAENRPAPVEPLSAEQRELRELSRRRGQLLQIRQSLANQSRGLSLKALLSGQRKLLKEFDRQISVIEQLMEKHVAASELLRRKRDLLMVEPGVGPVVALALLAEMPELGTLNRASAAALAGVAPYARDSGTKSGRRYIRGGRALIRKKLYMAALVASRHHPRLKAIYQRLIARGKPAKVALVALMRHLIIQLNHNLKNVPSTP

SEQ ID NO: 55587 - protein, 331 aa, unidentified
MAQNELIVVGLDVAKDKVDACIRSLSLRQTFPSTPEGRRSLIRWLRKHKVGKAAMEASGGYEREWAKALREAGIEALVVDPKRVRNFAKSAGRLAKNDPIDAAMIAWFTETFIEARGQTYDAAREKLAQIVTARQALIDAQTSLQNRREHSTPDVVRKMQDRLRKQIAAEIAKLEAAIAALIKATPRFAELAEIIESVPGLAGSTSAGLIGSMPELGQMSNKVAAALLGAAPYDHDSGKRRGIRHIQGGRRKVRNLFYMACMGAATRHNPVLKAFYDRLITKGKEPKVALTACMRKLIVILNVMIARGEKWDASRYEVSDSARLPPSACTA

SEQ ID NO: 55588 - protein, 343 aa, unidentified
MIGLDLAKNVFAVHGIDAAGNVVIRRSFRRPQLEEFLAKLPPTIIGMEACGGAHHWGRLAIRLGHEPRMMPPAYVTPYVKRNKNDGRDAEGICEAMSRPTMRFVPVKSLDSQAKRAVHRTRSVFVRQRTMLGNALRSMMAEFGVVAPKGVKGLRDLIGRLAEPDDAIPELARASLLEMVRHWEGLDASVRKMEARIVRDTKADATARRLTAIPGLGPIGASATLATVPEPRVFKRARDFVAWLGLTPRGFGTGGKQRSGGISKQGDRSLRTLFIVGACAHLRQEIRRGVADPWLARLVAERPFKVAAVAYAAKMARIVWAMLVSGEAYRRRGEARPAAAPAGA

SEQ ID NO: 55589 - protein, 466 aa, unidentified
MTPRKQKNFRMSAQPAEPLRVANPHAAGIDVHSAEHWVAVPPDHAPPPPPDHPPNLPPHVHRFGACTADLEALADWLTLCSITTVAMESTGVYWIALFELLERRGFQVALVDPRQTKHAPGRPKSDCLDCQWIQRLHSYGLLAAAFRPDDQVVVLRGYLRQRQMLIQYGGQHIQHMQKALEQMNVKLTEVVSDITGVTGLAILKAILRGQRDPLQLAKLRHEKCKRTEAEIARALYGNWRDEHLFALEQALALYEFYQHRLRECDQRLEAYLGTFADQSGGRKLPLKPRQRKRKANEATFDVRGLLHRLSGHDLTVIEGIDESTALVVLGEIGTDLSKWPTVKRFVSWLGLCPQHQGSAGKIKSRRVRRGANRAARALRLAAQGCHHAKNALGAFYRRIQARCGGPKAVVATARKIAERVYRLLKYGEVYVRQEMAAAEEAYRLRQLKGLARKANELGYQLVLATS

SEQ ID NO: 55590 - protein, 337 aa, unidentified
MSIVFVGIDLAKNVFALHGVDDAGKARLVRPAVRRDQLLETIAKLEPCTIGMEACSGAHHWARQFMAFGHTVRLIAPKFVVPYRMSGKRGKNDKADAAAICEAVQRPNMRFVPVKTELAQARLAVHTVRQGLVASRTATINRLRGVLSEFGQVMPLKARTVRLEAATRAEGLSQWAQTACMDLLAEIRRLDEQIDIYDQHIRLMAQADDRSKRLMDMPGIGPTTASALLAAIGNGHDFDNGRQVAAWLGLVPGQYSSGGKNRLGRITKAGDSYLRTLLILGARAVLAAANGKHDRISRWAQALAERRGYWKAVVAIAAKNARMAWAMLAKGEAFKPA

SEQ ID NO: 55591 - protein, 419 aa, unidentified
MNKLFVGMDISLDDVKVHILDQDGNDACSRFSVDNNPSGCNILVSHILDCCNKYNVQKVFIGLESTSVYGWHIQYYLADHASLKPFNPSVTTFNANTVKAFKKSLGDLPKNDWVDAFVIAEKLRFGRLPKSCPVDFRYLALKRLTRHRFHIVDSIVREKNYFLSNLFLKFSGLCQIKVFSNNFGAAATEIFNEFLTLDDIAARPLEDLIAFLVDKGRDHFNDPNATAKLLQDAVRKSYRINANVNDSLNFVIKSCLDNIQYLEKQKKASEKTIANEVKGFKNQFLCLTSVNGIGPTIAAGLISEIGGISRFDNDNALAKFSGIYWSEYQSADFKAEDTYLKRTGNEYLRYYFIQAADQLRKYCPEFSQYNARKFNESKTHKHKRALVLTARKAVRLVFALLREEKLYKPPAMKGDDCKY

SEQ ID NO: 55592 - protein, 316 aa, unidentified
MSQFNVFVGIDVSKDRLDVHLLPDDKSWQFANDEAGCAELSERLTGLSGPVLVVMEATNVFWRLAATRLASAGLSAAVVNPRQVRDFARATGQLAKTDAIDAQVLAVFAQRIEPPVRALPSEQCQMAAELLARRAQLMGMRVAEKNRLATARAAKVRKDITATIAFLEKRIAALDEEIDQWLKSTPIDQSRVNLLKSFAGIGEHTAKSLLITLPELGSLTAKQIGALAGLAPFARDSGNKRGQRQIRGGRTTVRAALYMPAITAIRCNAVIRALYQRLINAGKHHYVAITACMRKMLVILNAMLKSNQPWKNPQEA

SEQ ID NO: 55593 - protein, 384 aa, unidentified
MQKHQRRFGAMTQDLLELGNWLRQFEVAQVAMESSGVYWKPVWNILEGQFTVVLANAQHIKNVPGRKTDQKDAEWIAQLLQHGLLRPSYVPCEVIRDLRDLPRMRVSLSQEASRISSQVQKVLEDANVKLASVATNTLGKSGRAMLEEIIAGQNDPEHLASLALGHLRAKTPQLKLALEGKIRPHHRFLLRRLLDQLRFVEHEIVLLDERLEDIGRERPELSQAVTRWDTIPGIDRVAGWTLLAEVGHTMAQFPTAEQLASWASLCPGNHESAGKRLGGTTRKGSPWLRRMACQCAWAAARTKNIYLSAQFRRVAARRGSKRAIIAVAHSLVIIGYHLQKNQRNYEDLGGDYFDRIDSDGLKRYFVRRLEKLGHKVTLAPVKAA

SEQ ID NO: 55594 - protein, 321 aa, unidentified
MKKEIFVGIDVSKERLDIGIYPGDETRTFDNNEQGIAKLLVLMSSVSPTLIVLESTGGLETLAVSSLCEKNLPVVVINPRQVRDFAKATGTLAKTDAIDAKIIARFAHSIRPEIRPLKDKNVQRLSALNARRRQIMTMLVAEKNRLKRAPQPNKKNIKEHIDWLEKTLANIDDDIQKTIKKSPVWKANSDILQSFKGVGPVLSASLLGDLPELGCLNRKKIAALVGIAPLNCDSGKYRGKRRVWGGRSNVRRLLYIASLSAMRSNPVIKSFYSRLIEAGKPHKVAMTACMRKIITILNAMLKNRTFWESPANYSLDIKHSC

SEQ ID NO: 55595 - protein, 349 aa, unidentified
MNKEGKVLGSCAKLYNSREGFEQFVKMTEGLKTKHGLNDVLIGMEPTGHYWRKHAYFAKERGYEVRFVRTTALKHHREIDESSSAKSDQRDALTIANITREGKYIDTVIEDGAMRQLRTLAKTRERLLRYSVSAKNALHAALDDYFPEVHKIFCSMGTRSLWAILEQCPFPDDVVGIKISSLQELIARSARKKAGAAQKAKALYRAAQKSIGLKRVGDADRFRVTIYLEEVKRTVLVLKDIARQIVKYAGYDPQESDSGSWVSRKFISNKGRWLLRKYLFFMSMRVVVLSKYFQEYYQRKLETKNRVGQQPKRKEILCAVAIKLIKVIFALLRDKRTFDDRVRATVTHT

SEQ ID NO: 55596 - protein, 446 aa, unidentified
MADVMIGIDPHKSSHTAVAIGLSEEPLGELQVRACPSQTEQLVAWAAGWPERVWAIEGAAGLGHLLAQQLVAAGEQVLDVPPKLAARVRLLQAGDTNKNDPNDALSVAVAALRSPAPRPVLAEDYAVVLKIWGKRHRDLARSRNQAACRLHAVLCDLVPGGVRREISAGRAARILEQVRPADAVIAARCELAGELLADIRRLDAQLRDTHKNLAAAVRACRTSLTGIFGVGPVIAGTVIGDARQVFRFPDRDHFAAYNGTAPVEVSSGGRKVYRLSLRGNRRLNHAIHMAAISQIRHKHSDGRAYYDKKLAEGKTHKEALRCLKRRISDAIYAALAADARQATAATCPEGPGGQPGNHSVSRAAGSHPARRLFGQATPGPGHHPTTAAGIQGRAGHSSIAATLPPAKPQVQVERPQRSEDERPGGAARRRPYSAARKAPMEPRTRP

SEQ ID NO: 55597 - protein, 421 aa, unidentified
MTRERAKSMDQRAFGRSCTAEAAGEAALAAHGFHATRLNASVRTVPRAHLLVWTAPRRHQACQNEVVTDLRQRGPSVEHISRIGMDTSKHIFQLHGVNAAEEPVLRKKLRRKEMVTFFEKLAPTVIAIEACAASHHWARLLQSLGHSVKLIAPQLVKPYVKRGKNDAADAEALCEATSRPTMRFVPVKTAEQQAALMLVGVRDRLIRNRTQLVNAIRGHAAEFGVTAAKGKAHLDALLERIQADESLPALARELFVAQAKQYAQLRAQIAEVDARLMSWHRADECSRRLAKIPGVGPIGAVLLKMKTPEPELFRSGRQFAAWIGLTPKDHSTAGKVRLGVITRAGDEGLRSVLVVGATAVIQHVRRGGRSSPWLTELLKRKSPKLVAVAQANKMARIAWKLMVTGENYAAKSAPAALAGAA

SEQ ID NO: 55598 - protein, 393 aa, unidentified
MICVGIDVAKDKYDCFILSSEGEVLTDVFTIPNNAEGFDTLLQTIRRCARPEDKIKVGLEATGHYSYNILGFLLNEGLDTYVINPLHTNLYRKSLSLRKTKTDRVDARTIAAMLMSDVDLKSYTDTAYHNEELKSLTRYRFDKVRERAKLKQSVSRLVTILFPELEKLVSTLHMASVYALLSEFPGAKQVAGTHLTHLKAVLHDASKGRYGSDMATTLRDAARCSVGSVMSAKSLELRHTIRLIHELDAEIEDIEAAIQSMMGEIQSPITTIPGMGVRMGAMILAEIGDFSRFDSPDKILAYAGMSPSTYQSGQLSLSGAYSHMEKRGSRYLRYALYNATKYVCLWNPTFAAYLAKKRAEGKHYNVALSHATKKLVRLIYALEKSKRPYSTAA

SEQ ID NO: 55599 - protein, 370 aa, unidentified
MKKSNTTLFVGLDVHKETIAVAYAPEGRDAEVHSLGSIGTRQCDIDKLLRKLVSKGARLVFAYEAGPCGYWLHRYLQKKGFECDVIAPSLIPKKPGDRVKTDRRDARQLAERLRSGDLTSVYVPCIEDEAIRDLARAREDARKDLNSARFRLKGFLLRHDVRYTGRANWGPAHLRWLATVACPTPVQQIVFQEYVRAVSERQDRLDRFDTELQEQVPSWRLFPVVEAVQAMRGVAFTVACTTIAEIGDLSRFQNPRQLMSYLGLIPSEHSSGPRRRLGGITKAGNSHARRVLVEGAWAYRFPAKVSLHLQKRIEKAPEFAREIAWKAQIRLCKRYRRLVARGKHPNKVTVAIAREMAAFMWDIARQVAVK

SEQ ID NO: 55600 - protein, 348 aa, unidentified
MTVVFLGIDLAKNVFALHGVDAAGKPCLVRPQVRRDQLTELIAKLPPCTIAMEACSGAHHWARTFSAFGHTVKLIAPRFVIPFRMGGKRGKNDQADAAAICEAMQRPAMRFVPVKSVDAQSMLALHATRQGFVQARTATINRLRGLLSEFGIVLPLKAQTIRKRAAEALEGLPGWARFACTDLLSEVGRLDERIDTYDTHIRLSAQHDATCRRLMQMPGIGPTIASALRASIGGGHDFDNGGQLASWLGLVPGQYSSGGKNRLGRITKAGDSYLRMLLILGARAVLAAAAGKKDRISRWAVSLAERRGYWKAVVAIAAKNARMAWAMLSKGEDFKPVEDALPADVAPA

SEQ ID NO: 55601 - protein, 352 aa, unidentified
MERYVGLDSHARSCTLGVMSAGGQRLKSLVVETNGRALVEAVCGIGGRVHLCLEEGTQSAWLYELLKPHVAEVVVAMAPERKGPKSDRRDAWARANELRTGAIETRVFKAPEHLAGLRNAVRAYGFAVTDVVRAKNRLKSVFLSRGMSTDASVYDPTKRAAWLKKLSSPHRELAEWLGRQLDQLEPLREEAERLLLAETKKHPIIRTLSTAPGMGPIRTAQVVAIVATPERFRTRRQLWSYSGLGIVTRSSADWVQDRTGKWVRAQHAQTRGLSRKRQPRLKAVFKGAATTVIAQLADDPLHADYERMLKSGIKPTLAKLTLARKIAATVLSMWKHQEVYDPKRHRPTPEQK

SEQ ID NO: 55602 - protein, 326 aa, unidentified
MTYQLGIDISKAKLDVALLNADGKYRSKVFPNDATGFKSLLQWLHTHVPSGKAEVHVCMEATGSYHEALALFLSDQGVAVSVVNPLLVKRFIEVDRVRNKTDDGDAKCLARFCQMTQPELWEAPSVAVRTLQALVLRLDTLQEMRQGELNRLEVAHASVQQSMRDVIAGLERSIEAVREQIRQTIDDDPDLKQRQGLLASIPGLGDKTIPQLLAYIGRPERFKSVKALIAYAALAPLIRQSGTSLNQHKGTHPQGHRALKSALYYPAMVAGKYNPLIAAFWQRLKAQNKPGKVIVVACMHKLLAIAYGVLKSRKPFNADHLKPIVT

SEQ ID NO: 55603 - protein, 355 aa, unidentified
MEVTTIGIDVAKDVFGLHGVDAQGRVKVRKRLVRKHLLEFLSKLPACLVGMEACASAHYWAREIERLGHRVKLMSPRFVKPYRKSDKSDANDAEAICEAVGRPSMRFVPSKSEAQQDLQALHRVREQLLKSRTALVNQARALLAEHGLIAPRGIAHARRLLTELLAQPERYPLSGLLRETLLEISERLRFFDQRIAAYDLRIEQVFRHDERCQRLAKIAGVGPLVATAVVAAIGNAQEFKSGRQLSAWLGLVPRQYSSGNRNLLLGISKRGDCYLRTILIHGARAALCRAVRKRDQRVTWASRLRLRRGTNVAAVALASKNARIIWALLTRGENYRPLLAPTPSHAAGGLQLKCS

SEQ ID NO: 55604 - protein, 423 aa, unidentified
MENTAARKRKQVPEGYLVIGIDPHKKRHAAVAITQDFTTRDKFKFDNTREGLETMLRRARTEMVESGCRGVMFAIETGGHYWRNVAYFLDEQDIPFRFINQFTLKRRREGKDLNRRKNDYRDSEVAAQLLCTGEFTESKVPQGVYAELRTAHNAYRRLVKERTRIINLVKGLLDALFPEFTFVFKDPCGLTALSVLSTCAIPGVIAGMTEDEFVATIEAKHKGRLMRKKLRALHYSARTSIGIDAGARSVSSEIAFLVEKLELIRRHIRIIGGTLISLVDETEEGKYLLSIRGLNYISVAGLLAELGCFKSYRTAKQMIKMAGSNPTESESAGKRGSHTPMSKQGRPVLRYCAWTAVIPMLRFNPDFRAWAKQRRERPAHANPLNGREVVGAALNRLLRLAFAMVKNQTYYQVSKPELTLVAV

SEQ ID NO: 55605 - protein, 429 aa, unidentified
MNYTQNEKIEQVTDSTMVVGVDIGSQIHYARAFDNRGRELTKRIFSFHNDLEGFNSFNLWAETLKTENKKTAVLIGCEPTGHYWFAFAKYVNDHQKRLVMVNPFSVKKIKELDDNSPKKTDSKDPKTIAKLVVDGRYSIPYMPEGIYAEIRDLVYSRDRIMKQHNISANRIQRWLAIHFPEYLGLYTRFDAISGLAVLEKAPLPKDVIALGVNGIRKIWHDKKMRGRGVTEDRAKTLVEAAHNSVGLDGGIGTKSELYMLLEEHRLWTSQLEAVNKVLEEMILKVPHVEKLLAIKGVGSITIAGFIAEVGDIRRFDSPKQIQKYAGLELVENSSGKHKGRTRISKRGRRKLRKILYQVMVPLLARNKEFRGIYDYYVTRVKNPLKRRQAMVAVSCKLVRVFYAVLTKGVEYDRFKMMSDIHRKSDIIAA

SEQ ID NO: 55606 - protein, 343 aa, unidentified
MDYFAGLDVSVKDTSVCIVDEAGKIIREVKVASEPDALLAVLNNLAYHFKRIGLEAGPLSQWLFSALAEADLPVICVETRHMRAVLKAQINKTDRNDARGIAQMMRVGLYRPVHVKTLRSQKLRMLLTHRKLLQAKAIAVENDLRATLRNFGLKVGTVGAVKFEARVKELVDNFPDLVELVEPLLVVRRVLREQISILHRRVLAAVRNDEVCRRLMTVPGVGPLVALTYRATVDVPARFRKSKSVGAVFGLTPARDQSGESDRPGAISRCGDEMMRTTLYEAAQVMLLRSAKWSWLKAWAMKIARHRGMKKAIVALARRLAVIMHRIWIDGTEFRWTREAAAA

SEQ ID NO: 55607 - protein, 377 aa, unidentified
MAKFSTYVGMDVHARSAICRGVTPETGEAWSRRFDGAGYGGDVAAWLLGLPQPVYCAYESGCTGFELCREIRAAGVECDVVAVSTLPKSGKDRKRKNDRSDAASLMRELANPSRDYTAVWVPPADVEAARDLARARDDSTRAVKAAKQQLLAFLLRHGIVWDERTKTGRVKKSWGADFVRWLGSVELPEPAAQAALASYRDRVDMLSRHDARLRALVAAEAQKPRWKPYVDALMRLKGVDVQTAFLAAAEFGDFSRFTSGRKVSCWIGAVPTESSSGPRESRGGITKDGNSHLRRALVEGCCSLGSRRRGAKKENPAQPVSATVDRIAAAANDRLLDRYEHLVGKGVHVNKARMAAMSEMARWIWVIGLEVQSEQAA

SEQ ID NO: 55608 - protein, 372 aa, unidentified
MFSRQKGAPPLNSNKYVGMDVHTATISVAVRDVAGKLIMESVIETKASTILQFVQGLRGNLYVTFEEGTWAAWLYDLLKPYVTNVVVCNPRRNALLKEGSRNDRIDARKLAELLRTNLLSPVYHGEKGLRTLKELARVYLTINKDLTRVMNRVKAIYRSWGIPCSGKSVYSPRHRKEWLSKITQTSVRRRAEFYYEQLDALVLLRKQARQELLAEGKKHQAWKLLRSIPALGPIRAAVLMAIVQTPHRFRTKRVLWKYSGFGVVTHTSADHRYVKGQLERSKKPVSVRGLDRDHNHHLKDLFKGAATQASTRKGPFLEFYEALVAKGMRPEMARLTLARKIAAITLTVWKSMPTPRLCRLNQVSSLLPSVRR

SEQ ID NO: 55609 - protein, 348 aa, unidentified
MTHRTKKIDIAVLGIDLAKSSFQLHGVDDRGHTTYKKKLSRQKLKEFMVNLSPCRVALEACGSAHYWARLLTTYGHEVKLIAPQFVKPYVKSNKNDAADAEAICEAAQRPNMRFVSIKNIEQQDLQSLHRLRSLLVAQRTARINQIRGLLQEYGVELAQGPSVLFREVPLILEDADNGLGVLFRALLSDAYDELLHLDDKIKDYDQKVVQMSQQNEDAKRLQTIPGIGPITATALVAAIGSSVANFNNGRQLSAWLGLVPRQHSTGGRNTLLGISKRGDVYLRNLLIHGARSTMKHVDKRSDARSQWSQSLLTRRHQNVATVALANKMARTVYALLKKSEDFKPVVVV

SEQ ID NO: 55610 - protein, 339 aa, unidentified
MQVTTVGLDIAKNLFQVHGADAQGRPVLKRKLARGKVLEFFATLPACLVGLEACGAAHYWARELAKLGHTVRLMPPQYVRPYVKTNKHDAADAEACCEAVQRPGMRFVPVKEESQQSLLMLHRVREQLLKQRTATINALRAHLAEFGVVAAQRRAGLRELLAVVGDQEDRRLPPLARELLQGLVEHLRGLEERTAELDRRLVAAARDGAACERLAAVPGIGPVIATTLVAAVGDAKAFTSGRHLAAWIGLVPRQHSSGGKERLLGISKRGDAYLRRQLVHGARALVRVSPGREGGLWTWINGLLARRPFNVVVAAVANKLARIAWVLLSRGETYRAAAA

SEQ ID NO: 55611 - protein, 368 aa, unidentified
MNTVKFIGMDVHKNSITIAIADGGSREPARLYGTINNDFDALSKFCRKMVSTSSELYFVYEAGPCGYGIQRYLSDNGFECIVAAPSMIPKKSGDRIKNDRRDAKSLAQNHRSGELTSVYVPDPEDEAMRDLTRAREDAVVSTRKAKQRLCAFLLRNGLTYNGKTKWSKAYFNWLSDIAMPHPAQQVALQEYIDAVHENLKRVERLTDQIRHMAANWRLEPVMKALQAARGVSLIVAATMLSEIGDLSRFENPKQLMAYLGLIPWEHSTGDKIKRGGITKTGNGHARKALVEGAWAYRMPPRVSRILLKRHEGLPDAVLKIAWRAQLRLCARFRRLMAKGKSKQVVVTAIAREFCAFLWAINKQVKMPA

SEQ ID NO: 55612 - protein, 408 aa, unidentified
MAVVSPCEYSCGLDVHKSSISAAVYRSDGSFTTHRFSTLLDGLTALREWVVENRCERVLMEATGVFWIPPYMALESSVEVYVVNPLSIKYLPGRKTDTLDAVWLAEIALNGMFKASYIPPRDVREFRELTRTHRKLVEERTAHKNRIHKILERSGIRLSGVLSDIFGKSGLLVITGLIEGKPIEQILATLHDSRILKKRDAIERAICGDLGENEVFIIQQSLESIKHVNAQIAQYEERILRTLARDEESLQIVTSVPGIGFKVGAVILAEIGNIRQFDGPKNLVSWAGLAPTVYESAGKTAHGHITKRGSKYLRTVLIETAQVIANGKPNRLKQFFLRIRARKGYKMAIVALARKVLALIYHLLINRERYLDEAGTVKTVNLPKIRPNREMDVLAHHKLIHFSSKGSP

SEQ ID NO: 55613 - protein, 416 aa, unidentified
MNAVGIDVSSRKSTVAVLRPLGEVVCLPFDVTHDIAVLASLVEKLKAIDGETRVVMEHTGRYYEAVEKALHEAGLFVCAVNPLLIKEYGANSLRRVKTDKADAIKIARYALDNWADLRDFTPMDAIRYDLKTLNRQFQLASKQRTASANNLIALLEQSFPGIRKCFDSPVRSDGTQKWVDFAHSFWHVDCVRKQPFPAFCERYRKWCKRHAYLFKLSNAEEVYALAKRAVVLTPKSKVVKVLVQEAANQLISISRSVEVYRAEMDRLAAMLPEYPVVMAMYGVGKSYGPQLMAEIGDVRRFERKQALVAFAGIDPMPNQSGDKNVRSNKSSKRGSPYLRKTLFNVIRTYLQCAPQDEPVFQFLNRKRAEGKPFYVYMLAAANKFLRRYYAKLRDFFASLDTLQPVAPIPTILKATL

SEQ ID NO: 55614 - protein, 352 aa, unidentified
MEQQRQYVGIDLHRKRSVIVRRNAAGETVETVRIDNDPRTLASELAKAGEHPEVVLEATYGWYWAVDVLEECGASVHLAHPLGNNWGQRRVKNDERDATDLVDLSRLGRLAEAWIAPPPLREYIRYRAKLVHQRTSLKAQVHSVLAKEGLFGVRGHALMNEVHLGDAYRVRVESLGDLTEACDREITMLEEHIAPILAGDLGYQSDQTIPGVGPILASIFVAEIGDISRFSSARHLCSWAGLTPTHRGSTTRSAGATSPSKGHASCAGQPSRPWPVSAQTPRSGLTTAVWASGGASRSDGWRPPANFSCSSTTACVTARSVAWPRRSENRNGRNPLRARGLPGPRTSARPPF

SEQ ID NO: 55615 - protein, 430 aa, unidentified
MKFNTQNKKIEAITEKTLVIGIDVGSETHYARTFDYRGIEYSKKPFKFSNTEAGFVTFKEWIRDIKERHEKDKVVPGMEPTGHYWFNLGKFLQDNEMKPVLVNPHHVKKSKELDDNNPTKNDRKDPKVIAGLVKEGRYMIPYLPEGVYADLRTASNMRFQIQSELTRIQNRISRWVNIYFPEYKTVYGRPDAVSGMMILKQAHLPEDILTLGVEGVNQIWRDAKMRAVGKKRAQILIEAARHSIGAKEGSMAARMEIRMLLEDYESRNNHLQEVMTLIEELVKQIPMAEKLMDIKGVGIKTVSGFLAEVGDVSRFSNPKELQKLTGLALVENSSAKHEGQTTISRRGRKRLRYLLFEVAMSLVAKNPKFRELHNYYTTRRLNPLKKMQSLMAIAAKLIRVFYAMLTKGVDYDPKKMVSDIKRPAVYLQAA

SEQ ID NO: 55616 - protein, 454 aa, unidentified
MARKNRGKNRRQQGSLPILKLNAAGVDIGATEIFVAVPADRDPEPVRSFQTFTEDLHRLADWLTSCGIETVAMESTGVYWIPLFQILEARGFEVCLVNARYYQNVPGRRTDVSDCQWLQYLHSVGLLRASFRPDQEVCTLRSFLRHRDNLIQMASTHVQHMQKAMDQMNLQLHHVISDITGLTGLAILDAILAGERDPKVLAQLRDGRIHASEEVIIKSLVGDYRPEHLFTLRQSLEAYRYYQRLIAGCDREIEKQLRRFKDQVDVKVQPLAPPKVRRKKLYSNEPAFDLRQYLYRIFGVDLTAVPGLNVLTAHTLLAEVGPDLAKFRSASAFASWLGLCPDNDVSGGKVLSVRTRRVNNRAALAFRMGANALYRSQSWLGNFFRRMRAKLGAPKAITAAAHKLARIVYHLLTRREPYDATVYAKHEKLWRFRAEAKLRAQARALGLKVVPVAG

SEQ ID NO: 55617 - protein, 346 aa, unidentified
MGKSITDLSSVTTVGLDLAKLIFQVHGVDASGRVIFAKAIKRKNLLAFFASLPLCLVGLEACGSAHHWARELIKLGHDARMMPPAYVKPYVRRQKNDAADAAAICEAVARPSMRFVAVRTAENQATLMRHKAREMLVSQRTQLLNGLRGHLGEIGVIAAQGPRHARELAELIEACDERIPIDVCAALAELVVQLRRLDEAVDRLDNTIAKTAQADATARRLMTIPGIGPITASAIAASVPDVSGFSGPREFAAFLGLTPRQNSSGGKQRLGRISKMGNRYLRKLLVVGAHAVLFHRKPHTDALRTWAKRLIEKKPFKLVAVALANKMARIVFATLKAGASYRSIPA

SEQ ID NO: 55618 - protein, 342 aa, unidentified
MYYIGLDVHKKTISYCVKDASGQVHREGTVRATRNELDGWVRTLPEPRIIAMEATIFTGWIYDHLLPHADQVKVAHPLMLRAIAAAKKKNDRIDAGKIADCLRCDFLPECHMASTEIRDRRRSLRYRHLLVRQMVQMKNRISGLLMETGVSHNKQRLHKVGYFRELISKNEEVPESIRPLLRLSRETIDRCRKTEYALVSSLERDPLLAERIQRLRTVPGVGPITALTWALEIGDVSRFRSIKQAISYCGLCGEEKSSADKVLRTPLSKQRNKHIQHVLVEAAKLAPRQNHELALVHEREKQKGNGNRATLAVARKMVAYLLAVDRRQRDFVPAEGRSTAAA

SEQ ID NO: 55619 - protein, 420 aa, unidentified
MDVLIERCAGIDIGKNEVVACVRTPNPDGRGRQKQTRTFSSFTGALEEMADWFTDEGVTDIAMEATGPYWKPVWYVLEERAFQLRLVNAHHVKILPGRKSDVLDAEWLAELLEHGLLRASFVPPPAIRELRDLTRYRKRLIQATTAEQQRIQKTLEDAGIKLDSVASDVLGASGRAMLDALVAGERDPQVLAELAKGILRRKIPALRQALRGRFRDHHALLVRLCLEHIDHLQAAITELDQRVDALIAEHTSEAGVPFARARDRLTTITGVGKRAAECILAEIGADMSRFPSAGHLASWAGMAPGNNITGGKRGSGKTTDGDKWICDILTQCAWAAARTRDTYLAAQFWRLARRIGKKKAAVAVGHSILVICWHLLTNDCDYDDLGGDYFTRRANPDRQRDRLITQLHTLGYRVTLDPVA

SEQ ID NO: 55620 - protein, 310 aa, unidentified
MATVKRIVIGGIDTHALTDHAAVIDGHGRLLADEQFAADTNGYRRLLAWLRRHGEVVKVGVEGTGSYGAGLATYLADHGVRVVEVDRPDRRARRRRGKSDPIDAEAAARAVLAGTATAVPRGRSGVVESIRALRIARAGAVKARTAAINSLKAILITAPAPLQEMLAGDGTTALVAACTRLRPGDDLTDATAGAKAALAAVAHCVTQLNQEIAAADARLATLAAAAAPATLKLTGIGPDHAGQLLVTVGANPDRLRGEAAFAHLCGVAPIPATSGKTKRHRLHRGGDRDANRALHLAVVVRMRYCPRTRA

SEQ ID NO: 55621 - protein, 405 aa, unidentified
MEVIIERVCGMDVHKDNITACIMTPEGKEIQTFSTKTVFLIQLMDWIKSHGCTHVAMESTGVFWKPIVNLIEAEEMEFLVVNAQHMKAVPGRKTDVKDAEWIAQLLRHGLLKASFIPDRNQRELRELVRYRRSIIEERARQHNRIQKVLEGANIKLGSVVSDIMGVSSKDMLHAIAFGEDDPEKLANLARRSMKKKKDDLILALNGYVNPHQRMMLKTILTHIDFLTEQIKNLDQEVAQRVSVYQENIERLDSIPGIATRMAEQILAEIGTDVEKQFESAARLCSWAALVPGHNESAGKRKSTRGKKGNKYLKSALTEAAHSVGASKNYLGALYRRTAARKGRKRAGIVVAHAMLRISYYLLTRKEMYVDLGEDYFDKQKQASIVRNSVRRLENLGYTVNISEAS

SEQ ID NO: 55622 - protein, 359 aa, unidentified
MTATMTYVGLDVHARSTHAAAIDVASGELRRARFGGGSEEVVAWLQTLPAPLRGCYEAGPTGFALHRAADKAGLLLDVVAPSKTPRAPGDRIKSDRKDAELLARLLLAGQLKPVAVPTPALEAARHLDRAREQVRGDLMRCRHRVSKLLLLHARVYQASAWTKTHRRWLEQQHFDQAATELAYLDALAAVDGLVARKAALDERLSRLAREGEWWPTVARLRCFRGIDTLSAFVLCLEIGDWTRFSRPAKLAGWLGLVPSLDQSGESRRQGAITKTGSGYARRLLVEAAWHYLPRPSVGPALAERRAGQPDHVLQIALRAQRRLHRLYQRLRERGKPGNVTTVAVARELACFLWAAAVAE

SEQ ID NO: 55623 - protein, 424 aa, unidentified
MKITYQTCCGVDVHKSFLVATIVKTTGGIEPSYQKKRFSTFNNSILEFKQWLLDNDCHDVCMESTGKYWVPVFNLLEDEINVVIANPKWVKAVKGNKDDTKDSKWIGDLFRLGLVKGSYIPCKIVRILREYTRYRYKLVSCRSSEKNRYQNALTVCNVALDSVVSDIFGKSSTSIIDYLLEQSGTSINHEEIASKLLRSLKSKEDAVIQSVEGYQMTDAQKYRMRLVRAHMDYITAEINDVDKMIENMISSNPDFENAVQFLCTIPGVKRDSAITIISEIGTDMSQFSSSKRLCCWAGLTPGNNESAGKKKSVRITRAGVYLKPALVQCAHAAVKSDKSPYYKKKYESLVKRRGKKRAIIAIARMILTAIYQMLSTGEQWNPSDLYKIDMPEALVEKQKAKAIKQAKKLLQREGLLPPDEPLAS

SEQ ID NO: 55624 - protein, 349 aa, unidentified
MKQYAGIDVSLEYSSVCVVDADGRIVREAKVLSEPDALTAWFAEHGVAMERIGLEAGPLSQWLYAGMAKTGLAVELIETRHVRAAFKTMPVKTDKKDARGIAQLMRLGWFRPVHCKSLAAQEVRALLTARKLIQGKLHDIEMSIRGILRGFGLKVGPTTRRTYAARICELIEGHPTLEAIAASLLKAREALADEFACFERKLRVIARQDDKARRLMTTPGVGVLVALTFAAAVDAPERFRTSRAVGPHFGLTPKKYQSGETDYSGRISKIGDVGVRTALYEAANVILTRPVKGSDLKTWALAVARRAGPRKARVALARKLAVVLHRMLRDGTNFLPRKAAPAMAGGGRM

SEQ ID NO: 55625 - protein, 339 aa, unidentified
MREFIRIGVDVSKGFFQVHAIEGEGSSAVRRKLSRAKFLSFFAGIAPTRIGIEACGSAHHWARELRALGHEVVLMAPAYVKPYLKRGKTDANDAAAICEAMSRPDMRFVPVKSADQQAMLMLHKTRALMIKQRTMAVNALRGHLSEFGLIAARGIHRIKDLLALAETDERLPEAAREATAMLAAEIQGLDGRIDALEAKIAAASSPMIRHLDEIPAFGPLIASAMVAFNPDPRAFRSGSDFSASLGLTPSQHSSGGKEKLGHITKAGNRYLRTMLVVGCTSVLRVAHKYKGALAEWIVAMRARKPERVVAVALANKLARIAWAMMATGEAFRKELYFKA

SEQ ID NO: 55626 - protein, 309 aa, unidentified
MGIDTGKHWLDVALSDGRSLKRRPNTREGHLALVGELKALGVAKAGIEATGGYEAEACSVLRSADFAVHVFQPQQVRAYAMFRLQRAKSDKIDARIIAQCTAEMKELRTPPDPRLSDLAGHLTMIEQIEEDIARAKIRREHAVGERAITHYKAEIKRLASQRREELKRVEIVIRHHPDLARNLDLVASIEGVGLRTAITIIVRMPEMGSLSREKAASLLGVAPFIRQSGHFEGERHVAGGRARPRTALFACAQAAIKWNPQLAHFYKRLRDNGKHYSCAIMACTRKLAVYINIVLKRQAPWQPECQENV

SEQ ID NO: 55627 - protein, 401 aa, unidentified
MDHIGDRFAGVDWATDAHSVCVVDAAGAVVAEFDAEHTAGGLAGLCGRLAAAGAARVAIERPDGPVVEELLAGGFEVVVVSSRAVKALRVRYGTAGNKCDRGDAYILADCLRTDGHRWAALEPDSGATVALRAHVRARKDLVQTRVATANQLRAHLRVVFPAAVGLFSRIDSPISLRFLERFPSEARARWLSPKRLSAWLRANRYSGRTSTEELHRRLTAAAPGAADDERSTVTAALVAVLETLRAQIKELDNRIAELLDAHPDGAIFASLPRAGTIRAATLLAEIGDCRARFPDPESLAALAGVAPSTRSSGRHRSVTFRWACDKKLRDALCDFAGDSRHANTRAQHRYQTLRAAGKRHPHAERILARSWAHIIWRIWQDHTPYDPTRHNALQQLNPNPG

SEQ ID NO: 55628 - protein, 351 aa, unidentified
MMLIGVDYHPSFQTIAFLIEETGEYEERELNHSDGQAEKFYRDLKQRGICVRVGMEATGHSRWFERLLAELGFELWIGDPAEIKAKRVKKQKFDREDARLLLRLLRENNFPQIWVPDAENRDLRQLLWHRHRLVQMRTRIMNQLHALAMNEGFCWKKKLFSEKGRAPLEKLALAPWAGRRRQGLLELLDRMNPTIEELTAAVEREARKRPEAMRLMTHPGVGPLTALAYVLIIGTPTRFQRGKQIGTYVGMIPCEESSARKQRLGHISKQGNSLLRFLLVEAAQAAARVNPHWRRRYMHLAMRRHKSIAKVAMGRRLAVRLYWMWRNGCEYSPSLEFGSYAGQLGLGNGVK

SEQ ID NO: 55629 - protein, 340 aa, unidentified
MSLYGGIDLHANNSVVVLINEQDEVLYRKRLSNELSTILEQLAPYQTTLKGLVVESTYNWYWLVDGLMEAGYRVHLANPAAIQQYDGLKYTDDHSDARWLAHLLRLGVLPEGYIYPKAARAVRDVLRKRAHLVRQHTANVLSVQNILVRNTGTRFSLKRIRELTKQELEGVLPETAHVLAITSSLAVLDCLSHQIKALEKSVHQRLHHTPAYEQLLTVKGIGPILAQTITLETGDIHRFPTVGHYASYCRCVASTKISNGKRKGQGNVKNGNPYLAWAYMEATQFALRFHPSAQRFYQRKLAKSHNNTPLARKTVAHKLARACYYIMRDLVPFDAMKAFG

SEQ ID NO: 55630 - protein, 339 aa, unidentified
MQVTTIGVDLAKNIFQVHGITESDEVAFNRPLRRAQVLPFFAHLDPCLIGMEACSTSHYWARELTRLGHEVRLIPPMYVKPYVKRGKSDAIDAEAICEAVTRPTMRFVEIKTVEQQALLSLHRARNLMVRQRTQLVNALRSMLAEFGVYIAKGLACAISFAQGVLAGAELELPEIAQDVVHNLCGQLDILHGQVRWYEVRLRLESKRDPRVRLLQTIPGVGPVTASAIAASIGSGHQFKNGREFAAWLGLTPTNRSSGGKERLGRITKMGDQYLRQLLVVGMTSLVRQTKSHPERANKWLMELLERKPARLATVAMANKTARIVWAVLTKNEPYMPRTT

SEQ ID NO: 55631 - protein, 320 aa, unidentified
MMAQDDLVVVGIDVAKDKVDACIRRVELRQTFPNTVQGHRKLVAWLRKYRVGKAVMEASGGYERQWRNVLYNAGIEIRIVDPRRVRNFALSAGRLAKNDPIDAEMIAWFAETFSQAPGQIPDAAREELAALAKARKALVDIKIRLRAQNEHAAPELARKAHARILKNLAAEIDKLEAAISFKIKATPEFAQRAEIIESVPGLAQATSAVLIAGVPELGQVSDEVAAALVGLAPYDDDSGKRRGERHIKGGRRWVRNAIYMPCLGAATQNNPVLKAFYLRLLAKGKEPKVALVACMRKLIIILNTMFARCQKWNPGHHAVA

SEQ ID NO: 55632 - protein, 343 aa, unidentified
MQAVTTVGLDIAKSVFQVHGVDARGNVVVRRQLRRRQVLPFFKKLPSCLIGVEACATSHHWSRQLQALGHTVRLMPPAYVKPYLKRQKNDAADAEAICEGVTRPNMRFVATKTPEQQSCLMLHRTRHLSIRQQTAVINAIRAHLAEFGIVAPVGRNGVEELLDVVADPNDDRLPEVARECLAALGAQLRMLQAQILEFDRRILAWHRSNETSKRLDEIPGVGPALATALVASVADPRAFRSGRDFSAWVGLVPKQNSSGGKEKLGSITKRGDRYLRSLFTAGALAVIRYAKIHGTKHRPWLTALLARRPTKVAAIALANKIARMAWAMMAKGEHYREPVALAA

SEQ ID NO: 55633 - protein, 366 aa, unidentified
MKESITPIKAPVGVDVHKRRCKVVEFDHGEIKVRKSIANTWEEWLELLMELPPEAEIGLEVSTAGYYAMSVLEAAGWRDRAHWVHTAGIDSNRRQKNDRLDAERLARKLAAHHLDPLPEAWFPPPEIRALRLRVRQRCWLALLRTQAKNHMHSLLQMHGLIPPGSDPFGAEGKAWLEQQKLPAPLRESIPQIQQMLKLLGKQLEISEKHLAAVEKQFPELALLRSIPGIGPLLAAVIWSEIGDIARFASAKALANNTGLVASFYDSGDVQVSGPITRQGSRWLRWALVTAANVAIQHRNPFADRYHRLRRKKKPNVAKAAVAHSLARCVYGVLKHGCPYREDRWGRKVGALEQEARGSHRSTKTVP

SEQ ID NO: 55634 - protein, 430 aa, unidentified
MAGHRIARRLRLVAPTSVWIGIDLGQERHAVAVLSPDGCLLARFWMVNALSGFQQLVERARGFSGVCNGAPVVIGMEATNHYWETLVDFLDEHGLAWRLINPFTAKRHREGADLARTKHDRRDAMQLAEMLRIGYFTETKRLPPAYAALRRAFHEHVRLADARAQQQILIRHALEGVFPELRRACRAGVQSEAVRSVLRTGLTPRQIAALSVAEFVERVRAHFHGKRLFCGKLRALYSACQETVGSTLGSEAAMAEIRRCLATFDHLEAQLAEVDAELDAALVLIPISRHLFTMPGLGRITVAGLLAEIGPIEWYTSGKQLVKLAGLHPGQHDSGRRTGTRGRLAKQGRVLLRRVAFMAALSCLVHNPLLRTRHHALTTRAARPLARMVALGAAMNKLLLWVFALLHQQRDWDPLHEWQPTRKEVVAQAS

SEQ ID NO: 55635 - protein, 364 aa, unidentified
MAQDTMIEAAVTGGLDVSDRYTYVCVLNFSGGVVDEGRVPTTPEALRRRFSGHGPMRLVLETGTHSPWISRLLEACGHEVLVANARQLRLIAQSDSKNDRADAETLARVGRLDPALLKPIRHRGAEAQLDLALIRARDALVQARTQLVNHVRGAVKAVGGRLPACSTTSFPMKVGEAIPAGLRPALGPVLDVIAAVGKELGRYERLVEDLATTRYPETAALRQVPGVGALTALSYVLTLEDPARFPKSRAVGSYLGLRPKQRDSGAGAPQLRITKTGDAYLRRLLVGSAHYVLGPFGPDSDLRRWGSALAARGGKNAKKRAVVAVARKLAVLLHRLWVTGAVYEPLRVAEQRPAATPVLTASNC

SEQ ID NO: 55636 - protein, 437 aa, unidentified
MEEVSDEPLYRDRVCGIDIGKAGMAATIRVPSDKDPARRAAETRSFGTTRREVLALADWLRSWQVPAVVMEATGDYWKGPFYRLEAEGFECVLADAKQVRHLPGRPKHDPGDSRWLAACFERGAVTSCFVATGEFRIIRLHTRYRRDLTDERTREKQRAEKLLESAAIKLSSVVTDLHGVTGRDIMDHLIAGERSPKVLAQLARARARRKISELEEALEGAEFFTAEHAALLAAMLARIDRVNAEIARLSEVIETLLEPYEEQLQQAESMPGWGRRAAEDALAETGTDMTRFRTGAHLASWAGRTPLDNSSGKRKGKAKSKKGNRYLGGLLGETAIAAGKTQTREGARYRRLSRRRGKAKALVAVGNTQLKVYHALLSSPGTRYEDLGPDYYERRAEVSRQVRHHVGKLGALGFDVTLCRIPEPGPEPGGTGNSQTA

SEQ ID NO: 55637 - protein, 312 aa, unidentified
MTTASNLALIGCDVGKATIVVFDSRDGRTRDIANRQPDLARFATRLDDTCLVICEATGGHEATLLDVLVRAGIAAHRADARKVKAFIRSFGILGKTDAIDARALAEYGRERHAMLARWQAPDPQRGQLQTLVQTRRDLVAERLACSNRLAAPGAHPVRPYLERLRDCLNAQIKAIEAAIEALIRVHKPLARAAKILRNIAGIGPTTAAALIALMPELGRLNRRQAAALAGLAPHPNQSGASDAYRRTKGGRPEVKRVLFMAALSAAKHNADLAAFYKKLIANGKKPLVALTAVMRKLVVICNAKLRNHPLAI

SEQ ID NO: 55638 - protein, 456 aa, unidentified
MQQYYLGIDVSKGYADFVILDPNKQPIKDNFQLDDTFAGHCQLYDRLHEFYVNHPDSKIYAAVESTGGYENNWFNSLIKFQSSFNLETARLNPLGVHANSKADLKRNVTDKISAQNVAEFLIAHPEKVAYQQQDYLASLRKQWGFIKMLTKQSTQLLNQLESLIYSANPELLVYCRDGMPDWILKLLLRYPTAANLSKAKASSVARIPYISSARAKELVATAKKSVASSTDRVTGQLIAATAKQILHLKKTIASQTKIMAKDCSLPEVDLLKTFPGISELSAIGLILQIQSVERFSSVKKIASFFGLHPVFKISGDGASGFRMSKQGRKGPRQILFMVALTAIRSNPLIREIYQDRVQKGMEKMAAIGLCMHKILRIIYGMLKHNTAFDPEVDRKNREKMAKGHKRVRQDKNRRYQDFDPKAPISRRQKMKRKEWEQSHSDNNTKSGINAPIPQAA

SEQ ID NO: 55639 - protein, 343 aa, unidentified
MEHYVGLDVSLKQTSICVVNQVGSVVREGVVDSEPEAIAAFVRSKAPGAVRIGLETGPTVTWLWTELKQLGLPVICIDARHARAVLKMQINKSDRNDAAGIARIMQTGWFKEVRVKDLDSHSVRALLASRALLVKIKRDLENQIRGLLKNVGLVIGRAKFNVFAVRAEELIENRPELIAVVEPLLKARKAIEQQTDDLDRKVLKLARHDAQVRRFMTVPGVGPITALCFKATIDDPTRFKRSRSVGAYVGLTTRRHASGETDWTGRISKCGDAMLRSYLFEAANVLLTRVPKWSALKAWGMRLAKRNGLRKAKVAVARKLAVILHRMWIDGTEFNWSKKEVAA

SEQ ID NO: 55640 - protein, 465 aa, unidentified
MTKRGQRQASAQRSSKVSRNLTMLNPNAAGIDVGASEHYVAVPAERDEQPVRCFGAFTEDLHRLAQWLRQCGVRTVAMESTGVYWIPLYQILEDYGFVVKLVNARHVKHVPGRKSDVQDCQWLQQLESFGLLSGSFRPEAKICILRSYMRQRQMLISNASRHIQQMQKALTQMNLKLHQVISDLSGQTGMRIVRAILQGERDRLKLAALKDPHIKSSLSTIAKSLEGDYRAEHLFALRQAVELYDYHQQKIAECDQEILKEMQSLESRAAPGSVPPPPLKRKGRSRHNLIPYDGRAELYRIMGVDLTRIDGLNEGTVQLILSELGLDVCKKWPTEGQFSSWLGLCPNNEISGGKVLRRGTRKVVNRVANALRMCAESLLNSKSALGAYARRMRAKRGSQIAIGATANKLARLIYRTLTYGQEYTDIGQEKYETKYRENVIKSLQKRARHLGFQLIDLHPVSVRVP

SEQ ID NO: 55641 - protein, 349 aa, unidentified
MEIDTIGIDLGKTVFHLVGLNVAGEVVVRRKFSRLQLLRFTANLRVRLVGMEACGGSHFLGRSLREQGHEVRLMPAQYVKPYVKTNKNDYIDAEAIAEAAGRANMRFVPIKSDDQLDMQSLHRVRDRWVARRTSVINQIRGLLLERGITFRKGRRHAEAGLPAILEDADNRLSGLLRMLLAQLQGELRQLQSQIDEADTLIAKRASEHEPCRRLMAIPGIGPLTATAVAASIGNGSEFRKGRSFAAWLGLVPKQQSTGGRQKLLSISKRGNHYLRRLFVSGARAVLQCRDKQSPGLSAWLGQLASRVHTNVAAVALANKMARVAWAVLAKSEIYRPPLAVIATEALVCN

SEQ ID NO: 55642 - protein, 376 aa, unidentified
MSKIIRIGIDTSKSIFVLHGVDAAEQPVLRRKLRRSQMHEFFRKLEPTKIGMEACGGAHYWARELKALGHEVVLLPPQYVKAYVKRNKNDAADAEAICEAMSRPTMRFVPMKTSEQQAALMLAGTRDGLIGRRTQLSNTIRGYAAEFGLTAAKGLDKIEPLLARIALSADLPKLAKELFAAYDREYAQLERQFLDMEARLMAWHKHNELSRRLVEIPSIGPIGATLMAMKVTNPHAFRCGRDFAAWIGLTPKDHSTAGKTRLGVISRAGDEELRSVLVAGATAVIQQAQKGRGYSPPWLVDLLKRKPAKLVAVALANKMARVAWKLMVSGERYNPACIAAPATPTREGAALRCVGLRAAPPRSASRLGAVVARTKA

SEQ ID NO: 55643 - protein, 410 aa, unidentified
MEVMYPHCAGLDVHKKTITATVSHHFEGAPKAITNTRTFGTFTDELMIMRDWLVAESVTHVAMEATGSYWKPVFNVLEDTFVTWVVNPATIKAFPGRKTDVKDSQWIAELLQHGLIRPSFIPNREQRELRELVRYRKSLIEERAREVTRVQKVLEGANIKLGSVLSDVLGVSGRAMLSALVQGETDPRKLAEKADPRVRSSCETLARALNGVISDHQRMLLGAQLDHITYLDRKIAILDSEVAERTRPFAEMRAKLETIPGVKTRVIDVVFAAIGPNVDPFPNAAAASKWAGVAPGNKTSGGKRLSGRSQPGNSMLRSALVEAAWAASRAKGSYFQAQYRRLVVRLGKKKALLAVAHSIMVVIWVIMKRGTPYVDLGADYFTKHDEEAVARRAVNRLKALGYEVTLNKPA

SEQ ID NO: 55644 - protein, 316 aa, unidentified
MESQRPFVGIDVSVQRLDVGTMPASKTFSQPYTEDGIASLVLHLKPLNPQIVLLEATGGYEIPVAYALYEAGLPVVIINPKAVRQFAKAVGILAKTDKLDAQVLALYAQKIQPPVRPLKDQEQLELTNLMTRRRQLQGMIVMEENRRRTCTAKVRGNVEKSLAHLRQLLKDLDRDIQDFIRRSPLWHEKAAILQKVIGIGPVVSSELLAHLPELGFIDRKKVAALVGVAPMNRDSGQWRGQRRIQGGRPAVRRALYMAALVASRHNPVIRDFYQRLRQAGKPPKVALTACMRKLLVILNAMLKNHAHCHQPLPLAA

SEQ ID NO: 55645 - protein, 528 aa, unidentified
MACFTNGTMKGMMPEKTYTSESLRSTTLDDGTRIVTSPVTDIKRPVCAGIDVHKSVLMAAICKTDPKTLSAVFYVRQFTSTNSDIRRMAGWMKSYGVQDVCMESTGKYWIPVYDILEQCGLRPVLTHPKYVKQAKGRKTDFRDAIHIANLFRMDLAVASFIPPSDIRDLRELCRYRLKLTYMRTSEKNRYQNSMTISKVRLDSVFSDPFGRSASSIMSYLISTAPDEVSDDEILRRVDKRVKASNEDILDSIHGYEFIGVQRDKLQVIRKHLDDIDECIGMIDGKLEYYRCKYAEIVRHLVTMIGITVDSALYILGEIGADMSVWRDSASLASWAGLAPASNESAGKKKSTKVGKGGHYLKPLLVQCALAATKSTKKCPYFRYKYQTLKKRRGHKKAIIAIARKMLVAIYHMIRDNADFSPVDYEDIMGQNNKPKGLDLKNVIAFLGEHGADENTIRMVEAQCSGNGTEKSSGNTSGESYQKRKQSKPSTETSANSEPKTVKRKKAAASSTTKAPDPSKQSVPVTATA

SEQ ID NO: 55646 - protein, 339 aa, unidentified
MGLYAAFDLHSTNSQLGIVNDAGKRVHRKKLLNEPEAILRDLEPYRTEIMGIAVESTYNWYWLVDLLQAAGYRMHLANPAAIQQYSGLKHVDDRHDAFWLAEMLRLGILPEGHICQKEDRAVRDLLRKRGHLVRLRTSLIISLQNTITRNCGIQVDVNDVKILKEDRISPLLKGNEDLELSGSVSKESIDFLTKQIRKVEKTVEKRVALRAAYKNLLTIPGIGKILGLTIMLETGEIGRFAGVGNYASYCRKVNTKWLSNGKSKGKGNKKNGNKYLAWAFSEASEMARRFDAQARAYYERKLRQTNRMVSHAALAHKLARAAYFIMRDGVEFQPRRIFG

SEQ ID NO: 55647 - protein, 366 aa, unidentified
MPEYILTACDLHDKTLVLKIARGLEPPQQRTFYNDPDGRTALVAELRRRAAQAGGAQVIFAYEASGQGFGLYDQLTQEGFTCYVLAPTRIERSAKHRRAKNDRQDALRLLELLRGHVLAGNPLPAVWIPDRQTRDDRELLRAHLDAGEKLTRLKVQVQSLLKRNQVRHPPEVAKGWTSGHRQWLQQLTQATESSLGPGGRTVLKSLLAQMEALEHERDELKKAVAKLARTRRYARLAKALEALPGVGLMTAMVYLTEMGDLSRFRNRRQVAAYLGLVPSSNESGQQDDRKGHITRQGPRRLRQVLCQAFWAQQRADPASRATYQRQVRRNPKHKKIAVVAGMRRLGVILWHKGLAADLPPGRKAAG

SEQ ID NO: 55648 - protein, 408 aa, unidentified
MDVIYKSCCGIDVHKDKLVACLKIKGKKDVIKEFSGQTEDIRLMANWLLDNKCEKVAMESTASYWKPLVNIFDITNLDYTVINAREYKNLPGRKTDVKDSEWIADLLQHGMLKDSYIPSREQRELREATRYRKSLVQERTRGLNRLQKMLEGANIKITTQLSNVLGVTSRNLIEYVLENEEPLTMEKANELVVTRIHAKLEDVVRAMDGIVTPFQKIMMKEVIKHIDELTKRISEMDNLIDEYMKEYEKNKKKLEKIPGIGKRSSEIILAEIGQDMNRFPTAGHISSWSGVCPGNNESAGKRRSGKTRKGNKILKSALVECAQSAVQHKSSFFYAQYQRISMRRGKKRALLAVAHTMLIAIYYMIKEDKEYIDLGADFYNKFNKEKKANAYMKKLKELGYDVQIAQAS

SEQ ID NO: 55649 - protein, 315 aa, unidentified
MGQTTAIVGCDVSKLWVDAHVVHASGRRTSRLSNEPESLKRWACALPEASQVGMESTGSYHLNLAQALIEAGHTVYVINPRWVHAYARSIGQRGKTDRSDAALIARYVQSEAAHLHAFELPSDEQVRLRYLLLRRQELVKLRSATRQSFGEEAADVITGFNRLLRKVEREVHQLVEAQAVWREYAQQLRQIPGVGPIVSAHLVQVLTRIPFARADAFIAHTGTDPRANDSGQKRGRRRLSHHGDSALRRMLFLAAMAAIKQPEWRKLYERYRHRGLPSTGALVACARKLARIAWHMFKHPDADYDPGKVAGPIAA

SEQ ID NO: 55650 - protein, 349 aa, unidentified
MLIIGLDYHPGFQQIAFVDTDTGELQERRLQHREEAEKFYRDLAAQGMKVRVGMEASGHARWFERLLSELQFELWIGHAAEIRTKRVGKQKTDRQDAQLILRLMLEDRFRQIWVPSWENRDLRQLLWHRHRMVQARTRIMNQLQAVALNEGLRCKKRLWREAGRKQLESFLLAPWSSRRRQDLLELLDRLNPTIAELTQAIEQEVEKCPDAQRLRTHPGVGSLTALAFVLIMGRADRFQCGKQIACYLGLVPLEESSGERRRLGHITKQGNSLLRFLLVEAAQVTVRSDPEWRSKYFHLAMRRGRKIAKVAMARRLAVRLYWMWRKGWDYEQLKKFGSHAGQPGTGDGV

SEQ ID NO: 55651 - protein, 370 aa, unidentified
MGHLSEAFVGIDTSKLRNAVAIAEGGRGGEVRYLGEFPATEAAMRKLVAKLAAKYRRLTFCYEAGPTGYGLYRLIKSLGHECLVVAPSLIPKKPGERVKTNRRDGLNLAKLLRAGELTAVWVPDDRHEAMRDLSRARLAAHKDLRGKRQQIISMMLRLGRIYPGKKTWGPAHMDWLMRQKLEHREQRIAFEELMEAVRQESERVARLEQAIREAVPEWSLAEVVTALQAARGIDLIAAVTLLAETGDLSRFRNPRELMGYLGIVPSERSTGDTVKRGAITKAGNGRARRILVEAAWAYRHPPRVGREKQAKVAAAPKSVREIAWKAQVRLCGRYRSLSRKGKHPAIVVTAIARELSAFIWAINREVMARR

SEQ ID NO: 55652 - protein, 403 aa, unidentified
MNAVGIDVSKGKSMVTILRPFGEIVSSPFEIKHTSSDIHSLIKLIHSIEGESRVVMEHTGRYYEALAHQLSAADLFVSAVNPKLVKDFNNDSLRKIKSDKADSVKIARYALDKWQSLEPYSITDELRAQLKVMNRQFHFYVKQKTAMKNNLIGLIDQTYPNANTYFNSPTRSDGSQKWVDFVSTYWHVDCIRKMSLNAFVEHYQNWCKRKKYAFNKSKAEEIYTKTKELVPVFPKNEITKHIIRQAIDQLNSTSVTVETIRTLMNETASKLPEYSIVMQFKGIGPSLGPLRKGRIGDVTRFTHKGALTAFAGVDPGVNESGSYAQKSVPTSKRGSSNLRKTLFQVMDVLIKTMPQDDPVYQFMDRKRTQGKPYYVYMTAGANKFLRIYYGRVKEYLSVLPDPS

SEQ ID NO: 55653 - protein, 409 aa, unidentified
MIAAVIERCAGIDVGKKRVAACVMTGDAAAEPQWELQEFGTTVAELRRLRAWVVACGCTHAAVESTGVYWQPVFNHLEDALTVVLAQPQQVKARKGHKTDRQDAWWLAHLLRHAMIRPSFIPPPAVRELRDLTRLRRGVLEQATQERNRVEKVLEKANVKLSSVLSDLFGVSGQRMLEALLEGRASAAEIADLARHTARKKIPALVAALEQHQLNDHHRLLIRLHVDHLAFLENEIHTIDEAIAKQIRDHGWHPHQELLTTIPGVGPTSAAAILAEVGPDMSVFGSEKKISAWAGACPGNAVSAGVSGSTRRPQGNAHLKTTLSMCAIAASHTTAGALRDQFNRIAPRGRAKAAAAVAHTILVHAFHVLQSQTPYREPQRLLSHRRKARLIRHHIRRLGKLGVAVKPAG

SEQ ID NO: 55654 - protein, 356 aa, unidentified
MTKTKTLSFEGETIYCGVDVHKKNWKVNIRNSNMELEHFSQNADPDCLAAHVQKRYPGAKIKVAYEAGFSGFWACRKLQQAGIDCMVINAADVPTSDKQKKQKNDTVDARKIAKELSKNNLDAVYVPTIAEQNDRSLVRVREQLVEDQTRCKNRIRHLLHFNGLKVTDGIDKEKYWTLAFIKALEELDCADNSLRITLNLLLAELKDIRKKVLEATTAVRKLAATNVYKEDIELLRSICGIGPTNAMVIRTELGNISRFKCFDHLCSYVGFIPSTDDSGDNKATRGITHRCNNRLRTALIESSWMLISKDPAMLMKYSAYCKRMDKNKAIIRIGKHLLSRIKYVLTKREKYEPCVV

SEQ ID NO: 55655 - protein, 398 aa, unidentified
MGRVEYAVFLGLDVGKEEHHACGLAPDGQRVHDKPLPQSEARIRELLSSLAQRGPVQVVVDQPASIGALAVSVARSLDVDVAYLPGLAMRRIADLHPGNAKTDARDAYVIAEAARSMPHALRRVDTGDEALADLEVIVGFDDDLAGEVTRISNRIRGLLTQVHPALERVLGPKVQHPAVIELLTRFGGPQGLAKASRRQLIAATKTRAPRSYERLIEAVGTALNEQTVTVPGTRAAELVLPQLAITLTGLLAQRAAAAKQIEEMLDAHPLSRVLTSMPGIGVRTGARILLEVGDGTAFPTSGHLAAYAGLAPVTRRSGSSIRGEHPSRAGNKQLKRAFFLAAFASLHDPTSRAYYDRKRAAGKKHNAALICLARRRVDVLHAMLKHGTLYETRPTPAA

SEQ ID NO: 55656 - protein, 413 aa, unidentified
MDLLYASCAGLDVHKETVVACVRRLDAKGKVQQQTRTFGTMTGALLELADWLDEQGVTHVALESTGVYWKPIWNLLEGQFEILLVNAHHIKQVPGRKTDVKDAEWIAQLLQHGLLRGSFVPDTPQRELRELTRQRRQLIQARAAVANRIQKVLEDANIKLGSVATDVLGVSGRAMLEAIVAGQEDPEVLAELARGKLRPKIPQLRQALTGRVSEHHRFMLRLLLDDLAQREKLIGRLTERITEVMPAPFVEAVQRLATIPGIDERAAENILAEIGVDMGQFPSAGHLASWTGMCSGNRESAGKRQSGKTTKGNRWLRATLVQVAWAASHTKGTYLSAQYRRLAGRRGKKRALVALGHTILVIIYHLLRDKTTYRELGPDYFDHLDRERLSRALVRRLEALGHKVTLQPQQPAA

SEQ ID NO: 55657 - protein, 367 aa, unidentified
MMGWMAPLRHLSAKLLSDRISSEWEPSMGEVTTIGLDLAKHVFQVHGVDAEGATVLRKQLRRAQVLAFFSRLPPCLVGLEACATAHYWARELRALGHEVRLMPAQYVKAYVKRNKHDAADAEAICEAVVRPTMRFVPVKTADQQAAVLLHRGRERLVRQRTGLVNALRGHLAEFGVIAPQGLRNVGKLIDIVRDEGDARLPDLARQVLQVLAAQIEQLAAAVAAIEKQLMAWHKSNPVSQRLASVPGIGPIIATAIAATVVEPSGFRSGREFAAWLGLVPRQNSTGGKHRLGGISKRGNQYLRRLLINGASANLLRSKATNADPWVIGLRRRRPPLVVAVALANKTARIAWAVMHRHENYQRVAAAA

SEQ ID NO: 55658 - protein, 421 aa, unidentified
MTGGKETTRIGSLDIHKRSVVCHVLDVFFDENENRFVAESRALKKTSRSLVGLSDLAEFLKEFNVKQVVMESSGPYGLKVYYFLESEGFDVYMVPAQDNKPRRGKKTDVEDAKRLARNFVANSIRAYKLPSDPKIRSLRIYVRSRKKLVDKLVAVKNMIIKTFDEACIDIKSVFSNFGKGFLAFLEAYLKGESLDAIIRKWPRFGKKREKLEEILRTRLDEASLITLSSYLRLMKVLMKEISRLDAHIESLLAEFSKEVGLLLTIPGVGLKSAAVIISEIGDIKRFASPKKLASYAGLVPTVYQSGGKTVYGKLRRECNRRLRWILYEVAINAVKVSPWLRSFYERLILRGKARKQALIAVARKIAVGVWHILMRDVPWKERLQRSICLPKKRRVSRVAVREALRILREAGYIVIKARGAL

SEQ ID NO: 55659 - protein, 344 aa, unidentified
MRTVCGLDVHKDSVYLCILSSTGEIYEKKFGVLTTELIEMRDLMLSHHVLEVGMESTSVYWVPIWRVLEPHFKLKLINPYFIKQLPGHKSDVKDAQWIAECMLKDLVNGSFVPPERIQQLRHYDRRIYDLDDEIIRKLAKLDAAVQRCNIRLSNYVSNTDSVSYKAVIDKICEGVTDPNVLVEEIHGRIINHHGKETIIASLTGSITECDIDIMQQLKAEIDLAEQHKQECMDKMLAICENEYSTQLHNLQTIPGVKMRAATSLIAEIGTDMSHFETANHLASWSGLKPRNDQSNKTIKSRRITYGNRYLRRTIIQCSWGASAPRIVFLADSPTTRHKSERKTE

SEQ ID NO: 55660 - protein, 411 aa, unidentified
MQVIYERCCGLDVHKRTITACVLKRLGSEWQKEIRQWGTMTKDLLALSDWLVHEGCTHVAMESTGVYWKPVYNILEGQFELLVVNAQHLKAVPGRKTDVRDAEWIAELLAHGLLRGSFVPPAGVRELRELTRYRSSLVRDRARTINRLQKVLEAANIKLANVVSDIDGVSARLMLEALVAGERDTQQLASLAKGRLKEKREQLVEALSGRLKPHQSFLIAEQLAQIDYFEGAIERLSHQIEERLRPFEQEIAWLDTIPGVNRRTAEVLWAETGGDMSRFPTARHLASWAGMCPGNNESAGKRRSGRTRKGSPWLRHCLVEAAHGAAHTKNKYLSSQYHRIGARRGKKKAQVAVGHSILVIAYHLLTRKQPYSDLGANYFDERDRQAVTKRCVNRLQKLGFKVSLEKLQMAA

SEQ ID NO: 55661 - protein, 342 aa, unidentified
MEYYVGLDVSLKQTSICVVDHSGSVVREGVVDSDPETISVYVRSKAPDAVRIGLETGPTSTWLWTELKRLGLPVICIDARHAKAVLKMQINKSDRNDAIGIARIMQTGWFKEVHVKDIDSHSVRALLASRALLVKVKRDLENHVRGLLKNLGLVIGRAKFNVFATRAEELIEGRPELIAAIRPLLEARNAVGQQVGELDRKVMKLARHDAQVRRFMTAPGVGPITALAFKATIDDPTRFARSRSVGAYVGLTSRRHASGEVDWTGRISKCGDAMLRSYLFEAAGVLLTRVPKWSAVKAWGVRLAKRNGLRKAKVAVARKLAVILHRMWIDGTEFNWSKQIAA

SEQ ID NO: 55662 - protein, 344 aa, unidentified
MNYKLISIDLAKTVFQVAAFNPDNTIAFNRKINRPALLDTLRQCEPTLVVMEACYSANYWGRAIEKLGHTVKLIPARMVKAMLVGNKNDANDAVAIGETASRPKVSLLRPKTVEQQDIQSLLRIRERLVENRTANCNQLRGFLAEYGLIVAKTRRQLMLAIPLILEDADNELSTVARGFIQRLYEFQLYLNEQIDQVAQDILALAQAMPQYPLLLTIPGVGPIVASTLLASINEVNDFKNGRQLAAWLGLTPSQYSSGTTNRLGKITKRGNQTLRRLLIHGARTVMNWCDKKDDSLSQWLQRLKQRQHVCKVTVALANKMARMVFVVMSRRQVFDMNKACKVVA

SEQ ID NO: 55663 - protein, 479 aa, unidentified
MNAKTTRNKNQVTNSFSVINTLSAEERQSRIDELLKTMQAKTWHDLETTGKFDKNAKLSFISEDMLIVGCDIGSETHYLRAIDIRGRELSKKPFSFTNNEEGFEAAKAWMVELAAVNGKKQIVLGLEPTGHYWFCIATWLISNGISVVQVNPYAVKQTKEVEDNSQLKDDRKDPKVIANLVMNGNYGMPYLPEGIYADLRSLSLLRSQLTENRIRCANRMHRLMKIHFPEYKDAFGRVDGSFALEVLKIAPFPKDIVALGEDGIREIWHNAKLRGRGYSRAAELFRYASTSVGRNEGAEYDREAVRWFVEEMISLDEKLTTIEAAINAKCMEIPHAENILEISGLGQNIVAGIISSMGDIDRFDDVKEIQKLSGLNLVACSSGKHNGETKISHRGRKELRTWLFQGAKSVVAHAEEFQLIHEYYTTRPKNPLKKMQSLIVIACKLLRIIYAILKKGVTYDPQKMLDDIKRFENAEIVAA

SEQ ID NO: 55664 - protein, 356 aa, unidentified
MGEGSWVGLDVHARSVVAGVIDQGTGEVRSLRVPAGSGETVAWLQTLPPPVRVVYEVGPTGYRLARACAEAGISCVVAAPSRIRAAADRVKTDRRDAERLARLLRLGEITPVRVPEPEEEAARDLVRAREDARGDLMRARHRLSKLLLRHGLVYDATAWTRTHDAWLRRQRFDGGPLAVVFDECYGRMLDAKSRRDALDTAIGELAATQPYADVVNRLVCLRGVSTLTAFALTVELGDWHRFRPESLGPFLGLTPSEYSSGERRRQGAITKAGNSHVRRLLIEAAWHQRSPSRRSVTLERRRDGKQLTVRAQADRSARRLHARWHALEARGKPRSIVVVAVARELAGHCWALATME

SEQ ID NO: 55665 - protein, 403 aa, unidentified
MNSVGIDISKGRSTVAVMRPFGEVVISPFEVRHTDSELSELARQLKSLDGETRVVMEATGNYHASVAKLLHDAGLYVSVVNAKLVHVYGNNDLRRVKTDRKDAVKLANYGLDRWLTLPRYVPEEDTRLLLKNCYRQYRQYSKVQTVLKNNLISLLDTVFPNVNRLFSSPIRGDGSEKWVDFVAEFWHCRCVSEKSQKAFTSKYQRWCRKHGYNFSEEKAHTIHAEASGYIGVMPKSETTKLLVEQAVAQLRATSAALTALKHEMLALAAQLPEYPVVMGMFGVGPTLGPQLIAEIGDVRRFYSKKALVAYAGLDAPPNDSGDVTGKHKSMSKIGASSLRRTLFLVMSVYLQNAPLDEPIFRFMDKKRAEGKPYRVYMMASANKFLRIYYATVKAYLESLEHTA

SEQ ID NO: 55666 - protein, 308 aa, unidentified
MTCIGIGIDVSKATLDISVHRHKKPLRTTNDPAGWKQAIAWMQPFEPTQVVLEATGGYEQDALDAFYSAGLPIIRVNPRQARDFAKAMGQLAKTDHLDARMLAHMASVIELHRYQPRTDQAQELHAYHQRRQQLVQMISAEKQRRRLTRNAVLLEGLERHITQMESDRAELDKIIAGLLQGTMQAQVASTIKGMGPVAVSTLVCEMGELGYLNRKAIARLYGMAPLSKDSGQFSGKRTTWAGRRAPRSAMYMACLSAVRYDPVLKPFYQRLVANGKPKKVALVAAARKLVTMLNARMREALKAAAHLA

SEQ ID NO: 55667 - protein, 397 aa, unidentified
MISVGIDVSKEKSTVCIMKPGGELIQNPREYEHTETDLCVLVRIIKGFGEETRVVMEATGVYHLPVAEYLIEHDIFVSVINPYVMKQYARQGIRRVKTDRKDSITIAQYGIEKWYKLEQYSMTDDVYRQLKLLSRQYRFHMSEHVQYLQNLNHLMDYTMPGLRKLFNSLNQESGKDKLSDFALRFWHCENITKMSEGKYIEVYNRWAERKGYRKSNKKAAVIYQTAKNSIPTMPASPTTKMLIIQAVECLKRVDEALTMILAQMRELAKSLDEYEVVREMEGVGEILAVRLIADIGDVRRFRNSKALVAYAGVDPPPHESGQFIAPNRRISKRGSPVLRKTGYEVIRSIMSHKPEYSSVYKFILKKRAEGKPTKVSNIAGMNKFLRIYYARVMEIYS

SEQ ID NO: 55668 - protein, 303 aa, unidentified
MKQQTSAATETKIKGRNIIDFTGKTIYVGIDVHEKDYQVAKVFDGICLGNHRMAASHQMLIDHLNSRYPGATFKCVYESCAWGFTLQRALSRAGIECIVVHAADVSSSDKEKKRKTDKVDALKLARNLASGDLTGIHVPDEDLQKERNLIRFRKKLVGDLNRSKNRLKSLLKYQGIKIPEHLGKKNNWSYNFMNWVEQEANKDVLLKDTLLLMLEEIKFLRQLLLKTERALRKLMKERHNEKATLLMTAPGIGRTIAMQFVLEVGDIKRFHSFDALNDLIGFCPDTDSSGDMQRDRGITSQAA

SEQ ID NO: 55669 - protein, 321 aa, unidentified
MSNTDVLGVDISKATFDVALLANDKVKTKKFNNKNKGFLELIEWLKNKNITTLHVCMEATGNYGDALATYLFELGYTVSVVNPAQIKGFGKSELSRNKTDRADAQLIARFCRAMAPVSWTPKPQHIRELQAWVRRLEALQNMYYQENNRFGVVDVIVKASIKKIMGQLEKEIADIKKTIREHIGAHPDLQAKSALLATIPGVGEATISQILAFVGNVEAFKNAKQLAAFVGLNPTQRQSGTSVRGRTHLSKMGDSNLRKALYLPAMTAKKYNPIIKKFCDNLANGGKPKMLIIGAAMRKLIHIIYGVLKSQKPFDANIAMV

SEQ ID NO: 55670 - protein, 414 aa, unidentified
MTQTLEIAAGLDLHKKFIIATILTLAGGKMQERFERTHEGLLKLKDWILNNKVQALGCESTSDYAVQIYDMLNQYIPVIVGNARDIKAFTHKKTDKVDSEFIALLTLKGMIRPSRIMPKCIRDFRSLTRLRHRLVDQRTTTKNYIHSILDSELFLLSDAFTDIFGKAGRIVLNGITNGFTVDEILQCIPKNVKGKEVQLRKIMEHTLSYYALKRMEANLLILYAYDKQIENLTQQALDYAYTHHPREMKILKSVPGIGEIAAITILAEIGDIKDFPTPEQFASWLGIVPRVYQSADKLHTGSITKRGSVHARWILIQVAHAAGRSRNNSLKSFFQRKEPVIGKGKAVVALARKIVVVIWHLLTNDEVYDDGIYKKSPQPKHVSVKIPSIVTMEEILRLIREAAIIIKKPDPGVI

SEQ ID NO: 55671 - protein, 350 aa, unidentified
MEIVIGVDPHKATNVVAAIDEEGELVGQETFPANRKGLQALQRWAKRFPKRRWAVEGASGIGRPLAQKLLAAGERVVDVPPKLSSRVRVLSSGNARKNDLLDATFIALAALRNDRLVSVQPEDGPEGHAEVLRLLTERREDLVVERTRGLNRLHVLLRDLLCDAVRKQLSADAAAQLLRRARPKHPAGRVRRHLASELVRDVRALDRRIAELDERIAVEVEASGTTLTKIFGVGPILAAKIVGIVGNVARFPSKAHFASYAGVAPIEASSGEVVRHRLSLAGNRRLNQVMHMIAVCQARSDSTRGGAYHRKKLAEGKSRREAMRCLKRRVSDAVYGALVVDSGRAPLASA

SEQ ID NO: 55672 - protein, 343 aa, unidentified
MELYIGLDVSLKLTSICVVNQSGAIVQEGVVDSDPEAIAAFVRSKAPGVVRIGLETGPTTTWLWTELRRLGLPVICIDARHAKAVLKMQINKSDRNDAAGIARIMQTGWFKEVRVKDLDSHAVKALLVSRALLVKIKRDLENQVRGLLKNLGLVIGRATFNVFVTRAEELIKGRSELVAAVGPLLKARKAIEQQLEDLDRKVLMLARHDAQVRRFMTAPGVGPITALCFKATIDDPARFRRSRSVGAYVGLTTRRHASGELDWSGRISKCGDAMLRMYLFEAAGVLLTRVPKWSALKAWGTRLTKRIGLRKAKVAVARKLAVILHRMWIDGTEFNWSNKEVAV

SEQ ID NO: 55673 - protein, 450 aa, unidentified
MREPEEIEDEAYERVLERVCAIDVGKASGKVCTRVPHPSRPGQRRTRVWDVEATTNAIVELGEYLAGEGIEKVTLESTSDYWRIWFYLLEAAGLDVQLVNARDVKNAPGRPKTDKLDSVWQAKMTERGMLRPSFVPPVEIRQLRDYTRMRVDLTRERTRYWQRLEKLLEDSLIKVSAVASTLDTKSVRDMLEALIAGERDPKVLAGLARGRMKAKRAALVEALTGRFDDHHAELTRMLLDQIDQLNVQIGRLTTRIEELIAAIPAAQGADADGTTGPSAGRGADAAVLPAIDRLDQITGIGREGAQAIIAEIGLDMSRFPTAGHLVSWAKLSPRTIQSGATSRSGRTGKGNPYLKGVLGEAAAAAARTDTFLGERYRRIVKRRGKLKALVAVARSILVIIWQLLADPTARYQDLGSDYYASRTNKDRRARSHIRQLEALGFTVTLTQVAA

SEQ ID NO: 55674 - protein, 389 aa, unidentified
MRFAGVDIASLTHVIAIMTEIGKVLVKPTSFGEDAAGYEKAFALLGPSTDVLVVMEATGHYGRNFMAALWVRGYQLALINPIRTRLFAHEDLRRAKNDPIDALGLARFGIQKGPLLPTPPFDEATDQLREFVYLLERLTQDFGDRVRQLHRLIDLGFPEFTRHVPNPSAQRATAILAAYPSAQAFSDSCLRELATLRYDGSHHVGEPLASALIETAKASVGRHHGPAYHLETRYICQDIDRLRSELRQIQQEIERRLAENPVAVLLATIDGLGAIAISRIIAAVGDPARFRSGAALASYVGAVPGTDRSGKGHRRSDPLCPLGNARLRRTLFMTTLGAVRRNPWLGAYYARLRARGKPPKLALLAAMRKLLMAIYSVAKHRKPFVPQLP

SEQ ID NO: 55675 - protein, 343 aa, unidentified
MPHYVGLDVSQKTTAICVVDAQGRRLWRGVCATDPGPISARISQHAGVDAKVGIETGSMTPWLVHGLRAAGLDVACLDARRVKAALQMQLNKTDENDAEGLAQIMRTGWYRAVYVKSLDAHRARALLGARAQLVGMTTRLSNMIRGVLKTFGLLPGAGRGLRFDRKVEALLEGAPEIALVVRPLLATWRQLREQIAVFDKAVLQQVRADPICRLLMTVPGIGALSSLMYVSTVENPSRFSRSRAVGAHLGLTPRRYQSGETDRSGHISRCGGGLARTLMYEAAVVILHRVKRPLHLKDWAEAIERRSGSGKARVALARKLSVILHSVWRSGEPFRWAIPAIAA

SEQ ID NO: 55676 - protein, 354 aa, unidentified
MSQTANTAIAVIGIDIGKNSFHVVGHDARGAIVLRQKWSRGQVEARLANIPPCLIGMEACVGAHHLSRKLASLGHDARLMPAKYVRPYSKGQKNDFNDADAIAEAVQRPTMKFVATKTAEQLDLQALHRVRERLVSQRTGIINQIRAFMLERGIAVRQGIGFLRTELPTILATRTDALSPRMLRVIEELAGDWRRLDQRIDGLSGEIEALARQDQACSRLMTVPGIGPIISSAMVAAIGTGDVFSKGRDFGAWLGLVPKQISTGDRTILGKISRRGNRYLRVLFVQAAWVVLVRIKNWERYGLKSWIEAAKKRLHHNVLAIALANKLARIAWAVLAKGRAFELTRTDDAGVRPA

SEQ ID NO: 55677 - protein, 370 aa, unidentified
MIVIGADTHKRTHALAAVDAGTGRVRGKREIEAEEPGHLAAVRWARGLDEERVWAIEDCRAVSRRLEQALLAAGERVVRVAPHRMGASRKGERRPGKSDEIDALAIARAVVADGIEKFPAAHLDERAMEIRLLLDHRGDLVADRTRTVNRLRWHLLQLCPELERAIKPGAFNQARVLDRVDRRLRKLAAGARARVAREQVAHLRQLNRQIDQLKRELHELVRAHRPQLLAETGCGPLVAAILIGRTAGAEGFRTDASFALQSGTAPIPCSSGQRTQHRLNRGGDRQLNHALHIIAITRAHHDPDTRAYLERKETEGKTKKGALRCLKRHLARRFHRLLSPPAQARPQPHDASRSDTTTVGAAPMPMICLT

SEQ ID NO: 55678 - protein, 408 aa, unidentified
MRVIGMDIHRTFAEAVMIDGDRLIRLGRINMSRDHLAAFAAKLTSEDHIVVEATGNAHAVAEAVAPFVGRVIIANPRQVHLIAKARIKTDVIDATVLARLYASGFLPEVWVPDQTTLRLRRQVTRRNQIVRQRVRLKTMVQAILHAHLVPQCPHADIFGPKGRAWLLAQLLPDDEDAAIERHIREYDRVTDDLRVVERELARDALGSAETKRLMTIPGIDMVVAVGLLAAIGPIDRFASPGRLVAFLGLNPSVHQSGNSPARHGRITKQGPCHARTMLVEAAWQAVRGPGPLRAFYERVRGRRGTHVAAVAVARKITVIVWHLLTRGEDYAWVRPALHAKKLRDLELRAGRPARRGQRGAGYAYNLTHSRREERQRGERAEAAYKRLTEGWTKRGRPVSADVSMEERQ

SEQ ID NO: 55679 - protein, 337 aa, unidentified
MNNNAVGLDISKNVFHLYSQTDDGKVVKKKLKRGELLAYIANMPVSLIGMEACGGAHYWAREFSKLGHEVVLLNARFVKGFVVGNKNDFNDAEAIFTAVTRPNKRVVAVKNETQQDIQMLHRLRQQRIDQRTALVNQVRGLLSERGITLPKGINQVRKQLPWILEDAENGLTSLSRELFAEQYEQLKALDGDIKAQDSRINRLCQQNALSRRFLEVPGIGPIIATIMASDIGDGKGYTKSRDYAASLGVVPRQHSSGDKQVLLGISKRGNAYLRTLLIHGARSVIKCCHDKSDPLSRWLQALVERRGFNKAAVALANKNARILWAMARQDQPYQAAA

SEQ ID NO: 55680 - protein, 342 aa, unidentified
MAQVSVLGIDLAKQLFHVVGMDDAGTVVWRKRFTRRALMPFIALLPPVIIGMEACGGAHYWARRFREHGHIVKLMAPQFVKPYVKSNKHDMADAEAIGEAVTRPTMRFVPIKELAQQDLQALHRVRERLVKARTALINEIRGLLNEYGIILPQGVTKFRQGLLMTLEREQAKLTELSREVFQQLYAEWLALEERLAHYNERIEAICQAHPVCQRLLTIPGIGPLTATALIAAVNDATHFKNGRQFAAWLGLVPRQHSTGGKPRLLGISKRGDRYLRKLLVHGARATLRWTKLKHDRRSRWVRALMERRGTNRAVVALANKNARIVWVLLTTDQVYTPEPTAA

SEQ ID NO: 55681 - protein, 495 aa, unidentified
MEKDLSGQRLVPPVAGLHSEDCLPVHRFTANAQAVSPLVHTGDSSHRAAYGLKDSNTHARGCGYALGARDTLQDPSLSKFHRKEVLPMKLFVGIDVSSLTLDVCFLDSDDHILKQCSLPNDLPGASSIKELILEYHQKVSYESILVGMESTSVYSFHPAAFLNEDPDLKALDVKVVVQNPKAIARFKGLFDEDKTDKVDAYRIADFLRFDRFNLSLVKEEKYLALQRLTRSRYQLIQQMTECKQHFLENLYYKCNTLTRDVDTSVFGAAMMDLLSESLSLDDIAAMPIEALAEVLQQKGRGRFADPTKLAKAINKAARDSYRLGKVMQDSVDVVLGSYALMIRTIKEQVKSLDSAIERLLEAIPESQCLLSIPGIGKVYTAGILAEIGQIERFEDQSKLAKYAGLYWKRKQSGNYESQRTSLTRTGNHYLRYYLVEAANSVQRHEPVYREFYLKKYHEVPKHQHKRALVLTARKLVRMVDALLRNRQLYAPERSV

SEQ ID NO: 55682 - protein, 461 aa, unidentified
MPLSINVVNMMMKDNNNIKVCGIDPHKRKCQAVILSIDQDHHTVAAKTELRFDNNLTGALELLKLLRDADCNRVVIENSNNFAYALYEFLREAKVHVELVGPSRVPAKHKKSDRVDAEWLALMYSRSMVSLDYVPTKEIRQLRDLLRLRSLLVRARTMLKNNVHANLTRGTFDISKIVSDAFGKRGFEILEMLSLASVGVHDYDDALLRLPKAVIEKYKDAVNNSFIAQINGVTLGVALGIIKALNEGIKELEDTIAQHILEHEELKRMVELIMTIPGIGLIVATTIVAEVGDFSRFGSKKELAAWAGMIPDTEESNGKQKSHGITKRGSPHIRRVLCEAANVIALHGKPVGLLRFYKRILHRKGRKVAIVALGHKLLRVIYALIVTEKRYEDEEVPKNDRRGRRTIPEVDKGELKRIHTKKLKMLQRRGATGKAVMKKYREIGALRAHISTGMSEEGEAT

SEQ ID NO: 55683 - protein, 347 aa, unidentified
MNFYNHQHKHYCGIDLHARSLYVCIQDSTGAILVHKECAAKPDRLLAIIAPFLDDLVIGVECMHCWYWVADFCEQQGIAFILGHALYMRAIHGGKAKNDRIDSMKITQLMRGGNFPLAYVYPKEMRATRDLLRRRTNLVRHGANLKAHVSNTTSQYNLPPHQVNLKNVSARNQLRQAFPDPEVQQMINLDMAVLECYHRELSKTEWHLEQQAKKHQPISFNLLRTIPGIGRVLALTILYEIGDIKRFDTVQQFASYSRLVKCKAESAGKSFGTQGNKIGNGHLKWAFSEAAVLYLRGNPKAQRYLQRLQKRMSKAKALSALAHKLGRATFFMLKHKTVFDEQRFLTG

SEQ ID NO: 55684 - protein, 412 aa, unidentified
MDVVYQRCAGIDIGKRTAKVCVRVQGRGSQPTVSTVTSWSSMMPQILKLRAKLVNEGVQRVVMESTSDYWRPFFYVLAEELDVILVRASDVKAIPGRKSDVCDAEWLADLAAHGLVRASFVPPQQQRQLRDLTRARSRLLADRAREVQRLEKELEDACIKLAAVVTDLQGVSARLMLQALIEARDDPAAMADLAIGRMRTKIDQLTEALTGRFNDHHRFMVTFRLKRIDAATADLAELDARIDALIVDAGFDPARDLLLSIPGLGPHSADELLAEIGPDMSVFDAPEQLAAWAGVAPGSHESAGKRKNAPARRGNRYVKRALGIAAKSAARKKTGFLAARFRRLAARRGYQKALVATEHSIIIAIWHMLSTGEYYHDLGGDHYHRLIPARIIRRKIAELEAAGYTVTHEVAA

SEQ ID NO: 55685 - protein, 334 aa, unidentified
MDKQAVAGVEVSADVLVVALDNGQLRACEFPNNALGHQQMLRFLHKHATQVRACMESTGLYGLDAALVLHRQPGIEIMVANPRSVRHFGCAMMQRSKTDPIDAKLLAEYARRMPFQPWQPPSLKGRQLCALSRAIHQLTEMNTMQKNRLHAASVTETTPKIVLRELQRSLTHQQRSIQRLTREALQLIASDAELQKRFELLLSFPGIAQTSALQLLGELVLLSPDFNVRQWVAYAGLDPRQYSSGKSVEKKVRISKVGNRHLRRALFMPALVAVRRDPQFRAYYRYLLAHGKLKMVALVAAMRKLLHGIYGVFQTREPFNPHKLFTLPRTGETI

SEQ ID NO: 55686 - protein, 338 aa, unidentified
MSIVMGLDQHRAQITADWLDTDSGEVRRGRVAPADRAGVRRFLERFRGQELEVALEATTGWRFVVEELRRIGARVHLAEPAETAGLRGPKKRAKGDRADARHLRELLMVKRLPESWIPPDHILDLRARVRLRHTLSEQRSEWQQRIQATLYHHGIPRRRDLLTRENRQWLGSVLLPDTAREQVTVALAMIDALDRQMAPVEKELRAYARRQVGCRALLAHYGIGELTAVTILAELGDCTRFSSSRHAVRYAGMDITVHQSDQHRAPGHLSRQGPPALRWALYEAAQVARRTGSPDRDYYEQAAERLGGNRACLSVARKLLKRSYHTLRELGQEALAPA

SEQ ID NO: 55687 - protein, 349 aa, unidentified
MEHYAGIDVSLELSSVCVVDAKGKIVKEAKISSDPVALVTFFRGLGIAIERIGLEAGPLSQWLHARLTQAGFEVVLLETRHVKAALSAMTVKTDRKDARGIAQLIRMGWFRSVHCKSVGSQEVRALLVGRKLLLGKLLDVEFSIRGILRGFGLKMGVVTRRNFEARVRELCAGHSMLEQICAAMLAARSALQTEYTKLHKAMLTIVRKDEVCRRLMTTPGVGPLVAITFKTGIDDPSRIGKSKAVGALFGLTPKKYQSGETDVTGGITRVGDEMVRTALYEAANILLSRVTRFSALKRWGMDIARRRGTKRAKVALARKIGVILHRMWVDSTNFRWTKEAPTAPRLIQA

SEQ ID NO: 55688 - protein, 370 aa, unidentified
MKFVGIDLHTNRFTCCYLFDNSTEKQTETFGLDTEGLFSFYSTIGKDTYVLVEATINTFAFVTLFKDLVAEVIVANTYQLKSVGIPGKKTDKLDAAKLAEKLKAQIVSGVQQIVPVTVPPKEIRALRALFATYRTLRKEIGRTKNRIHSLLKENLYPFTKEYIFGKKARKEIRNISDDYLLSFQINLLMDTLEHLEEAFERLVVEIKKAGSLFMPQIEILTSMTGISVVTAIAVIADVIDAGRFRNSKHFASYLRSVPRVESSNDKTIIKSTTKAGRKLAITLLSQSLNHFRDGNGKLSRWVEKVGKYKKKGIVRMALCRRVITEIYQMLKKREYHYFYNPVLHGKKMAEYKKFLQKDTKYFSKEFSISA

SEQ ID NO: 55689 - protein, 335 aa, unidentified
MSQLYENTIGIDVSKATLDCAIAQGGVIKETFRIANDKCAIQQLVRKLEKQNIDKKKTIFCFENTGLYNHNLAYELSKHQANIWIENALAIKRSSGLTRGKNDKIDAQRISLYASRFQDKAIIWKPKRTVILKLESLFRARSMAIKNMTQIEKQIKITQEAESAAVGMGNAFLRPIITKIKQQLKKIERSIKALYTSDQKLKAQVAQATSVPGIGPQIALALICNTNEFQEKSTRKKLACHAGVAPFAHVSGTSVRGYNGVSHYANKKLKQILHMGALSAITRTGELQEYDQRKVAEGKAKMLVINNVRNKMIARPCACIRNGSTCEKNHVRKVA

SEQ ID NO: 55690 - protein, 345 aa, unidentified
MQSMYYLGLDVHKKTISYCVKDGSGNVHAEGAIPATRWDLDRWMKMLPQPWTAAMEATIFTGWIYDHLKPHAAALKVAHPLMLRAIAAAKKKNDRIDANKIADCLRCDFLPECYMAATEIRERRRTLRYRNLLVHQAVQLKNKISGLLMEAGVSYNKQKLHKVGYFKELLATNPDINEGLRPLLRLCRETLVRLQKTESALVRSLQRDSLLAERVQRLMTIPAVGPITALTWVLEVGDVKRFSSIKKAISYCGLCGAEKSSADTVKRTPISKQRNKHLQSVLVEAAKMAPRLSPELALIYDREKQKGNANRASLAVARKLVAYLVAIDRSQRDFLVVEKENCAAA

SEQ ID NO: 55691 - protein, 390 aa, unidentified
MPLDHHSEEPTAIRTNLGAIFVSLELSRSTWLITSLSPGGGEKMSKHSVSAGDIAALLSRFSELKQKAFARTGQSFPIIVIQEAGLDGFWIHRVLQSEGIESYVVDAASIATSRRRRRAKTDRIDGEALVRALLAYKRGEPRVCAMVRAPTPEDEDRRRLCRERKTLTVERVQHVNRIKGLLFSQGVSGYEPLRRNRRQRLDGLKTGDGRPLPPHLKGQIGRELDRLELLLGQIKAVEAERDALLTPATETEGMPAPQAMLIDLRGIGAEFAAVVWSEGLCRSFANRRQVAAYGGLAPTPWQSGSVAREQGVSKAGNPRLRTTMIQLAWLWLRHQPNSALAQWFKERVKRNGGRLRKTTIVALARKLLVALWKYVTAGVVVEGAVMKAVS

SEQ ID NO: 55692 - protein, 318 aa, unidentified
MRIKECDLQARQQTLAMLDTGTGEVVNRTLPHEGESVREFYSTLPGPVRVGIEATGSMKWFLQLMQELGIDCQVGHPATIRAAEPRRQKHDQRDAELLLKLLVENRFPSIWQPSKELLDLRGLLLHRHQWVRLRTRIQNALQAIALANGLRRGSSLWSQSGQDAIASLPLATHTAQRRSELQAMYAGFEAEIEQLKQQVLQQAGPRPTAGLLMTHPGVGPITARATDVFLGDPKRFSNGKALASYIGIIPREHSSGGRQRLGGLSKQGNPLLRLLWCEAAAHAVRRDPELRRFYRRKLVQKGLGKARVAAARKLGPGN

SEQ ID NO: 55693 - protein, 406 aa, unidentified
MELLTLYKRVVGLDVHQAKITACAISEDEAGNVSVELAEFGGFKRDRRAMAEWISSRDPEMVVMESTGIYWKSPYAALEKVGIVATVVNARHVKTVPGRKTDWSDAQWLATLARSGLLRASFVPPAKLRELRHVARQRQQLVGILSGEKNRVHKLLSDGGIRLSVVVSDIHGVAGRAMVKALIEGQPPAEVLMLAGNRLKADRQELLDALDGELTAEHRFVLRELMAHVEELEQRIDRFDLHLLKELEPYRTTLALMQTIPGIDAIGSALLLVEIGDNMDAFGSVDRLASWVGICLGNNESAGKRKSGRIRKGNPWVRRLLCQFAHAASRTQCAFKSKFEALRLRRGHKRAIVAIAHKILKTVFLLIRRQTYYRDSAVDYEAMSVARNAPRWLRMLKKHGFIPAAA

SEQ ID NO: 55694 - protein, 344 aa, unidentified
MISMHFIGLDIHKKTISYCVKDVSGKVLSEGTVPATRIQLNEWMKTLPAPWTVAMEATMFTGWIYDHLLPHAAAVKVAHPLMLRAIAAAKKKNDRLDASKICDCLRCDFLPECHMVSTEVRERRRTLRYRKLLVRQNVQLRNKVSQMLMESGVVYNKQKLHKVGYFKELMETNQDIGRALRPLLTICRETIVRIGKTESALIRSLRRDPLLQARVERLMTIPAVGPITALTWVLEVDDVARFHSVKQAVSYCGLCGAERSSAETIKRMPISKQRNKHLQSVLIEAAKLGPRLSPDLALIYDTEKQKGHANRASIAVARKLVAYLLAVDRSGREFVVARERKAAA

SEQ ID NO: 55695 - protein, 465 aa, unidentified
MSMIERTAETQDVRQQTVRSMKGLDVIHPGAAGLDLHKEVIVACAPMTAGETQHPVRKFGTYTSALLELATWLKQHGVTTVAMEATGVFWLPVIGILRSKGLEVLLVNAREVRSVKGRPKTDKLDCEWIRRLHACGLLRGSFIPDAETEMLKSLWRHRLNMEEEDARAIQRMQKAFQIMNIRLDIAVTDIVGETGIRIIEAILAGERDPGKLAKLRDPRVAKSEREIADALTGNFKDEQLFIIRENLAHHRFLLERIRETDARMGAQMETMKKKSNAADLPAATKPDRSRHGETLSRERLYELLGVDLTQIEGVGVLTVSSFLVNAGRDMSPWMTENHFASWLGLSPNVKQSAGKTRSGATRKTASALAHSFRMAVMTIGRLDSWLGAYYRRLKGRIGAPKAITATARKLAIIFYRAVKAGGTVKRLTAEAYEQANRDRILKALRQRAAHFGFDLTMKSNLPVEA

SEQ ID NO: 55696 - protein, 459 aa, unidentified
MPSKGKRKKAQSQKVVRLESLKQINLNAAGLDIGSAAIWACVPEDRDDQPVRQFATFTVDLKALADWLETCGIESVAMESTGVYWIPIYEILEARGFQVYLVNARHIKNVPGKKTDVLDCQWVQQLHTYGLLRASFRPEEEMCALRAYIRHRDNLIRHRSSHVQHMHKALHLMNVQLTNVISDITGLTGMLIIRAIVAGQHNPVQLARHRNPRCVSSEEEIAKALTGNYRPEHLFALKQALQLYDFYSQQIRDCDGEIEQKYAAIKPVVNIEAKPLPPAKRRKRSKNEPDFDLRSHLYQICGVDLTGIDGLEALTVQQIITETGVDMSRWPTVKHFCSWLTLAPHNDISGGKVLKSRTMKSKNRAAQAFRLAAQSVGKSKSALGAFYRRMRAKHGAPKAITATAHKLARILYHMLKYRQAYADPGQDYYEQQYRNRVIKNLQRRAKQLGMKLVPQPSVS

SEQ ID NO: 55697 - protein, 360 aa, unidentified
MTSQPESRHIVGGVDTHKLTHHGAVLDAGTGKLLADSEFPATRAGYRQLLSWMSSHGTVLKVGLEGTGSYGAGLQRHLQAQGITVIEVSRPNRQARRARGKSDPIDAINAARAVLSEEAIAAPKLRDGYVEAVRQIRATRRSAVKARKAALHQIHGLLWCAPEELREKLSSYDRAALVARCARLRVPAPGKLDDPVVTARRMLRRLAKRIQMLDEEITEANKELDAILASQTPNLLAVNGVGTEAAGQILTTAGENIDRLKSEASLARLCGVAPIPASTGNTTRHRLHRGGDRDANSAIYLIVVNRLRWHEPTKRYLERRTQEGKAKKEIIRCLKRAVVRELYRALQADLNRKPEALDAA

SEQ ID NO: 55698 - protein, 419 aa, unidentified
MSKSLFCGCDVALENNTIWLMLDDGSQPTKLFNVDNNQLGAEVLVERIYSIAKEHCISDILIGTEATSMYDWHLLEYLAESKLALEFNLKLYRFNAKWIKNFKKSLAPKGKTDPIDSFAIAERLRIGRLPKEYVPDTKYQPLRKLTRFRFHLQQQIAREKDFFLANLFLKASAYSRVSPFASTFSATSLAVINDFFSVDELAAMPIEELTEFILEKGKAHFSKPGEIVDNLKRVARESYRLKPELAPTVNLILASTFNNIRCYKDQVKLVDSAIAENLKAFKHTLDSIPGIGPVYAAGILAEIGDVNRFPNDSALAQFAGLTWPKYQSGKFQAEETRMSHTGNQYLRYYLVEAANSVKRYDATYKAFYEKKYAEATKHHHKRALVLTARKLIRLVWTLLTRQVLYQPGYCSFENLSKIG

SEQ ID NO: 55699 - protein, 345 aa, unidentified
MSNNIHFSCICGIDIAKKVMQVFKVTSDGVVTNTSVSRKDFLEHFRNIPPALIGMEACATSQHWGRELQGLGHTVKLLSPKAVKPYVKGLKNDRNDAEGIYRALIMGVREVSIKSTAVRDLSLLQTMRAKRQRDKVATINHIRGILAECGLVMGKSVRAFLSNAGTLIARLTESETTSQLVISELEKLLKEVKEIVSRIEELESSIKKIASENKNYDLFRSAPGVGPITAAMMVVLLCNPTVFKNGRDFAAYLGLAPMSFGSGGRNQVTGIPSKYRCHNEARSLLVQCAHSITRLKYKSDWVASILSRKPKKVAIIAIANKLARQLWVMAKKGDKFEKRLVLAAV

SEQ ID NO: 55700 - protein, 391 aa, unidentified
MIFVGIDVAKDKHDCFILNSEGTVLADVFTIANNRIGFETLLSRIQSCSQGESKIKVGLEATGHYSYNLLGFLLDSGLTTYVINPLHTNLYRKSLSLRRTKTDRIDARTIAMMLMSDVDLKSYSNTAYHNEELKSLTRYRFDKVKERAKLKSSVARLVNILFPELEKLVSSLHIAVVYALLSNYPGASYIANANTEELAETLCTASKGRYTKSKTAEIQVAAGVSIGSKMPAKSMELKHTIALIRELDKEISEVESAIDKITSQMDSPIFTIPGIGRHMGAMILAEVGDFSNFASADKLLAYAGLSPSTYQSGQLQNCYAHMEKRGSRYLRYALFNATKYVCLWCPTFSAYLEKKRSEGKHYNVAISHAAKKLVRLIFAMQRSGKAFLADY

SEQ ID NO: 55701 - protein, 414 aa, unidentified
MFAVGVDVSNGRSMVAVLQSKSKVILKPFEVPHTPEALGKLVDKLNSLDGETRVIMEHTGRYYESIAMFLNSAGFFVSALNPLLFKDYQEGISVHPVKTDKADAVRIAKFGLDKWDLLRQYEPMDTIRYQLKTLNTQFHLASKSKTAFTNNLIALLEQNYPGIRKHFSGPARPDGSQKWVDYVGTFWHLDCVRKLSLNAFTVRYLKFCRKHEYNFSEDKAAELYHHAQSTIALVPKSDISKLMVKEAVSQLNSVSRTLETYRAEMNRLASQLPEYQTVMEMYGVGPSMGPQLMAEIGDIRRFPQKNSIIAFAGIDPKKEDSGDKVSTTGKSTKRGSPYLRKTLFVIMDILIQLKPADDPVYQFLDKKRSEGKPYYVYMTAGGTKFLRIYYGKVRDCLIEKGLWDKPMIESGNPD

SEQ ID NO: 55702 - protein, 500 aa, unidentified
MKTKRSKGKIRGRHKRLSVTISEPGQKLEILRPDAAGIDCGAEEHYIAVPPDRVSAGEPTVRCFSAFTEGLDAAVDWLRDCRVTTVAMESTGVYWIPLHQKLEAAGIEVYLVNARHVRHVPGRKTDVKDSQWLRQLHRFGLLNASFRPQDIICRLRSLHRHRDNLVSSSASEIQHMQKALQQMNLHLHHVVSDITGLTGLRIIDAILSGQRDPEQLVKLRDKRVYKSTPRQMQAALVGDYRAEHLFVLSQSLQAYRFYQTRIEECDREIEPLLEKLAQQVEAASAKLKLDPLKPSSAKDGARTPEPLSESKSAPGLKAKRKHKPRANEPKIDLAGLLERICGIDLTRVVGLNVLNVLLIVSEIGVDMSKWRSAKAFCSWLGLCPGNKISGGKVLDSRTRQVVNRVADALRLAAQSAARTETCLGIFYRRKLAHLGAPKATTATARKLACLIYHLLKYKQPYQEPDPAIYQLRLKKSALTKLQRQAIALGYTLLPTTPPPA

SEQ ID NO: 55703 - protein, 346 aa, unidentified
MLYVGLDLSRKRLDFDALLPDGTRLERGAVAPDADGLASLVRRLGDANEPVLATIESMSGARFVHDQLELAGWDVRIADAYKAKGLAPLACKTDKIDSWVLAELGRLSLVPEIWLADPAVRAERERARFRLHLVKHRTALKNRVHATLIAHGVPNPSSDLFGKRGRELLARLSLPEPWQQTTEASLELIDFLDEQITAIERELRALGSEHRYIPLLLTCPGIGWILAFTIASELGDISRFPTALKFVGYTGLCPKVDQSGERDWRGPLRKNGPSYLRWALVEAAHTAVRHPCYQPTLVRQLARHGRKRGRKIAVLDVARKLAEAIWYMLNRNQPFAPAGAKQVLTA

SEQ ID NO: 55704 - protein, 370 aa, unidentified
MKPKLSDYELATIAYHRDTLGVNPVAVDVASRVMQVCYFDSDKKLLKNFQLTRSKFFEFVDNAPEPCLFGIEACGSCNYLSRYFESKGHQCRIIPASKVKAFLKLDKNDKIDASGIFKAMLSSVESIPAKSLENQLIMNLFTIRDQLIKQHTQCINAAHGILYEHGIVAGGAGVETSAKITLGFTDAQESFEHDPMASAHFSVIKNAVFNILDNLKEQIDTINKYILKYGSSNKTCLNLATIPGVGIQTAVALNTALGDPKRFHSARAFSAYVGVAPIITGSGGKITVMGIRKSGIRSLKKSLYMGAMVYLTFTMKNGTQSSWVKDRLKTKKKKVIICAIMNRLARIAYAVAKNGEVFDETKCNLIKNLR

SEQ ID NO: 55705 - protein, 363 aa, unidentified
MTEPRTQTPAAVVIGVDAHKRTHTLVAVNHLGHPLGQVTVEATDSGHAKALRWAQTTFGPEPALWAIEDVRMVSRRLERFLMDAGLTVVRVPTQVMATTRASSRIHGKSDPIDATAVAVAALRYPDLPRAFHDQLSYELKLLMDHRETLIKQRSAAINRLRWRVHQLDPQYDCGPNLKADVHRARLRDWLIQTQSGVLAEIAVTDVDDISRLTRLIRPLERDIETRVAAAAPNLLAVPGCGSFGAARLVAETANVTRFRTDAQFAMHIGVAPIPWWSSNDPHVHHGRTGNRRLNAAIHVIALSQIRRGGVGRPYFDKHIAAGDTTRGALRRLKRRLARVVFNALRKDYALRTALQPDAAVPKL

SEQ ID NO: 55706 - protein, 408 aa, unidentified
MDAIIERCAGLDVHQRTVVACILYGPLDRKPKQLVRTFGTTTRELLSLLDWLTEYEVTHVAMESSGVYWKPVWNILEGDFTLILANAQRIKNVPGRKTDVNDAVWIAQLLRCGLIESSMVPPKDIRRLRDYTRYRRKLLSAATSEKNRIHKVLQDANIKLTTFMSDVFGVSGRALLQALVKGKVLQPHQVQSMVHTHLKKKVPALVEALNGRVDQHHRKMIQYHLNHLDFVEKQIAEIEYEIEQLLIPYREEMGLLNSIPGIDKNAAAAILAETGVDMSKFPTEPRIASWGGVCPGNHESAGKKKSTRTRKSNRTLKAILCQVAHVNARSQNRISAFFHRIRKRRGALKAVVATAHLILRIIYHILKNRIPYHELGPGYDKAQKPSVHHWVQKIKQQGYEVFVTPING

SEQ ID NO: 55707 - protein, 406 aa, unidentified
MADIFALDVSMGKSYCVWYRGKHCLKEFSLVHTRAGFNALRDMIKKAQKPIIYFEATGIYSRVIEHFCETNGLRFCRLNPLELHLKSESLRRVKTDQKDAHRIALTVQENTFRLTVPWKKDYLQLHELSRFYNQLNADWNYRLNHLHTALEQVFPELKQLFVNRTSKLALNIVELFPHPALVRPYSRVKLKNILMASTDKRISKMKAYKYADRLIDLAQKSYPAVSGDAIQVDEVRYYARQLIALTRKKEEVIKRMESIAQRLPEYILYCSFPGIGKQTAAQLMGELGDISRFDNANQLNAFVGIDIRRYQSGTYLGQDHINKRGNPIARKLLYFTVGNMIRQQHANSNHIVDYYYRLKEKRPHPKLNKVAMVACMNKTLKCLLSMIKHHEKYHYRYTDSIVPVKA

SEQ ID NO: 55708 - protein, 430 aa, unidentified
MKSNTQNAKIEAITEKTLVLGIDVGSETHYARAFDYRGIEYSKKPFKFSNTEAGFVTFKEWILDLKERHEKDKVVPGMEPTGHYWFNLGKFLQDNEMKPVLVNPHHVKKSKELDDNNPTKNDRKDPKVIAGLVREGRYMIPYLPEGVYADLRTASNIRFQLQAELTRIQNRISRWFNIYFPEYKTVYGKPDAKSGMLILKAAPLPEDILTLGIDGVNQIWRDAKLRAVGKARAKTLIEAAEHSVGSKEGAVSARMEIRMLLEDYESRNTRLQEVMVLIEELVRKIPMAEKLLEIKGVGIRTVSGFLAEVGDISRFNNPKELQKLAGLALVENSSGKHKGETTISRRGRKRLRYLLFEVAMSLVSKNQEFRELHNYYTTRRLNPLKKMQSLMAIAAKLIRVFYAMLTKGVDYDPKKMVSDIKRPAVYLQAA

SEQ ID NO: 55709 - protein, 370 aa, unidentified
MQHSSTLFVGLDVHKEAISVAYVAEELGAEVVSVGSIGTRQSDIDKLIRKLKGKASKLVFVYEAGPCGYWLYRYLTKQKLTCRVVAPSLIPKKAGDRVKTDRRDAVQLARLMRSGDLTAVYVPAIEDEAIRDLSRARQDTMPDLKAAKYRLKAFLLRQDIRYEGRASWSPAHLRWLAEVVCPTPAQQIVFQEYVRTVSEHQDRLQRLESELQTAVKTWRWGPVVEAIQALRGVQFTVALTLIAELGDLTRFDNPRQLMSYLGLTPSEYSSGPMRRLGGITKAGNTHARRALIEGAWAYRYPAKVSRHLQLRLEKVPKAIQHISWKAQVRLCKRYRQLTARGKHANKVVVAIAREMAAFVWAIARVVQEAH

SEQ ID NO: 55710 - protein, 337 aa, unidentified
MKYSGIDLHSNNSVVVVSDEADRVLVRRRVPNDAAAILALLAAHRDELVGVVVESTYNWYWLVDALQAAGYRVHLANTAAIKRYEGLKYSGDEDDAAYLAQLLRLGILPRGYICPPAARAVRDLARKRMQLVRSRTAQVLSVENMLSRQTGAGMRSYAVQRLTAPAVEAFGFQPDVGRAMCANVAVIKTLNREIDKLEQRLHQCVRLRPEFGLLTSVPGIGQTLATLIMLEVGTIERFAAVGNFASYARCVDSARISNGKKKGQGNVKNGNAYLAWAFVEAANFARRYCAEARRFYERKKARTNGVVATKALAHKLARACYHMLKEQQPFDVKRCFA

SEQ ID NO: 55711 - protein, 330 aa, unidentified
MNYSHFVGLDVGKKSFDACLVSLDKELSHHTFPNTPGGIEELLHRVKQHGVEVETALFCAENMGSYVIDLCLSSYQFHFPLALECPLTIKRSIGLQRGKNDRIDARRIARYACLHYRKLRLYELPDKDLVRLRNWMVIRDNLVKQKVSSRKLLELPRETSGLADLVTAMTFLEKQLSLVKEKISYVEQEMEKIISSNIALLTNYQLLTSIKGIGPINAIVLLCVTGNFHRFSDPRKFVCYCGVAPFEHSSGTSIRGKTKTSNLANREVKVYLTRAAITAISWDPQIKAYYKRKTGEGKHKASVINAVRAKIIARCFAVIKRKTPFVTLRA

SEQ ID NO: 55712 - protein, 338 aa, unidentified
MSVELIAIDLAKNVYQLCGVNRAGKSVFNKQVSRTKFVQTIAQYPGVTVAMEACCNSNYIGRLLLRMGYNVNIIPPNHVKPFVKGNKNDRNDAFAIAEAARRPDMHFVQPRSIEQTDMSIAHKIRERRIAERTALVNQVRGLLMEYGVTVPLGIHKLRADLPLILGDAENELSIIARQQFQLLLEEWQALDILISEQDTLIKRQAHADKKATRLMQIKGIAELTSTAIVSHMGASHNYKNGRHYASCLGVVPQEYSSGGKQKVGGITKRGNKYIRRLLVQCAWSIIRRIESATDNLSLWAKKVIERRGKQIASLAIANKLARIVWAMSHYKQDFNYGN

SEQ ID NO: 55713 - protein, 446 aa, unidentified
MSRKPEEIDAEDGGEVVERAAAIDVAKASGKVCTRVPHPHIAGRRVTKVWDVDATTGAIMALAEELTRQGIERVVVESTSDYWRPFVYLLEAHGLLVWLVNARDVKQVPGRPKTDKLDTVWLCKLNERGMLRPSFIPPVEIRELRDYTRLRADLVAERTRHKQRVEKLLEDSLIKLSTVATDIFGKSGRAMLDALIAGERDPDALAELALGKLRSKRPALREALTGRFDQHHAELIAMLLDQVDTLTVKIDTITLRVEQLLTDIPAAAAPPRPGPDTGDSATAPLSAVARLDEITGIGMMAAQTIIAEVGLDMNQFPTAGHLISWAKLSPRTIQSGTRSRTAKTGKGNPYLKRVLGEAAASAARTDTFLGERYRRLVKRRGKLKALVGVARSILVIVWHLLADPTARFHDLGVDFYTRTVNTQRRTRNLVHQLEVLGHHVTLTPAA

SEQ ID NO: 55714 - protein, 368 aa, unidentified
MKKQTKHTPSVVLTSPAAVSGFTLGLDLGDRSHYVCVLDATGQMIHEGTLVNDRVALALLLTKYPAATVALEAGTHSPWISRYLTSLGATVIVANPRKLHAISRHERKCDRRDAVMLARLARADVALLHPLQHGSAQAQHDLLGLKLRDSLVRTRVNLINTVRFTLKSLGHTVSNPSSESFHKNMVTAVPADCLPVIKPVLAVLALLTEKIKLLERDLVRRSKKDYPVTQRLQQIAGVGPLTALCFVLKIGEPTRFGRSRDVGPYLGLCPGRDQSGGTDKQLRISKCGDGLLRRLLVSAAHYILGPFGPACALRAYGQHLVGTSVREKKRAIVAVARKLAVLLVSLWKHGTDYEPRVPVAPALVLVPA

SEQ ID NO: 55715 - protein, 334 aa, unidentified
MKNTIYDHYIAIDWAATNMAIARMTKKLNRIQAFDVPADIAELKFYLLRLNGTKILALEETNTSQWLYTELKDHVDRIYICDPYRNRLLSEGPKTDKIDATKLVRLLKAGLMKEVYHSTDKFIYLRRLVSGYEDLIKAGVRLQNQRYSLLRVCGKTGYEDEVKLSSNDEQFVLDCLDRQIEAYKTEKKGYEKEFKKLSRKHPEIKHQTSIPGIGYINAVKIVARVVTPHRFPEKGHYLSYVGLIKHEKMSGGKSYGKKNPRYCRMMKSVYKSGVLAATRGNNPINDYYEYLIKEKGYPEYNARNMTCRKLAIISLGVFKNGKKYQPWRNHVKDN

SEQ ID NO: 55716 - protein, 397 aa, unidentified
MIAVGVDVSKSKSTVAILNGDGSIRAKPFDVHHVADELQALVDYIKRMSEPPTILMEPTSHYHYPLLKVFQKADLPVCLINPYQMKKYGDTELRKAKTDKRDALRIAQYALEKSYSLVPYTPQDQKYEDLRFLSRQYNQRISTLTVAKIQLLSLLDETMPGITAILPLKSRDPDNCVLLRFIKRFRSFDVIRKMGKTRFLDSYQVLVKKTRDRFAGAKGLAIYELVLNSVTTNGENPLSAMTQEQCVDLVSISQKAADEINLQMRIIAETIPEYKVLRSMAGVGDRLGPIILGEIGDIRRFHSGKALNAYAGNDAPPYQSGQFESRNRHISKRGNPALRKACFEVMQALKLTKPQDDPVYLFLLKKEQEGKPYNVAKMAAVNKFLRIYYARAMESYK

SEQ ID NO: 55717 - protein, 341 aa, unidentified
MKHTVVGVDVAKRVFQLHWVESESGEIVSIQLKRARFLEHFANRAPCVVGMEACGGSQHWARQLRTLGHEVTLLSARMVKPFVGGNKNDAADARAIWTAMQQPGIKTVAVKSEAQQAVLALHRMRQQLVKFRTAQINGLRGLLIEYGEAMPQGRAGVKRELPQALGRLEQRLPTVLIDTLREQFSRITELDEQIAQIEQRLRQWHARDEASQRIAAIPGIGLLTATAAVATMGEAKVFKSGRQFAAWIGLVPRQSGTGGRVRLLGISKRGDTYLRTLLIHAARAALLNSKSPPVWATNLAQRRPTNVAVVALANKMATHDLGRNSSRASVPARVRESAPLG

SEQ ID NO: 55718 - protein, 361 aa, unidentified
MGRKKKQRLCVGVDLHKTQFTVSALTEDGEVVLQEEYRTTPDGYSEFIEELHRYEEEDGCSIELAVETTGNARFFKNQMEKEFFDVTVVNTNKFKVITYSTKKTDANDALTLAMYLQKEMLPEAHLCSQTSEEIRRMLKTRRILVQSSVKIKNQIHGMLLGYGIETNAAQFQSKRKRQDLINDLADHDYSEFTASSLEVMLNILDVLAEQIKDVEEQIEQMVEDNEDVELLKTIPGVGKIGAATIASYTEDLERFEGDFKRFAAYIGIVPSVHNSNETVHLGHITKHGPQELRTAFVQVALGMIRASKQTSDWRLIEEYRRKKTEKGSGRAIIALTRKIARIVFVMLENRETFNPDLMLSK

SEQ ID NO: 55719 - protein, 353 aa, unidentified
MISRGCLYVPGIIVGVDTHKDEHVAVAVDKLGVRIGQRNLPTTNMGYVSLERWASGLGEIDAFGIEGTGSYGAGLARFLRGQGHQVIEVNRPDRSTRRRLGKSDPTDAEMAARAVLAGVARDRPKSGVDKVEMIRMLKSTKDSAMKGRTQAINQMKALVVTAPVELRAVLRSLITNQLVIRCARWRNGQLGTPTAAAKYALRSLARRYIQLTQEIEALDAQLARLTAAFAPALMESFGIGPDTAAALLVTAGSNPERLKSEAAFAALCGVSPVPASSGKTTRHRLNRGGDRQANAALYRVVIVRLRYHDRTRTYFQRRMEEGKTKTEVIRCLKRYVAREVFSILRDIGKRRTA

SEQ ID NO: 55720 - protein, 482 aa, unidentified
MKKPNIYQNQSQELLHLFEEAGSSEKVMCVPMDYAKNDHLVMFCNGHGDILRKPFSVKNTPEGIGYIDDQVTRSCRQRGIKKKHVFFGGEDANSFAKNFVSTLRSKGFVVANVNAHDAKKQRGNLQASTDRIDLMGIATLLLNCRANCCPAQFGIYRNLRTLVRHRRKLVQMLTEVKNRVHGIVDELFPGFLDEKNSGIIPFTQSSLYLMQDRFSPKQIRRRRRQKLVEILKRLGTSRAEHTAAKLQQYAAKVLHAPVEYVDTMQLSLAQHVKHIRCLKESVAQMEKEIALNLAQTQGAFLTSVRGIGLVLAAGVTAEIGDPNEQKPLNNLASYSGIVPRVKQSGGLDGKTYTGPVAKRCNRILKDYVVKSAYHLGLHGPQDLMADYKRRNASGQHADFGIGRRYLRMAINLMRTSQVYLPPNLRKDDDTLQQRAGYYLMSWPYLKEKWKKVGALEAAFANNRPLGLWRQIVQELYDIKLKL

SEQ ID NO: 55721 - protein, 419 aa, unidentified
MARKKNKPIIEVMHPDCCGLDVHKESVSACMLRIDEDGKDQIEYREFGTFTNNLIELKNWLVENECPIVAIESTGVYWRPVHNVLEGCKEVVLVNARHLKNVPGRKTDHGDSEWLAGLLRYGLVKASFIPEKQVREWRELARLRKSHVNTLGDYKRRVHKLFETANIKIDSVVSDLFGVTGRNLIEQLCDEKADLSIENIRRCAKGTLKAKVDELQRSLTGFFSDHHRFQLKGMMRIISEIEREIESITQRLQQLTEGHKDLLSRLDEVPGINETAAQSILGHIGYTLEEFKSSQSLCAWAGLCPGNNESAGKRKSGRIAVRSHPFKTIMVEVAWAAVKKNGSYYREKYFRLKSRLGPKKAIVAIAHRITKAIYSIIKKGESFKDLGADYLVNLTRHRKLSALSKQAAKLGYKLVSAKS

SEQ ID NO: 55722 - protein, 310 aa, unidentified
MDEVVVGIDVSKDRLDIHVVPSGEAFAVGRDGKSLDALTERLKTMNVHLIALEATGGYETVAAAALAGAGLPVAVVNPAQVRQFARALGKRAKTDPIDAAVIARFAATARPEPRVAPSEEAVILAELIARRRQLIEMAASERQRKHHALNARVKKSLDRHLKLLESELAELDKEIGTTVRASPVWREKEDLLASVPGIADKTARVLIAELPELGTLTRRQIASLVGLAPFTRQSGAWKGKAMIAGGRAKVRSALFICALVASRHNDVLSAFYRRLLEAGKPKMVALTALARKLLTILNAIIRDKRPWQNA

SEQ ID NO: 55723 - protein, 410 aa, unidentified
MELLHPHCAGLDVHKESVVACLRHMVDGKVTAVVKTFQTTTQELMALSDWLSAEGCTHIAMEATGVYWKPVWHVLSDGGFELVLCNATHVKNVPGRKTDVNDATWLADLLAHGLVRASFVPPEPTQQMRDLLRTRKQFVRERSGHVQRIQKTLEDANIKLDSVITDIVGLSGRRMIEALIAGQTDPEALAALAHSRIHASKQELEAALRGRVKAHHRFMLRLHMDHLQALDAAIACIDQEVSAQLEPFRVAVEMLTTIPGISSLAAEVMVSEIGIDMSRFKTEGHLISWAGLCPKNDQSAGKRRSNRMRKGAPWLKTTLIQCAWAASRSKGTYLQAQYLRIRSRRGPKKAIGAVAGSILTAAYHMLKNGTLYQDLGANHFDCRQKGKQVLRLVNRLQNLGFIVQITSMAA

SEQ ID NO: 55724 - protein, 338 aa, unidentified
MFTIGIDPHKGTHTAAVLDGTETVIDELRFVADRHQRDRLLCFASRFAPRTWAIEGASGLGALLAQQLVAAGETVFDVPPTLSARVRLLDSTRTDKTDAHDARAAAIVALRHAGLRPVVAADHTAVLRVLADRHHDLTGLRTQAVCRLHAMLCQLTPGGASGRLSAQRAGQILRGTRPLEPVAVERKRIAVDLLGDVRRFDNQLVAINERIIEAVLASGSTVTDVHGVGPLGAAIILGHTASIGRFPDAGHYARYNATAPIAASSALKDRHRLNPRGNRQLNRAIHVAAVTQVAHDTDGRAYYLRKLAEGKTRKEALRALKRQISNAVYRRLVTDARA

SEQ ID NO: 55725 - protein, 561 aa, unidentified
MVRHITRKGQGTHLSVEAGRVPATARGQPWPGGGREETEQRVWLDYGVGVDCHSKFLAICILRSQGGRVLRTEGEFGVDRPSLLKARAWIVRKLGGRAAQGFRYCIGSTGTYHKPVLLAFGGQPSVVNPLLAGPTRRRTDVLDARLLAHHSITGLWPRSFVAPEDGLTLRVLWACRREAVRAATRATNRVNSLVLRFRHTIAAATPIRSATGKALLEAPVLGEVPDYPNVAPCGLQEHIRPVIASLMADLERQMAAVTEAERAALAFVRSREWPTGGKAVPGRRLVELLMTVPGVGQTTALAWLSEVVDPRRFRSSEQVSAFAGCGSSVKVSTGKVTDFVKRKGNAKLHRALLFAAAAEMRKPDSRLSAWGRCIAGRHCKGGYRKAVGAVARRLAAGLWHVHALGEPFDISKYHFGEPPRVRDAPATALPLSQRQMALLPPELRTAQDVVSAFWTGRLSGIAGLGDGAFAKISCWARDNRASRAWTRIIPLDYDKEHEPEKYRGPVRTGAGHSKEEKRGDAGRQKATPRDALHQIRRPGPTGRQVERRPASGGHAVGGSER

SEQ ID NO: 55726 - protein, 321 aa, unidentified
MAEITTSTNIGIDVSKDWLDIVVMPSGETFRTENTEEKIGGLVEKLEKLKPARIVIEATGGYERLVTTKLYLAGQPVCRVNPKRVRYFARSIGQLAKTDKLDAKVLARFGEVIQPALTKLPSEQEQLLSDLLARREQLLAMLVAEKGRMSTAPTKVRPSLNEHITWLKNQLKELDNEIDSFINDTPDLKEKDDFLQEVEGVGKRTSAKLIADLPELGSCDRKQIAALVGAAPYNHDSGYKKGQRAIRGGRPEVRSILYMAALTATRYNPVIKLFYQRLLKSGKKKKVAIVACMRKLLTILNAILRDRKHWNSSLPITLSPA

SEQ ID NO: 55727 - protein, 367 aa, unidentified
MKKVSTVEAKQSRKISQSKLTVGLDLGDRTSWYCVLDEAGRVLLEQRVSTTPKALREGFGGMLRSRVALETGIHSPWVSRLLSEVGHEVIVAHARKVRLIGESRKKDDRLDAQTLARLARIDPQLLCPVKHRSAKAQAEHTVIRARAGLVRARTALVNTARGLAKSYGERLRGCNVRNMNPEKAEGLSPELQAALQPLLGALESLSERIAEYNQEIETLAKESYPQVALLKQVKGVGTLIGLTFLLTLEDPHRFRKSRDVGCYLGLQPGRRISGQSEPQMHISKEGDPYLRTLLVQGAQHILGPFGVDCDLRRWGLKLAERGGKSGKKRAIIATARKLAVLLHRLWVSGEVYEPLHNSKQSAMPAAA

SEQ ID NO: 55728 - protein, 443 aa, unidentified
MARKNQKRFEIIHHDCAGIDVGSREHWVAVNPGRGDNPVRKFSTFTDDLIALADWLASLKIKVVAMEATGVYWIPLFEVLDARGFEVYLVNSRATRQTSGRKSDVLDCQWIWQLMTHGLLSGAFRPSDEICSMRSLVRQRANKVCDQAKSINRMQKALSQMNIHLANVISDITGVTGMKILNAINQGERDPLVLAALRDRRIKADQATIARSLHGNWRAEHLHALSQELACHDFLETQIADCDKAIAQALERLPRLQEAVPVAGKVLRSPHRSAAQQSALHQALGQVMGVDLTAIPTIGVDTALVLASELGPDLSRFPTSQHFCSWLGVAPPTRISGGKALPGKPPKVINRASQALKQSASNARNDKSFIGASHRARLTRMDTGCAIKATAHQLARLIYAMLTKGQPYVEKGIEAFEAKSRSRQLRALEHKARKLGMQLVMAG

SEQ ID NO: 55729 - protein, 347 aa, unidentified
MRFYTKQHPFYCGIDLHARSMYVCIVNHDGEILVHRNMKAAPEPFLKAVAPYRDGLVVAVECIFTWYWLADLCTQEGIPFVLGHALYMKAIHGGKAKNDKIDSQKIAALLRGGMLPQAYVYPAEMRATRDLLRRRMHLMRKRAELLAHIHNTNSQYNLPEIGKKIAYKANRAGVAERFPDPAVQKSMEVDLALIDYYDPLLNDVELSIVRLAKQHDPDTFYRLQSVPGIGKILSLVLLYEIHDIRRFPRVQDFLAYCRLVKCSKESAGKRYGTSGAKIGNAYLKWAFSEAAVLFLRDNPAGQKYLTKLENKHGQGKALPLLAQKLARAVYYMLTRHTAFDLHKFLHA

SEQ ID NO: 55730 - protein, 460 aa, unidentified
MAHRRRKIAAQLVEDEAYQLRHERVAGIDIAKDKGDVCVRLPPDRDGGRRRSRVQADVPARAQDVLELGAQLLADGVEAVVMESTSDYWRIWYYLLESLGLAVALVNASHARQLAGRPKTDRLDCQWLARLAEMGLLRPSFVPPPEIRALRDLARARQQLVRDRARCWQRLEKLLEGALIKLSSELSSLARVKTARLILDALAGGERDPKALSALALGSLAGRRGDLEAALEGMAAGPHHSRLIRAHLDQIDSLTRSVGAIEDEIAALLEAIPAAWGIDAAGEPSPDPGPGAAALPADARLAEVPGITVDLARAIIAETGLDMSVFPTAAHLVSWAGLAPVARQSGPRSRKPRKGQGNAYLKNLCTQAGHGAAGTESFLGERHARLARRLGPNRATCAVARSVLVIVWHLLSDPAARYADLGPDWHQRKTGRDKKIRSHIRQLQALGVDTSTLNAATTAA

SEQ ID NO: 55731 - protein, 447 aa, unidentified
MTHRIGPSRGDRRRNARKARLRGLIPREFAIVGVDLADRKQVFAVCDHDGGVHGRRSVNKRAWQLDETLRWAKAAAVEAGFAGVVVACEPTGHRWRVMLDQCDELGLTMVCAPPMLVHREREREDLTPDRSDAKDAVVIAGLAAQLRCYEPERPTAQWARMRHLGARRSELTTACGVVRQRMRSLLECVWPAALATAADPLASMTWRATMAVICARSVDGDPAAIRRMGWPRFQAAVRRELPRWGGHRVTWTIARELWDATTDPTGVIVHRHGALERVADALTDWQRLRVQRGAVEARMVHLLDELNLTSLVTTIPGLSAVGAAAILAETGDPHRFDSGRAVVKHAGLAPRDNESGTFKGTSRVSGRGRPELRLAVWRAVWGALPHNAVLSARHHHLRTREHNRLTDHQARVAVAGSLLRQLHAVIVRGVPWDARTAAGRQEVIAAA

SEQ ID NO: 55732 - protein, 318 aa, unidentified
MVNESFVGIDVSKQWLDIGWEPAGRTERVAHEETAVAGLCERLARERPSLIVLEATGGLETHLASALAASGLAVAVVNPRQVRDYARACGRLAKTDRIDAAILAAFARAIRPQVREPKDEESAELGALLARRRQLIDMRVQERLRLERASALQRKSLKEHIDWLTKRIQRLDIELTHRLRSSSLWREREDLLKAIPGVGVITRSTLIAMLPELGRLNRREIAALVGVAPFNRDSGKHRGERVIWGGRAQVRQVLYMAAVAAARTNPVIRSFYQRLRAQGKPGKVALVACMRKLLTIMNAMLKHNTPWNPNPLDLQHSC

SEQ ID NO: 55733 - protein, 393 aa, unidentified
MRFAGVDIASETHMVAVMDETGEVLVKPTTFREDTDGYAELIGLLDPPADVLIAMEATGHYWKNLFAALTACGYSIALINPRRTRRFAQEDLERTKTDAIDALGIARFAAQKRPAATRLPDQATEELRELVRHRDRLVQHFGDRVRQLHRIVDLGFPEFTRYIRSLDSELASAVLHDFPTAQAFQGVSVRRLARLCYDGRHRVGEELARSLIDAAKVSVGHHHGFAYRVQVRHACEDLDVLRRRLRELERDIERLLMDHEVGSLLTTIDGIGVQTSARLIAELGDPALFRNSAALAAYVGPVPALKQSGKKQHTRAGITTIGNASLRAALWMPTLTAVQKNPWLRAYYQRLIARGKPPKLALVACMRKLLTAVYSVAKNRRPFVPILAPELAP

SEQ ID NO: 55734 - protein, 463 aa, unidentified
MPKARKSRKKLALKVDVTAGLEALHHHAAGIDVGNAEHYAAVPVGRDPQPVQTFGSFTADLHRLAKWLKACRIETVVMQATGVYWMALYEVLEGYGLQVNVVNAKYTKTLPGRKTDVLECQWLQKLHTFGLLNNSFLPPEEIRVLRTYLRQRENLVAAAGTCIQQMQKVLTQMNVQLANVISDLSGMTGMAILQAILDGQRDPQQLAALADPRVQASRKEIAQSLEGHWREDLLFVLRQVHDLYFTYLESITACDQRIEAHLKTMPAKVDVVAQPLPEARPKDRLPNRKHIPQFGLREELYRITGVDLTRIDGIQVQTAQVFISEVGVDMTRWPTEHHFSSWLGLSPNNQITGGKVIRRGTKKVLNRAATALRLAAQTLHRSKSYLGAQYRRLRARLGAPKAITAMAHHLARLIYRLLRFGTQYHDKGVEQYERKYRETEMKWLQKQAAKLNMQLIPTGALTK

SEQ ID NO: 55735 - protein, 481 aa, unidentified
MAKKSGQPVKPVTSSAAPVSQSSRTRRVPAPRFSARFPKEDLHVINRHAAGIDLSGRNGHFLAVEVSETELEVLEVGGMTPDLAQWIPYLLDHGVTTVAMEATSIYWVPVYDALEHVGLEVFLVNPCHAKNAPGRPKDDKLDARWLQKLHKYGMLTASFRPSEEIRPLQSLWRQRTFLVRRCADAIRHQQKALDQMNLRPHQVLSDLDGVTGQRIVRAILDGERDPARLSSFRDKRCACSEEELQAALMGFYQDHLVFALKQAYERYQFYHQQIAEIDAQIETLLTALIPQEPEAIQEAVVQDKHPLPHGKHAPAFNVTALLILLLGVDPTRLPGIAAQIALGLFAELGTDLTRWATDRRFGAFLGIAPVKRISGGKVLSSKTRPGIHPAGVLFLQAAAAVAKTDTALGAFYRRLAIRIGKPKALTATAYKIARMYYHLLCDGQEYVELGAQQYEERYQIRQLALLRKKAKSLGFELTPAA

SEQ ID NO: 55736 - protein, 321 aa, unidentified
MSQNNPTIYVGLDVAKASFVFDLQGRSLQCPNDAGGHARLCRQLGKLGGSALHVVLEATGGYEQPIVAALHEAQIAVSVVLPCRVRAFAKALGQQAKTDPIDAALLSAYGRSIAPEATTPRPPHEQTLQETVRQRQQLVEIQTQLRNQAAHAVSPQAKKRHRHLLKALAAEITDCERHIADLQAEDPRLAQRAQRLQEVPGVGPIVAAVLLAEFPELGSLPPETAAALAGLAPYNCDSGPRKGTRRIAGGRAPVRRALYMAALTARRKDGIFKSFYESLLARGKAKLVALTAVMRKLIVLLNRLLKDPHFQLQPPPTLAPH

SEQ ID NO: 55737 - protein, 334 aa, unidentified
MNEDGNTRATTRRYVALDIHKYYCVVAGVDREGSVLFQPVRVEHADLEGWLKKHLCSSDQVVIESTTNAWHVYDLLAPLVERVVVANPIRVKQIAQARVKTDIRDTLILARLLAANLVPEVWVPPVHIREMRQLLSQRRQFVETHTQIVNRMHSVAHRHHLQHERGQRFNEKTTGWHKDKTLSALEQFQLQLEMENLTYLEKQIERLSKEVRKMCHQKPWADSMTYLMQLPGFGVITAMTVLAAIGDIQRFESPKHLASYSGLTPGLEQSGTKNRGKGITKEGRRELRWALVEAAQMAVKSDPLWKSRFQEMQKRMHRNQAIAAVAHRLLELVW

SEQ ID NO: 55738 - protein, 346 aa, unidentified
MVAIGVDTHKANLAACAIDERGRPQAQRSFANSASGHRAFERWLRALPLPRRIGIEGSGSFGAGLAQRLAAAGEEVREVPAVLTYRERRRTGRPGKSDPADALAIARVVLREERLPAFRVRVHRDLKLLVDYREQLIGEQTRLRNRLHADLRVLVPGYGAQLGRCGDLTSVASVAAARSMLAPLDGVAAELAERRLARVELLAREITALNSRLADALEGSHLALTAISGVGSLTAARLLGETGDVRRFNSSAAFAMACGVAPIPASSGSTQRVRLSRRGNRQLNRALFTVAFTQARCYAPAHAYMERKRSEGKSWNEALRCLKRHLADVVYRAMLEDRRSEEALTT

SEQ ID NO: 55739 - protein, 349 aa, unidentified
MSIIGGLDVHRAQITFDWVDRDSGEAHRGRIAPATRAGMGAWLGELPGAEGAFAVEGCTGWRFVVEELKAAGLVAYLAEPAETSSLRGPKRRAKTDRTDARLLRELLEQGRLPSSWIPPTWILDLRTTVRLRKTLVDQRTAWQQRIHAALFHHGLPRPTQELLSRGTRAWLEQVALPPASRQALAVALRQIDGLDAELDPIDQWLRTLARRQLGCRALMTHHYGIGAITAPTILAELGDARRFAGGDQVVRATGLDITVYASDGKRSPGHLSRQGPEVLRWALFEAAKAAARPSSPDYAYYQQVKARQGGNRATLAVARKLARRVRHTLLRLGDAALAPVEDLPVAEVA

SEQ ID NO: 55740 - protein, 315 aa, unidentified
MDQTASQESFVGIDVGKADVDVALRPLGERMRVARNGAALEQLAARLRELAPTLIVLEATGGFERVVLATLAGAGLPVVMVNPRQIRDFARATGRLAKTDRLDAQIIAQFAEAVRPEVRPLPDQAAQDFAELAARRRQLVEMISAEGMRVRQAVHKKVRRQLDAHLLWLNQELSALDADLDEAVRGSPLWVERVELLTSVPCVGPTVARTLIADLPELGSLDRRQIAALAGVAPVAHDSGKHHGARHIRGGRTTVRAMLYMAAWVGLRCNPVIKAYYARLTAAGKPRKVALVACMHKLLTILNAMVRTNTAWKTA

SEQ ID NO: 55741 - protein, 407 aa, unidentified
MYNAVGIDVSKGKSTVAVLQPGGVIVKKPFDVAHSISGLKELTDYIVSLDGDTKAVLECTGRYHEPILRSLSEANIFVSAVNPHLIKDFGNNSIRKVKSDPADAKKIARYTLDNWADLQEYSSMDNTRTQLKTLNAQLDFFTRQKASAKTNLISLLDMTYPGLNDLFSSPARPDGSEKWVDYAASFWHVECVRGSGLKTFTERYKAFCKREGYNFSEARAKTLYENAKDLVAVFPKDRSNKNLIEMAINQLRSLTECTIRLKNEMDELASTLPEYSTVMEMNGVGKVLGPQLIAEIGDVSRFTHREAITAYAGVDPGVDQSGKRASKSNRASKCGSARLRKALFLVMSVLLQTKPDDAVYHFLDKKRAEGKPYNVYMTAGANKFLRIYYGKVKAALAAQANSNSDQS

SEQ ID NO: 55742 - protein, 366 aa, unidentified
MKKISTVQAFKSEIFKEQKLTIGLDLGDLWSFYCVRDEAGQIVLEQKVPTTPEAMKQTFGKIPRSLIALETGTHSPWVSRLLTELGYEVIVAHAQKVQLITKSSRKDDRHDARTPSRLARIDPELLGPVRHRSAQAQIHLTVIRARAELVSARTALVNAARGLVKSYGQRLPKCGTYPVSGKLAEGLSAELRDVLEPLLKEVESLNERIKEYDERMEKIAKEVYPQVSLLKQVKGVGTQIALTYVLTIEDPYRFAKSREVGCFLGLRPGRRNSGKSEPQKGISKEGDRYLRTMMVQGAHYILGPFGEDSDLRRWGLKLAERGGKNAKKRAVVAVARKLAILLHRLWVSGEVYEPLRNSQKAMSAVA

SEQ ID NO: 55743 - protein, 329 aa, unidentified
MSVFAGLDVHKKYCHATAMDESGKVLFQEKFPSEPEEFQDLADRLGNEAEVAIEATYAWQYVYEQLEGEVEDVRLAHPKRTRIITDEKIKTDAKASEALAQLTRTGWLPEAWVPPKEVRMLQEKLRRRAYLVCKRTGFKNKIKAGLAKQGIRRDFSYSEDDRKWLENLEIDSINDYLSIIEALNEPIERLKGEIKKEARKDEDTKLVMSIPGIGFIWGLTITTEIGDVGRFPDPKKLCSYAGLVPSTEQSGSKEVHGSIAKEGNKYLRWAMVECSWSHLQHGEDTHLIRFFKRLARKKPDQVAIVAMARKMLTVIYWMLKRGEEFRPQG

SEQ ID NO: 55744 - protein, 346 aa, unidentified
MEHYAGIDVSLELSSVCVVDAQGKIVREVKVASEPEVLVAFFASLDFAVKRIGLEAGPLSQWLHAGLKRAGFDAVLLETRHVKAALSAMMVKTDRKDARGLAQLIRMGWFRPVHAKSMGSQEVRALLVARKQLLGRLIDVELSIRGILRGFGLKVGVVTRKGFEGRIRELVSGHITLERIAGAMLSARATLKVEYEKLHKIVLTIVREDAVCRRLMTVPSVGPLVAITYKTAMDDPNRIAKSKAAGALFGLTPKKYQSGEKDVTGGITRAGDEMARTALYEAANVLLARITRFSKLKRWGMNVAKRRGSKRAKVALARKIAVILHRMWVDGTTYRWTDTQPVAVQV

SEQ ID NO: 55745 - protein, 412 aa, unidentified
MRRLIERCAGLDVHRDTVAACVRVPGDGGERCQEVRTFGTTTTQLEALREWLVGLGVTLVGMESTGIYWRPVFAQLEDHVECWLLNAEHLHNVPGRKTDVADSVWICELTEHGLVRPSFVPPKPIRALRDLTRYRTVVVKERGRESQRLHKVLEDAGIKLSSVASKVLTASGRDMIEALVEGTRDPEVLAEMARGRMRAKIPQLKEALNGRFGPEHGLVAARMLARIDHAEEVITELSAQTREAIAPWEHHITLLMTIPGVGRRIAEVLIAEIGPDMSRFRTSAHLASWAGMCPGNNESAGKHRSGRTRKGSKWLREALVEAAHAAARSKGTYLSAQYARLRGRRGPAKAAVAVGHSILVIAYHLLSKNQDYSDLGADYFVARQSKETYKNRLVRQLERMGHTVTLEPAPTA

SEQ ID NO: 55746 - protein, 344 aa, unidentified
MDKFDVAGVEVSAKILVVALKVNGQLRTPEFANTATGHQQLIGFLLKHSRCVRVCLESTGLYGLDVALALHAEPEIEVRVANPRSVRHFAQAMMQRSKNDPLDALLLAEYAQRMPFQVWQPPSLPGRQLCALTRSIHQLTEMCTMQKNRLHAAAATATTPKFLIRELQRSLAQLQKSVQRLTQKALQLVRSHAQLRQQLELLDSLPGVGELSALYLLGELVLLSPDFSVREWVAYAGLDPRQYKSGDSVEKKIRISKVGNTHLRRALYMPVLVAARHDPHFRAHYRHLLAKGKLGMVALVALMRKLLHGIFGVLKSLQPYDGSKLFTLPLILDSKPTMKEKIAC

SEQ ID NO: 55747 - protein, 419 aa, unidentified
MSDYDFAAYIGLDWGDQKHAICLATGGQHVITELEQDAEEIEAWAADLRTRFGGRPIAVCLEQSRGAIVYALLKYEFLVLFPINPKQLSSYRDAFVPCGPKDDPTDAELLCLFVEQHHTRLRNWRPDDASTRTLRLLTEDRRRWVDERTALKNRLGQRLKEYFPLALQLAGNDLDADWFLQLLKKYPSHAELVRANPKTLAKLFPKRRRASDDEGEAPRLALVRSSSPLVTDQPVILAHRLDVLHIVRMIVQINETVAEYDREIAHHMEKHCDAALFQSFPGAGAGMAPRLAAAFGTDRERFSSAIEMQQLSGIAPVLKRSGKSCLVLRRLACPKFLHQTFHEYADHSRKKSAWAGAYYRMLKQRGMGHHCALRSLAFKWQRIMYRCWKSRTAYDEGRHMQQLRLRNSPLLDYMTTTNP

SEQ ID NO: 55748 - protein, 351 aa, unidentified
MTVGVDLGDRWSQYCILGLEGETLAEGQLRTTQEDVGEFFQALTVARVVIEVGTHSAWVQDVISEWGHEVLVANPRLMEGSKRRKRKSDRIDANKLARLGRVDPQSLYPIRHRSREVRQDLVVLRARDALVSVRTELINTARGLVKSMGTRLPRCSSPSFAEKVKHAIPVEVREALLPLVQLTETVNDCIARYDQKIEELGQKKYGHTTLLRQVKGVGPITALAYVLTLEDPQRFSNSREVGPYLGLVPKQEDSGDSQPQLGISKTGDRMLRRLLVGSSQYMLGAFGPDTDLRRYGLRLCERGGKNAKKRAVVAVARKLAVLLHHLWVTGDVYEPLHRSGAGTGTAHAAAA

SEQ ID NO: 55749 - protein, 316 aa, unidentified
MTSKRFLGIDVSKDWLDIAVDGQDRPVRIANAPHPIAAFLAGLCRDEIGLIAFEPTGGYEQTLRQALVAAGLPFARVHPNQLAAFRTRSGVQAKTDARDARLLADFAATDLARRGLRPLVEGDEVLRELAVRRRQLVDLLQAERCRAALARTDTVRASLASVIDALEASLEALEAAIAQRIAAQTELAQRAALLQSLKGVGPVTVATLMAELPELGQLSGKEIAALVGLAPRTRESGKRRARATTGHGRPGVRRVLFNVARTAIRWNPILRAFYQRLVHERQRPGKVALTAVMRKVLVILNAIARDNQPWNHAAAA

SEQ ID NO: 55750 - protein, 337 aa, unidentified
MQKSYLGIDVSKLSFDLSVLIVKDGVKKEMLTTKFENNAVGLKAFKKYLDDNGVAFNENSLLVIENTGIYHRLIWQFCSDYGLPIYIGNAADLKWSFGIARTKNDKVDSMRLCDYSYKNREDLKPTPALNKNFIILKDLLTNRSKLVRQQNAIRQTIKELKISNDKATQKMLEAINKAAIDGLKKSIKLIEAEMRKMVKADPEVLANYTLMISVPGIGEITAIFILCCTNNFAIKISGKQLASYAGVVPCEHTSGTSVKGRNKVSHMANKELKSILSMGALSAVQAYPEFGDYYERKKNEGKHHNKIMNAIKNKMLLRVVSVVNSGTPYVNNYKKAG

SEQ ID NO: 55751 - protein, 334 aa, unidentified
MSNVTTVGIDLAKNVFSLHGVDARGVVVLRKTVSRARLASFVAQLPASVIGMEACSGAHEWARRFAQHGHTVKLMAPKFVVPYRKSGKNDGNDAAAICEAVSRPSMRFVPVKSVEQQTMLTLHRVRLGFVEERTATINRIRGLLAEFGVVLPQRAMEVRRGAAASLEQLPAAAARALSDLLAHVRVLDERVNEYECELEQHARRDERAQRIQSLSGVGPISASAIVASVADAHEFKNGRQFAAWLGLTPKQYSTGGKTRLGHITAHGDPYLRTLLIMGARSMLQTALRRTDRLARWALGVRARRGYHRACIAVAAKHARIIWAMLAKNEVLQLS

SEQ ID NO: 55752 - protein, 345 aa, unidentified
MEQIIRIGMDTSKSVFQLHGVDSGERPVLRKQLRREGMISFFRKVPPTVVGIEACGGAHHWGRLLASFGHQVKLLPPQYVKPYVKRGKNDAADAEALCEAMSRPTMRFVSVKSAEQQAAQMLAGVRDQLVRRRTQLTNAIRGYAAEFGLVASKGLGKIEPLLARIRTDEVLPTLAKELFEAQAREYARLQKELEALDARLMAWHRANALSCRLVQIPGVGPIGATLLAIKVADASAFKSGRDFAAWIGLTPKNHSTAGKNRLGVITRAGDEMLRSVLVAGATALIQPIKRGRRPASPWLVGLLRRKAPKLVAVALANKTARIAWKLMVSGECYRPDAAMSAAAHA

SEQ ID NO: 55753 - protein, 347 aa, unidentified
MLHAGLDLSREKVDVCLLSDEGDHLDQLATPPDAEALRTLARRIAEVHGEPVCAVIESMTGARLVHDTLEQEGWNVEIADAQKVKGLAPLACKTDKIDSQVLAVLSHRDLVPAIWLPDPRVREERELARFRLHLVKHKSALKNRVQSTLINFGKPCPVTDLFGVEGRRLLERLRVPEPWRGNITASVELIDDLERQITEINRRLKEGHADHPYIPLLLSAPGIGWVLAFTIAAEIGEIERFASPEKLTGYTGLCPRVNQSGGKDRRGPLSKHGPRYLRWAMLEATMHALKHPAYSARYQRNKRRLGKQRGAKVAQIDIARRLAHAIWHMLARKEEFAPRGAAFRLAA

SEQ ID NO: 55754 - protein, 425 aa, unidentified
MEQSTRFVGMDVHKDTIVVAVTATGEVGKAIPYGTLSNTAAALEKLVKRLHQAGCGPLKFCYEAGPCGYGVHRTLAKMGEDCMVVAPSMIPRKAGDRQKNDKRDAASLAVLHRGGLLTAVWVPDAAHEAIRDLIRTRQAAVRAVRTARQQLSAFLLRHERIYPKGRQPWSKAHRGWLADQRFVLPAQQIVLEENIEAVRLGELRRDRIDGHLRAQIPTWSLFPLVQSLCALRGLDTIASAGLAAAIGDPSRFASAPDFMAYLGLVPSEHSTGPKRRIGAITKAGDVHARTLLIEAAHNYRFPARVGRHKLAAVDGVSEAVRAIAWKAQTRLCHRYRRMMAAGKLKQIVVVAIARELAGFVWSIACITSDPPARTSVATPASEDSGLTNRGMTTISSHNDSQRHNEIDRPTTGRDHKGHSQPQGLD

SEQ ID NO: 55755 - protein, 340 aa, unidentified
MTIIIGIDPHKATHTAVAIGSDESELATVTIRATRQQTDKLLSWAEPFEERTWAIESAGGLGYLLAQQLVGAGEQVLDVPATLASRVRVLGSGRSNKNDPNDARSVAIAALRSPGLRAVSIADHAEVLRLLAKRNGDIGDHRTQVVCRLHALIAALEAGGIAKELNASDANGLLGSFEPSSPAEHTRHQLALELLADVRHLDGQLAESKQRIKVAVSASGTSLTEVFGIGPVIACALLGYTGDVSRFASRDQFAAYNGTAPIEVSSGGRVAHRLSRRGNRNINHAIHMVAICQIRHTHSEGRAYFDRKVAEGKTKREAIRSLKRQISNTVYRHLVLDAAK

SEQ ID NO: 55756 - protein, 420 aa, unidentified
MFKIFRFNCCGLDVHKTWIFACIGITDSSGRTEYKEKRFSSFSKGLRELDEWLTLYSCDEVCMESSGKYWIPVFNVLERNHKVTLAHPKYTKPQKGNKTDRKDAKWICDLFMCDMIKPSFIPPPDIRQLRDLLRYYRKLTNMETGEKNRAQNCLTVSNLKLDDVFSDVFGKSALSITKYMLDHPGESFDVSPFVDGRCKTPIEEIQAAVDGAISKEQAIKLRQCLEHIDQLEGHKQSIKDEILTITKSYSETLELLRTIPGFDKNPMTAITVLSEIGSDMTVFPSAKHLCSWAGCCPRNDQSNKKVKCRRISQAGTYLKPLLVQIANALIKSKSHTEFVERYRRLKARRGHKKAIIAICKMLLTAIWNILSKHVPYTTEGYFTSSPNIKKDKVLTTAQALSLLRMRGYTISDDNSQPIAS

SEQ ID NO: 55757 - protein, 366 aa, unidentified
MNYIFVGCDSHDKTLVNKIALNREASQTKRFAAGRAGRGKMMEHLKALSRAAGNAKVAVAYEASGNGFTLCDELRKAGYECHVLAPTKIERSAKQKRNKNDDRDAERLLDIVRGHYLAGTRLPSVWIPDRQTRDDREPVRGRQDLSQKQTAVKTQLQMLVKRHGIEKPEGIGASWNKRYRQWLKALSEDAQQGWGMKQALGSLLRQLEFLEKEIEQLNQAMEQLADTPRWKPIVQAMTKEKGVGLMTALKYSTDIAEFSRFRRGRQVGAFYGLTPSSNESGENNDRKGHITREGSPTGRQVLCQSTWSRVRHDEHEREVFQRLVLKNPKKKKIALVACMRRLAVRLWHVGFQAQLQMKAAPVENGH

SEQ ID NO: 55758 - protein, 327 aa, unidentified
MSLMNSHCKKEMIAPEKRNSETTYVGLDISKSRLDSVVADGKPREDANSPEGRSAFVKHVARLAKPRVICEATGGYEKAIVAALMEAGIEVCVVQPGRVRHYALAEGLLAKNDRIDARLLARFGKKILPRCETPPEPSAQRLREMLEYRRILTDTIVETRNRLELATGYLRDGLQTQIDALEAAIKQVDFDIDLHISSHTDLCSRAKRLRLLCGVGPVLAATLMAYLPELGQVDGKVIAALVGVAPHPNESGGRSKKRKVKGGRDCVRHVLYMAAISAVRFNPILSAFYKRLREQKSKPHKVAIVAVMRKMINVLNRLAADPEFSLA

SEQ ID NO: 55759 - protein, 355 aa, unidentified
MDTTKYIGMDVHTEAISVAVRNSAGKVVMESILETKANTILEFIEGLRGNVQVTFEEGTWAAWLYDLLKPHVTTVVVCNPRKNALLKDGNKGDKIDARKLAELLRLNNLKPVYHGEHGIRTLKELSRSYLTITKDLGRVMNRLKALYRSWSIPCAGQQVYAPRHRSEWLSKITEAGVRRRAEYYYQQLDALQALRHDVRRDLLAESRKQTATKLLRQIPCIGPIRAALLIALIQTPHRFRTKRQLWNYSGLGIETRDSAQYRFVGGELQRSKRPQQLRGLNENHNHDLKNIFKSAATMATISPGPFHDFYEGLLVKGRKPTMARLTLARKIAAITLIVWKKGDSFDAKHLKPQAA

SEQ ID NO: 55760 - protein, 323 aa, unidentified
MSKHSMVCAGIDTGKHKLDVALDGRSDQLAVDNTADGHKTLSAWLRQHQVKRVGIEASGGYEQAVVLQLRQDGFLVIVFQPAQVRAYAMFHLQLAKNDKIDAALIATCAAATRKIHAPPDPRLAPYAEHLTLIDQITEDIAHLKTRRASCRNARIQGLWKDEITRLKRLQNAELKALVKAIRQHPDLAKRLDLIESVDGVGLSTAVAILVRMPEIGRVTREEVAALAGLAPYDNDSCSQIGARHIKGGRKRLRGRLYNAALPASFRWNAQLIALYQRLIAKGKSHKTALIACARKLLIFVNAVIARGEPWTEKPVRPAHIGAM

SEQ ID NO: 55761 - protein, 421 aa, unidentified
MTVYLERGYNRKEYQWVYKQYQNIYSKEIFMIYVGIDVAKDKHDCFITNSDGEVLFKSFTIPNNREGFETLFQKVQSVSDDLTKVKVGLEATGHYSYNLLGFLLDKGLPTYVINPLHTNLYRKSLSLRKTKTDKVDAHTIASMIMSDVNLKSYSDTSYHNEELKSLTRYRFDKVQERAKLKTSVSRLICILFPELEKLVATIHMASVYALLSEFPSAHAVASAHLTRLTNLLSESSHGRYGKDTAVMFREAARNSIGSNMPAKSLELKHTIKLIQELTSEIDEIETEIKSIMDEVNSPILSIPGINYRMGAMIIAEIGDFSRFDSPDKILAYAGMSPSTYQSGQLDNCYSHMEKRGSRYLRYALYNATKYVCHWDESFGTYLAKKRAEGKHYNVALSHATKKLVRTIYAMEKTGQSYRSAS

SEQ ID NO: 55762 - protein, 341 aa, unidentified
MSIITVGIDLAKNVFAVHGVDENGKAVLVKPRVVRERLLDLIAQLPPCVIGMEACSGAHHWARSFRVHGHSVKLMAPKFVMPYRMSGKRGKNDAADAAAICEAVTRPKMRFVPIKDVDQQATLCLHRTRQGFVTERTAVYNRIRGLIAEFGIVLPLKIERLRHDILLQLEELPGWVNRCVGDLLRHADTLQERITEYDKAIGQVARQDERSRRLMRLSGIGPNTATALLASIGAGHDFKHGRQVAAWIGLVPSQYSSGGKTRLGWITKTGDAYLRGLLVMGARSILAGLGDKQDRFSRWARSLVERRGYWKAVVAIAAKNARLAWAVLRYGDEFRLHADAV

SEQ ID NO: 55763 - protein, 333 aa, unidentified
MYYLAFDVSKGKLDGVLTNFRTKNKYFQINNDYQSIIDWLNNVKLPKKMFCGCESTGGYHLLVLRVFVERGFAFKLINPLLVKQFTRTTIRKKKTDTTDSLIIAKLLAQGEGYQINSQELDLTAKTLERGLEKLIEERQKFSLMGQGLGFQKQNEDLISLNNKFKGIENKIGETIKEHVSSLKERYSKEPVIELLESIPGIGFKLAFTIWTEIGDVKKFDSYKKIVAFVGLDPRIRQSGHCLNNQGKLTKRGSPHLRRALFVAASVARRYDPELKLYYEKKRSEGKRYTVAICAVARKLVSRIYAVWERGTPYLKKEIPSLNILKAVTTMATA

SEQ ID NO: 55764 - protein, 354 aa, unidentified
MPRKTANLEAVTTIGIDIGKNTFHLIDLDKMGAIVLRQKLSRGQVDTRLANMPPCLIGMEACVGAHHLSRQLKALGHDARLMPARYVRPYSRGQKNDFRDAEAIAEAVLRPTMKFVAIKTVEQLDLQALHRVRERLVCQRTSVINQIRAFLLERGIAVRQGLRALRTEMPIVLAMTDKLSPRMIRMIEDLCTDWRHLDARIATVSNEIKTLSEQDDGAKRLMTVPGIGPIISTATVAAIGKGDVFSKGRDFGAWLGLVPRQMSTGGRTVLGPISKRGNRYLRMLFVQAARAVLLRPQSWEKYGLRSWIEAAARRLNRFKLAIALANKIARVAWGVLHGGRNFEVRSMRTAPQAA

SEQ ID NO: 55765 - protein, 392 aa, unidentified
MIYVGIDIAKDKHDCFIINSDGEILFHTFTISNNHEGFNTLFQRIESVSDDFTKVKVGLEATGHYSYNLLGFLLDKGLPTYVINPLHTNLYRKSLSLRKTKTDKVDSRTIATMIMSDMNLKSYSDISYHNEELKSLTRYRFDKVKERAKLKTSVSRLVNILFPELEELVPSLHLSSVYALLSEFPGAAQIAASHLTKLSNLLSQASKGRYGKETAILFRETARSSIGSVMPAKSLELKHTIKLIQELTAEIDEIEAAIKQIMDEEIHSPILTIPGISYRMGAMILAEIGDFNRFDSADQILAYAGMSPSTYQSGQLDNCHSHMEKRGSRYLRYALYNATKYVCHWDNSFGAYLQKKRSEGKHYNVALSHAAKKLVRLIFAMEKSGRTYQPAA

SEQ ID NO: 55766 - protein, 326 aa, unidentified
MSPTHVAFNHIVAFEVAKETLVIHILPGDGQHTIANKPKAIRKLLMRELRRNALADLGSLLVVCEATGGYESYVLEICVELGLAAHKAHGARVRHFAKYLGLLAKTDPIDARVLALYGLKTQGLRLYVPLTPVVMALKDLKTRRDQVQQMLIAETNRLEHAHHASVTRSLKVHIASLRKALATLEADIAAHLKANDELARKARLMRSLKGVGPMTATTLLAYMPELGTFRKGEVTCLAGLAPIANDSGKSHAPRHIAAGRSNIRTALYMAALVALRHNAVMRRFAASLRQNGKPFKVVITAVMRKLIVTLNAILRSGEPWSHAKQA

SEQ ID NO: 55767 - protein, 419 aa, unidentified
MTSDFEWYAGIDWASEQHRVCLLDGGGGPAGEREFAHSGDGLAELCAWLIAMSGCEPHKIAVAIETPHGPVVEMLIDHGFAVHSINPKQLDRFRDRFTVAGAKDDSRDAQVLGHSLKTDAHAFRRLVVDDPMIIELREWSRLGDDLKQERNRLANRLRQQLWRYYPQMLELGGDDIAADWLLALWDEAPTPAKAAEISTQVIAPLLKAHRIRRFEAADVLRILRQTPLTVAPGTIAAASAHIRILAERLRLVNRQVKETNRKLDRLCRKLGQAPESEAGNRPEQRDVAILRSLPGVGRINLAALLTEASEPLKRRDYHALRLMSGVAPVTRRSGKACLVIRRLACNARLARAVYHWTRVASQCDPISQKRYAALRQRGHSHGRALRTLGDRLLGLACTLLRRQVLFDPDYHCKEVAAAA

SEQ ID NO: 55768 - protein, 391 aa, unidentified
MSMYFIGIDISKYKHDCCIISAADQKVVSKVTIKNNKAGFNELLTIIHSLANPADIRIGFESTAHYALNLELFLENSLLTFMEVNPVLISEYKKSKTLRRTKTDSVDCESIARWLMTVEYNPHSKGFYHAYSLKSLTRLRDKLIRQRSFYLVKITNVLDHTFPEFKPFFNERLSKTALYLLENYGSAGKMARMNSASYEKLRSLSRGKFSPQQFLRLKELAANTVGVNNSIFDVELNSLLSLYKSLVKEINTIEKEINKLIEEVHPHYMSVPGIGPLSAAVIYSEYGDISNFTNPGQMLAFAGIEPGINESGTESHGGKMVKRGSSQLRYTLINCCLPLIRFDMTFATYYAKKRGEGKPHRVAITHVAKKLIRVIYALERQDIDFNAQKLR

SEQ ID NO: 55769 - protein, 245 aa, unidentified
MAMPVPVSKPIVGVDVAKNELVIYHAELDLLEVIPNNKTAIKKWLKALPGAVAVAIEATNIYHLEFADLAYEADCMIYMVGDYELSHYRKGVNVRAKTDALDAKLLARYLKNEAEELRPWTPPSPLYRQLLSLFRRRAALVQARVSLTQSWANEPLLKASFAEQVKSMQKLEGLIEKMIGDRLKEAGLSDQLKRCLKVEGIGFLTGARLVTTFQRGDFRNADAFIAFLGMDLRVSKSGQKIIVAA

SEQ ID NO: 55770 - protein, 377 aa, unidentified
MKKHSTAKKNQKALTKTKSTIRHMAGKSRLTIGLDLGDHTSRYCILEEAGEVGSEGQMPTTPAGLKSLFGKMASSRVALEVGTHSPWVSRQIAALGHEVIVANPHKVKLITQSARKNDRIDAQKLARLARVDRKLLSPIRHRGEQAQADLAVIRARAELVESRPGLINCARGLAKPMGERLKKCDADQVEEALAKPLSEAVKIVIGPLLKSVEAIREQIGGYDEKIEEIAKRYPEVELLTQVYGVGALIALTYILTIEDAERFQHSRDVGAFLGIQPKQRESGNSQPELGISKTGDRLLRSYLVQAAHCNLRRGAPDSDLRAWGLGKVGAGGKRAKRRALVGMARKLAVLLHRLWVTEEVYDPLYNRKAAQAVKATA

SEQ ID NO: 55771 - protein, 466 aa, unidentified
MALTLGIDVAVRAAHQATLARDGKTVWRGHKFMPRPDELERVWADVGVQDPAELTVVLEPTRNAWIVIAEWFRRRGATVVMVPTTQSADLRKYYSKHAKNDRIDSELLARLPLLHPEGLRPYTGQGPADPLRRLTKQRSTMVKRRTAVYARLDSLIELLGPAWYAVLGSNYGNAALQFLAHYADPHAVIRLGQTRLARFLIARSRGNWRDEHAGGLTAAAKETLALWNVDGTDGMNFAELAADIAHEAEQALFLTRQIKEIDERIANLYAEADPQGIVASAPGVGATISAVIAGRIGDPHRFTSLAAIRAYTGLVPKVSQSGVVKTESSITKAGDPLLREMLYTAADQARKVDPQFAAKYHRLMAGDRHHDSAICHLATMLITRIATCMRNGTPYQLRDVDGTAITESEGRTIVKERYQLDPRQRDHVRHKLMRERRKGGPGVTGVAKRSNIPARQTQAYDEPQPA

SEQ ID NO: 55772 - protein, 313 aa, unidentified
MAMPAKQFIIGIDVAKVELVSYCEQTGQHQSFRNTQPEIRKWLALQPANTAICVEATNIYHLDLVEMAYEKGFAVYVVDGYQLSNYRKGIGGRVKTDASDACLLARFLDREGSALRPWVPPPPVYRKLQSLLRRRSALVSARTSLVQSWSNEAFLKEAFNSFIKHFESLDLLIQKQLKTVVREAGLTEQVVRCQKVEGIGFLTAVALVTAFIRGEFRSSDEYIAFLGMDLKVADSGQKSGRRRLTKRGCSEVRRLLHNAAMAASKSAAWKELYEYYRSKGKAATQVLVILARKLARVAFALMKTQGEYVSRRA

SEQ ID NO: 55773 - protein, 393 aa, unidentified
MFYVGLDIAAEKHDCCIMTEERQVLKQFVFRNDAEGFEFLKKTLTKLAPTEEIKIGLENTGVYGSNLVQFLRRNGYKTYTFNPLLINKSIQATTLRKTKTDKADAKFLAQYLTWDNSQPDHDVSYHISELKSLSRLRFSLVQQRSKCKTQAKGVLAQVFPELTQVFSDVFGTTARTILSLCPSAQRIAAYPVPQLADLLRTTSRGQLGLEKAELLHALAVHSVGNSSIALELQLQIYLEQITQLSFHICRCEAALRTILAQMDSPITTIPGIGTVLGATILGEIGDIFRFSSPAKLLSFAGLEPSITCSGKSVSAPGRMVKHGSHYLRWAFGQAARCIILRDQTFATYASKKRAEGKHFNVVCSHVAKKLVRLVFALLKNHSSFIPNYSSLAA

SEQ ID NO: 55774 - protein, 354 aa, unidentified
MITIGVDYHPSFQTIAFLMEETGEYGEQELNHSNGEAERFYRDLQQRRIHVRVGMEATGHARWFERLLAELGFELWIGDPAEIKTKRVRKQKTDREDARLMLKLLQENRFPRIWVPSPENRDLRQLLWHRHRLVQMRTRIMNQLQAVAMNEGYRWKKKLFGEKGRALLEKLSLALWASRRRKELLELLDQLDPKIAELTAAVEQEAKKRPEVVQLMTHPGVGPITGLAYVLVIGTPGRFPCGKQIGSYTGLIPCEDSSAGKQRLGHISKQGNTLLRFLLVEASQAAARCNPDWRRRYAHLMMRREKRIAKVAMDGLRVTRQVDLSLSRMIDPVRFGDLFKYVVATIRRVSFVRI

SEQ ID NO: 55775 - protein, 320 aa, unidentified
MMAQDDLVVVGIDVAKNKVDACIRRFTLRQTFPNTLQGRRKLTVWLRKYRVGKAVMEASGGYEREWRNVLHSAGIEVRIVDPRRVRNFALSAGRLAKNDPIDAEMIAWFAETFSQAPGQVPDAAREELAALAKARKALVDVKIRLLAQNEHAAPEPARKAHARILKSLAAEIDKLEAAISAKVKATPEFAERAEIIESVPGLAQATSAILIAGMPELGQVSDEVAAALIGVAPYDDDSGKRRGERHIKGGRRWVRNAVYMPCLGAATQNNPVLKAFYQRLIAKGKEPKVALIACMRKLIIVLNTMLARRQKWNPGRHAVA

SEQ ID NO: 55776 - protein, 581 aa, unidentified
MNAVGIDVSKGKSTVIALAPGGKLLARPFEVLHTKSGIKELISFVHTLGADTRIVMEHTGRYYEPLLQRLAASDLFVTAVNPKLIKDFGNNTLRKVKTDKADAKKIARYALDNWCDLRQHTGMDTTRTQLKTLNRQFAFCMKQKTACKNNLIALIDQVYPGANTYFESPARADGSQKWVDYVSAFWHVDYVCSMRLSTFTERYRKWCHRHGYNFQSDKPRMLWEKAKDLIAMLPMDKMTKSLVQTAVAQLNVLSKTVETLRTQMIELAEKLPEYPVVIAMNGVGATLASQLIAEIGDITRFPRRGSLTAFAGVDPGAKQSGTMQLRSNKIERPHFIIHQTEGVTILTTSSKPFDFRTMLYLNLLLMCVLIFSGRQEVLILSFLLSILVFATVGSAAQTVKFILGFLALLVLQYGAELLRSTDLPCGLILVPQLIAFIALRIYPFVVLGIALKKSTNIAEITTALSRLRLHRGIILSIVVMIRYLPAMKDDFRVIVDAMRLKGIPVSLGYVVRHPMKAIEYFVVPMLFRSEKITEEFSGAALVKGYEYSGTRASYFDVRMGGKDWAMIFLAPLAFVLCMTLV

SEQ ID NO: 55777 - protein, 353 aa, unidentified
MNSLTDLREVVDVVIGVDTHVHTHSAAVVDAATGGVLGEITVEATSDGYGELVEFANQHATLRAWAIEGTGGHGAGLSRHLMELSEIVIEVDRPKRAARRNGAKSDPLDAIRAAREAMARPRLGTPRTGGDRQALSVLLAARRSAVNASTEAQLQVFSLVIAAPEPIRVRFRGQKLAAMLNTAANLRVHASWDTETTSTVVALRTLARRAHAMLKEARELQKAMVAIIRSWRPDLLEEFGVGPIVAATVLCAWSHPGRIHSEAAFAMLAGVAPIPANSGQVTTRYRLNRYGDRQLNNALHTVVASRIQYQPATRDYVARRTAQGKTGREIKRCLARYVARDLYRLLESGAPAA

SEQ ID NO: 55778 - protein, 324 aa, unidentified
MIDGILGIDVCKNTLDVSISSYSKVRTKSFTNSPDGWRHLLDWLIAQKIQRVHACLESTGRYSLGIACALYEADHVVSIINPAQIRDFVRTKLGRNKTDGVDASHIREYCELFKPSPWAPPSEAHRRLGELQTIRSGIIAGLTEWKNRKNSGIVDAEAQALADATISHFTSQLGAVDKAIALTIDNDCDLQSKRDLLLSISGVGETLAGVVLAELPGPDVLRSSAEVVAYAGLNPRRHQSGTCIDRATRISKIGNAVLRAALYMPALSAMRYNSAIVALVTRLKSRGRLKPKQIVVAAMRKLLVLCFGVLKTGRPFDAAIAMGG

SEQ ID NO: 55779 - protein, 411 aa, unidentified
MHQKQKYIYVGIDTHKLTHTAVIINCWGDKLGEITIENKPSKFNDLLLEVKKHAKRKTAVYGLEDCGGVGRALAVFLLGEKKLVKEVDSSLANVERKALPIYHKDDSFDALCVARVLLSRLDELRNANPQDLYWTVNQLVQRREALVKSSSALKSQLHVQLAHNYPSYNKFFFEIDGKTALAFWEKYPSPSKLKTATLEELTELLVTNSHNYYTVKKAVQIIETAENDNVREVPEFQYIRDFLVESMVKEIKFKDAELTKIEVEIKLIVDKMGYKLHTMTGIDLVTSSKLIGEIGDIERFPTPAKLAKYAGVAPITYSSGQKDKQLKNQQGNRILYGIFHLLAVHQIILDRNTKNPRNPVFREYYEKKISEGKTSGQAIICIARRLVNIIWGMMKNKSEYKIPNLPKQNTK

SEQ ID NO: 55780 - protein, 370 aa, unidentified
MLSIGIDVSKGKSTVCGMKPGGEIVYAPFEVQHTREGMSELVSLLRSSGEEVRAVLESTGSYHCPVVAALLENGIFVSAVNSLRMKRFCSQSIRKVKTDRIDAMQIALYGLAYWQELQPTKLPEDTYRELQLLARQYYQMTSILIKAKVDFNAICDQVLPGMQELMSDHAGRHKLSDFVLRYHHTTHILEMGETRFRKDYCKWAEKKGYRNCERMAVLIFATAQNGIPVLPNAPSTQIVITEAIRVLHTVEASRDAILTQMQALAKTLPEYSLVREMPCIGDTLAPRLIAEIGDVRRFHSKRALIAYAGIDAPPYQSGKFCANNRHISKRGNRYLRKTGYEVMQSYVMHKPANDPIFTFIEKKRGEGKEW

SEQ ID NO: 55781 - protein, 386 aa, unidentified
MPQLNDLSRSLVILEQDATLIAVIEMGQSSWLVAGIVPGVERSPLKKLAVDESALLKLLNCWREEAEKAGHRIERIAIAFEAGRDGFWLARWLRARGIEAHVIHASSVAVSREHRRAKTDRLDTELLKRAFLGWLRGERDHCKMVAIPTLAQEDAKRPNRERESLVGEQSRIVNRMKAALARLGIRGFNPKLKKAVERLDGLRTPEGEPIPPNTLAELKHDMERRRLVRSQIRDIEGTRLERLKQAPGDGPHVMVRLLARVVGVGVETADMLVQEVLSRNLRDRRAVARYGGLTGSPDESGKKRREKGLARSGNARVRRGMIQLAWRFLMFQKDSALAHWFYARTKNAPQTRKTMIVALARKLLIALWRLAREGAIPEGIVLRPAL

SEQ ID NO: 55782 - protein, 426 aa, unidentified
MKNTQNEKISQIKFSTLVVGIDVAKETHYARAFNFRGIELSKLLKFSNTAEGYQRLEEWMQNICQQHSKTDIIVGFEPTGHYWFTLGDYLKNQGHKLAIVSPFHVKRTKELDDNSPTKNDRKDPKTIAMLVKDGRYREVYIPEDVYQELREAVSERDRLVQRMSAISNQITRWLDIHFPEFHTIFKDWRRKAAMQVLRNYPTPDKIVAAGAVKIEETWKLTMKRTAGLKRAQELVKAAEKSIGRKTGLIAAETSLQHLLNEYDLYSQHYQQLEQLMLELLQQVPNAKKLLDIKGVGLVTAATFVGEVGDIRRFQDPRQIQKLAGFNLVENSSGKHKGKTKISRRGRRRLRHGLFMAMITILATNPEFRQLHKKNISRENNPLNKMQSIVALCGKLIRVFYALLRTGTDYSADKMLGDIELGMKAVA

SEQ ID NO: 55783 - protein, 347 aa, unidentified
MEYFAGLDVSVKETSVCIIDGTGKVVRETKVASEPEDLVAVLCNPAYPLKRVGLEAGPLCTWLWNGLTEAGLPTICVETRQMRAMIRAQSPVNKTDRNDARGIAAMMRVGLYRPVHVKTVRSQKIRMLLTHRKILQAKAIDIENDLRGTLRNFGLKIGIARGASFEPRVKELVERMPDLAASIEPLLTVRRVLREQLTVLHRQVLALARDNELVRRLMTVPGVGPIVALAFIACIDTPARFAKSKSVGAALGLTPSQYQSGEVQRQGKISCCGDDMMRTLLYEAAQSMLFRSQKWSWLKAWAMKIAKHRGVRKAIVALARRLAVVLHRMWVSGTNFQFSRRDVATSV

SEQ ID NO: 55784 - protein, 426 aa, unidentified
MRSVGRSIGLDVHRDFCEVAIAQDGQVRSSGRVDTTPERLELFGASLHPHDRVALEVSGSAWEVARILERHVARVVVVSPADTGIRQARAKTDRLDARTLARLLAAGELDAVWSPDEHCRVMRRRLSRREQMVRARSRSKNEIHAVLVRRLVGRPPFSDLFSVKGRRWLCELSLPLEESETIEACLRHIEFLDSEIATVERQIASEALRSAEIRRLMTVPGVNMICAASFIAAVGEIRRFPNPRMLTGYLGLDPRVYQSGSAPATGGHISKQGSASTRWALVEAAWSVVRQPGPLHAFYSRIRARRGHGIAVVASARKLACLFWFLLTRGEDYAHQQPSLTARKLRLLEIRAGAPTLKGTPTGVWATRQAMREAERRLAEQAEASYAQTVRDWQAAAPKKAGASVTPGRASQKPSTGKVARQTTSP

SEQ ID NO: 55785 - protein, 377 aa, unidentified
MKRVKFVGLDVHAETIAIAIAEQDGEVRSLGVIPNREDSVRKLVRKLGPVEELRFCYEAGPTGYVLYWQLTRMGAKCEVVAPTLVPVKAGDRVKTDRRDALKLARNYRAGELTAVWVPDAAHEALRDVVRAREAAKKDQLRARHRLNKFLLRHGRRPPMGIKPWTMKYLEWVKRDVHFEPMAQEATLLDYLNEVEHAAARIARLDGAIAEAVKSAPPKMRAVIEALQALRGIAHVSAVTVVAELGELSRFGRATQLMGYGGIVASEDSSGERTRRGGITKTGNAHLRRVVVEAAWAYRHRPAVGTTLRKRQEHVSEEVKEIAWKAQQRLHQRYRKLLAKGKNKGVVVTAVGRELLGFIWAIGTKVETAQKESLQQAA

SEQ ID NO: 55786 - protein, 379 aa, unidentified
MRDHNEVFVAFDTSKLRNAVAIAEAGRSGEVRFLGEIDNTPAATAKLLKKLAGQYDRVSFCYEAGPTGYGLYRQITGLGQACMVVAPSLIPKKAGDRVKTNRRDALGMVTQFRAGELTAVWVPDPRHEAMRDLTRARGAAVEDLRAKRQHVSSFLLRLGLHYPGDKTWTKAHVNWLVKQKLAHAEQRIAFEEMLLAVRQAQERIARLEAAIRGAIPEWSLAAVVDALMAMRGIDMVSATALLAEIGDLSRFHTPRELMAYLGLVPSEHSTGDKVQRGGITKAGNRRARRLLVECSWAYRHPPRIGNKKQDKVAAAPQAVREIAWKAQHRLYARYRALIRKGKLKTVAVTAVARELCGFIWAVNRELTIAGAGATAAGIR

SEQ ID NO: 55787 - protein, 368 aa, unidentified
MNNEYYTTIGMDVSDRTTKVCVMAKERGARRILEETTIPTTVDGLRTYLSGKCADWPVVFETGSHSRWMKREVESLGMKAIVANPSRLRMVTESNTKNDRNDARELARFALADVELLHPVRLRGERCQQVLRLMKARDMLVKVRTMHVNELRGFAKSMGFRLPGCPANKVHALDKAGWPDDFESLAWPLMDMLETIDLKIRAYESQIRSLAESVELRDKIDRVREVYGIGLLSGAALVASIDADPGRFRKARDAGAYFGLVPKQRQSGEMDVQCHITRAGSDFVRRLMIEAAQIAMRESARDTDIKLKGLRICARGGKIAKKRALVAVARCLVVTAVALLKKPDADYVPLSERARLEFEAMRSAETAA

SEQ ID NO: 55788 - protein, 374 aa, unidentified
MSKVRFLGLDVHADTIAVALAEPDGEVRSLGIIPNCLESLRKLVKKLQPVSSLRACYEAGPTGYVLYWQLATLGVKCEVIAPALVPTKAGDRVKTDRRDAAKLARSYRSGDLTPVWVPDAAHEALRDLVRTREDAKQDQTRARHRLGKFLLRHGKRPETTMKSWTVTYMEWLERQVHFDQPALEATFLDYVHEVSHQAERIVELEKAIDQAIATAPPQIRAVIEALQALRGVAKITAVSIVAEVGSFSRFQDPRSLMGYSGMVASEFSSGNRVQRGGITKTGNAHLRRVIGEAAWAYQRRPWVGGLLRKRQQGLEQEVKDIAWKAQQRLHSRYTKLSARGKNKNQVVTAVGRELLGFVWAIATRTEAKYQKKAA

SEQ ID NO: 55789 - protein, 319 aa, unidentified
MPDIATQIAGIDASKNHLDMAIHGHAKVTRVPNTVAGWKTLATSLVAAGVARAGIEATGGYERGVMGYLRDQGVVVTLLQPVQVKAFGMLHLKRAKTDRIDAVLIAACTQVLGNRNRMTPDARFEALGDHLTFIEQIEEDIARFKTRLEHISDKRLRRSVEASIKREQMRRLLEIKRLIDVVRAHDDLSKRFLLVLSVPSVGERTALALLIRMPELGQVTREQAASLAGLAPFVHQSGKWQGQTRIGGGRSRLRRSLFAAAFPGAHHWNKPLMSMHNRLRARGASHTSAIVACARKLLIQVNAVVARGTPWEDRATSLA

SEQ ID NO: 55790 - protein, 318 aa, unidentified
MVNESFVGIDVSKQWLDIGWEPSGRTERVAHEEAAIAGLCERLAQERPSLIVLEATGGLETHVASALAASGLAIAVVNPRQVRDYARACGRLAKTDRIDAAILAAFARAIRPQVREPKDEETAELGALLARRRQLIDMRVQERLRLERASALQRKSLKEHIDWLTKRIQRLDIELTHRLRNSSLWREREDLLKAIPGVGVITRGTLIAMLPELGRLNRREIAALVGVAPFNRDSGKHRGERVIWGGRAQVRQVLYMAAVAAARSNPVIRSFYQRLRAQGKPGKVALVACMRKLLTIMNAMLKHNTPWNPNSLDLQHSC

SEQ ID NO: 55791 - protein, 387 aa, unidentified
MSKPADLNRCLAPLDQDHTIIGVIEMSQSSWLVAGVVPGIARHPLKKLAPDQDALLKLLHRWRAEAGQAGREITRIAVAFEAGRDGFWLARWLRAHGIEAHVIHPTSVAVSREHRRAKTDRLDTALLKRVFLGWLRGEPEHCHMAAIPTLEEEDARRPTRERECLVGERTRIVNRIKAALARLGVRGFKPTLRKALERLDALRTPEGTALPPNTRAELHRDMARLHVVTEQIQQIEAARSERLKQAGAKGPNAMVRLLAQVVGVGLETADMLVHEILSRNLRDRRAVARYAGLTGAPDESGRRRREKGLAKAGNARVRRGMIQLAWRFLLHQKESALAQWYRARTAEARGSTRKTLIVALARKLLIALWRMVTTGEAPHGVVLRPAG

SEQ ID NO: 55792 - protein, 372 aa, unidentified
MHGLAHSTASTRILALDLGKFNSVLCVYDPATHDHHFVSAQTTPQTIHDLLVTHQTDDPSSTLLVIETCDVAGWVYDIAVALGMNVAVANPAHEAWRWTRVKRKTDKDDALKLAKLAVLGQLPTAHMPTPQQRQRRRLVHYRRVLVDRRTQIKNQVRSIYSQQGLSLPRRGKAWTKAGVAQMAEEAKPLGECESVDDLWRGRLHVELQLLESLNQQVTQVDEKLDALGSQDDRVQLLQSVPGVGPRLAETVVAHLDDPRRFKNARQVASYAGLVPKQFESGTIKRSCRITRRGPALLRSMLVEVAWMVYLRNVWAKQFVQRISRGVASRKNIAIVALARKLLVMLWAMLRDHKRWRDPSPARDASSAPLAMA

SEQ ID NO: 55793 - protein, 367 aa, unidentified
MSNYVTAIGLDVHARSIKACALNPMTGEVSRARFGYDPASVAEWALGFESPKAVYESGPTGFHLCRALGALGVDRAVGAVSKMHRPAADRGRKNDRRDAEWLARLLACRNVVEAWVPDERTEAARDLSRALEDARDDLQRARQRMSKFLLRHGLVFDETTPTGRRRSNWTEAYWRWARSIEFDEADDAAAYERYTDAVDRCGEAKRELERRVVEAASRPEWAPTVDALCLVKGVDVATAFLLAAEAGDFSRFPSAPSFAAWCGLAPSERSSGETESRGGITRAGNSHVRRALVEASWHVPMSTRHPKKPRPGHGVAPAASRRAAKRDRRLRDRRDAMSQAGKRPCVANCATAREMACWVWAIAPMVR

SEQ ID NO: 55794 - protein, 347 aa, unidentified
MRKVVKQVLGVDVAQKELVVSLGRMYEDWTPELYAGKTFANTEKGFNALLKWVRSQTDNAVSLRFVMEATGIYHEAFAYFLDGHQQDISIVLPNKMSNYMRTLETKTITDKTASEAISRFGLERKLDNWHRPKETYRKMQQLTRERDQLVLERTMLKNQLHAEESGALPFEGYIIRIKERIGLINKQEHIIKQEIDALIETDPEVKQVLELICTIPGISVLTAAIILGETNGFELIRNKRQLASYAGFDVKEKESGTSVKKKPKISKKGNRHLRKAMHLPALVAIKHDERFKATYAHLVAKHGIKMKAAVAVQRKLLEMTYTIYKTNKKYKKNYLEEQKDSAQVAVE

SEQ ID NO: 55795 - protein, 370 aa, unidentified
MEETIRYLGLDVHKESIEVAIAEGGRGGEVRHYGRIAATPAAVAKLIARLRERGGRLVACYEAGPCGYGLHRQLISLGVESMVVAPSLIPRKPGERVKSDRRDCLSLARLHRAGELTPVWVPDPAHEAVRDLVRLKAAAQRDFTRARQHLQSFLLRHGLIYQGRTPWSRAHRLWLAGLRFPHPAQQIALQDMLHAIEAHQLRLRGLDVELRRLLPDWSMAPVVAAYQALRGVSEISATTLAAELGDLSRFSNPRQLMGYLGLTASEHSSGKRRRQGAITKAGNAHARRVLVEGARSYRLPARIAKAKLASLERQPKVVRDIAWKAQTRLCARYRRLAASRGSSNIAVVAVAREMAAFLWAIAQVAPPSFG

SEQ ID NO: 55796 - protein, 405 aa, unidentified
MLYLGIDLHRKQMTVSLRNEAGDVLLRRQVSTQWPKLEEFREQLKGFAADDEKYLAIVEVCGFQDWLVRWLPRDERCHMLLVVQPLGRSPVKTDRRDAHALSELLWINRERLLRGDRVHGVRTVYQPGAEQQADRQLTRLRERLVWRRTQTLNQIHKILRRRNLEWERPTKTFQTRKVIEWLKTLELDAMDRLALNQLLLQWQLWEQQLLAVDTRIAQRFLANRDAQLLATMPGVSMYMALAIVCRIAPVGRFPHGRSLANFLGLTPGCRSSGDTERPGSITKVGSRMVRCLLAEVVLHLLRRDGTVRTWYQRIKRRRGSKIARVALMRRTATIVWRMLSTGEPWRPGKAASETSSPASEAKPVRPRRGRRAVLSALVAKETEAGCMSTGSSSLLTGEEVTRCQA

SEQ ID NO: 55797 - protein, 320 aa, unidentified
MTQYIGVDMASESLQVAFDEETNINFSNDDSGFKLMLKKVKPGAIFGVESTSNYHHAFCIFFLKKGYDIKEVNPIVTSQQIRCTVRKKKTDITDALLIRRILEFGEGRSMSLKNLISQFAELKKLSRSRKHLVDMRSALKRKFKSLEKDVCDTKFLQKSYKRLEKNFDKEIEKLEKKLEKYKTKNTEILKSVTGISSILSAAIEGEIGDIAQFENAKKLVAFAGLDPKIKQSGKCLNSTGKLTKRGSSHLRHALFLAARSNICSNTVFTKYYKKLIKKGKSFTQATCATARKMLEIIFVLLSKQILFDRNFCSKKVLTKA

SEQ ID NO: 55798 - protein, 348 aa, unidentified
MVWVGIDAHKKVLVAVAVDDAGQEVSSWRAHNRTSDWQDCSDWIKGIRGVSAVGIEGAYSYGRGLAQWLVGQTFIVYDVNPRWTAGYRKTARRQHKTDPLDARAVASVVRRDAPDLPQVHADDVSSLLQVMVSERDAAQSESVRLRNQLHDHFFQLGVELKALDATKLRKVLAQLPAPATPLDSQRLVAIERLAARCFLALADVSRYTTEIEAIAKEHFAPLVEIHGIGLLTAGVIASHLGPQARFVSEGQVAAYAGVAPIEVSSAGKDRHRLNRSGCRKLNAALYFIALSQYRSKSSPGCQYIERRRAEGRTLREAVRALKRYIARAVFRSWRECLPPQSAPVQLPS

SEQ ID NO: 55799 - protein, 362 aa, unidentified
MAMSASESPATVGEVVLGVDTHLEMHVAVALDELGRRLGELTVSTTTKGYERLIFWAQSFGTVGCAGVEGTGSYGAGLARYLRDAGISVVEVERPKRRHLRRNGKSDPIDAEAAARAVLADDTAGEPKSGDGQVEMIRSLRSARQSAVKARTQAANQLQALLVTAPEDLRHRLREHPTKDLVDTCARFRPGSDLDEVHTATKFALRSVARRYQQLSEEIAELEEQLDRLVAKAAPQLTALTGVGTDHAATLLTVVGDNPQRLKSEASFASLCGVSPIEASSGKVVRHRLNRGGDRDANRALHLICVVRMRHDQRTKEYVARRTAEGKSKREIIRCLKRYIAREIYRLLAPIAAASPPTAVRP

SEQ ID NO: 55800 - protein, 407 aa, unidentified
MELEPLYKRVVGLDVHQAQITACAILERDDGTSRVEHRQFGSFKRDRRALAEWVVEVGAQEVIMESTGIYWKSPYAALEAVGIQAKVVNARHVKTVPGRKTDIGDAQWLAILGRSGLLRGSFIPPARFRDLRMLSRQRQKLTSQLSSEKNRLNKVLTDAGIRLGVVVSDLHGKAARAMTKGLIAGEPPELVVTYAGNRLQASQEEILDALQGDLNDVNRFILRELVANIEATEAQIERFDRKLLIELKPESGLLDLLETMPGVERIGAAMLLVEIGTDMGVFGSADRLASWVAVCPGNHESAGKRTSGRIRQGNRHVRRLLVEFAHAASRTRSALRQKFDSLLPRRGYKRAIIALGHKILRIIYRLLERREPYRDSAMDYEAIHVQRNAPRWLKALIKHGYITPATA

SEQ ID NO: 55801 - protein, 388 aa, unidentified
MPQTPNDLSRSLTALEQTATLVAVVEMSQASWLVAGMIPGLERQPLKKIAPNEAALLSLLQRWQEEAIKICQTIRRITVAYEAGRDGFWLARWLCSRGIEAHVIHPTSVAVSREHKRAKTDRLDTAMLIRVFLGWLRGERGHCGMVAVPTLEEEDAKRPSRERENLVGERTRIINRMKSALVRLGIRGFKPELRRAPQHLEKLRTPENVPIPLRTLEELRRDMARLAMVRAQIEAIEQIRLQRLEQAPQDGAHAMVRMLANIIGVGVETADMLVREILAKELRDRRALARYVVLTGSTNESGSKRREKGLAKSGNARVRRGLIQLAWRFLRFQKDSALAQWYRTRTEGAKGARKTSLIVALARKLLIALWRLVTIGEVPQGIVLRQAT

SEQ ID NO: 55802 - protein, 347 aa, unidentified
MRTKPLGAAVYGIDLGKTSFHVVGTDVKGNLLQRVTLNRSNIFEFFANASVALIGMEACPGSQWLARKLETLGHQVRIIPAQFVKPYVKSNKNDTIDAAAIAEAVTRPSMRFVKAKSTEQAELQCVHRIRDRLVGTKTQLINQIRAFCLEFGIPIRNGVGGFKEALPTILADEKNDLTPEMRDLLAHLSMELSGLETRITTVTKRIEAAAARSDIAMRLASIPGIGRLSATAIIAAVGDGKQFAKARDMAAWMGLAPAQYSTGGKTTLLGISKRGNPYIRRLLIHGARACVLHLDRSKDRLGAWINTLEARMHSNKVVVALANKLARIAWVVLNRPGTLYLRESQPA

SEQ ID NO: 55803 - protein, 353 aa, unidentified
MKRDKYIGMDVHQATTVVAVLDANGKVIWEKIIPTQAGPILELLESLSGPLHVTFEETTQADWIYEMVRARVAEVIACDPRRNKLLSEGSKADKVDARRLAELLRVGMLRSVYHGNDGARQLKQLAKGYQTLLSDMQRTMARIKAMYRGRGIQTPGRGVYQAKQREHWLSLLTDLGVRQRTAWLYEQLDQLGPLRREAKRAMVAESGKHRAVALLRTIPQLGPIRSALIVANLDTPHRFRTRRQLWSYSGLAVVTHMSAEYEMKDGRVVRSRKPIATRGLNRNCNRVLKDVFIGAATGGGQREPYRQYLQGLQDRGMRKEMARLTLARKISSIALTIWKKGEAFDPKKLNWAT

SEQ ID NO: 55804 - protein, 422 aa, unidentified
MLGVGIDWAEQFHDIALGTPEKGVIQQFRIEHSPAGVERLVTRCLALEADPAEVRVVLETRHGLLVEALIDAGFTVVPVNPDLVARRRGPARKKDDAEDARICCLLALDRHTTLRQLIPHGQIAGELRAIARDDERAARDHVRLLNRLRADLQITYPAALILAAGDLGAPTMLRLLQRWPTQPELAKVTREELVGFARASHHGWPERFAERIAEALAAPALPVREHLVRAKATGIRLAATQLLALHGARRSWERRMAELLLGGPRSGVEHTVKDPDPGKAFPGGEIYLSMPGLGDRLAARVAGEIGDAIHQYQTPSALQCYAGTAPVTRRSGKSDFVVARRLAHNQYLGDAVHQWAFSSLTRSAWAREFYDEKITAGKSHHNALRTLSNRWLEILWHCLTKGIVYDEATHQANRNRARGHAA

SEQ ID NO: 55805 - protein, 430 aa, unidentified
MEIVYPRACGVDVYKSFIVAVICISESIKPRYIKKRFSAFNNQLIQFRDWLIENNCHNVCMESTGKYYIPVYNALEGHIPNVVVANPKWVKAIKGEKDDNKDAKWIADLFKFGIVRSSYIPEKDIRILREFTRYQYKLVNIRSSEKNRFQNALTVGNCKLDLVFTDVFGKSASSIVDTILSDEPYTSEDILSKVHERCKASSDDILSAVEGTNLNQYQKARIKIVQKHMEYVDSLLDEVQHHIDMMVESYENYIQLLMTIPGVNRKSAIIIISELGIDVSQWSSARKLAAWAGLAPGHNESAGKKKSVKISKAGIYLKPCLVQVAHAAVKDKTCSYYAEKFGRISKRRGKKRAIIAIARKILVAIYHILKTDEVFNPSDMADVETTKEQRIAYITNNFRNAFNQLSRTGLSEEEILSIIIKKSNNSPQTE

SEQ ID NO: 55806 - protein, 419 aa, unidentified
MPFKIFRKNCCGLDVHKTWIFACIGITDTNGRTEYKQARFSSFTNGLKDLADWLAKYSCTEVCMESSGKYWIPVFNVLEESCYVVLAHPKYTKPQKGNKTDRKDAKWICDLFMCDMIKPSFIPPPDIRHLRDLLRFRTKMTNQITGMKNRALNCLTVSNLKLDDVFTDVFGKSSRSIIQQILDHPGETFDVTPFVDRRCKHPIEEIQAAVDGAISHEQATKLKICLAFIDEQQKRISELDTEIFRLAEPHTVILDFIRTVPGFSKDPLTAIRLLSEIGPDMSVFRTSKHLVSWAGCCPRNDQSAQKVKSTRISRAGSYLKPLLVQIVNALLKSKKHPEFKERYRRIKARRGHKKAIIAVCRMLLTAVWNVLSKLEPYSAKGYLADKLTEHSVVITKSEGLALLRKRGYIFRDEIADNDS

SEQ ID NO: 55807 - protein, 309 aa, unidentified
MGEFIGIDVSKSVLDVAAHGSGARLQAENDEQGLKQLAEKLLELAPELVVMEASGGYERLCAAMLAQAGLPVAVVNARQARAFALATGVLAKTDAVDARILAHFAAAVRPAVRPLPDEQRAALDEIMGRRRQLVGMLVMEKNRLGQARNPGVRRDIQSLIVVLEKRVGGCDGELQRLIQASPVWRAQEALLRSFNGIGPVNARVLLVELPELGTLDRKQIAALVGVAPIARDSGQHRGRRSIAGGRGQVRATLYMAAVTAIRANAVIRAFYQRLREAGKPAKVALVACMRKILTILNAMVRTKTRWQSA

SEQ ID NO: 55808 - protein, 372 aa, unidentified
MNYNTVYVGMDVHKESFTFCAYTIDAEKGSHFQRTEADYKNVLKYLEFLRTVYGNDANFICGYEAGCLGYTLYHQLTEYHVNCVILAPTTMPEQCSKRRIKTDRHDAEIIAKCLAQHNYSPVHIPTATDEETKEFLRMRDDHKLALKKLKQQILAFCLRHNYRYDGNSHWTAAHIKWLKSLKPEALYKEILDEYLLTYTTLSDKLERLDKRIEELASKDEYRESVKKLCCFIGIKTHTALSVLVEVGDFQRFASAQKFASYLGLVPGEDSSGDEQTRLGITKAGNRHVRMLLTEASQCYARGQIGFKSKELKSRQAGNSPQVIAYADKANERLRRRYYKMVLGKSKKHNVAKTAIARELACFMWGMMTDHIA

SEQ ID NO: 55809 - protein, 338 aa, unidentified
MKLYGGIDLHSNNSVLALLGEDERLVCRKRLGNDAPSILEALAPYREAIVGLVVESTYNWYWLVDALMEAGYPVHLANTAALVQYSGLKYSDDDSDARWLAQLLRRGLLAEGYIYPKEDRAVRDLLRRRSRLVQQHTANLLAIQNLFARDRGHSLSANEVKHLTPETVPRLLPDPNQALAVQATLLPMRGQEAAIDLLEREALAQVRLRPAYRHLLSVSGIGQVLGLTIMLETGPIARFAAAGHYASYCRCVGSERLSNGKRKGRGNTKNGNKYLAWAYLEAANFAVRYDAVINRYYQRKRAKSNGVIAIKTVAHKLARACYHILREGTDFDVAKAFA

SEQ ID NO: 55810 - protein, 420 aa, unidentified
MSNVIMIGCDLHDRSMLIHFAVNQGKPQRASFSNDSLGRGLLIERLRELAAIHQAERIVFVHEASGQGYGLSDLLNEHGIECHVLSPTHLPKTAKSAKNKTDAKDAQMLLEQVRGYVLAGNPLPLVWTPPERLRNDRELVRARVDASDDTTRIKLQILSLLKRRGIMKPPWYTTRWSKLFVKWLRDMAAALDTFVAPVLASLIDRYELYHQEQAKLDRAIGALSRTDRYRAACEELRKIPGVGLLTAMTFLTEMGDLQRFHNRGGVAAYLGLCPSSFESGETSDRKGRITRQGPARLRKMLCQAAWVSLIHCDESSQTYRRIKAGKSNRTKKALVAVMRHLAIKMWHQAKSCDVAEELRGRGGPHERTERLLTRQSDSKNCSLIFKTSTGGLFSFCSEEGIDQERMYSNPALTSWNSGWR

SEQ ID NO: 55811 - protein, 425 aa, unidentified
MEVIHPRCCGLDIHKESVVACVRLALGDKVIREVRTFETTTSGLLLLLAWLTELGCTHVAMEATGVYWKPVWNILSDGDFELVLANAAHIKNVPGRKTDISDAAWIADLLAHGLIRSSFVPEQEIQELRELLRTRKQLGRQQSSHIKRLQKTLESANVKLDSVITDIVGKSGRAIIQALIAGETDPVKLAALADRRIKASAQELREALRGRLTNHHRFLLHLHLQHIEFADAAIQDIDRNVTALISRMDQEVEAGQTRASFQSLISLLITIPGIDVLAARIVLSEIGPDMSRFPTAGHLLSWAGLCPRNDESAGKRRSNRLRKGSAWLKTLLVQCAWAARRKKGSYFNAQFYRLTDRRGPKKAACAVAASLLTTIYHMLKDGTQFADLGADHFDRRSKEVRAKRLVVQLAKLGFDARLTPLAQAA

SEQ ID NO: 55812 - protein, 315 aa, unidentified
MTTPGRFVGIDVAKRQLDIAERPGGERWAMGNDGAGIAALLERLSGAGPIALIVLEATGGYEIPVVAALTAVGLPVVVVNARQVRDFARAVGKLAKTDAIDAAILAQFAEAVRPERRALPDELTQTLQSWLARRRQLLEMLLAEEQRLAIAVRGLRAPIQQHVEWLRRQMRDIDTELQGLIRQSPVWREQENLLRTVPGVGPVLATTLLADLPELGRLNRKQIAALVGVAPLNWDSGQQRGARHIWGGRAPVRTALYMATVSAVRCNAVIRAFFERLCAAGKPKKVAITACMRKLLTILNAMMHSRTGWLPAGGA

SEQ ID NO: 55813 - protein, 415 aa, unidentified
MALKIVYKICCGIDVHKTFVVACIASTDKHGVTSYERHRFSTYTKGLKNLLQWLLEHNCKDVCMESTGKYWIPVYNILEKDCSIVLAHPKYVKAIRGKKTDKKDAKWIADLFKHDLVAGSFMPPADIRQLRDLMRYRFKLTCFKSSEKNRLQNCLTVSNIQLGNVVSDTFGKSAQAILDKILENPEDTSFDLEPLVFKSLKKKLPELRDAIDGYITPEQAGKLKIIKAHYESLESRKAELEELILALAAPYQQELAILQTAPGISSDFTAIGIISEIGTNMEAFPSAKHLCSWAGLAPTNNESAGKKKSVRVSKAGCYIKPLLVQCANAVVKNSKHPEMRNRYLRLKKRRGHKKAIIAIARMLLTALYHMLKNGENYNAELYRKSDLPPVDREITVEQAILIARNQGYKIKSATA

SEQ ID NO: 55814 - protein, 427 aa, unidentified
MTGLATEEFTAFIGLDWADAKHAICLQAAGSDKREVQVLEHRPEVIEAWATALLQRFAGGPIAIALELNKGPIVEALRKYDGFVLFHINPMMLAKYREAFTPSRAKDDPTDAELQLELLLWHRHKLKPLVPQSPQMRALAQLVEHRRRLVADRVRIMNRLTSTLKGYFPQVLQWLPNKETWLFCDFLTRWPTLKAAQLARRSTLEQFLHQHHVRDDQLIHERLEAIKSATPLTTDESVIIPHALMAQSLIAQLRVIIEAIEHFDHAIAEQAQSHPDFSLFDALPGAGPILTPRLLVAFGEQRERYGSAAEVQTYAGIAPVLERSGKQSWVHWRCQCPKFLRQTFVEWATVSIRFSFWARIYYEQQRDKGASHQAAVRALAFKWIRIVFRCWQNRIPYNESTYLAALQRQGSPLISNMAKLSKKGENT

SEQ ID NO: 55815 - protein, 344 aa, unidentified
MKIAVLGIDLGKNVCCVDGLDASGAVVLRRRVRRDTLIDLVAKLPACIVGMEACCGAHHLGRLFATQGHNIRLMSPEYVRPYVKAQKNDDRDAEGIAEAATRPTMRFVEVKTEAQLDMQTLHRSRERLVGERTALINQLRAVLLERGIVVPQGKRKFEQYLVAMMDEHDGEGLSARMRMLVADTRAQWRELDRRIAAFDAEFARWAKENEDARRLATIPGVGVTISTALIAAIGKAETFEHARDLAAWLGLVPRQATTGGKPRLMGISKRGNKYLRTLLIHGARAALPHLAEKGTTLGRWAKNLLSRVHQNVAVVALANKLARICWAVLRSGEKFAAKEATLTV

SEQ ID NO: 55816 - protein, 339 aa, unidentified
MKLYTAFDLHSNNSYLGIIDENGKRIFKKKLRNDPAMIKETLKPFKTDIEGIVVESTFNWYWLVDLLKEEEYRVHLANPSKIQQYSGLKYSDDKHDAFWLAEMLRLGILPEGYIYPKEERPIRDLLRKRSHIVRLRTALIVSLQNIITRNLGVKLKANDIRFLTTDRVTPLLQENEDLSLAGKVSKESIDFLGRQINAIENTISGRIQLSNPYNRLLSIPGVGKILAFTITLETGPIDRFPKVGNYVSYCRKVPSGRFSNDKKKGTGNRKNGNKYLAWAYSEASDHARLFDTKARIYYQRKLQKTNAPVAHSALAHKLARAAYYIMRDGVVFMPDKAFV

SEQ ID NO: 55817 - protein, 315 aa, unidentified
MSKHNIVCAGIDTGKNKLDVAIAGSDKEACFANCPHGHAGLVAWLRRHQVERIGIEASGGYERAVVAELRRNGFVVIVFQPIQVRAYAKFHLRRAKNDKIDAALIAACTAATEKIHAPPDPRLVALADHQTLIDQIIDDIAKLKNRRESCRDERFRRLWKEEIARLKKMERAEFKRLVAAIRQHTDLGQRLDLIASVDGVGLPTAVAILVRLPEIGRLSREEIAALAGLAPYDDDSGERSGDRHIAGGRERLRKTLYNATLAAAFHWNGQLIAFKDRLLAAGKLHKVMRVACARKLLIFINAVVARGTPWVSSPV

SEQ ID NO: 55818 - protein, 385 aa, unidentified
MRGNSFIPRDYDVFTGLDVSKKSMSVTFTNHQGFIRSLNMPHKAEHLLHYVRKHFPDQKIAFVYEAGPTGYGLYDGLAAQAYPCLIAAPSMIPRAPGQRVKTNRLDSKVLSENLRGGQLKSIHIPSPTYRHLRHLTQLRDVLVSELAGMKQRIKSLLLFEGIEFPPAPPGSQWSFMVKDKLRKLPCSGTVRFKLDQLLDSLEFNEKQVLKTITEIRRFCRNDPELSQCMQYLMSLPGIGWITASQLLARIGDWRELNNIRQLAGFLGLVPTEHSTGERIDRGSITRTGDERLRSKLIQGSWSAIRQDAELREFFRSVCRKHPREVASRVAIVAVARKLSVRISVVLMKQRSYEVREKVHSAPLTQEETSPQGTTRRLREPGEKNS

SEQ ID NO: 55819 - protein, 346 aa, unidentified
MVLIGCDFHPSWQQVSWLNRETGEAGDQKLVHTAGATEEFYGRFPAGSRIGMEATGNGQWFLELMVRLGHEVLVGDAAKIRASDARQQKYDKRDARLLVQLLAEDRFPRIWVPSREQKDLRQLLIHRYKLVRIRAQVKNGLQHLALNQGLLRKRRLWSAAGQKALCELSLAPWASRRREDLFKMMSELDAKIDLLDQAVATAAEENEKARLLMTQPGVGPITAMAFMLTLGEVSRFPRGKQVASYLGLIPREYSSGGHQRLGSISKQGNSFLRMLLVEAAQGAVRCDPGFRNEYLHRCHSKPKGVAKVAAARKLAIRLYWMLRTMTKYPEIVRVESSSRVPLVGAS

SEQ ID NO: 55820 - protein, 348 aa, unidentified
MDRKTIAIDLAKDVFELAIDNGGTVTRERLTRNRFLQYIAHLAPAHIVMEACGSAHHWARHLRARDHDVIMLPAQHVKPYRRGNKTDRADANALLQADRVGGIKPVPIKSVEQQNLQHLHRLREQWKMTRTARINALRGILREHGHAFPAATDTFLASAMAVVDTDPALAMLRPVLHALQAEITFLEDQMADVERQLRELTRHNPEVRAMQTVGGVGLLTSTATLAAVGTPTHFRNGRQFSNWLGITPREHSSGTRQSRGSITRRGNVYLRTLFIHGARSALLAAKRCAKMHPEKLTRLQCWALDLEKRVGHNKAAVALANKMARITWAVWHHAREFDGNWQPAACAA

SEQ ID NO: 55821 - protein, 422 aa, unidentified
MLGRGFRDSPDHRIRQRNGRDHLGLACHEDSEAAVRTAKLFDDPAITLIAPTIRSRRTTVPRYDEVRTLDWTPGLASTENSHGRVYRPRCIYERDSSCDPRVGVRIWRGKCALDPHIIAELIRKRAPTVKRVVFETGPLSVWFYHALRAKDLPVICIDALHAKAALDMATNKTAANDADGLAHLAEVGFFREVRVKRFDSMLARTLAAASTRLVHMTTELSNQIRGIMKTFGLVIPAGKGSVFEKNVRDLLSSSDDLAHIVLPLLDAWKGLRARAADLGRQLVVDARQSRACRVLMSIPGVGAIIATSFATAIEEPGNVRKSRSVGAWVGLTTRRYQSGEVDYDGHISRRGDRHLRGLLYEAASVILTRSSKQSSLRTWGLQLRERGGFKRAAVAVARKLAFTMHTMLKTGEFFNPTAGATA

SEQ ID NO: 55822 - protein, 356 aa, unidentified
MLYLGIDQHARQITISLRNEDGDVLQARQVSTQPEKINDFFQQLTRERLQNGETFVAVLEVCGFNDWLIRMLQDYRCHKVILIQPDDRKKRKTDRRDAAALSELLWVNRQRLLQGKPVRGLRQIDIASSTDQENRRLTTLRKEAGGARTRIVNKIKQILRRHNLQWGMPTKTFPTVAAVTWLKELVLPEMDRMEMNHLLIDLEQVEKRLEELEQVIAQRSATSKEVRILSSMPGMGGRFTALSLACRVGRIERFRRAHSLANYWGLTPGCRNSGENDQRLGNITKAGSAMARWLLAQLVHKVLRRDARLREWFKRIKRRRGSTIARVAVMRKLATIIWHMLSKRLTYAECRARAAT

SEQ ID NO: 55823 - protein, 372 aa, unidentified
MSVYVGIDVHRKRSQVAVINHGGEVLANRNVPNGVEPILGVIGGLPPGTPAAFEAAFGWGWLVELLEDYGFSPHLVHPLQCKAIASARLKNDKVDAAILAQLLRADLLPEAWIAPPAVRQLRAMLRHRAQLVRLRTLLRNRIHAVLADHGHDRPGGCWSGPGRAWLAGLELPAVSREVIEDDLALIDALQQPIDRLDWEVHQRARTEPAVKVLTQLPGVGPFTALVLLAEIGDISRFGSARKLAAWAGLTPTVRGSDRTVRHGHISKQGSVWVRWILGEAAQTAKRHPDFAASYQAIARRRGKKIATTAIARRLLTRAYHLLTDASQASRQQPTPQPPISAPATDAPADREGPPGPGELAFTHEPAKPRSMT

SEQ ID NO: 55824 - protein, 349 aa, unidentified
MVVLGIDAHKRTHTVVAVDEVGRQLGVRVTQSTGTAAHLELVVWAEKFGPSRRWAVEDCRHLSRRLEADLLGAGEQIVRVPPKLMARARDSARTYGKSDPIDALAVARAALREPGLAVARLDGPERELRLLADHREDLVAERTRMINRLRWHLHELDPGWDPKPRSLSRRKNITAVAARLAGMDGMVARLAADLAARITALTGEVNALEKEITARVRELAPSLLAMAGAAELTTAKIVGETAGVDRFKSKDAYARHNGTAPLPAWSGNRIRHRLARTGNRQLNCAIHRIAVTQKRCHPEAQAYLKNRIAAGDTNTEALRALKRRISDAVYRRLKADAAAGTAQPPGQAA

SEQ ID NO: 55825 - protein, 347 aa, unidentified
MKQIAVIGIDLAKNVFQVHGTDAAGNAVLNKKLSRAQMIEFFSKITPCLIGVEACSSAHYWGRRLTDMGHTVKLMPPQYVKPYVKTNKNDARDAEAICEAVTRPNMRFVPIKSEEQQAVLVLHRVRDGIVKQRTALSNQMRGLLAEFGIIVAKGSKQLNGCMTQLLSESDSTLPGNLQKTFSSLFQELTNLTARIKEFDKQIESHLKATDECVRILQIEGVGALTATAVVASVGDIRNFKSASQFAAWLGLVPRQNSSGGKTQLLGISKRGDTYLRWLLVHGARAALSYAKRTEKLTTWQQAMLQRKSLNKVVVAMAHRTARRIWAVLAKDCAYDPLHNQRHAMVGA

SEQ ID NO: 55826 - protein, 355 aa, unidentified
MEKLIRIGMDTSKQVFQLHGVNAAEEPVLRRKLRRKEMVAFFQGLEPTVVGIEACGGAHHWARVLQEFGHQVKLLPPKYAKAYVKRGKNDAADAEALCEAMSRPTMRFVAAKTAEQQAAQMLAGTRDRLIRRRTQLTNAIRGYAAEFGLIAARGVDKIAPLLARLHSEPTLPALARELFAGHAKEYAQLQAQLEAIDAQLMAWHRQNEPSRRLVKIPGIGPIGATLLVMKVAQPEAFQSGRHFSAWIGLTPKDHSTAGKTRLGGITRAGDEALRSVLVVGATAVIQQVRRGKACPWQGTGGHPSPWLVELLKRKPPKLAAVALANKMARIAWKLMVSGQHFNPAHGIATAMDEAA

SEQ ID NO: 55827 - protein, 426 aa, unidentified
MKEHIDYLSTLFVGIDIASRIHVISALDFNQDFYIKMKPFENTKDGAGIVEKLIADVLADNHQFKYVVIGMESTGFYGVHLANYLSTSELLAPFSVRVYCLNPKEVKNYKKSFNDIGKNDGIDSFVIADFARVGRIAIKPWRGSQYLALQRLTRHRMHITECITREKTYMLNNIYLKFSQYALLRNGEHPFSNKYGATAEAILTEFTTNEDIVSSSIEELVEFINSKSKGRIADPEETAKIVQAAARNSYRLDKCLYEPLTISIASSFNCISSFEKELKAIDKAILQTVQGLNPEEYTVLNSIPGIGKVYSAGILAEIGSIKAFQNANQLAKYCGIVWNDNDSGDFESEDSRMSKAGNRYLRYYIIEATGSVINHCPEYKAFYQKKYAETRNHQHKRALALTSRKFIRLLFGLLDKGQLYSPEKSR

SEQ ID NO: 55828 - protein, 359 aa, unidentified
MTSMDHDRPLRRVVVGVDTHKHLHVAAALDQHGGRLDARSFVADRSGYEQLIVWATGFGAPVTFGVEGSGSYGAGLASALRRSAVGVVEVLRTDRRERRLRGKSDTLDAENAARAVLAGTARAVPKSADGEVEMLRTIKVAKDVAVKARSAALISLRQVLVNAPAELREQLEGMSKMALIRRCAALRPGAVTDVAAACKHALRAIARRWLALDEGIRGHEQLLSAITGALVPELVEAFGVGPDIASELLIVAGDNPERVRSEAAFAKLCGTSPIPASSGKTTRHRLNRGGHRHANSALYRAVIVRLQYHEPTKTYLERRTAEGKTKAEIIRCLKRYLAREVWALMRPLRERRQALPETG

SEQ ID NO: 55829 - protein, 338 aa, unidentified
MSIVYVGVDLAKNVFAVHGVDEAGKPVLVRPAVPRAKLHELIASVPPCTVAMEACSGAHHWARLLAAQGHTVRLIAPKFVTPYRMSGARGKTDAADAAAICEAVQRPNMRFVPPKSEQQQSQLMVHRARQGYVQARTACINRIRGLLAEFGHVLALKASTVRRQAGALLEDLPGWANTVIGDLLSELHRLDERIAAYDRHIAQIARQDHRAAQLMRLSGVGATTATAVVAMIGSGHEFKCGRQFAAWVGLTPGQYSSGGKTRLGRITKAGDGYLRSLLILGARSVLARAKRSSDRLSAWALALQQRRGYWKAVVAIAAKNARMAWAVLRRGEDFKMPT

SEQ ID NO: 55830 - protein, 380 aa, unidentified
MPDVNSTAPAVVHQWIVFDVHKNSLVAGILPASGGKPEVKRVENTEKAIRRFFERAGDPGTLAVAYEAGPCGYDLYRLLGRMGIACDVIAPSLTPVRAGDRVKTDRRDAKKLVRLYRAGELSFVSPPTPRQEGLRDLLRCRDDLRCARTAARHRVSKALLRHGHIYREGKKAWTIKHREWLDRQRLDDPLAQLALEQMRAHLDGLDAQLAALDQELAQVALSEPWADPVSWLCCFRGIATHTALGLLAEIGDFRRFASPRELMSYLGLTPTEYSSGDQQHRGHIAKTGNRHARRLMVEAAWHYQHAARLSKRVAERREHVPPAVFARAWRAQVRLHHRHRTLTANGKRPTVATVAVARELCGFIWAAMTDQPLREEAAAA

SEQ ID NO: 55831 - protein, 377 aa, unidentified
MSNCTRYLGLDVHAETITAAIAEGRGRIRSLGKFPNRPEAVRKLIEKLGGGRNLKVCYEAGPTGYALYWQLTKLGIDCEVIAPSLIPKKPGDKVKTDRRDAEKLARSYQNGDLTPVWVPTPEHEALRDLVRQRAAAKHDESRAKHRLITLLLRHATREPNGSRAWTHPWWRWVQALKFDHESRQVVLADCIAEVLHMGERLARLDQAIDRLVESAPAHMRAVIEALQALRGVAKLTAVTVVTEVGTFQRFHRPTQMMGYTGLVPCEHSSGARQSQGGITHTGNAHLRSVLVEAAWHARHRPWLNRRLKQLLPTLPADVAAVAWKAQERLHRKFSKMIYSRKHAGVVAAAVARELVGFIWAIGTMVEAKQTNTVARAA

SEQ ID NO: 55832 - protein, 340 aa, unidentified
MSLYGGIDLHANNSVIVLLNEQDEVIYQKRLPNDLTMILGQLAPYHAELQGLVVESTYNWYWLVDGLMEASYRVHLANPAAIQQYSGLKYTNDHSDARWLAHLLHLGVLPEGYIYPKPERAVRDLLRKRTHLVRQHTANILSVQNILARNTGARFSGKRIQELTQQDLTTLLADETQVLAVASSLVVLDCLRQQIKTLEKSVHKRLHHTPSYEQLLTVQGIGTILAQTITLETGAISRFPTVGHYASYCRCVDSTKLSNGKRKGTGNVKNGNPYLAWAYMEAAQFALRFQPAAQRFYQRKLAKSRNNTILARKAVAHKLVRACYYMMRDLVPFEETKAFG

SEQ ID NO: 55833 - protein, 385 aa, unidentified
MTKTPKKVTRTAPAAPVAEVIGGVDTHRDFHVAAAKDSLGPTLGTRSFPATSAGYAALVAWLAGFGPISAVGVEGTGCYGAGLSTYLIEHGITVVEVNRPNRQKRRRAGKSDPRDAINAAAAVQSGDATAAPKTRTGPIESVRVLRQTRDLLVTARTRAINTLKALLVTAPAPLRESLHGLSTTALLTHCAAFDTPTADVKGLRGKAKTQATTDLAEALLDPGMGVRTVLGELARIIAHHNTHIAELDIALDALVHRIAPRTTALFGLGPDTTGQLLTTVSDNPDRIHSEPALATLTGVAPQDCSSGRTQDHHRLSRAGDRQANAALYRTVLTRLAWHEPTRTYMTTRLTPNASNKKHLIRCLKRYLIREIYPHLTTDLATLHTA

SEQ ID NO: 55834 - protein, 356 aa, unidentified
MQTQVTKKIDFKGKDLFIGLDVHKKSWSVTILVEGMEHRTFTQPPDPLALYTYLQRMFPGGTYHSAYEAGFCGYGIHRALNDLGIKNIVINAADIPSSQKDQLQKRDPVDSRKIARALEKGLLRAIHIFDRDMEELRSLNRTRFYLMRDFRRSKNRIKSFLQYYSIFIPPEFDNNQWTLKFIGWIKQIQMKTSSGQDAFSNLIRSFEYNREQILILSRQIRIRVREYDKELYNLLKTISGIGPLTSSALITEIGDINRFPHINHLSSFVGLVPRVKQSGETSYNAGMTFRCNEYLRTLLIESSWQAIRLDPALMQYYQQHIINNKGQKVIIKVARKLLNRIRYVMKNRQPYVTGVA

SEQ ID NO: 55835 - protein, 414 aa, unidentified
MLKIVYRVCCGMDVHKSFVVACIASTTEYGVTTYKSKRFSTFTGDLRRCAAWLAENSCKDVCMESTGKYWIPIYNILEPTCNIVLAHPKYVKAIRGKKTDKRDAKWIADIFKHDLVAGSFIPPADIRQLRDLVRYRWKLTNFTTGEKNRAQNCLTVSNIKLDDVFSDVFGKTASAITTRILENPAEKITDVSGFRTKGMKATNEQVLAAVDGEMCEEQAEKLRIIRSHMDSLALCKLNLESLILSIAEKYLPQLNLVMTVPGIQSFTAIGIISEIGVDMSVFPTSKHLCSWAGLTPQNNESAGKKKTTRISRAGAYIKPLLVQCALNAVRAKKFPEVRNRYLALKKRRGHKKAIIAIARMLLTAIYNILKKNESYNPELYRQTDRPPAHREVSVAEAIFILQRQGYLVAAPPTP

SEQ ID NO: 55836 - protein, 506 aa, unidentified
MKVQASKPTFTIDYNPIGQYGSNICRQDIGRKRPYRSLLRQRYWAWSFTSKLITMAKVAKRKQTSKGLRLEVVNPNAAGIDISPKEMQVCVPSDRDGECNRTFGVYTEDLHYIAEWLKACCIDTVAMESTGIYWLPVFRILKESGFDVILVNASDVKNFSGRKTDASDAEWLMMLHSYGLLKPCFQPENIARTMRNLVRHRDNLIRSASREVLHLQKAMEQMNLKLDNVFSDILGKSGQSVIKAILNGERDPKVLSDLADPRCRTSKEEIEKSLQATWDEEHLFEMRQSDSLYQFYQQLIAECDAKINEIAMQYSATVDAPKTELLRSGKYNAKKNRIGFDVEKVAFELWGVNVMRIPGMSRGALLRLVGELGAGFTTKFVDVKHFVSWANLVPNNKISGGALLSSKVPKKKNPVGIIFRQAANTLKAAKNPLGNYFRHMRAKGGHLQAMVATGKKLASIFYCMVQRKVEYNEKVYCNHRKQELQNKVAYLHKRLQRMESELANCG

SEQ ID NO: 55837 - protein, 419 aa, unidentified
MSFKIFKFNCCGLDVHKTWIYACIGITDSNNRTEYKQARFSSFTKGLNELCDWLAKYNCKDVCMESTGKYWIPVFNILEQHSFWVTLSHPKYTKPMKGNKTDRKDAKWICDLYMCGMVKPSFIPPADIRELRDLVRYRFKLTCMITGEKNRAQNCLTVSNLKLDDVFSDVFGKSSRSITEHILQHPGEKFDIAPFVDSRCKTPITEIQAAVDGAISKEQVVKLRQCLDHIDELNKHISEVEQEILRLSDKYEAALNLIRTVPGFDKNPLTAIQVLSEIGGDMSVFPTAKHLVSWAGCCPRNDQSNQKIKSTRISRAGSYFKPVLVQVANALIKSKKHSEFTSRYKRIKARRGHKKAIIAICRMILTAIWHILSDLKPYTPEGFLESRPVKEGKVLSTSQALNLLKQRGYIIKGEPLAVS

SEQ ID NO: 55838 - protein, 428 aa, unidentified
MTNRQPIPTDALLVALDIAKVRNEVLIEASNHKRRRRLSVLNTRAEHDRLIETLRAYGEPVICAFEATGNYHRPIAWRLIEAGFDVRLVSSMALARTREALHNGWDKNDPRDAQVILHMLRIGATQRYHDPLRAGINDVQELSKTHEAIAKAKTEIQHRILTHYLPLYFPEIERFRGNSRSDWFFAFLDAFPTPASIMALSKEAFIEAAWDVVGRKVSKERLLADIYETARTSIGLPLPIDAPAIRMFRMVIAEARSLIRQRNEIEDMADAMLRDSADYKALRKVPGIGPVIALTILAEGGDLRRFRHHRQFLKFCGLDLSTQQSGQHRGQTRLSKFGNARLRRTLWIAGQVAIRQRENGFRHKFERYIAKDRDNPDLRRKALTAITAKMARVVHAIIKSGSDYRPFVEGRVPGGRISFCGAVRAPKG

SEQ ID NO: 55839 - protein, 351 aa, unidentified
MIELGVDQHKRFSQVAALDTQTGKIEHRRLEHDDPQAIRSYMASLGPQVRASLETTGNWYWLADLLEEEGAQVQLANTLETRRLLKARAKNDRLDAQALAVLSHQGLLPQVYLPTKAQRDQREVHRFRIRLLGLQTQVRNIVHSILSKLNVPTPFTDMFGRSGRSYLDRLALREPYAGQLRSALRVLDAIAPEVLRAKQQIVHRLKGEPLADLLQSAPGIGQLTAYLILSEVGPIERFRSQKQFARYCCLTPGTWRSARRSRDVPVGRHGNLYLKAAFGSAAVTAIRTDATMAGYYRRTAARKGKQTARMATARRLAICVYQMLTRRQRYRPAAQQIRHTGKPHLCPGQHS

SEQ ID NO: 55840 - protein, 311 aa, unidentified
MYVGIDVSKDRLDVAVRPTSEVWEVANDTAGVEALCERLKGLSVELIVLEATGGYESAAVAAMGSAGLPVVVVNPRQVRDFAKATGKLAKTDSIDAQILALFAERVRPEIRELTSEAAQALEELLARRRQILEMVQAERNRLEHARGPVRKDLTEHIRYLQKRLVRVDADLEQRIRESPFWRAKEDLLRSVPGIGPVVSRTLIAELPELGRLSRQEIAALVGVAPLNRDSGKRRGKRSTWGGRASVRGVLYMAAVVASRRNAAIRQFYQRLRGAGKPAKVALVACMRKLLSILNSMVRKNRPWCPEMVPQS

SEQ ID NO: 55841 - protein, 354 aa, unidentified
MKYIKKVIGVDISKDSFVIRFGTLEFNQQQKISKAFKFKNNKAGFNQLLKTINKINYFSSEEQTLEDIPVWFVMEATGVYYENLAYFLTENKFSISVILPNKIKHFAKTLEIKSKTDEIDAAIQTQFGLEKKLKPWSAPSITLRSLKELSREYHTINKSLTQIKNRLHAKNYSYKPTAETLKRINEQKKLLKKQLKQIREQIATIVKSDDQLYSKVKKIITTKGLQIITVVSVLGETNGFALIQNKNQLTSYAGFDIQQSQSGNYKGKTRISKKGNAYLRKAVYMPAISAARYNENLKNLYKRLCITKINKKIALVAVARKLLILIYTLWKKDQEFIVNYENVKTNLKNINISS

SEQ ID NO: 55842 - protein, 277 aa, unidentified
MTQTNNNITTAGIDTSKLKLDVAVHGRTERWRVANALSGWRALVANLAKAGVTRVGIEATGGYERGVVEHLRAADFTVLVLQPIQVKAFGRVHLRRAKNDALDAELIAACTAAIDQPRIAPDPRLAELAGYLTFLEQLEEDIARFKTRLEHIDEPGLRRIVNSDIARLKARKAAQIRDIAKRLRAYSDLAKRLDLVLSIPGIGERTALALLIRMPELGRVSREEAAALAGLAPFDDDSGQHRGQRHIAGGRGRLRRSLPNVIGSSPSAAQFLGTERN

SEQ ID NO: 55843 - protein, 338 aa, unidentified
METMHDRCAGIDIGKRSLTVCAITPGPRGEPVRETRSFGTLTSDLLRLADWLADREITAVAMESTGSYWKPIWNLLEDRFELLLANAAHIKAVPGRKTDVRDAEWIADLLRHGLLRASFIPARPDRELRELVRYRTTLVRERASEINRLAKVLEGANIKLGSVSTNLGGVSGRSMLAALSAGVDDAEALADLARGRLRAKREALIEALAGSVGAHQRFLLGTQLRHLVDLDGLIESLDAEIASRLATAGAVIERLATIPGIGRRTAEIIVAEIGLDMARFGSARQLASWAGMCPGNYESAGTSHGGTWVPSTVGWPLDVVRGERSWPSAIPSSASSTT

SEQ ID NO: 55844 - protein, 343 aa, unidentified
MEYGAIDLHTKESQIRIIDGDGAVVLERRVATTRARLTDVFGARASQRILLESGTGSEWVARHLEGLGHEVVVADPNYAPMYGQRTRRIKTDRRDVAALAEANRLGVYRKAHRVSAPQRDVRRRLRVRDQLVHMRRQAINLLRAQLRSEGVRVPTGAAESFAGRFIRSEVSEGVRGAMAPLLDLLAAIAPLIAQAEQWTRHAAKADPVARRLMTAPGVGPVVALAFQATVDDVGRFATPGAVTSYLGLVPREDSSGERQRKGAITKAGPSRMRVLLIQSAWHLWRSPAGSATLHAWARRLGDRRGRRIAVVALARRLARILWAMWRDGRDFEPARVGRLAVAA

SEQ ID NO: 55845 - protein, 350 aa, unidentified
MPRKFDTAVVTIGIDPGKNTLHLVGLDARGEIVLREKVARTKIVSRLANVPPCLIGIEAGMGTHYVTRQLLALDHDVRQVPPVYAKPFRQTHKNDFRDAHAVAEAVQRPTTRCVPPKTDEQLDLQALHRVRYRLVGQRTAIINQIRCFLLEHGITVRQRLHWLRHALPDIVAQRTDVLSPRMVRILEDLAQDWRRLDDRVEAVSGEIDALSKNTELCLNLMTIPGIGPIISSAVVAAIGDGAAFARGRDFAAWLGLVPKQISTGDRTILGRITKRGNRYLRMLFLQAARVVLLRPKNWMQHSFGPWLAAAAQRLHHNVLATALANKLARIAWSVLVQHREYEARLSVATT

SEQ ID NO: 55846 - protein, 414 aa, unidentified
MRALVERCCGLDVHQDTVVACLLIGEPGKPLRQEVRTWATTTRALEALRDWLQAEKVTHVGMESTGVYWRPIYAVLEGPFVLIVGNARHIKTVPGRKTDVKDAAWIADLVRHGLIAPSYVPPQPLRELRDLLRYRRKLVEGRASERNRLLKLLETANIKLASVMSDVFGVSGLAILKPLVAGETSPERLADLGKGPLRKKRADLVRALEGKVEEHHRFLMGVQLRRLDAADHDIAALNERISERLKPYTAEHALLMQIPGVDGLAAAAIIAEIGVDMAVFLSAHHLAAWAGVCPGNHESAGRSKSGRTRKGNVHLRTILVGAAISAGRCKGTYLRDKYHRLKARRGALRAALAIAHKILIAAYHMLARGVSYRELGEAYLDQLSQTRTAAHLKRRLERLGYHVTLEPKTVAMVT

SEQ ID NO: 55847 - protein, 348 aa, unidentified
MLGADTHKRSHSVAAVAAATGELLGEQTVPVGLRGFAALLRWARSLDGERAWALEDCRHVSGSLERFLIERGERVLRIPTHLTANARRSARQRGKSDPIDALNVARAALREGLESFPAAHLDGPELDLRLLVDHRERLVRHRVELNSTLLWHLHDLWPELQLPGGALFSKKWSTRISRRLARAEQTMRVRIARDELRRLRELTQAVTGLEREITELVGQLAPQLLSEPGFGPLIAAKLVGEIAGAQRFATPARLARAAGVAPIPASSGNTQRQRLDRGGNRQINAALHRVIVTRARCHPPTRDYIQRRRSEGKSTREAIRCLKRYLARRVWRLLQPTTPPRTSTRSIS

SEQ ID NO: 55848 - protein, 313 aa, unidentified
MPIKVVGIDIAKNLFQVCVLSADGQILSNRKVKRDKLLDTVRQFPEQTAIALESCATSHHWGRIFQELGHRVALIPAQHVKPFVGRQKNDANDARAICEAFSRPDIHFVPVKSIEQQDLKAIRSVRKRLVEYRTALANQIRGLAAEYGVVFPLSIKSLRSHLPLAIEDAENQLSHVMRSLLKTLYCNFINISDEIDEVTQSITRLSQQHPRYEAVKNIPGFGPILTAAIISEVGSGKQFQNGRQFSAWCGLVPKQNSSGGKSSLGALSKSGNRDLRTLLIHGARAVVRCRTNSMDPMGVWLRSLMHVVGKLKL

SEQ ID NO: 55849 - protein, 343 aa, unidentified
MDYFAGLDVSVKDTSVCIVDGTGKIVREVKVASEPQALLAVLRNATYCFKRIGLEAGPLSQWLYGALAEAGLPVICVETRHMRAVLKAQINKTDRNDARGMAQMMRVGLYRPVHVKTLRSQKLRMVLTHRKLVQSKAIALDNDLRGTLRNFGLKVGVVGTVKFEARVRELVESLPDVAELVEPLLIVRQVLREQLGILHRRLLAIVRDDDVCRRLMTIPGVGPVVALTYRATVDVPIRFRKSKSVGAVFGLTCAKYQSGEIDRTGAISRCGDEMVRTTLYEAAQILLVRSTKWSWLKAWAMQIARRRGMKRAIVALARRLAVIMHRIWVDGTEFRWTRKAAAA

SEQ ID NO: 55850 - protein, 348 aa, unidentified
MTHFVGLDVSVKETSVCVVDAAGRVILEQKVPTEPADIITLLTSLGVGFCRIGIEAGPLSQWLVNALTEADLPVICVETRHMKALLTAQQINKTDRNDARGIAQMMRVGLFKPVHVKTLVAQEQRMLLTSRKLLQRKLLDLECDLRGTLRNFGLKVGIVSGGRYEARVHELVTDFPRLAAIVGPLLNVRRVMRQQLAVLHKMLLDTVRDDPVCQRLMTAPGVGAVVALTYRATVDQPQRFVHSRAVGAHVGLTPKRYQSGEVDYDGGVSKCGDALLRTMLYEAAHSLLIHSGKWSWLKAWGIRVAQRRGMRRAVVAVARRLAVVLHRMWVDGSEFRWSKNSTAVPAVT

SEQ ID NO: 55851 - protein, 342 aa, unidentified
MEYYAGIDVSLECSSVCVVDASGKIIREGKVASEPDALISWLKSRGCELIRIGLEAGPLSQWLFAAIREAGLAVELLETRHVRKAFEAMPVKSDRNDARGIAQLMRLGWFRPVHCKSMGAQEVRAVLTARKLIQTKLQDVENSLRGILRGFGLKVGKTTARSFAGRIQELVKGHPNLEAIGKALLSVRAVLLREFNAFEKRVRAMARSDVRTKLLMSTPAVGPIVALTYASAVDDTARFKSSKQTGPHFGLTPKRYQSGETDYSGRISRIGDASVREALYQAAHVMLTKPVKGCSQLKSWAMRIARRAGMSKAKVALARKLAVILHRMLANGTPFNAAAAAA

SEQ ID NO: 55852 - protein, 309 aa, unidentified
MKEELVYLGVDIAKSYLDAAIGNEKHRFANECSGHRELIKWVKQLKAPVQVICESSGGYERALVQALASAQLKVSLVQANRVRQFARAAGIFAKTDRIDAKVLCAFGEVMRPETISASQLEQEHLRELESQRRHLTHLLVMEQNRAARVSDRCVRRLNRSLLNQIKKQIERLDLLIREHIEASPELSVKAQKLTAINGVGARTAALLLARMPELGQLNRREVAALVGVAPFNRDSGKMRGKRAIHGGRKFVRHGLYMAAVVAARHNPILRAFYLRLPAVGKPTKLALTATMRKLLIALNSALKPDLNYA

SEQ ID NO: 55853 - protein, 352 aa, unidentified
MTRITTIGLDLAKKVFHVHGVDFAGNVVVARRLKRKEVLAFFAKLTPCLVGMEACGSAHYWAREIAKLGHTVKLMPPKYVKAYVKRGKTDPGDAAAICEAVTRPTMSFVPIKAVEQQGLSMLHSARSQLVGQRMQLINAARGHPSEFGIVAARGLLGFAELAAIVRDESDRRLPATARAALMVLVRQIEAISTEIASLDRVLMKENKASELGPRLETIPSVGPVIASAFRARVNDAKLFENGRHLSAWIGLVPENDSTGGKVKQKGLSKKGDRYLRSLLVNGAMSVVRQAQKRPDKHPWVAKLLGRMSAKQAAIAIANKTARVAWAIMVHGGVYEAGHRAPQYRAQVCAAAG

SEQ ID NO: 55854 - protein, 335 aa, unidentified
MSLKLLAIDLGKRSFHCHGIDSDGVIFSRKVNRSKLIETIKELAPETVAMEACASAHFWGRNFLADGRQVLLINPRFVKPFVKGSKNDAADAEGIYEAALRPTMRFVPVKSTEQQDLQSLHRARERVVCARTALINHMRGLLGEYGVILPQGAWRFLTQAADAIATAELSDLTRELFGDLLDELRSLDLRLDKLDQQLLRLCRTNEACRRLSKLPGVGPVIATALVAAVDDGRHFRSGRELAAWIGLVPRQYTTGGKPRLGGIGRRANHYLRRQMIHGARAVMFRLAKHDDPRSQWLKGLAARRGFNRAIVALANKTARIAWALLTRKEDYLAAA

SEQ ID NO: 55855 - protein, 361 aa, unidentified
MFTERTSVGLDVHARSVVAAAIDGVTGEVFRARLTPGNDDVIDWVRALPGPSAVVYEAGPTGFGLSRAFTTAGIRCEIAAPSKIQRPGGDRVKTDARDAMHLAKLLRLDEVVSVAVPSLQREAARDLVRAREDVRGDLMRARHRVSKLLLRQGIVYYGGSAWTGIHLLWLRAQHFDAPGLQIAFDAEHEAVLQAEARRDRLDKAIVAMAADSEFTPVVHRLGCLRGISTLTAFGLAVEVGDWDRLTGSSIGAYLGLVPTESSSGQSRSQGSITKTGNTHARRLLVEAAWHHRKPYRTPGATMTARWELAPAAARARGHAGNQRLHQRWLHFSDRKKRPVVANVAIARELAGWCWSLAVMDD

SEQ ID NO: 55856 - protein, 361 aa, unidentified
MLKHIFVGIDLGDKNSVGRIAVDREKTERFGFVNNRRGRARLFSEAKRRAQEAGGAKIVMAYEASSCGFVLHEEAEAMGICCWVLAPTKMEKSVEQRQHKNDDRDADDVVEKLRGHVLAGNRLPTVWVPDQQTRDDRELVRARVELGEKQTQVKSQIQMLLKRHGVEKASGLGAGWTVRYRRWLEALTESEPLGRGGRQTLGSLLRQLSFIEGEIERMQQPVERLADEPRHKPIVDELRQECGVGLLTAMVYRTEIGYAGRFRRGRQTGKYVGLTPTSYESGEQNDRKGHISRQGPPRLRKMLCQASWSQVCHDASAKRIYQQLVSRNPKKKKIAIVAVMRRLAVRLWHRMRKVEVEMGLA

SEQ ID NO: 55857 - protein, 412 aa, unidentified
MQVVHGSCCGLDIHKKSVVACVLLTNEQGQVQREIRTFGTMTVDLLALADWLGHCEITHVAMESTGVYWRPVYNLLEDETRTLVLVNPQHIKAVPGRKTDVKDAEWLADLLRHGLVQASFIPPAPIRELRELTRHRKALIHQRTQEVNRLEKVLEGANIKLAAVATSMLGKSVRDMLEALLAGEEDVTAMAALARGRMRAKLPALRQALTGRLQAYHRVLLRQILAHLDFLAAAIAQLEGEIEQRLRPYEDAVRLLQTIPGIKDITAATIVAELGVDMAQFPSAKHLASWAAVCPGNKQSGGKRLSGKTRQGNAWLKAVLCEVAWANARHPASYIGAQFRRLTRRRGVYRALIAVAHTLLVIIYHVLKTKQPYHELGADYFDKLDQAYLERHHVRRLEQLGYSVTLAPSGVV

SEQ ID NO: 55858 - protein, 427 aa, unidentified
MKTYILRDPKTVEPQNRQPNPPPNSRRNDPAITATVDAICGRPAPPPALSGPVLFLGLDVHNDSIAVSLAPSDSTEVRRYGIIGGTHDDVLKLIKKLSAAHPGAALKFCYEAGPRGYPLCRFIRQHGAECIIVSPSKVPRQPGARVKTDRRDADQLARLYRAGELTGIYVPDPQDEAVRDLIRARYQVQQQQHRARQQLKMFLLRQNIRYAGTTSWTAAHLRFLATVKLAFAEQQFVFQEMVNVISEAGQRLERYEKQIAAVVEGWRWQPVVQALTSLRGVALLTGATLVAELGDLERFATAPQLMSYLGLCPGEHTSGETRQQGGITKMGNGIARKAMIEAAWQYRVPARISRTVLARQEGLPKAVTEAAWNAQTRLHQRYKHLTGVGRKKSQVAAAALGRELSGFVWAIGRMVKPRAVQPETVKQ

SEQ ID NO: 55859 - protein, 389 aa, unidentified
MEHLMSQLNDLSRSLTSLEQDNAIIAVIEMSQSSWLVAGIVPGIERHPLKKLEPNEGELLRLLMRWRAEATKMGCTITRIAVAYEAGRDGFWLARWLRAHDIETYVIHPTSVAVSREHRRAKTDRLDTGLLKRVFIGWLRGEPDHCHMVTIPTLAEEDAKRPNREREGLVRDRTRIVNRMKSCLARFGVRSFKPTLRKAPERLATLVTPEGVPLPANTLLELRRDMARLRFIMDQIKEVEEARAQRLEQAPQEKSHAMVRLLARVIGVGIETADMLVHEILSRSLRDRRAVARYAGLTGAPDESGSRRQEKGLAKAGNARVRRGMIQLAWRFLLFQKDSALAQWYCTRTESAGKKRKTMIVALARKLLIALWRLVTIGEVPAGVVLRAA

SEQ ID NO: 55860 - protein, 407 aa, unidentified
MKAGRQETQIDPKVKVPKLDFGGYMQPTRTTHFTPPEEILAVALELASGAWKMAFQDGKHEKPAICTVSSEIAASRLIEATQEITKIKKKWGLPAKVRTVVLYEAGQDGFWIKRALTKLGYEALICDPGSIPVERHARRAKTDRLDAIKLVLCLRAWLRGEVDRMHVIRVPEVKDEALRHLSRDRGELQKEIGQHRDRMRKLLRTVGCWQSVDGNVAVRLAKDAFRCHDGTALPPELQERLTRECERLTLAEQQFVMLEQDLIHQLPEGTQDRIDNLMRLKAIGPVGAARLVLELFWRHFDNRKQVGSCVGLVPQPYDSGESRVDQGISKQGNRRVRALLIEMAWFWLRYQPDSAIAKWYVKRTTGTGENKRGKRSAIVAVARRLAIALWRYLEHGIMPDGAILKAH

SEQ ID NO: 55861 - protein, 316 aa, unidentified
MTDAAVFVGIDISKTRLDVAVRPTGSAFTVSYDETGITTVVQRLRPLSPVGIVLEATGGLEVLLSGALATAGLPVAVVNPRQVRDFARATGRLAKTDALDAQILAQFAEAVRPACRPLPDASTQQLAALIMRRRQLVEMLTAEKNRRGSAPRVMRTNIQQHIEWLQQHLAQLDQELTTAVQASPIWREHDELLQSVPGIGPVVTRTLLAELPELGTLTHKQIAALVGVAPLNRDSGTFRGKRRVWGGRATVRAVLYMGALVAARHNRVLKAFYQRLRQAGKAPKVALTACMRKLLTMLNAMLKHRTSWRDTSAQTT

SEQ ID NO: 55862 - protein, 391 aa, unidentified
MTKPKTKTVNDFSRCLDPLDMDATVIAVIEMSQSSWLVAGIVPGVERQPLKKLAIDEHALLNLLNRWRVEAEKQGHQITRIAVAFEAGHDGFWLARWLAAQGVEAHVIHASSVAVTREHRRAKTDRLDTELLKRAFLGWLRGERGHCKMVAVPTLAEEDAKRPSRERETLVGEASRIITRVKAAFVRLGIRGFNPKLKAAATRLETLRTPEDEPIPPNTLAALKRDLERHRIVKKQIREIEQTRLDVLKQAPEKGPHAMVLLLARVIGVGVETADMLVQEVLSRSMRDRRAVGRYAGLTGSPDESGAKRREKGLARSGNARVRHGMIQLAWRFLLFQKDSALAQWYRQRTADAPSTRKTLIVALARKLLIALWRLAREGVVPEGVRVRPAA

SEQ ID NO: 55863 - protein, 366 aa, unidentified
MDAIYIGVDFHSKQQTICYLKIDTGELVIAELQHQDKEQVRAFYQQFQGHVIIGLEASGYSLWFEAMLEQLGCEVWLGDATEIRRRARWRQKSDRRDAELIRDLMVHHEFPRLHQPLPASREVLRMLRYRQKLIKLRTMSKNSLQAIALQAGLAKGKQLFTAAGQQQFQAVSLSPVLQWQRDHWLELLKPLNQQLLETMIWFKAQSKDDVSIQRLRTHPGIGLLSSLCLLHTLQPVTRFRNQRKVVAYAGLDPVVRSSAERAIYLGISKGGSRMLRYLLVEAVHTAVRYDEDLKRFYQRVAERRGRPKAKVATARKLLIRAYIMMRDEIDYAEFRRRASAARLARRGQGPTKVPVVLIGQSASPGA

SEQ ID NO: 55864 - protein, 451 aa, unidentified
MAERNRKLTGKSSGQHRSLEIAYPNAAGIDIGNAAHFVAVPPDRDDYPVREFPSFTQDLHALADWLTACRVDTVAMESTGVYWIPLFELLEARGFKVLLVNARHVKNVSGRKSDVLDCQWLQQLMSYGLLAGAFRPDDEVCVLRSLWRQRARLLREQGRQVQRMQKALTQMNIQLANVISDIVGVTGQLIVRAILAGERDGHTLAALKNGRIHASEDEIARSLQGNWRREHLFDLGQSVAMFDFIGTQLADCDREVDQQLRLLQSHDALPEKSGKRKGSRNAPEFDLRARLFQMCGVDLTRIDGINITTALAVVSETGADLSRFPTVRHFTSWLGLCPGTKISGGKILSAKTKRVVNRAAQALRLAAASLRASKSALGAYYRRLCARMDKPKAVTAAAHKLARLVYTMLTRGEEYTDQGQEQYEHQYRDRLLRNLAKRAEQLGMTLTPAAA

SEQ ID NO: 55865 - protein, 458 aa, unidentified
MRIIGIDLATTAKHRAIVADERSRFITPLIKFETRLADLERLRARALAGAKPDEELVVVMEATDINWYPISVYFSRQAATVHVVNPRVTADLARFYKRHAQSDRLSAKILARLPLISPDSVYPLVLSGADYLALQRGCKELDRLTVRISAHKNRLQAMDRLGWPGLKLRVFSDPVGPAAGWFREHFYEPRQVVKAGVHGLCQAWRAAEVYNKDEGWIESLVELAKELLDLYGDQGAYLDYVALAGEVRREQRRLAEVEADAHYVRLRVTRPRYRQIHSSRNLETMRGIGQDGAAVYVGFVGTPQRFATNRAFRGWSGLVPRSRQSGESESKGLRISQAGPDLVKKYAYLDADSARQWDPQIAALYYDQMVNKGKHHTQAVCACATHLLDRVWAMLTQDRVYELRDVDSTAVTPDQAQAIIAERYIVPQQVRQQSNRRARRERAEQQTERKEERRSRSR

SEQ ID NO: 55866 - protein, 341 aa, unidentified
MDHYVGIDVSLEASSICVVDSNGKIIREGKVASEPGALIEWLRNLKLQLTRIGLEAGPLSQWLYAAMRQAGLAVELLETRHVRNALETMPVKTDRNDARGIAQLMRLGWFRPVHCKSTGAQETRALLTARKLVQVKLHDLEMSLRGILRGFGLKVGPTTPVRFEGRIRELVAGHPSLEAIAESLLAVRVTLRREFERFEKQLRTMARCDTRVRLLTSVPGVGAIVSLTFVAAIDDPTRFKSSKEVGAYFGLTPTKYQSGETDIDGHISKIGDAGVRAALYEAAHIILTKPLKGCTALKSWGMKLAKRGGMKKAKVAMARKLAVIMHRMLADGTSFRHVAAA

SEQ ID NO: 55867 - protein, 380 aa, unidentified
MSITTKYVGLDVSKSKIAVALADEGERGEARYWGMLEHSKSAVSKLMKHLQQNGEVQLNVCYEAGPTGYVLYRWLLEMGIACTVVAPSLIPKRPGDRIKTDKRDAKRLAQLFRAGELTAVYTPTPEDEALRDLVRAREDAKEDLTRHMQRLGKFLLRYQISNPKKSKTGTFAHEEWLDTLRFSNECQRVTFQEYRQSIWETKERILRYEQEIEQQAEKGSHSQRPLIQAFQALRGVALVTAVTLSTEIISISRFASAADFMSYCGLVTSENSSGDTRRQGRITKAGNAHLRRVLVEAAWHYRHTPGVRRKLRERLTGLPAEVQSLAWSAQTRLHKKYNALLWRGKTKGCIAVAVARELAGFVWAIAQEVQRQSVEIQEAG

SEQ ID NO: 55868 - protein, 403 aa, unidentified
MNNVAGIDVSKGKSMVSVLRPFGEVVAKPFSIGHTGSELKELADYLKSLDGETRVVMEHTGRYYEPVARFLHEEGVFVSAVNPKLIKDYGNNTLRKVKTDKADARKIARYGLDNWAELRQHTPMDTIRMQLKTLNRQQSLYAKTKTMMKNNLIALLDQTYPGVNALFDSPVREDGSQKWVDFATAFWHVDCVRNMSLTAFAERYRKWCKRHGYNFRQSQAAEVHPGAQDLIAMLPKDALTKTMVRQAIDALNAVSASLERLKAEMQALAAQLPEYPVVMAMHGVGDSLGPQLMAELGDVARFTHRNAITAFAGVDPGADQSGTHEAKSTRVSKSGPPELRRALFLVMDCLLKTQPQDDPVYRFMDKKRAEGKPYLVYMTAGANKFLRIYYGRVKEYLASLEEN

SEQ ID NO: 55869 - protein, 333 aa, unidentified
MKAFIGIDVSKEKLDVAVLSNGNIIACGEFGNTKSGTNTMRKWAKKQCGRGTEIIFGCEASGIYHSICAQTLFDAKQKVVVINPRFTKHELEAMGRKNKTDKVDAEVIAIRLSREIDPLWNPPSESIQLLRDLMLRRDQLVRSITVEKGRAERYRKDSIADDSVKRMLKFLEQELAEIERKIETLIKSDEELDTQTRIGDTVPGVGPVVARVFIAAVGDVNDFADADQVQSYLGICSQQRISGKSLNRSWMSKRGNQLLRKTLYMGAMATATRSKNSPYRQYYESLIARGKSEKAAIAAVMRKIVRALYAVLRDGVPFSIARYAVPPHELKQC

SEQ ID NO: 55870 - protein, 341 aa, unidentified
MEVKYQRCCGIDVRKQMVVACVMVSGEQPGEPDKETRTFKTMSDDLGALAAWLKAKGVTHVAMESTGVYWKPVYNLLEGQFEILVVNAERIKALRGKKTDSADAEWIADLLRHGLLSGSFIPTAQQRALRDLTRFRSSLVEDQARAVNRLQKVLEDANIKLASVATDVTGVSERAILEALLAGQTDPQVLAELALRKKIGLLQKALSGRLKPHHRVMVTELLGQIDHLDETIERLNAEITEQMRPFEAEIERLDSIPGVSRRVAEVLVAEVGVDMQPFERAENLASWAGMCPGNNESAGKRKSGKTRKGSRWLRAALTEAAHGAARSKHTYLKRQFGFTRV

SEQ ID NO: 55871 - protein, 348 aa, unidentified
MRLYTGQHKFYAGIDLHARSMYIHILNDQGKTVFDQDLPASPTAFLEAVKPFRDGLVVGAECMFAWYWLADLCEDHSIPFVLGHALYMKAIHGGKAKTDKIDAGKLAALLRGGLFPMAYAYPRAKRQTRDLLRRRSFFVRQRAQLIAHIQNTNSQFNHPPFSKKLTYAGNRTADIAERFEDPSTKLSVEADLGLISGYDEQIAAMERHLTKNAKIDDPVTFGLLRSVPGIGPILGLVLLYEIDQIARFPEAGNFLSYSRLVRCSHESAGKVKGSGGKKIGNAHLKWAFSEAACLMLRSCLPIKSWMQRQEKKGTKRKALALLEAKLGRCIYHLWRKQVPFDAKRFLNS

SEQ ID NO: 55872 - protein, 326 aa, unidentified
MANLEKKVIGVDVSLKMLTLNYKDSEGVIITRNIPNLKKDILGNLNIFDKEEYKIIVEATGAYSSKILYFSYELGFEVSMVNPVSIKRYGELKNHISKTDAEDSRLIREYGEQVEFRPYTPKSKTLEYLDQELNLWHDLEQAKKKYGLKLKALQQKALCSKETIKHYERLIRNHDSEIEKVMSRMSRLQDEELKRDVDLLSSISGIGEKTALLLLVATNGFKNFANAKQLSKYFGVAPRLYESGTKKKSLGKCRTTKKHVRSILYVCSWTAMRFNSQCRELYERILSKNKSKKVALIAVCNKLLRQCFGIMRNKIPYQKNYLQVGN

SEQ ID NO: 55873 - protein, 346 aa, unidentified
MNHTILGLDLAKSIFHSVELAPGGKRPMRKKFSRGQLKEFMANRQPSKIAMEARASAHYWARLFEGMGHEVILLPPQHVKGYLRNQKNDYNDALAIAEACHHGAIRPAQIKSVAQQDEQALLRIRTQRVGQKTQLSNQMRGLLGEYGIVFPQGMAQLFRQIPLILEDADNTLTPQFRELLHREYEHLLIIKADVDWCNQQLEQKSKQDLVCKRLMKIPGFGPVVSCAVKTWMGDGQQFNKGRHASAALGLVPRQHTSGDKIRLMGITKRGDKHLRSTLVNGARAVVNHAEKKTDPLSQWINRLRETHCFNKVVIALANKLIRMAWVVISRGEDYHAYPGLAQGQST

SEQ ID NO: 55874 - protein, 415 aa, unidentified
MEGMEVLHEHVAGIDVHRKSLSVCVRHVGADRRIRQEVRTFGTMTRDLLELRDWLQAERVTHVAMEATGVLWKPVYNLLEDRVQVLLVNARHVKQVEGRKTDVKDCQWLAQLLACGLLRASFIPPKPQRELRDLTPMRAQLVAGRTQVVNRLHKVLEDANIQLGAVASDILGKSGREMIEALIKGEQNIETMAQMARRRMRAKLPQLRLALDGRVNEHHQFLLEILLDQYDGIDHQIERLTARIEKVCASFAPAIEKIVEIPGYDQTSAQNVVAEIGIDMSRFGDDEHLCSWATICPGNHQSAGKQTNGRTVKGNRWLKAALCQSAWAAARTKNSYFGAQFHRLAGRRGKKRAVIAVAHAQLKVIYHLLSSAQSYQDLGADYFLELNADRAARYHRKVLESLGYTVIAPGADKAA

SEQ ID NO: 55875 - protein, 357 aa, unidentified
MALSGTAPNINSATIIIGVDTHKSTHVAVAINTQGARLAALSIPASAKGYQELESWSRALGEIEAFEIEGTGSYGAGLSRSLLLLGHKVIEVTRPNRQLRYRHGKTDSLDAEGAARSVLNGQAMAKPKTQTGPVEMIRHLKIARDTAVKCRTQAMVTLKTLIINARTELRGVLDSIKGKIALIRYVAAFRPGKITSTTASAKAAMRALARRWLILHEEIQTHDKELERLVIAEMPSLMASHGIATMTVAEMLILVGDDPSRIKPEAALAKLCGVCPIPVSSGKTNRFRLNRGGNRQANAALYRVAIVRMRNHEPTIAYVRKRTQDGKTKSEIIRCLKRYIVREIYRGLSQITRIISV

SEQ ID NO: 55876 - protein, 336 aa, unidentified
MRYIGVDLHTTQITVCYLTEKEEVAIAKFQLCEIERFVSGLSKKDEIAVEATGNTRWFVEQVRSACGRVVLVNPRQFDVVKNSVKKTDRNDAINLARFLKADMLPEVRVKKEEADKVQSLVGTRTKLVRLKTSLMNKIHALSVSKGRKLRKTSLASEKGLERVLQEEWTVIERIELDIIIEQIRSLKAGIKKLDTAIAQESEKLKGYRNLVSISGIGSLSAGILLSVIGEASDFASADKLASYFGIVPRVSNSNETVNHGRITKRGSKTGRTTLVQCSLAAIRKNDYLKKYYEQVKARRGHGKAKIALARKYLKIIYSTLTNNWVFADFNNFELAE

SEQ ID NO: 55877 - protein, 337 aa, unidentified
MKLTIVFVGLDYHQAWVQVCVMDRRGNVLVNRRCPNDRQAIAALVHQYSRRVQASIEACCGAAELAEELIDHYGWSVDLAHPGYVARMKQGPDKTDFGDARLLADLERVGYLPCVWLAPEPIRELRRVVRFRQQLAAQRRDVKLRIRALLRDGRVPRPTSKAWTVPWMQWLKTTEQVSKQSRWILDRYLKRLKELLLEIRVVEKRLAQMTKEDKVVEQLLRQKGIGLITAVTLRAEIGRFDRFRTGKQLSRFCGVSPRNASSGERQADAGLVKAGNRQLRTVLIETAHRLARYEYRWIAMKAKMRHRGKPGSLVAAAIANRWVRWLYHQMQTVSQAA

SEQ ID NO: 55878 - protein, 388 aa, unidentified
MIYVGIDIAKLNHYASAIDSDGVVLIEPFEFLNDNAGFYTLLSKLNSFELDDIIIGLESTAHYGNNLVSFLVTKGLHVCVINPIQTATLRKNNIRKTKTDKIDTLVIAKAVALMDHPRFVTLYDIALMQLKNLGRFRMKLVKQRSRTKIQLTAYLDQVFPELQYFFKSGIHQKTVYAILKEAPSATQIASMHLTHLKNLLVSNSHGHFKKETALELRVLAQKSVGTADRSLSIQITQSIAQIELLDSQIDAVESEMKDIVTSLDSVIMTIPGIGPINGGMIIGEIGDINRFSKPRKLLAFAGLDPSVYQSGNFIAKKTKMSKRGSSTLRYALMNAAHNIVKYNQTFKEYYDSKRAEGRGHYNALGHCAGKLVRIIYKMLKDDVEFNLD

SEQ ID NO: 55879 - protein, 345 aa, unidentified
MNITTVGIDLAKNVFQVHGVDARGKVVLRRQLRREQVARFFVKLPPCLIGMEACASSHHWGRTLERFGHAVRLMAPQFVKPYVKTNKNDAADAEAICEAVSRQNMRFVPIKSIEQQAILSVHRVRQGFVKARTAQANQIRGLLGEFGLVIPKGICHVAERVPGLLEDASNELPLALRQLIDRLTSHLKDLDQQVRELERQIIAWHRGSELSRKLEKIPGIGPLAATALVASIADPRSFKNGRQVSAWLGLVPRQNSSGGKSTLLGISKRGDVYLRTLLIHGARSVILMAKRQTENKNVWLAKLLNRRHPNIAAVALANKNVRTVWALLAHGRDFKPDYVPVRATA

SEQ ID NO: 55880 - protein, 402 aa, unidentified
MNCVGIDVSKGKSMIAVMRPFGEVVVSPFEVLHTDSELSKLAGLLKSLDGETRVVIESTGNYHAPVAWLLHDAGLYVSVVNAMLVHDYGNNSLRRAKTDKKDAVKLANYGLDHWLILPRYVPEEDTRLMLKTCYRQYQQYSKVQTMLKNNLISLLDTAFPDANRLFTSPPRADGSEKWVDFVAAFWHCECVCGLSEKAFTAKYQKWCKKHGYNFSKGKALDIYASSCGHFGVMPKTDTAKLLVEQAVSQLRATSAALAALKQEMQSLAASLPEYPVVMEMFGVGPTLGPQLMAEIGDVRRFHSKKALVAFAGIDAPPYQSGQMDVRSRSISKRGSASLRRTLFLVMGVILQHAPMNEPVYQFMNKKRSEGKPYRVYMMASANKFLRIYYASVKAYLDSLEHD

SEQ ID NO: 55881 - protein, 343 aa, unidentified
MDQVCTIGLDIAKNLFQVHGVDQIGAVVIRRQVRRRQVLTLFGKLPPSLVGIEACATAHYWARELARLGHEVRLMPARYVKAYVKRNKNDAADAEAICEAVTRPTMRFVPVKTPEQQSVQMLHRTRLLLVRHRTRLINAIRAHLAEFGIVAGVGRNGVATLLQLIAKGEDERVPAVARDCLAVLAAQLELVTRQILDADRRILAWHRSSELSQRLEAIPGVGPLIASALIAAIPDPKVFRSGRDLSAWIGLVPKQNSTGGKQRLGAISKAGDRYLRQLLVIGALSVIKRAKQLGHTRHPWLVPLMQRRTVKIAAVALANKIARIAWAMMVRNEPYRAAQSTPA

SEQ ID NO: 55882 - protein, 347 aa, unidentified
MRFYNRAHQYYCGIDLHVKTMDVCILDGAGQVLVHRNVPSTPAALTEVIAPYREGLVVAAECMFAWYWLADVCAAEGIAFVLGHALAMKAIHGGKAKNDKIDSHKIAVLLRGGMLPQAYGYPAGMRSTRDLLRRRLHLVRKRGQLLAHIQNTRAQYNLPAFDKRLAYPGNRNGVVERFADPSVRKSIEVDVVLIDQYDALINDLELTIVREAKRHDGNAFHRLRSVPGIGKILALTILYEIHDITRFDRVQEFASYARLVKGQKRSAGKLLGTSGAKMGNVHLKWAFSEAAVTFLRHSSDGKRILARLEKRHGKGKALSILAHKIGRAVYYMLARGTVFSMEKFVAA

SEQ ID NO: 55883 - protein, 390 aa, unidentified
MGVIIGMDPHKRSATIEVVNERGVVLSKARFGTDKLGYGDMLAEGRRFPDRVWAVEGCNGIGKHVAHRLVHDGETVLDVPAKLSAQVRVFATGNGRKSDPVDAHSVAMAALHNPGLLRVEVDDDLLVMGMLTDRRDELGRNRTQTVNRLHRLMLELFPGGAKQFLSAQQARALIATIKPRDLPGKTRRRLAVELIGEIEVLDRKIKAAKKELTALVDTRGSTLLQLPGIGPSSAARLLVDVGDIHRFGNRDRFASWNGTAPLDASSGNQQRHRLSRAGNRRINRALHIMAIVQLRHATEGRAYYDRRKAGGMPSMMAMRALKRRLSNVVYARMLDDQKRRQPKLGASPGGHSGNDSDSSAADSHPSTDSSDKPHPGPATSQPRTKLTAAS

SEQ ID NO: 55884 - protein, 355 aa, unidentified
MTSTKYIGMDVHKESISIAVMNDAGKIVMECVIETKASMILQFIDGLRGDVQVTFEEGTSAAWLYDLLKPHVTKLVVCDPRKNRSMREGNQNDKIDARRLAELLRLDHLNPVYHGEHGLRTLKELVRSYLTITKDLGRVMSRVKALYRSWAIPCTGKQVYAARHRAEWLGKIREPGVRRRAEFYYQQLDALRLLRQEVRRDLLAESKKHQAWKSLCQIPSIGPIRSAELLGILQTPHRFRTKRQLWTYCGLGIETQSSADHRVVRGQLHRAKKQAEVRGLNTNCNHDLKNLFKGAAVVAATKPGPFGEFYARLLAKGIRQEMARLTLARKIATIVLIVWKRGVCFDAQHLKPQTA

SEQ ID NO: 55885 - protein, 428 aa, unidentified
MSYRIAGIDVHKKMLAVVVSDVEIESEYQFERRMFGSSPEQLRSLAAWLLALEVEEVVMESTALYWKPVWGALERYWQPICQKREGAGATSGILHLAQAQSNRGPRGRKKDFRDAERLVKRLVADELKLSFVPDWEQRLWRTLTRRRYQLTRARVQLQNQLEALLEEAHLKLSSLVSDLLGVSARRMLQAIDDGETNPEALAGLADRRLRATPAQLSDALGACTELHAVYRRLIKMMLGELKVIEEHTAELNQELATLLRPHQDAVERLAEVPGLGVDSAQQILAEVGANAVVFASDKNLCSWVGVCPGDEESAGESSSHRSPQGNRQMRRLLNQAANAAVKTKGSIFQIAYRRLVPRLGHNQTIGAVAHRLCRLIWLLLHKGVRYEERGPAVSQRSRQNRTSKMIRELRRLGYRVEFLNAVPSNPMP

SEQ ID NO: 55886 - protein, 316 aa, unidentified
MKNEVFVGIDVSKQHLDVAVRPQGRHFITPNDDRGLKQLLKRLTALKPQLIVLEASGGYELLATAALAEAQLPVALVNPLAVRQFAGATGKLAKTDKIDAQVLAHFAEAVRPELRPLPDQEQQLLKAALQRRVQMVKMIGQEKNRLEKTFIPQLRQDIQAHLAWLQQRLAQLDRDLNDQIRRSPLWRDRDRLLQTIPGVGPAVSRAVMAQLPEAGRLPGKKAAALVGVAPFNRDSGRFRGKRMIRGGRSYLRRMLYMAAVVAARWNPVIRNFYQRLLAAGKPKKLALTACMRKLVLIFNAMLKNNQPWNQFINQVP

SEQ ID NO: 55887 - protein, 370 aa, unidentified
MKKKALYIGLDVHKNTTDVAIANGRSNGKVRTYGKIVSTLDALEKLIKKLQDVDKELRFVYEAGPCGYQIYRHLYAKGIDCSVVAPSMIPRRSGDRIKTDRRDAINLVRLFRAGELTSIYVPTVEDEAIRDLVRCRDDMKRFERKARQRLLSFLLRHGYQYSGMRNWTKGFYNWLATVRFSHSAQQVTLQEYIDATNECSERIKRITQQIQVHLEEWSRAPFVKAYQALRGVSLIVSTTVAAEIGDMRRFQNPKQLMAYLGLIPSEHSSGKTVRRGPITKTGNSHVRRVLIEAAWTYKMQARISNILLKRQQGLPKSVCEISWKAQTRLCTRYRRLFARGKTKQTVVTAIARELSAFIWAIDKEMQFAEE

SEQ ID NO: 55888 - protein, 409 aa, unidentified
MDVAYPRCGGLDVHKDTVVACVLTSTDAGAPAKAVRTFGTTSAQLRALGDWLAERAVTHVAMESTGVYWQPVWNVLDGRFALLLANAAHVKAIPRRKTDVGDAEWLAELLRHGLVRGSFVPDRAQRERRELTRHRAELVTARTAAVNRLHKTLEGTNLKLGSVVTDLMGKSGRAILAALLAGDTDPARLADLAEGRLRAKRAQLAEALVGELTAHHRLLLGQHLAHVDFLDAQIVQVEAALAAHLAPDADLVARLDTIPGVGTRTAEVLVAEVGAEVERFASADHLTSWAGVCPGQDQSAGKRRSGRTRKGNKALRTALVEAAQAAGRTKDTALGRRYRRLKERLGAKKAAVAIARHILEIAYHLIKEGTAYREPAPARGPLARRGDHRRHVQALETLGYHVTLHPTAA

SEQ ID NO: 55889 - protein, 482 aa, unidentified
MKKKNIYVHQSQELLGLFEQAGNAVKTMCVPIDYAKKDHVVMFCNGHGDILRKPFSIQNTPEGVQHLVEKVSCSCQHHKIKPEHVFFGGEDGGSYAENFAETLRAKGCLVVGVNAHDAKKQRENLQASTDRLDLMGIARMLLNRRGTCCPAQSGVYRNLRNLVRHRRKLVVMTTEVRNRIHTIVDRLLPGFLSERKSGIAPFSKSSLWLMENRFSALQIRRRRRNALIEVLRRNGTPKPDQAASNLQEYAAQVLNTPSEYIETLQLSLSQHIKHYRCLQENTEQVEKEIAVWLAQTQGAFLTSIRGIGMNLAAGVTAEIGDPNMQKPLNNLTSYAGIVPRVKQSGGSEGQVYTGKVGKRCNRILKDYIVQSASHMGLHGPDELMADYKRRDAAGQHADFGIARRYLRIGMCLMKTSQVYIPSRLRKNNVKPEERAGYYLMSWPSWRDKWHKAGALNAAFEATRPLGQWREMVQRTYDIKLTL

SEQ ID NO: 55890 - protein, 340 aa, unidentified
MNSSPQTVLPVASGLDVHKSFVVAVIKSTSNQGTVNTVKKRFSTFRADLEDLRDWLLQNDCHHVCMESTGKYWIPVYNVLESAMNEVRVCNPKWLSLVKGEKDDNKDAARICDLYRNGMTKSSYIPNKQIRTLRELTRLRQKYVQQRTSDHNRLINCLTVSNYKLDMVFSNVRGRSAFLIINLILSGEPYTDEDILKCVSSRCKAPREDILRACHGFELDKLQREKLRIIQDHIDGLTKEIEKLDQLIAEACEDHKDYIRLLMTMPGVSEISARKIIAELGTEMDQFVKGSRVAKWAGLAPGSDESAGKIHSRHITKGGKYLKPVLVEAAWAAVRSKNPY

SEQ ID NO: 55891 - protein, 403 aa, unidentified
MTMRRRAWVGIDVGKTSHHACAIDETGKVVWNQKVSNEQRAIEQLVTRACKGAEQVRWAIDLTSPMALMLITVLLCAEQSVVYVPGRTVNTMTHAFRGEGKTDAKDARVIAETARLRNDLSNVVLPDELVVELTQLTGYRADLMADWVRGINRVRALLGSIFPGLEAAFDYSTRTPLILVSGLCTPAEIRAAGIDGMTAFLVENHAWPTRIAKSAATAAALANEQPLALPGEAGTAAVVKTLARRLLELDREIKDIDKTITARFRDHPYARIIESLPGFGPGLGAEFLVVTRGDLASFATAGRLASYAGLVPVPKDSGRITGNLRRPKRYNRRLRRVFYLAALSSLRADGPSRRFYDRKRAERLIHTQALLALARRLIDVLWALLRDDREFTPEKPITATAAA

SEQ ID NO: 55892 - protein, 403 aa, unidentified
MNMNAVGIDVSKGKSMVAILRSYGEIISKPFEVKHTVSGIRSLIEQIQSIDGESRIVMEHTGRYYEPLVRELSKADLFVSAINPKLIKDFGDNSLRKEKSDKADAVKIARYTLDSWTELRQYSLMDEIRNQLKTMNRQFDFYMKHKTAMKNNLISILDQTYPGANTYFDSPAREDGSQKWVDFSATYWHVDCVRKLSLNAFIDHYQKWCKRRKYNFSRSKAVEIYEASKELVSILPKDDLTKLIIKQAVEQLNTASQTVEQLRTMMNEAASKLPEYPVVMAMKGVGKSLGPQLMAEIGDVSRFTHKGAITAFAGVDPGVNESGSYEQKSVPASKRGSSTLRKTLFQVMDVLIKTKPQDDPVYLFMDKKRAQGKPYYVYMTAGANKFLRIYYGRVKEYLSSLPE

SEQ ID NO: 55893 - protein, 440 aa, unidentified
MIYAGVDIAKADHVIAAVDETGAEVARPMAFKNTEAGFERCVAWLESIAQTEDDVFVGMEATGHYWMACFAYLTAAGYRACVVNPMQVSAMRRLKGLSGVKNDRIDSFLIAETLRQGDYDQTGLATDEVQALKQLTRYHQGLKRELATVKTQAICVLDAYFPEYAGLFSDMFGAASLKVLSECPTPSEVARKRASSIAKMLSEGSHGRLGADRAARVKAAARSSVGIRLGEDAASFQIKTMVSQIEFLNATIAKVEREVEGLLERIEPNITTIPGVSITTGAQIVAEIGDVKRFKNAASIVKYAGLNSGVDESGKFSAEGVPITKQGSPYLRRSLWLAANRAPIRSQAQGLLRQEAAGGQAPSGGRDRLREEAVPCSLRGHARRGALRPRQVGKAPYPRSHIACAMRPIAPKSIRYSAFKMRNPVNSKLSISYGFALDFI

SEQ ID NO: 55894 - protein, 425 aa, unidentified
MNYKQNEKINQVKESTLVVGIDIGSTTQYARAFDWRGIELGKVFTFSNSREGFESFKAWMQHLQDKYRKSDVIVGIEPTGHYWFDLGAYLEDEGILLVMVNPYAVKQTKELDDNSQSKNDRKDPKVIAKLVTEGRYSAPYTPDGVYADLRIMVANRKRLIREMTQIKNRFARWFAIYFPEYTDVFGDYEAQSSMLLLKKVCTPEAIVELGAEKINQIWRDAKLRAVGMKRATTLCETAKRSIGLKKGSSAAQYEMKLLLEDYEYKKAQLDAVMEEIEKLCRKIPESEQMLAIKGIGVITVAGFLAEVGDVRRFESPRQIQKLAGLSLRENSSEKHKGQTTISKRGRSKLRAVLFNAAIPLIATNPEFKSLHEYYTTRANNPLKKKQSVIAISCKLIRVFYAILANGVTYDAQKMLSDIRRQPQAA

SEQ ID NO: 55895 - protein, 327 aa, unidentified
MTNPTLGIDIAKLKFNVCFINPSGKLKHKVFANSTAGFAQLREWLCKQESERVHACLEATGTYGEALALWLHQAGHTVSVVNPAAIKAFAASRLSRTKTDRVDAELIARFCLAQAPPAWTPLPPEVRELQALVRRLESLIEMRVAEQNRLEAGIMVEAVKVSVEELITHLSAQIKHTEKLIRKHIKDHPRLKEQSELLDSIPGIAQTTAATILAEITDFTHYSSARQVAAYAGLVPRERTSGSSVRGRTRLSKIGNARLRKALYFPAITALRCSEFFQAWAKGLQERGKCKMSVIGAAMRKLIHLAYGVLKTGKPFDPLWAQHAKTA

SEQ ID NO: 55896 - protein, 384 aa, unidentified
MMIDAASERSEQGRFLSQSPGSSNAVMFPEKSARRYAPALFFGGSLMLHSGLDLHKRTLVISTVNDAGEPVDDVTLPTTRTAVRTYFERHAGPHQAVVESTANWYWLRDLLAPSDVALTLAHAKNVKAISYAKVKTDAIDAATLAQLLRANLVPTAHMISADHREARDLLRARLQWVTQQVRCRNAIAGLLAQHNVTTPSALPALTQVRAAMLDAQLTLLRQQAKAVQHALQPQLIPTADVQRLVWIPGIGTIVAFTLVLEIDDIARFPNAKAFVSYCRLVPGAGNSGGKLRQKRTKDGNRYLKLAFSHAAIRAIQYSPEIRRFYQALARRKPKAVARAVVAKELARIVYVVLSRQVDFNHTFKGKPLSTRKASQWPRLSSPSV

SEQ ID NO: 55897 - protein, 346 aa, unidentified
MHYVGVDYHKKSSYVTVMDERGEVVKEGQIANTQEAVAAFLDGKAQGASAVLEAGRNWPVMYDWLEELVDEVTLAHPAKVRVIAEAKVKTGRIDSRMLAHLLRADLIPAAYVPGAVTREQRRRLRQRMFLVRVSTMVKNRVHTLVDRHPELSRQAAGWSDLFGRAGRAWLEQVALPAGEADLLRTDLQLLEAVQTQIKASNRWVSQLAKKDVRAKLLTTIPGIGDFFAVLLAVEIDDVSRFSRPQKLAAYAGLVPSTYASGGYTHHGRITKRGNKWIRWACIEAVYPATRQDPELAALYQRLKAAKGANVAKVAVAKRLLTIAYRVLSEGRPYRPAEEQAQLRRRR

SEQ ID NO: 55898 - protein, 349 aa, unidentified
MRKSSITSSVYVGLDVHKDSIDIALAEAGRDGEVRHAGSIGGDLASLDKSLRKLISRGSPLHIVYEAGPCGFVIWRHLSAQNLHCEVVAPSSIPKRSGDRVKTDRRDAILLARLARAGELTAVRVPDVADEAVRDLVRAREDAVRECRNARHRLKALLLRNGIGYTGKTAWTAAHLRWLATLKLAHSAQQIGFQEYLHAITEATARIGRLEQAMRDALPEWTLRPLVQALHALRGVQLIAAMTLVAELQDFVRFANPRQLMSYVGLVPGEYSSGPKRRQGSITKAGNSAARRMLVEVAWHYQHSPRVSPIIAKRQDDLPTAVTDIAWKAQLRLNAKFKRLVARRVLPPS

SEQ ID NO: 55899 - protein, 366 aa, unidentified
MTRTEYYIGMDVHKDTIQMAVFAETGEEPIYERRLTNDTDLLTKEVSKFNRKGKTEAAYESGCLGYVIQRAMEKAGITCYVLPANKVAKKRTDRIKTDKRDARLIGRELRSGSIKPISVPDEADEAVRDLLRCREDVNEDLRRTKQRLTKFLVRHGHIYSGESGNWTQAHWRWMDKCPFKNEHERMVYEEYRSLINSVEERIVRHEKKIEEIAESPRYKESVSRLRVFKGIDYIIALSMICEIGDFHRFAGAKDFMSYLGLVPSESSSGGKRNQGGITKAGNGHLRRLLIEGAWHYTKNSRPGKRLEKRRQGCSASLIDIADRALRRLNKKYVKMVFKGKHKNVVVTAIARELAGFIWAVQVSNVA

SEQ ID NO: 55900 - protein, 346 aa, unidentified
MEHYVGLDISLKLTAICIVDRTGKIQREGVVPSDPEAIAAFIESHSSNVARVGLEAGAASTWLWTELNKLGLPVICIDARHAKAALKMQINKSDRNDAAGIARIMQCGWYKEVRVKDLDSHAVKALLVSRALLVKIKRDLENQIRGLLKNLGLVIGRAKMNVFAARAAELIQDRPKLTAAVIPLLKTREVIERQIADLDRKVLRLARNNTQVRRFMTVPGVGPITALCYLATIDDPTRFKKSRSVGAYAGLTTRRYRSGEIDWTGRISKCGDAMLRTYLCEAANVLLTRIAKWSALKSWGMRIAKRSSLRKAKVAVARKLAVILHRMWVDGTEFNWSSKEVAARAA

SEQ ID NO: 55901 - protein, 414 aa, unidentified
MNLFVGLDVSSETLEACFLGDQIDQVFLRTRFTNDTVGASQIRNEIIKLNADTQFDKIMIGMESTSLYSFHPAIFFQNDEELKALNVKTVIEDPRRVRKYAESYDTDKTDYNDAFIIADYLRIGRGTTSPMREEKFMALQRLTRSRYQLMHQLIETKQHFLENLCYKVNTLSRELDSVQVFSATTISLMTEDLSLDDLANMPLENLADLVQAKGRGRFKDPTVFAQTIQKACRNSYRLDKAMADSIDTILGILAREMRGLTKSIKDLDKAIEDLVSTTSEYKCLTSIPGIGPVYAAGILAEIGQIERFPDQAQLAKYAGLTWKRKQSGNFESENTQLSQTGNRYFRYYLVEAANSVKNHVPEYKNFYQRKYAETPKHKHKRALVLTARKLVRLVDTLLRNRQLYVPPKEVQETE

SEQ ID NO: 55902 - protein, 346 aa, unidentified
MSITEDADLVVGVDTHRDTHSAAVCDARGRVLSQLQVPATPAGYADLLAWASEAAGGQRLAWAIEGTRHYGLGLARQLSVAGQQVAEIDGTRHIGKRRSGKSDPIDAVRAARELLARPRPGQLRADGDREALRLLMTDRDNAIQSAKTARTVLTSVIVTAPAQLREELRQLPRERRARACAELACPAGADRLTRVAYQTLARLGQRIAGLAEVAAELEAQIAGIVEEMTPGLVEAEPGLGVLSAAQILLSWSHAGRIRTEAAFAMLSGTAPIPVSSGRTDRHRLNRLGDRQLNRALHVIAVNRMRHHPPTRAYAKRRRAEGKTDKEIRRCIKRYLARHLYRVLNQA

SEQ ID NO: 55903 - protein, 388 aa, unidentified
MFHVGIDISKFKHDCYIATNAGVKIGSFQFKNDHEGFQTLRKDLESLGEPGQIKIGFESTGHYGINLKSFLSKLGYTYLEFNPQLTSKFSKATSLRRTKTDKIDAKLIASMLGQFDYKTLHTLFYHDNDLKELVRSRDDYLESRSKVLVKLTNVLDKVFPEFKPFFNNTLGKTPLYILKRFKTKEKIANLNMAHYDVLRKMSMGKLSYARFSNLRHLAKTSIGVSSKIYETLIPMMIDNYYHLTHLIDQLDEQITLIYNETNSLIHTMPGIGIITAASIYAEVGNINRFTNSSQLIAYAGLDVSVSQSGLKEHRGKIVKRGSSLLRKKLFNYSFQSLKFIPQFHDYYHKKKSLGKHHKVVLTHLSRKLIRIIFHIETTKTPFDITKVK

SEQ ID NO: 55904 - protein, 457 aa, unidentified
MQQYYLGGDVSKGYSDFVILDSQKRRVEENFQLDDTIVGHSFLYDRLLIFFEEHPDAELCAAVESTGGYENNWYNTLRKFQSSLNIKTARLNPAGVCKNNEAGLKRVITDKISAQGVAEYLIAHPEKVMYQQQDYWASLRKQWSFIKMLTKQSTQLLNQLESLLYSTNPEILKYCQDGMPAWVFKLLKQYPTAAKLSKARATSVARIPYISISRAKELVASAKTSVASTTDTITGQLISATVGQIQHLQKTIRAQTKIMAAECTLQEVELLKTFTGIGDYSAIGLMLEIQAVERFTTTKKLASFFGLHPVYKISGDGASGFRMSKKGRKEPRRILFMVAMSAINSNSLIRDLYQKHVENGMKKMTAIGLCMHKILRIIYGMLKNNTPFNPEIDLKNRERTSEQPQKERKDKSRRYQDFDANAPISGRQKKKRAERKLSQNAVSVECGICTPVPQLSS

SEQ ID NO: 55905 - protein, 320 aa, unidentified
MRNAVGLDISKTTFDATAIIGGIEKSAKFDNDSKGFEQFKDWLDKMKCPDAHICMEATGNYYEGIADYIGSLYKVSVVNPLKISKYAESRFARTKTDKQDAKLIAEYCQTAKAQDLVIRKPIIDDGYKLKRLSALYAQLTADSTAQKNRLEAAKDTFVVKICQSNIRHLQKQIKAVKKELEKLTKQPALKAQTDRLATIPAIGRLTAVMLLNYLLGADFQTSNKFAAFAGLTPQIKDSGTSVRGKPSLTKYGNRRLRALLFMPAMVAYRIKAFPDFIARLEAKNKPKKVIIAAIMRKLAVIAYHVHKKGEDYDPTRYKAA

SEQ ID NO: 55906 - protein, 347 aa, unidentified
MRYVGVDIGKWKCRAAVMNPEGVLIDEFAFNNDHQGIEDLTSRLTPGDRVVMESTGSVWETLYNHLDERHIPVVLANPLKTKAIASARIKTDKVDARILAHLLRGDLVAECYVPPRELREIRALVRHRASLVRARTTVKNRVHAIVDQHGLRCGYSDLFGKRSLEWLRGLELGALGRLMLDNHLGHVESLSRQIGRVDEEIRSRGSLDEDVRLLLSLTGVDVYTALLIRSEIGSISRFPDYKRLISWAGLAPSLHQSGSVEYSGGITRQGSRMLRWAMVESARTAVRHDERMRVFYERVKRRRGDGKAVVAVACKMLKVIWFMLSRREVYQSRNEGRYGRKLKSLDR

SEQ ID NO: 55907 - protein, 342 aa, unidentified
MLYVGIDIAKNKHDVTALNVPGKTVLKPLTFSNNKAGFELLDLSLRQLNQDCLIALENTGHYAFNLLNFLHEQGYKVYTCNPLLIKEFAKSLSLRKTKTDKKDAHGIALKLLSDPNREQFQHDNRQVELKILARHIHRLKRKQSDWKVQYTRCLDIIFPELDKIVGKHSEYTYQLLTCYPNPQKRLEAGFNKLIEIKRLTASKIQDILSVAPRSIGTTSSAREFEIIENIKHYKRLIDKAETCVNDLMAEFNSVITTVTGIGGRLGAVILAEIRNIHAFDNPAQLQVFAGLDSSIYQSGQIDLAGRMVKQGSPHLRWALIQAAKACARFSPAFKAYLKTKLE

SEQ ID NO: 55908 - protein, 358 aa, unidentified
MHGKGTTIDFNGQNVYAGIDIHLKSWKVTIMLGDREHKTFSQDPNAETLWNYLRKNFPGAVYHSAYEAGFCGFSAHRELEGFGILNLVVNPADIPTTDKEKRQKEDKRDSRKIAKSLRNGELVGIYIPGKGMEELRGLVRYRKTLVKEISRHKCRIKSFIYFNGIKIPLEQDGISKHWSGRFTHWLREVKLSTAHGKMVLDDTVDTAELLRKKLLKVNRHLRQVVGNGEYSEKLRLLQSIPGIGLISAFTLLTEMEDILRFRNLDQLCSFVGLVPSTNSSGEKENVGRITRRNNRFLRSIIVEAAWMASRKDPSLLYSYGLLCKRMEPTEAIIRIAKKLLNRIRYVMKNETEYVHSVI

SEQ ID NO: 55909 - protein, 405 aa, unidentified
MKELLVGIDWSQSHYDIAVVAPNGALLTQFRIAKTAAEFLRFAEKIDQFGIPAADCQIGLETAHNILIDFLWSRQYAAYVIPPAIVKSSRGRFGNRGAYTDAKDAHLIADLLRTDRERFAPWRPDSELLTIIKTKLGHLAHLTKLITSQTNRLRSILLRVYPQVLQAFNDLQVFIVLHLLVAYPTAATLAALSYADFAAFCRQHNCHRMDWITTWYSRLQQPQPAVQSALAAAYQDEIVFMAQEISALLREKKQALQQVQTLYHQHPDQPIFASLPGAGELLQPKLLVMFGEDRARFPAPQDIRALAGTCPVTKQSGKRRRIQFRRACNHSFRDTAQQFAVASVQRVDWAAAYFTAARSRGLRKNHAYRCVANRWLGIIWKLWQTRQPYDEAYHLQQILQQRRPN

SEQ ID NO: 55910 - protein, 405 aa, unidentified
MINAVGIDVSKGRSTIAVLRPGGVTIRRPFDVSHSSADLSSLVQYIGSLEGDTRAVMESTGRYHEPVLHALSDAGIFVSAVNPHLIRNYGNNSLRKVKTDPADAMKIARYTIDNWSELREYTGMDNIRSQLKILNTQTAFLMKQKTAVKNNLIALLDQTYPGVDKLFTSPVRTDGSEKWVDYVYSFWHVDCVRKIGIKAFSERYAAFCKRHGYNFQKGKPQELFDSSKELIATLPKDLICKKMIQNSIEQLKLLSRHIVELRSEMDRLASTLPEYSTVMEMYGVGPVYGPQLIAEIGDVSRFPRRESLTAFAGVDPGKNDSGQRISKSVHASKCGSSRLRKTLFQIMSTILQLGDNDDPVYRFLDKKRSEGKDYLVYMTAGANKFLRIYYGKVKECLRQQTNATE

SEQ ID NO: 55911 - protein, 368 aa, unidentified
MTNYKLQAAPTALSKEQNSQRQAEANRIDIGVDAHLKSYQAARKIDKGAVGVAQTFQSKEGLLLYAQKQREQAKQVTVVYESGPLGFGLYRELKALGIECLVCAPRSAEQKRKRRKNNSIDARTLTSDLSNYLNGNEQALQLVRIPTEAQEQARVQSRQHDGLVQERKRIGAKGNALLLSQGYGSWSNWWRPKAFERLSQAVAPWIIKHLERWVGILRELDHQIQQAKVELTQQYQGPRPKGMGAASLAQLKAEVLDWNRYSTERKMGCLAGMVPSEWSTGEGQRLGAITKVGVPAIRRIITEMVWRMSLFQPQYKAVQKWREVLEGSNRGLKKKAVVAIGRRLIVDIWRLQTGRITAQELGLIMIEA

SEQ ID NO: 55912 - protein, 382 aa, unidentified
MQASTVDTPTAGHSGTIFVSIELSQKTWLVTLHSPDRDRISRHKLEGGDHAGLLGLLENIRARAALKLGAAPKVVSCYEAGYDGFWLHRLLTAAGITSFVFDPASIAVDQRARRAKTDRIDGELLLRTLMAHLRGEPRVVRIVRIPSVEQEDARRASRERDQLVKEQTAHTNRIKALLRLLGMAVGNPRRGDWLGWLEQQRDRQQHPMPPHLLAEVKREHARLMLVREQLAALEAVQAAQAPAVPAPMAERRDALRRLKALGPAFTATLVNELFYKDFCNRREVASYCGLTPSPWRSGGIDREQGISKSGNRRARHKAIELAWLWLRHQLDSALSCWFRARTASAGKRAKRIAIVALARKLIVALWRYLTTGLVPEQATMKA

SEQ ID NO: 55913 - protein, 424 aa, unidentified
MKVTYQTCCGVDVHKSFLVATIVKTTGGIEPSYQKKRFSTFNNSILEFKQWLLDNHCHDVCMESTGKYWVPVFNLLEDKINVVIANPKWVKAVKGNKDDTKDSKWIGDLFRLGLVKGSYIPCKKVRILREYTRYRYKLVSCRSSEKNRYQNALTVCNVALDSIVSDIFGKSSTSIIDYLLKQSGTSINHEEIASKLLKSLKSKEDAVIESIEGYQMTDAQKYRMRLIRAHMDYITAEINDVDKMIENMISSNPDFENAVQFLCTIPGVKRDSAITIISEIGTDMSQFGGSKRLCCWAGLTPGSNESAGKKKSVRITRAGVYLKPALVQCAHAAVKSDKSPYYKKKYEALVKRRGKKRAIIAIARMILTAIYQMLSTGEQWNPSDLYKIDMPVALVEKQKAKAIKQAKKLLQREGILPPDEPLAS

SEQ ID NO: 55914 - protein, 347 aa, unidentified
MTIVDSSRPITGGVDTHLDNHVAAALDANGGVLGVESFPTTRAGFIALHQWLCAFGAVARVGVEGTGAYGAGLSRYLQSLGLVVIEVDRTNRQLRRMRGKSDPIDAIEAARAALSGRASGIAKTADGNVEAIRALLIAQRSGRQARARCLNQIRHLGFTSPDALREQFRDLPKAHLARQAAALRPRADGDPVLHATKLAMRTLGRRALAISDDMADLEAVLARLVAQTAPELLACHGVGVDTAAILLVAAGDNSERIRNEAAWAHLCGVAPLEANTGKQHRRHRLSRAGNRQANHALWRIVFTRMGNDPRTRVYVERRTEQGLTKPEIMRVLKRYVARETYRLLPRN

SEQ ID NO: 55915 - protein, 387 aa, unidentified
MKSIYQNQCAELRQLFAQVSPDRILAVAIDFALDQHVVLFCNGQGEQVLKPFPVHNNTAGFLFLKERILSTCRRLQIDPSHVVLAGEDDPPYALNFLWALNQEWLVLRVNARIAKEHRENLKASTDLLDLLGIAKALLSRQAHRVFPLNLEANDALQSLKTLGRDRDAIVKDATRLKNRIHSHVKILFPGFLEAHKDNPVKAFGKPSLALMAKDDFCATTYARKKAAPLARCLKSLRLRLSQEKAVELIKRASEVLAPPPHRIESEQLALGSLLVAYQALEEAAYQFELQQSRILATHSAAMLTTLPGAGIITVSAMAGELGQTEELGSRAQMASYARIVPQVEQSGGPNSATQTKPTGHRCNHRLKNHLVRAAMNIEADPEKRSSG

SEQ ID NO: 55916 - protein, 468 aa, unidentified
MIFYSPNKTIEYGKKGFLGIDVSKGYADFLLLGNDTNVLEEGFQLSDNREGRHRLKQLITGWQQQGLEELYCGVESTGGYEDLWHSYLKTAFKESKVYVCRINPRGVKAVGDAALKRTITDAVSAENIATYMISFSKKLDYGTNAIPLNEGFKEGRQHNTCIRMLVKQKVQLGNQLEKLLYQYFAEMLVYCCHGTPVWLLNMLLKYPTSAMVLKAGTAKLSAIKGVSNAKAKAIVAKAKDNTQIVSTQIGHVIMVTAREILHKETLINEERQYLANLYKESEEVILLTTIPGVGIDSAVVFALEIGDVNRFESAKKMASFFGVHPTFKQSGDGVWGIHMSKKGRGEIRSALYMASLSAARHNPVLKQVYARFRAKGMKHYQSAGVVMHKLLRIIFGMLKNKTKFCAETDEQNQQKAKEKQHDKEQKDQADKKIKQQKKHRFQEATTQGPISRRAEQRIRKQIASQASD

SEQ ID NO: 55917 - protein, 412 aa, unidentified
MDVLHPHCAGLDVHKDSVVACVRHVAAGTVKREVRTFKTTTAALIALSEWLSAEGCSPVAMEATGIYWRPVWHILADGERQLVLANAAHVKNVPGRKTDVNDATWLADLMAHGLIRSSFVPDEPTQAMRDLLRSRKQFVRERGSHIQRIQKTLEDANIKLDSVIADIVGLSGRRMIEAIVGGETNPARLATLADRRIKASPADLAAALRGRVTEHHRFMLRLHLYHLDAVDAAIARIDQEVDANLEPFRQAIRILSTIPGISTLSAQVLVAEIGIDMHRFPSEGHLLSWAGLCPKNDESAGKRRSNRMRKGAPWLKTTLVQCAWAAVRTKGSYLQAQFHRLRSRRGAKKAVGAVAASILTAAYHMLKNGTPYEDLGAGHFDNRAKGKQVLRLVSRLQNLGFAVQITPSQAAA

SEQ ID NO: 55918 - protein, 529 aa, unidentified
MKSDMDKLQSSVVGADEVTRGLASARQAACDRGADPVHQVLYDYGVGIDCHSKFIQVCVLYQLGGQVRRAEKEFTTSWDDLVRAKAWAMEVLGPLAKPDVLRYCIESTGAYHMPVLLAWKAIPCVVNPLLAGPTRRKTDVLDARMLAHHSITGIWKPSFIPTESAQVLRVLWAARAEALRAATRASNRINNVVLRFGHTFGATAVMRTAYSEGILSDLIDGQIPDLPGVAPEGLPVEIRTIIAALLLDMTGAVSEGRKATVAAENYIKSRDWPLGEGVTTGTTVLSLLKTVPGVGAATAVTWLAEVTDPRRFSNAKQVAAYAGCDPSLKVSAGKVTSQVRRAGNVRLHQALLHAAGGVLRRPDDKFALWGRSILGRHKKGGFRKACGAIARRIACALWYVHSKGEKFSYEGYTFTRRVYVAVVKVDVILGARAVKVLAKEGITTSQQLADMYYRGKLAGIFGFSEASVQATKAWILLNTKKHSATNENARLYEQREQSGMGTTYQLHPPVSFVARGKGAGGAEGPAGAA

SEQ ID NO: 55919 - protein, 367 aa, unidentified
MTIVAHAHPFVVGVDTHAKNHALSILATPAGVQVDDGEFPTTAAGMARAIDWVARRTGGDLAVLWVIECAASFGSQLAHAVTAAGYQVVEAARMSAKANRGVGKSDPLDARRIAAAVLPLELDRLRHLRKDDGVRVGLRVLIAARDHMTGERTATVNALIALLRVLDLGIDARKPLTAAQIIEVSKWRTRTEDIGAAIARAEAAGLAKRVIVLEAELAENTKTTTDLLRRSPARVLLDKPGIGPVTAAVAMAAWSHDGRLRSEAAFASLAGVNPIPASSGNTVRHRLNRGGDRRLNQALHMAVVVRTRMDPATKAYVERRLTEGHTKKEIRRCLKRYLARQIYRTLTAVTRADEALAAVTSATPIPA

SEQ ID NO: 55920 - protein, 374 aa, unidentified
MEKVSIGYVALDTSKLRNAIAIAAEGRDGEVRYLGEIDNTPAATGKLVRKLAKQHPVMTFCYEAGPTGYGLYRQIIGLGHDCIVVAPSLIPQRPGDRVKTNRRDALSLARQLRAGELTAVWVPDPHHEAVRDLTRARNAAVRDLRVKRQQVSALLLRLGQPYPGKTTWGKTHLRWLAGRQLDHVEQRIALEEMLHAVRQATDRIGRLEQSIRAAVPAWSLGSTALALMALRGIDLIAATALLAEIGDLTRFCSPRELMAWLGMVPSENSTGERVRRGAITKAGNHRARSMLVECAWSYRHPPRVGASKLAKLEAAPPVVRDIAWKAQTRLTARYRALRRAGKPDNIAITAVARELAGFIWAVGQAVASAATRPA

SEQ ID NO: 55921 - protein, 397 aa, unidentified
MAIYIGFDVHSQQTTYYAIDQDQTALRSGQIETTAEAYSAFAREMLKIDPVVEVAMETGTQCRWAALRLQENGLEARVFHATEVAAYRPKKKQKNDMNDAKDMAHGMRNRLYRCEVYMPTDTESWMRKLCEERIGFVDIGTAEINKAKNILRGKGLPVPVRLNTLKVWEDLLEKYRESELYFLLQLHYQTFRHSREMVKLLEEEIVKVRPQREEEIELLETIPCVGKLTAFALMAAIGDVHRFSDSAKLSSYFGVVPSSYDSGKRRTTGTHITRTGPSYVRRLLCECAHQAMRSTNPFSAYYYAVNRRSGNRKKAIVAVMHRIVRVAYQVLKTRQPFDAKKLRIFPELIGDNTKICWRMGIRPSKEDGIPPIPSTLELPQKPLKIRKKKASENGGNE

SEQ ID NO: 55922 - protein, 411 aa, unidentified
MEILVERGCGLDVHQATVVACVLRVLANRQIQKEIRSFGTTTRELGELRLWLQAKGVTHVAMESTGVYWKPVYAILEGSFELIVANAQHIKRVPGRKTDVKDAEWIADLLLHGLIKPSFVPPPAIRELRDLTRYRRKLVASQSAERNRLLKLLETANIKLASVASDVFGVSGRLMLAALVEGEATPQQMADLAKRKLRDKLPQLELALEGRMEEHHRFLLKMQLQRLGAVEQDLGELEARIQQKLQPYQKQFELLKQIPGVDATVAAIIIAELGVDMSVFPSASQAATWTGVAPGNRESAGKRKSGRTTQGNVYLKTALVEAALAASHQKGSYLRDKFYRVKARRGHKRAAVTIAHKILVSVYHMLSGGVPYRELGDLYLDKLNKNQLARNLVRRLERMGFTVTLEQNLAA

SEQ ID NO: 55923 - protein, 424 aa, unidentified
MKVTYQTCCGVDVHKSFLVATSVKTTGGIEPSYQKKRFSTFNSSILEFKQWLLDNDCHDVCMESTGKYWVPVFNLLEDEINVVIANPKWVKAVKGNKDDTKDSKWIGDLFRLGLVKGSYIPCKIVRILREYTRYRYKLVSCRSSEKNRYQNALTVCNVALDSVVSDIFGKSSTSIIDYLLEQSGTSINHEEIASKLLRSLKSKEDAVIESVEGYQMTDAQKYRVRLVRAHMDYITAEINDVDKMIENMIFSNPDFENAVQFLCTIPGVKRDSAITIISEIGTDMSQFGGSKRLCCWAGLTPGSNESAGKKKSVRITRAGVYLKPALVQCAHAAVKSDKSPYYKKKYESLVKRRGKKRAIIAIARMILTAIYQMLSTGEQWNPSDLYKIDMPVALVEKQKAKAIKQAKKLLQREGILPPDEPLAS

SEQ ID NO: 55924 - protein, 354 aa, unidentified
MTSTKYIGMDVHTESISIAVRNSVGKVVMECVIETKASTILQFIDGLSGDLRVTFEEGTWATWLYDLLKPHVTEVLVCNTRKNASRNGSKSDRIDARKLAEQLYMNNIKSVYHGEHGLRTLKELARSYLTITKDLTRVMNRLKALYRSWGIPCAGKEVYAPRHRAEWLAKISEAGVRRRAEHYYQQLDVMRPLHQEARRDLLLEAKKHKPWKLLRLIPGIGPIRAAVVIAVMQTPHRFRTKRHLWTYSGLALETHDSAQYRVAEGQLQRSRKPATVRGLNKDYNHDLKDIFKGAALRASTAAGPMHDFYEALLAKGRAPTMARLTLARKIAAITLIVWKKEVRFDANYLKAQAA

SEQ ID NO: 55925 - protein, 341 aa, unidentified
MNKITTLGIDLAKNVFQLHGVDERGRVVMRRQVRRAQLVGFIAQLPPCVIGMEACASAQQWGRRFTRHGHRVRLMSPQFVKPYVKSQKNDAADAEAICEAVQRPSMRFVPLKSFEQQDLQSAHRLRQGLVRDRTASINRIRGLLGEYGVALARRPATVRREVPAVLEDGGNELTVVAREIISELYEHCKDLEQRIARTEGLIARLGSTHETVRRLQTVPGIGLLGATALVAAVGEAQVFRNGRQMAAWLGLVPRQYSSGGKPRLLGISKRGDRYVRTLLVHGARAVVTAAERYPKPAQQWITALLERRGRARTYVAQANKIARIAWAVMTSGQCYRATVVS

SEQ ID NO: 55926 - protein, 399 aa, unidentified
MHREFAQIAVWEDGLVRQAGRVATTPEGLLELADSLLPSDEVALEATCNTWAIVKLLEARVARVVISNPMKTRAIAEAKVKTDKVDAAILAQLLAADYLPSVWKPDEATQALRRQVARRANLVKQRTRLKNQVQAILQRNLVPRCPFSDMFGIKGRSWLINQGLPADEKFAVDALLRLIDFHAQELKLIDTDLGRIGLERPEVKRLMTIPGVDATVALSIVAAVGDFHRFAGPDRLVSYLGLNPKVRQSGNQPASHGRITKNGRAHARGMLVEAAFSAVKTPGPMRAFYERIRSKRGMQIAIVATARKLAVLCWHLVIKDEDYAFARPSLTQKKLRNLELRAGMPSRKGRKGTAAGHNLSEIRERELQISQQAEDQYRRLVADWQAVGRTRKGQTVAKT

SEQ ID NO: 55927 - protein, 319 aa, unidentified
MSKRVLGIDAAKKKLDVALMFDCKVLTRKFDNTPKGFKLLGGWLASLHIEQVHACLEATGTYSEAIAEFLHEGGHRVSVVNPLRIKSFAKSDLQRNKTDEADARTIAAFCLAKDPEDWHPMAPEIKQLRDLTRRIETLERMLGIEKNRLEMAPATTRPSIDRMIGSLNKEIDEVQRLIKDHIDNYPDLRQQSELLQTIPGIGEKTARLLLGEIEFRSFDSARAVAAHAGVTPRRFQSGSSLNWTRLSKLGNGRIRKALYFPAVVAVRFNEVIKQFAQRLSRNGKTPMQIVCASMRKLLHIAFGVIKHNRPFDPGLAFHI

SEQ ID NO: 55928 - protein, 421 aa, unidentified
MDGEVIRVVGFDAAEEKHDAVLLGRDGQEVFQLSCRNRVKAIEDACGELMVRLESGERLAVVLESPRSHGRLIFEVATRLGCDVWQVSTVAVNHYRDVEGQPRKDDRWDAYLAARMVHLRTGRCYLVADPRPEERVLSRLCRARSRHVDQRTKLFQQLRAMFLELAPEVLHKEWKGPTYDSKAMHKILRRWPALEGLKRSRKATVEGIIRSCRYRKERMEEMVDGLRRIAREIAVPIDERSVMALEMELILKQLELLEKSIQRLEGQINELVKQHPIGRKLMEMPGIGVLTAAVLVGELLRVARNTSEASSATYAGITPLCRKTGKSRKRSRLTRGSNKHVLNALFLSAVGALKDSAFDRAYYDKKRDDYQGHPKPHTAATLALARQRHKVIYKLMTTDARYDKEKLIASHFERRQLENCA

SEQ ID NO: 55929 - protein, 415 aa, unidentified
MYYVGIDIAKSFHVVSVINDEEIKVINKPFKINNDAKGFEKLLTILDSVTLDKSEFTIGLEATGIYGENLQEFLKSKQYLVKLLNPFQTTRYREQITLKKVKNDEIDSLVIALLLKSGKFSSGYITDDEYQSLRTLYRNRSTIQADMKDVKKRILTQITVTFPELEGFLKPFSVTGLVLLDKYPTAHHYRHSSVDRILKLFRHIQGNNFTQSKALQLLELSRESIYSGKAKDARAIAIRSTVRLLQMYLSELDIIEAEILSLLKNSSVETTVDEAGKEIEKADSLLANLKTIPGVAEKTIAALISECGDLTRFPTIPKFIGYLGLFPNENSSGNSKHIGHLSKRGSPLAKHALYMSAVSCLIHNTQLKQLYDTKRSQGKSKKEALVAVSRKIAVIIYSIFKYNIPYDPNRVFAKS

SEQ ID NO: 55930 - protein, 339 aa, unidentified
MTVKTVGLDLAKDVFQVHGISESGRVIFNKAIKRAKLLAFFVALPPCMVGMEACGSAHHWGRTLRKLGHDVRLMPANYVKPYVKRGKTDAVDAEAICEAVRRPTMRFVEIKTEDQQAILSIHRTRDLAVRQRTQLANMIRSLLREFGHILPIGIEAVTAFAKRHLDGDHPDMPEIANGMLGIQCYQFIGLNERVEGYSKMIEQHALLNADARRLMRMPGIRSITASAIVATIGDAKQFRTGRNLAAWLGLTSLNKSSGGKERLGKITKAGDRYIRKLLVVGMTSRAVMAKRSPEKVDLWTAKIIAEKPFRLATVAMANKAARSVWAMLTKKQEYRQPAF

SEQ ID NO: 55931 - protein, 375 aa, unidentified
MEGAPMLDTTTFVGLDVHARSIKAVSLDVMTGEVRCATFGYDAGAVAAWVRSVDPRARCVYESGVTGFDLQKRLSGLGVDCVVGAVSKMIKPSADRRKKNDRNDAEFLARMLSVGNVVEVWVPDDECEAARDLTRALEDARDDLSRSKQRLSKFLLRHGLVFDERTPTGRRKGNWTRAHWSWIESIRFAEGADNEVLAYYVEAVRRAAEEKSRLEGLVGAEARKPRWRRRVDSLRCLKGVDTATAADLVFEAGEFSRFRNARSFAAWVGLTPSEHSSGENDRRGAITKAGNKHLRKTLVEAAWHYLTCSGRPKDLAKGQAPDPAARRHAAKGVRRLVERREALLARGVHGNKANVATARELACWVWAVGLMAEEA

SEQ ID NO: 55932 - protein, 335 aa, unidentified
MELTNQSVGIDVSKDSLEVKFKEKSTKGIKIKGSSKFDNTSNGFISLLEWCNKREKVENVVYVLEATGVYHEEVLYFLFGQGKKVSVELPQRIKYFAKSKGVKTKNDVIDSGVIADYGLERELKVWQPPGKEFKTLRDLSREHNTLTNSKSEAKNRLHAAKHSHDKNARVIERLQSTIKFYTNQLAEIEKDIKTTVNADKELSGKIKKVATIKGVGIMTVVKIIAETGGFYLFQNINQLISYAGLDVVENQSGNHNGKTWISKKGNADLRTALYMPAMSAIRFNEKMKSFNERIMKTHSYKKQGIVAVMRKLLILIYTLWKKNEEFSFDYKWGQA

SEQ ID NO: 55933 - protein, 444 aa, unidentified
MNEQMPPIAVAAAAAPDVDDPARAFGQLTHYGGFDWAKAEHHALVVDRQGHIVLSLRFANDADGWAHFRRKVAAFPGLGIAIETNCGPAVERLLDMGLTLYPLNPKAAERYRDRKAPAGAKDDALDAWSIADGLRTDGHGWRPLRPQDPLTTELRLLCRDEVALIEQRTALVNQLKAALHEYYPAALDAFDDWTGEGPWRFVITFPSPDVLVKAGRRKQERFLHANKLYRPQTAEQRLSAFAAAKAFANPNAAVTRAKMLLAVTLAKQLCSLESQLREYRARIIELFDDHPDHDCFGSLPGAGAKIAPRLLSELGANRAVFATAEALQGYAGTSPVTKQSGRSRFVIVRRACNKTLRATVHLWADLSRKSCVWAEAYYQKKKADGMGHAAALRCLGQRWVKILWTMWRNHAVYDEATHTRNQVRHGSWVVGLLPTNPAPTTAGR

SEQ ID NO: 55934 - protein, 342 aa, unidentified
MTTIKYSVGVDIASSTFTVSVGEIPWKVILKPETFENVEDGYQTLMEWLAEHHLSVSETVVCMEATGVYSEGLAYFLYAKGYRVAVQSPLEVKRTFKPYGPKSDAVDSLQIAEYACRHMDKLSFWRPRNEILEQVKALLAVREQFVSQSTAHKNALKAIQRKVVRTPFAEQAYLQLIEQVKKQIKAIDLEIRRLIESDPTFKEMLLLLLSVPGVGLLLAAHFILLAQFSLEYKVLASFLGISPNEHSSGTSVFKHATSRHFGPPAIRKLLYLAACSVCTHRPQFGRYLARKAQQGKPPRLVLNNVENKLVRIMCAVLQSKTAFIENYHSVQPFVFQKTLTVS

SEQ ID NO: 55935 - protein, 338 aa, unidentified
MSQRFVGIDVSKKEIHVCVFGKKTHSCPNSLSGFRKMMKSLREKEPQGEETIFHIGMEATGVYHLKLATYLNGEPDVVVYVMNPAQVRNFFQASFHRTKTDSIDACGIASCTEFLVSRGKIRAFETPDNEVERLRQLCSRREDLLSMVQMERNRLEALKEVPSHSRDAERSILEHIKFLNRRLEDIEEKIKGHIQNSPELKEQADLLKSIPGISDTSAAALISEIRRAERFSNVKELVAFAGLAPAERISGTSVKGKTSICKTGSSRLRKHLYMPALVGIRHNPLLKEFYERLTNRNKPKKAALIACMRKLLHIIYGVLKNRTAFDPHWAKTRLAMAC

SEQ ID NO: 55936 - protein, 370 aa, unidentified
MTDDARWFVGIDWASETHQVCLVDAGGKIVGERGFPHGGAGLAEMCIWLLVTTRAEPTVIAVAIEVPHGPIVETLLERGFLVYAINPKQLDRFRDRFTVAGAKDDRRDAHVLGDSLRTDRHCFRHLAAEDAVTVELREWSRMAEDLQQERNRLANRVREQLWRYYPQALKISDDLGADWFLELWAAVPTPAKAARVHESSIDRVLKTHRIRRIAAAEAAQVLRQQPLTVAGGTVEAASAHIRAVAARLKLVNRQIKEAHRRLDALCGKLAAGEEKTASGQAPEQRDVTILRSLPGVGRIVLTTLLAEAAEPVRRRDYHALRTLSGVAPVTKRSGKRCIVIMRQACHMRLRGAVYHWARVAIQHDPLSRCR

SEQ ID NO: 55937 - protein, 457 aa, unidentified
MAPRHKGNPPKAKTSTPQLPVLHLHAAGIDIGAREIYVAVPPGSCANNVRSFPTFTEDLHALRDWLQECGVTTVAMESTGVYWIPLFQILEAAGIAVCLVNARHCKNLPGRKTDVQDCQWLQHLHSVGLLRGSFRPADQVCAVRTILRHRDALVRGAGRCVSHLHKALTQMNVQLHHVISDLTGVTGQAILNAVLAGERDPQKLAALKDHRIKASREVIAKSLRGDWRAEHLFTLKQTHALWQQHQQLIAECDTQIEGMLQAFDAKVDVASAPLALAKSSHKQAQRNEPQFDARTECYRVLGVDLTCVPGFASPTVLVLLCELGPEFAAKFPTAKHFGSWLGLCPDNRITGGKIYSVKTRAVKSRVAEALRLAAQSLWQAKNYFGELYRRWKARLGSPKAITAMAHKLARILWHLLKFKAPFNPEVFAKEEAKMKRKKLQRLVAMATTLNYRLVPNQ

SEQ ID NO: 55938 - protein, 361 aa, unidentified
MEKVIRIGMDTSKSVFQLHGVNESEKPVLRKKLRRQQVLAFFAKLAPIEVGLEACGAAHHWARELTALGHRARLVPPQYAKMFVKRGKNDAADAEAICEAMSRPSMRFVPIKSAEQQAAQMLLGTRDGLVRRRTQLSNRIRGNAAEFGLVAAKGLARLEPLLARIAADPGVPKLAKDMFAVLAQEYAELDARLAQAEARLTAWHRQSELSRRLAEVPCIGPVGATAMTIKVTDPRVFGCGRDFSAWIGLTAKDHSTAGKLRLGGITRAGDEMLRSILVAGATAVIQQVKRGRARPSPWLAALLQRKPLKLAAVALANKTSRIAWKLMVSGGRYDPSHGRRGLVAPLARQGEPTEGAVVIGA

SEQ ID NO: 55939 - protein, 476 aa, unidentified
MPRKPSSRLDLVALPQLSHETLYVGVDVGKRAHVAGFLSSTLLTRHQRFEHCPALAFDNSREGFRALLDRIQTYVPLTQVQALLEVTGHYHRALLQYLQELDIPVYVIHVQKRQEGLLKTDKRDALGLANLLYNQLEKGIQVGDPLQAVRRLVSPTEAAAQLRGMVQHHYELVAESTQRKNKLTALCDELFPEFTRLLRDPNLPTALALRSRFPTPATLAAASFWELREARGRTCSVSDAKLVELQRLAGQSIGTKDPARVRGLVFEQKQLITELKLIAEHLQQLETEMIQIVEHCREGKILTSLPGIGPQAAAALIATIGTIANFERAAQLKSYFGWVPKVAQSGSSLDWTRLSPRGVRQMKQTMYLIVWRAIQWDAEWKQMYERLISSKCRYDERTRRLIGREKVIGRLAGQMTSVIYALLKQDLELLAHLAPGAEPPEPQLYDPEIHRQHRMGQYHPRGAAGKPPQVLQLPSA

SEQ ID NO: 55940 - protein, 335 aa, unidentified
MKTHYFLGVDVGKNQLHAAITIDGVNFHDQQVENTPTSIKEYFRHLKSKFNFNASQLTVCMEHTGIYCYPLLDYLTHQGIAVCVEPAVRIKQSQGMQRGKNDKMDAVRIAKYLFKNHTELKLWKPKREVVQQLRALLVVRERLVRGKMRFEVPVKESSEFISKSIRQLAVVNCKATITAIKKDIKRVNVEISKLIKKDAQLHAQVKLATSVTGVGTIIATNMIIDTNEFQDIDDHKKYACYSGIAPFPNQSGKSLRGKDKVSHLANKRIKTLLHMGAWSAVQYAPDLKAYYNRKLAEGKPSYSVLNAVCNKLITRVFVCIKNQRMYQKDYRPALA

SEQ ID NO: 55941 - protein, 349 aa, unidentified
MHSTTVAVDLAKNVFELAVADSEGKIGERLRLNRARFSSFFVHRAPCRVLMEACGSAHYWARRIGTHGHTVQLLPAQYVRQYVRRNKTDRADAAALIEAARCADIQTVPAKSLEQQQVLVLHRLRSQWMCTRQRYLNTLRGLLREFGIAVPLGARLARTRIAHYLAQPPQELPAAVRPLLAQMLSGVKQLEQQIEQVERELTDLSRTDPVVQQLRQIPGIGLLTSTAIRATVGDVQRFPCGRRFASWLGLTPREYSSGERRRLGGISKRGDSYLRTLLVHGARSALLAAHRQQRTGRPLDHLRQWALQCERQRGHNVATIALANRLARIVWATWKHGRAFDGNWACVTQ

SEQ ID NO: 55942 - protein, 319 aa, unidentified
MHQSTEHWIGIDVSKATLDVAVLPSGAQWQLANRAAPIEALVEQLTALSPKRIVLEASGGFEALLVGALASAQLPVVVVNPRQVRDFARATGQLAKTDRIDAQVLAGFGEAIRPQLRPLPDATTRAVRALVSRRRQLQEMLTAEQNRLVSAAVQDAPEPLREQLAEHIEWLRRQLANVDDDLRRQLQASPVWREREDLLRTIPGIGPVTSATLLSQLPELGQLDRKAIAKLVGLAPLNHDSGTLRGRRRVWGGRAAVRAVLYMAALVATRCNPTIRRFYVRLRANGKPAKVALVACAHKLLLLCNSVLRSATPWRPVTP

SEQ ID NO: 55943 - protein, 340 aa, unidentified
MDITTVGLDLAKNVFQVHGINSAGAVLVRRRLRRAQVCPYFSGLKPCLIGMEACATAHFWARELVALGHEVKIIPPSYVKAYVRRGKSDAVDAAAICEAVSRPNMRFVPIKTEGQQSALMLHKVRELLMRQQTMLVNALRAHMAELGMIAPQGRGKVKDITAVIEDDEDESIPELAKSALKPLVMQLRANEDATAALDVELKAWHKNSPASQRLATIPGVGYLTASAIAATVPDPSFFRSGREFAAWLGLVPRQNSSGGKQQLGRISKQGHRYIRKLLVVGATSVLRYARTKSAPGADWVNDLLERRPARLVTVAMANKTARIAWVLLARQETYRPRLSS

SEQ ID NO: 55944 - protein, 365 aa, unidentified
MKKLSTITAEATKNAHEEQLTIGLDLGDRSSWYCVLDEAGQVLLEQKVSTTAKALREVFGRMPRSRIALETGMHSPWVSRLLEELGHEVIVAHARNVRLIGESRKKDDRLDARTLARLARIDPQLLSPVKHRSAKAQADLTVIRARASLVRARTALVNAARGLAKSYGERLRSCNVRNLNPEKAEQLSPELQRALQPLLAGIEVLSEQIREYNQQIETLAHESYPEVALLKQIKGVGTLIALTFLLTLEDAHRFRKSRDVGCYLGLQPGRRNSGQSEPQLHISKEGDPYLRTLLVQGAHHILGPFGADSDLRRWGLRLAERGGRNAKKRAVIAVARKLAVLLHRLWVSGEVYEPLHNNRQVAFAA

SEQ ID NO: 55945 - protein, 387 aa, unidentified
MTVCTVNHLPAATHGETARCLFAIELSKQSWVIGFITPLSAKINRRILSGGDWRGLLELIEEMRARVSRETGRAVEVISCYEAGYDGFWLHRQLEAHGIRNYVIDPASLQVDRRVRRVKTDRIDTERLLRSLMAYLRGEPKVWSVVRVPSVAEEDARRLHRERDCLVSERVQHVNRIKGLCALQGIYDYHPLRPRAMARLEQLRTAQGVALPPRLKSEIKRELHRLELVVEMIASLEAERDIIAEDKASTHVNAEKIQALHKLKAIGPEFAAVLVGEIFHRDFNNRRQLASYVGYAPSPFQSGNVAHDQGISKAGNRKGRTTGIELAWLWLRYQPDSDLSVWFRARVGTVKGRIRRIAIVALARKLLVALWRYLETGLVPRGAVLKG

SEQ ID NO: 55946 - protein, 328 aa, unidentified
MVVTASRLRSPLNSAAGEKLGSVRVVNEPLAIAAAVAEAGPSPEVVIEATYGWYWIVDWLREQGATVHLANPSALNWGTRRVKNDERDAIDLIDVLRLGRLPEAWIAPPATRELRELVRYRAKLVALRSGLKAQVHAVMAKAGVLPLVSDMFCQAGNAQLDDLQLGDGYAIRVESLRDLIELYDREVTMLEAQIRSRLRGHVGYRAIQAINGIGPTMAAILVAEIGDVHRFRSAPALCSWAGLTPKHKESDTTVHRGQLTKQGSRLVRWAVVEGTVRYHGGGKLAADYRKIAERRGKNKATVAIARKVLTLIYYGLRDGEIRCLADAA

SEQ ID NO: 55947 - protein, 395 aa, unidentified
MFAEKEVAAPAPSINTDPIFVAIEMSRSKWVVGTHIPTSSKVGIHTVEWGDAAALLALVERLRSRAADVVGIAAVPVLCCYEAGYEGFWLYRRLAAAGLRVLVIDPSSLLVNRRAKRAKTDRIDAKAMIRALMAYNRGEDQVLSAVIVPSVEQEDHRRLVRERQSLVYDCTAHTNRIRGLLLTQGIVGFDPRASGAERQLDELVTGDGRSLGPRLKDEMRREIGRLRVVLEQLKDVSAERDAIALGKTIETPHRDQGLADADAAMIASLARIKGVGPNDASVLVREAFWRKFNNRRELAAWSGLAPMPWASGTVSRDQGIAKTGPAIFRSHMLQIAWRWLHHQPQSRLSQWFNERTNGAAGRVRRVMIVALARKLLVALWRYATAGLVPTGAIVA

SEQ ID NO: 55948 - protein, 317 aa, unidentified
MQVASAVGIDVSKAWLDVATRTGQVGTRFSNDAAGQAAVLAAVTPLEPELVVVEATGGYERGIVASLQAGGLSVAVVNPLRPRQFARSLGQLAKTDRIDAQVLARFGEATGPEPQRPIDPAVQEMQAVLARRRQVQEMLTVEKNRLGQVPERARPSIRRHLEFLEAELAGLNQEIDAAIVATATWQETNTLLQSTKGIGVVTAANLILNLPELGHLDRKQIAALVGVAPFNRDSGTLRGKRFCQGGRAAVRAALYMAVLSAVRWNPPIAAFYDRLLTAGKLKKVALVACMRKLLTMLNVILRTRTPWDPTKFAPATP

SEQ ID NO: 55949 - protein, 324 aa, unidentified
MIDAILGIDVSKNTLDVSISRCTKVRTKSFANSSDGWHHLLDWLTTQKIQRVHACLESTGRYSLGIACALYEAGHVVSIINPAQIRDFVRTKLGRNKTDGMDASHIREYCELFKPSPWAPPSEAHRRLGELQAIRAGIIAGLTEWKNRKNSGIVDAGAHALADATISHFTSQLGAVDKAIALTIDNDSDLRSKRDLLLSISGVGDTLAGVVLAELPGPDVLRSSGEVIAYAGLNPRQHQSGTSVDRATRISKIGNAVLRAALYMPALSAMRYNPAIVALVTRLKSRGRLKPKQIVVAAMRKLLVLCFGVLKTGKPFDPAIAMGC

SEQ ID NO: 55950 - protein, 368 aa, unidentified
MKKSSTAATIESRNFSMQQKLTIGLDLGDRHSWYCVLDETGTVQLEQRVRTSAKTLQEVFGAMPRSRIALETGTHSPWISRLLSELGHEVIVANARKVRLIGESRKKDDRLDAQTLARLARIDPKLLCPVKHRSAQAQADLSVIRARAGLVRARTGLVNTARGVAKSYGERLRGCNGRNMNPEKAEGLSPELQRALEPLLSAIEELSERIAEYNDRIEALAQQSYPQVALLKQIKGVGTLIALTFLLTLGDPHRFGKSRDVGCYLGLQPGRRNSGQSEPQMHISKEGDPYLRTLLVQGAQHILGPFGPDCDLRSWGLKLAERGGRNGKKRAIVATARKLAVLLHHLWVSGEVYEPLHNSSRTTVAAAA

SEQ ID NO: 55951 - protein, 416 aa, unidentified
MNNESPVVAGMDVHKKMLAVVVAKVDGNRIEYLSERFGTTRQDLDQLAHWLHQQQVTEVAMESTAQYWMPVWLAWEEQFTLYLAPPRSTAAPPGRKSDWADAQRIVRRLLAQDLTLSYVPGREQREWRTMTRTRVEMSAQQVRLRNQREGLLEQAQIKLSSVLSDLLGVSGRRILREMVKGETNPACLASLADKAVKASEKTLQEALGGKLTATHRLLLKMYLEQWDLLASQIDQLNTRMAQALSQHQAAVHRLVEIPGVSLTAAQQIIAEVGPEARAFAAPQKLASWVGVCPGQHQSAGTEYSHRSPKGNRMMRRVLVQCAWASVKVKGSIFHQKFRALVPRLGPRQAIWAIAHRLLRIIWKLLHDQVNYVERGLDTNPAAVQLRIKRHLKELQRLGYAVNLSALAAIRPQEASV

SEQ ID NO: 55952 - protein, 345 aa, unidentified
MELYTIGIDLGKTVFHLVGLNQRGEVVVRKKFSRIQLLHFTANLQVKLIGMEACGGSHFLGRALRGQGHEVRRMPAQYVKPYVKTNKSDYIDAEAIAEAVERPKMRFVPIKSDEQLDLQSLHRVRERWVMRRTAVINQIRGLLLERGITLRQGRRHIDAALPGILEDASAQLSGAVRLLLAQLKLELDHLQMRIDEADAMINKAAGENEACRRLVAIPGIGPVTATAIIAAIGNGAAFKKGRGFSAWLGIVPGENTTGGKQKLLGISKRGNSYLRRLFVQGARAVLQQSAKQSSGLSAWLAQLTARTHRNVAAVALANKLARMAWAVLAKNEPYRPPVLADSAAV

SEQ ID NO: 55953 - protein, 407 aa, unidentified
MTITCGIDWAEAHHDVALMNDKGYVVARARIDTGLMGFTELMALLVEHAGDPRSVPVAIETDKNLVVVALQAAGVIVFPINPRAVARYRERHGQSGKKSDPGDAAMLADVLRTDIHQHRPLPAISESARAVKALARQHQEAIWAVHQTTNRLRSVLLEFYPQALQAFPNLKHKAALTILAAASTPELGSKMTARRIVTLLHRCGRRNDDALVQQILTDLKTPAIRQPAAVEAALGLAVVGLLGIITAMHASISQLEDAMTVEFDKHPQAAILQSAPGLGTVLASRILAEVGDDPTRFATADGLRAFTGTAPVTRASGKGRWVGARRVRNKRLGDACHWWAFAMLTKSPGARAHYDRRRAAGDHHNAALRNLANKLLGRLWWCLQHNEGWDDQAAWPHYAAAPTMHAA

SEQ ID NO: 55954 - protein, 428 aa, unidentified
MEKTRIAKLEAIDEKTIICGIDVAKKVHWAQFVDWRGIPVGKAVKFKNNKAGLEHIVAEAKRRCKETGKEKVITGMEPTGPYWKAMARWLESEGLEVVGVNTYHTKQAKELDDNSPTKNDKKDALVIARLVKDGRYFHPYLPENTYAELRVTANHRLMLVKRMNAVKNRIIGILDEYFPEFVTVFKCPLKGKASRQILKNCPFPQHILEIGIAGVWAEIKKAVKKTVGKKKAEQLLVAAADSIGVRHGADSARFQMRLLLDELEFFEMQLIQVKARMEELLGQTGYKDLLLGIDGIGIISAASFLAETGDPMRFDKPRQIHRLAGYDLVENSSGQNKSGTSISKRGRKQLRALLYRMAMVMVASNSELKQLYLYLRTRLKNPLKGKQALIVVSKKIVTIIYQMMKTRTEYKPVLVLGPVRREQLRLAA

SEQ ID NO: 55955 - protein, 366 aa, unidentified
MKKISTVQVFGNEILKGQKLTIGLDLGDRWSFYGVLDEAGKILLEQKVATTPEAMKRTFGKIPRSLIAMETGTHSPWVSRLLTELGHELIVAHAQKVELITKSNRKDDRHDARTLARLARIDPELLGPVRHRSAKAQIHLTVIRARAELVSARTALVNAARGLVKSYGQRLPKRGTYQVSRELATGLSAELRDVLGPLLQEVESLNERIQEYDERMEKIAKEEYPEVSLLQQVKGVGTQISLTYVLTIEDPYRFPKSRAVGCFLGLRPGRRNSGESEPQKGISKEGDRYLRTMMVQGAHYILGPFGEDSDLRRWGLKLAERGGKNAKKRAVVAVARKLAVLLHRLWVSGEVYEPLRNSQKAMRAVA

SEQ ID NO: 55956 - protein, 402 aa, unidentified
MNCVGIDVSKGKSMIAVMRPFGEVVVSPFEVRHTANELSELAGLLKSLDGETRVVMESTGNYHAPVAWLLHDAGLYVSVVNAMLVHDYGNNSLRRAKTDKKDAVKLANYGLDHWLTLPRYIPEEDTRLMLKICYRQYQQYSKVQTMLKNNLISLLDTTFPDANRLFTSPPRADGSEKWVDFVATFWHCECVCGRSEKAFTTQYQKWCRKHGYNFSEDKALDIYASACRHFGVIPKTDTAKLLVEQAISQLQTTSSALAALKQEMQSLAASLPEYPVVMGMFGVGPTLGPQLLAEIGDVRRFHSKKALVAFAGIDAPPYQSGQIDVRSRSISKRGSASLRRTLFLVMSVILQCAPIDEPVYQFMDKKRSEGKPYRVYMMASANKFLRIYYASVKAYLDSLEHG

SEQ ID NO: 55957 - protein, 332 aa, unidentified
MVFNHYLGIDISKKTLDAALLLREGVVEGQTKVSNDKKGFKDLLSWLKKLKISPTEVLVCAEHTGIYGYDLQVWLDEKAIKYALVPALEIKKSLGIRRGKNDVVDALRIAEYAYIRRESIVLTHRPSETIFQLKALITERKLYVRSRAGLLSRKDAMEKYESREGRKRREDAIKKFSSYIESLEGQIEDVISNDPDVLRNYQLVRSVKGIGLINAVNTIVYTNNFTSFQTARQYACYIGIAPFEHSSGTSIKGKTMVSSLGNHQLKCELTMAARNAVCTDPWLKGYYKRKMAEKGNMRGAYGIVLNAVKFKLVVRMFAVIKSGTPYKTLTYC

SEQ ID NO: 55958 - protein, 344 aa, unidentified
MKIKRIGVDLAKNVYQLHGVDNHDECVLQRRLKRDHWLKVLFEKTEPGCEIGMEACTGSHHWARLLESRGYKVKLIAPQFVKPYVKSNKNDAKDAEAICEAMSRPSMRFVPIKTVEQQDIQAMHRIRSELICHRTAKANQIRGLVSEYGLVAPQQMAKLRMAIPDWLEDGDNGLTDRFRGLLNGLWDDLQGLDRRVHELDQEIQAIAQSHPDAKRLQQLRGVGPMTATALVAAVGKGEHFTKGRQMSASVGLTPRQHSSGNKERLLGISKRGDPYLRSLLVHGARSVIWASRGKDDRLSRWVTDLAARRHPNIAAVALANKTVRMAWAMLHNGTDYQPDLVIAE

SEQ ID NO: 55959 - protein, 353 aa, unidentified
MNITTVGIDLAKDVITVYAQDAQGKCILSRNFKFKELAEWLVQLPEGCRVGMEACSTAHYWGRRMQAMGLQPRLMAAEFVQAFRKSKSAKNDHNDAEAIAIAVRQPTMRFVAIKNENQQSRLAWHKVREGWKEERTALINRCRGLLLEFGFPIARGTASFAHGLKTCQQAQALPGNLRRLLVQIEEQLRQIDHQLALCDREIAQSARDDEAARRLQAMAGVGVITSDAVSASVGNAHDFKNGRQFAAWIGLTPRQYSSGGKTKLGRITRRGDAYLRSLLVQGARSTVQAALKKAPDKLNRMQQWVIRLLGRVGYHKTLVAIANKNARQIWALLAKGETYDLDAWQQYAIGEKV

SEQ ID NO: 55960 - protein, 314 aa, unidentified
MKSNTAVAGVDVGKCWLDAAVHGRDDEIRLANTAVGIAELMNWLAARDVGRVGMEATGGYEKDLRAAADATGLEVVVHQPLEVRLYGKLKRRRAKNDRQDARLIAAATAQVEQVRAAQDPRLQELAERLTAYEQITDQAAEMKTFLETVRLKDVASLIRTQIRALERAKAKLAADLMARVRAEPDLLERLRLLISLPGVGPIVALSLLIRMPELGAMKRGQAASLIGVAPFDRDSGQLKGMRFIAGGRARPRRMLYLAALAARRCDPALKAFAEQLVARGKPAKLAIVAVMRKLVEAANLVLTRQQPWLKTRTT

SEQ ID NO: 55961 - protein, 310 aa, unidentified
MEHTTVVGIDVSKDRLDVHVLPSEEAWAVARNADGLAELCRRLHGLSGVVALEATGGYENIVAASLSSAGLPLVVVNPAQVRAFAKALGQRAKSDPIDARVIARFAEATKPVVRPLPDRATQMLAALLARRRQIVEMMASESQRLRRTDLVRVRKSIERLLAILKRELADIDHDIDDTVRGSPVWREKENLLASVPGIGRIIARTMVADLPELGTLGRKQIGALAGLVPFVRQSGQWKGQAHIGGGRPTVRTALFLGAQVAKRHNPVLRAFYERLLAAGKSKMAATVAVAHKLLLILNAILRDKKPWQTA

SEQ ID NO: 55962 - protein, 352 aa, unidentified
MIFVGIDVAKDKHDCFILNSEGTVLADVFTIANNRIGFETLLSRIQSCSQGESKIKVGLEATGHYSYNLLGFLLDSGLATYVINPLHTNLYRKSLSLRRTKTDRIDARTIAMMLMSDVDLKSYSNTAYHNEELKSLTRYRFDKVKERAKLKSSVARLVNILFPELEKLVSSLHIAVVYALLSNYPGASYIANANTEELAETLCTASKGRYTKSKTAEIQVAAGVSIGSKMPAKSMELKHTIALIRELDKEISEVESAIDKITSQMDSPIFTIPGIGRHMGAMILAEVGDFSNFASADKLLAYAGLSPSTYQSGQLQKLLCSHGKAWLQIFAICSFQCRQICLPLVSYILGLS

SEQ ID NO: 55963 - protein, 346 aa, unidentified
MAETGVAVTGGVDTHLDTNMAAALDGVGGQLGTKEFPTNIAGYRALHLWLESFGTVVRVGVEGTGAYGAGLARYLGAHDVQVIEVDRPNRQNRRRRGKSDPVDALSAARAALSGEASSLAKTRNGAVEAIRVLRVARSSARRDRTEALNQMRSLVSTAPDELREQLRDLSGLALIERAAALRPGAGMSVISATKTALRELARRVDYLGEQMDRLTALLGPLVADTAPALVASHGVGTDTAGALLVAAGDNPERLSHEAAFAHLCGASPIEASSGKVTRHRLNRGGDRQANHALWRIVMVRMVSDPDTRAYVERRTKDGKSKREIMRCLKRYVARELYPLLAAEKTA

SEQ ID NO: 55964 - protein, 323 aa, unidentified
MNKYKETFGVDISKDVFDCYGSVSGHTQFSNNETGFKTFLKSLPKESLVVMEATGYYHYRLAQYLYKKGIAVSVVNPLSVKRFIQMKLAKIKTDKNDAKAICDYGLSQEVPLYNALTDVQSECLQLFRLLDSYLKKRAATKNKLHGEEVLGVPSNHVYRSLKRNKVHLDKEISGIESKLLSLVKQDQQQQLTLLQSIPGIGLKTALFLIVVTDGFNKFETSSQLCSYIGITPIIRESGSSVRGRSRISKVGNRKLRNLLFLCAFSACKQNKACREVYQRITNKGKSKKLALIAVANKLLKQAFAIAKSGRPYDERFVSVLVIK

SEQ ID NO: 55965 - protein, 357 aa, unidentified
MAKSIKAGIGIRAIGLDLADVWSDWVGLDERGDRVECERVKTTESELRKVFGAMAPTTIALEVGTHSRWVSRVLGSLGHTVVVANARKVALIHRNKRKNNRIDAEFLARLVRADKALLFPIQHRDERSQADLSVLRARDLLVRARTKLINHVRGASKAFGTRLAKCSAPAFVSRCSHQVPATLLTALNPILKQLAEMTAAIKGFDREISAMVKRHPEATTLMQITGVGELTALAYVLTVEDPARIIRSRSAGAYFGLVPGSDDSGEKHEQQRITKEGDRFCRRLLVSAAQYILGPHVKVDSDLRRHGLAIASRGGKNAKKRAVVAVARKLAVVMHRLWVTSEVYVPLFNASRQSIAA

SEQ ID NO: 55966 - protein, 392 aa, unidentified
MFYIGIDIAKQSHQVAFIDDGGNVIVKPFVFQNSNQGFEKLVVAFTKYGISKDNCVIAMEATGHYWFALYFFLSDLGFSVKVLNPIQTDAFRDLSIRKVKNDVIDSINIAELLRFGKFSECVIPDENTIALKNISRFRYAMVDLCSDLKRKVICLLDQVFPEYDKLFSDIFGITSKQLLLKFSTPDEFNEISVTKLSNFISKASQGRLGKTKAQDLKSAAANSIGISFALDSFSFQIKQLIEQIDFTEKQIEEIDLKLVELLAATQYSVITTITGIGAVTGSLIVGEIGDINRFDSAPKLVAYAGLDASVKQSGNFVGTQNKISKRGSPYLRRALWSAAFVASQHDPVLSVYYSNLIARGKSHKLALTAVSRKLCNIVWAVLRSGNPYVPKA

SEQ ID NO: 55967 - protein, 385 aa, unidentified
MIHVGTDVHVRNSVLNAKDQDGQVLARGRCGNTMLEVGAFFAPLERRAKSTGETIRVVMESTTNARAIQRLLTQYGREAGIDLTAEVLHARKLRVIAESVNKCDRVDANILTELSRSKLQLPVCYMPDDEEFALREHLRARTDLVRMRTMVKNRVHAVLHRRGILTPRGELFGRIGGGFLDQLELDEAGQVILQRSRTLIGQLDETINESTASLRDLMRQPRWAGPATLLQTMPGIGLITSLTILAELGDRTRFRSCAAVANYAGLVPRHRDSDQKYWSGRITRRGPAHLRGVLMEAAWVAAPRVPAYQALFDRVARKKSKGTAIVAVARRMLEDAWMLLIKEEAFRYVPTPVSDAHGERTSESASPGHRKRRSRVSQAASSVAG

SEQ ID NO: 55968 - protein, 374 aa, unidentified
MKKNVRFLGLDVHAETIVVAIAEPDGEVRSLGTIANRAESIRKMVKKLGPVEQLKACYEAGPTGCILYWQLAELGVACEVIAPTLVPMKAGDRVKTDRRDAERLARSYRSGDLTAVWVPDESSEALRDLVRAREAAKQNQLRARHRLSKFLLRAGQRPAAGVKAWTQLYMAWVRQLRFAQVARESTRLDYLHEVEHMAERVKRLEQAIAEAVKLASPAVQEVVKGLQALRGIAQISAVTIAAELGNISRFDTPRQLMGYSGAVPSEDSSGKRMKRGSITKTGNAHFRRIAVEAAWSYRLRPSVGPALRKRQEGVPEEIKEIAWKAQVRLSKRYARLAAGKDQRKIITAVGRELLGFVWAIGVKAEAAAKLKKAA

SEQ ID NO: 55969 - protein, 400 aa, unidentified
MEEDMEEITDRYVKYDTELIEISPVFHSFSSLDKVFRDVYLPQSCIKRREKTVKRFPLKLYIMEVIRQNVGIDIAKDSFVSTVTFLQKGQIVKHIATKQFSNNHGGFCEFHKWCLALCVECVAISFTMEATGVYYESLAYYLEGEGSIIHVLLPNKVKKYAASFNIKSKTDKIDSKILGQMGVERVLDTWKLSSKFYRHLRTLSRERQQIVVERTRIKNQLHAEEHCGDPIKTTMRRMKNRIKYLNKQIDAIENELANIIAKDDCLSEKVKKITSVPGLGFKTVVTVIAETQGFVNITSIRQLNSYAGYDISLKESGKWKGKARISKKGNSHIRQAMYMPSWSSIKYTTTYKTFYERLNERKGNGLIAGTAVQRKLLGLIYTLWKNDTEYIDDYEIKKVS

SEQ ID NO: 55970 - protein, 336 aa, unidentified
MEPTTIAIDLAKRVFQIHYVEPETGAIHSKVLKRAQLAPFFANRPASRVVMEACGSAHHWARVLARLGHDVRLIAAQFVRPFVKSNKNDAADAAAIWEAAQRPGMRFVAVKTEDQQAMLAMHRIRQQLVRIRVMQVNQLRGLLYEFGVVLPQGRRASIEAAKAALASLADELPAMLLDSLQDQLSRLRALDEQIARIEQRILSWRRNDDACLRISEIPGVGVLTATAAVSVIGQARTFRSGREFAAYLGLVPRQNGSGGKIKLGGISKRGDVYLRTLLIHGARSVISSSKHLPERLRQMLSRRPTNVVAVALANKIARTIWALLAHGRTYEAAPSQ

SEQ ID NO: 55971 - protein, 334 aa, unidentified
MQFDFFIGVDVSKATLDFAVLKANQVLFHQQVSNDKKGIAEFLKQLRQQTKAGIGQCLFCMEHTGIYNNPLLKVLHQQAAPIWVERAAHIQESMGLTRGKTDQVDARRIALFAYKNRDEVRLWKPKRPVMAQLDRLTAQRARLVKVIKMLQTPLTDSAGFVDKADRKAAQQACKASLQALKADLKLADKAIAELAEQDPELKRLFERVTSVVGISQTTAAEIILTTNEFQDITDPGKFACYAGVVPFERSSGQRKGRPQVSQIANKKVKSLLHLGAMSAIQHCTQLKAYYQRKVSEGKNKMLVLNNVRNKLVLRVFACVREDRNYDKNYTPALV

SEQ ID NO: 55972 - protein, 355 aa, unidentified
MDSKKYIGMDVHKESISIAVMNGAGKIVMECVIETQASMILQFIDGLRGDVHVTFEEGTSAAWLYDLLKPQVTKLVVCDPRKNASMREGSQSDKIDARRLAELLRLNHLNPVYHGEHGLRSLKELVRSYITITKDLGRVMSRVKAIYRSWAIACTGKQVYAPRHRAEWLGKIGEPGVRRRAEFYYQQLDALRCLRQEVRRELLAESKKHQAWKRLCQIPSMGPIRAAVLLGILQTPHRFRSKRQLWTYSGFGIETQSSADHRRVDGQLQRAKKPSSIRGLNRNCNHDRKNLFKGAAIVASSKPGPFQEFYAALLTKGMRPEMARLTLARKIATIVLMVWKRGACFDAQHLKPQTV

SEQ ID NO: 55973 - protein, 455 aa, unidentified
MARKRKTRKTDNAILPVMRSNAAGIDIGATEIYVAVPADRDAENVRSFPTFTQDLYRLADWLKRCGIETVAMESTGVYWIPLFQILEERGFEVCLVNARHVKNVPGRRTDVSDCQWLQFLHSVGLLRASYRPEQEICAVRSLLRHRESLVQMGATHVNHMQKALDQMNLQLHHVISDITGLTGLAIVDAILGGERDAFTLARLRHDRIKASEEVIAKSLVGDYRSEHLFTLRQSVKAYRSYQQLIDECDREIRAALDKFQPPVTMSGPDADVRPPESRKTRTASADAGLRTELKRVFGVDLTKIPGIRTGIAQMLFGEIGPDFTKFRSPSAFASWMGLCPDNDISGGKVLWVGTRKVKCRAATSLRMAAQSLHHSKSGLGDFYRRMRAKLGAPKAITAAAHKLARIIFHLVTTRQEFDDTRFAADQLRFAKRQENKLRLKAKALGFQLTPLENAG

SEQ ID NO: 55974 - protein, 315 aa, unidentified
MMETPVFIGIDVAKAELVVAVRPTGERWTTPNHPGAWPALVARLQALAPQGIVCEASGGYEVPVAGVLGAAGLPLVVVNPRQVRDFAKATGRLAQTDRLDAALLAHFADAVRPAIRPLPDAATQLFAALVTRRRQLVEMLTAEENRRGLLPAALRAELQDHSADLRRRVAQLDQDLDQHLRASPIWRAQEDLLRSVPGIGPVTARTLLASLPELGTLDRRAIAALVGVAPLARDSGSLHGRRSCWGGRAAVRTALYMATLTGVRFNPILAAFYEHLVAQGKRKKVALVACMRKLLTILNAMVRTKTRWAPRPGMA

SEQ ID NO: 55975 - protein, 426 aa, unidentified
MKVVYERVAGIDVHKDMIKVAIRSPGEKPWTRKTEIVEYRTFYGVLQQMAAELRRRGVTHVVMEASGVYTEPVYYALAERDFTEIAVINPAHAKALRGHKTDAKDAARLAELFECGLLRGSYIPAPELKEVRDLTRYRIKTVQARTSEIQRLAKALESAGIKVGSVASEITGKSVTAMIEALIDGERRGAVLADLARGRMRTAGKLADLSMALAGRFTEHHALLCRLHLDRIAVFDTAVAGLEDQIAAKAARWQREQNLLKTVPGFGDAVAQAWLAEIGPAPHAHFPSHDKLASWVTLCPGNNISARKRKHGRTGDAGTYIKPMLVQAAWAAIRVRGRLQARYHRLVRRFGGEKNPAAKKKAITAIAHTLLKIAYQVLKSGQPYQDLGADFYTRRESPEQRQAWLLRQLQKLNPGATITIAPPEAA

SEQ ID NO: 55976 - protein, 354 aa, unidentified
MSQTPNTAIAVIGIDIGKNSFHVAGHDARGAIVLRQKWSRGQVEARLANMPPCLIGMEACVGAHHLSRKLASLGHDARLMPAKYVRPYSKGQKNDFNDAEAIAEAVQRPTMKFVATKTAAQLDLQALHRVRERLVSQRTGIINQIRAFMLERGIAVRQGIGFLRTELPTILATRTDALSPRMLRVIEELAGDWRRLDQRIDGLSGEIEALARQDAACSRLMTVPGIGPIISSAMVAAIGTGDVFSKGRDFGAWLGLVPKQISTGDRTILGKISRRGNRYLRVLFVQAAWVVLVRIKNWERYGLKSWIEAAKRRLHHNVLAIALANKLARIAWAVLHKGRAFECVKTHASASRPA

SEQ ID NO: 55977 - protein, 347 aa, unidentified
MRFYTGQHEHYCGVDLHARTIYVCILNRKGETVLHRNMPSNPDRFLDAILPFSDDLVVGAECMFTWYWLADLCQEAEIPFVLGHALYMKAVHGGKAKNDRIDSAKIAALLKGGTFPMAYVYPREWRSTRDLLRRRLHFVRKRGELVAHIQNTYHQYNLKAPSAKLRYRANRSGAAEAFSDDSAQKNIAVDLAVADRLDRVIRDLEYFLTRRAKVHDPDTFHRLRSIPGVGKILAMTLLYEIHDIERFPRVQDFASYARLVKCAHESAGKRSGTGGAKIGNAHLRWAFGEAVVLMLRENDEIKKRRQRLERKHGKGKSLSILAHRLGRAVYFMLKRKRVFQMERFLAG

SEQ ID NO: 55978 - protein, 338 aa, unidentified
MQTGQTAQTYTLFVGVDIAATTAAVATQRPGAKASQSFIIDQTPEGYTSLLHTLQRTGHAPCQVLVVMEATGSYWISLATRLVHEGFGVSVINPAQAHHFAKALLKRAKTDVIDAQTLAQLAMVLQPEPWTPPPQIYYALQQRLAQRDDLLNLRQQVRNQLHALVQHPEVIAEVRARMDQLLATFEAQLTEVEREIATALTQDAAWAAAAARLQSIKGVGWVTAAWTLVTTLNLTSCDTVDSLTAYAGLAPMPRQSGSSVWHRPAIGHTGNGRLRTAFYMATLSAAQHNPVIKAFYTRLREIGKPEKVARCAAARKLLHIAWAVVKKDQQFDPYYARG

SEQ ID NO: 55979 - protein, 312 aa, unidentified
MTETTIGIDVSKDTLDVHLHPAGDHRQFENTPKGFRAILGWIAGRPVARLVFEATGPYHRAFERAMGEAGLPLCKVNPRQARRFGEAIGQLAKTDRMDAAMLARFGALVEPGIRAAPSKIISDLKDLHVARTALIKDRTAAKNREKTLTSPLLKRHVRQRLSSIESHLKEIDEAIRILIDSDDHLRRRFEILVSIPGIADRSAFALLIDMPELGTLEAQEAAALSGTAPMTRQSGKRTGKAFVSGGRVNVRQALYMPALVAARFNPDLKDKYQTLTARGKPPKVAITAIMRKLVILANALIRDDREWAPRVA

SEQ ID NO: 55980 - protein, 387 aa, unidentified
MSQVSDLSRSLVPFDQNITLTVVVELSEASWLVAGLIPGVDRQPVKKQEPEPIALLRLLERWRVEAVRAGRTIGRIALAFEAGRDGFWLARWLQARDIEVHVVHSTSVAVSREHRRAKTDRLDTAMLMRVFLGWLRGERGHCRMVAIPTLEQEDAKRPSRERESLVGERTRIVNRMKAALARLGIRGFKPTLRKAPQRLDALRTPEEVSIPPNTLDEIRRDMVRLAVVREQIDVIERARLARLEQAPAAGPHAMVRLLARVIGVGLETADMLVQEVLSRNLRDRRAVARYVGLTGSPDESGRRRREKGLAKAGNARVRRGLIQLAWRFLRFQRDSTLAQWYRTRTGGPKGARKTTMIVALARKLLIALWRMVTIGEIPAGVALRQVI

SEQ ID NO: 55981 - protein, 458 aa, unidentified
MKLYLGGDASKGYTDWVIISETKKKLLDNFQLDDTFEGHNQLYNAIKSCVDKYPNVEIYAALESTGGYESNWLNTLKGYQKAFNIQVARVNPLAVFHDSKANMTRTVTDAVSALSIAEYQINHPDKIRYEQDTSWKSLRRHWNFVELQKKQRVQTINQLDALLYSANPMLLTYKTDKLSNWLLEVIIQYPTANLLAKASAEELSKIPYLSLSKAKEIIAGVQKSVASATDENTGVLITQIALQIKMFDQTIESQMSLIEKEMICPEIDILKTFKGIDTTSAIGLVLEIGAVERFYCVKSICSFFGLNPKFKQSGDKIIGVRMSKLGSKNMRKILFNIAMGAIVHNPLIYEVYQRKLSEGMSKMASIGVCMHKILRIVYGMLKNKKAFDAQVDKHNASRSTSKQDEKNQLKNAYIVKTRRFQEYDQNAPISIRQTKKRKEHVLSQCEIESHGAGSTHSF

SEQ ID NO: 55982 - protein, 388 aa, unidentified
MPQQRKPNDLGRSLISLAMDTTLIAVVELSLSSWLVAGIVPGVERQPLKKLKTDENALLALLNRWRDEAVRSGHKISRIAVAFEAGRDGFWLARWLKARDIEAHVIHASSIAVSREHRRAKTDRLDTELMKRAFVGWLRGERDHCKTASVPSLWEEDAKRPSRERESLVGEQSRLINRMKATLIRLGIRGFNPKLRHAEQRLETLRTPEGEPIPPNTLAELKRDMQRRRFICDQIRSIEQDRLERLERTPDTEPHAMVRLLARITGIGIETADLLVHELLLRNMRDRRAVARYGGLTGSPDRSGGTNREKGMARSGNARVRRGMIQLAWRFLLFQKDSALAQWYRGRTEHAPKARKTMIVALARKLLIALWRLVREGVVPEGVAMRPA

SEQ ID NO: 55983 - protein, 340 aa, unidentified
MRKYIRIGVDIAKNSFQVHALESEDCSATKRKLSRSGIVKFLAEVEPCAIGMEACGSAHYWARQFRAMGHEVKLTPPIYVKAYVKRGKNDAADAAAICEAMSRPNMRFVAVKSEDQQATLMAHKTRELLIKQRTMSVNALRGHLAEFGVIAAKGIGHVEELIERAAAADLPAMVQATLGVLLAQLRSLDAAIDELERAIAADHRRDPVSRLAASVPGVGALAASAILASAPDPHVFKSGRDFAAWLGVTPKQNSTGGKEKLGSITKQGNRYIRRLLVLGAISVLRAAPKRKGALCDWLAALRARKPAKVVAVALANKLARIVWAIITTGEAFRTSIYAKA

SEQ ID NO: 55984 - protein, 341 aa, unidentified
MQIRTVGIDIGKTVFHFVAMDKHGNVVAKKRFSRSQLVAYTANLQSCLVGMEACCGAHYLGRVLAGQGHQVRLIPAQFVKPFLKANKNDYLDAEAIAEAVQRPSMRFVPLKSEDQLDLQALHRVRDRLVSRRTSIINQIRAFLLERGITFRQGRLHLRKNMPAILENAASTLSPRMQSIIHDLWQEWHSVEAQIDHATDTIDAISKQDEACQRLLEVPGVGSLVATAMVAAIGNGSAFARGREFSAWLGLVPKQHSTGGKPKLLGISKRGNQYLRRLFIHGARSVLTHARRESHPLGKWMNDLETRVHRNVAVVALANKLARIAWAVLFSGEPYRLATAKA

SEQ ID NO: 55985 - protein, 343 aa, unidentified
MELYVGMDVSLKETSICVVDGDGEIQCEGTVISEPDAIAEFIKGKAGRALRIGLETGPTATWLWHELRAHGLPVICIDARHAKAALSLQINKSDRNDALGLARIMQAGWYREVEVKSLPCHEVRALLKSRAQLVKIKRDLENQMRGLLKNLGLRIGKAGGRVFRSRVEELVGDRPLLHEAVGPLLAVREMVSRQIATLHRKLLDLARDDEESRRIMTVPGVGPITALAFVTAIDDPKRFARSRSVGAYFGLTPRRHASGEVDWSGRISKCGDGMVRSYLFEAAGVLLTRVPRWCALKAWGHRLWKRIGFKKAKIAVARKLAVILHRIWCDGTEYRRSAKEETA

SEQ ID NO: 55986 - protein, 388 aa, unidentified
MSGGTSRPVPTVPDAPDGGIVGGVDTHKDEHAAAALDALGRVRGRAAFPATPDGYGRLLDWLAGFGPVRRVGVEGTSAWGAGLTRFLRAAGVEVLEVSRPNRQRRRRAGKSDPADAEAAARAVLAGEALGVPKAQDGPVEAIRALRVARRSALHARTQAANQLRSLLDTAPADLREALRGRTLRRIVDAARRFRPAADLAVPAAATKAALRSLARRWLALTEEMAALDQQLAQLVRATAPSRLLDEVGVGPDVAGALLVAAGDNPHRLHTEASFAALCGTSPRDASSGRQRRHRLNRGGNREANAALWRIVMVRLRWSHPATQAYVDRRVGEGKTPREAIRCLMRYLARRVWRLLTQAPPAPRHAWPLAPPNHVSAGDHAGPLTHEYV

SEQ ID NO: 55987 - protein, 410 aa, unidentified
MEVLHPHCAGLDVHKETVVACVRHMVDGTIKREVRTFDTTTTSLLALADWLASEGGTVVAMEATGVYWKPVWHVLSDGDFELVLANAKQVKNVPGRKTDVNDATWLADLLAHGLIRASFVPDADTQVLRNLLRTRKQLVRERSSHVQRLQKTLEDANIKLDAVISDIIGMTGRVMLEALIAGETDPGKLAALAHPRIKAPPAQLREALRGRIMKHHRFLLRLHLQQIDAIDTAIAEIDREVNERIEPFRTTVELLTTIPGISELGARIIAAEIGNDMSRFATAAHLISWAGLCPKNDESAGKRRSTRMRKGAPWLKTTLIQCSWAATRKKGSYIQAQFHRIRSRRGAKKAIGAVAASILTAIYHMLKNGTCYQDLGHDHFDHRTKTVQTKRLVARLQNLGYAVQITPLAA

SEQ ID NO: 55988 - protein, 318 aa, unidentified
MNVIGLDVSKDTIDATLITTKGSKDYIKISNNTEGFENLINWIKTKRIRKIAISMEATGIYYEQAAEYLSALYTVYVINPLKIKEYAKSQFSNTKTDKADSKLIAEFANRHLDKLTPFRPSENPILYKLVNLLQQLKEQQKETQNRLHTAKDIYIKSTHEAIIELLEEKIDQTSKRIEGMIKQKESLNIEYQNLQTIPAIGKETAVILLRHLTDKNFETANKFVAFAGLSPKIEQSGTSVNKKGRLSRYGHRQLKRALFMPALVAYRMNAFPQLVRNLEAAKKPKMIIIVALMRKLAKIAFYIHKTKKPFDKARHQTV

SEQ ID NO: 55989 - protein, 346 aa, unidentified
MTHGAIDLGKRMSQICILKEDGELVERRIRTERDRFAAVLQAYPRMRILLEAGTESEWVARCLEELGHEVIVADPNYAPMYAQRQRKVKTDRRDARALVEACRLGAYRPAHRTSEAQRQVRWHITTREALVRMRARTLVLIGSLVRQAGLRLPGGKAETFASRLGTLALPQPLQDALTPMLLAFETLNRQVAAADRALDDLVRSDPRVRRLQTAPGVGPIIAATFVATVDRAERFSGPHQAEAYLGLVPREYSSGEHQARGRITKAGNTRLRYLLIEGAWSILNHPKPETAALRGWALRIAVRRGKPRAVVALARKLAGILFAMMRDNTVFDSGRFSLPSRVARVA

SEQ ID NO: 55990 - protein, 414 aa, unidentified
MDVLYPRCAGLDVHKDTVVACVRVADGAEVRREVRTFATTTPGLLEMSAWLSEHGCTHIAMEATGVYWKPVWHVLSDGEFTLILANAAHVKNVPGRKTDVNDAEWLAELVAHGLIRSSFIPPEPIQDLRALLRTRKQVVREQSRHIQRIQKTLEDANLKLASVLSDILGVSGRAILEALIGGETDPDQLLTLVQRGVKAPAERLRAALTGRLNPRHRFLLRLHLGQIDALQAAINGIDQEVEHDLAPFRDAVRLLRSIPGISDLTAEVIISEIGTDMSRFPTAGHLVSWAGLCPGQNESAGKRRSSRMRKGAPWLKTTLVQGAWAATHKKDSYLGAQYQRLKQRRGPKKAICAVAASMLTAAYHMLKDGTLYQDLGADHFRKASPEAHAQRLARQIAKLGFSCQITPMPEVVST

SEQ ID NO: 55991 - protein, 344 aa, unidentified
MSEVTTIGLDIAKHVFHAHGADARGAMVFSRRLTRSKLLDFFVRHPRCVVALEACGGAHHWARELRAIGHEVRLIPPAYVKPFVKRHKNDAVDAEAICEAAQRPSMRFVAVKSEEQQAAALVFRTRDLAVKQRTQIANTIRGHLAEYGWVAPKGAAHLAMLADLLEGGEIGDTLPEAARPMFAMMIDMLTVLDRRIGELDKEIARLAREDEVARRLMTIPGIGPITATAIAAIAPPAETFAKGRDFAAWLGLVPKQASTGGKQKLGAISRMGERTLRRLLIIGSSAVVLQASKRGAPAGSWLEGMLAQKPRILITVALANKMARTVWALLVKQEDYRAPVAVAA

SEQ ID NO: 55992 - protein, 329 aa, unidentified
MQVTTLGIDLAKNVVQVHGVDAKGHVVLRKRFSRAKVLPFLAQLPPCLIGLEASGGAHHWARELSQQGHTVKLMSPQFVRPYVKNQKNDANDAEGICEAVSRPHMRFVPIKSVDQQDIQALHRIRERQMKARTALVNQIRGLLAEYGIVIAQGVSKVRHALPALLEDADNVLTWHGREWLSALAGELRRLDQHITETEQKIQRVFERDEACQRLAQLEGIGPLTATALVAAVGTATTFTNGRQMAAWLGLVPRQHSSGGKPTLLGISKRGDSYLRKLLIHGARAVIRQVDKKKDPRSRWLQGVRERRGTNRACVAQANKTARIPDFDIS

SEQ ID NO: 55993 - protein, 378 aa, unidentified
MKKIMRYVGMDVHAETIAIAVVEEDGTERVVGPIANRPEAIRTCLRKLGRAEELHCCYEAGPTGYVLYWQLRRMGIACTVVAPTLIPTKAGDRVKTDRRDARKLARYLRSGDLTAVWVPDEAHEALRDLVRARQAAKIDEKRARHRLQKFLLRHGQRPPEGVKAWRAPHRAWLHKLQLDDATLQVVLGEYFHEVVHSEQRVARLDTAIEQAVEEAPEQLRAVVAALQGLRGVRKVTATAVVAEIGQFSRFAHPRQLMGYSGAVPSECSTGGPGKHQRGAITKAGNAHLRRLLGEAAWCYRFRPAVRYPLKKRQQGLPAEVSDISWKAQVRLCNRYRRMVARGKSKQKVVVAIARELLAFMWAIGIEVEKPQTQTRAAA

SEQ ID NO: 55994 - protein, 316 aa, unidentified
MTTTPVFVGIDVSKDRLDVALRPTGDRWTVAHAEPGLATLVERVRGLSPTLIVLEATGGLEAPLTGALAAAGLPVVVVNPRQVRDFAKATGKLAKTDTLDAAVLAQFAEVIRPALRPLPDAATQALSARLARRRQLIEMLTAEKNRLGPTPPPLRKGIRAHIVWLARQLARTDDDLAQAIRESPVWREKDDLLQSAPGVGPVLATTLLAGLPELGTLSRQQVAALVGVAPLNRDSGTLRGRRRVWGGRAQVRTALYMAALTATRYNPVIRAFYARLCAAGKAKKVALTACMRKLLTILNSMVKHRTRWQEHVASTP

SEQ ID NO: 55995 - protein, 318 aa, unidentified
MNTNTLQNINVGVDTGKSQLDIYIRPLDIYFTVPNTDKGITDAINTIKKHKPQRVVIEATGRLEMPFILACDKAKLPYVVANPLRIKRFAEAIGQRAKNDRLDAALIAHYAERVQPELTKLKSENIRLMSDLVTRRNQLLTMQTMERNRLQILPKNISSTITPILTALKNQLEKVEAKIAKLIERSPEYQAKSTILQSMPGVGKVLAASLISNVPELGFITNKQASSLVGVAPVTRESGRFKGKRMIKGGRPQVRTVMYMAMMSAIQCNPVFKATYERLLAVGKPKKVAIVACMRKMVVILNSMVRDGVMWDNNSAKN

SEQ ID NO: 55996 - protein, 309 aa, unidentified
MDHFVGIDVAKDRLDVHVRPSQESFAVARDGEALAALVERLRGLAPALVVMEATGGYETVVASAIAAAQLPLAVVNPRQIRDFARATGKLAKTDRLDAAVIAHFAEAIRPPARPIAEPEAQALGELVARRRQVIEMMGAERNRRRQATQRRVLGAIDRHLAVLQAELSELEGDIDGAIRSSPAWHQDAELMASVPGVGPATVRTLIAELPELGRLTRRKIAALAGIAPINRDSGTLRGRRAIAGGRAPVRTALYMAALVAAHHNPVIAPHYQKLLAAGKSRKQALVACMRKLLVTLNAILRDRKPWQPA

SEQ ID NO: 55997 - protein, 382 aa, unidentified
METLSKIVGANDTEQQQAKLFVALELGQATWVVALHSPIADKISIYRIEGGATDKLMTLIEKKRVQAARQLGRAVRVVSCYEAGRDGFWLHRFLIRRGIDNHVLDSASILVDRRARRAKTDRLDARALLRVLMALVRGEEQVCRVVHVPSIVQEDERRLSRERQRLLHERNSHIARIKGLLILHGVRDYRLIERDWKERLDAVRTAEGHALPARAKTEIERECRRLWLVKQMLAEVEREIEQMIGHDGAVAGKLIRLRGIGPTFASVLKHEVYYRSFDNRRQVGSYLGLVSIPWQSGRVRRDQGITRSGNARARRCAIELAWLWLRHQPGSALACWYRTRVGTMTGRMRRIALVALARKLIVALWRYLQNGIVPEGAALKAA

SEQ ID NO: 55998 - protein, 393 aa, unidentified
MPVLATQPEAAIAIRTDLCAIFVSLELSRSTWLITSLSPGGGEKMSKYSVSAGDIDGLFRRFGNLQERARVRTGQSFAVVTIQEAGLDGFWIHRVLEREGIESWVVDPASILTSRRRRRAKTDRIDGETLVRTLLAHKRGEPRVCAMVQAPTPEDEDRRRLCRERKVLTAERISHVNRIKGLLFAQGVRDYEPLRRDRRVRLEELRTGDGRCLPVHLKAQISRELDRLEIILVQLKAVESERDALLAKGNEDQPPTPASLLVQLKGIGPEFAAVLWSEGLYRNFNNRRQVAAYAGLAPTPWQSGSIDHEQGVSKAGNSRLRTTMIQLAWLWLQHQPGSALSIWFRERIQRNGGRGKKTAIVAMARKLLIALWKYAAHGVLIEGAVANAAFEKG

SEQ ID NO: 55999 - protein, 342 aa, unidentified
MNNTQSIKILGIDLAKSIFQLHGNDQDGHCVLSKRLTRSKLAEFLATLPRCIVAMEACGSAHHWGRKFREYGHEVKLIAPQFVKPYVKGNKNDMQDAEAIAEAASRPTMRFVGIKSVEQQEIQSIHRVRERLVRDRTALGNQIRGILQEYGIIFNEGLHHLRRELPQMLSMADSGLGVRTCALIQDLVSELLRLDERIGYYEHEIKTVSRDSELCQRLEGIPGIGPITSTALIASVGDARVFKNGREFAAFLGLVPKQRSSGGRSLLLGISKRGDGYLRKLLVHGARSVVSHNGRRLDKDRRSQWISSLEERRGMNRTAVALANKNARIAWALMVSGAQYRQ

SEQ ID NO: 56000 - protein, 385 aa, unidentified
MNDVTDRLELFRRMRASVRGSERYLLVGVDVAKNNHHAFFGTPNGRTLRKNMVFDNSTKGFESLRSFARDIRNQHGLVEVVYGLEPTASYHKPLAEYLIRQDEHVVYVSNVAVAKNRALLDGRWDKNDKKDAANVADLVGQGRCLYYDVPEESLRELRSLIAFRIRLKKEEHALRMRLRNNVFAQYFPELDKLYIRAGQPDDLVLSIAQHCLDPREIAGMEFEAFLKLITPRKIRIEQEKRLRELWEIANESAGCQVHDAARWEAQSLVSKLKAVRETVKDNEQLMEKVAKQFPEYESLLSIPGFGPIVSAMVLAAIGNAFRFENRKQVLRLAGLDLSAERSGKNSDTAKPVISKQGKAALRYALVQAAMVASSLNPDIRSYFSN

SEQ ID NO: 56001 - protein, 406 aa, unidentified
MELVPIHKRVIGLDIHQAQITACAITEESGGETRIEQRQFGAFKRDRRALAAWAATLEPEEVVMESTGIYWKSPYAALEAVGIRATVVNARHVKQVPGRKTDVGDAQWLATLARAGLLRASFVPPAKLRELRLIARQRQKLVGLLSSEKNRMHKVLTDAGIRLGVVVSDIHGQSARAMIKGLLAGEPPQEVLKLASRRLKASREELHDALQGELTASHVFVLDELLRHIEGLEAGIARFDARLLGELASEMNALALLQTLPGVDAIGAAMLLVEIGSDMSAFGSPDRLASWVGVCPGNNESAGKRKSGRVRKGNLYVRRLLCEFAHAASRTKSAFQSKFQSLIVRRGYKRAIVALAHKMLRTIFFMLKRGEHYRDSATNYEQLSVQRNASRWIKALTRFGFIPAAA

SEQ ID NO: 56002 - protein, 418 aa, unidentified
MKKNHILGLDIAQKSAVAQLERADGSKCWRGTVLTTQAGWQQLQSRLAEHGARLGDTQVLVEATGIYHLSWVERLTKAGAEVYVLNPLLAARLESSANALRGHKTDQVDVVRLCEIGRLHDTKLTRFRYQPELAQQGLKQLDHARRRLRATLTNLKKTVRSHLELVFPALLEAKIAPDTARAAALLEKAPTAGAWRSLPEVERKKLAREKQAALDQACAETLADEALAQACVPAVRALLRAQQAMTDQLRECDQQIVPRLPRERVALIASIPGFGERTAAVMATYLPASFAGWGSRKKIAARVQALFGFDPRLRQSGKWVGKVVMSKRGIAAGRTALFQAAFCSLDCDQDNAAYYRRLRDLEKKDHKQAIIDLMRKQVRRLVAVLCSNRAFEKKSLPHPDTALAKRPPRFAKKSPPAA

SEQ ID NO: 56003 - protein, 345 aa, unidentified
MQEETQEKTVDVWVGLDVGKDHFESAFVRTNATTALRDIPLRRFPSTKEGTVQLCTWIDEVKEETETVRLVMEATGKYSLELAAWVIAHHPSLHPAIVNPSRIYHFGKSLGVRNKTDEVDARIVALYGKERTPGAYEPPSAELAELRELSRQRDRLMTMIVAERLRAKETQPSRVVAHTQSSLIKQLECHILTIETAMNDLVTASSSLAKDVALLTSIPGVGRLTAMTVLAEMGDLRRFDRSRQASAFAGVSPRQHSSGTSVHRRTKLCKEGNKRVRTALYMAALTVIRTDNALSRYYIRLVEKGKPKMVALGAVMRKLLVLMRALLISEQYFINSVFEQHADCG

SEQ ID NO: 56004 - protein, 357 aa, unidentified
MKKLFIGIDFSKEKLDATIILACGMNEIGSREYGRFPNNTTGYRKLCNWVKTNAWNTIAEEWLFCGEDTGSCSIGLSKWLYGKGYDIWIENAYAIKHSSGIQRVKNDKADSAIIAEYAWRQQDKVVPFEPLNESLAQLREVFLYRHKLVGQRVAMELRKEDKSQSNKSKAISFINRKSKHLIAEINKTIAECDKAIDSIIEADEELKENYAIITSIKGVARQNATCMLVYTNNFKKFGYDPRKIACYYGVAPFGKQSGTSVNTPAHTSHFANKLIKSLLGQAAHIAKIYNPEIRDYYQRLISKGKKPQVALNNVKNKLIRIIVALVRKKVPYDQNTYKYYEEREIIERKKNEKLIYC

SEQ ID NO: 56005 - protein, 349 aa, unidentified
MRFYTTQHQYYCGIDLHARSMYVCIQDQSGKILLHRNYRAGPDALLGAIDQYREDLVVAVECVFTWYWIADLCSREGIAFVLGHALYMKAIHGGKTKNDKIDSNKIAALLRSGMLPMAYVYPQGMRSTRDLLRRRLYLARQHAELQAHIQNTNTQYNLPYFEKRIDRNSNRAGIAMRFTDPAVRTSVEVDGALMDALHQQILAIERQINAQVPEHDPVALHLLRSIPGVGKTLALVILYEIHDISRFPTVGNFISYARLVKCTHESAGKRKTGPNNKIGNVHLKWAFSEAACLFLRRNERARLYHQRLVSRYGKAKALSIIAQKLGRTVYTILKRRTPYDARRFFETLP

SEQ ID NO: 56006 - protein, 349 aa, unidentified
MSQQCSTAIARMGIDIGKSVFHVVGLDAKGKPVFRNRFTRERLLEFLARASPTIIGMEACPGSNWLARKAIDQGHQVRIVPAQFVKPFVKSNKTDIVDAEAIAEAISRPTMRFTQPKTEAQLDLQALHRVRQRLVSSKTAIVNQARAFLLEYGLTIGAGPAYFVRDMPSILADDGNGLTPAMRDLLQEQWQEHRSIEARLLQLRRQIEAIAGADDVATRLISVPGIAHLTATAITAFAGTGTQFKSGRHFAAWLGLVPGEFSTGGKQHLLGITKRGNPYLRKLLIHGARACVLHLDRTKDHLGLWISQMEAKGIHRNKVIVALANKLARIAWTILTRRGTFYLRQPQVQ

SEQ ID NO: 56007 - protein, 347 aa, unidentified
MITIGIDPHKASHTAVALDANGVTLSELRVTADRSMLAGLEQWAAAWPRRVWAIEGASGLGRLLAQQLVAAGESVVDVPSALAARSRVLARGHGRKTDGIDARSVALVAQHCSDLHTVAADDHTAVLRLLSDRRDELTGERRRTINRLHRLLRDLHPGGASRQLSADRAARLLAGLRRSGPVDQERKAIARQLIADVRRIDRALHENRRRCAQAVAASGSNLTEIFGISDVLAAKILGHTGDVTRFPSSDHYASYTGTSPVEASSGERTRHRLSRAGNRSLNHALHMAARVQVMHPGPGRAHYQRKRAEHKTSTEALRSLKRQLAKVVDRQLRADHHRVQPSPPPQT

SEQ ID NO: 56008 - protein, 328 aa, unidentified
MRYLGVDVSKDKLDCCLLVDAGGSKRKNKVVTNGTTGLQSLLTWLSKEGLSPEDVHVVMEGTGVYHQLAAETLHDAHVNVSIVNPAQVKDFGRGLAVRTKNDTKDSYVLARFGALLQPSLWVAPPIHARQLQAYIGRLDALKKDIQREQNRREKTMVEGAPLDVLASIDETLAFLQQQEAKLRKKINDHIKKYPDLGDDLKLLESIPGVGPEVGQHMLSVMHNRQFQAAEQLAAYLGLVPVERQSGSSLHGRPKLSKAGPRSIRSLLYLPAVTAKRCNPHVRALCERLAARGKNPKAIVGAAMRKLVHLCFGVLKTRTPYTEDQGQLA

SEQ ID NO: 56009 - protein, 332 aa, unidentified
METYWQYVGVDVSARSLSVSVDAHKPFLVLQTPSGWREISRHLKASGCAASQTLIVMEATGPYTLKPAMALHQAGFAVSIINPLKSHYFARTLLRSAKTDNMDAQLLARYGAQFQPEQWTPPPAIHRALYVRLVQRQTLVDIRQQLRNQRYNFERGGDVMPEVAQRLNDLIGIVQKQINATERELRQLLHSDTSWRENAQLLLSIKGVGVMTAAWLLVSTQNFAFTTSAEELAAYCGLVPHIRQSGHRLHSRRRVRYAGSRRLRRTLYLATLSGAQYNPILKKFYEGLRARGKPMKVARIATARKLAHLVWGVVSKKQPFDADYLKRQPIAA

SEQ ID NO: 56010 - protein, 388 aa, unidentified
MTQIDDLSRSLITFEQNSTIVVVLEMSQSSWLAAGVVPGIERRPLKKLDPDPMALLRLLEGWRDHAMKAGRMITRIVLAFEAGRDGFWLARWLRARSIEPFVIHSTSVAVSREHRRAKTDRLDTEMLIRVFLGWLRGEPRHCKMVAIPTLEEEDARRPSRERESLIGERTRIINRMKAALIRLGIRGFKPELLKAPQRLEAQHTAEGVPIPPNMLDELRRDMARLAWVREQINAIEQARFERLEQAPSSGPHAMVRMLASIVGVGVETADMLVQEILSRNLRDRRAVARYAGLTGSPDESGVKRREKGLAKAGNARVRRGLIQLAWRFLRFQKESALGQWYRARTEGAAGKRKTTMIVALARKLLIALWRMVTTGEIPAGVALRTAAA

SEQ ID NO: 56011 - protein, 461 aa, unidentified
MGRNKSKDKDRRTMLVVHPNAAAIDVGATMHMAAVNADCTPEPVRSFGTFTTDLHRLVDWFAECGVNTVVMESTSVYWIPIFELLDARGFAVFLVNARDAKHVPGRKTDISDAQWLQRLHSFGLLRASFRPKGQIAELRAYVRQRERLLEYGASHIQHMQKALTEMNVQLHHVVTDITGATGLRIIRAILGGERNPAVLARMRDRRCHATVETIEKALAGNYRAEHLFALEQALALYDTYQEKASACDSRIEAVLKELSICRGREAGPSPSPRQRMRRQPNGMDFDVRAALYALLGKDLTQINGLGPHLALRLIAECGDDLSAWPSAKHFTSWLCLAPSNKISGGKVLSSRTRRSGSRAAALLRLAAATVGRTDTALGAFYRRLSARIGKAKAVTATARKIAVLFYNAVRHGMEYVDPGASSYETRYRTRVINNLQRRAKAFGFVLQPTEVTPGPAVSAVS

SEQ ID NO: 56012 - protein, 355 aa, unidentified
MNQEKYIGMDVHQATISVAVMDNSGKLIMECILETKAATILEFLDGLRGSLSVTFEEGTSAAWLHDLLQPHVSRLVVCDPRKNALLKDGSKSDRIDARKLAELLRGNQLHPVYHGEHGVRTLKELGRSYQTLTKDVTRVMSRIKALYRSWAIPCSGTTVYAARHRAEWLAKIPQPGVRLRAERLYQQLDLLHPVRQEARRDLLRESRKHDAVKMLQQIPAIGPIRAALLVALLQTPHRFRTKRQLWAYSGFAIETHDSGEYRYVRGKIQRNRERITVRGLNDNHNHDLKNLFKGAALSASTRPGPLYDFYAALLEKGMRPTMARLTLARKIAAITLTIWKKGVSFDAKQLHRQAA

SEQ ID NO: 56013 - protein, 420 aa, unidentified
MREITEDIEIVARVAALDIGKATLMACVRVPDEDKPGRRLQEVRTFATTTPALLELRDWLICQGVTLCVMEATSAYWKPPFYLLEDATECWVVNARDVKNVPGRPKTDKLDAIWLCKLAERGMLRPSFVPPPWQRELRDLCRYRRTLVQERTREKQRAEKLLEDAQIKLSSVISDIFGVSGRAMLEALIAGQDNPAVLADLARASMRGKKSVLQEALTGQFRAHHGYLLRMMLDRVDALTAQIQTLTGRIDEAIAPFARQVAQLDEIPGVGTTGAQEIIAEIGVDMTRFPTAGHLVSWAKFAPRARQSAGKAKPGTTGKGSPWIAGTLGEAVIGAARTKTFLGSRYHRLARKRGKRRAIVATGRSILVIAYHLLSDPDARFDDLGPDWHDRIAPLRRKRQLIAELERLSGKKVTFQEAAA

SEQ ID NO: 56014 - protein, 343 aa, unidentified
MDKNTMIGVDLAKNIFQLHITTMTGALLSKKKLSRDRFKEFMKSHEPAIVVLEACSSAHYWAETLGDMGHDVKLIAPQYVKPFVKRQKNDAADAEAIVVAAQRPEMRFVAAKTKEQRAKAVLFRSRDRLIHHRTEHVNALRAVLYEYGYVIPQGIASIRRIEDILARPNCDLPDLVCDECRHLLEQISSNTKLINAKTDLIKQLANQTNMARQLQTIPGVGPITAMAIDAFAPPMDLFKNGRGLSAWLGLVPRQYSSGGKERLGRVSKAGQADIRRLLIIGAMSRLNWLGRKSIPEESWLGKMLARKPKMLVAIALANKMARTIWAMLTKETDYRDPTISATA

SEQ ID NO: 56015 - protein, 338 aa, unidentified
MFFIGIDPHKASHTAAVLDAHEQLVSEIRVSADRGQRDRLLSFAAAFEPRCWAIEGATGTGALLAQQLVAVGETVLDVPPKLSARVRLLDNERSDKTDAHDARSAAVVALRHSRLRVVGLEDHSAVLRLVAKRHHDLVAHRTRAICRLHTVLCQLVAGGLPRNLSATRAAAELRRIKATNAISVERCRLARELLGEVRRADAELIELKARITALVEAAATTVTDVFGVGPIMAAYLIGYSGDITRFATAGHYARYNGTAPIEASSGPNPRHRLNPRGNRQLNHALHIAAVTQIRNDTPGRAYYLRKQAEGKTQKEAMRALKRRISDAVYTQLRADANR

SEQ ID NO: 56016 - protein, 414 aa, unidentified
MEQKLIYLGIDWADDHHDIVITDDSAKTLNQFQIDHTPDGFALLHANIANYQKSPTDVLIAIETNRGLLVHELIRTGYTVYAINPKAVNRYKDRHVLSKAKSDILDAQALAHLLRTDRHRFKTLVPLPEDYRLLDRFCGDLRKLIDEKSRIVNQTISCLKEFYPKALELFSLNSQIFIDFLKAFPDHDTLRACKKKTFLAFIKKHRYPYPGKIEELWETIQSSTLQADTVTARAGKLRLLMLLDQLENLKIHCTHYEQEIQKILDTLPESNSIQSLPGVGDRLAPELVAALGPNGKDTHHRFHSAEEIAKLSGCVPIVKQSGKWEKVSIRHACVRSLRRTFHDWAFTSLKSSTWARAYYDYHKARNQSHFTILRNLGKKWIKILFAVWSKGTTYDEALHIQNLKARNIPWAMAL

SEQ ID NO: 56017 - protein, 331 aa, unidentified
MFPVGIDVSKKNLDLCMLYDGIKGRIKTRNIQNNRHSVENILRWLRLQHCGPEDVHVVMEATGVYHERLATELHDAGFRVSLANPHRSREFARGMGIMTKTDKVDAYMLACYAFLKKPHRWEPPAPEIRYLGALLRRRDVLLGDALREENRLEKYLSTDTPADIISSCRRMAQLLREEVSNIERQIKAHIKASPALRRDYTLLTSIKSVGPQLGMHMLVVLRSHNFVSAEQAAAFLGVVPIEKRSGTSVRRRPRMSKIGPPQLRAKLYMSALCGKIYNKRMRNIYDEMCLRGKPKMVAIGALMRKLVHWCYGVLKTGTVFNDEGLKQVLST

SEQ ID NO: 56018 - protein, 428 aa, unidentified
MNSTETIRRKEYCQITEEICGSEQYMIVGIDVAKDKHHAFIGTANGKVLSRKLIFENNRKGFSRLIDQAQFLQTQNGLSKVVFALEPTGNYHKPLGSYLAGNGFNVVLVSGKSVKNNREVLDGRWDKHDTKDAANVADLASRGRCQYYDRPSEKIIELRDLLSLRRRLKKEEHSLRMRIRNGLLAQYFPELDRFYNACESESLAIVRWCLNPEGIAAMEFDRFFEVVTRNRRGITQKLRLQKIYQAAGESVGCRVKQTAEFEAALLVEKLNQVRNQVHETEDYMKEICQTFPEYDYLLTIPGFGPYVSARVLASVADPFRFDSRKQIIKMAGYDLCANRSGKTSNKAVPVISKNGNGELRYALYQAAKVASSRVDIFRAYFAGMLRSREREKGIIAKMRVKLAAKMLVIAWTLMKKREPFDPAHLNIE

SEQ ID NO: 56019 - protein, 344 aa, unidentified
MEQYAGIDVSLESACICVVDANGRIVREAKVASEPDALIAWFRGLGVPMSRIGLEAGPLSQWLYAGMREAGLAVELLETRHVRDAFKAMPVKTDRNDARGIAQLMRLGWFRSVHCKSLPAQELRAVLTARKLVQEKRHDLEMSLRGILRGFGLKVGHTTPRSFEGRVRELVDGHTTLLAVADALLLARATLGEQLGKLQKRLVSSARDDARARLLMTTPGVGVLVALTYVAAIDDPGRFKSSKAAGAYFGLTPKKYQSGETDVTGRISKIGDASVRTALYEAANVILTRPVKGSSLKSWAMRVAKRAGMRKAKVALARKLAVVLHRMLADGTRFAAEKAAAAAA

SEQ ID NO: 56020 - protein, 300 aa, unidentified
MEYYVGLDVSLKQTSICIVDQAGLVMREGVVDSDPEAISAYVKSKAPDAVRIGLETGPTSTWLWTELKRLGLPVICIDARHAKAVLKMQINKSDRNDAIGIARIMQTGWFKEVHVKDIDSHSVRALLASRALLVKIKRDLENHVRGLLKNLGLVIGRAKFNVFAVRVDELIEGRPELVAAVRPLLEARNAVEQQVSELDRKVMRLARHDAHVRRFMTVPGVGPITALAFKATIDDPARFARSRSVGAYVGLTSRRHASGEVDWSGRISKCGDAMLRSYLFEAAGVLLTRVPKWSAVKAWG

SEQ ID NO: 56021 - protein, 350 aa, unidentified
MKFCGVDWANDHHDALSIDEQGHQLGSIRVAHNPEGLSQLDAYLEQIAGPGGKEQVACIIETTHGLLIAHLLEQGWSVYTVNPRTVERRRAPSGAKTDTIDAYLLAKTGRADFQDLRRLNPDSEQIQELKTLTRDQDALVRMQTRLLNQLTACLKAYYPVALELFSKLQQPSTLKFLRAYPTLQSARSASVEQLTATLKQARYPGAGRAAQQMLQHLQQPSLQASEVTTRTKARLMLALVDQLEPLMKQIADYDKETLRLFLMHEDHELFQSLPRAGERLAPRLLAELGDDRTRYDSASSLQALAGTSPVLFQSGAYQKAHRRLGCIKPWRNVLQQFGGPSTLQDTWARE

SEQ ID NO: 56022 - protein, 329 aa, unidentified
MKKNWHVGIDVSKKWLDVAIFVENSDLKGYSHTQVSNCKAGYKELLRWLKEHDVDASTCMYGMEHTGFYSDGLQHFLDKKGYRYTMLEPAVIKHYPIQPREKNDRLDAAKIADYLFRFKDRIRLSRVPDKTMEKLRELHKERKFYVEDRVGYLNRKQVVGKEEAKRLDKMISLLDKQVESVEEKIRDIIQADEALMESYLYLTSIKSIGFVNAVNAIVITQNFTVFKTARDYASYIGVAPHTKTSGTTVRWKPKPYRHCDLTAKADISEAAKCAVVHDVELKRFYERKCNGKDDADTVRKTMNAVKFKLVLRMFAVVRQKHTYKQLTTI

SEQ ID NO: 56023 - protein, 335 aa, unidentified
MQVYGIDLSKEKFDVNFIDANGKEKNQEVKNTVVSISRFLSSVSEHSILCAEHTGAYGDLLVFLCNQASIPIALVPGYTIKHSLGLLKGKSDPLDSKRIREYGERFTDKLKYTEHADENITELRQLYTLRLQLVKQRRALRTADTGREHLPMQSISVHSHIQIVLANLDKEIAAIEEEIEALIKTNQDLNENYELVKSVFGIGPVIATDLLIKTGNFKTIDTARKAASYAGVCPFPNTSGKMVGKSKTSPFADKKLKSLLFMGAKAAVKHNKEYKLYYQKKQLEGKSHYLIMNNVSNKLLRTIYSVVKSKTPYNQDHICIDPRERKINSSTKKVA

SEQ ID NO: 56024 - protein, 350 aa, unidentified
MKEIFVGIDLHKKFFTFYATDLFGNEVAQGKLDSNLLSIDTLLSKFRSKPKVVVEAMGSWMWFVRALRSNGCEVLLAHPLKVLAIAAAKIKTDSIDAKTLCHLLRSNLVPTSYIATDEEQDARELSRGRATLVHDRTQLKNRVHAILTKENLAFLGTDMFGTKGRVWLSGQELPDGKKYIVDTYLKKLDETEKAIMDLDGVIKEKSSSDTRVKLLLSIPGIGPTTAFLLASEIGDIQRFPTSKQFASYFGLVPRLHQSGSHAYYGRITKEGNPYVRWVLTQAAQRNARYDEQSRKHVVRLAFRTGYKKAITALARELATVVYCVLKEKRLFIKDYKRSPMVCPAIIAGKS

SEQ ID NO: 56025 - protein, 345 aa, unidentified
MPIVGGLDIHRKQITFDYLDTVTGEVKRGQITPADRVHVRAWLARFAGCEDVAFAVEGCAGWRYVAEELAAAGIGAHLGEPADTAALRGRKRHAKTDKTDARHLRSLLAEGRLPECWIPPPQILEYRALLETYHDLRAAHTAWVQRIHAVFFHQGAPPLAEGMMRTEPGLAALRAAAAAHLSAAGQQQVATALDMLAATEAQLGPLRHQLCDAAQHLTGAKVLAARLYGVGPVTGLALTCWLAGAGRFSSSRKAVRFTGLDITVHSSDRKGPPGKLSRQGPPVLRWAVYEAGKTHARTSAPDHGYYTQVKDRKNSKRAALSEARKIVRQACHILTELGDDALTAA

SEQ ID NO: 56026 - protein, 340 aa, unidentified
MTVIIGVDPHKASHTAVAIDDREGELDRTRVRATRKQTLQLLEWAEPLGTRTWAIESAGGLGYLLAQQLVDAGETVVDVPATLVSRVRVLATGRSDKTDPNDALSVAIAALRAPALREVRAADHAEILRLLAKRNIDIGKQRTRVVCRLHNLSMELAAGGISKELNASDAIRLLERIEPASPVEQARHDLAAELLADVQRLDAQLKESHRRIRIAVRASGTSLTDIFGIGPVIACYLIGFTGDVRRFASRDQYAAYNGTAPVERSSGGRVVHRLSQRGNRRLNHALHLAAICQIRQTHSDGRAYFDRKVADGKTKKEAVRALKRQVSNAVYRQLVLDAAR

SEQ ID NO: 56027 - protein, 343 aa, unidentified
MKLSYVGVDLAKNVYQLHGVDRHGKIVWKRRLRRGQWLQALIDKVEPGCEIGMEACTGAHHWARELQSRGYTVRLIAPQFVKPYVKSNKNDANDAEAICEAMSRPHMRFVTVKSIEQQDIQATHRVRTEIKDHRNAKANQIRGLVAEYGLVAPQTLLALRRAIPEWLEDAENGLTDYFRSMLHGLWDDLLTLEDRLKELDKEIEKLARSNEVAKRLQQLRGVGPIVATALVATVGDGAQYNKGRQMAAALGLTPRQNSSGDKHRLFGISKRGDVYLRTQMIHGARAVVSQAKHRDDPLSRWVTGIARRRHPNVAAVALANKTARMAWAMLRNDTDYDPSLSTC

SEQ ID NO: 56028 - protein, 356 aa, unidentified
MSIVAHTHPFVIGVDAHARTHSLAILACPTGEVIDEGQFPATAAGLQRAVAWVGRRTDGDLDTLWVVEGVGTYGARLARAAADAGYLVSEAARMNARANRGVGKSDPLDARRIAQAVLPLELTQLRRPRADDGVRAAVRVLIASRDHLSAERTAAINALTALLRVADLGIDARRALTGGHIATVAAWRTREEALAPKVARAEAVRLAKRVLAADHELAANAKQMTALLNDSPARKLLDQPGIGPVTAAVALAAWSHPGRVRSEAAFASLAGVNPIPASSGNTVRHRINRGGDRRLNRALHMAVVTRMRTDARTRTYIEKRTAEGRTLREIRRCIKRYLARQIYRQLNATQTTPQPG

SEQ ID NO: 56029 - protein, 412 aa, unidentified
MQDILTCAMGLDVHRDIIVACLVKGAVDAEPEAETRTFSTLIPEMQKLRDWVIESECRNIAMERTGIYWQPIYEMLESCFDGEISILVVNARHMKNVPGRKTDMKDAQWIATLLRAGLLKGSFIPDKAFRELRHLTRYRKSVVHDITAQKNRIDKFLQSSGFRFTAFLSDTFGASGRNIVRHLIEHGSIDREALDKCLKTKTRNRIDEILVALNGSLSEHQCRFLNMVFRHLEDLEAHKHTVEDEITEEVLKHTDTLNLLCSIPGIDVTAAAAIIAEIGTDMSSFPDSQHICSWAGLSPGNNESAGKRKSVHINKGNPYLKSMLCEVAWIMASHRKLYLSGWYWKVKQRKGAKRATIALARKILSIIYTMLKTGTPYNEECFEQRRLRCERKRANRLVNELQKLGYVVVAPD

SEQ ID NO: 56030 - protein, 344 aa, unidentified
MAIAVLGIDLGKNSCSVAGLDGTGRVILRRRLTRESVVRLAGTLPACVVAMEACCGAHHLGRVLREQGHEVRLMSPEYVQPYVKAQKNDERDAEAIAEAATRPTMRFVELKSEAQLDAQILHRARSRLVGQRTALINQLRAVLLERGIVVAKGRRRLEEYLIGLLDGDRPATLSPRICLLIEDMRLEWSELDQRIAALTAEFVARAREDQAARRLATIPGFGALNATALVAAIGTGETFRRARDLAAWLGLVPRQATTGGKPRLLGITKRGNTYLRTLLIHGARAALPSLSASQSPMGEWLRGLIGRAHKNKVIVALAGKLARIAWAVLRSGETYVKEGRPVAA

SEQ ID NO: 56031 - protein, 396 aa, unidentified
MPDGIRWVGLDVHAHESTIAIFDQATGELTTRRVVGRPHELMPWLRGVERPARMVYEAGPTGYGLARRALAEGIELSVCAPGRTDRDPTDRVKTDKRDAIRLARRLAAGELTMVCVPSVEHEQLRDLVRCREDIRGDLMRARHRLGKFLLRREIYYEGRGEAWSRRHRAWLAGLRFADRASQLTIADYLHSHDVLLARREQIEAELEQLASDSPWKVTIARLRCLRGIDTLSALGLCAEIGQFDRFGHPDQLSAYLGIVPSENTTGERRRQGAITKAGSTHARRLLVEAAYHYQRQPGVGQTLERRQRDQPAEVINIAWRAQRRLHARWRQLKHARGKRNGIVAVAIARELAGFCWELATWEQPHPDRIPPASMPADDPLTQTASLPPKHEVAVTA

SEQ ID NO: 56032 - protein, 412 aa, unidentified
MDIVHERAAGMDISKRDAKVCLRVPGPRPGTFISTVTTWGATTVQILQLREYLEREHVTTVVMEATSDYWKPFFYLLEDTLPVVLVNAKSARNIPGRKTDVSDAAWLAQLAAHGLLRASFVPPEPIRELRDLTRARALTTRDRTREIQRLEKFLEGSGIKLSAVVTDLTGVSSRAMLEALISGERDPQVLAGLAKGVLRSRIPDLVDALTGRFKGHHAFMARLYLDQIDSHTRTIDELTARIEEAMAPFRAARDFLATIPGVSLRAAEVIIAETGADMSVFETPGRLASWAGVCPGSNESAGRVKSTHILPGNKYLKAVLGTAALSASRSKNTYLAAKYRRITARRGPMKAIVALEHSILNAVWHMLAEGECYEDPGPDLFIRLDPVKAKNNAIKKLNSLGFDVTITPAPAA

SEQ ID NO: 56033 - protein, 395 aa, unidentified
MEFLKYGLGIDMAMEKFDACISIIDKLQHVMIRAQCSFNNNKKGFETFILWVSKNTKLAIPAVYLMEATGIYYEQLAWFLHNKNCSVSVVLPNKAKKYKEALGLKSKNDRIDAKGLAQMACEQSNTSWKPLTSNIYLLRLITRQIQSISEQSTVFKNQLHALQYGMYRDKAIEKMHVRQLDLLQKNKKSLQLRVEQIVEKDEILKRKFKHIGKIKGLGLQNLAVIVAETNGFTAFENVAQLVSYAGYDVVENQSGKRSGKTKISKKGNSHIRRCLHFPAFNMITYEVAPFKNLYERVYEKSKIKMKAYTAVQKKLLEFIYILWKKDEAFDPNYQDKTSGDVEPAPSFASVPQEPSLTCGDQEEKIKPVKQKITPAITRVTQDKHPSKYRRMPSFA

SEQ ID NO: 56034 - protein, 345 aa, unidentified
MKKSRQSVQAALVPLLTPSTIGLDLGDRWSRYCVVDENGVVVAEDRIQTSAAALARRFQRLPSRQIVVEAGTHSPWVGRLLASLGHRVVVANARKVRLIYESDRKNDRLDARMLARLGRVDVSLLAPIQHRSAEAQADLAVVRGRDALVAARTQMINAVRGMVKTAGGRLPKSTTAAFPRKVLPWIPPELRRAMAPLLESVRVLSEQIHLADRQIRALADEKYPETKLLRQVKGIGPLIALTYVLTLENPYRFAKSRTLGSYLGLRPRQRESGDSAAQLGISKAGNHQLRWLLVQAATISWDPWRPTVACGAGDSNWRHGVARTASAGRWSRWRGSWLFCCTGFG

SEQ ID NO: 56035 - protein, 313 aa, unidentified
MDHNSAFVGIDVSKNKLDSFVSTTGQVEQFFNTQEDIHRLAKHLKAQDPVLVVLEATGGYERLAAAELCAAGLPVVVVNPRQVRDFAKATGRLAKTDALDAQVIAEFAQAVKPEIREIPDEHARELADLLTRRRQLIDMIVAEESRLKQAVFKALRTDIKAHIIWLQKRLKSTDDDLHEAIKASPVWKANYDLLREVAGVGNVLALSLLAMVPELGKVNRKQVAALVGVAPFNCDSGQYKGRRRIWGGRAEVRSVLYMAVLSSKRHNPVIERFYNHLLATGKTKKVALVACMRKLLTILNAMVRDQKHFAEMA

SEQ ID NO: 56036 - protein, 408 aa, unidentified
MNTLYVGIDVSSKSNVVYLMLPNGDKHSNFSVANSHEGSTQLVKRILSALTSHSLDTVLIGLEATSVYGDNLVYFLREDATLAPFNRKIHVLNPKQVKKFHDAYNDLPKNDYVDSFVIADCLRFGRINKEVYMGDYRYKALQNLTRARFFAVQNLVKEKQRFMNVLFKKYSTMTQEKVFSDTFSTTALAVYDEFESAEALANMDLHELTDFIIEKGKNRFPDPDAVAKAIQKAARSSYRLPKTVNDSVNQVLSISITSMKALESQIKEFDKAIKAQMELLPNVLISIPGIGPVYSAGIMAEIGDINRFNSQAALAKYAGLAWKQHQSGGFESEVTRLIPSGNRFLKYYLCEAAFSLVRCDKEYSDFYHLKYKEVNRCQHKRALALTARKFVHLVFRLLKDNRLYCPAK

SEQ ID NO: 56037 - protein, 354 aa, unidentified
MNATTVAVDLAKTVFQVAEADANGRITGTHRLTRTQFERFFANRVTGQVVMEACGSAHHWARTLQRQGVAVRLLPATHVKPYCLRNKTDAADCGALLQANNDPRIREVRVKSVEQQALQALHRARSQWMSSRTQRINTLRGYCREFGVPIPVGAKTGLQAVRSLVGDPGSPLPAMLRPTMQMLLVEVVQLEARIAQLERDLREVVRQSPACQLLLSIPGVGLLTATALVAAVGTNLTQFRNGRQLAAWMGLTPYEHSSGNTRRLGHITRAGDRYLRTLLTHGARSVLQAAARAHSAGRDCTGLKAWALAVRERTNQNKATCALANKLARICFATLRHQQPFDAQRACKPRPAAH

SEQ ID NO: 56038 - protein, 363 aa, unidentified
MNANASLPIVGIDLAKSVFQIAIADASWRVIEQQRLTRTQFERFFANRALGLVVMEACGSAHHWARWFRAHGIAVRLLPPTYVRAYVRRNKTDAADACALLEAARCADIAAVRVKSVEQQALQGLHRTRSLWMATRTARINALRGFCREFGIVIAQGSRVGVEQISRALADPRSALPTLLRGTMSLLVEEIRLLEVRIAQLERELTMLARQWPACATLLSIPGVGLVTATAMVAATGGEVSHFRDARHFASWFGLTPKEHSSGSTRHLGRISKRGDRYLRMLLIHGARSVLRAATVARQAGRDIDRLRTWALELQARSNHNKAACALANKLARICYATLRDDQPYGVARLSKKMRRTAFTMPA

SEQ ID NO: 56039 - protein, 338 aa, unidentified
MKVAVLGIDLGKNSCSVVGLDDTGKVIMRRRMHRDSVIKIASGLAPCVVAMEACCGAHHLGRILRERGHQVRLMSPEYVRPYVKAQKNDDRDAEAIAEAATRPTMRFIELKSAEQLDMQSLHRVRDRLVSERTALLNQLRAILLERGIVIPQGRRKLEDHLRTLLEGQEAILSPRVWSLLNDMQAEWRALDSRIEALTDEFAAQAKTDEAARRLATIPGIGVLNATALVAAVGNAATFARGRDLAAWLGLVPRQMTTGGKPRLMGITKRGNNYLRKLLVHGARAALPSLSASATPLGKWLTSLLERAHKNTVVVALANKLARIVWAVLRRGETYAWQP

SEQ ID NO: 56040 - protein, 322 aa, unidentified
MDDAGRIIREVKVASEPDALLAVLTNRIYHFKRIGLEAGPLSQWLFSALAEAELPVICVETRHMRAVLKAQINKTDRNDARGIAQMMRVGLYRPVHVKTLRSQKLRMLLTHRKLLQSKAIAVDNDLRGTLRNFGLKVGMVGTAKFEARIRELVENLPDLAVLVEPLLVVRRVLREQIGILHRRLLAIVRDDEVCRRLMTVPGVGPVVALTYRTTVDVPARFRKSKSVGAVFGLTCSRDQSGERDRPGAISRCGDEMMRAMLYEAMLGRSSRWSWLKAWATQIAKRRGMKRAIVALARRLAVIMHRIWVDGTEFRWTREAAAT

SEQ ID NO: 56041 - protein, 355 aa, unidentified
MDSKKYIGMDVHKESISIAVMNGAGKIVMECVVETKASMILQFINGLRGDLQVTFEEGTSAAWLYDLLKPHVTKLVVCDPRKNASMREGNQSDKIDARRLAELLRLNHLNPVYHGEHGLRSLKELVRSYLTVTKDLARVMSRVKAIYRSWAIPCTGKQVYAPRHRAEWLGKIGEPGVRRRAEFYYQQLDALRTVRQEVRRELLAEGKKHKAWKRLCQIPSIGPIRSAVLLGILQTPHRFRAKRQLWTYSGLGIETQSSADHRSVNGQLKRAKKQISIRGLNRNCNHDLKNLFKGAAIVASSKPGPFQEFYTALLAKGIRPDMARLTLARKIATIVLIVWKRGACFDAQHLKPQTA

SEQ ID NO: 56042 - protein, 341 aa, unidentified
MLHIGLDLHKRFSTVSTVAVMDDDGKVLLEDKLYHEDQARLREFLSAYAGKAVVTVEATRNWYWMYELLERLGVTVKLANARKVRLIAEARLKNDKVDPKALAQLERTGFLPEAYIPPLLIRDNREYLRYRLTLVMMRTGLKNKVHALLDKLGIRHRFADLFCPAGRRFLGQLKPRPVYQEELTNYLALMDDIECRIVVVTKEIKRQLKPDSRAKLLMTIPGIGHLTAYLLLNEIGDIKRFATPGKLSAYGGIVPIVRQSADHRWQGHITKEGNRYIRWALTESAYLAPSKDYALGSFYRRVAFRRGPLRARVAVARKLLVAVWCVLTYCEPYKVTQFPTV

SEQ ID NO: 56043 - protein, 388 aa, unidentified
MHVVAAQSEAAIAIRTDLCATFVSLELSRSTWLLTSLSPGAGEKMSKHSVSAGDTAGLFSRFVELQQKARTRTGRTFPIITIQEAGLDGFWIHRLLQGEGIESWVVDPASVLTSRRRRRAKTDKIDGETLVRTLLAYKRGEPRVCAMVKAPTPEEEDRRRICRERKTLTAERVRHVNRIKGLLFAQGVGDYEPLRRNRRGRLEELATGDGRPLPEHLKAQISRELDRLEVILAQLKAVGSERDAMLEPAKEGPPTPASLLAQLKGIGPEFAAVLWSEGLFRSFNNRRQVAAYAGLAPTPWQSGSVAHEQGVSKAGNPRLRTTMIQLAWLWLRHQPGSALSLWFRERVQRNGGRGKKTAIVAMARKLLIALWKYAVHGILIDGTTAKAA

SEQ ID NO: 56044 - protein, 342 aa, unidentified
MRYLKKVIGIDISKDSFVIRFGTLNNELQQKIGEAFTFSNDLKGFKKFSNTLSKIPAYQDNVDTPCWFVMEATGVYYENLAYFLISKKHLVSVLLPNKTKYFFKTLNIKSKTDKLDASALAQFGLEKQVPAWTPPSGLMKDIKELTREYHNLVVMSTQIKNKIHAKEYSYQASKDNVKRLVQQLNLLKKQITQVKKQLENLVRSDEDLSNRINNIMTAKGLGFLTVITIVGETNGFVLIKNIKQLTSYAGYDVVQNQSGKFSGKTKISKKGNKFIRNALYFPALAAVRCDDKFKEFYKRLCIKKVYKKIAIVAVSRKLLALIYTLWKKNEVYNPNYKNAICS

SEQ ID NO: 56045 - protein, 401 aa, unidentified
MSKKNTRNALDTSLSYAVIGLDLAKADCAVAAVPCSDDELGLIDRMDYESLFEQAEKLEPTLFAMEPCCGYSQISLRLQNMGHEVKVISGHAVKNWIATHKSNQKTDLNDATALAKLALYDHDLQPIRVKNVEECRIASVQAIRIQLRTQATKSLVCFKSLCQCWGIVIRRGSLNTKKMAEAVAAVEKLLGAEVASSLMILRDAYKFTMKQINALDKLLDALVEANEQARTMKTVLGIGTQTAARLAVTTGDIKRFPMPRSYVAYFGLAPRNIITGHSGTPSPSKRGALKPVSSRGQGKVSRRGDRVARSFIIQGAATIYMLYCKDMLPECQLRRWLHEQIKRGKPYGKIIVSLAAKLLRIVWALLTYGEKFDSHKAGVPRSVLAAMEKPLKHDVAAESAA

SEQ ID NO: 56046 - protein, 391 aa, unidentified
MYSDGSKHSSFSVPNNRNGAKIIVDRVTSVLLLQDIPQVVIGMEATSVYGDNLMRFLRESGSLGRFERSLHMLNPKQVKKFRDAYSDLPKNDYVDSYVIADHLRFGRINKEVYMDDYKYQALKMYTRARHQLVQELTREKQRFLNTVFISFSGLTQEKIFSNKFGATSMALIEEFSSLDELAYMSTDELVDYIRKKGKNHFENPEEIAEAVQRAAKNSYRPPQVIADAAKQMLAISMNTIRLLQKQIKEYDKAIEKMLEAFPQTLTSVKGIGNIYAAGIIAEIGDINRFPSQASLAKYAGLVWTQHQSSDFEAEDKRMIQGGNHHLKYYLCEAANALRRCDPEFKRFYALKYKEANKHNHKRALALTARKLVRLVYTLLKTNRLYIPPEEY

SEQ ID NO: 56047 - protein, 274 aa, unidentified
MKQDISVLGIDLAKNVFQIHGPNAHGKRVLTKRVGRKELVELMSNFTPCVVGIEACTGAHYWARLFSSMGHTVKMMAPQFVKPYVMSNKNDRNDAKGIAEAVTRPEMKFVPIKTVEQQDVLLLHRARELCVKNRTAQSKQIRGLLAEFGVVINQGLSEVRKLPEILDLNKDKLSVKALHVFERLYAQFKIYEEQVLLYEKDIEAHVKSEPLCKEILKIEGIGPMTASALVATIGDAKVFKNGREVSAWLSLVPKQHSSGTKLDWVVSANEVTDM

SEQ ID NO: 56048 - protein, 430 aa, unidentified
MPYKIAGIDVHKKVLAVVVSDVEVDGEYRFERRMFGSNPEQLRSLAAWLIEQEVEEVIMESTAQYWKPVWGALERCWKPLREKREGASRRSGTLHLAQAQSNRAPRGRKRDFPDAERLVKRLVARELTLSFVPDAEQRLWRTVTRRKYQLTRDHVRQQNQLESLLEEAHIKLSSFVSDLLGLSARRMLRALADGETNPAALAALADERLRATPEQLCDALGACTDLKPVYRRLLKMALEQLQFLEQQIGQLDQEMANLLSQHQDAVERLAEVPGLGVDSAQQIIAEVGPTAATFPSEKCLSSWVGACPGDDESAGVNYNHRSPKGNRHMRRVLNQTANAAARTKGSIFETVYRRSVSRLGHNQTIGAIAHRQCRLIWLILHQGVRYEERGPAVTKQSKQKRAARMIRQLRSLGYRIEPPDPQQPSPAQAG

SEQ ID NO: 56049 - protein, 420 aa, unidentified
MVYLERGYNLKELPWSKTVSNSFLFKEACMILVGVDVAKDKHDCYIMTSEGEVLFKSFTIANNMEGFNQLYEKILSVIDNFDNVKIGLEATGHYSYNILGYLLDKGLTPYVINPLHSNLYRKSLSLRKTKTDKVDSRIVASMLMSDVSLKPYSNTLYHNEELKSLTRYRFTKVQERAKLKISISRLVTILFPELEKLVPTLQMNSIYALLYEFPSAHAISKAHLTRLTNLLNTTSKGHYTKDKAVLIREAAKNSIGSNMPAKSLELKHTIKLIKELTSEINEIEEEIKIIMNKINSPILTIPGIGLSTGAQILAEIGDFKNFSSPDKLLAFAGLSPSTYQSGNMYSSNAKMEKRGSKYLRFALFNAAIYVSYWEPTFSQYLKKKRVEGKHYYVAISHVVKKLVRLIFHLEKTNERYSTVV

SEQ ID NO: 56050 - protein, 411 aa, unidentified
MNQITSVGIDVSKGFSMVAIRQPGGVIVEPPFRVNHTSRELNALVQRLHILPGEIRIVMEHTSCYWRPIGLTLVNAGFFVSIVNAMLIHDFHDNSIRRVKTDRADALKIANYALTFWTELKPYSPEDELRQLLKMQCRLYERTLSTSVTLRNGLISLLDQTFPEINRMFHPLVKQSNGHVKWVDFVRTYWHKEKIATMTESRFMGSYRRWCKREHYQYYASHARRIYGLAKETVASMPRSESTRQLICQAVDSLNAVYEALHQLRKEMLRLAQQLPEFEAVMSLPGAGNITGPKLMGEIGDVRRFTSKRALVAFAGVDAMPYQSGIMDSHSRRMSKRGSPLLRKTLFQMCSICLQLSRVDDPVYLFMDRKRREGKQFYVYMVAGAAKLLRMYYARAKSAFDADNKENKITA

SEQ ID NO: 56051 - protein, 345 aa, unidentified
MGEVITVGLDLAKSVFQAHGADASGEVVFRKKLRREQVVPFFATQPRCLVAMEACASAHHWAREIGSLGHETRLIAPAYVKPFVKRQKNDAADAEAICEAAQRPTMRFVTPKSAEAQGAAVVFRTRDLLVRQRTQLISALRGHLAEFGHIARKGPGHVVGLIELVRDPEAGLPDEARSVLLVATEMLEALQARIAVLDRQVLARVKASPLARRLMTIPGVGPVMATAMVALAPTPSTFRRGRDFAAWVGLTPRQHSSGGKEKLGRTTKMGERSLRRLLILGASSAARMAARKGTSDPWLARMLARKPRMLVTVALANKMARIVWALMAKGGSYRAPIAMAASAAA

SEQ ID NO: 56052 - protein, 362 aa, unidentified
MMRHIFVGIDLGDKNSVARIAVDGVKFKRFGFVNDVRGRARLFEKVKVKSEEAEGAKIIMAYEASSCGFILRDEAEARGNQCCVLAPTKMEKSVEQRKHKNDDRDAVDVLEKIRAHVLAGNRLPTVWVPDPQMRDDRELVRARVELVEKRTRLKSQVQMLVKRQGLEKPSGCGSGWSLQHRRWLEALTKSDALGSGARTALTSLLRQLQFIEEEIERIEKPLLELASQARHQPIIEELTLEPGVGVITAMVYRTEIGYAGRFRRSRQVGKFVGLTPTSHESGQQNDRKGHISRQGPARLRKMLCQASWVHVNHDADAKRIYQQLVSRNPKKKKIAIVAVMRRLAVRLWHRMLRVELQMTQAG

SEQ ID NO: 56053 - protein, 417 aa, unidentified
MKKNSNPVKKCEPSTKRMKVRASERRDAREVMAELVAQLTKQLDAESSPVAEPEKGMRGADCPNLDRLTVGGDLGDQWSNYCILGLAGETLAEGQFRTRRQETSEFFQDLATSRVVVEVGTHSAWVREVIAGFGHEVLVANPRLMEGSKRRRRKNDRIDANKLARLGRTDPKSLHPIQHRSTEVREDLLVLRARDALVASRTELINTVRALVKTMGARLSNCSSEAFAKKAEMDIPNELLETLQPLLRLIATLNDEIKSYDQRIGQLASEKYMHTKLLRQVTGVGPITALAYVLTLETPLRFARSRDVGPYLGLVPKQEDSGDSQPQLSISKAGDRMLRRLLVGSAQYILGPFGPDTDLRRFGMRLCERGGKNAKKRAAVAVARKLAVLLHRLWVSGEVYEPLGHGVLASPAQSAAA

SEQ ID NO: 56054 - protein, 390 aa, unidentified
MYRSDGSFTNHRFSTLLDGLTALREWVVENRCERVLMEATGVFWIPPYTALESSVEVYVVNPLSIKYLPGRKTDTLDAVWLAEIALNGMFKASYIPPRDVREFRELTRTHRKLVEERTAHKNRIHKILERSGIRLSGVLSDIFGKSGLLVITGLIEGKPIEQILATLHDSRILKKRDAIERAICGDLGENEVFIIQQSLESIKHVNAQIAQYEERILRTLARDEESLQIVTSVPGIGFKVGAVILAEIGNISQFDGPKNLVSWAGLAPTVYESAGKTAHGHITKRGSKYLRTVLIETAQVIANGKPNRLKQFFLRIRARKGYKMAIVALARKVLALIHHLLINRERYLDDPGTVKTVNLPKIRPNREMDHDEMIQLLTQAGYVVQKLNAA

SEQ ID NO: 56055 - protein, 315 aa, unidentified
MSDVPCFVGIDVAKAQLDIALRPSGERWAVPNDASGVATLVNRVQTLHPTLIVLEATGGLERAATSALAAAGLPVVVVNPRQARDFARATGQLAKTDALDARALAHFADVIRPTPRPLPDAQTQELRALLGRRQPLIVMRTAEQNRLAGTSERLTKDIAAHITWLNADIATLDDDLETLLRASPLWRENDDLLQSAKGIGPVCAHTLLLELPELGTLTRQHIAALVGVAPLHCDSGTLRGRRTIWGGRAHVRTVLYMGTLVATRFNPQIKVFYERLLAAGKVKKVALTACMHKLLTILNAMLKHRTPWKPQEVQN

SEQ ID NO: 56056 - protein, 410 aa, unidentified
MTDTTIAQAEPVLVAIDIAKARHEVLISVPGRKRRRRLTVLNQLEDFNRLITTLSDYDRPVRAAFEATGNYHRALAYRLGNAGFDVKLVSSVALARTREALNNSWDKNDPKDAQVILHMMQIGNEQFYHDPMLCGTNDLQELSKTHDIVSRSKTELWHRILTHYLPLYWPEAERFHRSSRSDWFFAFLERFPSPHFISAMDQATFIADAWEVVGRKVSKERLLADIYQTAKSSVGLPIAPDSDATRMFRLVLAEGRSLIAQRNEIEDRAVELLKNNDDYQLLTSIPGIGPINALTILAEAGDLRRFQHHRQFLKFCGMDLATIQSGTFRGQTKLSKYGNARLRRTLWMAGQVAIMQKTNSFRDKFERYIAKDRQNTHLRRKAYTAIAAKMARTVHGIIKRGEPYRPFFEG

SEQ ID NO: 56057 - protein, 411 aa, unidentified
MIKENYIYVGIDLHKETHTAVMIDCYNQKLGEITFPNRPADFPKLVAKVKKCNTDGKTIVFGLENAYGYGRALAVWLIDKGYLVKDVNTAISHRQAKHRGAMYRKSDSDDAEAIALATLNMLDKLPDAYPNDAYWSLGQLVHRRDNIMKQRTRLVNQLHEQLCIAYPSYKQFFNDISRPTALYFWEHYPSRKYLKGKSVEDLRAELVPVSHNKCSTRTCEKILDAIAGDKVKNNAYQDARDMVTLSIVSDLQHYDKQLAKVDKMLEQMYKMLGCTLTTIPGVNVITAVKILAEIGDIKRFSNANKLAQFAGIAPLHLSSSGKGKDLATKQGNRRLQATIYFLAIQMVQISSKGTPRNPVVRAYYEKRKAEGKTSQQALICISRRLISIIYGMLKSGTEYRMPVMENTGETV

SEQ ID NO: 56058 - protein, 338 aa, unidentified
MKNISITRYNVGVDFGSEQMDAKLAAQYEDGTRKILFSRRFENKETGFKNLDGWLKEKCRCKDVEIRISCEATGVYHERCCYFLDGLGYYVTVEVPSRVKSYKKSYGFNSRNDKIDATALAYMGLERNLRKWEPINSFYYELRMLTRYHQSVQEMHTSACNQLHAQQAGMRISELVVKQLKANIELYEKQLAELERAIEEKLTSEPEVKRKMEYTTKDMKGVGMMTVAVMLAETNGFSWFTNRRQVVKYAGYDIVEDQSGKRRGKTKISKKGNAHIRRALYFPAINLVTYNVKPFADRTRIKMKGYTALQKDLLLMLFTLWKNDQTFDPNYQNQQKKK

SEQ ID NO: 56059 - protein, 347 aa, unidentified
MTEAYDGRQVVGMDLHRRRSVLVRMTEDGRKLETVRITNSPAALRAEIAKAGEHPRVVLEATYGWYWAADVLEEAGAEVHLAHPLGVKAYSYRRVKNDQRDAADLADLLRMGRLPEAWIAPPEIRELREITRYRHKLVKARTSVKDQVHGVLAKLGIPVTCTDIFGAWGNTWLDGLDLPQPYAGKVASLRQLNGELSGEIAMLEQVIGDLLAGHEGYRAIRALPGIGPVLGAVIVAEIGDIRRFPGPGQLCSWAGLTPRHRESDTKVSRGHVTKQGSRMLRWAVTEAVQRQPAGTRPRQVKDGIIARRGTQAKNTAKVAAARELLTLVFYGMRDGHIRRASRPGQAA

SEQ ID NO: 56060 - protein, 422 aa, unidentified
MLAESHDEEQIIARVAALDIGKAELVCCVRVPAPAGGRRRLQEVSTHSTMTRSLVELANRLVEMGIERVVMEATSSYWKPVFYLLEAHGLAPWLVNARDVKHLPGRPKTDVLDAVWLCKVAERQMLRPSFVPPWPIRRLRDLTRYRTDLVSARTAEKNRVEKLLEDACIKLSVVASDIFGVSGWAMLGALVAGERDPKVLAQLARARMRGKIDRLEQAFDGHFSDHHAFLLSRMLSRIEALDADIAAVDVQVEAQLAPFAEAAARLDEIPGIGPVAAAAIIAEIGVDMSRFPTAGHLCSWAKFAPGINSSAGKTKRSASSGHGSPYLARVLGEAAVGTSKTNTFLAARYRRIARRRGQPRAVVAVGRSILVIIWHLLKDPDARYQDLGADHYQRHVDSAVKKRGHIRQLEALGYTVTLTPAA

SEQ ID NO: 56061 - protein, 402 aa, unidentified
MIYAGIDIAKSSHVIGAVDERGKDAAKPMQFANSAGGFGKCAAYLEGLGAPAEEMLVGMEATGHYWLPLFSFLHARGYDVVVINPIRTDAMRRFKGSSRVKTDLVDCILIADTLRLGEFRPSKLGDESMVELRQLTRLHQGLKESVADLKRQVIVALDQVFPEYDSIFSDTFGESSKAFLKKCPTPEECRGVRVDALGNTLSRASRGKLGREKAEEIKGIAKESCGIDRGTRTLSFQIKLLVEQIDFIEGQIEEVEARIEEGIETTEPLILTIPGIGHILGAQIASEIGDIHRFRNASAVVSYAGINPSVSQSGKFSSSENHITKQGSPYLRRALYLAATAQLRLSTPFRDYYDKKRADGKSHREALIAVARKLVHVIYAVLSKQEPYRPDAVNANPVSRSE

SEQ ID NO: 56062 - protein, 532 aa, unidentified
MATKRSVRRSMVADASVLGKPQGVIQPRVQAVGPERFGIVAVDCAKARSKWMLCNFYGRVLIPPTIVEHGRAQLQIATAQLREACQEHGLKDHLVAIEMTGNYHRPVQRAFRKAGSETRLVHPFASHHYRLPASADIKTDDTDLAAIFRAAVNGFGLLEPVPQETYQRLQILERHRRDLVEKRATLQQQIREVLDRCLPGYAALFSGDDLWERPAGLCIARRAGSAATIRAAGVPGVTRWLREQKLSFWARTVEKVVAWSGNAADADPLAPHLKRVWQSLHDDWRQKTEVIRQLERELAEILVKTPYLLLLSHPGINVVSASDLAGEMGPIEYYVHAKGITGRAGIFPSRYQSDEVDRADGPLAEHRNARLRAALLRMADCLIKCNAHYRAKNELWKRQGIDARDIRCRIANRASRTLFQMLSGRQLYHHPSRLDRDYVLDKLLEFHLEHGTPPHQILRDLKCAAEQIPKHEQTAEAAPLVGRYQKCKRSRRPQSQPLGLLLVAVLAQYGITGLESKGEAQGPIVEQSDTST

SEQ ID NO: 56063 - protein, 384 aa, unidentified
MINDNIVFIGLDTHKEFTEVAYCQDHRGDKPIHQGKIKTTKQAFEKLVRQFQSKYPKATLHFVYEAGPCGYWVYRLLTRLGQCCYIVAPSLIPKKPGVRIKTDKRDALMLTQLLKNGDLDPIYVPEPEDEAIRDLSRARERTMKDLNNAKYQLKALLLRNNIRYDGTANWSLKHLRWLTELILPHPCQQLVLQEAIQTVSERLNRLKRLDNELAHHIKQWRYYPVVKAVQAMRGVRLLVAAGVIAELGDLTRFDHPRKLMSYVGLTPSEHSSGASRRLGAITKCGNSRARRLLVEGAHSYRYSANISTELQKRQEGLSKEIVDMAWQAQVRLCRRYQRLMQRGKPRNVVITAIAREMIAFIWSISREVVLSPVNPKLRLARVPA

SEQ ID NO: 56064 - protein, 463 aa, unidentified
MKRGKNQKHAVRRSTAVDGIPAIRTCVAGIDLGSEEHFVCAPALDGNGRELTSFGATTPELMAMCEWLKARKVEAVAMESTGVYWIAPHEVLEEAGFEVLLADARHMAGVAARDKKSDPTDCEWIQKLYSVGMLKGAFRPAEQVCMLRTLVRDKATLVAEASDWIRRMQKSLDQMNVRVHRAVSDLDGVTGMAILRAIVDGQRDPFKLAKLRDPRCRKSEEEIAEQLSGHWRQDHLFSLSRALEMYDQIQRQMEAYDREILRQLGAMQRPDHDDPTAPLDNASKQRKIEKHGQEPLRQALYGVSGMDLARIDAIGVDTVLTLISEHGVDLSSFPNEGKFVQYLRLAPSKPTSGGKPVKKKKRTMTSTRVAAALRMAAQSMRNSPTALGAYYRSVARRKDGDVAIFATARKLAQYVYRALRYGQCYVDIGAQAWEQQYQERRLAHLKSSAKDLGYELVPTEACA

SEQ ID NO: 56065 - protein, 411 aa, unidentified
MDVVNARCAGLDVHKATVVAGLRVPGPQRGERCGETKTFATTTRGLRELIDWLMAHGVTAVAMESTSVYWRPVHAVLEGHVQLVLVNARHVKMVPGRKTDVRDCEWLAQLLECGLLRASFVPPRAVRDLRDLTRLRKTLIRERGHHVNRIEKTLELAQIKLSGVVTDLMGKTGRAILQALSAGLKDPVQLAEYAQGLLRKKRAALREALVGRLTPHYAFLLQQHLSLIDAVNAHIATLDARIETAMAPFAESAAIVQTMPGVGARATQAILAETGVDMSCFPTPAHFASWARLCPGNHESAGKRQSTTTGKGAAWLRATLQEAAWAAVRSKKSYYRALYHRLKARRGAKKAIVAVQHAMIVALWHMLKHGVAHHDLGADYFERRNTARVRRHHVRRLEQLGYDVTLTEKAA

SEQ ID NO: 56066 - protein, 360 aa, unidentified
MLYLGIDQHRRQLTVEDRNEAGDVTVKRQVSTKWEPVRAFFAEYAIRAQAEGGFVAILEVCGFNYWLIRLLQEYGCRQVILIQPEKRSKRKTDRRDAGALAELLWVNRHRLLSGKRVQGVRRVDWPTEQEAEDRQMTVLRQRLGQLRTRTINRIKHVLRKHNIEQDCPTKGLDTIKGRHWLETVTLGTMDRMEVDLLLAQWKLWDEQLKTLDQEIRKRQAEHPTALVLATIPGCGAYSSLALASRIGPIERFPRPGSLANYWGLTPGSRNSGEATDRLGSITKQGSATARFILGQMVLHVLRRDAWMRAWYGRIKRRRGSKIARVAVMRRLATIIWHMVKHNEPYVMGGPPRKKLEAQAA

SEQ ID NO: 56067 - protein, 343 aa, unidentified
MKRNTIGLDLAKNIFHVVGFDHRGKQIFRKQLRRKQVANWFAQQPVSLVGIEACSGSHYWARTLMTLGHEVKLVAPQHVKAFVRGQKNDYNDASAIAEAVTRPQMHFVPIKSTAQLDLQALQRLRTRLIRERTGLSNQLRGLLAENGIVIPRSLAILRRRLPELLEDADNGLSVFFRRLLHTGWQHLLQIEDQVKTLDRELNQAVAEDEDCQRLMSIPGYGPVVASGFSVAVGDGRCYRRGRAVSAVLGLVPRQHTTGGKPKLLGISKRGDNLLRAHLIQGARSVLMHAKGKDDPLCRWALKVRAERGFNKATVALANKLARIGWAVLRNQTAYQPGYRLHTT

SEQ ID NO: 56068 - protein, 323 aa, unidentified
MTQKRTVVGIDISKEKADAHIRVLDASLSKPSTATGRAEMIAWLRENGVGLAVMEASGGYERDWASALREAGIEVSIVDPKRVRYFARSAGCLAKSDPIDAKMIAWYAETFAVEARKPAHDADRDKLDRLMTARAMLVRLQTQIGQLAEHKQPPAVVKAQQALAKTLKAQLAKLEAVIAGEIQANEAFVARDEIMQSVPGVGATFAAAAIAWLPELGHISNKEIAALVGAAPYVNESGERKGERHIKGGRREIRDLLYMVAVGASTLHNPVLKAHYRQLLARGKLKKVALVACMRKLIVILNTMLARRQKWNPPAVVARNAPT

SEQ ID NO: 56069 - protein, 341 aa, unidentified
MNKCKTIGIDLAKNTFYLIMLDKQGKQVERKKLNRQQLIGYLSKLETCVIAMEACGTAHYWGRKIGQLGHSVVLLPAQHVKGYLRGQKNDYNDAKAIAEACQHGAIRPVAVKSLAQQDDQTFLLMRQHVSSDRKRLINHVRGLLAEYGVVLARGSQVLRKTLPFILEDVENGLTDEFRALLFRQYTQLERLDEELQWYDERLAEKVKQKDVCQRLIKVPGIGPVVSFSLRAWMGSGEQFKRGRDASAALGLVPKQFSTGGREVLLGITKRGNQQLRSLVVHGARAVVSRADGKTDRLSQWILRLVERRGFNKAVVALANKIIRIAWVIICGGESYKAPAAV

SEQ ID NO: 56070 - protein, 352 aa, unidentified
MPLRYIGIDVHTSSCTIAVMGPTGKRLRHWQVETERRVLVEAIRSVPGPRHICFEEGTLSDWVYELLEPVAEELQVIQPPRTRGVKSDTHDAWVAANTMRLQPDDVTRVFKSPGTFTALRKAVRTHGLIQRDMVRAKNRIHACYRARGVQGLSSSIYDPLQRNEWLKKLPRPQRRMTELLCSELDGLVETCHQATLWMREEAQRVPAVALISTAPGISAIRASQVVATVVSPHRFRTSRQFWAYCGLAIVTRSSSDWTREQERWVRTNLHQTRGLNRNHQPVLKNVFKGAAKTISNTRMAAHPLHQSYQRLLASGTKPNLAQLTIARRIAAAVLAMWKNKETYDPTKQAQAA

SEQ ID NO: 56071 - protein, 363 aa, unidentified
MDAPRRHLRARVRCWLHSEEASVGDVSTIGLDIAKSVFQAHGADASGAVVFRKKLGRARLLAFFAAQPRCMVAMEACAGAHHWGRELMKLGHTVRLIPPAYVKPFVKRQKNDVADAEAICEAAQRPTMRFVPVKSAEQQASGVIFRARDLLVHQRTQLMNALRGHMAEYGHVAPKGVMYVDRLVVEIEDPQSEIPEAARTSLKAMVRMLDRRDTEISLLDAEIARRAKEDPIARRLMTIPGIGPVTAAALVALAPAPEAFQCGRDFSAWVGLTPVQRSTGGKQKLGQITKAGERTLRRLLVIGASAVIKQALLRGAPAGSWLAQMLPRKPRMLVAVALANKTARIVWALLARGGVYRAPALAA

SEQ ID NO: 56072 - protein, 343 aa, unidentified
MGEVSTIGLDIAKSVFQVHGVDIDGAVVIRRRISRAKVLEFFAAVPPCLVGIEACPSAHHWSRKLQVLGHTVKLMPPSYVKAYLKRSKNDVNDAAAICEAVTRPSMRFVPIKSEQQQSGLMLHRARQLLVRQRTMLSNAIRGHLAEIGIISAKGRNGTAGLLEIIANQEDDRIPAAARFSLDVLARQYANVTAEIGTIAKRIHAWHRSCEESRRLEEIPGVGPIVATALVAEVGDWKAFASGRSLAAWIGLVPRQHSTGGKERLGGISKQGNRHLRWLLVAGAMAVIRYARQHGTKRPWLARLMATRPIKVAAVALANKIARMAWAMMVHGERYKEPTLLIAA

SEQ ID NO: 56073 - protein, 347 aa, unidentified
MKILALDLGKYKTVACDYEGENGKHRFKATGTTPAALQQLVKEVKPDRVVIEVCNIAGWVCDLLRGMGVEVQVANTSDDAWRWRKVKKKNDRCDALKAAQLSAVNQLREVHIPIIEVRQWRALIAFRQQLVRRRGKVKNHIRDLLVTAGQILPRGARCWTQLGMAHLEALAKPLAEVGLNELWRGQLHIELRQLREVQEQIELAEEKLDAIAAADPRIALLRTIPGVGPRLSEAIVALLDRPERFHKAREVSAYIGMVPKQFDSGESERPGRITKHGSRLVRSLLVEVAWAGLRYNPWVRQTYQRISGGKKSRKKIAIVAVGRRLLVRCWAMLRDGTSWRSPVTVAS

SEQ ID NO: 56074 - protein, 409 aa, unidentified
MDVIYERCCGLDVHKRTVTACLLTPKSEGGRNQEARTFGTMTDDLLALADWLAQAGCSHVAMEATGAYWKPVYNILEGQFETLVVNAYHVKAVPGRKTDVRDAEWLADLLQHGLLRGSFIPDRPQRELRELTRYRTSLVRERASEVNRLQKTLEGANIKLSSVATDILGATGRAILEALAKGTGEGPELATLARGSLRQKRAELERALKAETGDHQRLMIREHLAHINYLDEAIGRLNREIEERLRPFEDTLSHLQTITGVGKRTAETILAEVGTDMSRFPTHRHLASWAGLCPGNNESAGKQRSGHTRKGSPWLRSALVESAWAAAKTKQTYLSAQYHRLAARRGGKRAALAVAHSILVIAYYIMARGQTYEDLGGNYFDERDRRQVERRLVKRLEGLGYSVTLEEVA

SEQ ID NO: 56075 - protein, 424 aa, unidentified
MFKIYRKNCCGLDVHKTWVFACIGITDENGRTEYKQSRFSTFSKGLRELAAWLGKYGCTEVCIESAGKYWIPVFNILEQTCLVTLAHPKYTKPQKGNKTDRKDAKWICDLFMCDMVKPSFIPPPDIRNLRDLLRYRFKLTNMLTGEKNRAQNCLTVSNLKLDDVFSDVFGKSSMSITKHILDNPGISFDVTPFVDRRCKKPIEEIQDAVDGAISLEQAAKLRVIIRHMEELENNRQSIETTISNLAAQYAYQLDLIRSVPGFSANPMTAIALISEIGVDMLVFPTAKNLTSWAGCSPRNDQSGGKLKSTRISRAGVYLKPLLVQVANAVVKSDKHPEFKERYRRIKSRRGHKKAIIAICRMLLTAIWNILSKLESYNPDGYLVNRTISKSDTFITKAQALNYMRARGFIITNDLAEGTAVESPA

SEQ ID NO: 56076 - protein, 449 aa, unidentified
MSYRVGGWLPSKYFGWRQPVHQSTIYQGQGYDSTNLRVSLAFSIAFVQWSECPMIFVGIDVASTKHDCAVLDSTGKVLCEFVIANDIVGFETLISRLQAVCNESQHKLSDIQIGLESTGHYNINIVKYLHEKRLSVKVFNPLSVARLKKASTLRRTKTDKTDARFLAVMLFNNDSKPYEQSVAQMDELKTLTRHRGRLVKESSEHKLHISRLITIVFPEFASVFSSTSGATARAILLEFPSAHDIAKADIRRLTGVVSKASKNRFGRDKADEIRTLAKKSIGTSDRALCFELKQHLAAIAFIKEQISKLEAFIKEIMIELNNPITTIPGIGYTLGAIIISEIGSIENFATPAKLLAYAGLDPSTYQSGKFTATLTPMVKHGSTYLRYALMTAATTVKRNEPTFEAYFNKKQAEGKHYFVAASHTAKKLVRVIFHLLKYNETYAPQAVAV

SEQ ID NO: 56077 - protein, 392 aa, unidentified
MYIVGIDIGKNHHEASIVSPEGKQIGRSLRFATTHKGADSLMSFIFKNIGNSPCVFGMEATGHYWYPIYSFLKAKGYTICVINPIQSDSLRKMYIRQTKNDSIDSFLIAEVIRFGQFGTTSMADENILAMRQLCRYRDSVISSRTEIKLRIGTIMEQIFPEYEKQFSSLWVSTSMGILEKYLTPENIENAPIDELFEIIKDKSHNRLTRAKAISIKEAAADTFGIKIAQDAFSFQLKQLIDRMNFLDKQIEALDCQILEYYEKFDCYLHTIPGIGIIGAATILAEIGDISRFKNSSSLIAFAGIDPTVRQSGEFNSTHNHMSKRGSPYLRHAIFLAATTCSFHNSPLNAYYKKKRDQGKHHLTATGAVARKLTTVIYAVLRDSKPYEPKKFC

SEQ ID NO: 56078 - protein, 358 aa, unidentified
MVKERRDYILRNENVFVGLEDSKKTWSLCVRSSGMVVHETSMPARYEALRNYFNNKFPECHIRVMYEAGFRGFELHDQLVADGWEGVVTPPHTVTDEKCQRKKNDRTDCRRLARNLENGDYRKCFVPDKALREDRQVSRTCGQVQADIKRVLNRIRRMLEFHGLDNGLPAGRWSGAAYTRLRQHLAEIEISDSLRLSFEVMFRELEQVRQLKRELLLQLRKLARSDRYKESVRLLMSAPGIGMLTAIRLTLEWGDMSRFGRKEEFASFLGLVPSDYSSGDQEHRGHITKQGNRSVRGWLTESAWVAIRYDPVLLDKFRRVLRNCGSKKKAIVVVARKLALRLRMVLLSGEPYVLGVVE

SEQ ID NO: 56079 - protein, 432 aa, unidentified
MERLREKAAGIDIGARKVFVSIEGDEVRSFFTFTEDFENLREYLVQNAIETVAMEATGVYWGILYEMLEEAGIDVWLVDGAQTKQVPGRKTDVKDCQWIQQLHTYGLLNRCFVADSDIKELRIYQRLREDHIRSASMHINHMQKALIEMNIRLPEVLNQVHGVSGLAIIKAILDGERDKEKLLRLCDKRIIKTKGEDVLKSLNGRYSKSGLFALKQAFDSYQFYQNQIKQCDMMLQEVIKRMGRWKPNRTSNAPRKPIRHHKPEIDDLGSEMLKIFDGRDATSLSGITDYTWMQLLSETGTDLSKWETEKHFTSWLGLAPGQHTSGKMRRTKKKKGIPKAGQIFRTIAQSLLNSKKIALGAFGRRLRSRKGSPIAVKATARKLAVMYWRIMVKGIDFVETGIQKYEEQIMEQKRRSLNRLAKELKMHVVVDV

SEQ ID NO: 56080 - protein, 418 aa, unidentified
MEEAIMWVGIDAHKKTLAVAAFYPGKHEPDELTIDNDERAIRKLVRRLEQRAEGREIRICYEAGTCGYALQRRLEAAGSVVCEVIAPSLIPRKPGERIKTDRRDARKLAELYRAGVLTTVTPPTPEQEAIRDLCRCREDVRADLGRCRHRLIKMLVRRGYVFNSTSRLWSEAHRAWLQALVFDNEIDRVVVTEYILAVEQAERRLRAMDGELEKAAQLPLYRDHVAWLRCFRGIDTTIAMIFVAELHGIERFESPRALAAYLGLVPSLYASGDTAKRGKITKTGNGHIRRALVQAAWQYRHRAGVGGKLRERRKGQPERVLTIADEAQRLLTGRYQRLVARGKNSNKIVIAIARELVGFLWAALRDDRVHARAGTRTSPIKNARASAAPSAATSHPEKKTSRAEVGPRRKARKEKRAA

SEQ ID NO: 56081 - protein, 342 aa, unidentified
MDLFVGLDVSQQTTLLCVVDGAGLQIWKGQCRTDPANLAAKIRQHAPNASRVGLESGPLSTWLWHDLNAMGLPIVCIDARHAKAVLAMQINKSDSNDALGLAQIVRTGWYREVKVKAFDSHKVRIAIGARVQLVRMRTDIMNQVRGLLKLHGIILPVGRKIDPEKYISGDDLLAHALRALASVLASTRTAIRDLERQIRKMTNVDADCRLLQTIPGVGFLTALTFVATVDDPARFNRSRSVGAYLGLTPKRYQSGDTDHTGRISRCGDRLLRCYLYEAANALLSRVTRFSPLKAWGVRFAGRHGAKKARVAIARKLSVIMHRMLITREPFRWNPAPVTANAA

SEQ ID NO: 56082 - protein, 340 aa, unidentified
MSIVMGLDQHRAQISAEWIETITGEVSRARVAPADRDAVRAFFGRFADDGLEVALEATTGWRFVVEELQRIGAEVHLAEPAEAAALKGKKKRAKTDWADARHLRELLLIGRLPESWIPPVHILDLRARVRTRHLLSHQRTEWQQRMHSVLYHHGFPQQRNLLTVQKREWLTSLTLPAAAREQLTISLSVIDAIELKLIPFDRELRAYARKQAGCRTLIEQIFGVGELTAVTILAELGEVRRFQNSRDVVRYAGLDITVYQSDQHRSPGHLSRQGPPALRWALYEAAQRARFPASPDRPYYDQLAARIGGNRACLALARKLLKRSYHLLKALGDQALAPVA

SEQ ID NO: 56083 - protein, 345 aa, unidentified
MEKPLFYIGIDIAATTFTSSIGCADSHWHIIGRPETFENIFDSFAKFSGWLRDHGVKANNSVACMEATGVYSEVLAHFLVSNGYILAIEPPLKVKRAFKPAGHKSDPVDSQQIAEYAYRFWDELSRWVPREEILEQIKTLLTTREQFVTQKTGHHNALKALEYKHVHTPLAEKVQKTAIAELKTHIKEIENEIERLIGQDPDLRNLAALLISVPGVGLLLAAHLLVIIQSAPEPCTAKNLAAYIGICPYENSSGSSGWHTPTSRHYGPRTLRKLIFLAAMSNSTHNPQFKLYAMRKAQEGKPKKVVVNNIANKLLKVIVAVVRTNTEFIPGYRSVNPSLLNLALT

SEQ ID NO: 56084 - protein, 383 aa, unidentified
MTEIRRLVIGGVDAHTDCHHAAALDERGRLLGDAAFATSVEGYHDLLAWLESFGQVGRVGVESTGSYAAGLGRFLAARGVAVVEVNQPHAHTRRRRGKSDPLDAEAAARKVLAGEATAIPKHTGGIVESIRQLRVAREGAVKANTAALNQLYELVITAPDELRQQLAGRKTSRGKASLCLRLRPDRARLHEPLQAAKLALRTVAERVRELERQIGVLDRYLAQLVATAAPRTTSLLGVSSQHAGQLLVTAGQNIERLANDGSFARLCGASPIPASSGRTSRHRLNRGGDRKANRALHLIAVCRLRYCARTRAYANRRTAEGLTKPEIIRCLKRYIAHELYHTLRADLADLGPPTMPPQRTLTINCGAGPIGTTRTRRRRRTRT

SEQ ID NO: 56085 - protein, 417 aa, unidentified
MRVVGLDIHRSFAEAAMLDEGQVRQLGRIDLVRERVVAFAKRLGKQTEVVVEATGNTMSVVKLMAPHVKRMVIANPLQVRAIAHAKVKTDKIDAVVLAKLHAAGFLPEVWQPDDATERLRRQVARRATIVHSRTRVKNRIQSVLHANLILPYKGDLFSGKGRTWLAVQPLDSDERATIDGWLGELDRLAKDLAQVDASLANIGLGDERVRRLMTIAGINLTVAVGLVAAIGDPARFSSSEKLVSYFGLNPRVRQSGDGPAHHGRITKQGRSLARGLLVEAAWAAAATPGPLHAFFVRIKVRRGQQIAAVATARKIAVLVWHLLTKREDYAFARPALHQAKLRQMEIKAGMPLKRGGNTPGRAKDYNIKPLRDAERKFVAQAERAYVRFVAAWSERPKTKQPVSKRPGCAGATTEERQ

SEQ ID NO: 56086 - protein, 317 aa, unidentified
MERTMGVDVSNEYLDADTLPNSSKRRFPNDAAGIAELLEWARAVAPERIIFESTGHYQKAAVGALLAASLPAVVVNARQVRDFAKGLGILAKTDAIDAGVLARFGQVVPTIVRPLPAPEIQAFQELYDRRGQLVRMLAAEKNHRHACRSAKVIKNIEAHIDYLKKQIRTLEERMDQFVEDSEAFRARDEVLQSIPGVGPQVSRTLLAYLPELGLATRQQITALVGLAPFNDDSGQQSHVRHIRGGRNKVRRGLYQAAIVAVRHFPSMKDFYARLKQRGKASKVALIAIARKLLVLANALVRSLKRYTQANSVCPQNA

SEQ ID NO: 56087 - protein, 389 aa, unidentified
MEQPMQQLNDLSRSLTPLKPDGTLIAVIEMSLSSWLVAGIVPGVERQRLKKLEVDESALLKLLNRWREEARKAGHRIERIAVAFEAGRDGFWLARWLRARDIEAHVIHASSVAVSREHRRAKTDRLDTELLKRAFLGWLRGESDHCKMVAIPTIKDEDAKRPNRERESLVGEQSRIVNRMKAALIRLGIRGFNPKLKKAAERLDGLRTPEGEPIPPNTLAELRRDMMRRRLVSDQIRQIEDARLERLKQAPSDGPHAMVRLLARVVGVGVETADMLVQEVLSRNMRDRRAIARYAGLTGSPDESGRKRREKGLTRSGNARVRRGMIELAWRFLRFQRDSVLAQWFRTRTENARSTRKTMIVALARKLLIALWRLVREGVVPDGVVLRPA

SEQ ID NO: 56088 - protein, 347 aa, unidentified
MKNTVIGIDISKKSTDWCLMRGTEVVSYHRVDNEIAAIEGQLQELMDSYLIDRCELMVCAEHTGHYIYPLAIACQNKHVDLWLENGYNIKCEARKERGKSDKEDSRRIAEYGYKNRQDARYYSVPTQEVAALESLLAERTDYVVGRAKLKGQLQDQKDYTDPAVYKAKAKRLRKLIRQYDKLISEIEQELERLMRENETMGHQAALLETIPGVGRHTAMRMIAATKGFTLFENGRQFCCYAGTAPFEYTSGTSIRSKNRVSQRADKSLKAMLHLCALTVARRSNPNHFSDYYQRKVYEGKNPMSILNAIRSKLVLTMFAVIRTDQPYSPEIVHNYVEKFSIKPIAIS

SEQ ID NO: 56089 - protein, 344 aa, unidentified
MTKISTIGLDLAKNVFQLHGVDALGAVVLKKQVRRAALERFFAQLPPCLVGMEACGSAHHWARVISRYGHEVRLMPPAYVKPYVKRNKNDGRDAEGICEAVTRPTMRFVAIKSIEQQATLAVHGTRALLVRQRTMAANALRAALSELGIVAAQGYKGLRELMVRLEEPSEDIPENMRCALLLLARHWQALDADERVLERQIAKAARCDGDAKRLMDVPSVGPIIASTVLAKVPDAKLFRSSRDFAAWIGLTGKDHGTGGKHRPGRISKQGDRMLRAMLISGASSHLRQQIARGVRDPWLRDLLARRPYKVVMVALAAKTARIIWAMLAKGEAYRDRASAPAAAC

SEQ ID NO: 56090 - protein, 352 aa, unidentified
MEEKKESVYKDKNIYVGIDVHKKRWVVSVRTYDLELKTFSMLPVAVELDKFLTNTYPGALLHIVYECCFSGFWIYDYFHEKGYDIIVTPTNRIYRDGSIVKTDKIDSRKLAFQHSRGLLREVKVPIMKIREYRSLFRIYDKEKMREGQILRQVRCILECKNHELKWEKWNKEFIEKLKLVRFQEDIFNRKFDTLIKEYEFVKEQIKDTEKRIKEIGEDPEIGTKVKRLEQINGIGIVSAVRLVVYLFDKKGRFESGEKLVHYVGLTPGEHSSGDEIVRSRTGLIGSRQLRSIIIQLAWVAARKDGNLLNKFDKVYKNTGCKQKAIVAVARKMMMKVHAITEKEEAYEINKAA

SEQ ID NO: 56091 - protein, 368 aa, unidentified
MPNLNIGVVTSGAHIRQSAVVTPLALVIKLGIDVHAKDYVVVRQVDEAVSQPAQRFNLEGLLGFARRQVAVAQSVHSCYEAGPFGYVLHRQLSALGVHNLVVRPRDWSTYGERVKTDQRDASALCSCLDRHLAGNQGALAVVRVPSEAEEQARAIARQRQSLVQERVRLTLQGKSAALLRGHQLRGEWWRVSTLSKLAPDLPPELLTLLQRWQQVILLLDAQAQALTEQLEQAAPPELPCGLGSMTWEILSREVGDWHRFRNRRQVASYTGLCPGEHSSGASRQQGSITRHGNPRLRHLLIEAVWRLLRYNPEYRGIAKWRDQFTAVRVTQARKKKIVVAIARQLAVDLWRLGTGRTTPAALGLQIPS

SEQ ID NO: 56092 - protein, 366 aa, unidentified
MRFFTQPHRFYCGIDLHTKAMHVCVQDRDGNVLVDRNLATDAQAFLEAIAPYRDGIVVGVECTFSWYWLADLCQAQNIPFVLGHALYMRLIHGGKGKNDRIDADKITRLLRSGSFPLAYAYPKGMRETRDLLRRRMYLVRQRAALLTHVQIVNSQYNLSPLAKTLLDESKHADIVERFADASVRQNVAVDLRLIDHLGGLLGALEEHLARTVQVEDPQAYYRLQTIPGVGKILGLVLLYETHDWSRFDSVGQFLSYARLVRCMHESAGKRVGSGNRKIGNAHLKWAIAEAACLFLRFSERAKKWKQRYIQKHGQRKAMSVLAAKLGRTVYHLLRKQEVFDEERFWNGGGRAKKQASAAAASGAGCS

SEQ ID NO: 56093 - protein, 416 aa, unidentified
MNAVGIDVSSRKSTVAVLRPLGEVVCLPFDVTHDIAGLASLVEKLKAIDGETRVVMEHTGRYYEAVEKALHEAGLFVCAVNPLLIKEYGANSLRRVKTDKADAIKIARYALDNWADLRDFTPMDAIRYDLKTLNRQFQLASKQRTASANNLIALLEQSFPGIRKCFDSPVRSDGTQKWVDFAHSFWHVDCVRKQPFPAFCERYRKWCKLHTYFFKLRNAEKVYALAKRAVVLTPKAKVVKVLVQEAANQLSSISRSVEVYRAEMDRLAAMLPEYPVVMAMYGVGKSYGPQLMAEIGDVRRFERKQALVAFAGIDPMPNQSGDKNVRSNKSSKRGSPYLRKTLFNVIRTYLQCAPQDEPVFQFLNRKQAEGKPFYVYMLAAANKFLRRYYAKLRDYFASLDTLQSVDPIPTTLKASL

SEQ ID NO: 56094 - protein, 369 aa, unidentified
MGKYSEVFVAFDVAKKKHAVAIAEGGRTGEVRFMGDVENNPAPIERTIKRLASRYDRLHVCFEAGPTGYGLYRQVQALGHDCMVVAPALIPKRAGERIKTNRRDAVTLARLHRAGELTGVWTPDPAHEAVRDLARAREAAGDDLRRKRQQLLSFLLRHSRIYSGGGHWTLAHRRWLAGQKFDHAAQQIVFQEGIDAIEDSLQRLRRVEKQLGLVVPEWSMAPVVEAYQAMRGASFLVAVTFAAEIGDVRRFDTPRQLTSFLGLVPAESSTGDTIRRKGLTLAGNRRARRALVEAAWTYRYPARVSETLRARLEGLPKPVRDIAWKAQIRLCARYRRLSATGKKSPVVVAAIAREIAAFLWAIGREIAPA

SEQ ID NO: 56095 - protein, 338 aa, unidentified
MEYGAIDLHMRYSQIRIIDEAGTVLRDQRIVTTRDRLVKAFDGFRPMRILLEAGTESEWVAQALEAADHEVVVVDPNYAPMYGELRRRVKTDRRDVAALAEANRRGWYRAAQRRSAAQRATQQVLRTRRQLVRMRSGAAALVRSLLKQDGHRLPTCQAEQIPTRVAALTLPNVLRGTLEPLTRMIATTTTEILALDQGLRRRAASDPIVQALQTVPGVGLIVALTFRAQVDRVDRFTHAGQVSAALGLVPREDSSAERRQRGHITKAGSSELRSLLVQAAWSCWRSKRSAALRVWAEQLAARRGRRIAVVALARRLSRILYALWRDGATFDLTKLAAA

SEQ ID NO: 56096 - protein, 352 aa, unidentified
MNDGISVGRRFVGVDLHLHRSVIAGLDEVGSQLGWVRIDNDPAVLVREVRNAGGRGCPVAIEATYGWYWAVDALLAAGFEVHLAHPLGMKALRKRKRVKTDPADAYELANLLRLGSLPEAYIAPPDLRELRELVRHRRQLVKLATAVKAGIRALLAKHNIRLSATQLESDTATGLLDALELPGTYAQRLASQRRLMLVLADEIAAVEVDLHARLRGHPGYRNLLTVKGIGPVLAATFVAEIGDVTRFPTAGALCCWAGLTPRHYESDKTVHRGHISKEGDPLVRWAAVEAVQRQCEPTVKAVKDEIVARRGKGARNIAKVAAARRMLEVVYYVLRDGQARCLTPGETGGAAA

SEQ ID NO: 56097 - protein, 366 aa, unidentified
MELFGAYEGGNTMLAEMVDHVIGIDPDRDWVTAAVVEADTAGVVATGRFPADAGGYREVVAWADGYSTGTERAWAIEGTASYGRGLTAALARCGEWVIEFDRAREKPARDGSKTDELDAIRAGRETLGRTKLATPRTHHGFREALRVHTVARDTAVQARTAAINELKAFVVTADDTLRAELRGLRTPALIKRCSGFRHSNNRSLDEQCTRAAMQAVARRITHLDGEIATHDQALTGLIDQAAPQLVAEVGIGPITAAAFYIAWSHPGRCRNEAAYARLAGVSPIPATSGQTQDRHRLNRHGDRQLNKALHQVAVTRLRCHPPTHAYKTRRSAEGKTDREIRRCLKRYIARRVFRLLEHQTASQTTT

SEQ ID NO: 56098 - protein, 380 aa, unidentified
MEYCTTIGADVSDRTTKICVMTKADGGERRIVVETTCATTKAGFEEAFLKFDRSWPVVFETGTHCRWMDRLFRRMGFKTIIGNPGKIPSITKSNTKNDRNDARELARLAIADPAMLHPVFLRDEVYQQMLRFHHARNMLISQRTQTINQIRGFAKSMGHRIECSSTERFHELGKAGWPRELEECAWPLMGSLKTINLKIKAYDKLIARLAERPEFKSMVERVRSVYGVGIIGSTVFIAAIGGRPDRFDHARDVGPYLGMTPRQDQSGDKDKQLHITHAGADIVRTALVECAGVVMMSNAKDTDLKLKGVRIAMHGGRIAKKKAKVAVARGLAVTMLALLQHPEREYVPLSEEGKKGFERYRAELEYLAMQKASRKEKKVA

SEQ ID NO: 56099 - protein, 320 aa, unidentified
MPAVFIGIDVARDTLDAHILPLQQTAHADNTPAGHRQLVAAFLPLAQRPADIRVVLEATGGFELPVALALEAAGFEVAVIKPERARYFAKAGGQLAKTDAIDAEVLARFGQAVPLTIQPLPDEDTRRFRDLLDRRNQLVDIRTMETNRLATAADKPTQKSLKAHLAWIRREIDRLEAELDRRIADNDRWRELDRILQSIPGLGPQSARTLIGQLPELGRVDRKVIGQLVGLAPVAHDSGKTSGPRHIVGGRQQVRNVLYMAAVCASRCNPVAKALYARLRGKGKSAKVALVAVAHKLLTIANAMVHNQTTWQHSDVEVSY

SEQ ID NO: 56100 - protein, 372 aa, unidentified
MRFVGIDLHTNCFTCCYIEENEGKRTITYRLDEEGIGEFRKTLDKTTHVLIEATLNTFAFVERFQELVGSVTIANTYRLKIISFTNKKTDRVDAEKLARIIKSQVLSGEEQIQPVTIPPKVVQDLRALLSTYRLLTKEITITKNRIHSLLKQHLIQISRAEVFNKKNRSAVREISDDPVLRFQLNLLFDSLEVLEAELAVLSEKIQVTAAPFLHEIDILTSMKGISVMAAIAIMSDIISVDRFPNSKHFASYLRSVPKVASSNETTFIQHTHRWGRKMTMVFLSQSAHHCRDADSHLSNWYEKLTQYKKKGLVRMGLCRRVITQLYQMLKKDTYCYYRDEANHASKMAAYCALLSRHGIEVEKTESSLRIAS

SEQ ID NO: 56101 - protein, 438 aa, unidentified
MSNKVIFNLDELFISVGIDVGSDFSWMSIALPNQQFVGKPYKILHNSIDSLTTAVSKIKEAEELYSLESRIFLESTGIYHYPLFCYLRDKGFNCSVINPIITKNSTNINIRKVHNDRFDSKKAALVGLKPDLKVSLMPSDLALNCRNLCREYYDLMDNRSAYVNKLQGELRMAFPQYLGIFSKVTINTSLTLLETYTSPSAFLKADKQEIIDIIKSTARFGLTYAQNKYNAIIQAATDANQFGYIIDSNIKRIRLYISFIRKYDEEINNILESLHELVDANEDADFVKQIHLIETFKGAGFLSAVSIMGEIGDFSAFSKPKQLFAYFGLDPAVKQSGKFEGTKVQMSKRGSAIARRVIHTLTLQSISISRNREAKNPVLREYYLKKCDSKPKLVAMGAVSHKVCNMIFAILRDNKPFKIIAPQEHIKQYNSAKCDIAA

SEQ ID NO: 56102 - protein, 314 aa, unidentified
MPKVNAYIGIDISKDHLDLHQLPQDRAARFESNTEGISKLITYLKRRKPTLIVIEATGGYESQLAAELVTAKLNVAVVNPFQVRSYAKALGILAKTDAIDAKVLARFAQDVKPQPRPLPDEKELELKALIMRRRQLVEMLVAEKNRFHRASSTQVKQSLQRMLNTIQQQIDELDKQIKNSVQNSPIWREKDNLLRSVPGISDKTSHTLLALLPELGKLNRRQIASLVGVAPMNRDSGLYRGKRKIYGGRKPVRNALYMATVASIRFNPLIKSFYERLTSSGKEFKVALTACMRKLLVIINSMIKKNTAFKQSFA

SEQ ID NO: 56103 - protein, 425 aa, unidentified
MDFKQNQKINQVTEQTLVVGIDIAKRKHFACFVDDRGRVLQKSFSVLQSGDGFQRFYQRILDAMKDFGKTEVIVGIEPTGHYWLNLAYFLEERGIPLVMTNPMHVKRSKELDDNLPTKHDRKDALVIARLIKDGRFSYPRILKDMEAELRVGSTFRSKLTEELGAVKNMIIRWLDRYFPEFTQVFPSFGKMAMAVLECTPFPADLHQKQPDEVLAIYRQVEGLKSPQRPKAVRLIEVASNSIGVTEGREMARIEIATLVRRYHQLEQEIESITQHLVELVKTSVEYEWLSTVPGLGDTTIVDLLAEIGSFSHYEDPRQLIKLAGLTLRENSSGQHKGQKRISKRGRRKLRALLFRVMMPMVRHNDAFRRLHEYYTNRKDNPLRKKQSIVVLCGKLLKVLHGISTKHKAFDAKRMMKDIPGLAEAM

SEQ ID NO: 56104 - protein, 482 aa, unidentified
MAKQKRSTFERLQHGKMNRKQRREFGRRINSENPGLEVVHPHAAGIDIGNESHFAAIPPDRDTAPIREFGSWTEDLREMASWLKDHGIRTVAMQSTGVYWIAVQEVLEKAGLEVYLVNARGTKNLPGRKSDVQECEWLRKLHTYGLLRNSFRPPEEIRAVRTIWRQRDRWVKESGRSVQQMQKALTTMNVQLANAITDISGLTGQAILRAIISGTRDPWELAKLRDPHITASEDEIAHSLQGNWREDVLFELRQMLEAYDFYQKQIAACDQELKKYTAGVATRDIPAKQELPKDGSALTSSKPARRPKARSKNRPRFDLASELHRTMGVDLTRIDGIDVITAQVIFSEIGPDFSAFPDEHHFASWLTLAPQHDISGGKVIRHIPAAGGQRVANALRMATQSLSRSNSYLGARYRRLRSRMEGPVAVKAMARYLACLVYRMVTKGQAYVDRGAAHYEAKRQERERIALQRRATTLGLKLVPAT

SEQ ID NO: 56105 - protein, 409 aa, unidentified
MLKIVYPNCCGIDVHKTFVVAVIAITNNQGITEYHRKHFSTFTNGLTQLRDWLEYYSCFDVCMESTGKYWIPVFNILEEQTNVCLAHPKYVKAIRGKKTDKKDAQWIADLFKHDLVASSFIPPLKIRQLRDLFRYRMKLTQLQVGEKNRYQNCLTWSNLQIASVVSDVFGKSAQAIIKSILDNPQDKPNIEQLVHKRMKNKVQDLEIAMEGALTPEQAEKIRVIKAHYDALAICKEDLEQMIRELGQDYQHQVKLIQTVPGFKEDLSALRIISEIGCDMTVFDSAAKLCSWAGLVPANNESAGKKFSTRISKGGKYLRPFLVQVANAVVKSDKHPDLRNKYLKLKKRRGHRKAISAICRRLLFSVYQVLRKQEDYNPVLQGLTEIRNPDKTMSVQDAVRFAQQHGFNVA

SEQ ID NO: 56106 - protein, 379 aa, unidentified
MKSELYVGLDVDKEWIVITVAEWGRNGAVQDLGAISNDLHALEKLLARLRKRYGPEVTIRACYEAGPCGFTIARRLRQLGVECAVVAPSLTPTRAGDRLKTDKRDARKLARLLRAGELTEIYIPEPTDEAIRDLCRARSDAVDDRRRSRHRLKAFLLRHGYRYQGKSAWSAAHERYLRELVLPHPAMKVILEEYLISVQLASERIARCEAAMSDLLGKWRLEPAVRALMAMKGFQTVAAMIVVSELGALDRFTHPRQVMAYLGLVPSEKSSSDRRRQGAITKCGNAHARWLLVECAQHYAAPPKVSKELSRRQQNQSRAVRTLSWKAQNRLHQRYCRLMARRLQRNKAMVAVARELCGFIWELLRTQECYHAPCPSGIK

SEQ ID NO: 56107 - protein, 411 aa, unidentified
MDVVYSRCAGLDVHKATVVACVRVPGAAPGERRGEAKTFATTMRGLTELSGWLGRHGVTEVAMESTGVYWRPVYAVLETTVTVILVNARHVKMVPGRKTDVRDCEWLAQLLECGLLKASFVPPQAVRDLRDLTRLRKALIRERAHHVNRIEKTLELAQIKLGCVVTDLMGKTGRAILHALSEGRDDPDQLADAAQGLLRKKRAALREALEGRLTPHYAFLLQQYLALIDTLEAHIVRLDARIDELMAPFADAVALAQSMPGVATRAAQAILAETGVDMAAFPTAAHFASWARLCPGTHESAGKRQPVGTGQGATWLRATLQEAAWAAIHTKKSYYRVLYHRLKARGSPKKAIVAVQHAMLIALWHMLKHRVPHHDLGADYFERRNTERTRRHHVHRLERLGYDVVLVEKVA

SEQ ID NO: 56108 - protein, 341 aa, unidentified
MDTVSLVGIDLGKHCFHLHAQDASGRMVFRKKLTRSQMFALLGNFPSCTVVMEACAGAHWIARRLQALGHEAKLISPHFVKPFRQGNKNDFADAQAICEAASRPSMRFVSPRNEAQQVVSALHRVREALVRERTGTINQIHAFLLEFGISLPRGMAVIRRLPAVLETQALPPRLVAVLERLQAHFKYLDEQIGQLEHELLTQLHEDERSERLLEIPGIGPITASVLMSELGDAHQYGSARQFAASIGLVPRQYSTGGKPTLLGISKRGDKELRRLLVQCARVIMLGIERRTDSLGTWVRSLLARRHSNVVACALANKLARIAWAILAKGAHYRSAPAALAA

SEQ ID NO: 56109 - protein, 515 aa, unidentified
MNMNAVGIDVSKGKSMVAILRPYGEIVSTPFEVKHTVSGIRSLIEHIQAIDGESRIVMEHTGRYYEPIVRELSQADLFVSAVNPKLIKDFGDNSLRKVKSDKADALKIARYTLDSWTELRQYSFMDEIRNQLKIMNRQFDFYMKHKTAMKNNLIGILDQTYPGANTYFDSPAREDGSQKWVDFATTYWHVDCVRKLSLNAFVDHYQKWCKRRKYNFSQSKAVEIYEASKEIVSVLPKDDLTKLIVKQAVEQLNMASQTVEQLRAMMNEAASKLPEYPIVMAMKGVGRSLGPQLMAEIGDVSRFTHKGAITAFAGVDPGVNESGSYEQKSVPASKRGSGTLRKTLFQVMDALIKTKPQDDPVYLFMDKKRSQGKPYYVYMTAGANKFLRIYYGRVKEYLSSLSTSHADGHIGGAFPVQLHIHGCLAVQAAMGDGLRLRIGLVAERLTALTVHEHGPQTLQRRFVSALLTSEAVRFPLRAERLDRAALLAHHQQKALVWPLRPVVLRRGPALPLAEP

SEQ ID NO: 56110 - protein, 331 aa, unidentified
MEQRKAIIGIDVSKKTLDVFIKTIEVHMQISNDSQGFKKLLAFFKANKLKPEDCFFVLEFTGGYEYRLVQFCQAKQFSYVRISGLAIKKSMGIVRGKSDKIDAKRIAEYGDEKQSKLKAETGSLAAIVRLKRLLNQREDFVTDRKAYEHRYKELQYMMDLPDPDSMLKRYQKIAADLQKLIEKTEDEIRKLIKDNDAFQLNFDLLTSIKGIGEVNGWTIIAYTENFTSFQNARQFGAYIGVVPYPFTSGTAIKGKSRTSKMANQQIKALLEMAARSAVNHDKELNIYYQRRTALGKHHMAVMNEIKFKLILIMFAVVKKQQPYVDKYKIAA

SEQ ID NO: 56111 - protein, 387 aa, unidentified
MSTMTQAPVQVTGGVDTHRDTHTAAAVDTAGRLLGTAEFPATPPGHAALWDWLTGHGQVVLVAVEGTGAYGAGLARFLHAHGVVVVEADRPDRKTRRWQGKSDPVDPEAAARAGLAALRTGTPKTADGKVEALRNLRVARRSAIRQRADTQRQMRTLIVTAPEPLRTELRDRPVKDLITRCATSRPTTGQAGKPATATMIALRSLARRHQHLTAEIEQLDALIAPLVEQINPHLSTLNGIGPDVAGQLLVTAGDNPERLRSEAAFAMLCGAAPLPASSGRTNRHRLNRGGDRQANSALHRIVICRLRWDQRTRAYTERRTKEGLSKKEIIRCLKRYIAPRDLRGPHQPHPASTGHTLTSIGASPRAVPPPAPRPQTAPSIMKLAAVL

SEQ ID NO: 56112 - protein, 316 aa, unidentified
MSPEAVFVGIDVSKASLDVAVHQPATRWTVDYTEADLTPLVDRLTALTPTLIVLEATGGLEGPCVGALAGAGLPVVVVNPRQVRDFAKATGQLAKTDTLDAAVLAHFAAAVRPPLRPLPDAATQSLAALVTRRRQLVGMLTAERNRLSCAPPVLRKELQAHIRWLERRITDLDTDLTQAIRTSPLWRAQEDLLRSTPGVGPIVARTLLAQLPELGTLSHKTIAALVGVAPVNRDSGLFRGRRMVWGGRAAVRAVLYMGALAAVRHNPVLRAFYQRLRAAGKLPKVALTACMHKLLTILNALLKQQRRWDPHHAQTR

SEQ ID NO: 56113 - protein, 438 aa, unidentified
MSNKVIFNLDELFISVGIDVGADFSWMSIALPNQQFVGKPYKILHNSIDSLTTAVSKIKEAEELYSLESRIFLESTGIYHYPLFCYLRDKGFNCSVINPIITKNSTNINIRKVHNDRFDSKKAALVGLKPDLKVSLMPSDLALNCRNLCREYYDLMDNRSAYVNKLQGELRMAFPQYLGIFSKVTINTSLTLLETYTSPSAFLEADKQEIIDIIKSTARFGLTYAQNKYNAIIQAATDANQFGYIIESNIKRIRLYISFIRKYDEEINSILESLHELVDANEDADFVKQIHLIETFKGAGFLSAVSIMGEIGDFSAFSKPKQLFAYFGLDPAVKQSGKFEGTKVQMSKRGSSIARRVIHTLALQSISISRNGKAKNPVLREYYLQKCDSKPKLVAMGAVSHKVCNMIFAILRDNKPFEIITPQEHIKQYNAAKCDIAA

SEQ ID NO: 56114 - protein, 461 aa, unidentified
MNNKYANPKKKKFKKIALDETWEKINPNACGIDIGARELWVCVPSGRDEESVRCFGTKTPDLEEMAEWLKACRIETVAMEATGVYWIASFQLLERKGFKVVLVNPRQVKNVTGKKSDVMDCQWIQKLHTFGLLGASFRPADPFCVARTYMRLRDDLIAGSTSQIQLMQKALHQMNIQLSHVLSDITGSSGQAIIVAIIAGVRDPIALAELASQRVKSTKAQIAKALIGDWRPEHLYCLAQAHQMYLRYQSDIKECNAKLAEELEKLPNKVDPKLNPMPPKMDRKKEIDEKLRLGLYCKFGVDVTAIEGIGPTAALTLLTEVGADLSAFASEKRFCSWLGLCPDNRISGGKVLSSRTRRVVNRMADVLRMSATTLKSSQSALGAFYRRMVARLGPAEGITAVAHKLARLLYSLIKYGHAYIRTGMEEYEKKNADRKMKALRKMAESLGVQLLEPQLVTAGVS

SEQ ID NO: 56115 - protein, 392 aa, unidentified
MIYVGIDIAKDKHDCFITNSDGEVLFKSFTISNNRDGFETLFQKIQSVSDDLTKVKVGLEATGHYSYNLLGYLLDKGLPTYVINPLHTNLYRKSLSLRKTKTDKVDARTIASMIMSDVNLKSYSDTSYHNEELKSLTRYRFDKVKERAKLKTSVSRLICILFPELEKLVPTLHMASVYALLSEFPSAHAVASAHLTRLINLLSQSSKNRYGNDTAVMFREAARNSIGSNMPTKSLELKHTIKLIQELTSEIDEIEAAIKQIMDEEIQSPILTIPGISYRMGAMIIAEIGDFCRFDSADKILAYAGMSPSTYQSGQLDNCYSHMEKRGSRYLRYALYNATKYVCHWDKSFGEYLAKKRSEGKHYNVAISHAAKKLVRLIFAMEKSRKAYLPTA

SEQ ID NO: 56116 - protein, 409 aa, unidentified
MKLFVGLDVSSFDIKVCFLNGEGDKLNAFTVSNDLPGAKQLRDEILNSTQNQSVSELRIGLESTSVYSFHQSMFLHNDESIRALDGQVLVMNPKQIANFKKSYSDMDKTDEIDAFVIADYLRFGCLPMSVVKEEQYVALQQLTRARYSIVRQITQEKQRFLQYLSYKCNTFTEEVESSVFGKAMMDLFLENYSLEELSRMPLEDLVDYLRLKGKNRFPDPKHVAKSIQKAVRSSYRLDKVVEDSIDTILGTSITLIRTFEKQKQEIDKSIKRIMKGIPQTLQTVPGIGPVFTPGIIAEIGQIEQFDDETKIAKYAGLYWRKHQSGRFTADETSLTRNGNQYLRYYLVEAANSVKKEIPEYGEYYAKKFKEVLKHQHKRALVLTARKFVRLVDALLRKNQIYTPKRSVNI

SEQ ID NO: 56117 - protein, 437 aa, unidentified
MTTEKIRNKVSPDEMVAWVGLDWADSEHMISMYDVATGKVEDKVLKQSGEALQQWLAELQERYCGGKVGVVLEQSRGGVVYGLMGYDFIVLYPVNPQSLASYRKALYSSGAKSDPVDAALLREMVQKNPERFRQWSPDDPETRSLRLLVEERRNLVDEMTRLTNRLTSKLKSYYPQALEWAGELNSRQACDFLEEWPTLESLQEVRPARLRKFYSRYGRPRPDAIDRRIEQIKRATPLTRDQAAVLAGSMMVQAVVKQIRPLIASIEDYDDEIKRLFQKHPDRLIFESLPGAGPVLAPRLLAAFGADRDRWSLAAEVQMLSGVAPVREKSGKQCWIHWRLACSKFLRQTFQEFAASSTKWCDWAKGYYQHLRDRGKSHHAAVRALAFKWIRIIFACWKSRTPYDNQVFLEALAKRGSPLSLRAASVVLAGRAKTQPA

SEQ ID NO: 56118 - protein, 339 aa, unidentified
MTNYIGLDHHRKFTQVAVVDETDAVILECKMANTIEAVTALLSRLKGTTKAVVEAGPSWGWIFDTFEHLGVEMVLANPMQVRVIAETRCKTDRRDALALARLLRAGWIPRVHVGDAENRAKKQIWRERIWLVRMQVRLKNRIRRLLDHHHVDIPEYSDLFGVNGRAFLQALELPELGQKILKSELALLASYQTQIKEIQSAAIEATQTMPMRRYLESLPGFGVIFAPIAALEIGDIGRFRNAAALSSYCGLVPSVSSSGGLTYRGSTGHSGNHWLKWVFIEAAWSAMRTMPELKIRFQRLKDRRGANVAVVACARHLCEIAFSLLKHQRCFEVRTLVHA

SEQ ID NO: 56119 - protein, 464 aa, unidentified
MSRKKGGRPTGSRRRKRVRVHVINPNAAGIDVGSELHVVAVPPDRDTEPVRSFGCFTADLNTLAHWLEQCGIETVAMESTGVYWIPLYQILEARGFEVLLVNARDVKNVPGRKTDVLDCQWLQQLHCYGLLRASFRPEERICVLRSYIRHRDTLIKSAAAHLNRIQKALEQMNLQFHKVISDISGVTGMRILKAIIDGERDPVILAQLKDYRVKSSCETIAKSLEGDWREEHLFALRQEFELYQIYRQKIIECDQKTLAYLNTFASKVDPGQKALPRYKHGRKKAYGNEPVVDLRTPLYRISGVDLTALDGFDVLTVLTLISEVGLDPNKWPTEKHFSSWLGLCPNNKITGGRVYNTKSRKVVNRAANAFRMAAQAVGKSHTALGAYYRRMKFRLGPAKANTATAHKLACIFYRMLKYGKEYVDPGIQYYEEKYRNRVLKNLKRRARLLGYQLIESQEPTPAVS

SEQ ID NO: 56120 - protein, 311 aa, unidentified
MDEIIIDKGCGLDVHKETVVACVMGSGIKKEIRTFSTKTNDLLRLKTWLSGLGITHIAMESTGPYWKPVFNVLEDGFTLILANARHIKNVPGRKTDVKDSEWICRLLRSGLLSASFVPPQGIRELRDLTRYRRKLTQALSAEKNRIQKVLEDANVKISSVLSDTFGVSGSQMIEAIMEGKLSESEIADLAKGKLKSKKGEIREALVGYFQDHHRFMIRASLEHIKHLEKQIEDLDRETKKKLAQYQKEYELLQTIPGVKEQGAAAIIAEIGVDMDIFPSEGHLSSWAGMSPGNNESAGKKKAERRPTAIRI

SEQ ID NO: 56121 - protein, 418 aa, unidentified
MEVEEADSELGCTKLPRKRTQKVQKGRNRPMKKNSKNETMKSKRETKKVAELEAGWTRLDEREANTLVIGIDLGDRTSAYCVRTLGQQIVKEATVATTATALLEAFQGLRRQRVVIETGTHSRWVAQLLELMGHEVIVANARKLKLISENNQKSDKVDARLLSELGCMNVEWLHPVYQRSQAAHSDLLLARARQALVDARTALINHVRGSVKSFGSRVEKCASERFVEVARGALPEALKPALSGVLATLEELNEQIYGYDCQIEHLCHTKYREAAKCLLQVNGVGPVTTLTFVLTIENKDRFEQSRDVGPYLGLIPKKRQSGQRDPQLGISKEGDEMLRKLLVNCAHHILGAKGQDSDLRRWGLELVRAVERKGKKGARKLAAAAVARKLAVLLHRLWVAGAAYEPLRNRGAQQAPAA

SEQ ID NO: 56122 - protein, 342 aa, unidentified
MQITTIGLDIAKNVFQVHGIDAAEKVIVRKRLRRSQVLTFFKALPPCLIGMEACATAHYWARELTKLGHKVRLMPAKDVKAYVKRNKNDAADAEAICEAVRRPTMRFVQVKSAEQQGQLMQHRTRDLVMRQRTQVINALRAHLAELGIVAAKGDKGVKELLTILADEKDTRLPIDARASVIVLAAQLQALQTLIGSIEKRIKAQHRSNQASKRLETIPGIGVIGATAIAATVADPTVFRSGRDFAAWIGLVPRQNSTGGKQKLGPISKQGDRYVRRILVVGAHSVLRRAKENPEKYPWLTQLLARRPFKVVAVALANKMARMAWALLAHGGTYRAPELAAAA

SEQ ID NO: 56123 - protein, 360 aa, unidentified
MEHTTIAVDLAKSVFQVAISHMPGRVDAERRLSRDRFLEYLAQQPPSTVLLEACGSSHYWARRLQQCGHTVRLLPAHDVHRYVRRNKTDRTDTKALLEAGRNEDIHAVPVKTVEHQAIASLHRMRSTWLATRTARLNTVRGLLREFGLVIPVGAHRVVPRVRELLAESPTVPDLMRTSLASACDEIETLETSMRAVERQLTTLARDRSDIALLRTVPGVGLLTATALVALVGDIRRFHSSRQFASFLGLTPKEDSSALRRRLGAISKQGDVYVRMLLIHGARSVLLRAKGAAAPTAFQTWARLTYQRRGHNVAAVAVANKLARIIWAVWTRQRPFTASARHTTTMVSNASSLPEDCTELN

SEQ ID NO: 56124 - protein, 410 aa, unidentified
MELLHRRCCGLDVHKETVVACLRLVSDGKVTTEVRTFQTTTADLLRLSEWLAANECTHVAMEATGVYWKPVWHILDDGDFKLVLANAAHVKNVPGRKTDVNDAMWLAELLAHGLIRASFVPDAQTQEMRNLLRTRKQLVREQSSHVLRVQKTLEDANIKLDSVLTDLMGKSGRAMIEALIAGETNPAKLASLADRRVKASPQEFRDALRGRVTKHHRFLLRLHLNQIDALDAAMATLDAQVEANLGPFRTAVELIMSIPGFKNLGAHVIVSEIGIDMSRFPSAAHLISWACICPRNDESAGKRRSNRVRKGGTWLKTMLVQCGWAAVKKKGSYLQAQFYRIKARRGPKKAIMAVVASILTAIYHMLKDGTMYKDLGSNHFDRRSTDQQKKRLVKRLADLGYVAELKPLAA

SEQ ID NO: 56125 - protein, 380 aa, unidentified
MVPLQHHRGTTMDHYAGIDVSLEYSSICVVDATGQIVREDKIASEPEVLIAWFGSLGYALTRIGLEAGPLSQWLYAAMKKAGLAVELLETRHVRDAFKAMPVKSDRNDARGIAQLMRLGWFRPVHCKSIGAQEIRAELTARKLVESKLRDTANSLRGILRGFGLKVGATTERSFPGRVRELVKGHPVLEAIAESLLSVHEVLLREFNGFQKRVQSAACSNVKAKLLMTTPGVGPVISLTYAAAVDDPARFKSSKKAGSHFGLTPKKYQSGETDRSGRISKIGDASVRAALYQAAHVILTKPVKGCPELKSWGMRLAKRAGQEKAKVALARKLAVIMHRMLADGTPFNPTAKAERMAATAAKAARKVLALPANGATMTEAV

SEQ ID NO: 56126 - protein, 371 aa, unidentified
MKQRSTNEALEVVGLDVSDRSSTVCRMSMTSGEILERTPIATSATGMESYFATRARMRVALEVGTHSPWISRQLEEYGHEVLVGNAALFQASVSRRKSDRSDAEGLARVARLDPSLLHPVRHRSAAAQRDLAVVRTRDALVRARTRLINECRGQVKSYGHRLPSCSAEAFAARAGAALPEDLRPALDPLLEVVAQLSAQIRAMERTLETLTRQRYPQTLRLRQVRGVGTLTALSFILILDDPHRFPRPRQVGAYLGLVPGRRQSGERNPHQPITKQGDPLLRQLLVQAAHYILGPFGTDCDLRRFGQRLIERGGAGARCRAAVAVARRLAVLLLHLWKTGDEYDPFFVEHRLARTVVPAAASAATTISTHV

SEQ ID NO: 56127 - protein, 395 aa, unidentified
MKEVASGENGSLRMMEGQSHFRPFGLSCWGFADLNKGVGSMTASYDYHIGVDYHKSYSHLVVQDSGGKTLRSGRVKNDRQSLGGFLERYRQNSHAVVEATRNWMVMYDWLDDICDDVVLAHPLKVKAIADAKIKTDKIDATVLAHLLRADLVPEAWAPGERARELRVALRERMFYVRLRTMTKNRIVTVFDRYPEQTTQLKKLGDLFGKAGRVQLAQVKVSEIDRIQIDRGLAFIGDIDGRIKQSEATIRAMTKANANVRLLKTIPGIGEFFARLIDAEIDDIGRFRNPKKLAAYAGLVPSTYSSGGKTFHGKIIKQGNKWLRWAFVEAVTPAIASDAQLRAQYEHLKIRGVNKARVAIARKLLTIAFQILRDQRAYEPRGESTTEGASTISRLS

SEQ ID NO: 56128 - protein, 393 aa, unidentified
MLGRGLPGLTGQSLKQGGRVVNHHSGAYVGIDTSKLRNAVAVAEEGRGGEVRYLGEIDTTEAATRKLVTKLAAKYRQLTFCYEAGPTGYGLYRLIRKLGHDCIVAAPSLIPKKPGDRVKTNRRDAVGLAKVLRAGELTAVWVPDERHEAMRDLSRAREAARKDLKGKRQQVSSFMLRLGRHFPGKKTWGPAHMNWLMLQKIEHREQRIVLEELLGAVRQESERVERLEQAIRDAVPEWSLAEVVTALQAMRGIDLVAAVTVLAEIGDLSRFQNPRQLMGYLGLVPSESSTGDTVNRGGITKAGNGRARRILVESAWSYRYPPRVSREKQNKVAAAPRAVREIAWKAQMRLCGRFRSLTRKGKRPNIIATAIARELAAFIWAINREVMAHATAS

SEQ ID NO: 56129 - protein, 338 aa, unidentified
MKSNIGTPVSVGIDVAKATLSVSICDHDGHEQALAIRNTDTDITTKVLPYLRHYSGKVVMESTGHYHWTPALVLREAGIDIRIVNPLLAKQYTSGTIRKVKTDPADARGLARMAMVCDNLPETFTVSRARLIIRKKLATISTMSRHLQALKANITSLREGQALLNEPDTTVVMELAESIKQLGLSIKHLENECVRLTTSDTNSRETMERLETIPGVSEFCAALATNWFDINTATSAKSFIGYAGLDVSSRESGTWRGHCRLTKRGNPFLRKRLYSAGWGAAMNYPEYRLYYDQLKASGRGHKEAVVIIARKLVRTMYCLLRDGVSYDSVKVSFPNRII

SEQ ID NO: 56130 - protein, 423 aa, unidentified
MMKLKYSICCGLDVHKNVIVATIVTTNKDGISEYKQKSFSTINSDIQKFHIWLIKNNCYHVCMESTGKYWIPIFNYLENDIDVCLTHPKYVKAIKGKKTDKKDSKWIADLYKFDLVRCSFIPPKDFRQLRELSRYRFKLVCMKSSEKNCIQNCMTISNVGIASVLSDPFGKTATEIISYLLEHTADSMDEKAVRKLIKKGAKSKSDEIIEAIKGYTIETDQAKKLELARGHLEYLDDMITQTEVELYVRIKPYYEFVEFVSTMPGMTELSSTIVLAETGVDMDIFDDAKHLCSWCGLSPANNESAGKKKSVRIAKAGDYLKPMMVQCALAAIKSKKQPYFAIKYGRIKKRRGHKKAIIAIARMMMVCIYHMVSEKKPFTPTDYEELMDPQNHVESVVLNENNVFAYLESLGYDSSKLVKRNDN

SEQ ID NO: 56131 - protein, 416 aa, unidentified
MFAVGVDVANGRSMVAVLDGMRNMVAKPFEVVHTAQGFATLVEKLRQLDGEVRIVMEHTGRYYESFAMTMHRAGFFVSAVNPLLIKNYQGSINVRKVKTDKADAQKIAQFALDKWTILPHYTPMDTIRYNLKTLHRQFQLASKTKTALSNNLIALLEQSYPGANRYFDSPVRTDGSQKWVDFVDTFWHVDCVAMSSEHAFVERYRKWCKRHGYVFSEQKAIQLHADARQKIPLVPKSDTCKLLVREAVSQLNAVSRTVETYRAEMDRLASQLPEYETVMGMTGVGKSMGPQLMAEIGDLRCFAHQKSLVGFAGTDPIKEESGDKVSQSAPSSKRGSPYLRKTLFVIMTILLQLQPQEDPVYQFLDKKRSEGKPYYVYMTAGGTKFLRVYYGKVRDCLKAKGLWEVPASASQEVNPG

SEQ ID NO: 56132 - protein, 406 aa, unidentified
MNMNAVGIDVSKRKSTVAILRPGGKVVVKPFDVPHLSADFQSLEKLIRELDGETRIVMECTGRYYEPVARELSQAGFFVSAVNPQIIRNFQGQDNPLRKVKTDKADSVKIARYTLDSWANLKQYSLMDELRSQLKTMNRQFDFYMKHKTAMKNNLIGLIDQTYPGANTYFDSPAREDGSQKWVDFIDTYWHVDCVRKMSLNAFTDHYQKWCSRRKYNFSKLKAEEIYGKAKELIPVLPKDSFTKRIIKQAIDQLNAASQTIEQLRTLMNETASKLPEYPVVMAMKGVGPSLGPQLMAEIGDVTRFTHKGAITAFAGVDPGVNDSGDYSQKSVHASKHGSPVLRKTLFQIMDVLIKTKPDDAVYLFMDKKRSEGKPYYVYMTAGANKFLRIYYGRVKEYLSSLPESE

SEQ ID NO: 56133 - protein, 409 aa, unidentified
MQEPEFAFFVGVDWGAETHQVCILDASGRPVAERVVPHRGDAVGALCSQLLALAPGGGVAVAIESPSSPVTEPLLECGLTVYSLNPKQLDRFRDRHFPAGAKDDRRDSFVLAVSLRTDRSCFRRLDPESPAVLDLRALVRLDRTLKTDLQAYCNRLRDMLLLTFPLMLELSPNVDEPWVWSLLERAPSAPAAARLSLAKLRSLLLHHRIRRISPEDLYRHLRQPVLPLPAASFERSARLVLNLLPLIRALAAQQQENAAALKAALDTLAVPEPKNGQHRDAAILLSLPGVGTMVAATMLAEAAGPLRERDYHALRAFSGVAPITRQSGKTRLVARRYACNHTVREAVYHWTRISTIHDPHAKAHYARLRAKGHTHGRALRGLADRQLRMLCAMLRQQQLYQPDRRRLAA

SEQ ID NO: 56134 - protein, 347 aa, unidentified
MKKILKQVTGIDVAQHELVVCLGRLNEDLSTQLYGHKVFPNTSKGFVSLVQWVEKSGMVGRFVMEATGVYHESLAYFLAEKGYPVSIVLPNKISNYFRTLAVKTITDKTAAEAITQFGLERNLDNWEPPKGIYKKLRQLTRERDQVVETRTVAKNQLHAEISEAYPNKTSLERTKKLIAFLDKQEKEITQELQQLLRDDPEMKKLLVILCSLPGIGLLTAVTVLAETNGFDLIRNKRQLTSYAGLDVREKQSGTSVKGKPKISKKGNRHLRKAMHMPALAAIRHDERFKAVFARLVSKHGIKMKAAVAVQRKLLELMFTLYKNKTMYDKNYFINQEAEVAQVIRTKN

SEQ ID NO: 56135 - protein, 385 aa, unidentified
MQPTLELNSTTPEVTLAIGLELSQGSWKLALQDGRHEKPAIHTVADEDAQERLKHLVKLVKEVHRKWKLRRENATVLLYEAGQDGFWIARALEKQGLGCLVADAASIQVDRRARRAKTDRLDAIRLVNTLRGWLRGERDRMQVVRIPDEKAEARRHLVRDRGELQKEVQQHQDRMRKLLRTVGCWNAIGSDFAQRLKRGEIRQHDGTALAPELRDRLLRECERLALVQNELAVLERSLLKQLPEDEQQKVAQLAGLKGIGEIGALRLCLELFWRNFTNQRQVGACVGLVPQPYDSGQSRVDQGISKQGNRRVRALLIEMAWMWLRYQPKSTLAHWFAKRTKGSGPNKRQRRIMIVAVARRLAIALWRYSKEGVIPEGVKLKAVRH

SEQ ID NO: 56136 - protein, 365 aa, unidentified
MKSIFYVGMDVHKDSVRIAVLKGTGKETEYEGTLGNDLNKIVKIVSGYREKGTVIAGYEAGCMGYTLQRSLAAAKVDCRVIAPNKVARLGSQRIKTDTRDAILIARMLKNNEGESIHVPTKDDEAARDLLRCREDIRLQAHRIKQQLTKFLLRNGHIYEAKRQLWTKAHRDWMTGIEFGSDVLKETFLQYWCSFLEIEDRLGRIEAKVVEIAESAAYREPVARLRCFKGIDYITALALVCEVGDYRRFGSAASFMSYLGLVPSERSSGPKRRQGGITKTGNAHLRRLLVESSWHYRHRGNPSVALQARRMGMDERVIAYADKALSRLQSRFAHLVYKGKSSKTVVTATARELAGFVWGTMVGVYC

SEQ ID NO: 56137 - protein, 371 aa, unidentified
MTETVKYVGLDVHKETIAVAVADEERGGEVRFVGTVANEDDAVRKLVKRLTAPGVRLSVCYEAGPCGYGLHRLLTKLGQACIVIAPSMMPRRPGDHVKTDRRDAMTLARLLRAGELTAIWVPDEAHEAVRDLIRARRSAQEDAAGAKQTVRSFLLRHDRRFGGKAAWTKMYWRWLSEQRFDFPHQQLAFEEMQKRVLEAQARVGRLEAGLGEAVDAWRFAPLVRNLQVLRGIRLVSAATLVAEVGDLTRFDNPKQLMAYVGLVPSEHSSGARTKRGRITRAGNAQARTMLIEAGWSYRLPAREERRYRERVIDLPEEIQAIGWKAQVRLCQRYRRLAAAGKPQPKVTTAIARELVGYAWDIARRVPPAVAA

SEQ ID NO: 56138 - protein, 347 aa, unidentified
MKEQNNRSEFTIGLDLGERRHRFCALNGKGEVVEEGSVLNDRASLARLTARYGGALAVMEAGAHSPWVSRYLEGLGWEVIVSNPRKVRAIYQHERKSDRRDALMLARIGRMDRALLYPVRHGSEEAQQDLLRIKLRDSLVRARVALINSVRFSLKSLGYGVSNPSSERFHKVAMESLPEAVREMIAPSVQTLAELSARIAVLEQEISLLARTKYPQTLWLQQVPGVGAITALYFVFKIEDPKRFKKVRDVGAYTGLCPRRDQSGESDPQLRISKRGDAYLRRLLVSAAQYILGPFGPHSALREYGLRLAADGTTRAKKRAVVAVARKLCVLLLSLWKNQTPYQPYPA

SEQ ID NO: 56139 - protein, 423 aa, unidentified
MKIVRPICCGMDVHKNIIVATIGISYKKNGITNKKTRITEYIQETFSTLNPDLLNLKQWLINHKCFDACMESTGKYWIPIFNILEDEINIYLTHPKYVKAIKGKKTDKKDSKWICDLFKHDLIKFSFIPPKEIRALREISRYRYKLVGMRSSERNRYQNCMTVSNIGIGSVFSDPFGKSAQAIMKEVLESDIIEDEKILKCIHGSCKNKDKILDSIKHCNIETDQRFKMNESMTHMEELQVHINNCEIEMMKRAAPMFDRFMHITQLPGISTLSAILIISEIGVDMKQFESDKQLTCWAGLAPANNERANKKKSVRISKAGQYLKPLLVQCALGAIKDKEGYFGIKYSRIKKRRGHKKAIIAIARMMLVSIYHMILTGETFNPSDYESFRNPKPPIKQQVLTEESAIEFLKKSGFDVSKLTKP

SEQ ID NO: 56140 - protein, 347 aa, unidentified
MLALHPGLDVVIGVDTHKDTHTAAAVGATGAVFEHLTVPADPAGYRQLIGFGRRHGATLWAIEGTGSFGAGLTTALHACCERVVEVDRPQRPARRGGVKSDDIDAVRAARQALAGVGLSVPRRRGDREAIRVLLATRAQAVTFRTRAISALHALVTSAPDGLRERLRTLPLGQLLQTCAGLRDSSRRSVEESATVLAMRSTARRALACQREAAELEVQLDRLVRRLAPELLGQLGIGPVVAGQVITSWSHRGRIRSEAAFAKLGGAAPIQASSGTITRHRLNRSGDRQLNRALHTIVLVRMRQDSATKDYVQRRLAQGKTIRDIKRCLKRYIARQLFRQLEALTPTT

SEQ ID NO: 56141 - protein, 347 aa, unidentified
MDTTSRPPTPMPPPPPPPPPGAAAPAGIVVGIDVCKERLDLARSDTGDRVVTFANDAAGIAAVVRLLLAAPAPVAAVVIESTGGLERPLVEALLEAGLPVALVHPGRVRHFAKGLGVESKTDRIDARVLVRFGQLAAPRLAERRSRNEAELRDLLACRRQLTVTRTQQSNRRGATASRAALKAIDAVIKALDRQIASLDEQVRALVDADDDFRDLARRLRSVPGVGPTLAATLLADLRELGGADRRRVCALAGVAPFPDDSGNVRGRRSIRGGRADVRCVLYMATLAAMRFNPVIRAFAQRLRAAGKLGKVTVVACMRKLLTLLNAMARDGLSWDQLDVVKNLAPTP

SEQ ID NO: 56142 - protein, 329 aa, unidentified
MTTTQAVVGVDVSKATLAVCHQMGAHLQHLEVANTPAGFRQLVRCGGAASLYILEATGPYYLAVAYHLVAVGAQVAVLNPLVVKRFIQMHLGKGKSDRKDAQWLLRYGQQQAAPRWQPEETVLVECRQVEQVVELLIRQKTMVHNALEALQAQPVVSPAALEQLRQTLLHLEEQVQQLETKLLTTIEARYPPEMQLLCSIPGIGRKTAAYLLLFAGGFTSFQNYRQLIAKAGLCPREFSSGTSVRGKARINKMGGALIRSKLFMCSWSARRANGACRALYDRLVAKGKNGKLALIAVCNKLLKQAYAIVTSGVPYQADFTKKVVAPLAF

SEQ ID NO: 56143 - protein, 420 aa, unidentified
MSKQNVELAAFIGLDWADQTHVVTLQEAGGDRRRENFTLDQTPEALQTWIHQVRIRFGGRPVAIAVEQVRGALIYALMHVEFLHIYPVNPQTLAKMRQAFYPSGAKDDPRDADLLLEVLLTHRQHLRVWVPDDVLTRSIQLLTEGRRHLVDERTALTNQLTAALKTYFPQALDWFGDMHTARACAFLHRWPSLQQLKRATSSSIRKFYQSQGYRGHDKLEQLLGNIKQAQPLTEDGAVLLASTMMVQALVTQIPSLTESIERYDQQIASRFAQHDDSTLFGSFPGAGPALSPRLLAAFGSDRNRFEFAAEMQQLSGIAPVTEKSGKSCWIHWRLACSKFLRQTFHEFAGQSILGSVWARAYYDHQRQRGKSHHAAVRALAFKWIRIIFRCWKNRTLYDETLYCKSLQLRGSSLAVALTTK

SEQ ID NO: 56144 - protein, 455 aa, unidentified
MTSKKGSQGFSVVHPHAAGIDIGATFHIVAVSPDHDPTPVRKFQSFTTDLHSLSQWLREVGVTSVAMESTGVYYIPVFEILESDGFEVILVNAREVKQVPGRKTDYNDAQWLQKLHQFELLRASFRPSEQIASLRAYLRHRERLIEYSAAHIQHMQKALMQMNLQLHHVVSDITGATGMKIIRDIINGERCAATLATHRDIRCKESEKTIAAALTGNYRDEHIFTLMQAVELWDFYQERIRECDTRIEKAMEKLNQKKVTPDTPLPKARHRTKQHHEPDFAVRSALYTLTGVDLTQINGFGPYTALRMIGECGDDMSKWATEKHFASWLSLSPGNKVSGGKILSSKTRRTKNRATTLLRIAAVNVGKTETALGAFYRRLAGRVGKAKAVTATARKLAVLFYSIMKYGRNYVEPLAEYYETQYRNRVLSNLKKRAKRLGYELVANTVPEILNAEVS

SEQ ID NO: 56145 - protein, 342 aa, unidentified
MQISTIGLDIAKNVFQVHGIDAAEKVVVRKRLRRRQVLEFFKALPPCLIGMEACATAHYWARELTKLGHRLRLMPAKDVKAYVKRNKNDAADAEAICEAVRRPTMRFVRIKSAEQQGQLMQHRTRDVLIRQRTQIINALRAHLAELGLVAAQGNAGVNELRAIVTDEQDTRLPIDARASVIVLAAQLEALESVIGAIEKRIKMQHRSSEASQRVEAIPGIGVIGATAIVATVTDPTIFRSGRDFAAWIGLVPRQDSTGGKQKLGPISKQGDRYLRRILVVGAIAVLRRAQENPGKYPWLTQLLARRPFKVVAVALANKMARMAWALLAHGGTYRAPELAETA

SEQ ID NO: 56146 - protein, 340 aa, unidentified
MQYVGLDVHKEFCQASVLDESGEEVSSIKVLTRKEELESFLDGFEDASFVLESTGIWEFVYEMIERHGFEMVLAHPLKVRAIAEAKVKTDKVDARTLAHLLRADLVPRSYIPSKDLRDLRQLVRQRAYLVQRATSFKNRIHAELLRRGIRRPKELVKSFTHKSVAWMRSLSIPTVNSSLDCLEAIQLQVEQLNEQLLQEFDRRREAQLIATIPGIGFYGALLIWAEIAGVHRFPDPEHLCSYAGLTPTVSQSASKSHYGGVSKEGSKYLRWILTESTFIHIMNCPDSRLSHFHARVARRRGKQKATVATARKLLHVIYWMLINGEEYRSQGLDLGAKPAA

SEQ ID NO: 56147 - protein, 452 aa, unidentified
MIMEEKEHGNYNLLRLVSVGNKNTLTGGVTAMHRKNDNRQVEKRQRITDATLVIGMDIGCEFNAMCLMSKEGTILGRYPKIYNSRKGFDYFHGIVESMKEKYGFTDVLIGMEPTGHYWRKIAYFAMDKQYEVRFIRTTALKHQRELDESSSAKNDIRDAYTIANIAREGKYIDTVIEDNIFRQLRTLAHTREKIQRISTGAKHALKGMLEDYFPELKHIFWSMKAKGLWALLEHYPFPEDVLKTDIDTVTELIAQSTRRKIQAHEKALQIYKAAQHSIGLQRVGDADRFRVAAYLSEIRHSETQLKEIEAQMEALLKKIPLAEYILSMPGIGTLTCGVFLGELGNPCNFTNPKQIVKYAGCDPKEHDSGQRTGRRIISKKGRWLLRKYLYFMAMRVVHRSPFLKDYYENKQKTMTKKEALCAVVIKLIKVIFALLRDKRTFTEKQSCLKQAA

SEQ ID NO: 56148 - protein, 316 aa, unidentified
MNTSSPFVGIDVAKAELMVALGPSRDLVAIPNDESGIRQVLEQLQAASPALIVLEATGGYETAAVAALAAAGLPVVVANPRQVRAFAKAMGILAKTDNIDAHVLALFAERVRPPIRTLPDEALRMLDALLTRRRQLIEMLVAERNRLAHALPPVEKSLKQHIRWLERRLADVDSDMDQAIQQSPVWRAKEDLLRSVPGVGPVVSRTLLADLPELGALNRKQIAALVGVAPLAKDSGTLRGKRMVWGGRAPVRAVLYMGALIASRHNPVIRDFYQRLVAAGKPKKVALTACMRKLLVILNTMVRNNTRWGERYALSA

SEQ ID NO: 56149 - protein, 346 aa, unidentified
MPNDTLVAVDLAKDVFEVGVSDRPGRIVLRKRLLRDRFMAFFAQLPRATVVMEACGTAHYWGRRIEELGHVVVLLPPQYVRPYVVRNKTDRMDVGGLLEAFRNEQIRPVPIKNVTQQVIASLHRLRSGWLADRVRSINTLRGLLRELGFFIPEGRRHVLPEAWEIIQDDRRGLPVALKPSLAALCEEIASLSTRIEDVEAQLEALAAQIPVVARLRSVPGIGLLSATALYAFIGDPSRFPSGRHMASFVGLTPREYSSGLRRRLGGISKRGDAYLRLLLIHGARSVLYHAKRMKNPDRLRSWALRLERKVGHNKAAAAVANKLARITWAVWKDNRDFEIIPEPQAA

SEQ ID NO: 56150 - protein, 345 aa, unidentified
MMVIGIDAHKRSHTAVSVDEMGRQGFVKTVGTTTQDHLRLLKWAVGLAEERLWAIEDCRHLTRRLERDLIAAGESVVRVSPKLMAHVRDSARSYGKSDPIDALAVARAALREPDLPTARLDGVERELRLLVDHREDLVAERTRIISRLRWHLHELDPGWTAPTKLQRGSAFDKVQAHLSGRNDGTIVRRLALRLVEHLRLLTDEIDELTAEITARVTTIAPSLLTIVGCGALTAAKIVGETAHAGRFRSKDAFARHNGTAPLPVWSSNKQRHRLSRTGNRQLNAALHRIALTQARCYPPARELLERRTNSGNGGMEALRILKRRLSDVAYRAMLADQTDPPTVAA

SEQ ID NO: 56151 - protein, 344 aa, unidentified
MGEVITIGLDIAKSVFQVHGVDGLGAVVIRKRVSRARMLEFFAGLPRCLIGIEACPAAHHWARELQAIGHTVRLMPPSYVKAYLKRSKNDANDAAAICEAVTRPSMRFVAVKTKEQQAALMLHRARQLLVRQRTMLSNAIRGHLSELGIVSAKGRNGTDELLEIIGKDADSRIPLAARSVLKVLAAQYSAIGAEIASISKSILAWHRSCEPSRRLEEIPGIGPIVATALVAEISDWKAFSSGRGLAAWIGLVPKQHTTGGRDKLGSITKQGNRYLRWLLVNGAMAVIRYAQKHGTKKHPWLGRLMARRPTKVAAVALANKIARMAWAIMVRGERYREPALLLAA

SEQ ID NO: 56152 - protein, 267 aa, unidentified
MTNMNKSKSMVNVGIDVGKANLDIFIYEKNIHFQVSNDVSGIKQILNRLAYYQIKRLVMEATGRYEFNLAEAAFRKGLPVCIVQPLAVRRYAGAIGQLAKTDRIDAQLIAEFAAIIQPRVTPQKSRSLIRIEDLLARRRQIMGMRTQELNRFKIMGKFFEVSCKRMIRCFDQEINRMEHQLDRLVSKQAVWAEKRSLLLSAPGVGNTLTYTLLADLPEIGSLSNKQISSLVGVAPINRDSGAYRGKRRIKGGRAGVRTTLYGLPRVQ

SEQ ID NO: 56153 - protein, 327 aa, unidentified
MTASVASHNQIFVGIDVGGLSFEAAWHRGGSTQYQNRPDAIAAFVARLSVEKQIIRIAVEPTGGHEKALVKALRGAGLPVEMVHTSRFAAYRKLIGAKAKSDTSDARLLAAYAAAPEEVRGCKAGYVVLPQDDVREQLAELAARRDQLKHMIHAETCRLSTVRSPSIRDEITAHLQALRQADRKTHDAMMQLVRQRDELRSAKRLLQTIKGIGDKTALTSIAAVPELGLISNKAAAALVGVAPFVRKSGTMNARTHIHGGRAPVRNAFYMAAVTASRHNPVLAPFYARLIAAGKPVKVALVAVMRRLVVFANAVLRSGQPWKGAEIG

SEQ ID NO: 56154 - protein, 355 aa, unidentified
MNPEKYIGMDVHQATISVAVMDSSGKVIMECILETKAATILEFVDGLRGTLSVTFEEGTSAAWLHDLLKPHVSHLVVCDPRRNALLKDGSKSDRIDARKLAELLHANKLHAVYHGEHGVRTLKELGRSYLTITKDLTRVMSRIKALYRGWAIPCSGATVYAPRHRDEWLAKIPHPGVRLRAERLYQQLDVLEPVRQEARRDLLVESHKHHAVKLLHQVPSIGPIRAALLVALLQTPHRSRTKRQLWAYSGFAVETHDSGEYRLVRGKLVRNRERITVRGLNHNHNHDLKNLFKGAALSASTRPGPLCDFYVALAEKGMRPTMARLTLARKLAALTLAIWKKGVDFDAKQLNRQAA

SEQ ID NO: 56155 - protein, 331 aa, unidentified
MKKWNRVGVDVSAKELVVAIEASGRREAPIVLTNDADGHRKLIKLATKRGASAQVVLESTGTYGLDLALALHRAKRVEVMVANPRAIAHFARASLQRSKTDRLDAETILEFATRMPFEPWSPPAAHILELRALSRRIEALSKTVVQEKNRLHANDQSEELSEFVKQDIRELADLLESRIARLRKQALLVIEQSEELTRAFAHITSIKGIADASGITILAELAVLPADMTTRQWVAHAGLDPRQFQSGTSIHKPARISKTGNAHIRRALFMPALVAVQWEPHIKAFYEHLLDRRKTKMQANVAVMRKLLHAIHGMLEHDQDFVGEKFFAMKG

SEQ ID NO: 56156 - protein, 370 aa, unidentified
MDQAHGVAGIDPHKSTATVAVVDNCGGRRGCRSFAIDEAGIEELLTFLIDSELVLDRIGIEGSAFLGRPLVLALAAAGYDTREVQANRTAERRGRRRRAKTDSEDAEAIARETLAHPDLPPAGKRRTPHTGWEALAAIRNWRESLVLQRVRLLTEAEAVLVVLPVTVRAALPSTSRVLPQLKALSNGSVDLDGLSLADQIKLDRLAASLTDIAALTARIKELDKKIPALLERLGCTLTAIHGIGVVSAMDLLTEIGDPCRFTSEGQFARWCGAAPIALSSGEGDGPARRHRLDLGGNRAVNSILHTMHVTQVRCHPPAKAYMARQAERHKPKRAARRSHKRHLANVIIRHMWKDASRLPSAADASVQAAA

SEQ ID NO: 56157 - protein, 353 aa, unidentified
MRTYYVGMDVHRATIAIVVLNGAGKVVEQLVVETSATRVRRYLKQLQGRVYVTFEEGTQAQWLYDLVQPLVTEVIVCNPRHNKLLQAGNKSDRIDAQKLAELLRHGALKAVDHRDHGVRALKELVRNYDCLVSDTTRVMNRLKAMFRRQAIACGGHEVYRQDRREVWLGKLTERGAKERASSLYRQLAALKALRHEAKLAMVREARRQAAYVWLMSMPRLGAVSVAQLLAVVGTPHRFRTKRQFWSYVGLAVVTRSTADMEVVEGVLRRSRRPVATRGLNRNHNHLLKRVFKNAATSACQSEPFKQHYELRLRQGMEPALARLTIARQLSAITLSLWKRGEQFQAERMRRQTA

SEQ ID NO: 56158 - protein, 352 aa, unidentified
MKEYIGCDSHQRYSVFVRVNESGQAGAAERVENDRATIRQYLRRLPAGSAVAVEASGGWYWLVDEIEAAGLIAKLTDPKEAKQRMRGRNKTDEIDARGLAYLLYDERLPEVWIPPAELRDLRGLLRTRLSMRRVTTSLKNRISAAIRRYGLREDECSDLFAGTGRVHLSSYIGWLPLQTRFAAQEEWALLDETEKRIKRLEDRIADRIGKVGWVRMLKSLPGVGDILGATLWLEIGDVKRFHSAEHLASYAGLTPTVFSSGGKTHMGPTPKSANHYLKWAFVEAASATIRQKNKYVFTHVGRLYERIKKQKCSAKAKVAVGRHLAEASYWILTRKQFYREPAPALVASSKNG

SEQ ID NO: 56159 - protein, 416 aa, unidentified
MNNDYAAQVAMDWGDQTHAFALKSAQAEIETGEVKAGAETLHGWLEQLRERFGGRPVALAIEAGRNAVVHALLAHPWLVIYPVHPATSQRFRKAFVPSGAKDDLPDALVLLKILMLHKDQLRPLRPDCPATRKLSALVAARRSAVDRRSQLGNELRAVLKSYYPQALELCGEDLTSPLALDLLSRWPQLKSLKAARAATVRDFYHAHNVRKPEAVALRLQRIAEARVLTADPSVVEPAVLQVEMLVAVLRPLQKHIGVLEEHIALAFEAHPDAAIFRELPGAGPALAPRLLVAFGSDRSRYPDPESMQKYAGVAPVVERSGRQTWIHWRPYAPKFLRQSFVEWAGQTVVHCAWARAYYWSQREAGKRHHAVLRALAFKWIRILWRCSQTKTPYNETLYIQALHRRHSPLSGKLCLT

SEQ ID NO: 56160 - protein, 369 aa, unidentified
MTFYIGVDLHKTQFTVHARTEEMIESLNEIKMYPTTEAGYAEFTKRIRLYRETGAVVKLAVESTGNTKHFKNLMEKAGAEVTVVNTVKFKVINESVSKTDKHDAATLSEFLKDYKLPESYLCSKETENLRRLIKSRERLVRAQVGQKNEIHALLVSMGLADEARSLQSKKGRQKVLDTLESNNDYVLEAQSVKLMLEIIDTFAQKIKIIEKQLEELTKDDEMVKLLLTIRGCGKITAWIIRAYTEDISRFANSKKYAAFCGLVPKVKDSNETVHHGSITRHGPVELRTAFVQLFMGMRRCKDTKSWRMMQRYEYMKKNKGSGKSIISGARKTAEIVWALLTAKTEFDSSKMSGVYKPMNLPEQALSAVI

SEQ ID NO: 56161 - protein, 378 aa, unidentified
MDQKQTTQEKGPITKFPVLFVGFELGNSTWKMACSDGRKVRHVTVAARDLNQVERALLRAQDHFAMADGYSTVSCYEAGRDGFWLHRYLQDRGIDNVVVDSASLEVDRRLRRAKTDRIDAGKLLRMLIRYHGGERQLWRVVRVPSREDEDARHLHRELEGLKRERTRQRNRIHGILMQQGLCISNPSKKRFIKDLEALRTWDGQKLPVGMKARLVRAYQQLRLVEDQISALAKEKREQLKEVDNAKMRQVAQLLRLPGIGPVSSWAFVMEFFGWRRFRNRREVAALAGLTPTPYDSGKKLREQGISKAGNRRIRTLAIEIAWAWLRYQPRSKLSQWFSERFAGGGTRMRRIGIVALARRLLIDLWRFLEYGVVPEGVC

SEQ ID NO: 56162 - protein, 322 aa, unidentified
MAILSFCGIDVSKDRLDVMVLPEQQGLSVRNDAGGWTALVEQLRRFAIAAIGLEATGGYERGVMRALLAAGMSVRQINPFRLRQFARASGVVAKNDPLDARMIASFVAVMPTRPAQRHTPAVERLAEILAVRRQLSNEKVAAENAGRLLEDPMLQRLSRRRIARLSADVEKLDERLVEIVASDAALAHRYRLLISMRGVGPVLACTLVALLPELGRLNRKQIAALVGVAPYDFDSGLLKGVRRIWGGRAPIRNVLFMAAMNASRHNPALKLFHDRLKAAGKEPKVVIVAVMRKMITTLNAMVRDDVVWADRSHGRHMVPTAR

SEQ ID NO: 56163 - protein, 319 aa, unidentified
MNATDAIFVGIDVSKAQLDVAVLPNGPRSRVDNDRQGAAQLIRQLEPIAPSLIVIESTGGYERLIITELLAVGLPVALVNPRQVRDFARGIGQLAKTDTIDAEVLALFAKHVQPRLLETTPKKQAELEQLVTRRRQLLGLRNTESNRLGTTVAKLARKSLKQTIALFDRQMAELDKEIARRIETDDDWRDKARLLRSVPGVGPVTIATLISQLPELGLLNRAEIAALVGLAPFNRDSGQARGRRSISGGRSGVRCALYMAALSARTCNPTLRPFTSRLEAEGKPFRVAITACMRKLLVTLNTMVKNQTPWNPKINLSIP

SEQ ID NO: 56164 - protein, 427 aa, unidentified
MNILNSQSAQSASEFVAYIGLDWGDRNHAFALSTDGQKQTSQTGTLVNSPESLHHWLEELAQRFGGHPVALAVETSRGPLIHLFGAYPWLMVFPIHPATSARYRSAFKPSGAKDDQPDALLLLELVRDHQDKLRCLQPSDSATRQLAALVELRRDLVDRRSQVVLQLTSLLKAYFPQALALLGHDLTSGLALAFLRRWPDPLALKLARPSSVEKLFYKHSVRSETLVAERLSSLQKLRPLTTDEAVLMPARLHLAALLDQLRDLAKHIDLIEKQSLSLFKDHPEAYLFRDLPGAGKALQPRLLVAFGEDRALYPEPSSLQKYGGLAPVIEKSGSRVWVHWRWQAPRFLRQTFIEWAGQTVIYSTWAREYYQAMKAKGKGHQVILRALAFKWIRVLWKCWQTRTAYQEARYLKQLRLRKSPYAPKTSS

SEQ ID NO: 56165 - protein, 467 aa, unidentified
MTPHKDYVLDPCPPAPTPTLPQSPVLSEALQICHPHAAGIDIGEAEHWVAVPPGCAPQPVRRFGTFTADLDALADWLIDCGITTVAMESTGVYWIPLFELLEARGVQVLLIDPRQAKRAPGRPKTDRLDCKWLQRLHTYGLLAGAFRPEPQVCVLRGSLRHRQMLLTSAAHHIQHMHKALQQMNLKRTQVVSDITGATGMAIIKAIIAGERDPVTLATLRNPHCHHAEDDIAKALQGTWHAEHLFALQQAVALSAFSHQQLALCDQQIKAHLETCADKSAGQPLPPKARRHKQTNEPRFDARTPLSRMAGVDLTTIEGIEANTALLLLSAIGTDMPRWPSVQHCCRWLGLCPQHKISGGKILSRRVRPGAHRVTVALRLAARSLHHSQSAFGAFFRRMKARLGTPKAITATAHKLARLVYSLLKHGTAYVQQGMEAYETHYRERTVKAMARHAKTLGYALVPLAEQG

SEQ ID NO: 56166 - protein, 447 aa, unidentified
MAQRKRPAKEAAITLTHPNAAGIDIGSAAHFVAVPPDRDDEPVREFASFTADLHRLADWLDACSVDTVAMESTGVYWIPLYELLESRGFTVLLVNARHVKNVSGRKSDVLDCQWLQQLMSFGLLRGAFRPSEQVCMLRSLCRQRTMLLRSQGRFVQHMQKALTQMNLQLTNVISDVAGETGQKILRAIVAGQRDGLALAKLKNSRIRASEDEIAKSLQGTWRAEHLFALKQALDAFDFCSTQLTECDAQIEIQLHALHVREDEPAKGKKRGRSRNAPKFDLRTQLFQMCGVDLTRIDGIDVTTALVVVSEVGPDMGKFPSDKHFASWLGLCPGTKITGGKVMSGKTKRCANRAAQALRLAAAALRSSQSALGAYYRRMCARMDKPKAVTAAAHKLARLIYAMLASGQEYTDRGQDYFEERYRQRVLHNLAQKAKTLGMQLIAAPQPA

SEQ ID NO: 56167 - protein, 350 aa, unidentified
MLIIGCDFHSRFQQIAMLDPTTGEVINRRLEHENGEAKKFYATLPSPARVGMEATCDAQWFERTLREHNHELWIGDAAEIRAAMVRKQKTDSRAALHILDLLLTNRVPRIRVPSPAERDLRQMLRHRHKLVRFRTSVMNQLHALAMGQGLCRKKKLWTKVGRKELEGLLLDPWASLRRKELLQLLDQLDPWIANLDAAVIQAAESRPPAVCLMQQAGVGPVTALAFVLTIGPVSRFASSKKVVSYLGLNPSEESSGGRQRLGAISKQGNPMMRYLLVEAAQTAARLDPELRRDYQRLKFRRGSAVAKVAIARKLAVRLYWKLRETAQPVSSARMQGSPASPVVGESLSPY

SEQ ID NO: 56168 - protein, 396 aa, unidentified
MGGFIWGYESGSSRQLILRRQVSIVPNIIFGKTLVRRRLAMEKGKRLDFTGQTVFVGLDVHKRSWSVSVYTEHGEYKTFTQPPEPEKLVCFLRRHFPAASYRVVYEAGFFGFWIYEELAERGVECVVVNPADVPTKDKEQRVKRDGVDCRKLARCLRAGEIEGIYVPSRGRLEDRSLLRARLSMGCKLRRCKNQIKALLYFYGIGVPEELEGRCWSVRFIRWLEGVRMRSRAGQMALRVLIEEFRHLRSIIVSLDREIRQLARSEAYRESVRLLRTVPGIGTFFSMLLLTELCEIGRFPSIDELSSYVGLVPDVHASGEREYVVGVTKRRRAYLRWLLIEASWVAVRKDPVLMMAFKEYCRRMKKTRAIVKIARKLLNRIRYVLKNRSEYVAGVIE

SEQ ID NO: 56169 - protein, 436 aa, unidentified
MRGCRCSMIMGFTKPIEHFNLQRKKVITMNTLYVGIDVSSKSNVVYLMLPNGDKHSNFSVANSHEGSTLLVKKIYSALTSHSLDTVLIGLEATSVYGDNLVYFLREDATLAPFNRKIHVLNPKQVKKFHDTYNDLPKNDYVDSFVIADCLRFGRINKEVYMGEYRYKALQNLTRARFFAVQNLVKEKQRFMNVLFKKYSTMTQEKVFSDAFSTTALAVYDEFESAEALANMDLHELTDFIIEKGKNRFPDPDAVAKAIQKAARSSYRLPKTVNDSVNQVLSISITSMKALESQIKEFDKAIKAQMELLPNVLISIPGIGPVYSAGIMAEIGDINRFNSQAALAKYAGLAWKQHQSGGFESEVTRLIPSGNRFLKYYLCEAAFSLVRCDKEYSDFYRLKYKEVNRCQHKRALALTARKFVRLVFRLLKDNRLYCPAK

SEQ ID NO: 56170 - protein, 341 aa, unidentified
MKHLYLGIDWGKNFSQLFGFDQDGEVVIEERLKTLDLSVWRKKLRSLKDYSIHAAFEIGAHYDWLYDLLTEYCGEVAVIDPAQFAVICKSQRKTDKIDAQKIAEGLRRGDLPLVHVPDKQTRADRRLVAFTHWHSQQAASVKGKIRSLLLAQRLECPYSNITGMAALEWLNEQAPQMSDDAQLFLRLLLAEVELLRQQRQELDARVAIRVKRYKQVAVLDSIPGFGQLTILAVLSSIAGVARFSRPEQLSSYWGVCSSVYQSGATLRLGSLTRRGNVHVRWLLSQALQHLHRKDARARKRYLKLKRKKPRGVARAAQVRWLTQIIWHLLKKDEPYRIKTAA

SEQ ID NO: 56171 - protein, 377 aa, unidentified
MHSENIAAYIGLDVHKETLAVAIAAPERLGEVRYYGTINNEAQAVRRLFQKLQGLYGNILSCYEAGPCGFGLYHQLTAMNIKCQVIAPSRIPKSPTDRIKNDHRDAISLARLLRVGELTPVWIPDLTHEAMRDLIRARAAAKRDSRVARQRILSMLLRTDKRYAGKHWTGKHRTWLANQSFSQPSQQIAFQHYCQSLEQIEDRILQLDQEISRLLPEWSLCNLVCQLQALKGVGQLIAITLVAELGDFSRFSNPKQLMAFLGLVPGEYSSGNSIRPRGITKVGNSELRRLLYEAAWSYRTPAKVGAWLIYYRPDSVTQYSKDIAWKAQQRLCSRYRALTAKGKKSQVAITAVARELTGFMWDIALAAQSSFSQQKQN

SEQ ID NO: 56172 - protein, 340 aa, unidentified
MSLYGGIDLHANNSVIVLLNEQDEVIYRKRLPNDLTTILGQLAPYHTEMKGLVVESTYNWYWLVDGLMDADYRVHLANPAAMQQYSGLKYTDDHSDARWLAHLLRLAVLPEGYIYPKAERAVRDLLRKRAHLVRQHTANVLSVQNIMARNTGTRFSVKRIQELTKQELTTLLAEETQVLAVTSSLVVLDCLRQQIKTLEQTVHKRLHHTPSYEQLLTVQGIGTILAQTITLETGAISRFPSVGNYASYCRCVDSTKISNGKRKGTGNVKNGNPYLAWAYMEAAQFAMRFQPEAQRFYQRKLAKSRNNTVLARKAVAHKLSRACYYLMRDLVPFEATKAFG

SEQ ID NO: 56173 - protein, 341 aa, unidentified
MDEVTTIGLDIAKQVFHVHGADGSGRALFSRRISRAKMHGFFASQPRCVVAMEACGGSHYWARELGAMGHEVRLIAPRYVKPFVKRQKNDAADAEAICEAAQRPSMRFVAIKDEEQQASAAVFRARDLLVRQRTQTINALRGLLAEYGWIAPKGLFHLAGMITRIEDPSCALPPGARGVFLVMIDAIKEQDRRIRELDREIHQRARADADARRLMTIPGIGPITATAILALAPPAETFRKGRDFAAWLGLTPLQRSTGGKQKLGAISKMGERTLRRLLIIGSSAVVLHASKRGAPDGSWLGQMMARKPRMLVTVAQANKTARIAWAVLAKGEAYKAPVAVA

SEQ ID NO: 56174 - protein, 317 aa, unidentified
MAEVSFPSQVLRGCGIDVHLKVVVATIKGEGIRKETRSFDTFTSSLTELKEWLLQNGITHVAMESTGVYWKPVYRVLEDAIPNVWIVNARHIKNVPGHKTDKMDSEWICKLLLAGLLKPSYIPPKEQRQLRDLTRYRNKLIQHVSSEKNRIMRILEDCNIKLSSVVSNTSGTTATKLIDWLCEGKFITLQDVESIYHGKMSATPEELLKACTGFVESHHVYMLQMIRRDIDQTTVLIGELGAKIREVLSKYDNAIELLKEIPGFSDKVVEDLVAEIGFDMSKFPSEKHLVSWAGICPGNNESAGKKKAEESPTETNK

SEQ ID NO: 56175 - protein, 346 aa, unidentified
MKKGSAKGEVKVLGIDLAKQSFQLHGVDQSGQTVLRKKLTRNKLSAFVANLPPCVIGLEACGGAHHWVRVFKEFGHTVKMMAPQFVKPYVKSNKNDSVDAEAICGAVQRPNMRFVPEKSIEQQDMQSLHRIRSQLVDRRTAQSNQIRGLLLEYGIIVPQGIHHVRNQLPLILEAADNGLSDLSREFLHELYEELVHLNERIDALEKKLLRLSAQNEDCQRLLTIPGVGLLSATALVAAVGDVSNFKNGRELAAWLGLVPRQHSTGGKATLMGISKRGDCYLRTLLIHGGRTVVRVAHRHQDRRSRWVSELEQRRGKNISAVAVPNKHARIAWALLSKKTTYQATAA

SEQ ID NO: 56176 - protein, 427 aa, unidentified
MTDQLKHKAYHSWVAIDIAKDYNVVMVELTDGKNRRFRMANSGKDHDRLIEVIRELPQPCHIGFEATGNYHRPLAYRLLTEGFDVSLISSLASARYREAIFNSWDKNDPKDAGILLELLKRGIVQTYIDPIRSGYHDIQELSKTYSNITLSRTRLQHSILTHYLPLYFPEMAKFWCSTRNAWWINYLLHFPTPASVVQYSEQAFCQIASPIIGRKMNKQAKLLELYEAAQHSIGLPIASDSLACQTFQLQLQRYQELTNQRQQLEQQAETTLSMNPDYCLLKTVPGIGPIVAMTILAEGGDLRRFNHHRQFLKYCGLDLAKNQSGNFRGQDKLSKRGNARLRLALYMASLHAIRQTENSFRNKFHRYTQATPKDADCKRKAMTAVMAKMARVIHALIKSGTPYQGYFEVSPSGSIPLCRAVGATRTP

SEQ ID NO: 56177 - protein, 433 aa, unidentified
MEDAEDEPLFAQRVAGLDIAKAEVEVTIRLPSDTTPGRRQQETRTFGATRKELLALSDWLRCWGVTKTGMEATGDYWKPVFFLLESRGLDCELYNAAQVKALPGRPKTDRADSIWIARITERGMISSSFVPPEPIRRLRTHTRYRRHLTQARTAEKQRVEKLLEDGHLKLSSVISDIHGVSGRDMLNALAAGQRDPRALAQLARGTMRGKIRRLEEALECSFFTGEHAAVLAMMLVTIDHYTTQIGQLTAKIENLAEPYLHQVAQLDAVPGIGVVCAQDIIAEIGADMSVFPTASHLVSWARWSPQVKQSAGKRKGSNATGRGNPYLGAALGEAAISTGRTQTFLGARYRRLSKRMPKKKALVATGNSMLTSVHALLSDPSACYQDLGADYYEQRMHTRRQARNHVKSLERLGYKVTIQALNPDTDQPLTAAG

SEQ ID NO: 56178 - protein, 361 aa, unidentified
MVQVRSWAGLDVHAAKVVAAVVDGESGELRIRRLGGDADAVASFLAGFPGPVRATYEAGPTGFGLARALERAGVGCVVAAPGKIPVAPTDHIKTDRRDAEKLVRLLMAGGLSPVRVPTLGEEALRDLVRAREDVRLDLNRARHRLLKLLLRHGLRFEAGRNWTVRHRQWLAQVRLGEPAAQATLHDYLGAVDALVVRRGALEGAIEELVPSSPWADEVARLRCMRGVNTLTAIGLCAEVGNWARFPRPAQVMSYLGLVPSEQSSGEQRRQGSITKSGSQHGRRLLVEAAWHYRREPHLGAPLRRRQAGQPAHIVALAWKAQRRGYRTWQRLHAQRAKRATLVNIAVARELAGFCWAIATAD

SEQ ID NO: 56179 - protein, 352 aa, unidentified
MTAKKRQVTGGVDTHGKTHHAAAVDHAGRVLGDQEFPATAAGYQQLLAWLRGFGRVVRVGVEGTGAYGAGLARHLSASGVTVVEIDRPDRKTRRSKGKSDPIDALAAARAALSGQAAGVPKTRTGPVEAIRALRVARRGAVKARTAALNQLHGLITSAPDSLREDLAGLTGAALVQRCAELRVDESAIIDPVHATNAALAAIAARIAALNAEISHADRRLRPAVARTAPALSSLFGAGPEVAGQLLTTAGDNPDRLRSEAALAHLCGAAPIPASSGRIDRHRLNRGGDRAANNALHTIVLSRMRYDPRTRAYVEKRTKQGLGKKEIMRCLKRYVVREVHAALLTDFTALNTP

SEQ ID NO: 56180 - protein, 369 aa, unidentified
MSKCIFVGLDVHKDSINVAIAEAGRDGEVRHYGKIGGDIPALDKVIRRLQSRGAQLRVVYEAGPCGYEIYRHLSGLGIDCMVVAPGMIPKCSGDRIKNDRRDALTLARLHRAGELKPVYVPRAEDEAMRDLVRGREDAKAAEKKAKQRLGAFLLRHGKRYEGGKPWSRTHRRWLGDQSFAHPTQQITFQEYVSAVEQCQERVERLTEQIRILVPTWRLAPVVEAFQAMRGVSLIVAVTMAAEVGDLSRFDNPRQLMAYLGLVPSEHSSGGTVRRGGITKTGNGHARRVLVEGAWAHRFPARVSRALGDRQEGLPEAVRDIAWKAQVRLCGRYRHLESRGKTKQVVVTAIAREMAAFLWAIAREVPISAT

SEQ ID NO: 56181 - protein, 418 aa, unidentified
MRVDSDEPEIIERVAALDVAKGEVVCCARVPGPGRQRMQEVRTVSTMTAALLGLGDWLAELGVTRVVMEATSDYWRAPFYLLEDRFETWLVNAHDVKHLPGRPKTDRLDAVWLCKVAERQMLRPSFVPPPAIRALRDLTRYRVDLLAVRTAEKQRVEKLLEDALIKLSVVVSDPFGASGRAIMAALIAGERDPVILANLARGSLRSKTARLIEALTGRFTEHHAFLLTQMLHRVDAVTADIATVQARIDEQVGELASAVAKLDAIPGVGPVAAQMILAEIGTDMTRFPTPAHLASWARFAPGVNESAGRPTGKVASGKGNRYLARVLGEAAVSAARTDTFLGERYRRIARRRGKKRAIVAIGRSILVIIWALLSDEEAQFVDLGPDYYASRNNPERKVRHHIRELQELGYRVTLNPAA

SEQ ID NO: 56182 - protein, 361 aa, unidentified
MNYNTVYVGMDVHKESFSLCAYTIEAEKASHYQRTEADYKKVLNYLEFLRTIYGDDANFICGYEAGCFGYTLYHQLTANNVKCIILAPTTMLEQRSKKRIKTDRRDAEIIAKCLAQHNYSPVHIPTAKDEETKEFLRMRDDHKLALKKVKQQILAFCLRHNYRYDGKSHWTAAHLKWLKALTPEALYKEILDEYLLTYQTLSDKIERLDKRIEELATQDEYKEAVKKLCCFIGVKTHTALSVLVEVGDFKRFASAQHFASYLGLVPGEDSSGDDQNRLGITKAGNRHVRLLLTEASQCYARGQVGFKSKELKSRQSGNTPAVIAYADKANERLRRRYYKMVLNKYKKCIKCVAYKLLQWLL

SEQ ID NO: 56183 - protein, 341 aa, unidentified
MSIITVGIDLAKNVFAVHGVDDNGKAVLVKPKVTRDKLLELVAQLPPCLIGMEACSGAHHWARLFRQHGHTVKLMAPKFVTPYRMSGKRGKNDAADASAICEAVTRPHMRFVPIKEEHQQIILCLHRTRNGFVEERTATYNRLRGLISEFGIVLPQKVTCLRRDIGEHLEDLPGYANQCIGDLLGHADALDARIDEYDRIIAKAAKDDARSKRLMERPGIGPISASALLASIGGGHDFKNGRQVAAWMGLTPGQYSSGGKARLGRITKAGDPYLRSLLVMGARAVLSGLGDKQDGFSRWARSLQERRGYWKAVIAIAAKNARLAWAVLKYGEEFRLNPSAA

SEQ ID NO: 56184 - protein, 377 aa, unidentified
MREKLRFLGLDVHAETIAVAVAEPDGEVRSLGTIANREDSIRKLIKKLGSPEQLRACYEAGPTGFVLYWQLAQLGVECAVVAPSLVPKKPGDRVKTDRRDALKLARSHRSGDLTAVWVPDENSEALRDLVRQREAAKQDQLRAKHRLTKFLLRTGRRPPQGMKAWTARYMEWLQQVRYTLPAQEATLVDCLNEVEHMSARVKRLEEAILEVVKLAPASVQEVIRGLQALRGIAHISAVTIAAELGNITSRFESARKLMGYSGAFPSEDSSGNRIRKGAITKTGNAHLRRIIVESAWSYRHRPWIGAKLRRRQEGVPAEITEIAWKAQNRLHKRYTKLMARGKEQRKTMTAVARELLGFIWAIGIKAEAMACKQQMAA

SEQ ID NO: 56185 - protein, 460 aa, unidentified
MSNRKKSGKKNGVLPTSLLAIQSKVGGIDVGSTQHWVCGPAKDDGTPNVKVFATTTDQLNQLADWLIEQGVESVAMESTYVYWIPIYELLESRGIRVLLVNARQLHNVPGRKTDVSDCQWLQLLHSCGLLRGSFRPGESITRLRALQRQLGNLVEERTRCVQWMQKALDQMNVQVHRALADITGVTGMAIVRDIVKGERNPAKLALHRDSRCRKSVEEIARYLTGNWRDEHLFNLASALRLFDALEAEIATYDARLIQELEALQPPDRQRQAVPAHPNSAKEKAIKHRGEQPSRTALWRFAGVDLTRIDGISAGAAQIILTEVGFNMNAFPSEDHFVSWLRLCPRTPVSGGKPLKKRRNGQGANRIAGVLRMAATALQRSKTALGASFRRTARYKGGAVAVFATARQLARLVYRMLHFGHDYVDIGESAYEQQFQLRRLAALTENAKQLGYSLVSNAAKA

SEQ ID NO: 56186 - protein, 400 aa, unidentified
MISVGIDVSKGKSTVCLLKPYGEIICKPFEVQHTEKDLEELANLLQKLDGEIKMVMEATGIYHLPILTFLLEEGFFISVINPFMMKRFARDNSLRGAKNDRLDSVMIASYGIEKWHKLKKYEVNDGIYPELRFLGRQYHRFMQTHVKHVQELTHLLDHTAPGLKAMFNSWNEHSNRDKLSDFVERFWHFDLITSLSREEFVEQYLLWAKEKKYHQSRSKAEKIYDLASNGIPTLSSRTPSTQMIIQEAINVLRIVNNSLYRILSRMKELAKSLPEYATVRSMGGVGDALAPQLIAEIGDVRRLHNGHALVALAGIDPPPYESGQFVGTHRKISKRGSPILRKIGFEVMRVLKSHKEPEDNAVYNYILKKEAEGKNKKLSKIAGLNKFLRIYYARVMEVYR

SEQ ID NO: 56187 - protein, 342 aa, unidentified
MQVTTIGLDIAKNVFQVHGIDAAEKVVVRKQLRRRQVLEFFKALPACLVGMEACATAHYWARELTKLGHRVRLMPAKDVKAYVKRNKNDAADAEAICEAVRRPTMRFVQIKSTEQQGRLMLHRARDLLMRQRTQVINAMRAHLAELGIVAAQGRDGIKELLKIIASEEDARLPVDAHASLVVLAAGLHAVQTMIGSIEKRIMVQHRSNEASQRLETIPGIGVIGATAIAATVPDPKVFGSGRDFAAWIGLVPREDSTGGKQKLGPISKRGDRYLRRILVVGACAVLRYARQKPEKYPWLTQLLARKPFKVVAVALANKMARIAWALLAKGGTYRVPALATAV

SEQ ID NO: 56188 - protein, 414 aa, unidentified
MLKIVYRVCCGMDVHKSFVVACIASTTEYGVTTYKSKRFSTFTGDLRRCAAWLAENSCKDVCMESTGKYWIPIYNILEPTCNIVLAHPKYVKAIRGKKTDKRDAKWIADIFKHDLVAGSFIPPADIRQLRDLVRYRWKLTNFTTGEKNRAQNCLTVSNIKLDDVFSDVFGKTASAITTRILENPAEKITDVSGFRTKGMKATNEQVLAAVDGEMCEEQAEKLRIIRSHMDSLQLCKLDLESLILATAEKYLPQLGLVMTVPGIQSFTAIGIISEIGVDMSVFPTSKHLCSWAGLTPQNNESAGKKKTTRISRAGAYIKPLLVQCALCAIRAKRFPEVRNRYLALKKRRGHKKAIIAIARMLLTAIYNMLKKNEPYNPELYRSADRPPAHREVSVEEAVFILQRQGYLVTAPPTA

SEQ ID NO: 56189 - protein, 309 aa, unidentified
MLEAVRISNDPHMLAEVMGRAGEQPEVVLEATYGWYWAADLLATIGANVHLAHPLGVKAFAYRRVKNDFRDAADLADLLRMGRLPEAWIAPPEVRDLRQLVRHRAKLVAVRTGWKCQVHAVLAACGIPVRMSDLFGEAGTELLDHLQLPTTFAARVNSLRRLIHALDAEIDLFGGMARARLARHPGYRAIQAIDGVGPVLAAVLVAEIGEVTRFPGPAQLASWVGLTPRHHESDTHVHRGKITKQGSRLARWAAVEAVQRVGAHTRLGQVRERVAERRGRNIGVVAAARELICLVYYGLRDGHIRRLAA

SEQ ID NO: 56190 - protein, 475 aa, unidentified
MNIKGKKKKNQVITANIFEQQEVLAKVEAIKNNLKASTWHELETKGKFTKNEKLTFISDDMLILGCDIGSETHYVRAIDTRGRELSKSAFPFSNTLEGFQSAKDWAVKIAAANDKKQIVLGLEPTGHYWFCLTTWMVSNGISVVQVNPYAVKQTKELEDNSQLKDDTKDPKLIANLVKDGNFGMPYLPEKLYAYLRRLSMFREQLNEDRIRFLNRLHREMKIYFPEYKDALGKFDGAFSLELLKKAPFPEDLLLLGKVGIRQIWHDAKLRGRDYSRAEEILTYARESVGMKDGANASKTAVKWFVERIIELDEQLVEIEEQLKQKCKEIPHTENILEISGIGENTLSGILAEMGDISRFDDVKEIQKLSGLGLVSCSSGKHKGETKISHRGRKRLRYWLFQAAKSVVAHSEEFKELHAYYTTRIENPLKKMQSLIVIACKLLRVIYTILTKGTVYDPQKLRSDIKRSSKQETVAA

SEQ ID NO: 56191 - protein, 388 aa, unidentified
MRRKKNKATKKVHFESLPLIHPNAAGIDVGSKEHLVAVPPDRDPQPVRTFQAFTPDLHELAAWLKRCGIQTVALESTGIYWISLYEVLEQYGFEVRVVNARHVKNVPGRSKSDVLDCQWIRKLHSFGLLNGSFRPDQQIRKLRTYMRLEDNLVVERTQAVHHMQKALFEMNVQLSNVISDITGESGLRIIEAILAGERDPEQLADLCSTRIKASRQTVAKSLHGNWDEALLFCLKTALETYRFSQKKIQDCDQCIERQLATFEIKAPLPDSKQNLQTQLHQVCGVDLTKIPGIKEQTAKIIISELGLDMTRWNTEKQFSSFLGLCPNNLITGGKIIRRSTRKVYNRAADALRLCAQSLTHCKSALGAKYRRLRTRLGTMSKKAFNNTN

SEQ ID NO: 56192 - protein, 373 aa, unidentified
MPKYSTAFGMDVHLRSTTVCALDADTGEAVTRRFPGNPWGEIAGWMDGFPGPSLAAYESGHLGFAPQRELAGLGVECVVAAVSKIPRSAADSASKNDRNDAARMAKAILAHDISPVWVPSPEVEGIRDLAGAYDGATARLATAKQRLLAFLAKRGFVYGGNTPAGNPRKYWAYDFLRWLDKVRPEDDGGVRTLAALRNEVEAAAEARADLLSEYRAAVDASPIAAEVAALQSIKGCAFALAAAFSAEVGDFTRFRSGRQVTAYFGLAPSQRSSGDSVRLGGISGAGNALVRKLAVEGSWCYAAARHQPKLMPRDTGVPLEIRMHGRKGSERLLRRREEMLARGMPAAKANAATAAELVRWLWALGMMCREGAE

SEQ ID NO: 56193 - protein, 412 aa, unidentified
MEVMFERVAGLDVGKAAVTVCVRTPSTRAGRRRSETRTFPTMSRSLGVMRDWLVAEGVRIAAIESTSTYWKPPFYCLEEVMDVWLLNAQHMKAVPGRKTDVRDAEWIAQLLEHGLLRPSFVPPPPIRRLRLLTRYRDQLLADRTREMIRLELMLEDASIKLSAVVSSLKTVSARAILAAMIDGEDDSRVLADLAKSKLRRKIPQLTEALIGHFDDNHARLARSILHRLDLVEAALTELDEVIEQACAPWAHQIELLCTIPGVGVKVAQVFIAETGADMSRFPSAAHLAAWAGLAPAIYESAGKRTPAGARHGNKWLNHMLVESAGSVGRMHGKNYLAVQHARLTKRRGMGRAQVAVAHSILVAAYWMLTRDEPYHDLGPDWHVRRDTEAHTRRLVAQLERLGHTVALDTPAA

SEQ ID NO: 56194 - protein, 321 aa, unidentified
MTYIGIDVSKDTFVVAYSPEKNSKTRTFKNTTRGIHEFIRTISKDEHHCVMEATGNYSALLVYLLSEAGITTSLENPLKVKNFARAMLSTVKTDEIDARLIALYGEKMNPALYRLRSDAILTLKQKRTVIRQLKKQLIATRNLKGSMEVLPFFDAKCKKSIEKTIAFLEKQVKDLEEDLSSLARSEYKKQMDLLTSVKGIGVTLAAALIMATGGFTYFDNAKQLTRHLGLSPTYQQSGTSVNFKGHINRNGDSSLRSQLYVAACSSLRCNTECRACYDRLRSNGKPGKVAIIAVANKLIRQAFAVVTQEKLYVDGYVSSKK

SEQ ID NO: 56195 - protein, 341 aa, unidentified
MKKTEYVVGVDIGGESISIAALKGPDGAGLADLSVTNDPEGFEELKSWLTKHSLTVENAVFCLEATGVYGEALCYYLCSRTFRVAVEPPLKVKRAFQQSAHKNDTVDARQIAEYGHRFFDELSWWTPPAAVLEQVRVLLTAREQFTGQKIANVNALKALERKTITTRIAIQAYEQAIARLTQNIKEIDQEIKRLVKQDDSFNRMITAITSTPGIGMLLAANLVVMTSGFARARNHKKIASYTGISPIEHTSGTSVYRRPRSRRYGPSRMRKLLYLAAMSVSTHDPAFRRYYLRKVAEGKPKRLVLNNIANKLLKVVCALVRSESIYIHNYRSVQPFLLKTA

SEQ ID NO: 56196 - protein, 432 aa, unidentified
MKFNQSNKQNQRISRISETTLVIGTDIAKHNHVARAFNYRGIELGKRCLFQNDDNGLLNLLAWAESIKQEHGLTDVLLGVEPTGHYWFPLFHFLKQRGIEVVLVNPHHVKKSKELDDNSPTKNDIKDAKVVAKLVIDGRYTQPQLPEGVYADLRVLMNQRDRLCGDLNRVKGRIHNWLDRFFPEYRQVFKDWEGKASLITLQNFPLPQDVVAAGETTVVAIWKKNDVKRAVGPKRAELLFRKAQKSIGLTEGATAAKHELAMYLEQYAMLCRQIEQLMELVAGLVEQIPGATHMMSIPCIGLITVAGFLAEVGDLSGYDHSQQIVRHAGLSLRENSSGLHKGETTISKRGRCRLRALLFRAALTMVAKNPEFRALHLYFTTRRDNPLKKKQSMIAICNKLIRVLFELGRKQKNYDANKVLGPHREAQLQAVA

SEQ ID NO: 56197 - protein, 420 aa, unidentified
MEAIVSKSAGLDVHSESVVASVVYEKEGEEVSETRHFGVVLRQRETLCRWLLEQKVDVVVMESTGIYWRNLYRDLTAAGLRVQVVNARHVKHVPGRKTDVLDSQWLAKLGRYGLLRPSFVPSSDFQDLRLISRYRMKLRDIEAGERNRLQKVLIDAGIYLGNVVSDIHGVSSMRIIEGLIAGKPIEELIQRVHGRLNPKKDALREALEGFLRDAHRIVLKAIVAHIKMLELEIFDLERQLLLGLKPYQRELDLLQTIAGFDVIASMTLLVEIGPDMQHFGSAKRLASWAGICPGQNESAGKRYSGRVRKGNQMVRRILCQVAHAVRNSKTQFQSKYQSLLIRRGVKRTVIAVAHKILRVVFAVLRDKKPYREPGIDYEALAVARNAPRWIRALEKFGYKVENKVTRATKIPKPLPLPSTA

SEQ ID NO: 56198 - protein, 381 aa, unidentified
MCAVDAEGRALVSVKVPNVEADIVAALATVTDLADQVVWAVDIVGAPSALILALLARAQSLVFYASGRVVNTMSAAYTGEGKTDAKDAYVIAETLRLRRDLPMVDTVTDLTRELALLTAHRSDLIADWVRMINRLRDVMTSVFPTLEQQFDYSSHKGALILLTEYASPKRLRRLGETRLTQWLRRRQVRDAARVAARALAAARGQDIELPGQHVAEMIIAELAASLLQLDQRIHGLDQQIAATFHRHHQAITIESMPGFGPILGAQLLVAAGDLRAYPSAGHLAAAAGLVPVPNDSGRRSGNLHKPRRYSRPLRHVFYLSAQTSMMRAGPNRAYYLKKRAGGHTHAQAVITLARRRIDVLWALLRDDRTFSIDPPTPAAAA

SEQ ID NO: 56199 - protein, 362 aa, unidentified
MEIRVKPIIKVLSLKVSFDKLLKLILMEIKHFIGIDISKSTLDWAVCTPQGGIVYQTQSTNSEEAVKGIINIIKTLPGFENLKSVFCMEHTGIYNAHLLSHLHRFHFPIWLENSLQIKRSGGIQRGKNDAIDAVRIAQYAFRFKDKIRIWQPPRQVIQQLAALSAVRHRLLLVRQQLQQPLNEQESFIELSLQKQLCKTCQASLKAINADLEKVDNQIKEIRENDPHLKELFEFVTSVPGIGVVTASEVIIATNEFNNIAQPKKLACHAGVAPFEHQSGSSVRGKTGVNHHARKRLKSLFHLAAMSAVRVKGEIQDYYLRKVAEGKNKMLVLNAVRNKLIHRVCAVVHKREKYDKNYMLTLA

SEQ ID NO: 56200 - protein, 405 aa, unidentified
MRYYLGVDWADQTHAVWVVDESGTKIAARAVSHTAEGLGEWGRELDEWRAQGIALWAAIERPDGRVVDCLLDHGVVVYPVNPKALDRARDRFRQSGAKSDPFDARVLADFLRTDHAHLRALQPSSEAAQELKLLTEDCQRHIRQQTRLVNQLTATLKAYYPRALEVAEVTSALAREFLPAYPTPEALTALTERQWQRWARAHRLPEARAGELWAVLRQPQLPVPAHVVRAKARLMQTLMEQLRPVVAAVAQYRKTIDDFFARMPAAQWARTLPIGTHGITAPTLWARLGDAPGRWESFRHLQAHAGTVPVTKRSGKQQRVVQFRFACDKALRSVVDQVAYLSLLSSAWARPYYDQQRARGHSHRQALRALGAKWLKIIFIMWQRQVPYDEQYHLATMTRQQLGRR

SEQ ID NO: 56201 - protein, 408 aa, unidentified
MRSNSFTAVGIDVSKCKSTVAARRPGGEVVWLPFDISHDTKGIQRLLEKLNGLDGEIRIVMEHTGMYWRPVALALQQAGFYVSVVNAILIHDFSDNSLRKVKTDRADALKIANYGLTFWMDLREYSVEDETRQMLKIQSRLYERTTTTGIMLRNGLISLLDQTFPRANKLFRDESRNTKGHVKWVDFIIRFWHKECVAALSLNAFADTFQKWCKRTGYRFSTSDAERIHAAAKNAVATLPKNDSTKLLITQAAISLNSVYDTLQALRTEMDRLASLLPEYELVMGMEGVGKITGPQLMAEVGDVRRFSHKGALVAYAGMDAPPFQSGAFDAKKRHVSKRGSPHLRKVLFEIASMMLVHGNMENPVFCFMDKKRAEGKHFYVYTVVGAAKFLRIYYAKVTQFLNAQAVA

SEQ ID NO: 56202 - protein, 428 aa, unidentified
MSAREAVEQEPEFVAFVGIDWADQKHVWCLQAAGSTQRETGELEHKPEVVEAWVSELCRRFGQGAIAVAVEQVKGALVFMLCKYECLHLYPVPSTMSSSMREALYPSGAKDDPRDADLLLDLLLQHRDKLRRLTPDNEATRRVQNLVEERRKLVEEKTAQLNRLSGYLKVYFPQMLEWFAKLDTKLACEFLEHWPSLEELQSSSPAEVRKFFRRRRGRHGELTEWRVQGIGQAMPAIRDRAVIEAKRLVVQVIARLLRTLLEGIATLDSKIAEAAEAHPDFFIFRSFPGAGAALAPRLLAALGSHRDRYASAEEVQKYSGIAPVTERSGKKKWVHFRWACPKFLRQSFHEWAGHSIAQSVWARAYYQQQRQRGKDHHAAVRALAFKWIRIVFRCWQERAAYDENRYLAALAKRGSPLTSVVAAAAISM

SEQ ID NO: 56203 - protein, 341 aa, unidentified
MSKVSTYIGADLHKKTCYLTVMSKEGTIKKQTEISTKTDEIRKFFKGYKGVPVAVESTLNWMPFYENLESLGCKVSLSNPLQTKAIATARIKNDKVDSKVLADLLRTNLLPTAYIQPREIRDLKELVRQRINYVELRTRIKNKIHSVLFKTNIQHDFSSLYGKAGMEFLRTVKLRNIYREELDRYLATLDLLNRQIKELEEIITSTAEVDYDCKLLMTIPGISFFTALVVKSEIGDISRFSTANKLCAYAGLIPSTYQSADKIRFGRITKRGSKWLRKALIDAITSGSRNTNKISVFYRKLKKNKGTGKAKVAAARKLCSIIFAMLTDKQPFREFTPVKQR

SEQ ID NO: 56204 - protein, 467 aa, unidentified
MKHNGRHQSQPRGRVSPTLLTQINPNVAGIDCGSAEHYVAVPPDRDPNPVQSFKTFTTELIRLADWLAACGVTSVAMESTGVYWIPVFEILEARGFHVLLVNARHLKNVPGRKSDVTDCEWLRDLHSVGLLRGSFRPVEAIVALRAYLRHRQTLVESASMYILRMQKALVQMNLQLPLVVSDITGLTGLRILRDIVAGRRDPVQLAEHRDPRCHASKADLIAALTGNYRAEHLFVLEQNLQLFDTCQAQLAACDAAIEAHLKTLTAALAAPATPLPAARTKKKRSRNEPRLDIRSLLHHLTGGIDLTQIDGLGPHTSLKLIAEIGTDMARWPTEKHFTSWLTLAPNNKISGGRLLGSRTQPSANRAAAALRLAAEAVGKTQTALGAFYRRLAFRIGKPQAITATARKLAILVYRALSGTLVYRDPGATAYDQQQQARTVRHLRRRAAALGFELVNRNTGEVLAPAGA

SEQ ID NO: 56205 - protein, 407 aa, unidentified
MRLFIGDDWAEDHHDVEVMDQAGRVLARARLPEGVAGMGRLHALAGQHLGEGAEDGEVLIGIETDRGPWVAALAAAGYVVYPVNPLQASRYRARHGVSGAKSDQGDSHVLADMVRTDSRQLRAVAGDSAEAEAIKVAGRAHQTLIWERTRQVQRLRHQLREYFPAALEAFADLDAPDALELLAKAPGPARAARLTRAQVSAALKRARRHHIAGKTDAILAALRGEQLVQPPALTAAYAAAARSLIALIATLNDQVKTLHGQVEDHFGRHPDAEIYRSQPGMGAILGARVPGEFGDDPHRYVSAKARKNYAATSPITRASGKKKVVAARFIHNGRLIDALMAWAFASLTASPGARTFYDELRAKDIEHNDALRRLASRLTGILHGCLKTRTRYDEATAWSHREASLAA

SEQ ID NO: 56206 - protein, 413 aa, unidentified
MSLAASGVGEAQTRFVGLDVHRKYATVAAVDSKQQVVLTARRIDFNDFDEWVRKHVRKTDIVTLEATSNAWHLYDMLVPLVASVTVANPMQVALIAKTRVKTDPRDALTLARLLAAGMLPSVWVPPVSVRELRALGNHRSRLIKQRTQARNRLRAVLFTHNLFPPAGEAFGPANRGWWEGLDLPASEKLRVRQDLSILDSLEPLVNEVEAELVRQSSLEPWAEQAAFLVQLPGIGVHNAMLLLAAIGDIGRFEAPHKLVGYAGLGARVHSSGEEHYGGRITKQGRRDIRSTMVEAAWVAVAGHAYWKESFERLAFRVGKPKAIVAIARKLLVVVWHVLTKQVADREAVAEKVASKLLEWSWKLGRANRAGLTSGAFIRRELRRLQLGENITAISRGKRKFPIPVSEEANQAVG

SEQ ID NO: 56207 - protein, 343 aa, unidentified
MSEISIVGLDLAKNVFQVHAVDALGGVVLRRQLRRGAVAKFFAELAPCTVGMEACGSAHHWARVIGGYGHQVRLMPPAYVKPYVKRNKNDGRDAEAICEAVSRPSMRFVAVKSVEQQAILALHSARSLLVRQRTMIANSLRAALSELGIVAAQGIKGLQELIARLQAPGEVPEMMRGALLLLAEHWQTLDADERELEQKIAKAARGDADARRLMEVPGVGPIIASTVMAKVPDASLFRSGRDFAAWIGLTGRDHGTGGKHRPGRISKKGDRMLRALLISGASAVLRHQKRHGISDPWLRDLLARRPYKVVMVALAAKTARILWAMLVRKEAYRDRASASAAAC

SEQ ID NO: 56208 - protein, 341 aa, unidentified
MEQATTIGLDIAKHVFQVHGADAAGHVLFRKRITRAKLLNFLAAQTRCVVAMEACSGAHYWAREIAKLGHHVRLIAPVYVKPFIKRQKNDAADAEAICEAAQRPSMRFVPVKSEEQQANGIVFRARDLLVRQRTQCVNALRGHLMEYGYVFPKGITHVESLVALVEDLRSALPNSVRVILKLLVDTFTALEAQIAALDAEINQRSKSDPTARRLMTIPGVGPIASTAITALVPAAEGFPAGRDFAAWLGLTPLQKSTGGKQKLGAVSKRGERTIRRLLIIGASAVVQQASRRGAPQGSWLAQMLARKPKMLVTVALANKMARIVWALLVKGGTYRTPAAAA

SEQ ID NO: 56209 - protein, 315 aa, unidentified
MLIHYIDIAKRNFVIAVSSLSKTKTETNNPKGIAHTIEYLKKHKVALVVTESTGGLEIPAAKAIRRAGIAVIIANPRQTHQFAQSQPLTKTDAKDAKMPAFFTQMMTQKEDWQTMPYQPPTEAEEVLEALVNRRNQSADMRTAEKNRLHQVHETQVGSVKQLIAHFDRLIDELDKQIDDHTHTHFDGKAQVAEQIKGIGSITTATLMAMLPELGRLSHKRIASLVGIAPHPRESGETKFKSRCFGGRSAVRKALYMATVAATRFEPLIRDFYQRLPSEGKPYKVVVTACMRKLLTISNARMRDYFAENDTAENGI

SEQ ID NO: 56210 - protein, 320 aa, unidentified
MMAQNEVVVVGIDVAKDKVDACIRAFKLRQTWLSTAQGHRKLVAWLRKYQVNKAVMEASGGYERAWARVLREAGIEVRIVDPKRVRSFALSAGRLAKNDAIDAEMIAWFAETFSEAPSQLHDAAREELQALVKARLDLIDFRMRLVSQSEHAAPGLVQKAHAHILKSLASEIAKLEAAISAKIKSTPDFAERAEIIESVPGFAQTSSANLVAGMPELGQVSDEIAAALIGVAPYDDDSGKRRGERHIKGGRRWVRNAIYMPCVGAATQNNPVLKAYYQRLLAKGKEPKVAIIACMRKLIVILNTMIARRQKWDPSRYVLS

SEQ ID NO: 56211 - protein, 431 aa, unidentified
MNAQDTTTNIDNQRQTQIPDQFVAWIGFDWGHHSHAFAIQDQSGQRQCGTIPATSEALHNWVGQLQNRFGSRPVALAIETNRSGAISALQDFYWLTIYTVNPSSSASFRKTFKPSGASDDIPDAQILLQLLLSHQDKLRPLIQQDPLTIKLDALTRTRRQLVDHTTKLTCQITSLLRGYFPQALEMFGDIDSPLAIDFLSRWPDLISLKAAKPGSLKRFYYTHNVRNNQLIQKRLESVKQALALTTNQAIVSPSVIKLKAMLGVLRELRKQITILDREIAIAFHQHPNAHLFRNLPGAGDALAPRLCALFGTVQELIPDAPTLQKKIGVAPVLEKSGKSAWTHWRWFAPVFMRQTMIEWAGQTVQYSRWARVYYRRMAAQGKDHWVILRALAFKWIRVLWKCWATNTIYDEPKYLRQLHRRKSPNAVYDQE

SEQ ID NO: 56212 - protein, 414 aa, unidentified
MDVIVERCAGLDVHRDSVVATVRVPGKGKSRRRRAQETRTFATTIAQLEQLGDWLESFGVTLVGMEATGVYWKPVFYVLERRFECWLLNAQHLHNVPGRKSDVIDSRWCCELVELGLVRPSFVPPPEIRLLRDLTRLRATEVQERSRSIQRLEKVLQDAGIKLTSVASATYSVSARAMLEALLGGVTDPVALAELAKGRLRTKIPQLEEALASRFDVAHHGVLVAGLLAHIDALDQAVATLEARIGIATRPYADLIELLCTIPGVGVRLAEILIAECGLDMTVFPTAGHFVSWAAICPGTNQSGRKRRSGKTRHGDTWLRTALTEAAHAAVRTKNTYLAAHYWQLRGRRGQFKAIGATRHDILIAYYHITRDRVPYHELGPDWLARRHSPEHRTRRLVKQLEALGHRVTLEAAA

SEQ ID NO: 56213 - protein, 358 aa, unidentified
MVQRKELNFEGQNIYIGIDVHLKTWHVSILTESGCLKKHSQQSSAQALFEHLKKHYPNGNYLSAYEAGFSGFSTYYSLLDFGIECLPVHAADIPTGQYESVMKTDAIDSTKIARALKSGLLRGIYIPKKEVLDDRNVMRLRITLKRQLSGYKSRVKHLLYNNGVIYPECFQNSKSHWSKRYLKWVHEDVQLLSESRNSLDLLLRQVELFRKSLLEITRLVRTLSRNGRYWEAYENIVSIPGIGMITGMCLLTEIGDIHRFRNERQFASYLGLVPTSHSSGEKTSHGEMTFRGNKRLGPLLVESALVAIRQDRALAAAYGEYCKRMLPQEAIIRITRKLSNRILIILKSGKKYEHDRCY

SEQ ID NO: 56214 - protein, 422 aa, unidentified
MKKRRYHATSVNQVNWAQLAEQAGDQRVVFAVDAAKVTFVAVVMTPDKQVLKTIKWKHPEQTKSLLEGLFSQWDSATVQMAIEPTGTYGDALREAFERRGIEVYRVSPKAVRDSAELIDGVPSQHDAKAAYQIGWLHLNARSARWELRSEQRRLLGALLEELKVYQERRRSSLNRLEAQLARHWPELPTILGLGSVSLMTLLARFGSAAQVAAEPEEAEALLRRCARAALSQEKIAAVIDSARQSLGVPCIEAERRWVQGLAEDLLAQHRAVQRTEKAIAQQVEADPVATRLAEVVGKTTAAVLIECIGEPEAYPNAASYLKALGLNLKERSSGKHVGALKITKRGPGLGRFYLYFAVLRQIAQDSIMRAWHQAKTARDGGHKGKSIVALMRKLAKALWHVGRGERFDTRRLFDTAHLARAA

SEQ ID NO: 56215 - protein, 317 aa, unidentified
MTSEMLIGIDVAKDELVIDSEQGLLTLANTAEAIDAWLKTLPTGSYIGLEATSDYHQLMAEQAVLMGMVVYVLNPRHMRHYALGLGRRGKTDRVDAQLIRRFITAERGHLRPYQPASAMQHQVALLQRRRATVVKHRQALQKALRSVKELEAPLIDTVAALDGLLKHIDQQLDDLLTLQPALKAEARRLESIPGIGRQTSTQLAVLFDRVPLSRSDAVVAFVGLDPRACDSGQKRGRRRVSKRGPGELRRLLYNCAQAAAKTAVWKPYYQELRAREFSATQALVIIARKLLRIAFSLWQQADARFDAQKIGCLNNAA

SEQ ID NO: 56216 - protein, 349 aa, unidentified
MSGKFNSEIAAIGIDIGKNSFHVVGLDRRGAIVLRQKWSRGQVEARLSNLPPCLIGMEACVGAHHLSRKLTSLGHDARLMPAKYVRPYSRGQKNDFRDAEAIAEAVQRPTMKFVATKTAEQLDLQALHRVRERLVSQRTGIINQIRAFLLERGVAVRQGLRFLRAELPRILARPCKALSPRMLRVIEDLAGDWRRLDERIDGLSTEIEVLARQDAGCERLMSVPGIGPIISSAIVAAIGGGDAFSKGRDFAAWLGLVPKQSSTGDRTILGKISKRGNRYLRVLFVQAAWAVLIKPKSWARHGLKPWLEAAKKRLHHNVVAVALANKLARIAWSVLAHGRVFEATRIRAA

SEQ ID NO: 56217 - protein, 398 aa, unidentified
MTESSDYESVQVFIGVDVGKDTHHAVAINRSGKRLFDKALPNDENKLRSLISDLKQHGQILLVVDQPATIGALPVAVARSEGVLVGYLPGLAMRRIADLHAGEAKTDARDAAIIAEAARTLPHALRTLKLADEQIAELSMLCGFDDDLAAQTTQASNRIRGLLTQIHPALERVLGPRLEHPAVLDLLQRYPSPEKLASLGEKKLAAQLCKLAPRLGKRLAADIAQALAEQTVVVPGTNAAAVVLPRLALQLITLRKQRDEVALEVEQRVLAHPLYPVLTSMPGVGVRTAARLPTEIACRAFASAAHLAAYAGLAPVTRRSGSSIRGEHPSRRGNKALKRALFLSAFAALRDPLSRAYYTRKMSQGKRHNQALIALARRRCDVLFAMMRDGTFYTPQGS

SEQ ID NO: 56218 - protein, 343 aa, unidentified
MQITTIGLDLAKSVFQVHGVDASGQILVRKSLRRSQMLAFFAKLPPCLVGMEACGTSHYWARELIKLGHEVRLMPPAYVKPYVKRGKTDAADAEAVCEAVMRPTMRFVPVKSPEQQAALSMHRTRDLLVKQRTQLVNMIRGLLAEFGIDIPKGLERALLKARQIVDGEAPDVPIEAAKIVVTLSQQALEIHVRLRAIDRDLLVWQRGNDVARRLMTIPGIGPVGATALAASVTDPHQFRSGRQFAAWLGLTPLQKSSGGKERLGRITKMGDKYLRKLLIVGMTSRVRRAKQNPTGDPRLADLLARKPTRVATVAMANKTARIIWAIMARGEIYRGGHQPALAA

SEQ ID NO: 56219 - protein, 324 aa, unidentified
MSDSILGIDVSKETLDAYCARGQRKQGRTFANSPDGWKLVRAWLKAMGSKQAHVCMEATGRHSLGVALALHEAGHVVSVVNPAQIRDFARTKLGRNKTDKVDAALICEYAELFQPEPWTPPSPAMRRLCELQTTRAGIIGSRAEWKNRIGSGLGDSTATKLAAATIDHFTSQLEAIDRAIGETIEQDAELRGRRDLLLSVIGVGETLAASLMAEMPEPGVLRRSGEMVAYAGLNPSHHRSGTSIDRPTRISKIGNATLRSSLYMPALSAMRFNPAVAILVARLKSAGRLKPKQIVVAAMRKLLVLCFGVLKTGKRFDLAIAMPA

SEQ ID NO: 56220 - protein, 318 aa, unidentified
MHTDSTTVTVGIDISKEYIDFFIFNGKDNPRGRRPRGPKALAKLAVELAPYKPKRVVMEATGGLELAVWEAFEAAGLKVAVVNPKRVRDFGRSMGLLAKTDKLDAELSARYGALIQPRITALPSLETRELRELLHRLESLVSSRAEERTTLRQAVSAAVVDSLERTIAAQSKEIVLLEQQVEEALSRLPDERERVARLRTAPGVGPKTSWALVAELPELGQLSGREIAALAGLAPMACESGNYRGRRRIVGGRARVRKALYMAALAAVRCDPHMAAFRARLLAAGKPKKVAVIAVSRKLLVALNAMVRDNETWIPQKA

SEQ ID NO: 56221 - protein, 397 aa, unidentified
MYIVGIDIAKRKHEAAVIDGEGTVIIKPFSFTNNCSGYNRLLAMLAKAKLPLDEVSFAMEATGHYWLALFTRLQKEGFRVQVINPVQTNSIRSFYIRQAKTDPRDALLIAEVIRFGHFSESTLHPENIYELRELCRGRHAIVSMQADVKRKVVALLDQVFPEYETAFTNMFGDTSMAILQTCPTPKELSEMPFEELCHLIEVSSHKRFRMAKAQELQALARNSFGFAMAGDVFSTMIRLYAKHLVFLKQQVREMDRKIAEIMDTLDTPITTITGIGPTLGAYILSEIGDISRFSSAAKLAAYAGIDPTMRQSGEYNGVRNRMSKRGSPYLRHAIWLAASSAVLHDPALKLYFQKKRDEGKPYMASVGHACRKMVSIIYAVMRDNKAYTPHIPNEISA

SEQ ID NO: 56222 - protein, 329 aa, unidentified
MEQVFVGIDIAKDTFAVVVRRNGTNGKARIFANTAKGIGGLVQWLPDPAEEQIHVCLEATGEYGQEVAEQLHTQGMQVSVVNPLAVKRYAGSSLVRNQTDPVDAGILAEFGEYKKPRRWVPPTPAQKALRALSRRLEDVQTMQQMERNRLAASKQLPPVVKDSLQTMIQLLSEQIQTIKTQLRQHIDQDEELKRQKKLLMSIKGIGELTAIRFLAELGDLRQFESAKQLAAFLGLTPTWKTSGSSVHSKPRLSKQGSAEVRQFLYMPAIVAKKYNPIIKAFCARLALARKCDMSIIGAAMHKLVHLMFGVVHSGMLFDPDYLQKLHVPS

SEQ ID NO: 56223 - protein, 379 aa, unidentified
MEISTSALPTVAAERATMFVALELSKSIWLVALHSPVADKVSQHRFAGGDVEGLLALIARKQAQAEARLGQTIRILSCYEAGYDGFWLHRLLCARGIDNRVLDAASILVDRRSRRAKTDRLDAAGLLRTLMALDRGESRVCRVVRVPSVAQEDERRRSRERGRLVVERGQHSSRIKGLLMTLGVREFEPARRDWQLRLGGLRAADGQALPPYLKAEITRECRRLHQVIEMIAEVEAEQEAALEAEGGRAAQLVRLRGIGLVSATVLVNEVFYRDFRNRREVAGYLGLASSPWSSGRVRRDQGIAKSGNPRARRTAIELAWLWLRHQPGSNLAQWFRERVGMAKGRMRRIMLVALARKLMVALWRYLSEGLVPDGAALKA

SEQ ID NO: 56224 - protein, 418 aa, unidentified
MKDIKPEKGKKINRKTLIVAFDIAQEKHMVYIRCPDGREEKPFVVFNRREEYEQMWERISQTREAYGVEEVVVGFESTGPYAEPLVHYLMKKEVKLVQVNPMHTKRVKEIRGNSPNKTDEKDTQVIADIIELGNYLTVVIPEGASAELRRLTQARERAVERRTMLVNQVQGLVSVVFPEFLMVMKDIKTKTAHYLLNHCPRPEDIVELGYERLAETLKKISRGRMSKERAGALYEAAVNTVGVREGQGGMVFEIKQLVAGIEETERVIEEIEEKMREYLKEIPYSRCMLSIQGIGEVTVAGLIGEVGDFGKYKTIAEITKLAGLDLFEVSSGKHKGERRISKRGRPLMRKLLFYAAINVVRKGRIMHERYERYIQRGMPKIKALTAIARKLLGVLFALVRDQSEYVRNYEEIPLKKVA

SEQ ID NO: 56225 - protein, 334 aa, unidentified
MNEIIAIDLAKTVFQLHFVEGSPSVIQRKVLKRQQILTFFSNRTPCRVVMEACGSSHYWARKLRAFGHDVRLIAAQFVRPYVKSNKNDAADAEAIWEAAQRPGMRFVAVKSADQQSILALHRIRQQIVRIRVMQINQLRGLLYEFGFIFPAGRSASIKAIRDQLPEMEADVPRMLLDSVEEQLGRLALLDEQVARIEMRITEWRRNDEACRRISEIPGVGLLTATAAVAVIGDAKTFRSGREFAAYLGLVPRQTGTGGKVRLGGISKRGDVYLRTLLIHGARSMIACAKRLPDQTQKLLARRPTNVVAVALANKAARIIWALLAHDRRYEPIAA

SEQ ID NO: 56226 - protein, 317 aa, unidentified
MTQTSMAVAGIDTAKDKLDIAVHGQTSHWCIENTARGWKRLRAELAKAGIERVGIEATGGYERGVVRHLQEAGFTVVALQPIQVRAFARMHLRRAKNDALDAALIAACTAATDKPRIEPDRRLSRLADRLTFIEQIEEDLARFKVRLEHINEPQLRRAVLGDIARLKARRLTQIRLIARQLRAHHDLATRLDLVMSVPGIGERTALALIVRMPELGRISREQAAALAGLAPFDDDSGNYKGQRHIAGGRARLRRSLYAAALPAAFRWNRALISLYARLIAKGKAHCLALVACARKLLIYANTVVARGRPWTDSPAVS

SEQ ID NO: 56227 - protein, 420 aa, unidentified
MSFKIFRKNCCGLDVHKTWIYTCIGITDTNGRTDYKQTRFSSFSKGLKELSDWLAKYHCTEVCMESTGKYWIPVFNVLEKAYVSVILSHPKYTKPQKGNKTDRKDAKWICDLFMCDMVKPSFIPPADIRHLRDLVRYRFKLICMITGEKNRAQNCLTVSNLKLDDVFSDVFGKSSRSITEYILEHPGDLFDVTPFVDRRCKTPIEEIQAAVDGAISPEQAVKLRQCLNHIDELEKHLEEIEQEILRLSDKYQAALDLIRTVPGFDKNPMTAIQVLSEIGGDMSVFPSAKHLVSWAGCCPRNDQSNKKIKSTRISRAGSYFKPVLVQVANGLLRSKKHPEITDRYKRIKARRGHKKAIIAICRMLLTAIWHILSDLKPYTAEGFRESRPVNESKVLTTSQALNLLKQRGYIIKDDLTPAMN

SEQ ID NO: 56228 - protein, 339 aa, unidentified
MDKLYGGIDLHANNSVVVVLDEADQVHYQKRLPNDLAAIIQQLAPFQPHLQGLVVESTYNWYWLVDGLMAAGYRVHLANPAAMQQYAGLKYTNDHSDARWLAHVLRLGLLPTGYIYPKKERAVRDLLRKRSQLVRQKTANLLSIQNLLTRNTGQALRSNQLKQLTPATVSTLVALPEHALALQVTVAVMQHLAEQITQVERAVHARVKLRPAFQSLLTVPGIGRTLALTIMLETGEIGRFPTVGQFASYCRCVGSTKLSNGKRKGQGNTKNGNKYLAWAFVEAAHFAMRHEPQIRQFYQRKQGKTNVFVALKAVAHKLARACYYIMRDAVPFDITRAFV

SEQ ID NO: 56229 - protein, 350 aa, unidentified
MLIIGCDYHPGFQQIAYVDTETGELQERRLRHPEEAEKFYRELWERKVRVSVGMEASGHGRWVERLLAELGLELWVGDAAEIKAKRVRKQKTDRQDAQHILKLLLKDDFPQIWVPSWENRDLRQLLWHRHRMVQTRTRIMNQLQAVAINEGVRYKKRLWREAGRKQLESLRLAQWASRRRQDLLEVLDRINPTIAELTQAVEQQAEKCSEARRLMTHPGVGALTAVAFVLIIGEANRFGCGKQIASYLGLVPAEDSSGERRRLGHISKQGNSLLRFLLVEAAQATVRSDCKWRNQFFHLAQRRGRKIAKVAMARRLAVRLYWMWRRGWDYEQLQSFGSHAGQPGNPHGVQ

SEQ ID NO: 56230 - protein, 409 aa, unidentified
MLKIVYPNCCGIDVHKTFVVAVIAITNNQGITEYHRKRFSTFTNGLTQLRDWLEYYSCFDVCMESTGKYWIPVFNILEEQTNVCLAHPKYVKAIRGKKTDKKDAQWIADLFKHDLVASSFIPPLKIRQLRDLFRYRMKLTQLQVGEKNRYQNCLTWSNLQIASVVSDVFGKSAQAIIKSILDNPQDKPNIEQLVHKRMKNKVQDLEIAMEGALTPEQAEKIRVIKAHYDALAICKEDLEQMIRELGQDYQHQAKLIQTVPGFKEDLSALRIISEIGCDMTVFDSAAKLCSWAGLVPANNESAGKKFSTRISKGGKYLKPFLVQVANAVVKSDKHPELRNKYLKLKKRRGHRKAIIAICRRLLVSVYQVLRKQEDYNPVLQELTEIRNPDKTMSVQDAVRFAQQHGFNVA

SEQ ID NO: 56231 - protein, 341 aa, unidentified
MERLYYIGLDIHKKTISYCVKKVDGTIVQQGKITAERKALLKWMEGLPGPWLGAMEATIFTGWVYDFMKPHAVELKVAHPAMLKAITAAKKKNDRADAEKIADLLRVNLLPECYMLSEELRELRRILRYRNMIVRTAVKMKNKISGLLMEIGATYDKGKLHRRKYFSDLLERVEDVPDSVKDMLKLSRSSLEMFEAVQKKLVHTLREDNLIHERVQRLMSIKGVGEVMALTWVLEIGDSSRFHSARQAISYCGLCSAQRESAGKEQRGPISKKRNKHLQTMLIEAAKLAPRWNPQLTALHEKELNRGNRNRATLAVARKLVEYMLAVERQQKDFVPLELAA

SEQ ID NO: 56232 - protein, 343 aa, unidentified
MYEYFVKIFLKTLLFILKMKQIIHYYGIDVSQVSLQVSHQTSEGIWQDFEVKNEILSLTEWLSTFDLSQNHFVYEYTGNYSSRLSYVLNLLEAQFSILTPSQSKGFRATLKSTSKTDKQDARMLCLYGQKMQPEQTVLPDVKLDQKRQKYKYLATLKAEKQAFTNRLDALSYLPNADKTIKESLMNTVEFFDTQIQTITQEVFTLDDDNFRRIYDLMIQVVGIGKITANALIIATNGFQDFENAKQLAKFIGVAPSDKQSGSSLKAKGHISKSSCTALRTSLYMAAQNAARFNTTCKDIFTRLRAKGKPYKVAIIAVINKLIKQAFAVVKNKAKFDNFLVLTK

SEQ ID NO: 56233 - protein, 413 aa, unidentified
MEIVIERCAALDVHKDSVVACVRVPDPPAGRQQVIETFRTTTPGLLALRDWLAAYQVTLVGMEATGVYWKPVYYVLEEAFTCQLVNARHSRQLPGRKTDVADAAWLCQLLEHGMVRASFVPPKPIRELRNLTRYRTAQIEERTREAQRLDKVLQDAGIKLSSVASNVLGVSGRAMLQALVEGTRDPAVLAELAKGALRKKLPQLRAALLGRFGAHHALLVGTILAKLDFLDEAIAALSAEIEVAIRPFAAEVELLRTIPGVDRRIAEGMVAEIGVDMTRFGAAGRLASWTGMCPGNHESAGKRARGTTRKGSKWLRSYLRQAAKAAGGSKGTYLAAQYTRLRGRRGPAKATVAVGHSIIVAMYYMLERRQPYHDLGPDYFLRRHTREHHARRLARQLQALGYKVTLEPAEAAA

SEQ ID NO: 56234 - protein, 409 aa, unidentified
MEQMIQRCAGLDVHKAVVVATVRVPDGDGSRAMHTETFSTTTTSLLALHDWLHASGVTHIAMESTGVYWKPVYYALEDGFTLLLVNARHVKNVPGRKTDVKDSEWLAQLLECGLLRGSFVPPPPIRDLRDLTRYRRKQINERGREVQRLHQVLEDAGIKLATVATDVMGVSGRAMIEALIAGTTDPATLADLARGRLRRKLPALREALRGRFRPHHAFLVGQILAKIDFVDDAMTDLTREIDRLLLPFEATLARLDTIPGVNRTTATTIIAETGGDMRRFPSAGNLCSWAGLCPGQNESAGKRRSGRRRKGNPFLSHALVESALAVTRAKNTALQARYRRIVRDAGHKKAAMAVAHQILEIAYYIQRDDVEYVELGADYFDQRRREHAVRRHIEQLQALGYRVTVEEAA

SEQ ID NO: 56235 - protein, 352 aa, unidentified
MKHYIGNDAHKKYSVFVTVNENGRAGSPERVPHDKDLYKKYLATLPPCSPIAIESVGNWYWMVEAMEHAGHQPVLVHPRKAKLLMGLINKTDKLDARGLAMLNLNGSLPAVWIPPAELRDQRELSRMRMSMVGVRTQFKNRIQATLAKYAIMIDKVSDIFGKTGRILLSEAIKELPPETKQSVEEQLILLDQVSGQIEKIEKHIREVVRDTPMMQLIKSLPGVGDILAIVIALEIGDVERFASAEHLASYSGTVPRVSSSGGKTHYGQVRQDVNHYLKWAYIEAANCVALQQDRNAGRHTVELLKRIQKQKGYPKAAVAVGRHLAEATYCMLKHNEPYHEPNLRKTVLSSQG

SEQ ID NO: 56236 - protein, 359 aa, unidentified
MVKNSMLIIGLDLGDRCSYLTILDQDGELIEESRLPTTKASLQGKFSNLQPCRVAMEVGAHSRWASQLLKDLGHDVLVANARKLRAIYHNPRKGDRADAETLARLARLDPALLSPIHHRSPQAQADLAVLRSRDAVVRSRTLLINHARDIVKASGSRLPSCSADSFAHKVAPDIPESLRPALAPILDTIASLTQQIRAYDRKIEELCSERYLETKLLREISGVGPLTSLAFILTLENPDRFRRSREVGPTLGLVPRRDQSGDKDPQLRITKTGDPYLRRLLVGSAQYILGPFGPDCDLRRWGLRLAERGGKNAKKRAVLAVARKLAVLLHRLWKTGEIYDPSYHARKHDQAPEAIAAVA

SEQ ID NO: 56237 - protein, 345 aa, unidentified
MTEAYDGRQVVGIDLHRRRSVIVRMTEDGRKLETVRITNSAAALRREIAKAGKHPRVVVEATYGWYWAADVLEAAGAEVHLAHPLGVQAYSCRRVKNDQRDAADLADLLRMGRLPEAWIAPPEIRELREITRYRHKLVQARTSVKDQVHAVLAKLGIPVTHTDIFGLHGQAWLDGLRLPQPYAGKVTSLRQLAGELSAEITLLEQVLGDLLAGHEGYAAIRQLPGIGPVLAAVIVAEIGDITRFRKAGQLACWAGLTPRHRESDAKVTRGHISKQGPRILRWALCEAIQHQPAGTRPQQVKDGIIARRGPQARNIAKTAAARELLTLIFYALRDGRVRRAASPAA

SEQ ID NO: 56238 - protein, 353 aa, unidentified
MDNGSRYVGLDVHRDTISVAVRDSKGKLMLERVIPTSAAAVLELAELLRGNLHVAFEEGTSAQWLAGLLQPRVAQVLVCDPRKNDRRGSKNDRIDARELADLLRCGRLSPVFHQDCGLTALQELARTYLVLTKDQTRVMNRIKALYRSWAISCAGKSCYSPRQREAWLVKLPNSAVQGRAQIYYQQMDSLQALRQQVRTQLLREGRKHPALRLLCQIPYIGPMRATLLIVFIQSPHRFRTKRQLWAYCGLGIETHDSGEYRFRQGQLERKRQPTVRGLNRNHHHLLKYVLKSVAARCCSGSGPLRDFAQTLLDQGMRPEMVRLTVARKIAAIVLVLWKKGVSFDAHYLKPQAA

SEQ ID NO: 56239 - protein, 338 aa, unidentified
MELYAGIDLHSNNSVVTVLDEQDRTVYAKRLRNDLDAIVASLRACAGTMRGVAVESTYNWYWLVDGLQAAGFTVHLVNTAAVKQYDGLKHSGDFSDARHLAHLLRLGILPVGYIYPREERAVRDLLRKRSQLVRQRTTQILSIENLMARNLGTRATGNEIKRWEARNINAMELLDEQKQALKANLAVMKCIDGQVDRLERSVLAKVKRREDYKALKTVSGIGEILAVTIALETGDIGRFAGPGNFASYARMVDSRRESNGKKKGEGNAKCGNKYLAWAFIEAAHFAVRFDATIKRWYQKKCAGSLSVVAIKAVAHKLARACYHVIKDGTPFDAAKAFG

SEQ ID NO: 56240 - protein, 312 aa, unidentified
MAMLSFCGIDVSKDRLDVVVLPEGWFFSVSNDTAGWAELVARLRPLTVSAIGLEPSGGYERGIIRALLAAGLSVRRINPNKLRQFARARGVLAKNDRLDARLIAEYVAIMPTRVVQRDAAVEKLAEIVTMRRQLCDEHVAAENQAAHLEDAMLRRLSKRRQTRLEADIRLLDKRLAEMVAANGALAQRYELLTSMPGVGPVLAFTLIALLPELGKMSRKQIAALVGLAPYDFDSGKLKGHRSIYGGRMPVRNVLYMAALSASRYSPALKTFHKRLAAADKKSKVIIVAVMRKMITTLNAMLRDSAAWQPRSA

SEQ ID NO: 56241 - protein, 428 aa, unidentified
MDKSDLGRIEWFRQFKKEIRGSTEYLVVGIDIAKEKHHAFFGTANGKTLLKRLIFDNSREGFEKLEIQVEALQVRHGLSRVVYGMEPTANYHKPLGEYLIRKGDEVVLVGGQAVFKNRELLDNRWDKHDTKDAANVADLVLQGKCVFYESPELALRELRVLLGLKRRLKRQEHAYQVRIRNGLLAQYFPEMDAYYEQGKASCLGVVKWCLAPSRIAEMGFEELVGMVSSKRLLRTQEERLRAIWEKAPKSIGCEAGEAVAFEARVMVDQLRQTREMLKTTEEKIETLCEASPEYESLRSIPGFGPDVSSKVLGALGDPLRFNSGRQVLKLAGLDLSADRSGKSSPKATPRISKKGKSDLRYALFQAAFIASSKNASFMAYHTRQLKGREKEKGIHYKRLVKLAAKLLVIAWTLMKKKEVFDPSYLSQK

SEQ ID NO: 56242 - protein, 308 aa, unidentified
MCLIKENQKLKHKVFANARHGFEQLVAWLVSHQVGSFHVCLEATGSYGEALALHLHEAGYRVSVVNPAAVKAFAASRLTRTKTDKVDAELIARFCLAQQPEAWQPPLPQVRHLQALVRRLESLVEMRVAEENRLSSGISIDAVSYSLEEHIAYLIKEIKQTELMIRGHIDNHPDLKEQSDLLDSIPGIGQTTAALLLAEIVNIKQYKSARQVAAYAGLVPRERRSGTSVRGRAQLSKIGNARLRKALYFPAMTALRCSSFFQQWASGMRERGKCKMAVIGAAMRKLIHLAFGVLKTGKPFDPNWAKTA

SEQ ID NO: 56243 - protein, 347 aa, unidentified
MIIIGCDLHTRCEQIAMLDTETGEIEEKRLEHESGEARTFYAGLKEPALVGIEATGYTRWFADMLAELGHELVVGEAGKIRAKETRKQKHDRRDAEHLLNLLVRGDFPKIWLPSAEERDVRVLIEHRHQLVELRTRAQNGLQAIALSYGLRRRSRLWSERGQKELKKIPLREGMGRRREDLLRLVRQLDVWIKELDQRIEQEVARREDAQRLMTHPGVGPQTALATVLVLGPVERFPDDRHVTSYLGLIPQEDSSAGRQHFGHLTKQGNRLLRWLLVEAAQTASRYDPRLQRAYRRLAFRKGRPVAKVAMARKLAIRLYIMLRDKIDYQEFCRRGSHAGMLGDVALV

SEQ ID NO: 56244 - protein, 336 aa, unidentified
MIIPIRYNFGGKNKPMATKQDKIEFDQVIERGCGIDIHKSVLVATVQGKSIKTETRSYDAFTESIKQLRDWLKSLSITHVAMESTGVYWKPVYNILEEDFEIVLVNARDLKNIPGQKTDKKDSKRIAKLLLAGLLKGSFIPPKPTRELRDLTRYKRRIIQQIASEKNRIHKFLEDANIKLSTVVSNMSGAVATKIIDAIIEGEGEAEKLAKLRHGKMKASEEELVVALTGNLTDHHKFMLKMVKQSIKSKELLIDELDQQIDNKLKENQMVLDAELLSTIPGVDKDAAAYILSEIGNDMKRFPDEQHLASWSGLSPGNNESAGKKKAQGPHTETNG

SEQ ID NO: 56245 - protein, 320 aa, unidentified
MTHYIGIDVSKKVLNVFDGKKDLIFDNKENLCSLKKYLKKRYTDLTKLVILFEATGIYSYHLKAFCAEHMIKACIINPQTSHNFAKSLGTRSKTDTRDAHTIWAYHKLISDKDIRIPQVDPVLATLSSYLTSYQLALKQRLSLSNHLEGVKDKALYHLLKKEQERLCKLEHELLIRMDAYIKEYPGLNEDYRRLLSISGVGRKTAISLLVLFHTYPATNRKQITALLGLDPVQRQSGTSVHGRSRISKHGNQMMRKCLYMPTLVSIRYNQKIKVFYERLVSKHKPKKVAVIAAMRKLLLIAHAIYQNKTVYVPVEIISIL

SEQ ID NO: 56246 - protein, 411 aa, unidentified
MDVVHARCAGLDVHKATVVAGVRMPSPRCGERCGETMTFATTTRGLRELREWLIAHGVTHVALESTGVYWRPVYAVLEGVVEMILVNARHVKMVPGRKTDVRDCEWLAQLLECGLLRGSFVPPAGVRDLRDLTRLRKTLIRERSQHVNRVAKTLELAQLKLGCVVTDIMGKTGRAILQALSTGIDDPVRLADCAQGNLRKKRAALREALVGRLTPHYAFLLQQHLSLIDALDVHIATLDARIAEAMAPFAEAATLVQSMPGIAARAAQAIIAETGIDMSQFPTAAHFASWARLCPGNNESAGKRRPTTTGKGATWLRATLQEAAWAAVRSRKSYYRALYHRLRARRGPKKAIVAVQHAMVVALWHMLKHRVSHRDLGADYFDRQNTERIRRHHVRRLERLGYDVVLVEKAA

SEQ ID NO: 56247 - protein, 311 aa, unidentified
MTEIICGVDVSKRRLDVHVVPAGAFESFDNDAVGIAELAAFCRRHGVQLVVMEATGGYERTAFLLLWEAGIACGLTNPRNVRRYAEAMGILEKTDRIDAAVIARFAIAKGLKPTSPPTAGQQRLNALVARLRQVTDDLTVHKQRRSVAMNDEMLGSINEIIAVLRRQARTLEGEIASLIDDDPLWSHLDAALRTKGIANRTVARMLAELPEIGIYSNKAVVKLAGLAPLAHDSGAKAGKRHIRGGRAGIRSILFLVAGIVCRFDETLAAFHRKLTAAGKPKMVVRIALARKLLVRLNARAREAREQYALAT

SEQ ID NO: 56248 - protein, 408 aa, unidentified
MTVVGIDVSKGKSMVAAMKPGGELVAAPYEVRHSDIELSHLALDVLCMEPDTRVVMEATGRYHEPVAAQLHSEGIFVSILNPLLIKQSGAGSLRKVKSDPKDALKIAKYGLDNWSTLREYTPMEAIRQQLKLCARQCDLYSKNIVMLTNNLISLSDKTFPGVNELFSSPEKADGHLKWVDFYRTFWHCDCINRMSPDAFGERYKKWCKRKGYHFSADAADALYAASCGLYTTLPRDNNAKLLISVAADQLIALRENQSKLEAEMLNLCKQLPEYETVMAMYGVGKSTGPHLMAELGDVRRFPHRSSIVAFAGVDPGVVGSGKMQLSSVATSKRGSPQLRKALFQVVSTYVKCKPESEVVYQFYTKKRDEGKPFFVCTTAAANKFLRIYYARVKECLNASESATQVEEG

SEQ ID NO: 56249 - protein, 376 aa, unidentified
MVRPCSCPASDKLARGAKTRSTPSQTPSTAIAVIGIDIGKNSFHVVGHDTRGAVVLRQKWSRGQVEARLANMPPCLIGMEACVGAHHLSRKLASLGHDARLMPAKYVRPYSKGPKNDFNDAEAIAEAVQRPTMKFVATKTAEQLDLQALHRVRERLVSQRTGIINQIRAFMLERGIAVRQGIGFLRTELPTILATRTDALSPRMLCVIEELAGDWRRLDQRIDSLSGEIEALARQDQACSRLMTVSGIGPIISSAMVAAIGTGDVFSKGRDFGAWLGLVPKQISTGDRTILGKISRRGNRYLRVLFVQAAWVVLVRIKNWERYGLRSWIEAAKKRLHHNVLAIALANKLARIAWAVLAKGRAFELTRTNDAGVRPA

SEQ ID NO: 56250 - protein, 466 aa, unidentified
MAKRTQKSTSKTRSKQAGRAKLKPQDWTLGLTVVHPKAAAVDVGNAEHWVAVPPHMDPEPVRQFRCFTGDLLALADWLQQLGIETVALQSTGVYWIALHDILSERGIRVFVANARETQNLPGRKTDIQECQWLLKLHVYGLLRNSFRPEKKILGMRTYWRQRQQHIGDAARCIQHMQKALTQMNVQLANVISDISGWTGQAIVAAILQGERDPRKLAELRDPGIQASEEEIAASLIGNWQEDLLFVLRQEFEGYQALQRKIAECDAQLKKHYQTMEDKADPGQLPPCPREKRPHGNVPEGFDLRRELYRTTGVDLTAIDGINVLTAQTVISEVGYDMRRFETEAQFVSFLNLSPNNKISGGKIIGREKRKALNRAGLALRFAATSLLRSQTYLGAQYRRLRTKLGTPKAKKAMANKLARIVYRMLKYGEAYVDKGREYYEQKYRQIQIRLLVRKAAELGFQLTESA

SEQ ID NO: 56251 - protein, 389 aa, unidentified
MCLNAYIGIDMAKDKFDYCAMDRDLNVLCTGNNCSNSIDEFRKFSDVLTKLNGSDMALKIGMESTGIYHVLLYNHLRKEGFSVRILNGLEVRGMKKSRVRKTSNDSIDAQSIARYLMVTEGKESFQFPEDLENLRELVTAYDMLTCKIRTTKNNIIRAMDVLFRGLSNLISINANTTDLLEKYRTAEDFMNADQNELMKYLTKRKTAGIIEAAKSAPEPGNNKQALEIEMSSLIRILNVLTDEKMKIEESMKRELESHDHVIKSIPGIGSINGSIILGKIGDIKRFENAEKLVAFAGIDPVIKESGKMRLQKSISKRGDPLLRSAIYMSTIVAVRCNPVISEFYERKVGGGMPKQKALVAASRKQCHIIWSVWHNNKPFEIPEKFKSTD

SEQ ID NO: 56252 - protein, 436 aa, unidentified
MEEAGEEPLFAERVAGIDIGKTAVMVTIRVPSDARRGRRQQESREFRAVRKDLLALADWLRCWQVTKVGMEATGDYWKPVYFLLEREGFDCALYHAAQVKALPGRPKTDKLDSVWLAKITEGGLLPSSFVPPEDIRRLRTHTRYRRHLIQARTAEKERCEKLLEDAHLKLSSVIRDIHGVSGRDMLTAIIAGERRATVLAQLARGRMRGKIRELEEALDCSFFTQEHAFILAMMLENIDHLTAQVSVLSAKIEVLCEPYARQIAQLDAIPGFGIITAQDIIAETGVDMTVFATAGHLCSWARQAPQVSQSAGKRKGKNATGRGNPYIGAALGEAAIGAGRTQTFLGAKYRRLVRHMPKKKAQGAVSRSQLVICHALLSDPDAVYEDLGTDYYERKANIRRRARDHIRGLERLGYKVTIEDLSPDPETGELPVTQAS

SEQ ID NO: 56253 - protein, 345 aa, unidentified
MKKGITIGMDLGDKKHQVCILDKTGKIIAEEEVTGTRAAVTQFFKQYREAVVAMETGTHSRWVSQIAEAEGLNVLVGNARKLRMIWQSRQKSDTRDAVMLARIARMDPALLYPIRHRGEQVQMDLEIIRARDLLVRERTRMVTHVRSVVKSMGERLSPSSAASFGHKAKMPEALNEAMKPMLEMIRELTKKIRGYDLMIKEAATEKYPATERLSQVGGVGPLTALAYVLTLEEPQRFAKSRMVGAYLGLVPRLDQSGQTDKQLRITKHGDGYLRRLLVGSAHYILGPFGPDCDLRTFGLKLMQRGGKNAKKRAVVALARKLAVLLHALWRSGQQYEPKRKQPLAA

SEQ ID NO: 56254 - protein, 289 aa, unidentified
MFIIGIDPHRGSHTATVLDGAEEVLDELRVTADGRQRDRLLDWAAPFAPRLWAVEGATGTGALLAQQLVAAGERVVDVPPTLSARVRLLDSGRSDKTDSHDARSAAVVALRHQSLRQVQAQDHLAVLRLLAKRHHDLIAARTRAVCRLHTTLCYLAEGHFPQRMTTSQGAAILAGIRPRDAVSIERKALARDLLAEMRRADRDIAELRARIKTAVAASGSTVTEIHGVGPVVAAYLLGHTGQISRFPSAGHYARYNGTAPSKPRADRPSGTGSTPAGTASSTTPSTWPR

SEQ ID NO: 56255 - protein, 351 aa, unidentified
MMSLMRKAERPEHMNPRELYIGVDVHEKESQVAVYKLDGTLIEEKRLPTEKLPAYIASHPGEKHVALEAIGFIYPIHDALAEVGCDVAVANPHNIQLIAKTRIKHDKVDARVLGELLRTNFFPRSYIPDAETREKRLLVKDRVKYGVRRADLKNTVKWLLKRRGIKAKSPFSREGRERLRSLGLREVEVRLRELELVDTIIMELDRRIRFTALRDHGARLLDTIPGVGPYTALYLSTALHGVERFPSSKHACAHVGLVPSLHQSGDKTYMGHITRQGDKWLRRNLVECARWSVRKDPHLKEFYLRVTHRKGRKKALVAVARKLVSYAYWMLKRNQTYEELCPWKTDWGVSP

SEQ ID NO: 56256 - protein, 331 aa, unidentified
MNYPDKEYSVGLDIHEEEFYGNIMNKEGQEITEGPVKYSEQGLQNFLGFLPSTDVVIAIEACGISRAVYKLLTDMGYEVVIANPKKTHDIAGKNKTDRIDAKTLANLLRTKYLPTIYVPDNEILKLRDLSRHRVQLVRTKTRLQLMIRSNLVRNGKKPSGNWNKKTIEELKEMGPMINNFVEIMERTNEQIKQVVREIKRIAHNKHLTKLLMTIPGIGEISAILILGEIGDIKRFDNPKSLVRYAGLCPGVYQSGKKSRDTIENANNKWLKWIMTECGGIGAKYDENYMKHYFRVKKRKGFKVARRSVARKMIIDIWHILTKEEPFNKSGS

SEQ ID NO: 56257 - protein, 324 aa, unidentified
MYLGLDVSKNTLDCCLNKDGFFYACKISNNQKGFEKLKVWLDGHGCDETLHCCCEATGNYYEAAAEYLAAHYKMSVENPRKIKAYTVSELKRSKNDKQDAKTIAEFCEEKSRKLKTWKPKNQTEKELQSITRYIARLKQQKASETVKRQTASDNIKDLIDETIDYLGRKIKEAEGRLKTYINKNPELKQKADNLTTIPGIGIQTAAIIMAALSGNNDFKTAKQFTAYLGLDPAEYKSGTSVKGKDRISKVGDCITRAALFSPALVAYRIGTFPRLVANMRQKGKHIMQILTAIMRKLAVVAYTLHKTDTTFEKQRHTRIQQKAA

SEQ ID NO: 56258 - protein, 444 aa, unidentified
MARKSKKKPLKIVHPHCAGVDIGSREHWVAVDPDLCDKPVRPFSSFTDDLEAIATWLTLMGVEIVAMEATGVYWIPLYELLDARGFQVNLVNSRATRQVTGRKSDVLDCQWIWQLMSYGLLKGAFRPAGEVCALRSSVRQRATKVQEQSRCIQHMQKSLTQMNIQLDNVVSNLVGKTGLAILREIVAGERDPYKLAALRDRRLHATEEMVARSLHGNWRKEHLFTLAQALSHYDFIETQIAECDQAIGEALKFLPSLTEETATAVKPMHSPHRTTEEQRQLHQALNEVMGVDLTAVPTLGVDTILVLAGEIGPDLSRFPTCRHFCAWLGLAPPTRISGGKNLSGPKHKVFNRAGQALRQAAVNARRSNTFIGASHRARLAKMDGAKAVKATAHQLARLIYAMMTKGQGYVERGMEAFEARSRERQVRAVLRKATRLGLDIAPAN

SEQ ID NO: 56259 - protein, 355 aa, unidentified
MNRTIKYVGLDVHQATTVTTVREETGRVIARTILPTEAAPIVDWFRGMRGSIHVAFEDGTQAQWLHDLLVPVVDRVLVCNRRGQSTQGNKGDQPDADELSELLRCGRLRAVYHGSRDRATLKELARTYTNLVEDSTRVMQRLKALFRARGIKTPGTAVYRAAQRRTWLHQLSAAGVRFRAETLYTELEVLQQLRPKAKAAMLTEAKRDPAWAVLRTIPYLGPVRVALLLATLQTPWRFRTKRHLWAYAGLAVVTRTSAEYELEGQRAVRRRRRFVQTRGLNRNHNRVVKDVFKGAATAASVRSGALREWYQELLNRGMREELARVTLARKLAALTLRLWKRGGRYDPTQLTVQAT

SEQ ID NO: 56260 - protein, 351 aa, unidentified
MIIIGVDYHPSVQQIAYVDTETGETCERRLNHSDGEAEHFYRALERRQVSVRVGIEATGHARWFERLLAELKFELWIGNAAEIKAARVRKQKTDRQDALLLLKLLVEDRFPRLWVPSPENRDLRQLIWHRHRLVQMRTRAMNQIQATAMNEGVRRKKALWSKSGRQQLESLLLAPWATRRRQDLLELVDRLNGTLAEFTTAIEQEAHKRPEVLRLMTHPGVGPITALAFVLVIGSPDRFACGKQIGSYLGLIPCEDSSANRQRLGHITKQGSSLVRFLLAESAQAAVRWDSDWRRRYAHLSMRRDRRIAKVAMARRLAISLYWMWRKGYDYQQSLKFGSHAGEPGYRHGVK

SEQ ID NO: 56261 - protein, 390 aa, unidentified
MLRKNIVQTLDAATSWKVFGLDLAKHDLAVVAIPADGSEVQYVKRYSYADFLEFSAQIPSATMVFEPGNGANHFALRLQAQGHTPKMVSGASVKSWITLHMSGQKTDLNDAYALARLSEDPDLKTVRIKSVDQNRLQSLQAMRKQLVEQRTKTIVSIKGIFQCWGILFKKDSRSLKKFKEAANNNKELLGEEVVEAMILQIDRIADLDKDIKHVEELLKKVTMQDPRAQPMLDIPCVGLQTVSRLCAIMGDIKDFETPRSFVAFIGLVPKNMISGNKTTTPSGYEQVGQGKVNRRGDKMARSLIIQCASSMYMNFHKDNFPECALKDWIQKQKDAHKPYGKIMVSLASKLLRIIYAVLKHGEAFSYEKAGISRSALAALKAAQPAEVGNA

SEQ ID NO: 56262 - protein, 394 aa, unidentified
MYFVGIDSSKYKHDCFIVTEAGEVIKDTFTFDNTRSGFDQFFSILDGLGPKNEIKIGLEATGHYMNNLMKHLSVKGYSFILLNPIIVSRFRHSETLRRTKTDKVDAKLIAQVIASKDFSSYPLQAYHFPDLKTLTRLRDRLIKQRSLYLVMLTNQLDLSFPEFKEFFDGRLKSKTAQFILTKYGISSRIANMNSQSFELLRKVSHGKFSYAKFAKLKELAKNTIGCSSEIDETLFALTINLYQSIDEAITEVESKIIEIMEKLDSPTASIPGIGIMSAATIIAEYGDVSRFANDGQMLAYAGLDCGRYQSGTSDFPGRMVKHGSGYLRQVLMNVAETCMIHVPSFYDYYLKKRNEGKSHRVVLSHIARKLVRMIYKLETSRTHFDLSVFNSQHQ

SEQ ID NO: 56263 - protein, 345 aa, unidentified
MPIVGGLDIHRKQITFDYLDTGTGEVRRGQVSPADREHLRAWLARFTGTGDVAFAVEGCTGWRYVAEELAAAGIAVHLAEPADTAFARGRKRHAKTDKTDCRHLRTLLAEGRLPECWIPPGRILECRAMLETYHDLRREHTAWVQRIHAVLFHQGAPALGGALRGEPGLAALREVSAVHLSPAGQLQVATALEVLEALEARMGELRHQLLDAARHLAGAKILAARLYGVGPFAALAITCWLGGKDRFSSSRQAVRFAGLDVTVYSSDRKGPPGKLSRQGPPVLRWALYEAGKTHARASAPDHRYYAAVKDRCNGKRAALSEARKLLRQAHHILAELGDDALAPVA

SEQ ID NO: 56264 - protein, 366 aa, unidentified
MKKQAKQAIRLKKLCNEVTRILNLGLDEHYWQVTVAMQEDGGRIKVVGKMSHEAFLGWVKKKVAEGWEIRSCYEAGACGYWLHRELEKLGVKNLVVTPRAMGKTGQQQKTDKRDAVELCDTLDRYLRGQHRALSVVKVPTPEEEAKRALIRHHRQIMKDRCRCEARGKGLLCAQGIRVRGCWWKDQTWQELSTDPRLKDWLKQQLAHWRSQILSAQENQLSLREEIRALAPALLPKGVGAYSAAVLHYELRGFERFKNRRQISSITGLCPGVHQSNGHGKEGSINRCGIGAVRWVLVEMVWRLMIWQPQYPPVRRLAAGLVKSRRAKKRLVVEAARRLAIDLWRLSTGQTTPEKLGLIMQDHSQSH

SEQ ID NO: 56265 - protein, 436 aa, unidentified
MNDDVMIAVDPHKAHNTLAVMDRVSRVVVDSGEFANSDAGYVEMMRFARRWRCRRCAVEGCHGAGRSLAQRLVVDGEVVVDVPAKLAARIRVFSQGHGRKTDRDDANSIALAALDGSGVSTVRRDSSLDSLRLWCDRREELVAARTRAVCRLHRLLAELTPGGARRELSAAMAASLLGRIRPRHEVAKVRKALALSYVEEIRRIDGEIKAVRGRIGDLVDDSGTTLTELYGIGPVVAGRILAEVGDIHRFKSKDHFATYNGTAPIDVSSGEQQRHRLSRAGNRRLNYALYIMAVTQIRNPGTPGRVYYERKRGEGKTGKEALRCLKRRLSDAVYRQLIADAGKLAVCGSPTTAKPTPPTSTSPSRPSRPATPPRPRTRRPVSTRSSRSTGKTTFSSASRSSTPTSSSPKHSSTRPNTSNRRQKPARAWQRGAVTSD

SEQ ID NO: 56266 - protein, 357 aa, unidentified
MPMLEGVVDGVIGVDTHKHTLTAAAVDPVGAVLDQRTDRAEPAGYQRLLTFGRTRVPGRRVWALEGTGSYGAGLAVFLAGHGEQVVEIDRPARPARRSGAKSDLLDAARAAREALAREHLASPRARGTREALRVLLTCRHGAVTARTATINQLKALLVSAPAQLRSQLASVDAGELVGVCARLRGHPTRPIEHTATVRALRSTARRILALQAEVDEVGEQLGRLVAATMPALLEVVGIGPVVAAQLLVSWSHPGRLGSEAAFAALAGAAPIPASSGKTVRYRLNRSGDRQLNRALHTIVLARRAHHPETRAYVARRTTQGKTSKEINRCLKRALARRLYKLLEATTHADQINRLATT

SEQ ID NO: 56267 - protein, 338 aa, unidentified
MSKYSGIDLHSNNCVVAVIDDDDKVCCQKRVPNELERIVALLEPHRDDLVGVVVESTFNWYWLVDGLIEHGFPVKLANTAAIAQYSGMKYSGDEHDARHLAHLLRLKLLRFGHIFPPEWRAARDLARKRLQMVQTRTEHILALETLYARQTGKSIKSNAVKQLTMEQVAQWEWLTDAAVAAQANLAMVQAADVVIATLEQQLRQRVKLQPDYAILRSVPGIGDILSTVIMLETGPVERFTSAGNYASYARCVSSTRASNGKKKGEGNRKNGNAYLAWAFVEAAHFALRFNASAKRFYDRKKARTNGAVATKALAHKIARACYHMLKEQTVFDEKRCFT

SEQ ID NO: 56268 - protein, 364 aa, unidentified
MHSINNIELSSLEETRCQFNGGTGAIKLGIDVHQDFYVVVEQVGGSNPKPPQRFAKEAFLHWAARLKQKSSAEVYAVYEACGFGFSLQRKLSALWINCYVVCPQKLDEQNRRVKTDGLDAKALCLKLDRFVQGNRDALAIVRVPTEEEEQLRAIHRQREQLVKARKQLEAQGRSLMVNHGVEPVQNWWKPRTFAALPAPQWMKELLANSQPILVALQQKISALTVQLQSAASPDQPRGLGKMTSVLIDREIGDWNRFNNRRQIASYTGLCPGEYSSGNTRLQSCVTKHGNPRLRAALVELAWRLVRFQRDCKAVRKWRQILAKGALATGAARKKAIVAVARQLAVDLWRIKTGRLSAEELGLIN

SEQ ID NO: 56269 - protein, 347 aa, unidentified
MAAVMIGVDPHKGSHTAVAISPAEERLGELRVRACAAQAQRLLAWAAAWPQRTWAIEGARGLGHLLAQQLLAAGEQVVDVQPKLGARVRLLATGAVNKNDPNDARSVAIAALRSPAQRQVQPDDHAAVLKVWAKRHRDLGRTRTQVVCRLHAVLCELVPGGVSKAITAGQAARLLESITPAGAVEAARCELAAAFLDDLRRIDAQLREAKKKLDAAVRASGTSVTGIFGVGPVVAATVIGAVRNVSRFPDRDHFAAYNGTAPIEVSSGPRKIYRLSRRGNRRLNHVIHMAAVTQIRYRHSEGRAYYERKLAEGKTPKEALRALKRRISDAIFARLQADARQAATGPR

SEQ ID NO: 56270 - protein, 335 aa, unidentified
MKEITTVGVDLAKSVFTVHGVDGMGRPVLRKTVRREKLMELVAGLPPCLIGMEACGGAHEWARRFEGCGHRVGIMMARFVAPYRKSSKNDGNDAEAICEAVARPNMRFVPVKSAEQQAVLSLHRVRQGFIEQRTATLNRIRGLLAEFGIVLPQRADQVRRAAMIAAEELPVLARAAVADLRGHLAYLDDWIGRYEQQLVALAKQHQPARRIQQVSGVGPLTASAITASIASGHEFANGRQFAAWLGLVPRQYSTGGKARLGRITKRGDAYLRTLLMLGARAVLQSAAQKTDRLSRWAQALRARRGYHRAIVAIAAKNARIIWALLANNREFALPV

SEQ ID NO: 56271 - protein, 427 aa, unidentified
MPYHIAGIDVHKKMLAVVVANVEGEGDYRFERHKVGTSPGELRALAGWLVEREVEEVVMESTAQYWRPVWEALELHWRPKRRTRDGASPISGTLHLAQAQSNRGAGGRKKDFPDAERLVKRLVAQELTLSFVPDAEQRLWRTVMRRKYQITRSRVQLHNRLESFLEEAHIKVSSVVSDLLGTSARRMLHALAEGETDPAALAALADQRLRATPDQLRDVFGACADLHPVYRRLVKLTLEELRVIEDHLAQLDQQMADLLGQHHDVVHRLAEVPGLGVDSAQQIIAEVGAAAATFPSSKHLASWMGACPGSEESAGTNYSHRCPKGNRQMRRVLNQAANAAVKAKGTIFAIVYRRLVPRLGHAQAIGVIAHRLCRLIWKILHQGIRYEERGPAVSEQAKKARARKMIRELRSLGYSVELLPAGSISPA

SEQ ID NO: 56272 - protein, 406 aa, unidentified
MLNAVGIDVSKRRSTVAVLQPGGVIVHKPFDVPHKSRDLHDLAQYLGSLEGDTKVVMESTGRYHEPIRNVLSEAGFFVCTVNPHLIKNYGNNTIRKVKTDSADAKKIARYTLDNWAELREYTSMDTTRTQLKTLNSQFSFFMKQKTAAKTNLIALLDTTYPGVNKLFDSPVRADGSEKWVDFAYSFWHVDCVRKAGITAFTDRYKRFCKHRGYEFQENKANTIYKNSKNLIATLPKEAVYKELIQESIRQLNLLSENVEHLRKMMNELASTLPEYHTVMSMYGVGSTFGPQLMAEIGDISKFQHREALTAYAGVDPGKNDSGQEVHNSSHASKCGPSRLRHTLFQIMTTMLQNGVKENDAVSSFLFKKKAENKPYLVYMTAGANKFLRVYYGKVKECLRNQEEAEQ

SEQ ID NO: 56273 - protein, 329 aa, unidentified
MTLAQLGIDIAKHSFEVALIQGEKLRHKTFENAPAGFDALTAWLTRQGVSQGHAVMEATGTYGEDLALYLYHAGHRVSAVNPARIKAFGQSELQRNKNDRMDAASIARFAVKHDPEAWTPPPEELRQLQGLVRHLDDLIAQHSQWQQRLTESRPVPAVQTSLQTLVAVVEDQMQQVQQQIRDHVTQHPELARHQALLTSIPGIGEITATRLLAEMAPLERFQSARQAAAYTGLTPKHHESGSSVRGRTRLSKIGNARVRKALYWPAIAALRCNPLICAFGQRLRARGKAKMVVIGAAMRKLVHLAYGVLKTGKPFDEQHAMGAVPTHAR

SEQ ID NO: 56274 - protein, 449 aa, unidentified
MKILALDLGKFNTMCCFFDTKTRKHSFLNAPTERNYLNTLFKKHKIDLVVMEACGPSGWINDLAISHGLKTLVCSTNEDAWKWSNVKRKTDKDDALKLARMAAMNELKAVHMPSETHREFRSLVKYRKTLDHRINKMKCTIRAWFVNHGISIDIGEKAWHSGRELINSFRKPLIQCEPNELWKGELDIELTQLDALTTQLDIVVKKLEAIGKNDPRIQRIRTIPGVGPRTAEILVACIDDPHRFTNGRQVSAYFGLVPRQYQSGETDRNGRITKRGNPLARTILVECAWASLRYNEWAKGVYDRICGKQKTRKKKAAVALARKIAVLAWAMLRDEKNWEPKHMIQVTESFGKMKRELKQSLQSMKPKENSDQRKSRLRREAREAKAVAERPKRSVRTATARRSRSKTTVVPTATPPTNTSKRATPKPTTRTNLKPKPKPRRAGKLVSAV

SEQ ID NO: 56275 - protein, 345 aa, unidentified
MNKISVIGLDLAKNVFQVHGIDIDGEIVVRKQLKRPQLHQFFARLEPCLIGMEACGGAHYWSRELTGLGHTVRVMAPVFVKPYLKTNKNDRNDAEAICEAVQRPSMRFVQPKTPEQQAVLHLHHGRRLLVRQRVALNNHMRGVLSEYGIVLPQGGKVISRRLPALLEDANNALPMLARHLLAELKEEYDQLIERIEHIEARIKAWHANNSVSQRLASIPGIGILTATALAATIGEGQDFSNGRQLAAYLGLVPRQASSGGKARLLGISKRGDGYLRGLLIHGARAVIYHIQRRLRAGQPGGNPWVEQLLLHRHPNKVAVALANKMARIAWVLLVRNETWCPAHPV

SEQ ID NO: 56276 - protein, 412 aa, unidentified
MLKVINPVVCGLDVHKDSVKACLLKAIDSQMYQDTIKTFTTMTSDLERLKAWLLDEGCNKAVMESSGKHWIPIHNILEDSVSIVLANARHVKNLPGRKTDTNDARWLAKLLALGLVEGSFIPSKYIRELRDLTRRRQKLIYMRSSERSRLLDVLRTSNIMLSSVASDVFGVSGMSMLNALISDNKEQSQNAEDIANLAKRKLRQKIPQLVEALNGVLDKHKKDLIKEILEHLKFIDSQIFKLEQMIDEKCEPYNEFVNIIDSHPGIDKTSAQAILAEIGPDMKVFHSEDHLASWCGLSPGSNESAGKKKSTRTKEGNNYIKTILCQCAHAAANTKNTYIAARHWSIKARRGPQKAAVATARKMITTIYHMVCNNTYYREAGPDVYKEARSKNKTRRMIKSLHALGFEVIEKV

SEQ ID NO: 56277 - protein, 398 aa, unidentified
MISVGIDVSKEKSTVCVLKPYGEIVMKPKDVQHTEPELSKLVHELQKLQEEVRVVMEATGAYHLPILSYLKENGFFVALVNPLEMKRYRCQGIRNAKTDKIDSKIIANYGLDFWYHLSDFKGSEQHYLELRLLGRQYRQYMKFRVENVLALANMLDQTMPGIKTLLDDWNKYTGKDKLADFVYEYWHFDNITKKSEKQFLESYSKWTKKKGYRQNESKAKQIYALAKEGIPTLPSSTPSTKMLVQESVKIVREVDDTLTQILTRMSEIAKMLPEYQVVHDMGGVGDALAARLIGEIGDVRRFHNAKSLIAYAGIDAPPYQSGKFMGTDRHISKRGSSTLRKVGFETMTCLVMQKKHGDPVYDFIKKKQDEGKACKVAKIAGFNKFLRIYYARVMEVYQ

SEQ ID NO: 56278 - protein, 358 aa, unidentified
MNNLQTENNEVILGVDTHLDVHVGAVINSSGNLLGTRAVSVSSHGYLDLLEWAESLGKLKQAGVEGTGTYGAGLCRFLTSRGIVIIEVNRPDRSNRRRQGKSDPLNAGNAARAVHSGTATATPKKQHGACEAIRIISVARRSAVKAKTQAMNQIRGILVSGPQDIRELVWKTKPHDCAKACIEMISSDSSDLLESMTETLKLLGQRWLILTDELALLDKKLDKLTNEHCKQLRTRMGVGPYTAGILVTVAGDNPERLRNEAALAALCGVNPLPLPASSGKTIRHRLNRGGNREANNALWTIALVRARSDPRTRLYVARRTAEGLTTKEIYRCLKRYIVRELYPLILSDLKRINFSGLT

SEQ ID NO: 56279 - protein, 352 aa, unidentified
MKIIGCDFHPGFQQIAMLDVETKQRVKKKLHHASGEAEQFYRSLQGQRVRVGIEACGNTRWFERLLQRWGHELVVGDAARIRAAAVRKQKNDERDADHLLQLLEIGKFPAIWVPSPEERDLRQLLLHRHKLVQMRTRIKNQLQHVALDQGLQKKRQLWTERGRQWLLELSLPRWTERRRSDLLVLLDGLEPAIAELSQAVEMAAQQDARVQLLRTHPGVGPITALAFVLVIGDVQRFAHSNQLTSYLGLIPSEDSSAGRRRLGAISKQGNTLLRTLLVEAGQSAARWDPQLKRAYQRCCHRKSHTGIGKVMVARKLAVRLYWMLRTNQPYPPARMQGSPSHPVSTREGSSIV

SEQ ID NO: 56280 - protein, 350 aa, unidentified
MSNLPLFVGVDYHQDQLQLCVVDSQGVVQQNRPFVNDAREVAKMLAGLGAVKAVALEACCGAAHFGEALLSFSPPGGFRVELAHPGYVARLKQSPDKTDFGDARLVADLLRVGYLPAVWLAPAPVRELRQLVNHRQRLVDQRRAMKLQIGAILREQRIKPEGSRWSKPWRSAVKDHAALSTQGRWIVDDLLAELEHVTKRIREVEKRLREATADNALVKKLRSTIEGVGEVTSWMLAAWIGDFGRFKNGKQLSRYCGLSPRNASSGKVQADAGLINAANKSLRAVLIQAAHRLMRTNQRWKTLADRMLKKGKAKCVVTAAIANRWVRSMHHRMRADRPAGALPQENLLAD

SEQ ID NO: 56281 - protein, 340 aa, unidentified
MPRWVGRAVGLDVYREFCEVAICEDGRVRSAGRVPATPEGVKSLADSLVSSDRVALEVTGGCWEVTGILEPRWNRVVVVSPDDTGIVSGRAKTDRLDARALASLLWRGELEAVWVPDERCRILRRRLARREQLVRSRTRAKDEIHACLQRRLQPRPPCSDLFGVRGRRWLAGLGLPAEERESVDAALRHVEFLDRELAAVDRPIARQALFWPEIRRLMSVPGVNLICAASFIAAVGNANRFMTSRKLVAYLGLDPRVKRSGEGPARSGRISKRGSPAARWALVETCWTAVLQPGPLRPFYVRTKNRRGHGKAVAATARKLAVLCWRMLTRRRTTPTSSRR

SEQ ID NO: 56282 - protein, 388 aa, unidentified
MLTHKIEAAAAIGQDGTISLAFELSKSRWLVARLLPGSSKISRFRLDGGDTAGLLELLTEARRKAAQLGFPKARVVSCYEAGYDGFWLHRWLRDHGVDNRVLDPSSIEVPRRARRAKTDKIDLDKLMRVQLALDRGEPRVCSVVHVPTVAQEDAKRISRERSFLLRERISHTNRIKGLLHCQGLRDLNPLALNFLAGLDELVTPDGHRLSPGLLAELHREHARLALVVTQIAKLEAAARTAAEQALPGTPAAKIAMLQRLKSMGSTWSTLLVNEVFYRDFQNRRQVGAYLGLVGTPYNSGQSVREQGISRAGNARARNAALEFAWLWVRNQPNSALTLWFLNRVGDTKGGFRKSAITALARKLMIALWRYLETGLVPTGAVLRAKPTR

SEQ ID NO: 56283 - protein, 412 aa, unidentified
MKDLLEISCGLDVHKEKIVACILTGPLGKPTRSEIREFSTLIPDMIALRNWIVSKNCHHVAMESTGIYWMPIYEILEDAFSGDITLLVVNARHMKNVPGKKTDMRDSEWISTLLRAGLLNGSFIPEKRIREFRDLNRYRKSVIRDITSQKNRIEKFLQSSGFRLSSFISDIFGASGRNIILHLIEHGQIDKTALDSCLKTKTRNRIDEILMSVNGTLSEHQKAFLRILMTHYDSLKKHLAEIETSLEEDMAPFALQVEQLNSIYGISTTASCAIIAEIGIDMKPFKTAEHICSWAGLCPGNNESAGKRKNTSVTKGNPYIKSMLCEIAWVIAGKRNTYLSAWYWRIKQKKGAKKAIVALARKLLVIIYTMLKQGTLFDESCFETRRKHCEQKQLSRYIRELEKHGYHVEAQS

SEQ ID NO: 56284 - protein, 416 aa, unidentified
MLFIGDDWAEDHHDVEIEDEDGRRLTRARLPEGMEGIARLHALVAEHAPLSWAELPPEQAARQVVVGIETDRGPWVTALRAAGYQVFAINPLSAARYRQRHSTSGAKSDAGDAHVLAEIVRLDRDHHRPIAGDSDLADAVKLLARAHQTAIWERTRHVLRLRSVLREYFPAALEAFEDLAAKDTLTLLGRAPDPARAAKLTRSQLVAALRADHRHHVEAKAAILLTVLRAPALRQPATTEGAYAAIVAGQVRVITALNEQIAQLQQVVAEHFGRHPAAEIYLSQPGFGVVLASRVLGEFGDDKTRFTDARARKNYSGQSPITRASGKKTVVLARYATNHRLGAALHLQAFAALGASPGARAYYDALRARNIGHHAALRQLGNRLVGILHGCLKTGTAYDEDTAWQHHRSDTNNAAA

SEQ ID NO: 56285 - protein, 320 aa, unidentified
MMAQNEVIVVGIDVAKDKVDACIRSLSLRQTCPSTAQGHRKLMAWLRKHKVTKAVMEASGGYERAWAKVLREAGIEVRIVDPRRVRSFAQSAGRLAKNDAIDAEMIAWFAETFSEAPSQVHDAAREELQTLVKARLGLIDYRMRLVSQSEHAAPGLVQKAHARILKSLASEIAKLAAAICAKVRSTPDFAERAEIIESVPGLAGTSAANLVAGMPELGQVSDGIAAALIGAAPYDDDSGKRRGERHIKGGRRWVRNALYMPCVGAATQNNPVLKAYYQHLLAKGKEPKVALIACMRKLIVILNTMIARRQKWDSSRDAVS

SEQ ID NO: 56286 - protein, 374 aa, unidentified
MKILGAALQADGEYEVTVVTGLKHQMEKRSMDHFAGLDVSVKETNVCIVDDTGRIVREAKVASEPEALLQVLAKPTCHFKRIGLEAGPLSQWLFSALAEAGLPVICVETRHMRAALKAQINKTDRNDARGIAQMMRAGLYRPVHVKTLRSQKLRMLLTHRKLLQSKAIAIDNDLRGTLRNFGLKVGIVGTVKFEARIRDLVEDLPDLAVLVEPLLVVRRVLREQLGILHRRLLAIVRDDEVCRRLMTVPGVGPVVALTYRATVDVPARFKNSKAVGAVFGLTPSKYQSGESERSGAISRCGDEMMRVMLYEAAQVMLTRTNKWSWLKAWAVQIARRRGMKKAIVALARRLAVIMHRIWVDGTEFRWAREEAAAA

SEQ ID NO: 56287 - protein, 365 aa, unidentified
MDCDRIIALDLGKFKTVACVMDPATREHRFVTIAMSPTTVHDLLAAHATRSPQRTRVVFETCDTAGWVHDVCSTLGVSTLCTHGNGQAWQWRRVKRKTDRDDALKLARLALMDQLPAVHVPSPEQRQKRRLILHRRSVVSRRTSSRNAIRSIFNQQGLALVRGNKQWTRAGIEQLREHARPIADCEVIDLWRGRLQVELDLIEATDRQLKMIDAKLDALSAGDDRVKLLQTIKGVGPRTAEAVVLHLDDPHRFRSADEVANYAGLVPKQLESGQMSRYGHITRHGPALLRSMMVEAAWVVWRHNDWAQAFVAKISHGSKGRRKLAIVALARKLLTICWSMLKQNQPFRSPGSVRLPDCRPAALTT

SEQ ID NO: 56288 - protein, 348 aa, unidentified
MKKVMAGIDLHSNNLVIGIVDMDPKRVASRKLPCELSGVTKYLRAFKNRLEKVAVESTYNWYWLVDGLQAQGYPVVLANPAGMGQYSGIKHADDTNDAFFLAELLRLNILPLGHIYDAQLRPVRDLLRRRLTLVHHRTSQMLSFKSLYTRMTGQEMALRELKQLDMHQAQDLYEHPANQLIAGLQLKQIEQLSAAIERIEKAVLACARELPLYTRLTTLPGVGKILGMTVTMEVGDIKRFASPGEFASYCRTVAAERTSNQKKKGDNNAKCGNRYLAWAFVEAANFAKRYEEQCRRWYDRKAAKRGTIVATKALACKLAKAAWYVMAENTNYDAGRMFGQPSNSSMKS

SEQ ID NO: 56289 - protein, 380 aa, unidentified
MEYCTTIGADVSDRTTKICVMTKAKGGERRIVLETTCATTKAGFEEVFAKFDRSWPVAFETGTHCRWMDRLFREMGFKTIVGNPGKIPSITKSNTKNDRNDARELARLAIADPAMLHPVFLRDEVYQQMLRFHHARNVLISQRTQTINQIRGFAKSMGHRIECSSTEKFHDQGKALWPRELEECAWPLMGVLKTINLKIKAYDKLIARLAERPEFKAMVDRVRVVYGVGIIGSTAFIAAIGGRPDRFGHTRDIGAYLGMVPKQDQSGDSDRQLHITHAGAGIVRTALVECAGVAMMEKAKDTDLKLKGLRIAMRGGRIARKKAKVAVARGLAVTMLALLQHPEREYVPLSEEGMKGFERYRAEMEYLAMQKTSRTDKKVA

SEQ ID NO: 56290 - protein, 437 aa, unidentified
MNHLRFQTNRQLLGGKIVIGIDPAKASHQAAVVDATGAQQGSSFAFPASAAGYGETLWRHLARIVTVHRPEDVVFAIETSCNLWETLAFYLHGRGYTVVLISPLSTHHARPVMNLEFSHTDPKDAFLVATIAQRGAFHRYESFSPHTNAMHQLAITYDKLRQDLAHNRARIRSLLDRLFPEFLRVLEPDTETAMHLLKSYLFPDEFLHLDLSAESLRIEQISRRQLGRSTLEALQQQARRTIGVARQSHERLADRLTLDAYLALVETLQTQLDRVLHELIARSRELPQFARLTSLSGVGNCLGALFLAEVRNLSRYTHYKHIEKLAGLNLRLYQSGRYTGSRRLSRIGNPRLRWIIYKMTEETARRVPEVRIKYLRRQLKRRRHIKNVVAATPQLLQLIVSMERHQHPYQVRQENVEELQKLENQYAQLKAARKSAA

SEQ ID NO: 56291 - protein, 346 aa, unidentified
MEHYAGIDVSLELSSVCVVDAQGKIVKEAKVASEPEAVVAFFEALGFAVKRIGLEAGPLSHWLHAGLKEAGFETVLLETRHVKAALSAMTVKTDRKDARGLAQLLRMGWFQPVHAKSMASQEVRALLVGRKQLLGRLIDVELSIRGILRGFGLKVGSVTRKGFEARIRELVTGQATLERIAEAMLSARAALKAEYEKLHKAVLAIVREDPVCRRLMTVPSVGPLVAITYKSAMDDPSRIAKSKAAGALFGLTPKKYQSGEKDVTGGITRTGDEMVRTALYEAANVLLSRITRFSKLKRWGMDVAKRRGSKRAKVALARKIAVILHRMWIDGTTYRWAEAKPIAAQG

SEQ ID NO: 56292 - protein, 342 aa, unidentified
MNLPIRIGMDTSKSVFQLHGVDENEGVVVRRQFRRAEMIRYFERLPPVLVAIESCGSSHHWARLLQSFGHEVKLIPPQYVKAYVKRGKNDAADAEALCEAVTRPSMRFVPVKSRERQAACMLMTVRERLVSVKSQLSNAFRSYAAEFGIVGPAGRQNVTALIKRVLEDDSLPEMARDLFRLQAEEYAAVQARLAKIEAKLMKWHREDDVSRRIATIPGVGPIGSSMLSMKAPPPETFRSGRDFAAWLGLTPKDHSTGGRQRHGGITKAGDSVLRSTLIVGATALLRHIRKGRHKPTLWLASLLERKPPKLVAVALANKFARIAWRLMISGGVYNRPVAAMPI

SEQ ID NO: 56293 - protein, 354 aa, unidentified
MDRFLGLDAHSHSCTLGVVGPSGRRLGSRVVETNGAALVETVRSFSGRLHLCLEEGELSGWLHELLEPHVEEVVVTVPRPTKGRSKDDLRDAFSRAEELRRGAITTRVYKAPVHMMALKSAVRAYSMAVRDLSRAKNRLKAVCRSRGVLADSGIYDPTRRAKWLEQLPPAQRTLAEWLAKEHDALVPLRDEAERWLLEEAKAHPIIRKLATAPGMGPIRTAQMVAIVANPHRFRTRQQFWSYCGLAIVTRSSSDWKRDRTGQWVRAQVAQARGLTRQRHPVLKAIFKGAATTVITQMSTHPLHADYQRRLAAGIKPNLARLTLARQIAAAVLAMWKHQEVYDPERHKPVDKSAE

SEQ ID NO: 56294 - protein, 348 aa, unidentified
MKYYIGLDAHSTTSTFAVVDEIGQCVLRETVKTSEQSLVHVINRIHGERHMTFEESSISQWLFLQLKDKVDKLLICNPTYVAKKQGAKTDFRDALHLAQELRTNHLQPVFHDTSHWMEIRTTVSGYLDIVEEIVRFKNRLKAVFRAEAIQTDENSFYKNKSKVSYLKNPSAKFVAEKLFDQIEFLELEKEKYKEVFERNRKKYRPIRNLMTIPGISIIRANIIAAIVCQPARFKNKHKFWGYCMLVRHIQESGGKIYGNKRFFGRRELRNVFVGAAENAMRIDGELRDRYEALRAKGVVHKDAKLNLARQIAAIALCLLKNNDKYNQNYGDYLKERSKLRKELFDQTL

SEQ ID NO: 56295 - protein, 438 aa, unidentified
MSNKFIFNLDDLFISVGIDVGADFSWMSIALPNQQIIGKPYKILHNQMNSLATAVSKIKEAEELYSLESRIFLESTGIYHYPLFCYLRDKGFNCSVINPIITKNSTNINIRKVHNDRFDSKKAALVGLKPDLKVSLMPSDLALNCRNLCREYYDLMDNRSAYVNKLQGELRMAFPQYLGIFSKITANTSLTLLETYTSPSAFIEADPQEIIDTIKSTARFGVAYAASKYNAIIQAAHDANEFGYILDSNIKRIRLYISFIRKYDEEIKNILDAMHELIDANEETDFVKQIHLVETFKGAGFLSAVTLMGEIGNFSAFSKPKQLFAYFGLDPAVKQSGKFEGTKIQISKRGSAIARRAIHTLTLQSISTSRTGEAKNPVLRDYYLKKCESKPKLVAMGAVSHKVCNMIFAILRDNKPFEIITPQEHIQQYNAAKCDIAA

SEQ ID NO: 56296 - protein, 355 aa, unidentified
MNSEKYIGLDVHQATISVAVLDSTGKLVMESILETKATTILEFFAGLRGTLSVTFEEGTWAAWLYDLLKSHVAKLVVCNPRKNALLKDGNKSDRIDAHKLAELLYLNKLSSVYHGETGVRMLRELARSYLTIVKDLTRVMCRLKAVYRSWAIPCAGRDVYYTRHRAEWLGKIKEAGVRRRAERLYQQLDMLHYLRQQARRELLAESRKHAITVKLRQIPSLGPIRSALAVALIQTPHRFRTKRQLWAYSGLALETRTSAEYCYVKGGLRRSKKQISIRGLNKDHNHDLKGLFKGAATRASVLPGPFQDFYQRSLAKGIKPTMARLTLARKIAAITLTLWKKGENFDADKLKSQAA

SEQ ID NO: 56297 - protein, 424 aa, unidentified
MASHQFAAFVGIDWGDQKHAVCLRAEGVEVEHELAQKADEIDAWAAELRTRFGGRPVAVCLEQSRGPLIYALLKYEFLVLFPLNPLQATRYREALYPSGSKDDPLDARLLCLFVETHHSQLRAWQPDDEATRLLRLLAEDRRRFVDQRTAHKNQLRQRLKEFFPLVLELLRSGDLEDEWFLQLLIKFPSHAELRRASPRTLERMLPKHHRLSDDEPLDPRVAQIRAAVPLVTDGAVVKAGRLQVMELARLILRLNTSITEYDRELAVELARHPEAELFRSFPGAGAALLPRLAAAFGTNRERYVDAQELQQLSGIAPVQIRSGKSCSVRRRRACPKFLRQTFHEYADHSRKRSLWAKAYYRMLRGRGLRHNAAVRALAFKWMRILFRCWQTHTPYDEHRHLAQLRLKQSPLLQFLDLPIPAEQT

SEQ ID NO: 56298 - protein, 352 aa, unidentified
MNQSQTTAVPKLFIGMDVHKKSWTVHFKTDLFDNKTITIPTDPDVLINYVEKHFESHQVSCCYEAGCCGYWIARSLLKHGWEVKVVNPADVPRNNKQDWQKTDKIDSRNLCKHLSNDNLKGIFIPDEQQEQLRSLFRRRIHLARQLRTIKNHIKSQLLYFGIKLPEEFDNPNWSRDMKTWIANIKWKYNSAAETIKSRLKQLEFMWYEELHISNELRAYCRKHYKKDYYLYKSIPGIGGITASGILSELGDIRRFNRLDELAAIVGLVPGIYQSSDNRVNLGLTKRSNHQLRSLLVEASWVAVRRDMALQQYYRKHAHKEPNKAIIKVAHKLLSRMRAVIISGIPYQEGIIK

SEQ ID NO: 56299 - protein, 379 aa, unidentified
MKIITRNEKILYIGIDVHKDTYSLCSFDFHRNELSDEMTIKATTKAVIKYLEAIRKKHKEEILFACGYETGPTGYGLCRGLQKAGYGCVVMAPTTMSNPDGKRRVKTDRIDARAIARILAYKSYSQVHLPSEEMEALKEYTRARDAKKRMFKKAKQELLSFLLRNGKTYPESGNYWTEKFFKWIKTVQFSEKWMQEAFNEYLAEVYSLKHKIELMDAKIKEIAGLEIIKDKVDKLVCFSGIDVTTAVETVVEIHDFTRFATAAQFVSYLGLCPGEDSSGKTKNMLPLTKAGNKRVRALFCESAKAIKRTNPYGQKSKRILERQKNASPEIVAYADKATKRIRTKMRHLEERGKNYNVSSAAGARELACFVWGMMNGKIA

SEQ ID NO: 56300 - protein, 359 aa, unidentified
MQTQSNKIDFNGQNIYVGFDVHLKSWTVTIMTEKLTHKTFTQPPKPEALYQYLRKTFPGGIYHSAYEAGFCGYWIHNKLIKFGVNSMVVNPADIPTTGKEKVMKTDPRDSIKIARSLRNGELKPIYVPSLQTLEDRGLVRTRATLVKDLTRYKNRIKSFLYFHGIELPEAFSKSKSHWSNRFNKWLEDVEMTESSGKDSLNALLVQSHHLRASVLQVTRQIRELSKTDRYKMQLVLLCSIPGIGILTAMIILTEIETINRFSNLDQLCGFIGLVPSTNSSGDLEVIGEITPRGHSVLRTAIIESAWMAARLDPALNKCYHDYCRRMEPNKAIIRIARKLTSRIMFVLKNNQPYVCSVIK

SEQ ID NO: 56301 - protein, 411 aa, unidentified
MADGDRIAGIDVHKAMLAVVVVEATSQGCRCIERAKFGAMESELRRLGSWLAERRVREVVMESTAQYWKPVWMQLEGQFQLYLAQAQSNRAPRGRKGDFLDAERLARRHLARELILSFVPVAEQRLWRTMSRTKYQLRRERVLVQNQLESLLEEVRIKLSGCVSDLLGSSSRRILKALSSGERDAERLAAMADPGLRASRDQLTDALAQAGGLTGVHRQILGLFLERLDLIDAQIQTLDNSLAESMRQHQDAVRRLAEVPGLGPDSAQQIIAEVGPTAATFPSAPELAAWVGTAPGREESAGVSKSNRSPKGNRMMRRLLNQAANAAIRTKGSFFEKLYRRLVVRLGHNKTVWAVANRLCRLVWKILHQGARYIEHGNQPDPFKLKQRVQRMIRELKQLGYDVQPTAQIAD

SEQ ID NO: 56302 - protein, 424 aa, unidentified
MATQKKANRVRIDALADIYERCAGIDVHKESVTVCVIRPDATGAPAGEVVGYGTTTRELRQLSEYLQECGVTHVVMESTGVYWKPVWQILEEGGFHLVLANAKEVRNMPGRKTDQADAVWLATLLRKGLVKGSFIPPAQIRALRDLCRARVTLVRDRTRVVQRIEKVLEEANIKLDTVASDLMGVGPRHMLDELVGGETDATKLAELALGRMRSKIPQLVAALEGHFRPHQTFLLKELLQQFDYLSTKIERFEKQIEEYARPFEEQIVRLDAVPGIDRLSAAGILSETGVDMSKFPTPEQFCRWGTMAPGNHQSAGKQRHGKTGKGNRWLRGYLTQCAWAATHSKDSYFSAQYRRLIHRGKQRALVAVGHSILNAIWYILGRQTEYQELGGDFFEKQNLEGLKKAYRKKLERLGFKVTLEPIAA

SEQ ID NO: 56303 - protein, 358 aa, unidentified
MAVIEGVCRIVGGVDTHKDLHVAAIVDEQDRIIGTRSFATTRQGYRQMLAWMRSFGELQRIGIESTGSYGAGLLRFMQQAKVTVLEVTTPDKQDRRRRGKNDDLDAQNAAHAAFAGQRTVTPRSRDGMIESLRVLKACRKTAVSARRIALQMIHNTIVCAPDGLRDQLRRLTRMQLIRTLASWRPDLTAYRDLDSAYRIGLKSLARRYLELHDEIADLDAMIAAIVDELAPNLVARNSIGHTGAAQLLLTAGDNPERLRSEASFASLCGVSPVPASSGRTVRHRLNRGGDRAANSALHIIAIGRLRTDQRTKDYVARRLAEGHSKLDAIRALKRYLAREVFTLITQRRKEINATRIAA

SEQ ID NO: 56304 - protein, 353 aa, unidentified
MKRENAIKQSVGIDCGKIELVCSIGVMNHEFEEEIISNKAFKNTPDGFKKLKEWAKKLSDNSVEMIYVIEATGVYHERVSLYLYNEGCKICVMLPNKVKAFSQTLSVKTVNDKTSAQAIAYMGLEKKLDLWQPPHEVFNKLKQLTREREQLIEERTICKNQLHAEESGAWPNKGSIKRLKQRIWLLDKQVNEVESEIKEIVCQHQWLQEKLEYVCSIKGVALITAVTIVAETNGFNLIRNKKQLVSYAGLDVISKESGISVKGRSKISRKGNKYLRKALHFPALVAVRHNEQMKALYSRLVSKHGIKMKAAVAVQKKILELVYILWKKEELFDLEYFKNKGQQTSVATLCELA

SEQ ID NO: 56305 - protein, 328 aa, unidentified
MAKPITICAGIDTGKRKLDVALDGSKEQLQVENTAEGHKVLLRWLHQHRVKRVGIEASGGYEQPVVSELRRKHSVVVVFQPVQVRAYAKFQLQRAKNDKIDAALIAACTAAVRKIHAAPDPRLQPFAEQLTMIDQIGEDIARLKNRSESCRDAQINKLWKADIARLEKREKAALKALVTSIRKHPDLARRLDLINSVEGIGLPTAVAILVRLPEIGRITREQAAALAGLAPYDDDSGEHVGVRHIEGGRKRLRRALYTASLAASFRWNPQLIALYQRLTAAGKQHKRALVACARKLLIFANTVVARGTPWCGQPPAAKASPTTASSVS

SEQ ID NO: 56306 - protein, 410 aa, unidentified
MASAGLTCGVDWAEAHHDVALVDENGTVVARKRVSADLSGFTELLELIAEHGGDPSGTPVAIETDKNLLVVGLAAAGFTVFPINPKALSRYRERHGQSGAKSDPADAVTLAHVVRTDRHVHRPLPAISDQGLAVKALARQHQEAIWALHQTISRLRSVLMEFYPQAVKAFPKLQHHAATEILAAAPTPAAGQRLTRRRLESLLRRCGRRNDPCLVEQLLSDLRAPALRQPEPVEHALGITVEGLVRIVVTMRDVVDRLEAELAVAFDQHELAPILRSAPGLGPVLAARVLAEIGDDRARFATAAALRSFAGTAPVTRASGRSRYVKARKIRNKRLADACHWWAFATLTRSPGARAHYDRRRAAGDHHNAALRNLANKLLGRLWWCLHHHEPWDEAAAWLLPEPTPVAPAA

SEQ ID NO: 56307 - protein, 330 aa, unidentified
MKQYDHVFGVDVSKKTVDITHVINQQFTHRQFMNNDTGMEQLMEWFKEFAPEFEKTLFCMEATGLYCFTLTHFLASHSIDTWIEHAAQIKKATALARGKNDKVDSQRIAVYATKNLDRLRLWKPVNATLDKIRHLASLRERLVDTKKRLATPIKEFEDVGNLAMAKLLTKTIKSSLAAIDKDLKNIETKIIDVINEDDNLKLLYKLITSVVGIGFVTAINLIVHTNGFTMLKDTRKLACYCGVAPFEYSSGSSIRGRTKVHYMANKKLKCNLHMASLTAVKLDSDLKAYYERKVGEGKSKLSVLNAVKNKLLARIIAVVNKQELYVKKVA

SEQ ID NO: 56308 - protein, 362 aa, unidentified
MIGQRTSVGLDVHARSVVGRGLDVQTGDVLRARLTPAHEQIIGWLRSLPGPVKATYEAGPTGFGLARALQAAGIECVVAAPSRLLRPSGDRVKTDATDALHLAQLLAVGQVTAVAVPDEETEAARDLVRAREDARGDLMSARHRVTHLLLRQGIVYAGGAAWTGVHENWLRSQRFPRPALQWSYDAALAALVAAEDRRDRLDAAIAELAAASRFTPITDRLACLRGICTLTGFGLAVEIGDWSRLSPATIGAYLGLVPSEDSTGESRSQGGVTKTGNGHARRLLIEAAWHHRPPYRPSAQLRRRWQRVPGAVAAHAAKGNQRLHARWRSFDARHKRPVVANTAVARELAGWCWALAVMHPDQ

SEQ ID NO: 56309 - protein, 340 aa, unidentified
MQIAVLGVDLGKNSCSIVGLDDGGAVVLRRRMRREGVIKLAAKLKPCVVAMEACCGAHHLGRVLRALGHEVRLMSPEYVRPYVKSQKNDDRDAEAIAEAATRPTMRFVALKSEEQLDMQTLHRARDRLVGERTALINQLRAVLLERGITVAQGRRQLERHLAGLDAQGGLSQRMRVLIEDMRAQWGELDRRVAELDKELAEWARNEEAARRLMTIPGIGVLNATALIAAIGQGESFARGRDLAAWLGLVPRQVTTGGKPRLLGISKRGNKYLRKLLIHGARAALPTLLEGATPLAAWLRGLMARMHKNAAVVALANKLARIAWAVLRHGETFRFAGSATA

SEQ ID NO: 56310 - protein, 400 aa, unidentified
MLSIGIDVSKGKSTVCGMKPGGEIVYTPFEVQHTREGMSELVSLLRGSGEEVRAVLESTGSYHCPVVTALLENGIFVSVVNSLRMKRFCSQSIRKVKTDRIDAMQIALYGLAYWQELQPAKLPEDTYRELQLLARQYYQMTSLLIKAKVDFNAICDQVLPGMQELMSDHAGRHKLSDFVLRYCHTTHILEMGETRFRKDYCKWAEKKGYRNCERMAALIFATAQNGIPVLPNAPSTQIVITEAIRVLHTVEASRDAILTQMQALAKTLPEYSLVREMPCIGDTLAPRLIAEIGDVRRFHSKRALIAYAGIDAPPYQSGKFCANNRHISKRGNRYLRKTGYEVMQSYVMHKPANDPIFTFIEKKRSEGKCGKLAMVAGLNKFLRVYYGKVTELYRSLPAIE

SEQ ID NO: 56311 - protein, 412 aa, unidentified
MIRVLLFVGDDWAEDHHDVELQNETGRRLERVRLPEGMAGISRLHAMVGRHAGDAEDVQVVVGIETDRGMWVQALVAAGYQVYPVNPLQAARFRERLGVSGAKSDPGDAHTLADVVRTERHQLRPIAGDSDTAAAVKVAARAHKSLIWERTRHLARLRHALLDFFPAALEAFEDLDAPDVLELLGKASDPDAAARLSRAQIRAALKRARRRDVDAKTERILAVLRAPQLRQPAPVTAAYAASVQAQVAILTALNTQIQAMQAQVDAHFGQHPDVEIYRSQPGLGVILGARVLAEFGDDPDRYADAKARKNYAGTSPITRQSGKMRLVRARYVHNDRLVDALNYQAFAALRVSPGARAYYDRQRARGVSHHAALRQLANRLVGILHGCLKTHTCYDEATAWLGQATSARQQAA

SEQ ID NO: 56312 - protein, 342 aa, unidentified
MDKHDVAGVEISAKVLVMALKSHGQMRSAEFPNTAAGHNQLIRFLRRHSRPVRVCMESTGLYGLDLALALQAQKGMEIMVANPRSVRHFGAAMMKRSKTDPIDAKLLAEYAERMPFHSWQPPSLLARQLCAIARAIHQLTEINTMQKNQLHAAGSTVTTPKIVVQELQRSLAHQKRAIERLLKKAMHLLQSDPLLQRRFQLLLGIGGIKELSAVQLLGELVLIPADCDVRQWVAYAGLDPRQYKSGESVERKVRISKAGNRHLRRALFMPALVAVRHNPHFRAFYRELLAKGKLKMVALVAVMRKLLHGIYGIFKSQQPFDAGKLFPSLVLLLEPATKKMAC

SEQ ID NO: 56313 - protein, 437 aa, unidentified
MLHALKIITQIMNTSTNFAATIGLDWADQKHDLWIRPADGSKAEHVRLEQTPEALHQWVAKARERFGNRKIAIAVETCRGPVISALMAYDFIVLFPVNPKGLKSYRDAFSISGAKDDRTDAQLLEEFVRLHPDKLRALEPDTELTRKLGGLVENRRHLVDERTRIVNQIHATLKTYYPMAEALLHDQMNTPMAADLLVRWPDLDSLQSAKPQVVRSFFYKHNSRSAKKTEERLGAIQKAKPLTTDPAIIVPARHLVLALAGMLRPLHQAVARLDKEIQQAMDQHPDAPIFRSFPGAGPALAPRLLVAFGTNRDRFDQSDDVAEFYGVAPVVVQSGNSKTVHVRYRCPKFGRQTFHENAGCALKKEPWAKCYYEQQKERNKGRHHQACRALAYKLVRIYFACWKQRKTYESDRYLQALETHASPLHRKLENLTATICE

SEQ ID NO: 56314 - protein, 342 aa, unidentified
MSVYVGIDVHRKRSQVAVVGEDGKVQLNRNVVNGRETILRLIGGLPSGTPVAFEAAYGWGWLVELLEDYGFDPHMVHPLRCKAIASARLKNDKVDAAILAQLLRADLLPEAWIAPQPVRQLRALLRHRVSLVRLGTQLRNRIHAVAADFGYDRTGSYWTGPGRGWLAELDLPPVSREIVADCLASIDALAPVIERLDGELHQRAKADPRARVLTALPGVGEFTALVMLAEIGDIGRFGSARKLASWAGLTPMVRGSDLTVRHGHISKQGSAWLRWVLNQAAQIAKRSPEFAASYAAIAKRRGKKIATTAISRKLLTRAYHLLAEAQAAGTPSTTKPHASAAA

SEQ ID NO: 56315 - protein, 458 aa, unidentified
MSKNRKKKRRADADQASKKMERFELLNPKSAGIDIGSMLIVVSYTDREGIINLREFDSFTSSLYELAELLQKEGVEKVVMEATGPYWESLYNILEKHGMEMILINPSHYKNVSAQKTDINDAQWLHQLLAHGLIRNSHIAPELYRELRQYLHEREIYQNHKSDSLNRMQKTLTLMNVKFQHLISDVEGVSGMKLLRTISSGVSDPKILLARIDVKKLKASPEDLLSSLQGDYKQHYINILSNTLKSYDFYKEQMLVYEVHIEQTLRELLAYTGEQKAAIQKKTQKARKNQYSFNLKDYLLNIFGIDLTEVEGLDEIGLLTILAVTGTNMKKWPTAEHFVSWLNLSPRPKISGGKVIGYEKRNNNNPATQAFRLAAHCLWQSKGPMGQQYKRLAATKGSKKAIKAVARKLAVIFYHMVLNKQAFDATRLQPDIAQQKARKIARLQKEAAKLGLTIQKAA

SEQ ID NO: 56316 - protein, 443 aa, unidentified
MKELPVLDSRAAFCDVGSEHMHVSIAGGLPKVFGTFTSQLHELRDWLLGEGVRSMAMEATGVYWLSLYGVLEAAGLEVVMVNGRQTRNLPGRKTDMKDCQWGATLHAHGLLKAGFVPPAHIRKLQDYQRLRTDHIASAASHVQHMQKALERMNIKLHNVISSLMGTSGLAIVHAILDGERDPAKLLELCYSTIRHKKAKDVIEALRGTWEPEHLFALRQALQSWEHYHRQIAECDQQIQLLLQEITFNDMQGGGIGEKPKATTGKRPSANAPQISGLHSMLIDLCQGKDLSILPAHTDYSVLQIISEVGTDLSKWPTEKQFTAWLGLAPGTSQSGKRKSNVKHRRSRVGRYFCIMARSLARSKDMALGGFYRRLAARRGGLIANIALARKLAALFWRVMVKGTEFVEEGLAAYEAKFLEGKKRSLRRLARELGQTVSPIPVTV

SEQ ID NO: 56317 - protein, 343 aa, unidentified
MQIVRIGLDLAKYIFEVHGVDAHGKVVLRKTLRRNAVSSFFANLPPCLIGMEASNGAHYWARVLSGFGHQVRLISPQFVAPYVKSNKNDRNDAEAICEAAGRPTMRFVPVKSVDQLAVQALHRIRSRLVSGRTRLANQIRGILAEHGIVIARNIAKLRQNLTYMIEGDGNGLSSLVRALVGELKDELAELDQRIAAYDRRIRELYRNNELCQRLGKIEGVGPLSATALMAAVGDRQGFKNGRQFAAWLGLVPKQRSSGGRDRLFGISKRGDRYLRTLLIHGARASLARAKGKQDPRSRWLEKLRERRHPNIAAVALANKNARIAWALLSSGEAYNPSLSVGST

SEQ ID NO: 56318 - protein, 367 aa, unidentified
MGWMAPLRHLGAKVLVGENQSADKEPSMNEITTVGLDLAKNVFQVHGVDAEGTTVLRKQLRRAQVLAFFSRLPRCLVGMEACATAHYWARELRALGHEVRLMPAQYVKAYVKRNKNDAADAEAICEAVVRPTMRFVPAKTAEQQAAVLLHRGRERLVRQRTMLVNALRGHLAEFGVIAPQGLRNVGRLIAIIRDEEDARLPGLARQVLQVLAVQIEQLEAAIAALEKQLMGWHKSNPVSQRLATIPGIGPIIATAIAAMVAEPSGFRSGREFAAWLGLVPRQNSTGGKNRLGGISKRGNQYLRRLLINGASANLLRSKATNADPWVIGLRRRRPSLVVAVALANKTARIAWAVMHRQENYQRMATAA

SEQ ID NO: 56319 - protein, 417 aa, unidentified
MNAEKEIVCGADIHRDFLVATMISRSGLKLQEQFGMDQDGLLAFRSWILDHRCLRVAVESTGNYWYPIFCILEGHVEFILANAFQIRNIECKKTDRLDSERIAIYCLNNLIKPSRIYPKDYRDLRSITRSREALVNARSKLKNQIHQSLAVCCIKLSSVISDSFGKSGRYIIEQLLDGKTIEQIISKIPSKRVKKKADELRKAIRNGLDPVQILLIKTNLDAIDYLSEKIKLLDAEIAIKVKPFEEDLNIILSVPGIGLTSAATILAEMGDYRDFQNADKLAMYFGIVPAVYQSAGKLRTGKITKRGSKHMRRILVQVAKAITKTKKSSKLKRFFLRVFTRSGKKNVAAIALARKVLCIIYHLLMKREDYQEPEVKKNKPKIPSCVSPLSMMDIDEMIKTISQAGYLVKKGLKEGCG

SEQ ID NO: 56320 - protein, 346 aa, unidentified
MTYIGIDLHREFFVAHVENRDGEKLLSQKYPNSLESVGELTGRFPNSKVVVEATRNWMWFVRAVRAGGCNITMAHPFRTKAIAAAKIKTDAIDAATLCQLLRANLIPESYIASDSEVDDRELSRGRVNMVHDRTLLKNRIKAILGKENLTFPGSDLFGKKGRIWLNGQCLSQGKELMVENYLNLMDGVEERLKKVDGAIKQKGGNNPRANLLTTIPGIGVTTAFLLASEIGSIDRFANSKKFASYFGLTPRLSQSGNHAYYGRITKVGNPYVRWALVQTAQRWVRMHKNSRVWFDRLSYRAGKKKAIVALARKISTIVYSVLKYKRPFSLNFEVQKVSPAILPESS

SEQ ID NO: 56321 - protein, 505 aa, unidentified
MAAPTTGHQPASSLPPTGQPAQAQAHRQAYNRRKTRAKVRSEAFRQREAAQVEALPVQHPHAAGIDIGSRSHWVCVGFTTDAASCLIREFPAHTAGLKAIAAFLREHQVTSIALESTGIYWVPLYELLQAEGFEVLLVDPSYSHQLRGRPKTDRRDCQWIYRLHSVGLLAAAFRPDEQTCQLRAYLRQRGNLVRQASRHVQHMQKALEQMNLKLTEVLSDITGKTGRAILRAILRGTRAPEKLARYRDKGCKASEAEMAQALTGTYREEHLFELKLAYEAWQFTLGQVDKVDGQVALQLGRMKGDRALPPLKPKARPKRRANSPRFDVRAALYYVVGLDLTEIEGVSALTALTVISEVGPGVSRFATVKKFCSWLGLCPNWQKTGGQIKSSRTRRGVNRAAQALRLAAQSLHHSQGALGGFLRRMKGRLGTQPALTATAHKLARIVYLALRHGLTYVRQTQEEYEAQMKEKQLKALRRKARQLGLEVVEKPSVSGAPAAAEPVKG

SEQ ID NO: 56322 - protein, 316 aa, unidentified
MPETFIGIDVARDSLEIAVRPTGAHWSASNEPTALGELVARLLELDPQLIVLEATGGLELALLAALGSAGLPVVAVNPRQVRDFAKARGTLAKTDRLDAQVLAHFAAAMRPSVRPLPEAATQALAALVTRRRQLLEMLVAEQNRTAMAPPAIRSQIEEHIAWLRQRLTGVDRELATTVRASPLWRAQEDLLRSVPGIGPVASVTLLAELPELGTLNRKQIAALVGVAPLNRDSGTWRGKRTVWGGRATVRAALYMAALVGTRHNPVLRALYTRLVAAGKPKKVALTACMRKLLIICNAMLKQGARWAPPDPMAPNP

SEQ ID NO: 56323 - protein, 456 aa, unidentified
MKIPQSTIRLLTGRLVKILLNREVSTMKSNTQNAKIEAITEKTLVLGIDVGSETHYARAFDYRGIEYSKKPFKFSNTEAGFVTFKEWILDLKERHEKDKVVPGMEPTGHYWFNLGKFLQDNEMKPVLVNPHHVKKSKELDDNNPTKNDRKDPKVIAGLVREGRYMIPYLPDGVYADLRTASNIRFQLQAELTRIQNRISRWFNIYFPEYKTVYGKPDAKSGILILKAAPLPEDILTLGIDGVNQIWRDAKLRAVGKARAKTLIEAAEHSVGSKEGAVAARMEIRMLLEDYESRNTRLQEVMVLIEELVRKIPMAEKLLEIKGVGIRTVSGFLAEVGDISRFNNPKELQKLAGLALVENSSGKHKGETTISRRGRKRLRYLLFEVAMSLVAKNPEFRELHNYYTTRRLNPLKKMQSLMAIAAKLIRVFYAMLTKGVDYDPKKMVSDIKRPAVYLQAA

SEQ ID NO: 56324 - protein, 498 aa, unidentified
MHVVYERCCGIDVHKKFVVACLCILTAAGAIQKEIRTFSTMTADLLRMLDWLKQASCTHVALESTGVYWKPIHNLLEAELEVLLINAQHIKAVPGRKTDLKDAAWIADLLQHGLLRASFIPPQPQRELRELTRYRTSLVGERARLVNRIQKVLEDTNIKLASVVTDITGVTARAILRALTAGQTDPHVLASLARGRLCRKKEQLEEALQGALKEHHRFLLRNQLNHLDMLEKQIAEFDQEIARRLGIDQQPPDSAFVQGGETTAESGTDNQEPTEQRGGFDQQVPDQLRTAETPQAKAPHAGQPPSSERATETREQTPQTEQQILAPPCQNYEGYAQAITILDAVTGINQRIAQIVVAEIGITMSHFPSDAHLASWVGLCPGTKISAGKRLNGKTQKGNRWLRQALVEAAHGAARSKGTYLGALYQRLAKRLGRKKAIVALAHRILVIIYHLLKEKEPYEERGEGYVQRLEHEAMKLQAIRRLQQLGYEVSLEVSEVA

SEQ ID NO: 56325 - protein, 388 aa, unidentified
MNDRADKSEPLTAIHTDLGAIFVSLELSRSSWLITSLSPGGGEKMSKHSVPGGDFAGLMERFAQLQEKARLRTGQSFRIIVIQEAGLDGFWIHRALQNEGIESHVVDAASIATSRRRRRAKTDKIDGETLVRALLAYKRGEPRVCAMVKAPTPGEEDRRHLCRERKALTAERVRHVNRIKGLLFSQGISGYQPLRRDRRQRLEELQTGDGRAFPQHLKALVNRELDRLELLLKQIKTVEAARDALLAVGQTAKPAPAAMLLDIRGIGPEFAAILWSEGLFRHFENRRQIAAYAGLAPTPWQSGAVDREQGVSKAGNPRLRTTLIQLAWLWLRNQPRSALSVWFHERVSRNGGRLRKTTIVALARKLLVALWKYVTAGVVIEGVTMKVA

SEQ ID NO: 56326 - protein, 377 aa, unidentified
MKNVRFVGLDVHAETIAVAVAEQEGEVRSLGVIPNRSESVRRLIGKLGKPAQLRVCYEAGPTGYALYWQLSELSVHCDVVAPTLVPVKAGDRVKTDRRDAEKLARCYRAGDLTAVWVPDQAHEALRDLVRARLAAKRDQVRAQHRLSKFLLRQGRRAPEGIRTWTGKHMAWIKQQCFEQPAQEATLLDYLHEVEHAGERIGRLERAIDTAMEAMPQNQRAVVAGLQCLRGVAKITAVTLMSELGQLSRFARARQLMGYAGIVSREHSSGQRVCRGSISKAGNAHLRRLVVEAAWAYRHRPHVGVPLAARQSEQSEAVKAIAWRAQHRLYGRYRALLGRGKSKQKVITAVARELLGFIWAIGCEIERPQQQPSLRRAA

SEQ ID NO: 56327 - protein, 341 aa, unidentified
MDISVLGIDLGKNSCSVVGLDPTGKVVVRRRMRRETVLTYAAALPACVVAMEACCGAHHMGRALARQGHTVRLMSPEYVRPYVKAQKNDDRDAEAIAEAATRPTMRFVELKTEEQLDMQTLHRIRDQLVGDRTSLMNQIRSLLLERGHIVPQGRAKLAARLCEMLDDNASVLGPRIHRLVSDMRLRWTALDERIADLDAEFTDAARTDLRARRLMTIPGIGALNATALVAAVGDARTFGRGRDLAAWLGLVPRQATTGGKPRLLGITKRGSRYLRKNLIQGARASLPTMSKSDTRLGAWLRGLLSRSHPNTVVVALAAKMARIVWALLRHERAYDPIAQAA

SEQ ID NO: 56328 - protein, 411 aa, unidentified
MDVVHERCCGLDIHKKLIVACTIVPGSSRQPHRQVRTFGTMTDDLQELSDWLTDQGVTHVAMESTGSYWKPIFNVLEDRFELLLVNAQHLKAVPGRKTDVKDAEWIADLLRHGLLKPSFVPDRERRELREVVRYRTSLVQERTAAANRLQKVLEGANIKLAAVATDILGRSGREMLEALVAGETDSAALAELARGRLRDKQPALERALAGRFGPHQRFLVAHILAHIDFLDETLQRLDTEIGERERPFQVVLERLDTIPGVARRVAEIIVAEVGPDVHRFPSPGHLASWAGLCPGQDESAGKRRSGKTRKGNRWLRTALVQAAHAARRTKTYLAAQFRRLASRRGPKKAAIAVAHSILRIVYHLLIDQHPYEDLGELYFDNRQKHELSRRLVQRLQRLGYAVQLVPISSAA

SEQ ID NO: 56329 - protein, 408 aa, unidentified
MKDTRFVGLDIHKERISIAVAESGRSGAVNYLGEIANDPGAIRKLCDRLRRPGKPLAFCYEAGPCGYGVHRQLTSLGHRCDAVAPSLIPTKAGDRVKTNRRDATMLARLHRAGELTPVWVPDADHEAMRDLIRLRSVVRQIVTRARQHLQGFLLRHGRKHGRGTAWRMAYRRWLSTLAFDHPAQQIAFQDYVDAVMDAERRLKRIEEQIFGLLPEWTLRPVVDALQAMRGIALINAVVLVAEVGDFTRFSNPRQLMAYVGMVPGERSSGETTRRRGITKTGNTHVRRALVEGAWAYRMKARIGRHKVDRIEALTKVVRDIGWKAQVRLCARYRRLRARGKPPTSSMSPSHARWSASSGRSPARFNPRQRRRDDDLTDSQQRRLQTQNKPRRSMRRWGQDNAGEPSCVL

SEQ ID NO: 56330 - protein, 351 aa, unidentified
MDEYIAFDSHKHYTLAEREEIETGRTEQTRIEHQRGALRGYLDDAAPGTAVAVEATGNWYWIIQEIEEAGCVPRLVHPRKAKVMMGMINKTDKLDVHGLNRLQRAGTLPTVWIPPGPLRDLRELTRGRMVLVAIRTRLKNRLTSTLTKYGLRVEVATDAYGRRGREQWPGLLAQLPPETRWGAERSWELLDSLEEQVAAYEERMHDLVQETPVMRLLRSLPGVGVILAATIALEVGRIDRFPTAEHLASYAGTTPRVHASGGKVRYGPLRPDVNRTLKWAFAEAANSVAVNHLRCPERHVSRLYRRLRGRKGHAKAIGAVARHLAEATWHVWSCKEPYRDRSKEGVSAVLS

SEQ ID NO: 56331 - protein, 458 aa, unidentified
MKTKYFMGCDVSKGYADFVILDEAKHCVENNFQLDDTFFGHNCLYDRLTTFFSDYPDAELFAAVESTGGYENNWYATMRQFQGAFNIKTARLNPCGVHAGSRADLKRTITDAVSARSIAEYLIAYPDKVIYEQEDYWASLRKQWSFIQMLTKQKIQLLNQLESLVYNANPEILSYCRDGVPEWVLTVLKRYPTAIQLARARISTLAGIPYVSQQRAQQLKCQAKTSIASSLDVVTGQLISATVEQIAGLKQTIALQNKMLSRHCLMPEIDLLKTFNGIGDFSAVGLMLEIQSVKRFASAKKLAAFFGLHPIFKVSGDGSAGFRMSKQGRKAPRSILFMVAMSAVKSNPLIRDLYQEKVSKGMARMAAIGLCMHKILRILYGMLKNNTPFDPEIDLKNRKKSVSVKNKPVQDKNRRFQPYDDRAPVSGRNRRKRLERKSSQGAIDTKCGIEISAPASTS

SEQ ID NO: 56332 - protein, 364 aa, unidentified
MRRKEPRDRGTGGAGRPRVIGMKSVSYYVGLDVHRQSVSYCIKRPEGTIVREGKISAQRQALLEWVQSLSSVSWCGGLEATICSHWIYHLLRPYAAELKMAHPSRLKALIASKRKTDCLDARTLADLLRCDLFPECYVLAPDYEQLRQQLRYRSLIVRTSVLFKNKTAGLLIENGVPYETSKLHGKKYFAALLQNAEGMSEQLHKVLSFNRSQLETLARIDRTIIAILLQDPLLCDRVRQLRTVDGVGEITALTWVLETGDPARFSNAKQAVSYCGLCAAQRESAGVSKRGPISHQRNILLQTTLIEAAHLAPRFNPTLRAVYQAELAKGHRHRATLEVARRLVRYLLAIDRQYFQQHPSLAAA

SEQ ID NO: 56333 - protein, 344 aa, unidentified
MDHFAGLDVSVKETSVCILDDAGKIVKEAKVASEPQALLKVLGNPAYRFKRIGLEAGPLSQWLFSALAEAELPVICVETRHMQAVLKAQINKTDRNDARGIAQMMRVGLYRVVHVKTLRSQKLRMLLTHRKLLQSKAIAIENDLRGTLRNFGLKVGMVGTVRFETRVQELIETIPDLVVLVEPMLVVRRALREQIVILHRRLLAIVRDDEVCRRLMTTPGVGPVVALTYRATVDVPARFRKSKSVGAVFGLTCSKYQSGEIDRNGRISRCGDEMMRVMLYEAAQSMLHSKKWSWLKAWALQIARRRGMKKAIVALARRLAVIMHRIWIDGTEFRWTREPATAAA

SEQ ID NO: 56334 - protein, 358 aa, unidentified
MKIVGCDLHARQQSIAMLDTETGEFTEKIVRHEGNGVREFYAALEGGVVVGIEATGSMQWFLQLLEELGIQYRVGHPAKIRAAETRKQKHDRRDARLILELLAMKDRFPEIWMRSMEQRDLRTLLRDRHQWVKMRARLQHTMQSMALNHGLRRGPGLGSVAGQSALQALPLAHYTSQRRNALVSLYAQLQKRIQELDKVVEAEAQSRAQACRLLTHPGVGPVTALATEVFLGDPHRFPTGKQVASYIGMIPGEHSSGKRQQLGKLSKEGNALLRYRWTEAAMHAVLKDPELKRFYRRKLIQKGMGKARVAAARKLGIRLWIMLRDQIDYEEFCRRGKLRQEGEAHAGMPAFNSGPAMQ

SEQ ID NO: 56335 - protein, 325 aa, unidentified
MIDGILGIDVSKNTIDVSMSAGCNKVRARSFANSTDGWRHLLAWLITQKIQLVHACLESTGRYSLGIASALYEAGHVVSIVNPAQIRDFARTKLGRNKTDGVDASHIREYCELFKPKPWAPASEAHRRLGELQTIRAGIIAGLTEWKNRKNSGMIDAVAQSLADVTISHFTSQLGAVDKAITLTIDNDPVLRRKRDLLLSISGVGETLAGVVLAELPGPDVLRSSAEVVAYAGLNPRLHQSGTSIDRMTRISKIGNAVLRAALYMPAMSAMRYNPAIAALVARLKSRGRLKPKQIVVAAMRKLLVLCFGVLKTGKPFDPAIAMGC

SEQ ID NO: 56336 - protein, 402 aa, unidentified
MNAVGIDVSKGKSMVAIMRPFGEIVSTPFEIKHTSSDINSLVKLIKSIEGESRIVMEHTGRYYEVLAHQLSEANLFVSAINPKLIKDFDNDSLRKVKTDKADSVKIARYALDKWQNLKQYSVMDELRNQLKTMNRQFGFYMKHKTAMKNNLIGILDQTYPGVNTYFDSPARSDGSQKWVDFASTYWHVDCVRKMSLNAFIDHYQNWCKRKKYNFSQSKAEEIYGKAKELVPVLPKDAITKLIIKQAVDQLNSASTTVESLRTLMNETASKLPEYPVVMAMKGVGTSLGPQLIAEIGDVSRFTHKSAITAFAGVDPGVNESGSYEQKSVPTSKRGSSDLRKTLFQVMDVLIKTHPQDDPVYQFLDKKRAQGKPYYVYMTAGANKFLRIYYGRVKEYLASLPES

SEQ ID NO: 56337 - protein, 422 aa, unidentified
MRKRTYRATNVKQANWEKIARLAAGQRVVLGVDVAKDDFFAVLMTADRSVIDTIKWVHPQQTVQMVEHLLESVDVQALEVVMEPSGTYGDALRGYLGELGLAVYRVSPKRVHDAAEVYDGVPSLHDAKSAYLIGRVHLDGASAPWEALSASRRDHHALTAELDLYQGQHQATLNRLEAHLSRHWPEVIRILDLSTVSLHTLISEYGDPSQVSVHREQAGQLLRRTGRGLLSAEKIEQVLASSETTLGLPCTPGERHWLQVLGQELLRTHQALKALGYQISQVVEADQVLSRMASVVGETSSLVLETTQGTPLDYANPHSYLKGLGLNLKERSSGKHAGQLKITKRGPGKPRKYLYFAALRYRQHDPVIAAWYEKKVKRDGGLKSKAMTAVMRKLALSLWHVARGEAFDSRKLFNTRALGIAA

SEQ ID NO: 56338 - protein, 419 aa, unidentified
MTEPLSWEQITHYAGFDWAKDHHDVVVVNPQGKIVKDLTFEHSAEGWAKWKGLVAAYPRLAVAIETNQGAAIEQLLESGAAVYPVNPKSAERYRDRKAPSGTKTDYLDAWSLADALRVDGHGWRALKPLDRLVQELRILCRDEVELIGKRTEMVNQLQAALHEYYPAALQAFDDWTATPSWSFVQQFPTPQVLREAGRRKWETFLHVHRLYRPELNEKRLEIFARAHEFCGPPVVTRAKSRLALTLIKLLQTLDKQLEEYRQEIRRLFNEHPDHDLFGSLPGAGEKLAPRLLSELGSDRSLFESAQALQCYVGTAPVSFQSGQVRQVYARYMCNKTFRHAVHLWADLSRKFCSWAQIYYRQLRERGKSHASALRCLGQRWLKILWKMWQTKTPYNPDFHMANQLKHGSWVLSVKPNKPL

SEQ ID NO: 56339 - protein, 351 aa, unidentified
MKTKDTTDSKLFIGIDVHKRSWKIRTATDLFDGSSLTIPPDAFSLKKYVDRHFKGYTVYCCYESGCCGFSHYRHFISFGWHAKVVNPADVHRPAKAQFQKTDKIDARMLCKELKDSRLKGIHVPSIEREQLRCLFRRRNELVKEHRKIKTQIKMQLLYLGIEIPKVFDNSHWSHNFRDWLGGLTFEYPTMDYCFETRLMTYEYIDRQKRDVSTKLRAYCRKHYKKDYYLLRSVPGVGGIVACGLLCELGDLRRFKNFKQLASYVGLVPWVHQSGDNLKTSGLTPRANRLMRSYLVEATWQALRFDPVMQAYYRSHSGKDVKRILIKVARKLLSRIHAVIRTEIPYEVGVVS

SEQ ID NO: 56340 - protein, 408 aa, unidentified
MERYYLGVDWADEFHQVWVSDPEGKKVIEKKVIEDVEGLTEFGRWLDETRAKGIELWAAIEKPHGRIVEFLLDHGVVVYPVNPKALDRARDRFRMSQSKSDSFDAYVLAEFVRTDHGHLRALEPNSDPAQELKLLTRDQYRLVRQKTRLLNQLSRTLKEYYVRPLEIFSDLETNIALDFLQQYPTPQALAKLTRRQWNRFSKREHHLGEDHCKELWEKLNQPQLEVPEHVVRAKARLLAVLVVQLKTLRDAVESYHERVKSFFACMPAAELVRMLPGAKTGTIVATLWAELGDAKSRWESFRHLQAEAGVVPVTKASGKSRVVQFRFSCNKIMRHAAYWLAFVSLNRSEWANQYYRDQRAKGHSHHQALRALGAKWLKIIFVMWRDHKPYDENIHLANITRQKMRQAA

SEQ ID NO: 56341 - protein, 351 aa, unidentified
MMIIGVDYHPSFQTIAFLMEETGECGEQDLNHSDGQAEKFYRDLKQRGISVRVGMEATGYSRWFERLLAELGFELWIGDPAEIKAKRVKKQKTDRHDARLLRRLMLENNFPQIWIPSPENRDLRQLLWHRHRLVQMRTRIMNQLQALAMNEGYRWKKKLFSEQGRAQLEKLALAPWASRRRQELLELLDRLNPTIEELTAAVEREAGKRPEALRLMTHPGVGPLTALAYVLIIGTPARFPRGKHIGTYVGMIPSEDSSAGKQRLGHISKQGNSLLRFLLVEAAQAAARINPEWRRRYMHLAMRRHKSIAKVAMGRKLGVRLYWMWRNACEYSQSLEFGSYVGQLGTGHGVK

SEQ ID NO: 56342 - protein, 353 aa, unidentified
MAIVADHYAFVTGVDTHARSHTLAIVDARSGQELDTRTFPSTPSGRGRAARWLQRRCGTSSGVLVAMEGTNSYGATLRELLSDGGYRVIEAPKPVRSLRRSQGKSDQLDAVRAAQAVLSLDVDRLTEVKSDPIAQALRILLTARAGMTRERTASINMLLALLRTIDLGIDARRTLSNQRIRMVAAWRCRAEATPTRIARGEASRLAKRILEIDHHLKDNLIELTLLVQDAAPELLAMPGVGPVSAAVILGSWPQPGRVRSEAALAALAGTCPLPASSGNTTRHRLNRSGDRNLNRAFHTITLVRMSHDERTKAYVQRRTLEGRTKKEIMRSLKRYVTRQVYRTLAARSRVDKL

SEQ ID NO: 56343 - protein, 371 aa, unidentified
MIVIGTDTHKRTHTCGAVDALTAAARGELTAPARAGAFGELLRWARAIDPERVWALEDCRHVSGAFERFLIARGERVVRVAPKHMAGARRSSRERGKSDSIDAFSVARAALKEGLEELPTAHLDGAALDIRLLVDHREDLVAARGSDQQRLRWHLHDLWPDLEIPPGALDTAKWLGKASRRLARAKQTTRVRIACELVRHITASTKRIRELETELTALVEGYAPQLLAERGCGPLTAAKLIGEIAGADRFRTDAKLARTGGSAPIPASSGNTQRHRLDRGGNRQLNCALHRLAINKANWDPDTAAYLARKQAEGKSRKEALRCVKRHLARRVWKLLRSPAPGSRPSLEQQHQHQRQHRPKGIPANSEFTLT

SEQ ID NO: 56344 - protein, 387 aa, unidentified
MQKPHDNSKASPAAFMQDNTLIAVIELSLSNWLVAGLIPGVSREPLKKLEPNPEDLLKLLHRWRDEAIKAGRPITRIAVAYETGRDSFWLARWLRKRGIDAHVIHATSVTVSREHRRAKTDRLDTAMLKRGFLGWLRGERGHCTVAIVPTMEEEDAKRPHREREGLVHEQTRVVNRMKSALIQFGVRHFNPKLRKASVKLETVLTPEGKSLPPNTIAALRRDMERLKIIKEQIKAIEQARLQQFEQKPEALANRMVYLLVRIYGLGLETADLLVHELLSRTLRDRKAVARYAGLTGSPDESGSKRREKGLSRSGNTRVRKIMIQLAWRMVKFQPDSALVQWFKQRTENAKRSRKPMIVALARKLIIALWRYANDGVIPEGFRLHSAA

SEQ ID NO: 56345 - protein, 326 aa, unidentified
MEHELHYIGIDTAKEKLDVDVLRPDGRHRTKKFANTTKGHDELVSWLKGHKIDHAHICIEATGTYMEPVAECLYDAGYIVSVINPALGKAFAQSEGLRNKTDTVDARMLAEFCRQKRPAAWEAPHPLERALRALVVRHQALTDMHTQELNRTETAREVQRPSIDAHLLWLEAELKRLEKQIKDLTDDDPDMKHRRKLLESIPGIGEKTSAVLLAYIGLKDRFAHARQFAAFAGLTPRRYESGSSVRGASRMSKAGHVSLRRALYMPAMVATSKTEWGRAFSDRLAANGKKGKVILGAMMRKLAQVAYGVLKSGVAFDASRHNPVAA

SEQ ID NO: 56346 - protein, 337 aa, unidentified
MDTETGELQERRLQHREEAEKFYRDLAAQEMRVRVGMEASGHARWFERLLAELQFELWIGDAAEIRTKRVRKQKTDRQDAQLILKLMLKDDFPRIWVPSWENRDLRQLLWHRHRMVQARTRMMNQLQAVALNEGLRCKKRLWREQGRVQLESFRLAPWASRRRHDLLELLDRLNPTIAELSQAVEQEAEKCPEAQRLMTHPGVGPLTALAFVLIIGRAERFQCGKQIASYLGLVPLEDSSGNRRRLGHITKQGNSLLRFLLVEAAQVTVRSLPEWRSKYFHLAMRRGRKIAKVAMARRLAVRMYWMMRKGWNYEQLKKFGSHAGQPGHRDGVRLNTE

SEQ ID NO: 56347 - protein, 341 aa, unidentified
MKNKSFIGIDISKNVIDASIFCEGTPIKDFPHAVFNNSRKGFGEMCTWLKKNHVVLSNCLFGMEFTGSYSMELEKFLNARNYQFCMLSTHVVKHYPMGSKDKSDKIDSAKIADFLYRYNGTECVKPYKMPDKTMQRLKTQMNERKFLVEQRTCFMNRRQLCTTKEDAQLYDGYIKKLSHDIENIELEEQKLLATDDSLLATYKNLLTIPGIGFVNAINAIVITRNFTAFETARQYASYVGVAPHSHTSGTSVRWRPRPSARCDGQAKADLSMAATVAVQYDAELQSFYNRKLGGKQDSDTKRKALNAVKFKLVLRMFAIGKQNRKWEPLDSKSSNEKLAIS

SEQ ID NO: 56348 - protein, 402 aa, unidentified
MNAVGIDVSKGKSMVAIMRPFGEIVSAPFEIKHTASDIHSLVELINSVEGESRIVMEHTGRYYEVLAHQLSKANLFVSAINPKLIKDFDNDSLRKVKSDKADSVKIARYALDKWQNLKQYNVMDELRNQLKTMNRQFGFYMKHKTAMKNNLIGILDQTYPGVNTYFDSPARSDGSQKWVDFASTYWHVDCVRKMSLNAFIDHYQNWCKRKKYNFSKSKAEEIYGKAKELVPVLPKDDITKLIIKQAVNQLNSASTTVESLRTLMNETASKLPEYPIVMAMKGVGASLGPQLMAEIGDVSRFTHKSAITAFAGVDPGVNESGSYEQKSVPTSKRGSSDLRKTLFQVMDVLIKTHPQDDPVYQFLDKKRAQKKPYYVYMTAGANKFLRIYYGRVKEYLASLPES

SEQ ID NO: 56349 - protein, 428 aa, unidentified
MADLLEGALPLNLVAIDVARYSNAVLIELSDGKRQRFRMTNNASDFDRLLSYLQALPGNCRVALEPTGDYHRPLAHRLLTAGHEVVSINSVAQARYREAMFNSWDKNDPKDAQVILEMLRRGTYQRYVDPQIAGHHDLQELAKTYYQVSRARTKVQHSLINHCLPLYFPEMHRYWCTTRNEWFVRFLLEFPTPTHVRALDRESFVTAAWDLVGRKVNKRAKLEEIWETAAHTAALPHALDCLAVETFRITLRRYQELNVLREAIEARAEVELHDNADFAHLKTLPGIGSVIAMTILAEAGDLRRFGHHGQFLKYCGFDLAKIQSGTQRGREQLSKRGNARLRLAFWMAGMAAVRMKENSFRSKYERYVHANPDDADLKRKALTAVAAKMARVAYSMIKKNQPYRQFFELGLPSGSIPLSAAVGAQATP

SEQ ID NO: 56350 - protein, 425 aa, unidentified
MDTPAAVVAFSALDHFAGFDWATEKHDVVVVDRQGQVVLKLEFPDTAEGWAQLRDKLAPLGKVGVAVETSRGPAVERLLDLGQTVFPMNPKAAERFRDRKAPSGVKDDLLDAWAFADALRSDGHAWRPLLPQDPLTQLLRLLCRDEIGLIELRTSLVLQLREALREYYPAALEAFDDWVMAAAWEFIVQFSTPQALVKAGKRQWQKFMHAHRIYRPETAEKRLEIFARADKFASPSAAVTAAKSLLAVTLAKQLLTLENQIAEYRRQIEKLFADHPDSNIFNSLPGAGKKLAPRLLAELGDNREVFQTAQALQSFAGTAPVTRASGKSCSVSMRRMCNKTLRHTIHLWSDESRKECAWAESYYQQKKRQGHEHAQALRCLGQRWLKIIWKMWTTHTTYDEAHHMMNMVGHGSWVLGHLPELHPAI

SEQ ID NO: 56351 - protein, 355 aa, unidentified
MDSKKYIGMDVHKESISIAVMNGAGKIVMESVIETKASMILQFIDGLRGDLQVTFEEGTSAAWLYDLLKPHVTKLVVCDPRKNASMKEGNKSDKIDARRLAELLRLNHLNPVYHGEHGLRNLKELVRSYLTITKDLGRVMTRVKAIYRSWAIPCTGKQVYTSRHRAEWLGKIGEPGVRRRAEFYYQQLDALRTVRQEVRRELLAEGKKHQAWKQLCQIPSIGPIRSAVLLGILQTPHRFRTKRQLWTYSGFGIETQSSADHRGVNGRLERVKKQSSIRGLNRNCNHDLKNVFKGAAIVASSKPGPFQEFYTALLTKGIRPEMARLTLARKIATIVLIVWKRGACFDAQHLKPQTA

SEQ ID NO: 56352 - protein, 390 aa, unidentified
MARGPGLVTIAVDPHKRLNVVEVIDAASTVLATQQFEHSTAGFKELMRFARAWRRRQWAIEGARGVGKNLAQRLVAADEVVLDVPSRKSSLVRAFSATSGRKSDEVDAHAVALAALNSPDLERVRADDHATALRLLASRRKELVGLRTQAVNRVHRELQILIPGGAKRGLSATRAKAMLGSVRPRDEVAKLRKALVADQIADLVAIDKRLADINKQINAAVKAAPTTLPELRGVGPVITAIVVGEVRDVARFIDEDHFAAYNGTAPTTWGSAGEARPCVNRGGNRVLNHAIHMAAVTQLRNPGPGRDYYQRKLASGKKPKAALRCLKRRVSDAIYRRLAADAQADERDPGGHTGATTKISAANPTPTVDSSIKPQPGSQPDATPAAAKAS

SEQ ID NO: 56353 - protein, 315 aa, unidentified
MTQTIITTAGIDTSKGKLDAAVHDRSERWQVANALPGWRALAANLSKAGVTRVGIEATGGYERGVVEYLRKAGFTVLVLQPIQVKAFGRVHLRRAKNDALDALLIAACTATLDQPKTAPDPRLAKLAGYLTFLEQIEEDIARHKTRLEHIDEPGLRRIVNSDIVRLKARRAAQIRDIAKRLRASDDLAMRLNLVLSIPGIGERTALALLIRMPELGQVSREEAAALAGLAPFDDDSGKHKGLRRIAGGRSRLRRSLFAAALPAAFRWNKALVALYTRLTAAGKAHTAALIACARKLLIYANTVVQRGTPWTEKAA

SEQ ID NO: 56354 - protein, 368 aa, unidentified
MSDIIRIGVDTSKSVFQLHGVDAAERPVLRKKLRRRDFLSFFAQLPPTKVGLEACGGSHYWARELMALEHEPKLLPAQHVRPYVRRNKNDKQDADAVCEAMSRPRMSFVRIKSAEEQAAQMLMTTRQRLIDYRTQLINTIRGHAAEFGLTAAKGPAHVEPLLARLAKDVTVPALAKELFAIHGQEYDRLKIELREIEAKLKAWHRGNEMSRRLAEVDAIGPIGGCLLVIKAADPQTFHCARNFAAWIGLTPKDHSTAGKMRLGVITRAGDEALRRTLVVGATSVIKQVRNGKAHPSPWLRDLVARKPPKLAAVALANKVARIAWKLMVSGERYDAARAGIVSPTARVAPCSRRQGRCAPPAAVACGQP

SEQ ID NO: 56355 - protein, 356 aa, unidentified
MSRDIKYIGMDVHKEATVIAVLNGSGKLVMESIVETKASSILQFIHGLRGELHVTWEEGTWAAWLYDLLQPQAAQVLVCDPRRNALLKEGNKSDKIDARKLADLLRTGMLRPVYHGEHGLRTLRELGRSYQTISQDLNRVMNRIKALYRGWSIPCAGTQVYAPRYREEWLHKIEHVGVRRRAELLYQQLDGLQRLRRTLRPELLAESRKHKASKLLRQIPCIGPIRAARLIALMQTPHRFRSKRQLWTYSGLGIETRDSAQYRYVHGQLQRTKKPQQIRGLNRNHNHEMKEIFKGAATRASCGVGPLRDFYVALLGKGMKPEMARLTLARKIAAIALTLWKKEERFDTEQLKPQAA

SEQ ID NO: 56356 - protein, 348 aa, unidentified
MNYYIGLDAHSQTCTAVVVDEKGEQKLRETFPTTESKLIEFISKIPGVKNLTFEECTLSQWLYVTLVEHVDHLIVCNPVYVAKKQGAKTDYRDALHLAEELRTNHLKPVYHEKSHWIELRTLTNNYLALVDDIVRAKNRLKAVFRSEAVDTNTKNFYEDRDRVKDLENKNAQFVAESLYDQIAALEKLKSEYKDKFEKNRKKYRPIRNLSTVPGIDLIRASIITAVVCQPQRFRNKHQFWGYSMLVRHIQMSGGKIYGNKRIHGRRELRDVFLGAAESALRTETSLRDHYEMLKARGISHKDAKIAVARKIAATCLCLLKNNDTFKNDYDVQQNERVKLRKELNLENV

SEQ ID NO: 56357 - protein, 339 aa, unidentified
MSKLPQPKQATVFCGIDVSAQSLAVAVQQENQPIEQRELANTASGHKALIVWLRKRRTRVRVSLEATGIYSLDLALALDAAVDIEVAVLNPKAVNRFAQTLRRSKTDKADAAALAEYSRRMPFVAWRAPEREGLRLRAIGRHIDGLTVQHTREMNRLHAAQGSTATPRCVIQDLKRSLAGLQRRIMRLRRDAMALVQADDALRQRFELLTSMPGIAAISALQLLGELAPLSPEMSVRQWVAHSGLDPAHQVSGSSVHRPSRISRAGNRHLRRALYMPALVAVQRDAHMKAFYELLQSRHKAKLQALIAVARKLLHAIYGIFRSLTPYDGRKLFPALIPG

SEQ ID NO: 56358 - protein, 340 aa, unidentified
MGEQYVGIDLHRRRSVIVRMTPEGEVLETVRVDNDPVALSLELAKAGPDPEVVLEATYGWYWAADLLQACGARVHLAHPLGIKMFGYQRVKTDARDSRNLAELLRMGRLPEAWLAPPAVRELRELVRYRAKLVALRSGLKAQVHAVLAKQGVRVPMSDLFGVAGTRLLEELRLERAYAQRVASLRRLLAAYDQEIAMLGREIAAGLADDAGYLAIQAIPGVGPVLAAVFVAEIGDVHRFAGAPQLCSWAGLTPRHRESDTTVRRGPITKQGPRLVRWAAVEATQRLPGGSKQAADFHRIADRRGKGIGRVAAARKLLTLVFYGLRDGQVRCLAAASTETM

SEQ ID NO: 56359 - protein, 349 aa, unidentified
MRNVTIGMDLGDKKHVITILDEDGVIIKSCSLNNARASIIKYFRKYQGSTVAIEAGTHSPWISREIKALGCNVLVGNPRKLRSIWNSDDKADVHDAEMLARIARFDPELLYPIAHRSERTQADLELLKARDMLVKTRTSLINHVRGAVKSFGERLPKCSAASFHKQSLDFLPENLKTVLQVILKTIEDITDRIKELNRRIEKISRENYPETELLQAIGGVGPLTALAYVLVLEEPGRFGKGRQVGKFLGLTPRRDQSGETDKQLRITKAGNRFLRRLLVGAAQYILGPFGPDCHLRQFGLRLAERGGKSAKKRAVVAVARKLAVLMHRLWRNGEVYDPFYRTGMIKNAV

SEQ ID NO: 56360 - protein, 346 aa, unidentified
MTIVETRAITGGVDTHADVHVAAALDPIGGLLGVQEFPATPAGYGQLLGWLGGFGTVCLAGIEGTGSYGAGLARHVSRAGVRVVEVDRSDRQDRRRQGKSGPLDAISAARAAQSGRARGASKGRDGAVEAIRALMVVKRTARSERTQTISQARSLVLTGPDDLRIRFIHHTTSGLVADLAGLRPRPGATVGYATRIALRELGRRAQFPGGQLESLDELIVPLVTAHAPGLLARYGAGPDTAALLLIAAGDHPERLRSEAAWAHLCAAAPIPASPGKTVRHRLNPGGDRQANHALWRIVITRMSSHPPTRAYVERRSKEGLSKTEIIRCLKRYVAREVYPHLPPPAG

SEQ ID NO: 56361 - protein, 438 aa, unidentified
MRKKKNKASKRAHFQSLPLIHPNAAGIDVGAKEHVVAVPCDRDPQPVRTFQAFTPDLHELAAWLKRCGIETVALESTGIYWLSLYEVLEQHGFEVRVVNARHVKNVPGRTKTDVLDCQWIQKLHSFGLLNGSFRPDHQIRELRTYMRLRDNLVVEGTQAIHHMQKALFEMNVQLSNVISDITGESGLRIIEAILAGERNPEQLAALCSTRIKASRQTVAKSLHGNWDEALLFCLKTALETYRFSKNQIQQCDLCIERQLATFAIRTPLPNATQSLRTQLHQVCGVDLTKIPGIKEQAAQIIISEVGLDMSPWTTEKQFSSFLGLCPNNLITGGKILRRTTRKVYNRAADTLRLCAQSLTHSKSALGAKYRRLRARLGAPKAIVAMAHHLARLVYRMLRYGENYVEKGIEHYEQKFRLQRIKWLKKEAKSLNLQLVAAQ

SEQ ID NO: 56362 - protein, 419 aa, unidentified
MAQEKDNQIITVCHPICCGLDVHKDMISACLISVAESGEDYTEIREFRSFTADLQCLRDWLLEKCCPIVAMESTGVYWRPVHNVLEDVVQVILVNARHIKNLPGKKTDIADSKWLAGLLRHGLLKGSFIPPEFVRDWRDLTRMRKGIQEHLADYKRRIHKLFESANIKLGSVLSDIFGVTGRRLMQLLIARSTDITLEDIEICMQGPLKSNSHDVLQAIKGFFREHHRYMLEKYLRLITNLEQEVVDLDQRLTMLMESYHSQLQRLEAIPGISTTSARLILSEIGPTLDQFPSSAAFASWCGLCPGNNQSAGKRRSGRSPVHRHRLKEIMIEVAWSAIRKKGSYYKEKFYRLRSRLGPKKALVAVAHRLLKAIYHVIKYQEEFRDLGENYLLMLHQSRKVAYLKKQAQVLGYELIPVTS

SEQ ID NO: 56363 - protein, 413 aa, unidentified
MSAALPGEATTRFEVAGRKRGRLRQTVWSARRLARKLSRVAVGSGPTVEPQLREAPVMSEGSWVGLDVHARSVVAGVIDRGSGEVRSLRLPPGCDQMVAWLQTLPAPVKVVYEAGPTGYRLARACAEAGIHCVVAAPSRIPPTADRVKTDRRDAERLARLLRLGEITAVRVPDLDEEAARDLVRAREDARGDLMRARHRLSKLLLRHGLVYDATAWTRTHDAWLRRQRFPSGPLAIVFDECYGRMLDAKNRRDALDKAITELAATPPYADVVERLVCLRGVSTLTAFALTVELGDWRRFRPESLGPFLGLTPSENSSGERRRQGAITKAGNSHVRRLLIEAAWHHRPPSRRSVTLQRRRDGKPLAVQAQAERSGRRLHQRWHALEARGKPRTIIVVAVARELAGHCWALATME

SEQ ID NO: 56364 - protein, 416 aa, unidentified
MNAVGIDVSSRKSTVAVLRPLGEVVCLPFDVTHDIAGLASLAEKLKAIDGETRVVMEHTGRYYEAVAKALHEAGFFVCAVNPLLIKEYGANSLRRVKTDKADAVKIARYALDNWADLRDFTPMDAIRYDLKTLNRQFQLASKQRTASANNLIALLEQSFPGIRKCFDSPVRSDGTQKWVDFAHSFWHVDCVRKQPFPAFCERYRKWCKRHAYLFKLSNAEEVYALAKRAVVLTPKSKVVKVLVQEAANQLSSISRSVEVYRAEMDRLAAMLPEYPVVMAMYGVGKSYGPQLMAEIGDVRRFERKQALVAFAGIDPMPNQSGDKNVRSNKSSKRGSPYLRKTLFNVIRTYLQCAPQDEPVFQFLNRKRAEGKPFYVYMLAAANKFLRRYYAKLRDYFASLDTLQPVAPIPTILKATL

SEQ ID NO: 56365 - protein, 364 aa, unidentified
MTHTIVGVDIAKNVMQVHWVDQETGEIVNRPVKRAAFLEYFANRNACLIGMESCSGSQHWARRLIEMGHQVKLMPAKFVKTFNIRNKNDAADARAIWMATQMTSKAVAVKTEAQQAVLALHRMRQQLVKFRTMQINSLRGLLSEYGEVMGVGRTALDKAVAGVLERLAGRLPAILIDTLREQWKGLDDLDRQIAQIERRLREWMKDDQAAKAIAVIPGVGLLTATAAVATMGHAKAFKSGREFAAWLGLVPGQTGSGGKVELLGISKRGDTYLRTVDQNNTVTDSRVNQTVGGYFRRLDRRHRRRDDALPDGIRRLESAKFLTKRAQQGRPVRSLYQLCCRRCQPDWSCYATDHRGPPGGGGNE

SEQ ID NO: 56366 - protein, 344 aa, unidentified
MTSYAALDVSQETTAICVVDENGRIVAEKIVATCPDTIATWLLKHTNKLARVGLETGPLAVWLWNELREHDLPVICLDARHAHAALKMRSNKTDRNDAAGLAQIVRTGWFKQVQIKSRDSYEIRSLLSGREVLVRIRVKIENEIRGLLRTFGVLFGKTAGGFARRAQEIVAGDLDASPTMQLVIETLMQARAAILDRIKILERRVVAAARTNSTARLFMTAPGVGAITALSVISAFDKVSRFEKSSSAGAYLGLTPRRYESGEVSRNGHISKHGNGMTRKHLYEAATTLLTRTKSFSALKAWGLRLAKISGFKKARVAVARKLAVTLHAMWKTNTEFRWSKQVA

SEQ ID NO: 56367 - protein, 341 aa, unidentified
MKNLFIGVDFSKEKVDVAIIFADGLTETAARVFNEFKTTVSGYKQLVKWVEQNSYGIDSSLWLFCGENTGDYSKGLCNFLYGKGYDMWLENAKSIKDASGLRRLKSDRADASMIAEYAMRNYDKAIMYEPLSESLAQLRELFLYRQMVVRHRCSFQVRRGEKRLTMEKSPIKTMISQSGRHIVSELNKEVEKIDKRIAELIKSDEELTEVFTIVTSVPGIGTQNAVSLMVYTDNFRRFNYDSRKIACYYGIAPFGKDSGTSVHSDPRVHYMANRQIKAMLTQAALAAVKFNPIMARYYMRLVERGKKKQVALNNVKNKLVHLVTAMVRNRQIFTPEYKISA

SEQ ID NO: 56368 - protein, 260 aa, unidentified
MSSTIAVDLAKTVFQVAVGNRAGRIVTRHRFSRTQFEQLLRTTPPAHVVMEACGTAHFWGRLAQDAGHRVTLLPPRYVRPYVRRDKTDRADTDALLEALRNPGIAPVPVKSVAQQELVALHRIRDQWMATRTARLNALRGVLREHGLPVPTGATRALAAIPLLLADATVPLPRCLRHTLTALYEEIRALEARVTTLEQDLAELAAPDPVTQRLQTVPGIGLLTATAVRGTVGNIHAFRRARQFASWLGLTTRERSSGARR

SEQ ID NO: 56369 - protein, 351 aa, unidentified
MPRRSTVRAVTTIGIDMGKNALHMVGLDSLGAIVLRERVSRGRITSRLANLPPCLIGIEAGMATHYVARELAALGHDVKQVPPTYAKPFRQGHKNDFRDAHAVAEAVQRPTTRFVPAKTNEQLDLQALHRVRSRLVSERTAVSNQILGFLLERGIIVRQGLRFLRHLLPDILAKRTDVLSPRMARIVSDLVGDWRQLDERIETVTDEIETLAKSDDSCRRVMTVPGIGPLISSAMVAAIGNGTAFAKGRDYSAWLGLVPRQMSTGDRTILGRLSKRGNGYLRMLFMQAARVILLRPANWPKHGFGAWLVRAAQRLHPNVLAAALANKLARIAWTVLAQERSYEARVTKAAA

SEQ ID NO: 56370 - protein, 421 aa, unidentified
MNQLTDAGYTAYVGIDWAAAKHDICVQAADGGAREFACISSQPEGIEAWAQDLNRRFGGPIAVALELNKGPIVTALQKYDFFVLYPINPSTLAKYRETFTPSGAKDDPTDAELAVDLITRHPERFSPLKPQSVNMRKLIGLVEQRDKFLGDRGRLVNRLGHALKQYYPQVLEWFNEHHTVVFCDFLNRWPTLTQVKGARKASLERFFKSHHVHSVQLIEKRITAIKAAMPLTADPAVIEPHRLQVEILIEQLRITIKALKRFDEEIAATANKLPDYNLLFSPLPGAAQVLAPRLLTAFGEDRQRYPHADSLQMYSGIAPVTKRSGKKTWVHWRWQCPTFVRQTFVDWASQTINKSAWAGAYYRQQRAKGCSYQVAVRALAFKWIRILHRCWQDRTPYDESKYLEALRRKGSPLLKYLAEPV

SEQ ID NO: 56371 - protein, 339 aa, unidentified
MFYSGIDQHKRDSFITTYGPHGEVVNQKRVPNSAMLIQRYFSQLPGPHKAVVESTGSWYWLADLLEAQGVELTLAHTTRLKAISAAKVKTNKIDSDVLAMLLRADVIPEAHMISPEMRGPRDLMRTRLRLVEKCASCRNSIERLLEKFNLHDVTELDELYRLQAACHEAQIELLHDQINTLEAALHPHLIPNQDIQRLLWIPGIGKLNAFTIYTEIDGIERFPSANQFFSYCRLVPGAANTGTRTRHRSGSKQGNRYLKLAFGHAAVRAIQYYPEIRAFYRAKRRKKPERIARTLVALEIARIVYHVLSRQEDFNGLFKGKPLSRTKQSRWPRLASPSA

SEQ ID NO: 56372 - protein, 355 aa, unidentified
MSLLAERVDYVIGVDTHLHSHTAAVLTATGGLVASARIDAEEAGYVQLVQLVGRKAPGRRVWAVEGTRSYGAGLTGHLLRLGEVVGEVDRPRRPARKHGKSDEIDAVRAAREALSMGELASPRSSGRREALRIAATTRQEVMGERTRAMNQLRDLVVSSPEHIAARFRDRSGRSHSLERLTKRCLALRVTATHDVEDRIRLDTMKRIARRIVELEREASHYESAMTELIRQLAPGLLELPGVGPATAAMVITTYSHRGRFRSEAAFASMAGVAPIPASSGQQQRHRLNRGGDRRLNQALDLIVKNRIRYDPETIAYMERNKGGQRTDRDLRRILKRYLARSLFRFLERTSPLDKG

SEQ ID NO: 56373 - protein, 347 aa, unidentified
MVVIGIDAHKRTHTAVAVDGNGAQLGVRTVAANSAGHLDLLRWAEGFEERRFAVEDCRHLTRQLERDLLGAGEEIARVPPKLMAGQRRSARAKGKSDPIDALSVARAALREPDLPVASLEGEERAVRLLLDHREDLVAERTRIINRVRWHLHGLDPALESSAGDLTCVKPVEVLIRRIEGMEGVEAEILRDLLPRVIELTVVERRLEREIAIRVTPLAPSVLDLEGCGALTAAKIVGETADVTRFKDRNAFARHNGTAPIPVWSGNSDHHRLNRGGNRQLNAAIHRIAISQLRGCGPARELFDRLIASGKTKRDALRIVRRRLSDVVYKRLLEDSRVRRSTGFAEAA

SEQ ID NO: 56374 - protein, 404 aa, unidentified
MSVHGAPVTSSTIVVAVDVGKTSAMLSATDNGRHRVLGPFEFTMTQSGLVAAVGRVSAVIPSGAQVKVGIEAAGHYHRPVLDYRWPVGWEVLEFNPAHVAEQRRVAGRRRVKTDAIDLEAITELVLAGRGQPITEREVGIGELAAWAIHRSRRVATRTATKNQLLGQLDRAFPGLTRALPDVLGTKIGRLVAVEFADPARLSGLGVNRLIRFAAVRDIQLCQPVAERLVAVARDALPTRDAVMARRVLATDMGLLAVLDTQINAAEAELATLVPLSVFATLTSVPGWGVVRVSNYAAALGDPGRWPGPRQIYRASGLSPMQYESAGKRRDGKISREGSVALRRALIDLGIGLWLCEPAAKAYAAELKSRGKHGGIIGCALAHRATRIAYALVRDHAKYDSSRWA

SEQ ID NO: 56375 - protein, 319 aa, unidentified
MSAQTVIGIDVSRDWLDGFCLPEKQRFRFQNSPDGHARLLETLQSMPDGLKIGFEATGGQEWALWRLLISMGLNAVQLPPAQIKAFALSMGKRAKTDQIDAELIARFMAFRPEAGRTLPDVKLQFLRALTVRRAQMVEARKRLSAQISARRKQGVSAELEDMDSSLKAFLESQISELEQRIKSVIAEAEELSAKAELLRSIPGIGPVSVSMLLAEMPELGRMTATEAAAMAGLAPMAHDSGAMRGKRVISGGRRSLRHVLFQAGLAAACHNPVLRAVAKRMKQRSKPHKLVIVAIARCLITIANAVLKTGLPWRISSAA

SEQ ID NO: 56376 - protein, 459 aa, unidentified
MKRKTCGGKRVNVKRAEGNLSVTRPQVAGIDLGSVEHYVACPPRAGVAYVKSFGTTTPELAALADWLQAEGVGSVAMESTGVYWIPLYELLEQRGVEVVLADARQMKHVPGRKTDMLDCQWLQLLHSCGLLRGAFRPADAFCRLRAVVRQKATLIDEQADWLRRMQKSLDQMNVRVHRAVSDISGTTGMAMIRAIVAGERDPRKLVSLRSERCARTPREMLEELTGNWRADHLFNLKEALAMYDFIIERIAIYETEIQRILQELAPNPDVGPAPEPNNDNKKKLMRTRGQEPLRQALYGVCASDLTSIDGISTATAEVVLSELGANLNAFPTERHFVSYLKLSPKMAISGGKPIRKRPHGTASTRVGAALRMAALTLRNSKTALGGAYRRLARRKGASVAVFATARKLAVLIYRMLRYGTAYVDEGLQVYEQRFQKAKLRMCKDIANQLGYKLIQQETA

SEQ ID NO: 56377 - protein, 340 aa, unidentified
MQQVTTVGLDLAKNLFQVHGTDAQGRSVLKRKLARGKVLEFFATLPPCLVGLEACGAAHYWARELRKLGHEVRLMPPQYVRPYVKTNKHDAADAEACCEAATRPGMRFVPVKEESQQSLLMLHRVREQLLKQRTATINALRAHLAEFGIVAAQRRAGLRELLAVVADAEDRRLPPLARELLQVLADHLRALEERLATLDRRLLEIACADTACARLAAVPGIGPVIATALAAAVGDAKAFGSGRHLAAWLGLVPRQHSSGGKERLLGISERGDGYLRRQLVHGARALVKVSRGREGKPWAWIDAPLARRPSNLVAVAVANKLARVAWALLSRGEDYRAAAA

SEQ ID NO: 56378 - protein, 431 aa, unidentified
MPNRLQVGLDFSLKRADMCLLFPDGELLDAHLPFANSWPGFQEAKAFLLEAFDRFEFDGLDVSGEATGYYWLPFFYQLAADPDLAEHDLALFLLNPRWVKWFKKSFSPDDKTDQKDPFYIAERVRTRRPEVPWQPLSTLPLRFLTRYRFHLAQDLTRQKNYFLALLFLKASAYTRCRPFADTFGVTSQAILSDQLDLAELASLPLPDLATRLAQLSHHRLPDPTRNASRLQQALQDSFPLDPALAQPLQTVLDLALAHINFLDLQLDLIEDHIRAALPAYPAIQQLSTIPGVGLVYSSGIGAEIGDTQRFLDGRKWDKKRKRYRPRSLRDAEDAIAKLAGLWWPRNASGDFEAQDRKLAKSGNRYLRYFLIQAADKMRQHIKEYAQFYDRKFHEVPKHQHKRALVLTARKSVGLFVGLLHRNQAYRSQEPA

SEQ ID NO: 56379 - protein, 330 aa, unidentified
MIWLKIFFQLCGLNQAGKPVYTKRTGRKELLQTLANIPACLIGIEASTGAFYWQREFEKLGHKVKVISPQYVKPFVRGQKNDGNDAQAIAVALMQPTMQFVPPKSPEQQDIQALHRARQRIVNHRTATVCQIRGLLLDRGIPIGSAVSRARRAIPLILEDAENGLSSRMRRTIAELYDLFNDPGRRIHFFDKEIETVFRQSEACQRIAKVKGIGPETATAVAAIGKGTEFKNGRHFAAWPGLVPRQHSSGDRQVLMNMTKKGDRHLRTLFIHGARAVVRVATNNNDGHMNQWVNQLKERRGFNKTTVAVANKNARIIWSMLRNETGYQVV

SEQ ID NO: 56380 - protein, 305 aa, unidentified
MTTYIGIDVSKLLLDIHHNGQAAQIPNTEKAIRAYLKSLPDDTMLVCESSGGYEATLITQAHAQPCPIARINARQVRDFAKAKGRLAKTDTLDARIITEFAQAFHPTPLCPADPLQIELSALVKLRSHILNQITQNNNLQETLSDKNILRILASTVAALKKQEVKIRSLIVATIKRSPSLTSNVSRLQEVQGIGLVTAFSLLSFMPELGTLSDTQAASLAGVAPFNHDSGQFRGQRHIRGGRSHLRSALYMAALVASRHNPILKPLYQRLLAAGEPKKLALTVLMRKLILLANRILKNPQFSLVS

SEQ ID NO: 56381 - protein, 340 aa, unidentified
MKVATIGLDISKHVFHIHAVDSQGQVTSRQRLRRGEIMSFFSSLAPCLVGIEACATAHHWAREIRQFGHDVRLIPPAYVKPYVRRGAKNDAADAAAICEAVTRPNMRFVPIKSVENQGFLMLHRARGLLVRQRTMTACAIRAHFAEFGIIVGQGRQRVDGLVDLLDDEGLTLPAHARIALAVLMNQLKELDRQVEAIERELAQIQRVNPMAKLLSSIPGIGPITATALAATVPDATMFRSGREFAAWLGLTPKQNSTGGKDRLGRITKQGDSYLRHLLVIGARNVVRYPKARSRVGGGWIEALLERRRPMVVAVAVANKLARIVWAMMTTGEFYRSKLAA

SEQ ID NO: 56382 - protein, 408 aa, unidentified
MQLPPMHKRAMALDVHQAKITACAIVEHDDGRVEVTMREFGAFKRDRRALAQWALEIRPEVVVMESTGVYWKSPFAALESVGITAWVVNARHVKAVPGRKTDIADAQWLATLARAGLLRASFIPPLLMRQLRLVARQRQKLVGMCSAEKNRLHKVLVDAGMRINVVVSDIHGTSARAMVKALIADKPMHEVLDCKGRLRASREELFEALDTEQFSAVHRFVADEIVQHIEQIEQRIARLDAYLLEGLKAYGPQLNLLQTIPGIDLQGAAMLLVEIGADMSPFGSAERLASWVGICPGNNESAGKRKTGKIRKGNAWVRRLLCEFAQAAARTRCALRAKFEALAIRKGHKKSIVALAHKMLRTVYAMLSTGAHYQDKTVDYEALSVARNAPRWIKMLRKHGFIATPAAA

SEQ ID NO: 56383 - protein, 440 aa, unidentified
MIDTNQKQEIEFAAFVGIDWADQKHAWALQIPGHLDVERGYLDHTPEAVEFWAAELARRFAGRPIAVALEQSRGSLLFMLTKYAHLVLFPVHPTTLSDYRKGFRPSGAKSDPSDAGLLVDLLVRHREKLRRLNPDTEQTRTLQFLVEVRRKFVNDKTRYSNRLTAYLKMYFPQALEWFSEVTSPIAGDFLDRWPSLQKVQKARPETLRKFFVQHHSCKLDNIDRRLEEIHRAMPATHDAAVTCSCSAAVLALVRIVRAVRDAIVCYDQQIETLTREHPDFAIIDSLPGVGPALAPRLIAALGTQRDRYQSAGELQSYSGIAPVLASNGKQRWVHWRWACPKFLRQTFHEWAAHSIGSSTWAKAYYEQQRAKGKPRNTVVRALAFKWIRILFRCWKDRKPYSEEVYRQALARRHQLAVKSSPVQLQWKTCADFSKITAITS

SEQ ID NO: 56384 - protein, 315 aa, unidentified
MTSVRIYVGVDVAKDWLDVAQRPEEATWRVSNDDGGVAALVERLVQLRPALIVLEATGGIEMPLVGALVAAHLPTVVVNPRQARQFARATGRLAKTDVIDAQVLAQFGEAVKPEIRSLPDAATQQLSALLLRRRQLVDMLTAEKNRLRTAAPSVRPDIQGHIRWLERRLSELDGQLAQAIRSSPSWRERDNLLKSTPGVGPVLSVTLLAELPELGTLDRKEIAALVGVAPLNWDSGHFRGKRSVWGGRSKVRAALYMAALVAARHNPVIQAFYQRLVAAGKPKKVALTACMRKLLTILNAMIRHQTPWSLDHHAS

SEQ ID NO: 56385 - protein, 281 aa, unidentified
MRWIGLDIHRTSVEAAELRDGEPTVRRFRFCNTPEAWQRFAASLDRDAAVCLEATGNAFWIYDLLACRAREVVVAHPLKTRAIAEARIKTDKVDAEILARLLKADFVARVWVPPKPVRELRSLLGHWCCLVKQKTVLKNQVHGVLMRQGLRCPFTDLFGRAGRAYLQRIRGQLPETEQIIVDSALQVLDRVEAQLEALRRELYRRAQSVPAVRKLLAIPGVDVFTALLVIAELGDVSRFSSPKRVTSYAGLGGLVNRCVNTHQAAASSLTTSTPSSYCTPA

SEQ ID NO: 56386 - protein, 315 aa, unidentified
MAQTNITTAGIDTSKAKLDIAVHGRTERWQVSNALPGWRALAANLGKAGITRVGIEATGGYERGVVEHLQAAGFTVLVLQPMQVKAFGRMKLRRAKSDALDAELIAACSAAIDDPRITPDPRLADLAGYLTFLEQIEEDIARFKTRLEHIDEPGLRGIVNSDIARLKVRRAAQIRFIAKQLRAHHDLAIRLDLVLSIPGIGERTALALIIRMPELGHISREEAAALAGLAPFDDDSGQHRGQRHIAGGRGRLRRSLFAAALPAAFRWNKALVALYARLTAAGKSHKTALIACARKLLIYANTIVQRGTPWTEKAA

SEQ ID NO: 56387 - protein, 355 aa, unidentified
MTSEKYIGLDVHQATISVAVMDSQGKVVMESILETKASTLLEFLAGLRGSLFVTFEEGTWAAWLYDLLKPHVTEVLVCNPRKIPLLKQGNKSDKIDARKLAERLRLHDLKPVYHGETGIRMLRELARSYLTVVKDLSRVMNRLKALYRSWAIPCAGRDVYYRRHRSAWLDKIPEAGTRRRAEQLYQQLDLLQHLRQQARRELLAESRKHAITAKLRKIPSLGPIRSALAVALIQTPHRFRSKRQLWTYSGLGLETRDSGEYHFLKGQPRRRKKQATIRGLNKDYNHDLKGLFKGAATRASVKPGPFQEFYQRSLAKGIKPTMVRLTLARKIAAITLTLWKKGEDFDIHKLNSQAA

SEQ ID NO: 56388 - protein, 417 aa, unidentified
MFTTSDLLVGVDIHRRNNVVQVMNGVGDSLAKPQHVANNRPGTAALIQQLADLAQAGGFAHIHIAAEATGNYWLPFFCELEQSPELAAWPVSLYPFNPKVIHKFRHCLGDWDKTDTLDALVIAERLRLGRQLPYPFQMEERYLPLRTLTRYRYHLVGEVVRVKSYALSLVYLQASDYTVDRAFSDVFGKTSQAVLKEFPSLEAVAAMPFDDLVEWLDVKGKRRFADPQDNARRLHRIAQDSYHLPEPWLAAVNTALSLSLRHLTVLEQLLTRLDSAIADLMTQIPNSLTTIPGIGPVFAAGIIAEIGDLARFDYRHEKVASFAGLKWSKHQSADFTAEETHLKRTGSAYLRYYLCEAAQLVRMHDAEYGAFYQKKHDEVRHHQHKRAIVLTARKLVRLVVRLLTTHEPFRARQVPTG

SEQ ID NO: 56389 - protein, 377 aa, unidentified
MPPSPTSSPTATPTATPTATVLPESPPGDVTAGLDWATADHAVAIVNDRGTVLEQFLVDATGAGLRELVRRLRRAGVGEVAIERGDGQVVDTLLDAGLTVVVISPNQVHNLRGRYGSAGNKDDRFDAFVLADTLRSDRARLRPLIPDTAATVQLRSAVRARKDLLTHRVGLANQLRAHLRFFHPGPVGLFADLDAVTSLRFLGRFTCQDDTDWLTPSRLATWLRSVAYTGRKDPAALHAHLLAAAPGPSGPAGAAATAVTDAFVAALTAIVAQIHALDTHIAALLREHADAHIFLSLPRAQALRAARLLAEIGDCRGRFPTPESLASLAGVTPSTRQSGKMKTTSFRWSADKQLRDAICDFAADSRDPRRGERGLTS

SEQ ID NO: 56390 - protein, 426 aa, unidentified
MNNTDISRIEQFRQFKNQIKRSKKYLIVGIDIAKSKHHASVVSSKNKKLLRGLIVENNASGFEHLLSMVQFYMSRDGFDDVVFGLEPTGVYQKPLAQFLIRQGYLVVYVTNEAIKKNRWLLDGRWNKTDKKDSANVADLICQGKCQYYDLPDMNLRDLRSLLSLRGRFKKQLHSCQVRIRNNLVAQYFPELDKYWNQSKTENLAIVRWCLSPHRISQLSFEKFFQMVTPANKGQRQYQRLEKIWEIAPYSIGCQPGVSMEIEAKILVETIESIQRQIDKVNEVIEDICVSFVEYSYLISIPGFGPYISAVVLAAIGNADRFENSRQLLRLAGFDLSCNQSGNKSTVPVISKKGNAQLRYALYQAALIASSLNAQFRRYYVNLLQGREREKGIRTKMRVKLAVKLLVIAWTLMKKKQSFDPSYLKTK

SEQ ID NO: 56391 - protein, 349 aa, unidentified
MGEVSTIGIDIAKSVFQVHGVDTDGAVVIRKRIGRTKILKFFTDLPPCLVGMEACATSHHWARELRRLGHDVWLMPPTYVKAYVKRSKNDAADAAAICEAVTRPSMRFVPIKSAEQQSALMLHRTRDLLIRQRTQLINALRAHLAELGLVAAKGREGLHQLVTIVMESCDEKLLSDARFACQAIVMQLHAAQTQINGLDKRIIQAHRVNADSKRLNAIPGFGVILSTAVVATMTDPKAFKTGREFAAWIGLVPRQNSTGGKERLGSISKQGDRYLRRLFVVGAIAIVRTARMRPEKYPWVIKLLTRRPAKVVAVALANKMARVAWAVLAKGESYRAPTRSGNAAIAAAA

SEQ ID NO: 56392 - protein, 334 aa, unidentified
MQNITLIGIDLGKHSFHIHCQDKSGKALLRKKFTRTKLMQFLATCPPSVVVMEACAGAHFMARCISDFGHETKLISPQFVRPFVKSNKNDFVDAEAICEAASRPSMRFVQPRIETQQAMRALHRVRESLIRDKVKTTNQIHGFLLEFGISLPIGDAVIKRLSLVLAEHEIPEYLSRLLVRLHTHYFYLVEQIAELESELSQSINADDTAQRIMTIPGVGPITASLLSSQLGDGKQFSCSRDFAASTGLVPRQYSTGGKSTLLGISKRGDKNLRRLLVQCARSFIMRLERKHGKLAEWVREQLNKKHSNVVTCALANKLARIAWAITTQKKEYQA

SEQ ID NO: 56393 - protein, 303 aa, unidentified
MTVVIGLDPHKATHTAVAVDRAEEELDRIRVRATRRRLGQLRRWAEPFGDRVWAIESAAGLGDLLAQQLFGVGELVVDVPVTLAARARLLGTRRSDKNDANDARSVAVAALRAPRLSEVTPADHVAVLRLVAKRNLDLGRERNRAANRLHVMLTELVPGGIPKELTVSKALALLERAQPQTAVDHARYAMALELLDDVRRLDAQKNAMKRRIAAAVVASGTTVTDVFCVGPIVAYLVLGYTGDATRFADCHHFSAYNGTAPVEMSSAGRRVHRLSRRGNRTLNYAIHMAAVGQIRQLHSEGRA

SEQ ID NO: 56394 - protein, 274 aa, unidentified
MKLIRVGVDLAKSVFQVHGVDRSEKAAWQRKLSRAEWIKAVQQNVPLEAEIGMEACGSAHHWARQLRALGYSVKLIAPQFVKPYVKSNKNDATDAEAICEAMSRPGRRFVSVKTVNQQDVQAAHRIRSELMDQRKAKANQIRGLTAEYGLVAPREIWHRRRAIPLWLEDQENGLSPRFRRLLTGLWDDLRVLDGRLVELDQEITTIAASDPVAQRRQQLRGVGPLLATALVATVGDASQFGNGRQMAASLGLTPKQNSSGGKERLLGISKRGDC

SEQ ID NO: 56395 - protein, 343 aa, unidentified
MDQYIGLDVSLKDTAISIRQDGKRVWRGKCPSDPKALAQMISKHAPQAKRVVFETGPLSTWFYHALTAEGLPAICIEARHAQKVLNETLNKTDANDADGLAQLAEAGFYKAVRVKAFDSMLTRTLVAARNQLLSISKQLSNQIRGLMKTFGLIVPKGAGRVFDANVRGLLDGNAGLELVVLPLLEAWRDIRRHAANLDHQVLGAARESQATKLLMTIPGVGAVTAVSYIAAIEDPVNFRTSRSVGAWLGLTTRRYQSGEIDYDGHISRRGDGQLRGLLYEAATVLLTRTSRRAECSLKTWGLKLRERLGFRRAAVAVARKLAVIMHSMLKTGEVFNALAGDPA

SEQ ID NO: 56396 - protein, 406 aa, unidentified
MEVVVEIGAGLDVHKKRIVACCLDGRSTPPKRIRRTFGTFFNQLQSLRDWLVTAGVTDVAMESTGVYWMPVYRVLEGHVRIILGNARLMANVPGRKTDESDAEWIAVLLRHGLIRPSFVPPKAIRELRQLTRCRRKLVQMRTTAQLRVDKLLQMANIKLSSVASDLFGVSCRKMLRALTDGITDPVVLSELSYSTLRNKRPQLIQALTGTLSVEDRQLLKIQLDLVDDLKRELGRVDELIQQKVIPYEAIVQLLDTVPGINRTIAQEILGEIGTDISIWPSQRHFSAWAGVCPGNRESGGVRRRARSREGDRYLKSILAQAATSAAHVRGSYCAARFRSLKFRLGERRAILALAHELALSIYFILLRQQPYREPLAADPRLVRDQRRRSLIKQLQKLGYEVTCSDL

SEQ ID NO: 56397 - protein, 415 aa, unidentified
MEVVHPRCAGIDVSKRDAKVCVRVQGGHGRKTSSTVTTWGAMTNQILALKDYLAEQRVTVAVMESTSDYWRPFYYVLEADFEVLLVNARDVKNVPGRKTDVSDAAWLADLGAHGLLRASFVPPEPIRQLRDLTRARTHITQERTREVQRLEKLLESAGVKLSSVATDITGVSGRLMLQALIDSQGTADPAAMADLAKRRMRSKIPELTEALNGRFTAHHAFLTRLFLDRIDVHTKDIAALSERIGELMKPFLPARDLLESIPGFSQIIAEIVIAETGGDMTQFPTPGQLASWAGVSPGSNESAGRVKSTKTRPGNRYLKGALGVAALNQARSNKTYFSARYRRLARTRGPMKAIVAVEHAMLTAAWNMLTNAEFYRDPGADYYTRHDPAKAKARAVKQLEALGYRVTVQPLEQAG

SEQ ID NO: 56398 - protein, 387 aa, unidentified
MAQVNDLSRSLTAFDPISTLVVVVEMSKASWLVSGVVPGIERQPLKKLEPDATALLRLIERWRNEAMRAGRPISRIALAYEAGRDGFWLARWLITRGIEAHVIHSASVAVSRERKRAKTDRLDAAMLMRVFLGWLRGERGHCGMVVIPTMEEEDARRPSRERESLVNERSRITNRMKSALARLGIRGFKPHLRKAPERLAGLRTAEGTGLPANIIEEFRRDMARLALVREQISSIEKTRAERLERAPDTGPHAMVRLLARVIGIGIETADMLVREILSRKLRDRRAVARYAGLTGSPDESGLKRREKGLAKAGNARVRRGLIQLAWRFLMFQKDSALARWYRTRTEGPSGARKTTMIVALARKLLIALWRLVTTGEVPDGVELRPAA

SEQ ID NO: 56399 - protein, 459 aa, unidentified
MSASKTKVNKRSVQSLPILQPKVAGIDLGACEHYVCGPALISGEPNVRVFRSTTPQLIGLIAWLQEQGVKSVAMESTGIYWIPLYELLEASGIEPILVNARELCHVPGRKTDVQDCQWIQLLHSCGLLHGSFRPSEGICRCRALTRQCANLVKERSKTVNWMQKALDQMNVQVHRALTDITGKTGLAIVRGIVEGQRDPKVLACLRDSRCGKNEKEIAEHLTGTWKSEHLFNLKMALKLYDQLQAQITDYEQELHKELLAMTPQERKNKEAPEHPKAAKRKAIRNRGEQEDQKILWQFSGVDLTRIDGISAGVSQVILTEVGFNLSDFSSKKHFVSWLRLCPKMGISGGKALKKKPPRGTGSNRVAGILRMAAVSLSRSHSSLGAEYRRVARRRSGAVAVFALARKLAILIYRTLHYGQDYVDEGEKVYQERFKARRFFSMAKTAKELGYQLVELPANR

SEQ ID NO: 56400 - protein, 341 aa, unidentified
MVTTIGIDPHKATHTAVAIDGSETVLAEITVPADRYQTKKLIDWASQLNGDGRCWAVEAAGGLGHLLSQQLVAHGEHVVDVPAVLASRVRVLSSGRSDKNDPNDARSVAIAALRQPDLVRVRREDHTQVLRMLAKRHLELTSLRTQAVCRLHSVLTQLRPGGMARRLSASKTTRLLQGMRTLDAVGEQRRSMARTHLGDIRRYDREIKANKVLISEAVVASNTTVTDVYGVGPVVAAFLIGYTGDIGRFASADHYAAYNGTAPVEYSSGGKKRHRLSMRGNRVLNHAIHMAAVTQIRHDTPGRVYYYKKQAEGKTRKEALRALKRRISNIVYRKLVADQQS

SEQ ID NO: 56401 - protein, 387 aa, unidentified
MFSVGIDVAKRSHQACVLNDSGQMVGQSFKFPNSRSGVDTLVATLQELGSPATIALEASAHYWQGLYHYLVSQGFPVVVVNPLQTEAYRSTGVRKVKNDRGDAFVIADFLRIGRAQPNYVPGELTVQLRELTRYRMDLEDQIGDAKRRILTMLDRVFPEYPGLFTDAFMNSSRALLKEAVSAGDFANFDLAELTSILRHASRGKLGEGKAQEIQEKAKQSLGMAFLGPVARVKVGTILEQIDLLNRQVREVETAITELMERQPQYLTTIKGIGPVLAATLLAEIGDIRRFPSLESLVAYAGIDPSVFESGEFTGRRQRMSKRGSPYLRRALWLAAHSTRQWNTDLNDYFQKKLTEGKPYKVALGALCRKILARVYIVLKENRPYQVR

SEQ ID NO: 56402 - protein, 433 aa, unidentified
MKVKYEDRLKQKLLAITPDTLVVGVDIAKNYQWARFVDFRGIEHSRALKFKNRKGGFEIILARIQEICKKENFAKVVVGMEPTGHYWKAFANWLEKQDGITVVLVNPYATKQAKELDDNSQTKSDKKDALTIAKLVKDGRYFELYLPHDIYAELRGLSTTRTGLNKRKNALKNTITAILDEFFPEYEEVFKHPLTGKASRHILKTCPFPKSILELGEEGVTAEIKKAVRKTVGRKKAGQLVEAAEGSVGVDYGEEAARLKLRLMLEELELLEKQTEELESQMESALEKTGYAEFLLSIKGIGVVTLAACLGELGDPTRFESPRQMSRMAGYNLVEDSSGKNKSGTKISKRGRKNLRSVLYQMSLTMVATNDEMKQLYHYLKTREKSPLRKMQALIVVSKKILTLIHTLAKKKESYDPEKVFGTVRREQFKAAA

SEQ ID NO: 56403 - protein, 411 aa, unidentified
MRLFVGDDWAEDHHDVEVMNEAGKVLAKRRLPEGVAGMARLHELIGEHLGEDTDDAEVLIGTETDRGPWVAALAAAGYVVYAVNPLQASRYRERHGVSGAKSDSGDAHMLTDMVRTDSHQLRAVAGDSAGAEGVKVLARTHKTLIWERTRQVQRLRHQLREYFPAALEAFEDLDAPGTLELLGKAPDPARAAKLTRAQVSAALKRAHRRNITDKATAILAALRSAQLGQPEAVTAAYAVTVRALIAVITTLNEQVKTLQGQVEADFGRHPDAEIYLSQPGLGPILGARVLGEFGDDPDRYASGKARKNYAATSPITRASGKKKVVAARFIRNDRLTDALMAQAFTALTASPGARALYDAERARGAEHNPALRKLANRLVGILHGCLKTRTIYDEATAWPHEEKIPQTDLAA

SEQ ID NO: 56404 - protein, 347 aa, unidentified
MEHRIITAVGIDVSKYKSMVAVRRPGGEVVMEPFEVQHTAAGIAGLVSKLAAVDGEVRVVMEHTGMYWRPVAMALKQAGFFVSVVNAILIHRFSDNSLRKVKTDKADAMKIANYALAYWSDLRDYSETDETRQLLKVQCRLYERTIKTAKSLRNSLISILDQTFPGANKLFRDESRNSRGHVKWIDFVLRFWHKECVAALSLATFTDTFQKWCKRTGYKFSASDAERIHAIARNAVATLPKNDSTKHKGALVAYAGVDASPYQSGSFDSKSRHVSKRGSPHLRRVLFVIMSMTLIRANTANPVFCFMDKKRAEGKHFYVYTVAGSAKFLRIYYAKVKEYLNALEDTA

SEQ ID NO: 56405 - protein, 355 aa, unidentified
MKFYVKQHKYYCGIDLHARTMYVCIIDKEGTIVKQKNIDSGPDAFLQIIEPYREDIVVAAECMFAWYWLSDLCSRENIPFVLGHALYMKAIHGGKAKNDRIDSHKIAALLRGGLIPMAYVYPPEMRATRDLLRRRNHLMRKRADLLAHIQNTNHQYNLPAFHKSICYKGNREGVAERFSDECVRKSIEVNLSLINHYDQLLRKLEYYINQKAKAHDPEALFRLLSFPGIGQTLSLIILYEIHDIHRFPRVQDFVSYSRLVKSAKESAGKRYGSSGAKIGNAHLKWAFSEAAVLSLKQSPEIKKYKARLVKKHGKAKALTILAHKIGRAVYYMLKRKEVFNIDKFLNKQLIQTGRA

SEQ ID NO: 56406 - protein, 351 aa, unidentified
MMIIGVDYHPSFQTIAFLIEETGECGEQELNHSDGEAEKFYRELKQRGISVRVGMEATGYSRWFERLLAELGFEVWIGDAAEIKTKRVRKKKTDREDARLMLKLLLENRFPRIWVPSPENRDLRQLLWHRHRLVQMRTRIMNQLQAVAMNEGYRWKKKLFSAQGRAQLEKLSLAPWASRRRKELLELLDQLHPKTAELTALVEQEAKKRPEVVQLMTHPGVGPITGLAYVLIIGTPERFPCGKQIGSYTGLIPCEDSSAGRQRLGHISKQGNTLLRFLLVEAAQAAARCNPDWRRRYLHLMMRREKRIAKVAMARKLAVRLYWMWRNGWDYSQMVEFGSHAGKLVTGHGAK

SEQ ID NO: 56407 - protein, 343 aa, unidentified
MLTNNVIAIDLAKNVLQICHISIDGELLFNRALSRQKAKEFLTKTKPSIVAMEGCCGCHYWGQLAEQCGHEVRILNPKKVKGYLEGHKTDHNDALAIANAAIQIGIKYSQPKTLEQQAMHSLESSRRFLSRSVVSLGQHIRGTILGYGIANPRGEKGLKASIQSVLDDETPIPANVVSVLAMLWEQYKLLKSKLIEFEKEKNALTRQIEPCQRLMEIEGVGETTAAMLYTTLGDGKQFKNERQASAFVGLTPKQHSSGGKVFMIGIDKCGGVKELRSLLYLGAMSYVGRLPETPKTQKDAWLAKIVKRIGYKKACIALANKIVRTAWAMLRYETKYKPILLTN

SEQ ID NO: 56408 - protein, 345 aa, unidentified
MKHCAGLDVSVKETAICIVAETGKIVREAKVTTEPEAIVAVLTEAKVEYARIGLEAGPMSQWMVTGLLEAGLPVVCVETRHMKAVLKAQQVNKSDRNDARGIAQMMRVGLYKPVHVKTLASQHERMLLTARKLLRDKLQDVENELRGTLRNFGLKVGVVSTGHFEARVRELVVGQSPLEAIVAPLLAVQQVLREQFAVLHKRVLERVHRDRLCRRLMTVPGVGPVVALTFRATVDQPQRFARSKTVGAHFGLAPRRYQSGDTDYDGRVSKCGDAMMRTALYEAAQVLLTRTQKWSWLKAWGMQVARRRGGKKAIVALARRLAVILHRMWIDGSQFRWRKEVNAAA

SEQ ID NO: 56409 - protein, 328 aa, unidentified
MEEVKRFVGIDVAKAALDVFIGSGGGAFSVANDEVGIRELLRQLTPADFVILEATGGLEVPVASALAQAGLAVAIVNPRQVRDFARATGRLAKTDRLDAEILARFGETVRPAARPLATEQALALEALVTRRRQLVEMLTAEKNRRTNAPKVLHRSIDEHIRWLEKRLVGFDDELAELIRNTPLWRERDELLRSVPGVGKVLSTTLLAQLPELGMLNRKQIAALAGLAPFNRDSGKLRGSRCIWGGRAQVRRVLYMATVAGVRSNPTIRAFYLRLRGNGKHAKPALTACMRKFLVILNAMLHNNTHWQTPALTSSLSPLLGAVSEHGCC

SEQ ID NO: 56410 - protein, 341 aa, unidentified
MMIIGCDFHPRFQQIAFVDQGTGEYGERRLNHPQEAEQFYRSLAGVKVRIGAEATGNFRWFRHLMEELGHEFLLGDATAIRAACPRRQKTDKRDARHILTMLVEDRFPVVWQPSVENDHLRQLLLHRCRMVRMRTRIKNQLDSMAKNEGVLSSRVWSPKRRSEIEALPLPGWYAHRRADLLGLLDELDKRVRPLDQAVREAAEGNREACLLMTHPGVGPIVSLAYVLTIGDWRRFPRGKQVGSYLGLIPAEESSGNTRRLGQVSKQGSVLVRWLLVEAAVHAQRHDPSWHRQYVRLSMNKHHGVAKVAIAHKLAVRLYWMLRSGDDYSKVKERGSHAGQSV

SEQ ID NO: 56411 - protein, 394 aa, unidentified
MGKVYVGIDIAKDRSTAHGIEEGGGSLFELTFDMNGGGFAELLKRIEASAGSLGNVVAAMESTACYHINLYSFLSAKGIEAVIINPLLIANYTKLTLRKTKTDRKDAKTIAQFILVHKDSVTQLAVSQDLQDIRDMARERESLCHQISSAKVEIQRILQTTFPELAALTNPLTKVMLHFIQRFPSARLVSIAKPSAIEKTLRERPCSCRLRFTPKDLIEVARKSIATVSPAKEIILSGKIETLLHLQKRSDELTKALTKYCEATVVEDLRIVTSIDGINNKMATMLLAEIGQIANYHPYKNLIAFAGIDPTVYQSGKYEGASRISKRGNRHLRRVIWLMAISVIHHNTLFRNYFLKRRNEGQPFKKAVFATAHKLMRVIFAMLSKKTVFAAECI

SEQ ID NO: 56412 - protein, 350 aa, unidentified
MIIIGCDYHPGFQQIAYVDTETGELQERPLQHREEAEKFYRELAAQGLKVRVGMEASGQARWFERLLAELNFELWIGDAAEIRTKRVRKQKTDRQDAQLILQLLVEDRFPQIWVPSWENRDLRQLLWHRHRLVQARTRLMNQLQAVALNEGLRCKKRLWREAGRQQLEAFRLAPWASRRRQDLLELLDRLNPTIAELTQAIEREVEKCPETRRLQTHPGVGPLTALAFVLIIGKAERFRCGKQIASYLGLVPLEDSSGSRRRLGHITKQGNSLLRFLLVEAAQVTVRSDPGWRSKYHHLMMRRGRKIAKVAMARRLAVRMFWMMRKGWNYEQLKKFGSHAGQLVPGDGVK

SEQ ID NO: 56413 - protein, 357 aa, unidentified
MTNDKYVGLDVHQASTSIAVLDWDGKMISNAVVRTTADAIRDFINGLSGTIHVTFEEGTQAAWLYEVVKRLVAELVVCDPRKNKVLAVGNKGDRIDATKLAELLRGGLLKSVFHSNHDTKVLKQLTHNYDSLVSDTTRVMSRIKAVFRGQAIPCSGRDVYYKRNREQWMTRLAEPGLRIRAQFLFDELEPLKALRREAKKVMLKEARRHKAFKILSQVPTLGPIRIAQIIAVVGAPHRFRTRRQFWAYCGFAVVTRSTDDYRWDENGPLRRSRPPATRGLNRNFNRRLKHVFKSAALQGAGHEPFKSYYQARVAAGMRPEMARLTLARKIANRTLTLWKNGGQFNERKLSAQHDRAT

SEQ ID NO: 56414 - protein, 414 aa, unidentified
MLFIGDDWAEGHHDIEVEDDTGHRLARMRLPEGVDGLARLHEVVAECLDTDTDTDTDGPAAGAVIIGIETDRGVWVSALLACGYRVYAINPMSAARYRERHCTSGAKSDAGDAHVLAEIIRLDRDHHRQVAGDSTQVEALKLLTRAHQSMIWDRTRHLQRMRSALREYFPAALTAFDELTGPDTLALLQKAPDPHRAARLTTAQITAELARAHRRGDRTAKATRIRDALRAPSLRQPAPIEAAYAIVVAGQARTLAHLAGQIEEMEQAVRRSFRQHPAAEIVRSCPGLGNVLGARVLAEFGDDPLRYRNAKARKNYAGTSPITRASGKKKTVLARYARNKHLADACHQWAFCSTNASPGARAYYDALRAREVGHHAALRQLGNRLVGILHGCLKTGTVYDENIAWPQAPTQAAA

SEQ ID NO: 56415 - protein, 362 aa, unidentified
MTKSTTIIAFDQHAATTVAAVLLPADRTPALHKLTSDIPTILRFLERMRRGHAVQCCYEAGPCGFELQRALSGRGIRCDLIAPALIPRRSGDRIKTDRRDAAQLAVLYRAGALTAIHIPTEQEEAARDLLRCREDIRADLLRARHRLSKFLLRHGRRFTGTKKAWSKRHDVWLRAQAWPIPALDQTHRAYLRAVDEALARLRSAEEDLRALVTLAPLQERVQRLRCFRGMDDLTALTIAAELGDPRRFASAPRTMAFVGLVPSEHSSGTRQARGAITKTGNAHLRRVLVEAAWHYRHRPFVGAALRRRQRGAPDAIVAQAWTAQDRLYRRYHRLAGRGKPHQQVITAVARELTGFVWAALVQ

SEQ ID NO: 56416 - protein, 348 aa, unidentified
MILVGCDLHSRTQQVAVLDTRTGELVEQALAHEGDAVERFYRALPPPVTIGIETTGYTQWFHALMHQLGHTVLVGEAAKIRAMVVRKTKTDRRDARHLLDLLQHDRFPTVWIPDPDTRDRRALIAHRVRLVRMRTMVKNGLQAIALNQRLALRSALWTQRGLTQLKALALPPHTTRRRDDSLALLAWLTTRIDQLDAHIAAVASADPRVQLLLTHPGVGPLTALTTVLVLGPLARFPDSKHVVSYVGLAPAVHASADKQRLGKITKQGNALLRWVLGQAAPLAARKDDDLRRRYFSVMHRRGRPKAKVALARKLLVRLYIMLRDQIDYEEFRRRGRAPRPQQLPVAVM

SEQ ID NO: 56417 - protein, 350 aa, unidentified
MTTMTETRRQITGGVDTHRDIHVVAALDERGGLLDTNTFPATAAGYHDLLVWLSWFGPIDKVGVEGTGTYGAGLTRHLMDNDVEVIEVDRPNRQRRRRAGKSDTTDAISAARAALSGEASTTAKTRDGNVEKLRVLRVARRSIRQDRIRALNQLRSLVVTAPDELRTQLSDLTSIGVSQAVTKFRVADPTTTLGALKYAMRSLGRRAEALRWEAKEIDKIMRSIIEDTAPALIDQGGIGVDAAGALLVAGGDNPQRLHSEAAFVRLCGAAPLEASSGMVTRHRLSRAGNREANAALYRIIINRMANDDRTRTYVKRRRAEGKSNLEIIRALKRYVAREVYPLLGNNPLTT

SEQ ID NO: 56418 - protein, 345 aa, unidentified
MERYLGLDVHARSCTFCVLSEAGKEIRREVVETNGQALVGFLKQQPGRLHVCVEEGEWSLWLHETLSPHVAEMISVWPEAKQGAKSDGLDAHGLAERLRTGRLGRVAYKAPQKFAELRELARAYTLLTRDVVRQKNRLKSLFRRRGIDCPGEEIFQVEGRQNRLSELPKAMRRTVELLGTELDRLEELKAEAAKAMLAQSHHYPIAAILETAPGMGPIRVAQLLPIVVTPHRFRTKRQFWSYCGFGVVTRSSADWVRQDGGWVKAHVAMTRGLNHNHNHTLKTIFKGAATTVIAHARPNPLREAYDRLCEQGTKPNLAKLTVARRIAAMVLAMWKRQEVYDPKHA

SEQ ID NO: 56419 - protein, 465 aa, unidentified
MKKDTKSPKTKPAQLTSLNPKCAGIDVGASELFVCVAKNPSEQVVHSFPTFTPDLKRMIAWLKESGVESVAMESTGVYWIVPYEMLEEAGFEVLLVNARFFKSVPGRKTDVQDCQWIQQLHSYGLLRGSFRPSKEVVELRSYVRQRSRLFESAGIQVQLMHKALTQMNIQLNHVISDITGVTGLNIIRAILKGTRRPQSLADLSVGACRKNMDLIEKALEGNFRKEHVFALEQAHEAYEFFHKQIHKCEKAIEKILSSMQTEAQLPSPKSDVSAESTHPQKCAKKTASNRSPYCFDAPAAIKKVTVSDLTTIPGIDANTAMKILSEIGTDMSRWPNAKAFASWLGLSPGNKISGGKLLSSKTKPSDNRAAQALRMAAAALYRSKTAIGAFSRRLRARVGAPKAITATAHKLARILYRMLANGINYREAGENYYEQQYQARVMDNLIKRAKEFGYTLVPAQQTQGN

SEQ ID NO: 56420 - protein, 416 aa, unidentified
MNGKSPGTFARFIGIDLHKHYLVVGGVNAEQEVVLPPRRVNLGSWLKWAEANLMPTDAVVLEATTNAWEIYDQVAPLVGRAVVANPVQVKWIASARVKTDRVDVGRLACLLAAGLVPEVWVPPVEVRELRSLLAHRRRLVKMQAMIRNRLHSMVHRHNLTLPKGEAFSHEHRGWWLGLEISRTENLRIRQDLATMDHLEPQIAEIDSELHRLSTCAPWADQVPYLLQLPGFGLITTMTLLAAIGDITRFESARKLVGYSGLGAGVHASGQTHHSGRITKQGRAELRWALVEAAWVAVTTHAHWKREFERLSRRMSPKKAIVAVAHKLLVVVWHVLAKRTADTEAVAEMVASKLIGWSGRLGEEGRGGLATRQFVRYHLMKLKLGEDLKGVRQGRTTRLLASPEEMLTLRPELTSVR

SEQ ID NO: 56421 - protein, 330 aa, unidentified
MKQDNLLGIDVSAKELVVKIKRSGKSYPIVSFENDASGHRKLIRWATKGGKCARVCVEATGVYSFELALALHQNKQTEVMVVNPRALRNFAQALMQRAKTDPIDAEVAVEFLERMPFQVWEPPRDEVLELQAITRRILQMKLEINRESNRLHASLRRPSVSKAISKDIEVNIRHLKRRIERLEKEGLALIESVPDLHKKFKRLVSITGVATVSAMRILAEIEMLPKDMNPSQWVAHAGLDPRPFESGATINKHRHITKAGNKYLRSALYMPALVASQKQENVKAFYGKLIQKGKRPMQAVVAVMRKLLHAIWGILHHDQDFDGEKFYKLA

SEQ ID NO: 56422 - protein, 347 aa, unidentified
MLYVGLDLSRKRLDWHALLADGERLGAGACPPDSDGLAHLVHRLGAEQRPVLAAIESMSGARFVHDQLELAGWDVRIADAQRVKGLAPLACKTDRIDAWVLAELARRELVPEVWLPDPGVRAERERVRFRLFLVHKRTALKNRVHALLFQHGLRAPVDDLFGAGGRRFLARTQLSEPWRSTLAASLHLIDVLEEQIAGLERELRRQGAEHRYVGLLMSCPGVGWVLGSTIAAEIGDIARFATAAKLVGYTGLCPRVRQSGEVDRRGALSKHGPPYLRWALIEAAHNAIRSHPAYRARAERTRARLGQKRGGTIAALTVARSLAEAIWWMLTRNQPFAPAGATIPLTA

SEQ ID NO: 56423 - protein, 344 aa, unidentified
MKITTVGIDLAKNVFQVHGIDEHGKAVLKKQLRRDQMAAFFANLPPCLIGMEACGSAHHWGRKLQSMGHKVRLMAPQFVKPYVKTNKNDAADAEAICEAVGRPNMRFVPVKNVEQQAVLALHRVRQGFVRARTAQANQIRGLLGEFGLIVPQGIGHIATRVPELIEDGANELPGAFRLLIQRLLDHLKELDRQVDELEEKIHAWHRNSDLSRKLAMIPGIGPITASALVASIGDAKNFDGGRQVAAWLGLVPRQHSSGGKSNLLGMSKRGDTYLRTLLIHGARSVIYRVSQRADACSWISSVVNRRNKNVAAVALANKNARIAWALLAHDRQFDAGYVRSAAVA

SEQ ID NO: 56424 - protein, 351 aa, unidentified
MRRFYTKQHRFYCGIDLHARLLAICIVDHDTASVVCRTQIPANKQLLLDTLAPYRADVVVAVECLFAWYWVADLCAQEAIPFVLGHALYMKAIHGGKAKNDDIDAEKIARLLRGGNIPVAYVYPKGLRETRDLLRRRMHLVHQRAGLITHIQILNAQNNLPDFKKKLIYAKNRAELKVAERFLNPHVRKSVAVDLALIDALDAQVADLELYLERTAKVEDPTTFHLLKTIGGVGKILGLTMLYEIHDVRRFAEVGEFLSYARLIRCTHESSGKKLGVGGAKIGNAHLKWAFSEAVCLLIRNYPAVKAWQAKKEKRHGKKKTLGILAARLGRAVYHMLRRGVAFDVRRFLGQ

SEQ ID NO: 56425 - protein, 439 aa, unidentified
MINRIPEMVLAVDFSLDRLDVSLRGDDRDWLWAHQAYPNNWSGWQHLKQDLLVELNQAAPVRLTAVGESTGPYWWHAFYQFSHDDDLRSFSPELALLNPARVKGYRKALSERDKADPDDARLIDQYYRAVGVEHPHQFHDRYLRLRTFTRAYSRVTHTLASEKAYFLSVLYLWASEYSRKKEKPFSNLFGATSLYILDEFIDIQAVADIPLQELTDLLNQRSRNSFSDPQANARKLHNVACHSYPVPEYLTDALHQVIHHTLAHIRLLSDNQLAYRQLIEQELDTLPEAKLALDFKGLGTILVAGCLSEIQDTSRFVTGTKFDRRRKQHRPRTYRDGQAAVAKLAGLWWPKHDSGRVQGLQPYLARERNPYLRYWLVQSAHTLHRYQPDYCQFYWKKYHEARSHHHKRAIVLTARKAVRLIFALLHKGRQTCLEEGLLT

SEQ ID NO: 56426 - protein, 395 aa, unidentified
MERPMSRQFRFDPSRSLTALEQDSTIIAVIEMSQSKWLVAAVVPGIERQPLKRLIAEKEALLKLLHRWRNEAREVGREIKRIVVAYEAGRDGFWLARWLLGQGIESYVIHPTSIAVSREHRRAKTDRLDTELLIRVFLGWLRGERRHCSMVAIPTIEDEDARRPNRERKNLVTEQTRIVNQLKAIFTRFGIRIVPSTRRNLEQRLEGLRTAEGTLLPENTRAELCRHLARLRVVREQIRAIEQERLRKLAAAPGSARGSHAMVHLIARILGVGVETADMLVNEILSRHWRDHKAIARYAGLTGSPDESGSRRRERGLARAGNARVRCGMIQLAWRFLRFQNNSALAQWFAARTTDRRGGTRKTMIVALARKLLIALWRLVTTGELPQGVVLRPAA

SEQ ID NO: 56427 - protein, 354 aa, unidentified
MNTIKYIGIDVHQATSVFAIMNQQGKMVGEATLETKPATIIDFLKGQRGTLWVTFEEGTYANWLYDVIQPQVAKLVVCDPRKNKLDGNKSDKIDARRLAELLRLNALTAVYHGKYSTRTLKELARSYVSLQQDSTRVMNRVKAMFRSRGIACRGTSVYQPKNRKEWLEKLDDHGPRHRAERLLKQLELLQELCLEAQKDLIREGRKHKSYKILRGIPGLGPIRVALILAFVMTPYRFQNKRQFWTYTGFSIVRRGSAEYEITQGELKRTKKKPLPRGLNNNYNHVLKNVFKGAALTAAYRGPLQKAFDRRVADGVAPNIALLTLARKIASITLALWKKGEPFDIKRHRLGEQTT

SEQ ID NO: 56428 - protein, 395 aa, unidentified
MISVGIDVSKGKSKVCIMKPGGEVLAAPYDVQHTKNELNNLINTIRSYDEETKVVLESTGQYHFPVVKMLADNGIFVSVVNPLKMKHFASQDIRKVKTDRIDSIHIAMYGITYWNDLKESSLSADVYSELRILSRQYGYTVSLMVDAKNNLKRIIDSVMPGLDDYLKDNRQNNRLCDFAKHYWHYDNITKFSEKRFVNSVISWKKKKGYHLTEAQAKTIYALAQDGIPVLPCTSTTQLIVTEAAELICELEKTRKTILAQMTAFAKTLPEYSVVREMSCVGDILAVRVIAEIGDISRFKSKRSLIAYAGIDVPPYQSGNFNATERHITKRGNAYLRQIGFEIAQSYIMHKPKDDPIYDFILKKRSEGKCGKAAMIAGLNKFLRVYYGKVSEIYRV

SEQ ID NO: 56429 - protein, 345 aa, unidentified
MGVIIGVDPHKASCTAAVLDERGELVDQQRFASTRTGSRALGRWAKRWPERRWAVEGASGLGRRLAQQLVGDGEPVVDVPAKLAARVRLLSAGHGRKSDAHDAVSVAMAALGTTRLGQVRLEDHTAVLRLLSDRRDDLVRQRTRTLNRLHVLLCDLLPGGAKRSLDADTAAALLRRLRPATAPARTRRQLAVDLVADLRALDRRITAVEERLRHAVTQSATTLIELFGVGPILAAKLLGEVGDIRRFATKHRFAAHNGTAPIEASSGEVVRHRLSRAGNRKLNHALHLIAIVQIRHPTAGQAYYRRKLAEGKSRKEALRCLKRRLSDAVYRQLLADQHQPVQAQA

SEQ ID NO: 56430 - protein, 339 aa, unidentified
MTDWTVAIGVDTHKEAHVAVALSRIGAQLDSCKVEATPAGYQRLLTWAAALGRPLFGVEGCGSYGAGLVRFLEVEGVRVYECERPRRGERRRGKNDHIDAALAARRIVSGEGLSLPRGGGQREQLRLLLVERRGAVRARTAAMNQLSSLVVTAPEPLRRRLATLSKQQLARKAVQLRSRSDLVADVLRRIGRRVECLSQEITEIDRSLSALVAAIAPQLLAECGVGAVCAAQLVVSSGDQHRMVTEASFAALAGTTPVEASSGKQQRHRLNRGGDRQLNWALHVIALQRIHHHTETAAYYQRLLAAGKTTREARRCVKRALARRFYHRLRESHTPALTT

SEQ ID NO: 56431 - protein, 339 aa, unidentified
MKLYAAFDLHSRSSHLAVVDEQGNKVFKTKLANEAENMLLALEPFREGLAAIAVESTFNWYWLVDALMESGHHVCLANPVAVQKYKGLKYSDDASDAIWLAEMLRLDILPQGYIYPREQRPIRDLLRKRTHLVKLRTSLINSLANIVARNMGVSLGGNKIKQLTSDHVAPLLDGDDDLALSGRVSKEAIDYLTRQITTLEKVLECKLPLKQEYALLRTIPGVGTILSLTITLETGPIGRFPQVGNYASYCRKVPTRWTSAGKQKGSGNKKNGNKYLAWAFSEAAELARRFDPKIKAYYDRKAARTNAMIAHSTVAHKLSRAAYYIMRDKVPFDRERLFV

SEQ ID NO: 56432 - protein, 423 aa, unidentified
MMRLVYPICCGLDVHKNIIVATIVTTGKDGISEYNQKSFSTINSDIQKFHDWLIENNCKHVCMESTGKYWIPIFNYLENDIDICLTHPKYVKAIKGKKTDKKDSKWIADLYKFDLVRCSFIPPKDFRQLRELARYRFKLVCMKSSEKNRIQNCMTVSNIGIASILSDPFGRTATEIMSYLLQNTADIIDNKAIRKLIKKGAKAKSDEIIEAIKGYNIETDQHKKLELARAHLDYLDDMILQTEVELYVRIKPYYAFVEYISSLPGITELSATIILAEIGVEMNNFDDAKHLCSWCGLTPSNNESAGKKKSVGIAKAGAYLKPMMVQCALAAIKSKKTPYFAIKYGRLKKRRGHKKAIIAIARMMMVCIYHMVSEKHTFNPTDYTELMDPHYNQPKVTLNDSNVFAYLEAQGYDTSLLVKCNDN

SEQ ID NO: 56433 - protein, 411 aa, unidentified
MEVVHVRCAGLDVHKATVVATVRVPGSRRGERHSETKTFGTIARGLTDLAQWLVGHGVTDVAMESTSVYWRPVYAVLENTVHVILVNARHVKMVPGRKTDVRDSEWLAQLLECGLLRASFVPPPAIRDLRDLTRLRKTLIRERGHHANRIEKTLELAHLKVSGIVTDLMGKTGRAILQALSAGSDDPDQLADYAHGLLRKKRAALREALVGHLTPHYAFLLQQHLALIEALDTHIATLDARIDEAMMPFAEAAALAQTMPGVAGRAAQAILAETGVDMTPFPTAAHLASWARLCPGNHESAGKRQPTTTGKGATWLRATLQQVAWAAIRTKQSYYRALYHRLKARGGAKKAIVAVQHALIVALWHMLKHRVVHHDLGADYFERRDPARLRRHHVRRLEQLGYDVVLVDKAA

SEQ ID NO: 56434 - protein, 345 aa, unidentified
MEIRTIGIDLGKTVFHFVGVNARGEVVVRRKGSRTQLLRFTSNLRACLIGMEACGGSHFLGRALREQGHDARLMPAQYVKPYVKTNKNDYIDAEACAEAVTRPTMRFVPIKTDDQLDLQSLHRVRERWVVRRTAVINQIRGLLLERGITIRKGRHHIEESLPGILEDADNKLSGALRVLLTQLRLEMQYLHGQIGETDKLIARICGELEQCRRLVAIPGIGPITATATVAAIGNGAAFKKGRGFSAWLGVVPGEHSTGGKQKLTGTSRRGNKYLRKLFVQGAHTVLLQKTKQSSGLSTWLVNLTSRKRPQVATVALANKMARIAWAVLFKGEAYRPPSTPQVIAA

SEQ ID NO: 56435 - protein, 337 aa, unidentified
MKNYIGIDLGKQSSYFVIKNHQGVLLQRMKVFNDSAAVAQALTPHLTLPCKAVIEATCNYYWMYQQLKNLGCEVILAHPLKTRAIADAKVKNDRLDASILADLLRADLVPQSYIPDESIRALREMTRQHIRLTQIRTRIKNQCHALLTKLNIHCTENFSDTFGTKGRQWLQTLSMPAVFEFQKNQLIEQIQYYNNLIRKTDWQIEKMLRQFPQVESLKKIPGIGTFGAAMIIAEIGPIQRFPSPKQLVSYAGIAPGLYESGKTSHSRGITHEGNKYLRWILCEMTHRHIRKPGPLRQFYLRLKDKKGHGKALVATARKFLIHIYYVLKQQDFIGVVG

SEQ ID NO: 56436 - protein, 330 aa, unidentified
MTHVSSPQPVSSLPASPLFVGIDVAGDKLDLARSDSRQVLTVANDEKGIAQIVELLRPLRPALIVVEATGGLERPLVDALLDADLPVAVVNPGNVRHLALGLGILAKNDAIDANVLVEFARHAQPRLAQKRSANQAELDALVTCRRQLTGARAQQSNRRGATASRAALRSIDAILVAFDKQIESLDRQIRKLVESDDDFKDADRILRSAPGIGPVASSTLIGELNELGTTSRQRIGALAGVAPFDNDSGPRKGKRFIRGGRAHVRCVLYMATITAIRCNPVIMRFADRLKGAGKNAKVVIVACMRKFLVLLNAMLKENKTWDQLNVAKNA

SEQ ID NO: 56437 - protein, 431 aa, unidentified
MECPMSLPNDLSRSPVPFEQESTLVAASGEETALLPRSNAMECPMSLPNDLSRSLVPFEQESTLVAVVELSQASWLIAGVVPGVERQPLKKMAPDEDALLRLLHRWRDEAIRNGHPITRITVALEAGRDGFWLARWLTKHGIEAHVIHSSSVAVSREHRRAKTDRLDTAMLNRVFLGWLRGERGHCTMVAVPSLEEEDAKRPSRERENLVGERTRVINRLKAALARLGIRGFNPKLRKAPQRLDSLRTPEGFPIPPNTLDEMRRDLARLAILREQIKAIEQARLERLQQAPQTGPNAMVRMLASIPGVGIETADMLVQEVLSRNLRDRRAVGRFVGLTGAPDESGAKRREKGLAKTGNARVRRGMIQLAWRFVRFHKDSALAIWFRSRTEGPSAARKTKMIVALARKLIIALWRMVNTGEVPHGVVLRQPA

SEQ ID NO: 56438 - protein, 327 aa, unidentified
MTKPALGIDISKETFDVELSVSGKPKHKRFANGIVGFESVSDWLNKYGVDQVHACLEATGRYGEALALHLRTQGHLVSIVNPAQISYFAKSELQRNKDDRVDAGVIRRFCEQRMPPEWKPLTAAECELQALTRHLENLKVAKQIEENRLQSGVSSPTVIDSIQEMTTFLGGKIEQVEKKIQEHIDHHPELKEKQNLLVSIPGIGKLTAAMILGEMPQLDDLGSARKAAAQCGVTPAHRRSGKSVRGKPRLSKIGNARMRKILYMPALAAMRFNPVVRNFCSRLRENDKHKSKLAIVGAAMRKLLHIAFGVLKHRQMFDSNHQPNFAG

SEQ ID NO: 56439 - protein, 318 aa, unidentified
MTANMTTTMATPTHFIGCDVGKASIVICDSRTGQTRTVPNRPKDLAAFAATLDRTSLAICEATGGHEAVLLQALITAGCPAHRADARKVKAFIRSFGTLGKTDAIDARALVVYGQERHATLARWQSPDPQRDRLQALVLTRRDLVAERQAYRNRLAAPGAAAVKPYLGKLLACLEAQIAALTRAIDALIRAHTTLDRAAKVIRGIIGIGATTAAALLALMPELGTLNRREAAALSGLAPHPQQSGSSDAYRRTRGGRPEVKRMLFMAAMVAAKHDPKLRAFYERLLASGKKKLVALTAVMRKLVVVCNAVLRQDAVAR

SEQ ID NO: 56440 - protein, 343 aa, unidentified
MQIHSVGIDLGKTTFHLVALSAAGKVLLRKKFTQRQLITFTANMQCSLIGMEACAGAHFLSRTLREQGHDVKLIPAQFVRPFVKSNKNDFLDAEAIVEAVGRQNMRLVPIKTDDQLDLQAIHRVRDRLVARRTSVINQLRAFLLERGMTFAKTPFKLKVAMPDILENAEANLTPRIRNLVSLLWSEWKDLEQQIVGLNEEIEQIASSDPACQRLRQIPGIGPLVATAIVAAIGNGAAFHKGREFSSWLGLVPRHHSTGGKARLFGISKRGNIYLRKLLVHGARSAVLRVKRERSPFGPWLDALETRAPINVVVTAPANKLARIAWAVLSSGQDYRAPINSMAA

SEQ ID NO: 56441 - protein, 357 aa, unidentified
MAQVKKLDFTGTTIFCGIDVHKKSWRVNIQDSEFELEDFSQNADPALLHKHLNRKYPGAAFKLCYEAGFSGFSAQRLLSEQGLDCRVVNAADVATTDKEKRQKNDKIDARKLCEHLQSKKMKGIYVPSLQWEHGRTLVRARAKIVTNQTRCKNRIWQLLHFSGLALPKDYEAEQYWSSHFIKELQTIDCSSEELKTTLGLYIKDYQQTKSLLLEATRAIRKLCKQPTYEKDITLLRSIPGVGEINAAVMLFELQDVSRFRHFDHLCSYVGLVPNTSDSGETKITKGITNRSNYFLRTALVESSWTVIRKDPALLMKYKIYCRRMEKNKAIIRVAKHLLSRINYVLKSKKEYVIAVVA

SEQ ID NO: 56442 - protein, 354 aa, unidentified
MRCTTKYVALDVHQATTVASVREGDGRVIARSVVATEEGALVEFFRGMRGAVHVAFEEGTQAQWLHDLLAPRVTRVVVCDRRGEPRVGNKGDQGDADRLSGLLWRGGLRAVYHGSGGRGALKELTRAYRNLVEDSTRVMLRLKAVFRARAIPTRGTQVYQPRERERWLAQLPDRGARIRAEGLYAELELLQGLRPRAKAAMLAEARRDPAWPVLRGIPFLGPVRVAQLVATMQTPWRFRTKRNLWAYAGLAVVTCTSSEYELVAGQPVRRRRAPLTRGLNRNHNAVLKDVFKGAATAATARPGPLQDLYHGMVARGMREELARVTLARKLAALTLRLWKTGERYDPTKLTTPAR

SEQ ID NO: 56443 - protein, 342 aa, unidentified
MEHYAGIDVSLECSSVCVVDANGKIVREARVASEPQALIAWFGSLGFGLERIGLEAGPLSQWLFAGMKAAGLAVELLETRHVRKAFEAMPVKSDRNDARGIAQLMRLGWFRPVHCKSMSAQETRSLLTARKLVQSKLLDVENSLRGILRGFGLKVGKTTGQKFAGRIEELVAGHPHLQTIAKALLAVRAVLRTEFAAFEKQTRRMARSDRQARLLTSVPAVGPIVALTYASAIDDPTRFKSSKQAGAHFGLTPKKHQSGETDYTGRISKIGDAAVRTALYEAAHVMLTKPLKGCSQLKSWAMRIKRRAGMSKAKVALARRLAVIMHRMLADGTPFNAAATAT

SEQ ID NO: 56444 - protein, 368 aa, unidentified
MGDYSEAAVAIAETGRSGEVRFLGEIENTAAATGKLVRKLAGKYDRLAFCYEAGPTGYGLYRQITELGHECLVAAPALIPKKAGDRVKTNRRDALGMVKQFRAGELTAVWVPDPRHEAMRDLTRARGAAVEDLRAKRQQVLSFLLRLGLHYPGAKTWTRAHMNWLAAQKLAHPEQRIAFEEMLLAVRQAQERIARLEAAIGDAVPEWSLAAAVEGLMAMRGIDLITATALLAEIGDLSRFRTPRELMAYLGLVPSEHSTGDKVRRGPITKAGNRRARRLVVESAWSYRHPPRVGKKKQDRVAAAPQPVREIAWKAQHRLYRRYRALIRKGKHKSVVVTAIARELCGFIWAVHSEITTTDPVARQHGIR

SEQ ID NO: 56445 - protein, 367 aa, unidentified
MKEQENKRNKITIGLDLGDRRHRFCVLGEKGEVLEEGSVGNNRAALSELGGRYPEALVVMEAGCHSPWVSRHLEQAGCEVVVSNPRKTRAIYQHERKSDRRDALMLARIARMEPALLYPVRHGSEEAQQELLRIKLRDSLVRARVALINSLRFTLKSLGYSIANPSTERFHKVIQSALPQSVAQVIAPSVQALEELTLRIKLLQREISDQARSKYPDTAWLEQIPGVGPITALYFVLKIEDPARFKRARDVGAFLGLCPRRDQSGENDPQLRISKRGDAYLRRLLVSSAQYILGPFAPPSALRQYGLALASGATARAKKRAVVAVARKLAVLLLTLWKNKSSYEAFPQRSSKEKMRTNDLERLRCIA

SEQ ID NO: 56446 - protein, 352 aa, unidentified
MEKNNKLDFGGQHIYVGMDVHKKSWSVSIHTEQFEHKTFTQPPEVEKLTYYLERTFPGATYHTVYEAGFSGFWLHDKLREKGIDCMVVNPADVPTKDKERAGKTDRVDCRKLARGLRNGEIKGIYVPPRVKVEDRTLVRTRQSMVRKQTRCKNQITSILFFYGIVIPEEGRWSRRFINWIESIRRERASGDLALKAHLEELKHLRQIIANLNRAILSLSRTEEYRADVLLLKSVPGISTLTAMILLTELADLSRFSSLDKLASYAGVVPDIRSSGETEYVAGITFRRNAALRALLIESSWIAVRKDPALIMVFNKLSVRMKKTKAIVHIARKLLNRIRFVLKNRQEYVPAVV

SEQ ID NO: 56447 - protein, 442 aa, unidentified
MRLLNANANEHPLRIKLSAHIRTGIIMELQRNKVCGIDVHKRFLIATILSRDGKKDTQRFSITLEDLLKFRDWVIENGCEQVAIESTGIYWHPVHSVLEGKIDLIVANSYKIKHTPGRKTDVNDSEWIAELCLNGMIEPSRIFPKDDRELRRLTRAREGYVKQMTQEKNKIHQSLDSACIKLASVISDIFGKSGMYLLNCVLEGRDIDEIIDGIPSGRLKKKADQIKESIKSRLEISQVILIRGSLSLMRSIQERIDELDGEISARIQYRKNDLAIAMSIPGTGFVSATAILAEIGNYIDFKKPEQLAAWCGLVPSLYQSAEKTILGGITKQGSKHIRRMLIQVAYAISRTKDSKLKKFFLRIQAKKGSKVAAVALARKVLCILHHLLMNQEMYLEDRDKKNMRQKPLKQPSPIEMSIQEMIDCIVRAGYVVTKSDSIGGFG

SEQ ID NO: 56448 - protein, 315 aa, unidentified
MSDVPCFGGIDVAKAQLDIALRPSGERWAVPNDASGVTSLVDRLQARHPTLIVLEATGGLERVVTSALATAGLPVVVVNPRQVRDFARATGQLAKTDALDARALAHFADVIRPTPRPLPDAQRQELRALLGRRQQLITMRTAEQNRLAGTSGRLQTDIAAHITWLNERLTTLDDDLATALRASPLWRENDDLLQSVPGIGPVCARTFLLELPELGTLTRQQIAALVGVAPLNCDRGTLRGRRTIWGGRAHVRTVLSMGTLVATRYNPQSKAFYERLLAAGKVKKVALTACMHKLLTILNAMLKHRTPWQPQEVQN

SEQ ID NO: 56449 - protein, 441 aa, unidentified
MRVMYERCCGLDIHKASITVCALITEKGKTQEETRRFGTMTADLRELAGWLQQKGIRHVAMESTGVYWKPVWNILEPAGFELLLANAQEVKIVPGRKTDQKDSQWIADLHKHGLLRNSFVPPRAIRDLRDLTRGRAILTQEHTSVCNRIQKVLEDANIKLRSVASDVFGASGRAIQRALMKEENDPEALANLSKGKLRNKIPQLRRALEGQVTAHHRALITGHWNRMEFLERQIADLETQIAERMKPTPAEMAPTMQDASEDAPVPLSPREEAIQLWMEIPGLSWTSACSMVAELGVNMDQFPTAAHAASWAALCPGNNESAGKRLSGKTRKGNIWLRRTMCEVAWAASHTNDSYFAAQFHRIASRRGRKRALMAVAHSILVTAYSMLKHKRHYKELGADFFDGINRDKVRDRLVQRLAKLGFNVTLESKGNVESVSDVTE

SEQ ID NO: 56450 - protein, 351 aa, unidentified
MLIIGVDYHPSFQQIAFVNTDTGECGERRLVHSTREAEAFYRELQKGNVKVRVGMEATGHTRWFEDLLAELGFELWIGDPGKIRAQRVRKQKTDRQDAQLLLKLLIENRFPRIWVPDKENRNLRQLLWHRHRLVEIRTRVMNQLQSIAMNEGIRKKKGLWSQAGRAQLESLPLAPWSSRRRQDLLHLLDQLNQLIEELKAAIVKEAEKKPEVQLLMTHPGVGPITGLAFVLVIGNPERFRCGKQIGSYLGLIPSEDSSAGRQKLGHISKQGNWLLRFLLIEATHNTVRLDPDWRRHFLHLAMRRGRSIAQVMVARKLAVRLFWMWRKGWTYQQVLKFGSHVEQPELHHGVK

SEQ ID NO: 56451 - protein, 401 aa, unidentified
MKKFNPERHCIETASALEVVTSAGHQERHAAYVGLDVHKESIAVAVAEPGRSEPVYRGEIANKPKSVEKLVAKLSEAYDGGLLQFCYEAGPCGYVLYRQILACGHDCQVVAPSRIPRTPGERIKTDRRDALKLARLLRAGDLTAVWVPDRDQEMMRDLSRARDDMKGQERKARQQLNAFVLRHGHHWPRGKSRWSPTHYNWLESLRFEQPWQQVVLQEYIDATKAASARVAQLSDHLMQALPEWSLAPVVDSLIALRGVDKLAAIVLLAELGDISRFDSPRELMAFLGLVPSEHSSGARRRQGGITLTGNGHARRMLIESAWSYRFPARQTMHLKRKAVNASEPAKAIAWAAQKRLCARYRTLTRAGKNTKVACVAVARELAGFIWDIVRHEMPRLGLQEG

SEQ ID NO: 56452 - protein, 428 aa, unidentified
MKYNTQNAKIESITEKTLIVGIDVGSETHYARAFDWRNYEYSKKPLEFSNNEAGFVTFKVWMEELAEKYGKDVVIPGMEPTGHYWFNLGAYLQDNGMKPVHVNPHHVKKSKELDDNNPNKNDRKDPKTIAALVNEGRFSYPYIPTGVYAEIRSLSNLRLQAQEEITRIKNRIARWFSIYFPEIKDVYKNPGAVSGLMILKVAPLPKDIVKLGVDGVNQIWRDAKLRAAGLKRAKTLVTAAEHSIGSQEACDSARIELKILLNDYEIYHQREEELMELIEEKLSEVPYIDKLLEIKGIGVKTVSGFVAEVGDIKRFDNPKQLQKLAGYAIVECSSGKHKGESHISYRGRKRLRYVLYEAAISLIARNTEFKEIHRYYQTRGKNSLKKMQSVIAVACKALRIFYAILTKGVTYDGAKMLQDIKRPQLKVA

SEQ ID NO: 56453 - protein, 319 aa, unidentified
MEKTKSVTHWVGIDVAKDSLEVFVGASRRFAVENTHDGISQLVKELGSLEGAHAIFEATGGYEAALAEAFVRAKLPFTRINPRLARDFAKALNRLAKTDRIDSELLAEFGKRLEPSPTILPDDARRLLHDLVSRRRQLVDMRSMEQVRLQQARAKHLVRSLERTITFLTKQIKSLDDDIDTSCKALPEFKAQAEALGTLKGVGPVTRSTLLALVPELGRLTGKKMASLIGVAPFNDDSGKGERRRRIRGGRADVREVLYMAAMSARLYDATIRPFYARLLASGKKHPVAIVACMRKLIVILNARVRDALAAKQLSTSNA

SEQ ID NO: 56454 - protein, 343 aa, unidentified
MEQVTIIGVDLAKNVFQVHGASGDGFVAFRKKLTRPQFKRFMREVDPCLVAMEACSGAHYWARELAAVGHEVRLIAPRYVKPFLKRQKNDAADAEAIAEAALRPTMRFVEPKSADQQAQAVVFRTREQFVSQRTDLVNALRSHLYEFGYSAPQGIQYLSRLAEVVEEEGTDLPDPARYACRLLLKQIAILTEQIKALQNKVAEISVKTGVSRQLQTMPGVGPIGALAIETFAPPMEQFRRGRDFAAWLGLVPRQHSSGGKQVLGKVTKMGQRDIRRLLISGAMTVIVACKRFGKHQGTWVARMLEKKPPMLVAVALANKMARGIWAMITKGQDYREPSVNVMA

SEQ ID NO: 56455 - protein, 354 aa, unidentified
MDIKYIGMDVHKEAIAIAVMNGDGKLVMESILETKAITILEFIQGVRGDLHVTFEEGTWAAWLYDLLKPHVRELVVCDPRKNALMKEGNKSDKIDARKLADLLRGGYLSSVYHGENGLRTLKELARSYLTISKDLTRVMNRVKALYRSWGILCGGQQVYAPRHRAEWLNKIGEAGVRRRAEFFYQQLDALRELRQAVRKDLLAESRKQSATKLLRQVPSIGPIRTALLIALMQTPHRFRTKRQLWTYSGLAIETRDSAQYRYMAGQLQRSKKPQQLRGLNQNHNHDMKAIFKSAATMASSREGAFHDFYQGLLTKGMKPAMARLTLARKIAAVTLTVWKKGAHFDAKQLKLQAA

SEQ ID NO: 56456 - protein, 414 aa, unidentified
MSMQVFCGIDWAEDHHDVALVDRDGQLLARRRISDDAAGLAALLDLLAEHGDSAEQPVPVAIETPRGLLVACLRATGRKVYPINPMAVARYRDRHSVSGGKSDHGDSVVLANVLRTDLTFHRPLPADTELAQAIAVLARAQQDAVWDRITAHNRLRSCLREYYPGFLAAFEAARGGIMRPEARVILAAAPTPADAAKLTLAQLRGLLKKAGRRRGIDAEAARLREAFRAGQMRQLPLVEQAMGRQTLALLRQLDAACASAEDLEQAAIESFNQHPDAGIITSFPGLGPLTGARVLAEIGDDRSRFCDAKGLKAYAGAAPITRASGKTKSVTHRRVKNNRLNATGYTWAFSALTASPGARAHYDRRRETGDRHAAAQRNLFGRLLGCLHRCLATGQHYDETIAFPDTTQKLPTAA

SEQ ID NO: 56457 - protein, 350 aa, unidentified
MLYTGVDYHRSFSYLTTMNEKGEIVSQKKLPSNGEIVDFLKSFGESMEIAIEATPSWYWLYDHLEDEGFEVKLSHPLKTKAIAYAKVKTDKVDSATLAHLLRSNLLPLSYVPEKPVRLNRELLRYRASLVKIQTGVKNKIHTILAKNNVSHDYSDLFGKEGMTFLHSLSLPENYKIALEGYLDVLDVVRREIRAVSKKVQQLAEEDRDALLLMSIPGMGYYSALLTTSEIGDVKRFRSAKQLCAYAGLVPSTHASGNTCFHGHITKQGSRWLRWILIEAAIHAVKRPGVLRRFYFKIERKKGGQIAKVATARKLLEWIYHILKDGRTYQEMEKIADLLGRGEPGNSSGSA

SEQ ID NO: 56458 - protein, 369 aa, unidentified
MADRITYVGLDVHKESIVVAVASGGLRGEVREYGRIANTATALDRLLRKLGGEGMTLRFCYEAGPCGYGIQRRLSTQGHECVVVAPSLIPKRAGDRVKTDRRDAASLAKLHRAGELTAVWVPDARHEAMRDLVRARLDAVHSLRRARQQLSGFLLRQGCHYGRPAWTKLHRRWLAGLTFDQAVHHLVLEDYIAAVEAAMARRDRLTVQIEAMLPDWTLAPVVAALQTMRGMALVNAATLIAELGDLSRFTNPRQLMAYLGLVPSEHSSGASVKRGGITKAGNGAARRLLIEAAWSYRFPARLSRELLLRQESQPKPIRDIAWKGQVRLCARYRRLARTGKPANVVTTAIARELTGFVWAIARQVTVTPG

SEQ ID NO: 56459 - protein, 316 aa, unidentified
MLYVGIDVAKNKHDVTALNVPGKTVLKPLTFSNNKAGFELLDLSLRQLNQDCLIALANTGHYAFNLLNFLHEQGYKVYTYTPLLIKEFAKSLSLRKTKTDKKDAHGIALKLLSDPNREQFQHDNRQVELKILARHIHRLKKKQSDWKVQYTRCLDIIFPELDKIVGKHSEYTYQLLTCYPNPQKRLEAGFDKLIEIKRLTASKIQDILSVAPRSIGTTSPAREFEIIEIIKHYKRLIDKAETCVNDLMAEFNSVITTVTGIGGRLGAVILAEIQNIHAFDNPAQLQAFAGLDSSIYQSGQIDLAGRMVKRGSPHLR

SEQ ID NO: 56460 - protein, 386 aa, unidentified
MMVIGIDPHKSTHTATAVDPHTNRATASLRIDANLGEYRRLMRWARQFEQRRWAVENAEGLGRHLSTWLLARGEQVVDVPTTATARVRQLSRGGGRKNDQIDAAAAASVAALQGESRPLEPEGVTDALALLDESRMNLAQSRVRLVNQLHALLRELVAGGAPRDLSASTAAALLRRVRPAGDVERVRKQIAAGLVAQIRSVDALLKSNATQISERVAASGSTLTGTVGIGAITAGRLIGRTGRASRFPSSASFANYAGAAPVEVASADKARHRLSRSGDRQLNAALHTVAITQIRTPANRGHAYYNAKVAEGKTAREARRCLKRRLADHIWRTMITDERRLAANPGGHSGAALISSAAGSTPTTSPSEKSLPGPARRNSTTSRPAA

SEQ ID NO: 56461 - protein, 409 aa, unidentified
MRVLYERCAGLDVHKKSITACALWFNKDGEKEKEIRSFSTMTSSLLAMADWLKQRGVTHVAMEATGVFWRPVWTILEGQFQLVLVNPAHFKSVPGRKTDVKDCEWLADLLQHGLLRGSFVPPTDIQDLRDLTRYRAELTQTQNRVANRIQKVLEQANIKLSSVASDTLGISGIRMIEAIIAGEEDPEILADLAKQRLRHRIPDLQMALHGRVRPHHRFLLEEHLNEWKALAERIQRVEKEIERRIAPFEYAVTLWQSIPGVNRVTACCLVAEIGVDIRQFPSTRQLASWAGLCPGQHESAGKRVPVATRQGNRWLRRVLCQAAWAASRKKNCYLSALFRRIASRRGVKRALIALAHTLIVIAFTLLKRRQSYFELGEQYFEQMHKDRLKNELLRRLRRLGLTVTVEAPA

SEQ ID NO: 56462 - protein, 307 aa, unidentified
MFVGIDVAKDRLDVHLRPDGEVFTVARDGEGIEALAARLSALKPVLVVLEATGGFETVVAAALAAAGLPLAVVNPRQIRDFARATGRLAKTDPLDAAVIAHFAEALRPQARPVASAEAQALGELVARRRQLIGMMTAERNRRRQLTTKRLIKGIDRILAVLQAQLTELEHDIGDAVRGTPAWREKEDLLVSVPGIEQKIARTLIAELPELGSLDRHQVAALVGVAPFNRDSGKWRGRRSIAGGRAVVRSALYMSVLVSIRRKLPLAALYNRLRAAGKPAKVAIVACMRKLATILNAILRDKTPWQTA

SEQ ID NO: 56463 - protein, 345 aa, unidentified
MGPMYYIGLDVHKQKISYCVKDSSGKVFAEGWIPATRHDLDCWMKNLPQPWSAAMEATLFSGWIYDHLKPHAAGLKVAHPLMLRAIAAAKKKNDRIDANKICDCLRCDFLPECYMAPTAIRERRRTLRYRNLLVRQMVQMKIKIATLLMEAGVSYNKQKLHKVGYFRELLASSPDINDSLRALLRQCREMVVRLGKMETALIHSLQQDRLLLERVERLMSIPGIGPITALTWALEVGEVQRFSSIKKAVSYCGLCGDQHSSADRVQRTPLSKQRNKHLQTTLIEAAKMAPRYSPALALLYDKERQKGNANRATLAVARKLVAYLTAVDRGQTHFLVLDHDTCAAA

SEQ ID NO: 56464 - protein, 410 aa, unidentified
MERVIERCCGLDVHKKTVVACVRVPGRTSVREQHVRTFGTTTAELLALRDWLGGYGVTHVAMESTGVYWKPIFYVLEDAFTCVLANAAQIAQVPGRKTDVKDCAWIAQLLEHGLVRGSFVPPAPIRELRDLTRYRAALIGEHTRETNRLQKVLEDAGIKLASVASDVLGVSGRAMLDALTQGTHDPDVLAELARGALRRKLPALRQALTGRFRPHHAFLVSQVLAHLDYLDEVIEALSTHLDEVMAPFAEEVSRLDTIPGVNKRTAEVLIAEIGVDMGVFPTAGHLASWAGLCPGNNESAGKHRSGKIRKGNRWLRGALIQAALAGGTRATKGAFAARYRRVMRHRGHKKAVVAVAHAMLVAAYHLLARHTTYQEPGADYYERRHAERVRQRAVQLLERQGYRVTLEPAA

SEQ ID NO: 56465 - protein, 342 aa, unidentified
MKKSNDLSKSLAPFEPDTCMVVVVELSQSSWLVAGRAANLDRQPIKKLEPDENALLRLLDRWRDEASGKGLQIERIALAYEAGRDGFWLARWLRRNGIDVHVMHPTSISVSREHRRAKTDRLDTALLMRAFLGWLRGESGHCTMVAVPTLAEEDLKRPSREHETLAGECARTINRLKSALMRLGIKGFNPKLRRAQGRLEGLRTLDGEPIPANMLREMNHDLARLAFIRAQMKATEQARLERIEDHPSAENNPMVLMLARIVGIGIETADMLVRELLSRNLRDRRAVARFAGLTGSPDESGMRRREKGLSKAGSARVRRGMIKLAWRFLQHQRESALGPVFS

SEQ ID NO: 56466 - protein, 337 aa, unidentified
MDVSTIGVDLAKSVFQCHGVNSAGETVLRKRLRRSEVLQFFGRLKPCLIGSEACASAHYWARELRALGHTVRLIPPAYVKAHAHRGKSDAIDAAAICAAVLSPNTRFVPIKTAEQQASLSLHRIRQQLISQRTCNINVLRAQMAEFGLIAKAGPKHVDALVAIVKDEADIRLPAQARVALRETVATLEHLDLRIKTIDKAINEAHKADATSQRLATQPCVGPIMATAFVASVPDPQHFRSARHFAASLGLTPKNRSSGGKERLGKISKMGDRYLRMLLVLGATSRLAQAKRYRRPQDAWILRLLARRPARVVITAIANKMARVMWVLLARGETYRPA

SEQ ID NO: 56467 - protein, 356 aa, unidentified
MTISTKYIGLDVHKESISIAVRNSVGKVLMDCVIETKASTILQFIDGLRGDLHVTFEEGTSAAWLYDLLKPHVTRVVVCDPRKNKSMREGNQSDKIDARRLAELLRLNHLTPVYHGEHGLRTLKELVRSYLTVTKDLARVMTRVKAIYRSWAIPCSGKQVYARCHRAEWLGKITEPGVRRRAEFYYQQLDALRMLRQDARRDLLAESKKHKAWKRLCQIPAIGPIRAAVLLGILQTPHRFRTKRQLWNYGGLAIEMHSSADYRSVDGELQRSRKNVLVRGLNRNCSHDLKNLFKGAAAVASSKPGPFEKFYAALVAKGMKPEMARLTLARKIATIALIVWKKGVSFDANHLKPQTA

SEQ ID NO: 56468 - protein, 367 aa, unidentified
MKKVSTAGAKQSRNISHVKLTIGLDLGDRNSWYCVLDEAGQIQLEQRVRTNAKALCEVFGAMPRSRIALETGTHSPWISRLLNELGHEVIVANARKVRLIGESRKKDDRLDAQTLARLARIDPALLCPVKHRSAQAQADLTVIRARAGLVRARTALVNTARSLAKSYGERLRGCNVRNMNPEKAESLSPELQTALEPLLAEIESLSERITEYNDRIEALAQESYPQVALLKQVKGVGTLIALTFLLTLEDPHRFRKSRDVGCYLGLQPGRRNSGQSEPQLHISKEGDPYLRTLLVQGAQHILGPFGVDCDLRRWGLKLAERGGKSAKKRAIVATARKLAVLLHHLWVSGEVYEPLHNSSRTPMAAAA

SEQ ID NO: 56469 - protein, 411 aa, unidentified
MEIVNARCAGLDVHKATVVACVRVPAPRRGERLRETKTFATTMRGLSELTDWLIAHGVTDVAMESTGVYWRPVYAVLEGTVQLVLVNARHVKMVPGRKTDVRDCEWLAQLLECGLLRGSFVPPRSVRDLRDLTRLRKSLIRERGHHVNRVEKTLELAQIKIGCVVTDLMGKTGRAILQALSAGIDDPDRLAELAQGLLRKKRPALREALVGRLTPHYAFLLQQYLSLIDTLDAHIATLEARIQTVMAPFADAVALVQTMPGVAARAAHAILAETGVDMAPFPSAAHFASWARLCPGNHESAGKRQPTTTGKGATWLRATLQEAAWAAVHTKKSYYRALYHRLKGRGGPKKAIVAVQHSMVVALWHMLKHRVRHDDLGPDYFDRRNIDRTRRHHVRRLERLGYDVVLVGKVA

SEQ ID NO: 56470 - protein, 395 aa, unidentified
MARLFVGVDISKDSFSAAGLDTEGNECFAGLYSMDSDGFCKFLEIVNTHCLDRQKVLVAMESTGCYHINLFSFLTAQGIQAVVINPLLIANFAKRSLRKTKTDKKDAKTIAKFLLENREEISQLSISQDLQDLRDLARERESISHLISATKVEIKRVLRTIFPELESIADIYTRVMLRFLQAYPSARLVKAAKPKVLAQALRQPYVGNKLTFSAEDILRAAQSSVATASPAKEIILKGKIATLLHLRERMEEMTKLLTDLCKATRVEDLKILRPIKGVGPKTGVPFLAEMGSVDNFSSPKKLIAFAGMDPSVCQSGKYIGKSKLSKRGNRHLRRAIYLMTAAVVSQNAFFKAYFLRRKKEGLIPQKALLATAHKLIRVIYAMLSHRTYFQIKEAI

SEQ ID NO: 56471 - protein, 363 aa, unidentified
MEVAGRFVGIDLGKRTYEMCIVDRKGKISRTGGKTDFAGIDRLCEKLNGDDAVAIEACNLAFRIERAIRKSVGCKVCIMNAGRLAVIYMSTRKTDKEDSMKLAKLLKNHDEDELPIVTPPSDEEWERRKLLSEYRSLKCQRTKEINKLHAIFEHNGYTQFVRKDMCSEKNRANILPLLKGYEKEEAERLVERLNLLEKQIERLLQKINAEVENDGKIQKVMTVPGIDPITALAYVAYVGDVNRFDNAHQVSNFIGFVPKVDNSCTICRSGHTTKKGNPLLRSLLVQAAWSTVKSKNGGALRDKYKYMAESRCIGKGKSIVTIARKLGELLYLILKTDQEYKPQKFITPELKISKLAEDALECS

SEQ ID NO: 56472 - protein, 466 aa, unidentified
MARKRKSDKSKKSQRPIRSLETIQPNAAGIDLGSREHWVAGPPQEDKAPNVERFGTTTPDLLRLADWLTQQGVKTVAMESTGVYWIPLFEILDSKGFEVLLANARQVTHVPGRKTDMLDCQWLQLLHACGLLRGSFRPSDDICQLRALIRERNTMVDQRSDWVRRMQKSLNQMNVCVHHAVSDITGVTGMTIIRAIVDGQRDPHALARMRDRRCQKSEEQIAAELTGNWRPEHLFNLRQALKMYDQLCTVVADYDSEILAYIQTLQPEDNSDTDVPPPGSKAKARSISKRGQEPLRQALYRFSGFDLTTIDGIGVDTASDIVSELGLDFTVFPSENHFVSYLRLAPNLSISAGKKVSSKSKANTCTRVATALRMAALTLRRSKTALGAFYRRVAWRKGASVAVFATARKLAQLVYRLVRYGQAYVDAGAKAYETRFNQRRLKFYTKALKNMGYDVKPLSTAEAIAM

SEQ ID NO: 56473 - protein, 334 aa, unidentified
MLYVGLDVHSRQSSLCILNSAGGTVNEIQIKGPRAGIVDRLRQLNEPFRVCYEASCGYGHLYEALRPLAQHVAVAHPGKLRLIYGSKRKNDRIDAQKLAKLLLLDMVPPVHVPSIDVRAWRSLILLRQRLLQQVVRAKNRIRGVLREHDIVGAKWLWSKKQIAWLESLELHPVAKLRLELAVEEFKTLQMKVKRIERELQKYADAHPAVALLMTIPGVGVRTAETFIAWVDDVARFRNNRQLGSYFGLVPCQDASADRNRLGHITRDGPPVMRKLICEATWTAIKRCPRFKQFFERVSGGKSERKKIALVATMHRMIKVMGAMLRSGESYDDAR

SEQ ID NO: 56474 - protein, 355 aa, unidentified
MTITKYIGMDVHKESISIAVMNAAGKLVMECVIETKGSMLLQFIDGLRGDVHVTFEEGTWAAWLYDLLKPHVSEVVVCNPRKNALLKDGSKSDRIDARKLAELLRGNHLKPVYHGEQGLRTLKELARSYLNISKDVTRVMNRLKALYRSWGIACAGTKVYAPRHRSEWLGKISEAGVQRRAEHCYQQLDALRLLHQQVRRDLLLESKKHQAWRLLGLIPGIGPIRAALLIALIQTPHRFRTKRQLWTYSGLGLETHDSAQYRVVEGQLQRSKKPVTLRGLNQDHNHDLKDIFKGAATRVSSSSGPLHDFYEHLLAQGRKPTMAHLTLARKIAAITLIVWKKEVRFDASYLKSQAA

SEQ ID NO: 56475 - protein, 446 aa, unidentified
MKKSFRMSIIHPHAAGVDIGAEFHVVAVPPDADAAPVRTFQSFTGDLHRMSDWLKTCHITTIAMESTGVYWLPAFEILEAAGFNVILVNARDAKNVPGRKTDVNDAQWLQKLHSFGLLRASFRPEHDISVLRSYLRQRERLTEYRAAHIQHMQKALMQMNVQLHHAVSDITGVTGLSIVRAIVSGERDPSVLIQYRDVRCKTMPEVLQQALTGNWQPEHLFALEQSVAFFDFYQEKIRECDDQIETSLLQLSTGIKEPEGALPSARHRTKQPNQLVFDVRPLLWKITGADLTQRHGFGPYLALKFVAECGTDMNRWPDASHFTSWLCLSPGNKISGGKVLSAKTRRSSSRIAAALRLAATTIGRSDTALGAFYRRLSSRIGKAKAVTATARKLAILFYNALKYGQKYVDPGADYYEVRYRNRVLDGLKRRAKSLGYSLQQDPELCV

SEQ ID NO: 56476 - protein, 334 aa, unidentified
MTMTKTMAPPPPAYIGIDVSATQLDVAVWPTGGHWCSPYPTAPHDPALTTVVRRIQAQAPALVVLEATGGWEVPLHTALTAAGLAVAVVNPRLVRDFARASGRLAKTDALDAQVLAQFAAQMQPPVRATPAPAIQALRALVRRRQQVVAMLVAETNARRLTRGAVQASIDRHRTYLQAEREALDTAIAEAIAADATLREQAAPLQSAPGIGPVLAATLLAELPELGTLDRREVAALAGVAPLNRDSGRRHGPRRCWGGRATLRPALYMATRTAVRHNPLRRPLYARLRAAGKPDKVAIVACMRKLLIILNAMTRDQRRFHLPPSPSPASPGGVP

SEQ ID NO: 56477 - protein, 309 aa, unidentified
MSTAQGVAYGGGDQHDRGRAGQQEGPSHADAVDQLLAWAEPFPTRLWAIEGADGMGYLLAQQLVATGEHVLNVPATLAARTRLLGSGRSPKNDPNDALSVAVTALRTRDLRPVQPVGHSEVLRLLAKRNTDIGNQRTRLVCRMHALLLELAAGGIAKEINASDVDRFLAAVVPATPAELVRYDLAVELLADIRRLDDQLKASHKRIRTAVAASGTTVTDLFGVGPILAAMLIGFTGDIRRFPGRDRYAAYNGTAPVEFSSGGRTVHRLSQRGNRQLNHALHMVAVCQLRQPHSDGRAYFDRRVAEAKTK

SEQ ID NO: 56478 - protein, 421 aa, unidentified
MDFEVKHLICAGLDVHKKTIVAAVCMTDPVTLEAAYKVKSFSTNNSQIAAMRDWLLSYNCHDVYMESTGKYWIPVFNILETHMHVVLTHPKYVKAIKGKKTDKRDAKWIANLFRFDIVKASFIPPADIRALRELSYMRSAEKNRFQNSMTISRIRIDCVLTDPFGKTASSIMDYLLSDVPFDETECAKLIHGRVKASNEEIFDSIRGFEILSEQRFKMSHAKQHMELLSSYMDDIETELFRLSRSYDEVIKRISGIVGFTERSALFVISEIGADMGVFESAKHLCSWAGLTPANNESANKKKSTRYSKAGQYLKPLLIQCALAAVKSKKNPYYAIKYKRLAKRRGRKKAVIAIARMMLTSIYHMILNNEEWKPDDYEAIIHPSKPVKVALTLDNVIQFLGEQGADPETLKLLQQQCAVTPG

SEQ ID NO: 56479 - protein, 357 aa, unidentified
MLGMGDSAPRKGADAMTFVGCDLHTRMQQVAVLDTGTGEVSEHRLPHEGTAVEEFYAALPRPVTVGIESTGYAVWFHTLMQRLGHTLLVGDAAKIRAMVVRKTKTDRRDALHILDLLHHDRLPAIWVPDPATRDLRALLTHRMRLVRIRTMVKNGLQAIALNSRLACGSKLLRQAGVAQLQALALPPHTARRRDQSLELLAGLTTQIRELDDAITTAALGHPDAPRLITHPGVGALTALTTIVVLGPVSRFHDSKHVVSYVGLAPALHASADKYHLGRITKQGSPLLRFVLGQAAAHAARMDPDLKRTSGALVHRRGRPKAKVAVARKLLVRLFIMLRDRIDYDEFRRRGRTALAAA

SEQ ID NO: 56480 - protein, 367 aa, unidentified
MSHIIYCGVDFHARQQTICCLKTETGELTSHELKHEPKEALRKFYAELGGPVIVGLEASGYTPWFEELLEELGHQVWLGDATEIRRRARRRQKNDRRDAELILELLCHDEFPRLHRPSPESREILRMLRYRHKLVKVRTLIKNSLQSLSIQAGLSLQARLFTRQGTQQLEALALSPVMGQQRQQWLELLQELNHHITETEGWLKQQALSDPRISRLRTHPGLGLLSALGIVHTLIPVSRFSTTRKVAAYGGFDPMERSSADKKRYLGISKAGSRLLRFLLIEATQTAVKTDPELKRFYHRLAQRRGKPKAKVAVARKLLIRSFIMLRDEINYAEFQQRAIAARLAREDARPNVPVSLIGQPASPAKG

SEQ ID NO: 56481 - protein, 395 aa, unidentified
MFIVGIDIAKRSHEAIIITEDGQVVRKAFSFRNNCTGYNLLLEQVRRLTLVKSQIVFAMESTAHYWLALYARLLKDGYTVMVLNPIQSHSLRELYIRKAKTDTRDSLIIADLVRFGRCKASNVPQDKILALRELCRSRAYLVDMAADLKRKLIALLDRIFPEYESLFDSVFSKASIAVLRKYSTPQKVKNAHLGKLTDLLMESSNGHFGEWKAHQLKEAACSSFGIDDSDGVYSMLLGMFLEQILSLTAQADSLEKQISVFFQEFNNPLTSIPGVGTILAATILSEIGDITRFSSADKLLAYAGLDPSVKQSGEFKSNQNRMSKRGSPYLRRAIWLASTVAVHRDPMFQTYYEKKISEGLHYMNVIGHVSRKMTAVIFAVLRDGQPYQPVLQTAD

SEQ ID NO: 56482 - protein, 350 aa, unidentified
MIIIGCDYHPSFQQIAFVDTETGELQERRLQHREEAEKFYRDLAAQGMKVRVGMEASGHARWFERLLAELQLELWIGDAAEISTKRVRKQKTDRQDAQLILKLMLKDDFPQIWVPSGENRDLRQLLWHRHRMVQARTRMMNQLQAVALNEGLRCKKKLWREAGREQLESFRLAPWASQRRHDLLELLDRMNPTIAKLTQAIDLEVEKCPEARRLKTHPGVGPLTALAFVLIIGRADRFQCGKQVACYLGLVPLEKSSGNQRRLGHITKQGNSLLRFLLVEAAQVTARSLPEWRSKYVHLTMRRGRKIAKVAMARKLAVRMYWMLRKGWDYGQLTKFGSHAGKPGPGDGVK

SEQ ID NO: 56483 - protein, 382 aa, unidentified
MEVVYRCCCGIDVHKKVIVACLVNGGKQELREFGTTTSEIKTLANWLTESGCEMIAMESTGVFWKPLYNLFELMDLDAMIVNAAHMKALPGRKTDVKDAEWIADLIRPGQLKARDIPNREQRELREITRYRKSLTEERCREVNRLQKILEGANIKLDSVVKDITGKSARKLLQRIIDDDIPDSDEVSKLVHGRMRPKLEQIVASIEGITTPLQRKLLAQIIDHIDDLNRRIGELDKLVQEYMAEYEAAIEAIDEIPGIARRSAEVILAEIGLDMGRFPSAAHLCSWAGVCPGNYQSAGRRKHGKTTKGNKALKTILTQCAKSAKTVKSSYFFAQYQRISARRGKNRATLAVAHSMLIAIYHILKNKTAFYDLGSEYYDNDPR

SEQ ID NO: 56484 - protein, 414 aa, unidentified
MDQRTTKCAGIDWAKDYNALCLIDGDGRKVLEGRFAHEEGGIAELCRELVGMGVERVAIERPEGVLVERLLEAGMVVLAVHPNQLKASRPRFRATGARAKSDSFDAFCLSELARTDHHRFRALVPDSDQTKALRALTRSRQEMVGTRVALANQLRSELEAFWPGAAILFKEIDSAISLAFLARYPSPEDARGLAEKRLESFLKRHGYSGRKGASELLKRLRQAPKGRAGEAERRARREAVMGLVATLEVLVEQIKGLEERIAKAVRAHPDGEVFLSLFRDPKSTLTAACLLAEMGDKRERYPTGEALAADAGMSPVAVESGRRKVASFRRACDKRLRKALATLAESTRQHNPWAKDVYLRARARGCEHAHAIRVLGRAWVRVIFRMWQDGVPYDPAKHGNLRRLRTAEGLTQGV

SEQ ID NO: 56485 - protein, 402 aa, unidentified
MASEERIVIGGVDTHKDVHVAAVIDDRGKLLDTEMFFTTASGYADVLRWMRSFGTLVSVGVEGTGSYGAGLARYLAKEDIDVLEVNRPNRQLRRRRGKSDTVDAEAAARAALSGQATPPKSQVGIVESIRVLRVAFTSARRARAQVVLQIGDLVLTAPDELRALLDPLSTEKRMTRCAHFRVGAELSDPLSATKRALRSLARRYGALSAEIVELEASLDELTARANPALRGAKGVGPDVAGMLLVAAGDNPDRIRSEASFAALCGASPIEASSGKIRRHRLSRSGNRQANHALWRIAMVRLGCDPKTQAYAKRRTAEGKTKREILRCLKRYIAREMFHLITDPKAVPQGSELRTTRTDAGLTLHTAASALGTSTVQISQLERAIRHNSDLAHRYERWLSEAV

SEQ ID NO: 56486 - protein, 413 aa, unidentified
MLKIVYPICCGMDVHKDFLVACIASTNQQGVTSYKSRRFSTFTGDLRLCARWLAENDCKDVCMESTGKYWIPIYNILEPTCKIVLAHPKYVKAIRGKKTDKKDAKWIADIFKHDLVSGSFIPPADIRQLRDLMRYRWKLTNITSGEKNRAQNCLTVSNIKLDDVFSDVFGKAATAITTRLLENPAEKITDVSGFRTKGMKATDEEVLAAVDGEICPEQAEKLRIIRSHMNGLDLCKANLDSLILSVAEKYLPQLDLVMTVPGIQSFAAIGILSEIGVDMSVFPTSKHLCSWAGLTPQNNESAGKKKTTRIGRAGAYIKPLLVQCALCAIRKKSNPEIRRRYENLKKRRGHKKAIIAIARMLLTAIYNILKKNEPYNPELYAHLNTPPKQRTVSVEEAIFILQRQGYLVTPSAT

SEQ ID NO: 56487 - protein, 351 aa, unidentified
MMIIGVDYHPSFQTVAYLVEETGECGEQDLNHSEGKAEKFYRDLKQRGISVRVGMEATGYARWFERLLAELGFELWIGDPAQIKAKRVKKQKYDREDARLLRRLMLENNFPQIWVPDPENRDLRQLLWHRHRLVQMRTRIMNQLQALAMNEGYRWKKKLFSQQGRVLLEKLALAPWASRRRQELLELLDRMNPTIEELTAAVEREARKRPAAVRLMTHPGVGPITALAYVLIIGTPARFQRGKQIGTYVGVIPCEDSSARKQRLGHVIKQGNSLLRFLLVEAAQAAARVHPDWRRRYIHLAMRRHKSIAKVAMGRRMAVRLYWMWRNGCDYSPSLEFGSYAGQLETGHGVK

SEQ ID NO: 56488 - protein, 386 aa, unidentified
MSNPHELVSKMDRPSKVCVVSEAEEGSSSLGCGRNETCMEGQPIANSPHTGRFRMTYCTGIDVSKQSLELWDGTHEEEVPNERGLTTLKKLLKKRYGGEWHQQVRFIYEPTGPYSNYLRAFAAEHEARVYEVNPKKSANFAKALGNRSKTDAVDAKMLYTFHALLTEEDFGVPEIDEIAEQLGAYLGSYEMIQKTRTMLANHVHSLEYRSGATKRLKESLEKELGRLDAMEDELEKEMEAYAEDHEETREDLHNLLSMNGIGVISAMNLLYLFRKYPGANRNEITALAGLDPVRRQSGSSLNGGRKISRAGDPMLRKVLYLACMNCIQHNERMKAFYKHLVSENHKKPKVALVACMRKLLLIAHHLYVTKSEYRALQDEANPCLSS

SEQ ID NO: 56489 - protein, 304 aa, unidentified
MENVFGVDVAKAWIDVVGPGGHARVGNDDLAAFAQQVARTSGRVAFEASGGYERPLRVALAKAGVPAIRLNPRRARAFATSLGRLAKTDRVDAGVIREMALRLDLPECAPETEELSHLKALQLRRRQLVEDAKREKIRLAQTFDEHMRASFGRVLRLLRSEIDRIESAIARCIAASEDLRHRAALLRTAPGVGPVTATALLAGMPELGTLTPGQVAALAGLAPMARESGLRVGKRRIGGGRKSLRDALYMAGLSAARNDPSLRAFSDRLKAKGKAPKQAVIAVTRKLLVILNAMIRENRPYQPA

SEQ ID NO: 56490 - protein, 345 aa, unidentified
MGSKLEQLLERPSRPFTPRAGPVWPARILEAGVNYHVKEQLVYLGIDIAKSYLDAAIGSEKRRFSNDTIGHRELIKWVKQVKAPVQVICESSGGYERALVQGLARARIKISLVQANRVRQFARAAGILAKTDRIDAKVLCEFGKVMQPQTVTAATLEQEHLRELESQRRHLTHLLVMEQNRAARVSDASVVRLNRSLINQIKKQIEKLDLLIKEHIEQSPRLSAKAEKLISIKGVGLRTAALLLAQMPELGQLNRREVAALVGVAPFNRDSGKMRGKRAIYGGRRFVRHGLYMAALVAARHNPILRNFYLRLRAAGKPAKLALTATMRKLLIVLNSSLKTDLNYA

SEQ ID NO: 56491 - protein, 355 aa, unidentified
MKDTANQYVAFDVHQATVVVSVRDESGSVRMRATVPTEQKAIVDLLRGLSGRLHVAFEEGTQSQWLHDVVKPHGERVVVCNLRGRSQTTNKSDRLDADGLSELLRIGSLKGVYHGASALTTLKELMRSYVNLVEDSTRVMLRIKALFRARAIKTPGTAVYSPAQRKEWLAKLENRGARARAAGLYEELDVLQELRPKAKTAMIAEARRQPGWKVLLSIPFLGPIRVSTILAIIATPWRFRTKRQLWSYVGLAVVTRSSADDEFVDGKLRRKKRAPLTRGLNRNHNPRLKEVFKGAANAAACTPGPLKDKYEKCVAGGVREEMARLTLARTITSIALRLWKKGELWDPSKVTMQGT

SEQ ID NO: 56492 - protein, 372 aa, unidentified
MTEFSVYVGLDVHKDTIAVAVATAGRGAPQYRNEIANTPTAIKRLIHKLSPDGEELSVCYEAGPCGYGVHRQITDLGHDCIVVAPGLIPRRATDRIKTDRRDALSLARLHRAGELTPVWVPGQDQEAMRDLTRAREDLKAIERTARQRLGAFLLRHGYVYHGKSRWTQAHFRWIERITMGTSVQQIVLQEYVDTVITAQRRVAALTEQMRQALEPWSLRPVVEALMALRGVQMITAMTVLAELGDLTRFDSPSQLMAYLGLVPSEHSSGHSKRQGGITKTGNGHVRRVLVEAAWAYRFPARKSYAIQRRAEQSSDNVQAIAWHAQKRLCGRYRHLIGAGKNTPLATTAVARELAGFIWAIACEVPVNPAEAA

SEQ ID NO: 56493 - protein, 344 aa, unidentified
MKITTIGIDLAKNMFQIHAVDERGKTVLKKQLKRDQVAAFFVNLPPCLVGMEACGSAHHWARKLEGFGNTVKLMAPQFVKPYVKTNKNDAADAEAICEAVARPNMGFVPIKNIEQQSVLALHRVRQGFVKARTAQANQIRGLLGEFDLIIPQGIAHIAKRVPELIEDASNELTGSFRLLVQRLMDHLKELDKQVGELEVQIKIWHRASEASCKLEMIPGIGPITASALVASVGNAKNFDDGRQLAAWLGLVPKQHSSGGKSTLLGISKRGDSYLRTLLIHGARSVIFRAQQKTDKSSWLHKLLERRNPNVAAVALANKNASIVWALPANDRNFQADYARPLATA

SEQ ID NO: 56494 - protein, 362 aa, unidentified
MFTERTSVGLDVHARSVAAAAIDGDTGELVQSRLTPSFDQIRSWITDLPGPVAVVYEAGPTGFGLYRHLTQAGIRCEVAAPSKLHKPSGDRVKTDAKDAIHLARLLRLDEVTPVAIPTVEQEAARDLVRAREDSRGDLMRARHRLSKLLLRHGIVYDGGAAWTGKHDLWLRGDAFGQLTSPATRLTFDADYDTVLMMKARRDRLDAAIQEMATDSEFTPMVRRLGCLRGINILTGFALAVELGDWHRFTGNTIGSFVGLVPTEHSSGGSRSQGSITKTGNRHVRRLLVEAAWHHRPAYRVGKTMRDRWDLAPAAARARGDEGNRRLHARWAAFIARKKKNTVADVAIARELAGWCWSLAVLE

SEQ ID NO: 56495 - protein, 317 aa, unidentified
MNAPSAVVGIDVAKLKLDVFIDSTSELFTIDNTPQAVAALAKKLSALAPQVIVIEHSGGYERRCAIDLMDAGLPVALVNPRQTRSFARANNRFAKTDRIDAKLLAGFGKACQLRLSEKPPENRLLLDELVTRRRQLVDFRAAEQTRLDHARAKDIQRSIASHLTSLTNMIEKLDRQIATLIEDDDDWRGKTRLLQSVTGVGPVVASTLLAEMPELGQANRQEIAALAGLAPFARESGKWKGKRSIHAGRASARKVLYMACITAIHHNPVIARFHQRLISAGKPFKVAITAAMRKLLIILNALLKTGQSWQPKIAANS

SEQ ID NO: 56496 - protein, 318 aa, unidentified
MRIVGKMERVSVVGKRVYVGIDVHKESWQVTVRTEGEEIFNGRIPGQYQSLKRLLERYQGSWMKVAYEAGPFGFWLSDKLVEDNIEVMVVPPSLIPVESGNRVKTDKRDSRKLARLLERNMLKQVYVPTSEEREHRDLLRTRRQIVDHRKDVARQIKSKLLFYGIASPFSATPYWSLKYIEWLKALSFATDYLKESFHLLIDLYEYLTRQIARINRKVVLLCREAKYLDRIKLLCTAPGIGKLTAIEILVELQDISRLTSAEELASYIGLTPSEYSTGEKTRQGRITRCGNARYRSPCQAQYGVKFGSNGFPVSGCQR

SEQ ID NO: 56497 - protein, 422 aa, unidentified
MSRTPGPILEDLSTFQYVTGIDIGMQSCLVCVLKPDKQMVIKPTTFANAAGGFTELFERLAALGVAPGEILIGLEATSRYGENLYHALQKQGYTLCLLHPAQTHQWSKRRGLRAKTDKLDATTIARVLLSGEARRGYVPSELVASYRELIRLHIHLADEAARYKNEIHALLQVLFPEYSQVFADPCRVTALSLLKRYPGARAVTTAGAETIARFLHELAPRNYGRRTAEQLLTLAQHSVSTHLADEARAKSLAILCDQLLHTQANLAQVEKDIEALIERDPHTKGIQALAEFGSITTAVLRAELGDVDRFGHTKQVVAYAGLDLEIKESGKWKGKAKLSKRGSGLLRRMLYLAAVRSVRLNSSPFGTYYHRLVERGLPKGAALIAVMRKMLIVAAHLIKTGEQYDPTKVGANYAASPRGEAA

SEQ ID NO: 56498 - protein, 376 aa, unidentified
MQEISKIHVGLDVHKDSIAVAAAEPGRAAAKVIGTIRHDVPKLLKLLTKLGEAETIHVVYEAGPTGWGLQRALTAKGYSCEVIAPSKMPRRPGDRIKTDRRDCTQLAECSRAGQLRAVWVPQPEDEAIRDLARAREDALNDRRHLRQQLKALLLRHDVRFPGKTSWTQAHHAWLGKLNFPEVATQAAFMDYWMAVQASDERLKRLSAALLEYVKNWRFAPQVAALQALRGIDVTCAIALVAEIGDFSRFDHPRKLMGYLGLVPSERSSGERTARGSITKTGNAHARRMLSEAAWSYRFKPRLGERARRRQEGLSQQLCAIGWTAQLRLSQRFAKLDARGVHRNKVCVAVARELTGFVWAVAQAADTPSQATQGGTT

SEQ ID NO: 56499 - protein, 415 aa, unidentified
MTKTHSTPGNATLVAVDIAKSHNDVLVEPPAPGRRRHFRVANSLKDYESLVDYLRRFGAPAVIAFEATGNYHRPLAYFLHRHGFALRLIPTLALARTREAMHNSWDKNDPKDAQVILHLLKTGLSQIWHDPLVSGTNDAQELSKTHHQIALARTRVWHSLRNHYFQLYFPEIERFIRSDNSDWLINLLLRFPTPGTITSLSCEDFVTQAWKLVGRKVHKAALLADIYAAAQASIALPVASDSAAIAMFRLVLEEYLGLSGLRDSIAQQAEATLANNDDRRRLMTVPGVGPITALTILAEAGDLRRFAHYRQFLKFCGMNLSTQQSGRFRGVSRLSKYGNARLRTAFWLAAQSAVRMRENSLRRKFDRYVRTNPLDADLRRKAYSAVAAKLARIVFGLIKNGTDYRPFFEEAIPGG

SEQ ID NO: 56500 - protein, 414 aa, unidentified
MEVIHPRCAGVDISKKDAKVCVRIQGRGGRSTTSTITTWGSMTGQILGLKEHLLDEHVDLVVMEATGDYWRPFYYLLEDDGLNIMMVNAHDARNVPGRKTDVSDAAWLADLGAHGLVRASFVPPPPIRELRDLTRARTIITQERTREIQRLEKLLEDACIKLSSVASNITGISGRLMLQALIDGQTDPAALAEMAQGRLRSKIPELTQALSGRFSEHHRYMAELYLHRIDAHTADINDLSARIEAAMEPFRFARELLVSIPGFSTTVAEVFIAETGADMSVFATAGHLASWAGTSPGSNESAGRVKSTKTRPGNRYLKGALGIAALSCTRSKNTYFGARYRRIASRRGPSKALVAVEHSILTAAWHMLTTGELYNDPGADYFTRQAPAKAKARAVGQLESLGYQVILEPLQQPA

SEQ ID NO: 56501 - protein, 346 aa, unidentified
MDGLILAIDLGRFNSVLCWYEPATKRAVFRTAATTPADLRRELLRRPVNRVVVEACSPAGWVHDLCGEVGLACAVANTNGPAWQWRHVKRKTDRDDALKLARLAAIGELATVPVPPKPQREWKSLIGLRKRLVGERGRGQNRIRGLLAGQGLPAPLGNRAWTQAGLAGLHGLARPLAGCPAADLWRGEPAVLLERHRFLDGQLRTVEAALDTLAAAHPGVRLLTTIPGVGVRTAEVIAAYLGDGRRFRNADEVSAYAGLVPRQYQSGATDRRGRLTKRGPKVLRAALVECAWCSLRYNAWALATWRRLVGRGVGKKKAIVALARKPLVRCWGVLKHGRPWRAPAAA

SEQ ID NO: 56502 - protein, 417 aa, unidentified
MTDFAALLGIDWSDKKHDLCLIDSATGEREASVLPHSPQQIEEWATGLRARFGGRPVAVCLEQSRGPLIYALLKYDFLTLYPVNPRTLARFREAFSPSRHKDDPPDAAYLAELLLHHRERLRAWQPDDERTRSLRLLVEHRRRLVGDRTRISNRLTSLLKCYFPQVLEWFPDIRTALVCDFLLRWPSLDALKRVRRQTLIQFFRSHNSVRRETLEQRLNSIKGAQPLTTDDAVLHSSAAMTKALASQMKATLDAVRDFDRQIEALCAVHQDFELFKSLPGAGEVYAARLTAALGSDRQRWQSADELARLAGVAPVMERSGQSCWVRWRYFCPKFLRQTFHEYAGESIRHSFWARAYYESQRAKGKSHHAAVRSLAFKWVRIIFRCWQTKTLYDEVKYLESLRRKGSPLLNYAANNPA

SEQ ID NO: 56503 - protein, 370 aa, unidentified
MEFNSYIGLDVHKETIAIAIADAGRDGEVRFYGEIANTPDAVASLLKKLGGRRGKLHYVYEAGPCGYGLYRQINDAGHVCEVVSPAHTPRRAGDHVKTDRRDSVMLARLSRAGELTSVWVPDEAHEAMRDLIRAREAATKDLRQARQRIQGFLLRHGRRYAGAVWKKKHRVWLANQSFDHPAQQIAFQTYLNAMDQAIARKDLIEAQIETLVPEWSLGPVVEALQALRGVALVVAAGVVAEIGDMRRFDNPRQLMAFIGLVPGEHSSGSKRKLTGITKAGSVVARRLIVEASWAYRMPAKVGQAMMLRQQSIAVSLREIAWKAQVRLCARYRRMLARGKKAPIVITAIARELVGFMWAIARQVEPKTIGA

SEQ ID NO: 56504 - protein, 482 aa, unidentified
MRAKPPEKILQATNPSTRGHWNEMNRKQRREMMRQIQSEDISLEVIHPDAAGIDIGNESHYVAVPRSRDNQPVRCFACTTAELKAMADWLKQCGIRTVAMQSTGVYWIAVYEILEQAGLEVYLVNARETKNLPGRKSDVQESQWLMKLHTYGLLRNSFRPSQEIRTMRTYWRQRNDLVQSAGRHVQRMQKALTQMNIQLANVLSDVSGVTGQAIIKAILGGQRDPHKLAEFRHPRVRASEEEIARSLEGHWQEDLLFVLQQEQDGYEFCQKQMAECDRQLNHYLGQREDRSQGAPLPEEKRKGRRKKKSGNKPQFDLRTGLFRMSGTDLTRIDSIDVMTATTILSEVGWDMSKWETEDHFVSWLRLCPENRISGNRVIGKGRLPTNNRVTLALKMAASSLRLSDTYLGAQFRRFRTRLGAPVAIKAMAAKLARLVYRMLRYGMKYVDKGAATYQAQHQQLQIKQLKWKAATLGYQLIGVPAA

SEQ ID NO: 56505 - protein, 324 aa, unidentified
MVGFDGDGHIVLRRRVKRDRLLAQTANMPACLIGMEACSGAHHLARALQAQGHMPRLMPPQYVKPFVKANKNDYRDAEANAEAVGRPTMRFVPVKTEAQLDLQTIHRIRQRLVGRRTALINQLRAILLERGITVAQRRRVLERELPGILAEDRNGLSPRIRLLIEDMRTEWHELDRRIEALDAELVAMARTNDACRRLCEIPGIGALNATALVAAVSNGAAFSKGRDMAAWLGLTPREYSTGGKQRLLGISKRGNTYLRTLLIHGARAALPHLAMRQDGLGNWLRKLLERVHRNVAVVALANKLARIAWAVLNGSQPYRAQAAA

SEQ ID NO: 56506 - protein, 345 aa, unidentified
MEITTIGLDIAKRVFQAHGVDAAGQAVLRRKLQRGEVLEFFKNLAPCLVGIEACGTSHFWAREITALGHEVRLMPASYVKPYVKRGKTDAADAEAICEAVTRPTMRFVPVKSAEQQAVLMLHRTRELLVRQRTMLVNALRGHMAELGVIAPQGISRVADLVAVLMGETTLTVPRLARQALRGLAAELEALGNRVKEIEAAILAWHKDNEASRRLATIPGVGPITASAIVATVTDPGQFHSARQFAAWIGLVPKQNSSGGKHRQGGISKQGDRTLRRLLVLGATAVIRHARTKSTPEAAWLKGVLERRPARLASVAQANKTARIVWALLTRGGCYRAPVAPQAAAA

SEQ ID NO: 56507 - protein, 337 aa, unidentified
MKRYLGVDLHRTQFTVCTRDEQGGKNLRQWRIEQVPEFVEQLRPEDEIAVEATSTTARFYEAVVGRVARVVVVNPHQFKVISESVKKTDDKDAEALALFLSKDMLPEVRMKNQQQRELQHLAETRDLLVKQRSALKTKINNLLAAQGINLKREALSSAKALDRVLATQVSTLVKIELRVLVDQIRSLSSSIAEVDERLEEEGRRLPGHQNLTSIKGIGSLSATILLTSIGNVRDFADENKLAAYFGLVPRVQNSNQTERSGRITKHGNKLARTALVQCGLIAQRYSPYLKRFYERIKNRRGGAKAKIALARKLVKVVYETLKNNWVFSDFPSFTLAA

SEQ ID NO: 56508 - protein, 386 aa, unidentified
MIVIGADTHKGSHALAAVDDGTGKVRGSRQIKAEEPGHLAAVRWARELDEERVWAIEDCRSCSRRLEQALLAAGERVVRVPPNRMGASRKGEREPGKSDQIDALAVARAVVKDGVERFPGAYLNEQAMEIRLLVEHRNDLVAERTRTVNRLRWHLLELCPELEASLKRKALNQTRTLDRVERQLRKLPTGARVRIAREQISDLRGLNRGIERLAAELAELVTAHRPRLLAEHGCGALTAAILIGHTAGNERFRSEAAFALQTGTAPIPCSSGKRTQHRLNRGGDRQLNHALHIIAVTRAQHDPATKQYLARKEAEGKTKKGALRSLKRHLARRFHQLLSEPPADQQPASEPASIIEPELPSIPDRPKPQREVEQIAAAPSPMVCIS

SEQ ID NO: 56509 - protein, 423 aa, unidentified
MLKIVYSICCGIDVHKKFVVATVTSTNENNITTYATKQFSTYSKNLFHLKEWLSEHNCKEVCMESTGKYWIPIYNILEDSCNITLANPKYVKNIPGKKTDKKDSLWLADLHKHGLVKGSFIPPKAIRELRDLMRYRFKLTNFRSSEKNRFQNSLTVSNIMISSVVSDTFGKSSSAIIKYAMEHPDKLDIDYTQFLHKSMLSKADEIKIAMQGSISKNQTAKMSVCLNHYDYINNCISQLDTAISLISSEFKSQIELIASAPGITTQSATTIISEIGVDMSVFPDAKHLCSWAGLTPQNNESAGKKKSVRISRAGAYLKPILIQCANAAIKNKSCPYFKYRYESIKKRRGHKRAIIAIARMLLTCIYNMLLKNEAFDNSIYEKYLKRENTSRHFQPDIDRIILFLQAQGFEVTKVSQEISPKIS

SEQ ID NO: 56510 - protein, 323 aa, unidentified
MNKDIKYFGIDISHLVFDVTDSDGNYHQFKNNSSGFKKFVRLLDFDSHCVMEATGYYHYQLAYYLLENGINVSVENPLAVKRFIQMKLSKIKTDKSDSKLICEYAQQVELKLWKGNSKDEMECLQITRALSVYTKQSTMLKNKLHGEAVLGQPSKAVVSSLKRSLRQLEKEIKTLEDKLLVLVKQTHQDLLTRLETIPGIGRKTAIMLVVLTGGFDRFSSASELCSYAGLTPVIRQSGSSVKGRPRISKIGNQKLRNLLFMCSFNACKYNKACRELYERIVAKGKSKKLALIAVCNKLLKQAFAIAKSGLIYDNTYRSTLVKN

SEQ ID NO: 56511 - protein, 319 aa, unidentified
MEPEQTCYAGIDVSKGRLDAVLRPSGEYLGADNDERGIGSLVARLSEARPALIVLEATGGLEQPVVVALALVGLPVAVVNPRQVRDFAKAVGRLAKTDKIDAAVLAHFAEAVRPEPRPLADERARELSALVLRRRQILDMITAEGNRARTAPKAVRRRIEAHLRWLRKELERANGDLERAVRESPVWREKDDLLRSVPGVGPTLSATLLAELPELERLDRRKLAALVGVAPLNRDSGTLRGIRTVWGGRSSVRKTLYMATLSATRYNPAIREFYGRLVAAGKPKKVALTACMRKLLAIVGAVLRNRSPWDEGRFVLRAM

SEQ ID NO: 56512 - protein, 359 aa, unidentified
MNKNSMLYVGLDLGDKLSYITIVDQDGVLIEESRLPTTRASFQRKFATLQPCRVAMEVGAHSRWASHLIQDLGHDVLVANARKLRAIYNNPRKGDRADAETLARLARLDPALLSPIHHRSPQAQTDLAVLRSRDAIVRSRTLLINHARSIVKSTGARLPACSADSFAHKAAPDIPILLRPALAPILDTIASLTQQIKSYDQKVEELCSQRYPETSHLREISGVGPLTSLGFILTLEHPDRFPRSRQVGPALGLVPRRDQSGDQDPQLRITKTGDPYLRRLLVGSAQYILGPFGPDCDLRRWGLALAERGGKNAKKRAVIAVARKLAVLLHHLWKTGEIYDPLYLAQKRSQAFEAIAAVA

SEQ ID NO: 56513 - protein, 365 aa, unidentified
MKKISIVATKQSRNFAQQKLTIGLDLGDRSSWYCVLDEQGEVVLEQKLSTTPKAMKEGFGGMPRSRIALETGMHSPWVSRLLSELGHEVIVAHARNVRLIGESRKKDDRLDAQTLARLARIDPQLLSPVKHRSAKAQADLTVIRARAGLVRARTALVNTARGLAKSYGERLRGCSVRNMNPEKAEGLSAELQKALEPLLAGIEALSERIREYNEGIEQLAEQSYPQVARLKQVKGVGTLIALTFLLTLEDAQRFRKSRDVGCYLGLQPGRRNSGQSEPQMHISKEGDPYLRTLLVQGAHHILGPFGADSDLRRWGLRLAERGGKSGKKRAIIAVARKLAVLLHRLWVSGEVYEPLRNQRAMPAAA

SEQ ID NO: 56514 - protein, 427 aa, unidentified
MRSIALDVHRDFCEVAIKDESGLRLAGRVKSSVCELELFAQSLAPDDEVALEATGGALQIARILEAHVARVLIANTRKLSAIAESKVKTDKLDAKTLCELLAAGFLPAVFSPDEFTRALRRRLQRRSKLVRSRTRAKNECHAVLARNLKGRPPMSDVFGKAGRRWLAALELPADESETVACCLREVDFLDGEVGLIERELARQAMSSQEIRRLMSVPGVSLVSAAAFVAAAGEIHRFSTPKKLVSYVGLDPRVRQSGEGPARHGHISKQGSSEARHMLCEAAWVAVRTPGPLHAFYERVRARRGAQIALVATARKLSVLFWHLLTREEDYAFGRPSLTRRKLRALELKTEQGWRRGRYSGPRVHEAKKEREQEREFSDQVETAYRRLVQDWQPKPAKSGAGATRGRASSKPTSGKQRGRASVPNSAL

SEQ ID NO: 56515 - protein, 356 aa, unidentified
MSRDIKYIGMDVHKEATVIAVQNGSGKLVMESIVETEASSILQFIHGLRGELQVTWEEGTWAAWRYDLLQPEVERVLVCDPRRHALLKEGNKSDKIDARKLADLLRTGMLRPVYHGEHGLRTLRELGRSYRTISQDLNRVMNRIKALYRGWSIPCAGTQVYALRYREEWLHKMEPAGVRRRAELLYQQLDGLQALRRTLRPELLAESRKHKASKLLRQIPCIGPIRAARLLALMQTPHRFRSKRQLWTYSGLGIETRDSAQYRFVRGQLQHAKKPQQIRGLNQNHNHEMKEIFKGAATRASCGVGPLRDFYVALLAKGMKPEMARLTLARKIAAIALTLWKKEERFDAEQLKPQAA

SEQ ID NO: 56516 - protein, 346 aa, unidentified
MKILALDLSKFKSVGCVYEAESGEHRYRRVNTRPAELHDLLVELEPDRVVMEVSSVSGWVSDLVRALGIELQVVNTNGEAWRWRSVKQKHDQADALKLARLSAMNQLELVHVPAPEIRQWRAVIKYRQHLVGRRTDIKNHVRELLVREGVVLPRGRKCWSQEGCAALEEMSRSWEEVGISELWRGELQSEMQQLQVIQERIREVEAKLEELAKADDRVALLRTIPGVGPRLAEAMVALIDDPHRFKRARDVGAYLGLVPRQYQSGEMNRLCRITKRGSKLLRSLLVEVSWVSLRYNPWLRSLYERMNRGSKTRKKIAIVAVARHLAIYCWAMLRDGTTWRQPCPTQ

SEQ ID NO: 56517 - protein, 405 aa, unidentified
MTDIEQHDSVEVFVGVDVGKGAHHAVALDRKGKRLLDSALPNDETKLRALIGKLKEYGKILLVVDQPATIGALPVAVAGAEGVLVAYLPGLAMRRIADLHAGEAKTDARDAYIIADAARSMPHTLRSLKIADSQVAELTMLCGFDEDLAAQITATSNRIRGLLTQIHPALERVVGPHLDHPAMLDLLERYPSPAQLASLSQKQLSTRLLKLAPRMGKTWATEIVQALAEQTVVVAGTQAAGVVLPRLALQLAALRKQREEVAKEVERLVLAHPLHPVLTSMPGVGVRTAARLLVDVATRAFASAAHLAAYAGLAPVTRRSGSSIRGELPSRRGNKQLKRAMFLSAFAALRDPISRAYYTRKISQGKRHNQALIALARRRCDVLFAMLRDGTLYCPPRLEISLTTT

SEQ ID NO: 56518 - protein, 337 aa, unidentified
MNTANVVVGIDVSKKTLDIAMLVSGKIKTKALDNTTHGHKSLLEWLLGKSSVPMEQVHVCMEATGVYSEPVALALHKAGLIVSVVNPACIKGFGASENIRNKNDAIDAGLIARYCAAMQPARWQPPSIEQRQLRAWTLRLQALKDIRQQEENRMEAHDFTDMEAVSENVKRHIAWLSAEIAKLEDDINDHIDRHPGLKHDAELLRSIPGVGIATAAKLLGQLGDIRRFCNAKAFAAFLGVTPRQRTSGTSVRGRTMISRTGNTSLRAALYMPSLVARRHNPIVWRFAERLSATGMAKKAIICAIMHKLAHLIYGVIHTDKPFDPHYLEKGLAIQDGI

SEQ ID NO: 56519 - protein, 366 aa, unidentified
MRKISTVQVFGNEIFKEQKLTIGVDLGDRWSFYCILDEAGKIILEQKVATTPEAMKQTFGKIPRSLIALETGTHSPWVSRLLTELGHEVLVAHAQKVELITKSNRKDDRHDARTLARLARIDPELLGPVRHRSAKAQIHLTVIRARAELVSARTALVNAARGLVKSYGERLPKCGTQQVSRELAAALSAELRDVLAPLLREVESLSERIQEYDERMEKIAKEEYPEVSLLQQVKGVGTQIALTYVLTIEDPYRFPKSRAVGCFLGLRPGRRNSGESEPQKGISKEGDRYLRTMMVQGAHYILGPFGEDSDLRRWGRKLAERGGKNAKKRAVVAVARKLAVLLHRLWVSGEVYEPLRNSQKAMRAVA

SEQ ID NO: 56520 - protein, 352 aa, unidentified
MEMQQFWAGLDIGEGKTAVCVTSDAGEVLLEQMATSDIPGVAEVLEPFTQIGGVRVSIEAGMGNQLARKLRKLGYPVVVFDTITSNKFLTIRRNKTDANDARGLADLGRMRRTAAVSVHVKSVEIQRLRSQLVFRDQLLRQRTALDSALRALLRENGADPKAAPPNKGWRVRLEQEMTRLRQYEEVDLTAQARPMVEVREALDRYVKAADKQVLQTAESNPITKRFLQIPGVGPISALSFYSAIENPIRFATSADVGAYLGLVPRVKQSGTICQRSRITKAGNKLTRGHLVMAAGVLISRTKTECAIKDWGRQVAARAGHGKAKVAVARKLATVMLSLWKSGRDFQPFPIPS

SEQ ID NO: 56521 - protein, 434 aa, unidentified
MRIVYERCCGLDIHKASIAVCVVITRDGKIEEETRRFGTMTADLLELAAWLKARGIEHVAMESTGVYWKPVWNILEAEGFDLLLANAQEVKIVPGRKTDQKDSQWIADLHQHGLLRKSFVPPRQVRDLRDLTRTRATLAQEHSSTCNRIQKVLEDANIQLGTVASDVFGASGRAMLLAMMKGESDAEALAELSKGRLRSKIPELRRALEGRVTGHHRFLIDRHWRQMESLENQMRQFEEEIAERMKPTAEEIARMRESLPAEAPLPPSPREEAIRLWMELPGVGLTTACSMVAELGVNMEQFPTSAHVASWAALCPGNNESAGKRMSGKTRKGNVWLRRTMCEAAWAAAHSKKTYFAAQFGRIAARRGKKRALLAVAHSLLVAAYEMLKHKEHYREFGADFFEGLNKDQVKRRLVQRLAKLGFQVTVTQTPTAE

SEQ ID NO: 56522 - protein, 383 aa, unidentified
MTPPLRPVRRRPVVGGPPRERGPEVIVIGIDPHKRTHSAAAVDKQTGELRRERTVRAGEQGHEQLLAWARMLDRERLWALEDCRHVSSAFERFLLGHGERVVRVPPRLMGEARKGGRSYGKSDAIDALAVARAALREPELPVAFLAGSEREIRLLSDHREDLVGERTRIQNRLRWHLHELELELDIPAGALDRRCWLDRISRRLCRLEQTAQVRVARELAGRCRALTRRITELERELETLLEAEAPELLALVGCGTLTAAKLVGEVAGVHRFADDAKLAKHGGAAPLPASSGAIQRHRLNRHGNRQLNCALHRIAITQGRHHPPARAYLARKEAEGKSRREALRALKRHLARVVFRILTAIAEHNSSPTATSPNARPAAAGLT

SEQ ID NO: 56523 - protein, 484 aa, unidentified
MLRALFERASDPRKVLCVAIDYAKRKHVALCCDGNGDILRKPFAVDNTLEGVAFLVEQISATARRRKIPRCDIFLGGEDEPSYVANFTHALRVRQYLVLRVNAAEAAENRENLIASTDLLDLLGIAKTLLSRRARATGPAGSSRAKGKKCEEDIYFEIREITRSRRGLVRQQTVASNRIHTSVDQLFPSFLDHTKSGLTPFCEASMALMKERFSSTEIAHRRPRTLAAFLSRHGVRAPDEIAAKLIALASGVLPPAPHRLAALQRTLASTVDLRECLTRNANELRAQAAILLASTPYAMLTSIPGIGFTLAAGIAGELGDPVRLSPVDSLCAFAGIVPHTFQSGGPDQPACQGHAPARCNHILKDWVVQSAQKIHLYGPPELKERISRWNANGQHGIFAGARRYLRLLRSLVLNRVPYLAPRSRSSTSSDQERADAALQAWLILIRKWRTIPGGIAHISQETTPLGFWRLLVMESRSVTLPLQP

SEQ ID NO: 56524 - protein, 412 aa, unidentified
MLKIVYPICCGLDVHKDFVYACIATSVNGVTTYKSHRFSTFTKGIRELLSWLLEHNCKDVCMESTGKYWIPVYNILETDCKIVLAHPKYVKAIRGKKTDKKDAKWIADIFKHDLVSGSFIPPADIRQLRDLVRYHTKLTNFTTGEKNRAQNCLTVSNLKLDSVFSDVFGKASSNIIGHILANPSEKLSDVSAFRTKHMKATDDAILEAIDGEFCPEQAEKLRIIREHMSNLDLCKLNLQSLILTTAEKYISEIELVCTVPGISTFSAISVIGEIGVDMSVFPTSKQLCSWAGLTPQNDQSAGKKKTTRISRAGAYFKPLLVQCALAAIKAKNKHPEIFNRYSALKKRRGHKKAIIAIARMLLTAIYNILKKREPYNPELYRKSDVPPEHRNVSVDEAIFILQRQGYLVSSPT

SEQ ID NO: 56525 - protein, 443 aa, unidentified
MPVLRTDVAGIDVGSEQHWVCAPALAGGGREVAVFGATTPELQRLAAWLQARGVTAVALESTGVYWIAPHEVLEAAGFDVCLVDTRALARVPGRSKSDGQDCQWLQRLHRCGLLRGAFRPPDQVCVLRTLVRDRATLIAERSDWVRRMQKSLVLMNVRVHRAVADLDGVTGLAIVRAIVAGERDPQRLAALRDPRCRKSEAEIAEHLSGHWRADHLFSLQQALHLYDAIVARVAAYDQEILRQLAVMTPEARRGDDAPPPSKPDKAKDFRKRGVNPLRHALYRLSGIDLTTIDALGPETVSVVLSEYGADLSRFATEKQFVQHVGLAPHRAISGGKPIKRRKKPGSASARVGAALRMAATSLRRSRSALGAYYRRIAQRAGRDVAVFATARKLAQYIYRLLRWGQPYVDAGAAVYEQRYHDARVRRLSSTAKQLGYTLVAADA

SEQ ID NO: 56526 - protein, 349 aa, unidentified
MMIIGADYHPGFQQIAYVDTETGELQERRLEHPEEAEKFYRELATQGKKVRVGMEASGHARWFERLLAELNFELWIGDAAEIRTKRVRKPKTDRQDAQLILKLMLEDRFPRIWVPSWENRDLRQLLWHRHRMVQARTRIMNQLQAVALNEGLRAKKRLWREAGREQLAALRLAPWARRRRQELLELLDQLNPIIGELTKAVEEEAKKCPEAQRLMTHPGVGPLTALAFVLVIGMAERFGCGKQIASYLGLPEEDSSGERRRLGHISKQGNSLLRFLLVEAAQVTVRSNQEWRSKFFHLAMRRGRKIAKVAMAPRLAIRLYWMWRKQWNYEQFTKFGAHAGQPGNPHGVR

SEQ ID NO: 56527 - protein, 407 aa, unidentified
MERIVIGVDPHKLSATIEVVDRHENVLASGRFATDKAGYAAMRRHVAAWPERTWAVEGSNGAGRPLAQRLLANGEHVVDVPAKLAARARMLDTGHGRKTDAHDAHSVAVAAVRAKELRVLALDPQLEALRMLVDRREELARQRTQTANRLQRLLAELTPGRAKKDITTLQAKAILAAVRPRDLVGKTRRRLAVEQLTDLVAIEKRIKSLSKELKGRVADSGSTLMDLPGVGPIVAARVLADVGDVTRFADRNRFASWTGTAPIEASSGEQVRHRLSRAGNRRMNHMLHIAAATQIRLDTEGRRYYRRKLATGKTRMEAMRCLKRRISDAIYRQLVADARRAALSNARESREADPGGHCGATHQSSAVDLPPHIDTSDQPLPGPATTTLQPGPGLRNSANKQPLGTAS

SEQ ID NO: 56528 - protein, 309 aa, unidentified
MSSWVGIDVSKNTLAVWVRPSGVNFIVCNSSEGHQALLLNLAEIQVERVLLEATGGYERAVMGCLAQAGHSVVRINPRRARAFAQAMGKLVKTDPVDAGVLAHLAQVIEPSACQTVSLARDELQELVRRREQVVKLRDDERRRLTLARSGVVQESLQTNISQLNEQIARLNSAIETAAQRTDNQLVKQLGAIAGIGPVTVASLLAYLPELGQLNRRQIAALAGLAPYNNDSGRHSGKRCIKGGRASIRRVLYMATWSVIRCHSSFAARYASLRARGKCAKVALVACMRVLLIRLNAMVRDHSSWRAEAV

SEQ ID NO: 56529 - protein, 305 aa, unidentified
MISWVGIDISKSNLVVWVQPQKDGFEVPNTVEGFDVLVARLAQYTVGRVLLEATGGYERRVMAALQQASFSVLRINPRRARAFAVAMGKNAKTDPIDAAVLADFAEALHASREKPISPEREALRELIQLREHFVQQRDDNKRRLQQAQLPAVVEAIKDHIRYLQTQIKQFTKAIDQNMRELDAEKADRLISVKGIGTVATASLLVYLPELGELDRREIAALAGIAPYNDDSGNHSGKRQIFGGRARVRRALYMSCWVVIRHQADFKARYESLRERGKSAKVALIACMRILLIRLNAMLRDGTEWR

SEQ ID NO: 56530 - protein, 409 aa, unidentified
MRALVERCCGLDVHQDTVVACLLIGEPGKPLRQEVRTWATTTRALEALRDWLQAEKVTHVGMESTGVYWRPIYAVLEGPFVLIVGNARHIKTVPGRKTDVKDAAWIADLVRHGLIAPSYVPPQPLRELRDLLRYRRKLVEGRASERNRLLKLLETANIKLASVMSDVFGVSGLAILKPLVAGETSPERLADLGKGPPCKKRADLVRALEGKVEEHHRFLMRLQFARIEAAEHDREQLDARLSEKLEPYAEPLRRLMRIPGVDWITAATIIAEIGTDMSAFAGAAQLASWTGICPGNHQSGGKQRRGKIRKGNVHLKAALVTGAIAVAKTRGSYLAEKGRRLRARRGEMRAHVAIAHKILIAAYHVLSGNEYQDLGADYLDHLNKKRTVNQMTRRLEALGFNVQITPKAA

SEQ ID NO: 56531 - protein, 337 aa, unidentified
MKRYLGVDLHRTQMTVCTRLESGEESVREWAIKDLPEFAEQLRAEDEIAVEATGTTGRFYDAVVGRVARLVVVNPHKFKIISESVSKTDGKDCRELALFLSKDLLPEVRMKPKKQRELAHMTETRDLLVKQRSALKGKINNLLAMQGINLKREARSSKVALERGMGLEVSAMVKLELRVLVEQIRALSASIGELEELIAEEGEQLAGHRNLTSIKGIGSLSATVLLTTIGSVGDFADENKLAAYLGLVPRVQNSNATERNGAITKMGNKLARTALVQCGLVAKRYSPYLNRFYQRIKERRGGGKAKIALARKMVKIVYDTLKNNWVFDDFPSFTLAA

SEQ ID NO: 56532 - protein, 417 aa, unidentified
MDVMAERCAGLDVHRSTVVACVLLSEAGGRTKKAKAEFTTTTAGLGKLVAWLREHGVSVVGMESTGVYWMPVYAALESAGGFELIVANAQHIKAVPGRKTDMNDAEWVACLVRHGLMRPSFVPPKAIRDLRDLTRYRRTLVEAQASERRRLIKLLEAADIKLAGVLSDVFGVCGRLILRAVIAGDQSAAAMAKLARGKLRQKRPQLFDALSAQVDPHRRGLLAMQLTRVEAAEADIAALDAQIAIHLAPYARQLGLLMAIPGIDRVVGATMIAEIGVDMTVFATAGHLAAWAGVCPGNNESAGKRKPTGARKGNPHLKTALCNAAIGASRKRDSFFKAKYHKLKSRRGGGRAALAIAHKLLVVAYHVLSTGAEYRDLGETYLDKRNAQRSAQRYVRRLENLGYTVTLNPVAQTANAF

SEQ ID NO: 56533 - protein, 416 aa, unidentified
MPEEGEPVHYYLGVDWADQTHAVWVVDERGTKITARTVPHTAEGLSEWGRELDEWRAQGIELWAAIERPEGRVVDFLLDHGVVVYPVNPKALDRARDRFRQSGAKSDPFDARVLADFLRTDHASFRALQPSSEAAQELKLLTEDCQRQIRQQTRLVNQLTATLKAYYPRGLEVAELTTALAREFLQAYPTPAAVAGLTERQWQRWARAHRLSEARTQELWAVLQRPQLPVPAHVVRAKARLLQTLLTELEPVVAAVGAYRQAVEDFFAALPAAQWIRTLPIGEHGITAPTLWARLGDAPGRWESFQHLQAHAGAVPVTVKSGKQHVVHFRFACDKMLRYVVDQVAFLSLRSSEWARAYYDQQRARGHSHRETLRALGAKWLKIIFVLWDRQVPYDEQYHLATMARQQLRQRSKKIA

SEQ ID NO: 56534 - protein, 326 aa, unidentified
MNVIGIDVSKDKLDCLWLRELATGKAKSKVVPNKPSGYQALLTWAEKTVGCPVVEIWFVMEATGVYHEALAAALVAAGAPVAVVNPARIRNYAQALGQHTKNDQRDSYVIAHYGCTQRLQRWQPELPEVRELKALLARLEAVEKDAQREANRLEKATISQASTVVIDSIRGMLATLSAEKERLEKLIDNHIDGHPTLKQDAALLKSIPGVGAVLSRYLTMTYRSRDFQRASQMAAYLGLVPVEDESGSSVHRRPRMSKAGSSVIRAKLYLPAVVATRCNKQARELYQRLLQKGKTKMAALGAVMRKLVHMCFGVLKHQQAYSPLAT

SEQ ID NO: 56535 - protein, 377 aa, unidentified
MEHDSTLLYVGLDVHKDSITAAYALGTGEAELLGKIGTTKADIDRLCKRLQSKARHIRVVYEAGPCGYGLYRQLVQNGFDCMVCAPSLIPKKPGERVETDRRDAAKLVRSLRAGDLSAVYVPTVEDEAFRDLSRAWVTTKDDLKRARQRLKAFLLSHGVHYTGRADWGPAHRRWISQYSFDSQWQQLAFEELRRTIEDRVAQCDRLEAALRESVVNWRFYPVVLALQTMRGVQFTTAVGMLAELGDLSRFAHPRQLMAWLGVTPSEHSSGEKRRLGSITKNGNSYARKLLVEAAWSYQHPARVSPEIQRRHEGIPKPIVDRAWDAQVRLCRRYRRLVARGKEKNIAVVAVARELSGFIWDISRLAMSLAVRNEVRPT

SEQ ID NO: 56536 - protein, 407 aa, unidentified
MICVGIDVSKRKSTVCFMAPGDKIIRRPFDVKHTKEELQPLVDEIRVQAKYDEIKVVMESTGVYHLSIAYFLQQNGIFVSVVNALKVANFNKAENFRHTKTDSIDSTNIARYGIAYWAKLPQFDLNGDKYFLLKRLCDAYLNFSEERSRILLQLQSQLEQTMPGIFDLFGGFDINSGKDKLLDFLERYCHIEDIIAKSEAEFVASYREWAEEKGYRSNESKAATIYAQAKNGIPSIPNNPIVRETIMWYVGLLRRADEALMASLTRMEDIAKDLPEYELVGEMGGVGRVTRVALIAQIGDVRRFKNKHSLICFAGLTPSIHESGKFRASQNHIVKKGPARLRKVLYQVMMSLVMHKIPKDDAVYRFIKKKESEGKYKKVAKVAGMAKFLRIYYGRVMHLYRDLGLAA

SEQ ID NO: 56537 - protein, 389 aa, unidentified
MNEPTHNKHTMQKELLFVGLDVHAKSITLALAEGGGGEARLYGSMSNDLHALEKILARLRKAHPGAELRVCYEAGPTGFVLARRCAQLQIHCTVVAPSLIPTRSGDRIKSDRRDARKLARLHRAGELSAVHVPEASDEAMRDLCRARTDAVQDLRRGRAQLKAFLLRNGYRYTGRSAWSEAHQRYLRELVLPHPAQRVVLEDALAAITGAGERIGRLEEQMRALLESWPMKPVVEAVMGMRGFALVGAMVLVSELGGAWRFEHPRQLMAYLGLVPTENTSCDKRRQGQITKAGNGHARWLLIEAAQHYRLSPKVSKELSVRQQGLSAEVKACSWKAQTRLHQRMLQLLARGKERNKVTVAVARELCGFVWHIFRLMESRMTQGRAAAKS

SEQ ID NO: 56538 - protein, 346 aa, unidentified
MCSLPVFVGLDYHDSSVRVVVQDTDGSEMGNADRTNHWKAIADFGDRFGRPVRAAIESCCGAADLAEELVSCAGWSVALAHPGYVQRMKQNPDKTDCQDAQLLADLERVGYLPRVWLAPRYIRELRHVVRYRLQLTEQRRATKLRLRALLREQRCHAPEGLNAWTKAWQHWVRQTAELSEQGRWLAEQHLDELARLAIRIHEVEKRLEQLTTNDVEVQRLQQQPGIGPVTAWMIRAEIGHFDRFRTGKQLARFCGLSPRNASSGQRQADAGLIRAANPALRTVLIEAAHRLVQYDPSWQKFAQRLRARGKPGSVVAAAVGNRWMRRLYHEMKTSSGELAIAVGPAR

SEQ ID NO: 56539 - protein, 358 aa, unidentified
MNHIKSNKLDFTGQPIYIGLDVHKKSWSVSIFSRYGEYKTFSQPPEVGKLISYLGRHFPGAQYYSVYEAGYCGFWIHDQLRERGIQCIVVNPADVPTKNKEQRSKRDRIDCRKLARSLRNGEIEGIYVPSRSKLEDRSLIRTRQSMVRKQTRCKNQIKGMLFFYGLRLSEEATWGHWSRRFIQWIERIRMERASGDIALKAHLEELNHLRQLIASLNRAILRLARTEAYRPLVHLLKTIPGISTLTAMILLTELGEITRFPSMDELSCYVGLIPDIQASGEKEYVGGVTQRRHSQLRWLLVEASWIAVRKDPALLMAFQGYCKRMRKTQAIVKIARKLLNRIRYVLKNQAEYVPCVIQ

SEQ ID NO: 56540 - protein, 323 aa, unidentified
MQGKALPDQSAQAQVYVGVDVCKDWLDVYFHPLGKALRIANDRHGLKHLKRACEGVAIARLVLEATGKYHRQAHRSLHAAGLPVAVVNPLRSRLFAEAVGALAKTDRIDARMLALLGARLDPAAAPPAGEAMDGLQELVRARQSAVADKTALSNRAGEAETDFLRVELVQLIAEAERHIARLDEEIGRRIDTDERLAERFRILLSIKGVGPIAAMTLLSCLGEIGACSGKGAAMLAGLAPIARDSGDKNGQRRIRGGRAHVRTALYMAAVAAARWNPDLAAFYKRLRENGKAAKIAITAVMRKIVVLANVLIRENRQWTPTRP

SEQ ID NO: 56541 - protein, 367 aa, unidentified
MGWTAPAPASSVPNVGRHRSTHGEPSAMQVTTVGLDLAKHVFQVHGVDRRGRVVLRKRLSRSRLLDFFANLPPCVIGMEACGGAHYWARELQALGHEVRLMPPSYVRPYVKRNKHDPADAEACCEAVTRPSMRFVPIKSVEQQSVLLLHRGRELLVRQRTQLVNALRGHLTEFGVVAAKGITKIGELLALVADPTDQRVPPLARDVLALLVEQLRDTERKIEDLERRLVAWHRTNEVSRRLATIPGVGPITATALVATVGDPMFFTSARHFAAWLGLTPRQHSSGERVWQGGISKRGSGYLRRLLVQGAQSLLYWARRRTCAHQAWLQGLRQRRPGNVVTVALANKTARIAWAVMARGEAFRATAAA

SEQ ID NO: 56542 - protein, 342 aa, unidentified
MQVTTIGLDIAKNVFQVHGIDAAEKVVVRKQLRRRQVLEFFKALPACLVGMEACATAHYWARELTKLGHQVRLMPAKDVKAYVKRNKNDAADAEAICEAVRRPTMRFVQIKSTEQQGRLMLHRARDLLMRQRTQVINAMRAHLAELGIVAVQGRDGIKELLKIIASEEDARLPVDAHASLVVLAAGLHAVQTMIRSIEKRIMVQHRSNEASQRLETIPGIGVIGATAIAATVPDPKVFGSGRDFAAWIGLVPREDSTGGKQKLGPISKRGDRYLRRILVVGACAVLRYARHKPEKYPWLTQLLARKPFKVVAVALANKMARIAWALLVKGGTYRAPALAAAA

SEQ ID NO: 56543 - protein, 417 aa, unidentified
MEVMFEVACGLDVHKETVVACVIEPNGGRKTKKETKTFESSGRGLEALAVWLEEKKVEGIAMEGTGIYWRPVYAVLEQRQQPWKLVVGNAHHVKNVPGRKTDVQDAEWLASLVRAGLIRPSFVPPPAIRELRDLTRYRKKLVEDRTREQSRVHKVLQTANIKLDGVATDIFGVTGMLILHALAEGTATPKEMAQLAKGSLRKKMDALEVSLECKLSDVHRLMLGTALRLLASFDKELATLDGLIDRHAEPWQHLIERLKTIPGIDRVAALTLLAELGPDVSVFPTAAHCASWAGVCPGNNESAGKSRHGRSQRGNVHIKTMLCQAAQSAARTRDTYFSSKFHKLKSRRGHNKAIMALAHKILVAAYTMLRREEDFKELGGAYLDRRDRNRLARNLTERLRSIGFDVMLTERSVELAG

SEQ ID NO: 56544 - protein, 313 aa, unidentified
MAQMVTNAGIDVSKQWLDVALWPKRDEVSRFKRDAAGLEELAFWLRERHVVRVGLEASGGYEREVIDALEAQGLEVALLNPLQVRRFAQAKGRLAKNDRVDARTIAQFTAVMIEAPQPGRRRELDSLSEHLTFRRQLRAWIDDCTNRLEHLRDKALRRTAEALRVKFQRALAAHDKALAKLTAEHADWNVLARRLRTVPGVGPVLSQTLIALLPELGHLSRRAIASLVGVAPFDNDSGQRSGKRHIKGGRGAVREVLYMAALSAKTHNPIIAEFAKRLAGKEPKVMLVACMRKLLVILNAMVRDGMDWQVKTA

SEQ ID NO: 56545 - protein, 354 aa, unidentified
MGLKHQKEKRSMDYFGGLDVSVKDTSVCIVDDTGGIVREVKVASEPEALLAVLMNPLYRFKRIGLEAGPLSQWLFSALVEAGLPAICVETRHMRAVLKAQINKTDRNDARGMAQMMRVGLYRPVHVKTLRSQKLRMLLTHRKLLQSKAIAIENDLRATLRNFGLKVGVVGTVRFEARIRELVENHPDLTLLVEPLLVVRGVLREQLDILHRRLLAVVRDDNVCRRLMTVPGVGPVVALTYRATVDVPARFRKSKSVGAVFGLTCSRDQSGERDRPGAISRCGDEMMRAMLYEAAQSMLRSKKWSWLKAWAMKIARHRGMKRAIVALARRLAVIMHRIWVDGTEFRWTREAAVAA

SEQ ID NO: 56546 - protein, 326 aa, unidentified
MRKPGSHTSRLKTQIALDISSKSLDVHFKSDGNAFSVPNTEEGLNRILKSLTAYDVSLVLMESTGGYEDLAACFFQDHGFDVVVVNARHARNFARAMGKLAKTDQIDAAVLADMAFMIDASHDRDRYIKPLTDEQRKRLSVMTVRRRQVVGLISTEKQRLTRADDWTRASIKKTIKALTTELRHIEQQISAHVKKNFVDLSKMLLSIPGIGEQAMTILIGEVPELGKADRRTISALIGVAPFNHDSGNFRGRRRIWGGRQSVRNVLYMGIISATRFNPVIRSFYNRLVSAGKPKKVALIACMRKLLTIINAMMRTGKPFDVGLHGV

SEQ ID NO: 56547 - protein, 314 aa, unidentified
MKDREVVYIGIDVSKETLDIDAGEYGVRKIENTSAKIRPALAAIARKADTPPQVCFESGAYLARLMAECQGQGIAYSVLNPCKVSYFARSIAPAKTDALDARAIRLYAEITRPAPRPPPRPMLTPLRELVRVRGTLKKHIGALHPTLETVTDPDATQFIRSSMAFLEKKVEKCDRLIAEVVKADEEMSGLVDALSGVKGVGTLTAIQMVARMPELGTLGRRKAAALAGLAPRTRESGQWQGKSFIGGGRKEVRTALFMSATVATRHNPEMKALYERLKATGKPHKVALTAVMRRLLCHLDSVARNYHAQRKTTA

SEQ ID NO: 56548 - protein, 350 aa, unidentified
MTTIAVADVVVTGGVDTHLDLHVAAALDQLGRVLGTESFPTTPAGYRGLLAWLRRHGRVDKVGVEGTGSYGSALARFLTGVRIEVIEVARPNRQVRRRFGKTDVIDAIAAARAVQSGEATGVPKSHDGPVEALRTLKALQRSGNKARTQALNQVHQLLVTAPEDLRSRLRSLSRRDLLATCAAFRIAADDDSLPAMTRLALRELAQRVVHLDIQLALVGKRLDRITRDVAPELIAIKGVGPEVASTLLMTAGDNPERMKSEASFAALCGSNPIPASSGKTNRHRLNRGGDRHANAALWRVVVVRLSCDTRTRDYLAKRLSEGKTKTEAIRCLKRYVAREVYNAMPSAAGS

SEQ ID NO: 56549 - protein, 360 aa, unidentified
MTMLAEQVDGVIGVDTHRDTLAAAAVSPIGAVLASTDSPANARGYRRLLDFAREHVPGRRCWALEGIGSYGAGLASFLDQAGEHVVEVCWPKRVANRGGRKTDMLDAIRAAKEALATEHLIQPRLRGEREALRVLLATRQGAVLASTAAINQLKALIVSAPDDLRAELRKLKRPAQITCCAQFRDRPARNLEHRMTIRALRSTAQRIQTLQAEAKDLENEILALVRELTPELLDLLGIGPITAAQILVSWSHQGRFRSEAAFASFAGVSPIPASSGLTNRHRLNRSGDRQLNRAMHTVTLIRMRLDPATKAYVARRITEGKTSRDAQRCLKRAICRQIFKILERTDRTKIGSIKERTQAA

SEQ ID NO: 56550 - protein, 343 aa, unidentified
MKEVSVIGLDLAKNVFQVHGVDALGSVVLARQIKRKDMIRFFARLKPCLIGMEACGGSHYWHRQLSQLGHEVKMMVPAFVKPYVKANKNDRNDAEAICEAVQRPSMRFVSPKSPEQQAVLHLHHGRSLLVEQRVALTNHMRGILAEYGFVIPQGNKALDQHLVELLEDAENELPMLTRHLLAELKAEFDQLQSRIERLEWQLKQWHAQDKRSQRLETIPGIGLQTATALAAAIDQGQDFKNGRQLAAYLGLVPRQASSGGKDRLLGISKRGDGYLRKLLIHGARSVIRHVRRRMQLGQPGGNPWVEQLLQRCHPNEVAVALANKMARMAWVLLTRNETYRVNA

SEQ ID NO: 56551 - protein, 355 aa, unidentified
MNNLRYVGLDVHRDTISAAVLDTEGKLIMQSVVLTRANAICDFLNGIRGTLHVTFEEGIHSAWLYDLLQSKVARVVVCDPRKNKLLKSGNKGDLIDARKLAELLRNNSLSPVYHGELSALEVQRRVRSYSMLTEDTTRIMSRVKAVFRGQAIPCPGKSVFRPDRRKSYLLQLPTEGLRQRAELLYRELDAVHRLRLQAKREMLAECRKHPAMKWLQSVPYLGKVRAAVLIGRVQTPHRFRTKRQFWSYCGLALETHDSAQYQVVHGQVERKPRFIQVRGLNWNHNHDLKGLFKSAATMAAYRDGIFHEVYCGMLAKGMRPEMARLTLARKIAAITLKIWKEGGTFNAEQVKPQAA

SEQ ID NO: 56552 - protein, 346 aa, unidentified
MEYVALDVHKNYTWARVENSQGARLYESRLAHGHGTIKNFVNRWSGGSPVAVETVGNWYWVVDEIEAGGGTPQLVNARLAKLMMGNVNKSDKLDCQGMNRLQRTGTLPTVWIPSSSVRDGRELARTRMVLSRQRTQLKNRIHATLGKYGYTVKGASDAFGKKGREIIEELLLKLPPHTQQALRLILDELDHVTDNLKAIERHMIEIFSPCPQTQWLKSLPGVADILAVVIWTEIGTIERFNRAEQLASYCGLVSRENSSGGKIRLGPVRRDVNVYLKWAFVEAANSALLNAGRCGYAHISRLYERIKPRRGHGKAKVAVARHLAEASFWMLKKGESYREPMPSTQR

SEQ ID NO: 56553 - protein, 322 aa, unidentified
MQYIGIDVSKATFVVAYSSDKGGEIRTFNNTTAGIKQFIGTLPKDGSIHCVMEATGNYSALLLYMLNVAGITVSMENPLKVKNFARAMLSTVKTDKIDARLIALYGEKMNPQPFKVQGEAILRLRQKRTVIRQLTKQITAMSNLRGSLACLPVPDKGATHTVDETIKFLKKRRDRLQSELTDLVEVEFSRQLALLTTIKGIGITLATALILTTGGFTYFQNAKQVSRYLGICPTYEQSGTSVNIRGHINRNGDAYTRGLLYIAAWPASRFNAQCKETYTRLRQNGKPGKLAMIAVANKLVRQAFAVVAHDKEYIDGFVSNRP

SEQ ID NO: 56554 - protein, 347 aa, unidentified
MDKVTVIGMDLGDKNHKAVVLAADGVELERAEVSNTPDQVQEFLARHPGALLAVETGTHCRWISRLAVGLGLQVLVGNARKLRMIWNSSRKNDWNDAEMLAKLARADRSLLVPVKLRDDESQELLRLVKARDILVKHRAGIVNMIRGFSKAEGGRMDGCTTEAFVRQEFDVPKVLREVTKPLFAILRELSKKVALFDKLLVQSLEKKHREAAASVMAINGVGPVTAAAFIATVGNPTTFGKPRDAGAYFGLVPRLDQSGQSDRQLRITKEGNTQVRALLVNCANYIMGPFGQDCDLRRHGLRIAERGGKNARKRAKVAVARKLAVVMLALLQNKKEYCPLMGDVSMA

SEQ ID NO: 56555 - protein, 413 aa, unidentified
MQVLYERCCGLDVHNKTVVACVLITSPDGQVQKQGRTFATTTASLLALADWLASLDISHVALESTGIYWRPVFNLLEEGRTIILVHAQHMRAVPGHKTDIKDSEWLADLLRHGLLKASFIPSKPTRDLRDLVRYRKTLVQERAQEVNRLQKVLETANVKVSSVVSDVLGKSGRRMLAAIIEGVSDAEALADLARGTLRHKLPQLQEALHGQIESQHRVLLGQIFAHISFLEHSLEHLQQEIEQRLCPFEEAMQVLLSIPGIQAITAAAILAEIGVEMSRFPSAKHLASWAGVCPGNKQSGGKRLSGKTTKGNVRLRAVVVEAVWNISRMKDNYLSAQYHRLARRLGKLQAAIAVAHSLLIVIYHVLRDKKPYHDLGTDYFDSLDKERLTRQALRRLEALGYAVTLTPKEEVVI

SEQ ID NO: 56556 - protein, 356 aa, unidentified
MKVYNKQHAYYCGIDLHARKMYICILDKDGKTVYHKNRICCPEQFLNAVAPFREDLVVGVECIFCWYWLADLCQNEGIDFILGHALYMKSIHGVKTRNDRIDSLKLARLIRGGNFPLAYVYPPRMRPTRDLMRRRTHFVRKRAELLGHIQNTVTQYNLDPLGSLSRPDRRRGKDIVGHFPDPVVQLIVETNLKMIDHYDPIIKELDKQILALAKEHDPISLHLLQSIRGVGDVLSLTILYEIGDINRFAGRGEFCSYARLVKGQKSSNGKIYGTTGGKIGNAHLRWAFSEAALLYVRGNDLAGRYYQRLSSRHGKGKALTIIAKRLGVAVYYMLKRKEPFDEYKFLNLKKIPEESL

SEQ ID NO: 56557 - protein, 338 aa, unidentified
MNIVFLGIDLAKNVFQLCGLNQAGKPVYTKRTGRKELLQTLANIPACLIGIEASTGAFYWQREFEKLGHKVKVISPQYVKPFVRGQKNDGNDAQAIAVALMQPTMQFVPPKSPEQQDIQALHRARQRIVNHRTATVCQIRGLLLDRGIPIGSAVSRARRAIPLILEDAENGLSSRMRRTIAELYDLFNDPGRRIHFFDKEIETVFRQSEACQRIAKVKGIGPKTATAVVAAIGKGTEFKNGGHFAAWLGLVPRQHSSGDRQVLMNMTKKGDKHLRTLFIHGARAVVRVATNNNDGHMNQWVNQLKERRGFNKTTVAVANKNARIIWSMLRNDTEYQVV

SEQ ID NO: 56558 - protein, 411 aa, unidentified
MKKVSTVAAKQSRNFSSPKLTIGLDLGDRSSWYCVLDERGEVLLEQRLSTTPKALREVLGGMPRSRIALETGMHSPWVSRVLSELGHEVIVAHARNVRLIGESRKKDDRLDAQTLARLARIDPQLLSPVKHRSAKAQADLTVIRARAGLVRARTALVNTARGLAKSYGERLRGCNVRNMNPEKAEGLSPELQRALEPLLAGIESLSERVRECNEQIEGLAQQSYPQVALLKQIKGVGTLIALTFLLTLEDPHRFGKSRDVGCYLGLQPGRRNSGQSEPQMHISKEGDPYLRTLLVQGAQHILGPFGVDSDLRRWGLRLAERGGKEREETSHHRHGAKAGGVAASFVGERRSVRTIAQQQAGRDAGSGIRPKHSEEGTTKAQAPSSGDCVYRLAQLLSRRWKGGRQSGGSTG

SEQ ID NO: 56559 - protein, 346 aa, unidentified
MGEITRVFIDTSKQIFQLHGVDAGEAVVVRKTLKRSQLATFFGSIPPTVVGLEACGASHHWARVLGSLGHEVRLVAPQHVKAYVRRNKNDARDAEGGCEAMSRPTMTFVPVKTVEDQAVLMLVSLRDRLVRQRTQVTNAIRGHASEFGLVAPTGLDKIDDLLARVACDETLPVLARELFAIEAQGLAQLQARLKQVDTKLMAWHRADETSRRLAQVPGIGPIGATLLRVKTPAPEVFKSGRQYAAWMGLTPKDHSTAGKTKLGVITRAGDEALRAVLVSGAMSVIRQARTRPDRASPWLIALLERKAPKEAAVALANKMARIAWKLMITGQTYAPGHSQQPGLKAA

SEQ ID NO: 56560 - protein, 346 aa, unidentified
MLHAGLDLSRKRIDVCLLSDQGELVEELACPPDRDGLRGLARRVGVHDEPVVGVIESMTGARFVHDTLESLGWAVEIADAAKVKGLAPLAAKTDRIDARVLALLSQRDLVPAIWLPDPRVRSERELARFRLHLVKHRSQLKHRIHSTLMSFGRPCPVSDLFGVAGRELLARLEVPEPWAGNVLASVCLIDTLEAQISEINARLQRGGAEHPYVPKLLSVPGIGSVLAFTIAAEIGDISRFATPTKLTGYTGLCPRVVQSGESDRRGPLTKQGPRYLRWALLEATMHALRHPAYAGRYQRNKRRLGKQRGAKVAQVDIARKLTVAIWHMLTRNESFAPKGAAFRLAA

SEQ ID NO: 56561 - protein, 345 aa, unidentified
MSMVRMIVGGVDTHADTHVAAAVDANGGVLGIESFPADHAGFEALLGWLMSHGEIEMVGVEGTGSWGVGLARFLDDHKIMVVEVDRPNRQDRWKVGKSDPTDALSAARAALSGSASVTPKTRNGPVEQIRILLVARRSARSQRSETLNQLRHLIYTGPETVRSRFKDRYKTGLVTEVAKLRPRKGSDQVLYTTQYTMRGLARRIQMLNSEIKSLDAMLVELVANTAPSLVALFGVGTDTAATLLVAAGDNPDRLRSERSWAHLCGVSPIPAGSGKTSGRHRLNRGGNRQANAALYRIVLTRMSSDPRTKTYVARRRADGKNTAEIMRCLKRYVARETFKHLPRTA

SEQ ID NO: 56562 - protein, 318 aa, unidentified
MTNTSSPFVGIDVGQARLDAAVGKAGEEWAANNDATGIQKTVERLTQLQPALIVIESTGGLEIPLMLELSKAGLPFALVHPGRVRDFARSLGRLAKTDRLDARLLAHFAEAIQPPLTQLPSEEVQRLNALMQRRRQLLDILVAEKNHLLSTPLFQRAGVEEHLTWLEEKLAQLDQDIQDQIGRTPEFKEKEAVLRSAKGVGPVLCAKLLSGLPELGQLSRKEIAALVGVAPFNDDSGRHRGRRRIKGGRADIRHVLYMATVAAVRFNPLIRPFYQRLVSQGKLKKVALVACMRKFLTILNAMVRAMRPFAYTSGLFNS

SEQ ID NO: 56563 - protein, 357 aa, unidentified
MPQGAIERRATMVEYVGLDVSKEETAYCVKDERGKVLAHGKVASDPDALFAVLREHCLCPERIVLETGTLSNWLARELRKRGLPVTVIDARQAHAVLRLQHNKTDENDASVLADLARTGFYRSVAVKSESGQRHRALLKAREHLVGQLRSRGNAIRGLLGTFGIRLAKGTAKFDLRVRAALAERPDLAAIFEPLVGERAALLGAVEQLDRAVDAEAEADPTCRLLMTAPAVGPVTALAYVATIDEAGRFTKSRAVGAYVGLTSRRNQSGEMDYSGRISKQGDAMVRALLYGAANSLLTRVRRAHPLKAWARRVKRKAGHKKACVALARKLAVILHRMLITGEAFAWPQDNARETATA

SEQ ID NO: 56564 - protein, 319 aa, unidentified
MSEQNTSELFVGIDVSKDLLDVCIHPTIEYKSFSNHEKGIGELVEFVSSLNPKLVVLEATGGYEMAVVSVLAARQQPVVVVNPRQVRDFAKATGKLAKTDRIDAAVIAHFGAALRPEVRPLKDPDAQALGALIARRRQIVEMVTMEKNRIIGVPSDIHKSIKEHITWLEARLKSANDDINRSIHNMPMWKEKDEIFQSIKGVGPTTSATLLTELPELGELNRKQIAALAGVAPLNRDSGKVKGKRVVWGGRGQLRAVLYMSTLVATRFNPTIKTFYQRLLLAGKCKKVAITACMRKLLTIINVMVKNKTKWQDPVTKTA

SEQ ID NO: 56565 - protein, 343 aa, unidentified
MDYFAGLDVSVKDTSVCIVDGTGKIVREVKVASEPDALLRVLRNPAYHFKRIGLEAGPLSQWLFSALGEANLPVICVETRHMRAALKAQINKTDRNDARGIAQMMRVGLYRPVHVKTLRSQKLRMLLTHRKLLQSKAIAIENDLRGTLRNFGLKVGIVGRTKFEARIEELVEDVPDLAALVEPLLIVRRVLREQIAVLHRRLLTIVRDDEVCRRLMTIPGVGSVVALTYRATVDVPARFRKSKSVGAVFGLTCSKYQSGESDRPGAISRCGDEMMRTTLYEAAQVMLLRSAKWSWLKAWAMKIARHRGMKKAIVALARRLAVIMHRIWIDGTEFRWTREAAAA

SEQ ID NO: 56566 - protein, 399 aa, unidentified
MFLGGVTMTCFIGLDLSKFKHDCFIMNEHGEVVRNSFSFTNDREGFNTLLNVLNDLDPSQEKRIGFESTGHYGSNLKLFLEANGYSFMEFNPLLVNRFFKSESLRKTKTDKVDAQKIALYLYSRDYKPNPNSSYHLQCLKSLTRLRESLVDERSLQLVRITNIMDKMFPEFKPIFGKQGLKAATAMYLLENYGSPSRMANLTLASYHKMASKLKRTISYAKFCKIKELAKSTVGNENEILSFELEVCLELFKELDLKVLQLDNKITFELSLLNTHIPSVKGIGNVLAAGILAEFENIDKFDNPAQLAAFAGIEPSENQSGTHEGGGRMVKHGSPHLRRYLIQAANNMLAHNPVLYEYYLKKRSEGKSHNVAISHVARRLTRIIFYLEKNNIDFDINKMR

SEQ ID NO: 56567 - protein, 388 aa, unidentified
MSQPNDLSMSLTPFAQGNTLVAVVELSLSSWLVAGAVPGVERQPLKKLQPDEAGLLRLIQRWRDEAVQAGRAIERIVVAYEAGRDGFWLARWLRAHAIETHVIHSTSVAVSREHRRAKTDRLDAAMLLRVFMGWLRGERGHCGMVGVPTMDEEDAKRPHRERENLVGERTRIINRMKAALVRLGIRGFKPELRRAPKKLDGLRTPEDLAIPPNTLDEISRDMARLAMVREQIDLIEQARLARIEQAPNTGPNAMVRLLASIIGVGIETADMLVQEILSRNLRDRRAVARYAGLTGSPDESGSKRREKGLAKSGNARVRRGLIQLAWRFLLFQRDSALAQWYRARTEGAKGARKTIMIVTLARKLLIAMWRMVTTGEIPDGVRLRAAAA

SEQ ID NO: 56568 - protein, 345 aa, unidentified
MIIGCDFHPSWQQIAWLDSETGETGERKLVHAAGDAKAFYQQLAAPALIGVEATGNSQWFIELVQDLGYEIWIGDAAQIRASYVRTQTTDKRDAAPLLTLVVEGRFPRLWTPDGEQRDLRQLVLHRHKLVEIRSRVKNELQHLALNKGMQRKAKLWSQAGQKLLRELPLKPWAACRREDLLGLLAMLNQQIGTLDQAVQQAADEHPQAKLLMTQPGVGPNTALAYLLTMGDVSRFPRGKQVASYLGLIPREESSGGRQKLGAISKQGNRLLRSLLVEAAQIAVRYDPGLRKQYLHRCHQKPKGVAKVAAARQLAVRLYWMLRTEKPYPEIVRIESSPRVALVGAS

SEQ ID NO: 56569 - protein, 391 aa, unidentified
MVCVGIDVAKDKHDCCILDSDGMVRADCFTIPNNMDGFKQLLQTIRNCTKKSDKIKVGLEATGHYSYNILGFLLDNGLPTYVINPLHTNLYRKSLSLRKTKTDRVDARTIATMLLSDVDLKSYTDTAYHNEELKSLTRYRFDKVRERAKLKQSVSRLVTILFPELEKLVPSLHIASVYALLSEYPGAKQISEIHLTKLTNLLATASKGRYGKDKAIQIRDAARTSIGSVMPAKFLELKHTIKLIRELTSEIDEIEVSIQKIMDELNPPILSIPGVGIQSAAMILAEIGDFSNFESPDKILAYAGCSPSTYQSGKLTNCYAHMEKRGSRYLRHALYNATKYVCHWNPVFAKYLAKKRAEGKHYNVALSHAMKKLVRLIYALQKSGKAYLAAA

SEQ ID NO: 56570 - protein, 329 aa, unidentified
MSAFVCGLDVHKDSTYATILDHSGRIVNQARMSNERVLSYLSRFDVGTVAMESSNQVASLYRKLEGRGYSVVLSHPKKTRYIAEAKIKSDRVDSEAIAELARLDALPLAHMPDKETAILREQVRRRAFLVRERVKLRVKIKSVLTYEGIRWPSDQGLFTRKGVEWLHGLNFEPVESYLRVLKPLDDEIKLVSRQLRGLAGKDEDVKLLMTIPGIGYYSALLVKSEIGDVNRFPFGDRLCSYAGLVPSTHASGAYVRHGGITKEGSRWLRWVMVEAAQTHVHKYDTSVTRLYNRIAERRGKRSAVVAAAHKLLLVCYSVLKNKRPYYDQA

SEQ ID NO: 56571 - protein, 313 aa, unidentified
MERSLFVGIDVAKAHLDVHAVPTDAALRVAHDAAGLATLCERLVAWAPTLIVLEATGGHEVTVVAALASAGLPVVVVNPRQIRDYARATGQLAKTDALDARILAKFAAAVRPEVRPLPEPQTRALDEAVTRRRQLIEMLGAEENRRRLVRDRSVQGQIEAHITWLKRAIKELDRELQATIRASPLWRDAEAVLRSTPGVGPVMTTTLLAELPELGQLSRHKIAALVGVAPLNRDSGQFRGRRMISGGRASVRRVLYMATLSAIRRNPVIKTFYDRLCANGHPKKVACIAAMRKLLTILNAMLRDGRRWHPQIA

SEQ ID NO: 56572 - protein, 413 aa, unidentified
MDVLHPRCCGLDVHKSSISACILLREAGRVQKHQRRFGAMTQELRELAEWLRQFDVTHVAMESSGVYWKPVWNILEGQFTVVLANAQHIKNVPGRKTDQKDAEWIAQLLQYGLLRPSYVPCESIRDLRDLTRMRASLSQEASRISSRIQKVLEDANVKLASVATNVLGKSGRAMLEDIISGEDDPEHLASLALGHLRVKIPQLRLALEGKVRSHHRFLLRRLVDQIQFVEHEIGLLDERLEEIAQQRPELSQAVARWDTIPGIDRVAAWTLLAEIGDNMAQFPTAEHLASWAALCPGNHESAGKRLRGTTRQGSPWLCRMACQCAWAAARTKNTYLSSQFRRLAARRGKKRAIIAVAHTIIVIGYHLQKNQSNYEDLGGNYFDRIHSDGLKRYLVKRLQQLGHKVTLEPMEAA

SEQ ID NO: 56573 - protein, 312 aa, unidentified
MTSEWVVGIDVGKDHFDGNRYGSAEVRHFDNNATGQKALVKWLNQAGSGRVVMEATGGYERSLKKTLWTAGIEVAIVNPMRVRDFAKSQGILAKTDQIDACVIAHFGHVTHPMATPLQTEAEEYLSACVERRRQLVVMTTTEKNRLSTCPERVRGEIQEHIAYLEEKIDKLEEEIHSAIKQDSRKLDNCQKIESVPGLGPVTASTLVADLPELGKLNRKEIAALVGVAPFNKDSGRKRGKRKTKGGRAGIRRVLYMASLSACKHNPIIQAYYQKLIKRGKEKKVALVACMRKILTIINALIRKGETWRTTEN

SEQ ID NO: 56574 - protein, 428 aa, unidentified
MNSTSNNDHPHNDYAAFIAIDWADQKHAFCLQPAGQANKETGTLEQKPEVIGPWVAKLRERFGGRPLAVAVEQSRGALIHALLSYDFLVLYPIHPTTVAKFREAFKSSGAKSDPLDTEQILEILTKHLELLKPLNPDTEQTRLLARLVEDRRTAVELRTSHLQALQAGLKEYFPQAIELLNHNLRSRLAADFLRKWPTLEAFQQAKPSTIKKFLYGHNVRSPEVVEMVLRWATTAKALTTDPAIIESSRRLCQLHAQVIQTLNPIIEQYDQRIQTVFQDHPEVQLFNNLPGAGPALAPRLLAFFGTDRSRYEAAENAQSFCGIAPVTKSSGKTRVVYRRRACPKFDLQTFHEFARLSVAKCQWARNYVEYYLAKGKKYHTIIRALAFKWIRILFHCWQHRTPYNEEKYMKTLQQRGSIFATLHLEKKS

SEQ ID NO: 56575 - protein, 423 aa, unidentified
MRFIGLDVHRDFCEVAIADGGRVRLAGRVQTEPAALLLFAQSLAVDDQVALEATGNALEIARIIEPHVGRVVLANPKAVKGITRAGAKTDKIDARTLAKLLAGGFLPAVWLPDEQTRILRRRISARAQLVRQRTRAKNQVHATLVRNLKGKPPVTDLFGARGLRWLAEQTLPADEQETVAACLRQIAFLDGEIALIERALAEQVLASTEMRRLLTLPGVNFVTAAALMAAIGEIGRFPTARQLVSYLGLDPRVQQSGSEPARHGRISKQGPGETRHVLVEAAWHASRAPGPLRAFHQRIAARRGGNIATVAVARKLAVIAWHMLSRSEDYAFARPSLSREKIRKLELATGAERQKGKRIGVWVTKEQHQLDKELAAQAELAYRRLVQDWQPAIKSAGAAPGRASRRPSSGQAARQETAPPPAL

SEQ ID NO: 56576 - protein, 345 aa, unidentified
MVQRRFTRLRPVSPRYVVLNEPETIMAIPSTLVTLGCDVSQQWLDINVYGEDQVTHINNARSEIDAFLKGYAGAVIAVEATNTYHELIVERALKLGLTVYLVGGYQLKHYAEAIDERMRTDRVDAKLLARFLHRERDRLKPFEPKSPDVKRLWTLMKRRALLVKTKGQIRQSFAGLAEFKSSAKTTVKQIDHVITLIERRIRELVKNLDWQADVLRVKAIFGIGPLTAIALVCAYRSYDFPHRDPYIAFMGLDVRTKDSGKHRGKRKLSKKGDGEFRRLLFNTAMAAKKSYPYFEQRYNGYVSRGLSTTGALMAIGRQQARIAFALLKNQVDFDPNRFNKACNAT

SEQ ID NO: 56577 - protein, 427 aa, unidentified
MNYTQNHKISQITPSTLVIGIDVAKEKHVARAQDDRGLEFGKRLIFQNRFHGFELLLEWAHRHAKENSKDHIIFGVEPTGHFWLNLAYYLTAKGYDIVLVNPMHVKKSKELDDNSPTKNDTKDAKVIAQLIKDGRYSVPNLLDGIYAELREGVKIRDQLIQQLMITEGRIPKMIDRYFPEFCDVFGDWEGKAALCTLKLFPSPSQIVEMTPEEILQEWKPFVQRGVGIKRATKLVEAARKSIGLTIGTQFAQREMDNLLEQLELFRKQLEDLDQELEGIVRTIPGANEMIDITGLGVATVTTFLSEIGDLKNYKHPQQLVNLAGLSLRENSSGKHKGKTTITKRGRSKLRRALYMAIRPLVAHNPTFKALHHYYTKRPDRPLKKQQSLIALCCKLLRVIFVIGHKQCQFDGSKLLQGIPQENLLQVA

SEQ ID NO: 56578 - protein, 358 aa, unidentified
MLRHIFVGIDLGDKNSVARIAVDREKSERMGFVNNRAGRQRLFEEVKRRAEKIGGTVVMAYEASACGFVLQDEAEAKQIKCWVLAPTKMEKSAEQRSHKNDDRDSDDVLEKLRGYVLAGNRLPTIWVPDSQTRDDRELIRMRLELAEKQTQVKAQIQMMLKRHGIEKPSGLGTSWSVAYKRWLQGMAESERFGWGMRQALSSLLRQLDFMESELKRVDKPVEQLACDPRHKAIIEELTQECGVGVLTAMVYRTEIGYAGRFRRGRQVGKFAGLTPKSHESGQQNDRKGHISRQGPPRLRKMLCQASWSHVRHDRRAQQTYQQLLSRNPKKKKIAIVAVMRRLAVRLWHRMRKVELEQD

SEQ ID NO: 56579 - protein, 406 aa, unidentified
MVVGIDIGSTTQYARAFDWRGIELGKVFPFSNSREGFESFKAWMQHLQDKYKKLDAIVGIEPTGHYWFDLGAYLEDEGILLVMVNPYAVKQTKELDDNSQSKNDRKDPKVIAKLVTEGRYSAPYTPDGVYADLRIMVANRKRLIREMTQIKNRFARWFAIYFPEYTDVFGDYEAQSSMLLLKKVCTPEAIVELGAEKINQIWRDAKLRAVGMKRATTLCETAKRSIGLKKGSSAARYEMKLLLEDYEYKKAQLDAVMEEIEKLCRKIPESEQMLAIKGIGVITVAGFLAEVGDVRRFESPRQIQKLAGLSLRENSSGKHKGQTTISKRGRSKLRAVLFNAAIPLIAKNPEFKSLHEYYTTRANNPLKKKQSVIAISCKLIRVFYAILANGVTYDAQKMLSDIHRQP

SEQ ID NO: 56580 - protein, 354 aa, unidentified
MQYIAFDSHKRYTYAVVEEKEKGRVMEKRIEHRRGEIGAFLSQCEVGSPVALETIGSWYWIVDEIEAAGMLPRLVNARKAKMMIASSKKTDRLDAKGLNTLQRTGTLPTVWIPSSELRDIRELYRTRMVLTQMVIRLKNRILSCFSKYGISFDETSDAFNIKGRASLEAALEILPTQTCFAVKELLRQLDLLQEAVKEFEARMLQVQSNDPEIKLLQTIPGVGAILSYVIAYETGDIHRFPSASCFASYAGTTPSVHASGGKVRYGHTASDVNHYLHWAFIEAANVISMRHEVLRFRHTAKLYERLRQAKGHGIAVGAVARHLAEATYWILTTKTAYREPNQNKQVVVVSSKEG

SEQ ID NO: 56581 - protein, 348 aa, unidentified
MLIIGCDYHPGFQQIAFVDTDTGEAAERRLTHREEAEQFYRTLQLRRVRIGIEASGHGRWFERLLNELRFELWIGDAAEIRTKRVRKQKTDRQDAQLLLKLLMEDRFPRIWVPDAENRDLRQLLWHRHRLVQMRTRLMNQLHVVALNEGVRRKKALWRPAGRSELESLVLAPWALRRRRDLLDLFDQLTPKIHDLTRALEEEVGKRPIARRLMTHPGVGVLTALAFELVIGTPERFHCGKQIASYVGLVPSEESSGDRRRLGHISKQGNALLRFLLVEAAQVTVRSQPQWRSKFFHLAMRRGRKIAKVAMARKLAVHLYWMWRKGWDYGQFEKLGSHAGEPGNRHGVQ

SEQ ID NO: 56582 - protein, 338 aa, unidentified
MKSYAGIDLHSSNNFTGIINEQDQRLYRKRLPNRLDAILAALEPFKDSLEGVVVESTFNWYWLVDGLMEHGYKLHLANPSAIKQYEGLKHTDDKWDSFWLAHMLRLNILPEGYIYPKEERPVRDLLRRRLLFVKHRTAHILSLQSMISRNIGANMSCYAIKSLDQEAAESLFNSPYLLLAAKSNIAVIHFLKERIKPIEKAVKSHIKLRDEFKYLLTVPGIGDILALTIMLEVGDINRFAKVGDYSSYCRCVKAERFSNDKKKDKNNRKNGNRYLSWAYVEAANFAIRSYPHAQSFYQRKMAKTNGTVAIKALGNKLARASYYIMRDQVPYDPKKLFS

SEQ ID NO: 56583 - protein, 396 aa, unidentified
MEALLECCCGVDVHRDILQVCILKGLTDNPEVIRAEFKTMPNNLAEFVQWLISHECYHVAMESTGVYWRPVYEAIEESHSDYQSLMVVNAHHMRNLPGRKNDVKDAEWIATLLRHGLLEASFVPDKITRNLREYSRLYRSFTCEKSRYLNRLEKFLQTHGFKLSTVLSNIYGVSGRRLLYKLSETGDLLASDIIEAVDKRVKKTTDEIHEAIKGKLALCERRLLKTLLAKIDQIQKEIEEILIIMQEVAQPYQAAVEQLDSIPGVDTLSALTVIAEISATPQNHFSSSAKLCSWAGLSPRNDESAGKVKSRKILHGNPYIKSILCQVAWASVRVRKSSFAMWFWSHQGKLGRKKAIIAVARKILTLIYKLLKSGEFYDSTIALKAYSSPPLNNSLG

SEQ ID NO: 56584 - protein, 397 aa, unidentified
MIAVGIDVSKSKSTVAILNGDGSIRAKPFNVRHTADELLALVNYIKGTSEVPTILMEPTSHYHYPLLKAFQDANLPVCLINPYQMKKYGDTALRKAKTDKRDSIRIAQYALEKSYSLIPYTPSDQKYEDLRFLSRQYSQRLSTLTVNKVQLLALLDQTMPGITSLLPLKSRDPDNCVLLRFIKRFKSFDIIRKMGKTRFLESFQILVRKTKGRPASTKGLRIYELALNSVTTRGDNPLTAMTQEQCVALISTSQKAADEINLQMRTIAETLPEYKVLRSMAGVGDRLGPVILAEIGDIRRFHSGKALNAYAGNDAPPYQSGQFESRNRHISKRGNPALRKACFEVMQALKLTKPQDDPVYLFMAKKEQEGKPYNVAKMAAVNKFLRIYYARVMELYK

SEQ ID NO: 56585 - protein, 390 aa, unidentified
MQNVANRPGASTAICTNLGAIFVSLELSRSTWLVTSLSPGGGERMSRHSVTGGDVAALLARLTDLQGKAQVRTGRCFPIVVIQEAGLDGFWIHRALRKEGVESHVVDPASIAVQRRRRRAKTDRIDGEALVRALLAYKRGEPRVCAMVKVPTPEEEDGRRLCRELKSLIGERIRHANRLKGLFFAQGITGYEPRRQDRRERLEELCTGDGRPLPPHLKALALREIEVLELLTHQIDTVKAERNALLAVQCTADTTPGRVEMLLRLKSIGPGIAGALWSEGLFRQFDNRRQVAAYAGLAPTPWQSGSVDHEQGVSKAGNPRLRAMMVELAWLWLRHQPDSALSRWFHERVRHNGGRLKKTTIVALARKLLVALWKYVTAGIVIEGAVMKPV

SEQ ID NO: 56586 - protein, 344 aa, unidentified
MKITTIGIDLAKNVFQAHGVNEHGKTEKKKQLKRGQVAEFFANLPPCLIGMEACGSAHYWARKLEGFGHTVKLIAPQFVKPYVKTNKNDAADAEAICEAVARPNMRFVPIKNVEQQAVLSLHRVRQGFVKARTAQANQIRGLLGEFGILIPQGITNIAKRVPELIEDASNDLPGSFRLLVQRLMDHLNELDKQLDELEAQIKAWHRESAASCKLEKIPGIGPITASALVASIGNAKNFDDGRQLAAWLGLVPKQHSTGGKSKLLGISKRGDSYLRTLLIHGARSVILSASKKLDKSRWLRKLMERRNPNVAAVALANKNARIVWALLANEREFRSDYTPALAVA

SEQ ID NO: 56587 - protein, 323 aa, unidentified
MNNIAKIYVGIDVSKKQLDTYLYPLGKKKQFSNDENGFVKLIEMLESLENVDIVAFEASGGYERSLLLTLQEKKFKAWRIEPKRVKGFIRSEGVLVKTDSSDAKMIARFAAEKASQYLPITTTQADFQLQAWINRKEAIVQMISAEKTRLHQTNDPVVEKSIRRHLEYLEAEKLELEKNIDNAIKNDDDWRSKSKILQSAPGIGKGISAMLIAFLPELGKVDNKKIAAIVGVAPYTRQSGTFKGKAMVSGGRFSVRKITYMAAVNAVSKTHDWGKFYRKLVSRGKSGKVALIAVVRKILTTLNSLVRDNRLWAPERVNEEFSV

SEQ ID NO: 56588 - protein, 403 aa, unidentified
MTKYHVGVDVGKDKHHVSVRDLSRDAYCKTFSVTNDRSGFMEFVSSLESLSVDKYDFLIGIEACSYGLNLSYFLMGVGFKLVEVNPFRAGQFRKAQGKKAKTDRIDARTIAAILTLGNHKPLSIPDPILDNLRELTRFRAGLVRERAALLIHLREALSTLFPEYTKVFRQLDSAGSLALLLAFPGPEHLLGAGEEGIAATLSHASPHRMGKGMARRIMEAAQNTIGVIQKQPALGIKISILAKRILSLQSTIKELDEQITTLFNTLPYKPQDFPLGHVSSLAAIISEIGDIQRFPTLKKFLSYLGWCPQSFQTGNFRLEHPRMSHAGNRYVRQLIWMWSVLAIRILPRCREYFERRVREGKAKMHILVAVGRKLLSMLYAILKRGVSYDPNWEENRHLAVARR

SEQ ID NO: 56589 - protein, 356 aa, unidentified
MSHDVKYIGMDVHQEAMVIAVLNGSGKLIMETIVETKASSILQFLHGLRGELHVTWEEGTWAAWLYDLLQPQVEEVVVCNPRRNALLKEGSKCDKVDARKLADLLRTGMLRPVYHGENGLRTLRELARSYQTLSKDLTRVMNRLKALYRGWGIPCAGTQVYAPRYREQWLSKIVQAGVRRRAELLYQQLDGLQALRRNLRPELLAESRKHKAAKLLRQIPCIGPIRAARLIALMQTPHRFRSKRQLWTYSGLGIETHDSAQFRFVRGQLQRSKKPQQLRGLNRNHNHEMKEIFKSTATRASCGMGPFHDFYAALLAKGMKPEMARLTLARKIAAITLTLWKKGGRFDAEQLKTQAA

SEQ ID NO: 56590 - protein, 375 aa, unidentified
MKEKVRFLGLDVHAETIAVAIAEPDGEVRSMGTIANRAESIRKLVKKLGPVEHLKACYEAGPTGYVLYWQLAELGVGCEVIAPTLVPMKAGDRVKTDRRDAERLARSYRSGDLTAVWVPDEGSEALRDLVRAREAAKQDQLRARHRLSKFLLRAGHRPAAGMKAWTLGYMAWVRQLRFKQVAQESTRLDYLHEVEHMAERVKRLELAITEAVKLASAALREVICGLQALRGVAQISAVTIAAELGNISRFEGARQLMGYSGAVPTEDSSGQRTRRGSITKTGNAHLRRIAIEAAWSYRLRPGIGPALRKRQEGVAEEIKEIAWKAQHRLHKRYMRLAAAGKDQRKIITAVGRELLGFIWAIGIKAEAASKLRTAA

SEQ ID NO: 56591 - protein, 355 aa, unidentified
MSQQTNCAIAVIGIDIGKNSFHVVGHDARGAIMLRQKWSRGQVEARLANLPPCLIGMEACVGAHHLSRKLASLGHDARLMPAKYVRPYSKGQKNDFNDAEAIAEAVQRPTMKFVATKTAEQLDLQALHRVRERLVSQRTGIINQIRAFMLERGIAVRQGIGYLRTELPTILATRTDALSPRMLRVIEELAGDWRHLDQRIDGLSGEIEALARQDPACSRLMTVPGIGPIISSAMVAAIGTGEVFSKGRDFGAWLGLVPKQISTGDRTILGKISRRGNRYLRVLFVQAAWVVLVRIKNWERYGLKSWIEAAKRRLHHNVLAIALANKLARIAWAVLAKGRAFELTRTDDAGVVQPA

SEQ ID NO: 56592 - protein, 398 aa, unidentified
MTRKNTLKSLPTDTEFRVVGLDLAKSDVSVAAIPVDDNTPSLVDRMTYADLLDWAGKISPTLFAMEPCNGYSLLCLQLENLGHEIKVISGWTVSMWINTHLSGQKTDLNDAIALARLAVSDAELTPIRHKSITEIRIQTVQAVRQQLMSQRSKSIVSFKALAQQWGIPCAAGHRNLKKLRESIEAKVDLITRPVANAMLFLLDAVKSLDRQIGQLNQTLQELVMSDERGRLLQSVLGVGTQISARVITVVGNIERFNSPRSLVAYVGVAPRNFITGHKNLTKKKHGNCPDLSHKGQGKIRRRGDKLLRSLFIQGAACLYMQFCKDQLPECQLKRWILKQLAIQKPYGKLIVSLAAKLIRIVWAVLTYREKFNIQKAGMTRSMWSEMALETPLNKEVPA

SEQ ID NO: 56593 - protein, 428 aa, unidentified
MNEVDRNRLEQFRQLRKEIRHSEQYLIVGIDVAKDRHHAFFGTATGKTLLKRFVFDNTYQGFRKLLDQTEALRVRHELSKVVYGMEPTANYHKPLGEGLIELGRSVVLVSGVTVKRNRESLDGRWDKHDGKDSANVADLISQGKCLYYEYPSAELRGLRGLLSLKRRLKKQEHSYRVRIRNHLIAQYFPEMDRDYERLGAEGLSIVRWCLPASQITQLDVGPFIERVTSRRIRMEKRRRLEEIWEKAGESIGCDGVPGLDHEAKVMVEGLRQIREMIKETEDKIEELCKEFPEYQYILTIPGFGPDVSAKVLGAVGDPDRFLNGKQVLKMGGLDLSADRSGKDSDKAIPQISKRGKADLRYALYQAAFIASTKNQDFMRYYTKKLRGREKEKGIHGKILVKLSAKMLLIAWTLMKKKETFNPTYLNVE

SEQ ID NO: 56594 - protein, 414 aa, unidentified
MELLHERCAGLDIGKRDLKACVRTPNPSGRRSRQQEIRTFATTTNALLELRDWLLAQKVTLVVMEATGDYWRGAFYLLEDVLNVILVNAAHAKGLPGRKTDVSDAAWLCQMGECGLLKASFVPPEPIRHLRDLTRYRSTLAAERTREAQRLEKELEDAGIKLSTVATDILGRSGREMLAALIEGERDVHVLAEMAKTRMRPKIPQLVEALTGNFGEHHAFLCRLHLERIDQLSAAILELSTRIEEQMLPFARQLEHLVTIPGVGQATAEVIIAETGGDMSRFRTAGHLASWAGVCPGHHESAGKHKSGKTRHGNRQLGAALGTAAMAASRTKDTTYLGARYQRLVPRLGKKKAIVAVEHSILAAVWHMLTDDVDYHDLGGDYFTRRDPERAMHRIVRQANALGFTVRFDPIQAA

SEQ ID NO: 56595 - protein, 356 aa, unidentified
MDKVIREGAVRVGVDLAKRVIQVHAVDATGHVLTSRALPRARFIDWCVRLPAGCVVAMEASSSAHHWARKLIALGLDARIISAQLVEPYRMEGASGKNDANDAAAICEAASRPKMRFIPVKSIEQQSMLCVHRLREGFKEDRTACINRIRGLLAEFGLVFPQSPRELQAVLSDVLEDAGNELGTLARLTLQRAQAQWRELDDHLAWCDERIDAHRRSNPEVQHAATLIGIGPVTASAAIATVGDFKQFKNGAQFGAWIGLTPRQRSSGGKNNLGGITKRGDTYLRTLLIQGAKSAVMTAHRRQDKISSWVLALRERSGWQKAVVALANKNARILWAVMTRGDVFDPNHLSVKPTAC

SEQ ID NO: 56596 - protein, 341 aa, unidentified
MQITTIGLDIAKNVFQVHGIDAAEKVIVRKQLRRGQIIAFFEALAPCLVGMEACATSHHWARELTKLGHEVRLMPAKDVKAYVKRNKNDAADAEAICEAVRRPTMRFVRIKSAEQQGQLMLHRARDLLMRQRTQLINALRAHLAEFGVTAAQGREGIKELLAIVAQDESSRLPIDAHASLTVLAAQLQAVQTVIGSIEKRIVAQHRSNEASKRLETIPGIGVVGATTITAVVTDPKAFRSGRDFAAWIGIVPRQDSTGAKQKLGPISKQGDQYLRRILIVGAHSVLRRARQQPDKYPWLTQLLARRPFKVVAVALANKMARIAWALLARGGTYRASQLGAV

SEQ ID NO: 56597 - protein, 319 aa, unidentified
MTQNDLVVVGIDVAKDKVDACIRTVTERRTFPTTAPGRRSLIAWLRKHQVGKAVMEASGGYERVWAKALRQTALEVRIVDPKRVRSFAESAGRLAKNDKIDAEMIAWFAETFSEAPSQVEDPAHEEIKALVKGRKSLIDLRARLEMQKEHEVPALVGKAHARLLKKLASEIAAIETAIGAKIKATPAFAVRAEIIQSVPGFAEATALTLLAGLPELGQVSNEVAAALVGVAPYDDDSGKRHGQRCIKGGRRWVRNALYMPCVGAATLNNLVFKAFYQRLIAKGKEPKAALIACMRKLIVILNTMIARGEKWDPKRYQVA

SEQ ID NO: 56598 - protein, 410 aa, unidentified
MKPLYVGIDVSKRNNVVYLMKSDGSKHSSFAVQNNLGGAKQMVEKIVFAMKTMQLSDVVIGMEATSVYGENLMCFLREDGRIGQFNRKLHLLNPKQVKKFKDAYSDLPKTDLVDSFVIADNLRFGRITAEVYMDDYRYRALQNLTRARFHAVSSLTKEKNRFLNYLFMKCSGLAQEKVFSDACSATAIAVAETFETVDELAYMSLDELTDFIAKSGRGRFEDPERVAKAVQVAAKGSYRLPKTVNDSINQVLSISIATMRTLEAQIKAFDKAIEKHFELIPNTLTSIKGIGWVYSAGIIAELGNINRFESQASVAKYAGLVWNQKQSGDFKGEHTRMIKSGNRYLRYYLIEAANSVRRCDPEFMRYYGLKYKEVNKYQHKRALALTARKLVRLVFRLLRDNRLYITPEFH

SEQ ID NO: 56599 - protein, 343 aa, unidentified
MQTVTTIGLDIAKSVFQVHGVDNDGKVVIRRQLKRRYVLAFFEKLPPCLVGIEACASSHHWSRELQALGHTVRLMPPAYVKPYVKRQKNDAADAEAICEAVTRTNMRFVPVTTPEQQSGLMLHRTRHLFIRQQTSVINAIRAHLAEFGVTAAVGRKGIEELLRVIADPSDKRVPDVVRACLAALGSQLLSLKKQILDFDRMIMAWHRSNQTSKRLNCIPGVGPLLATALVASVADPKTFRSGRNFSAWIGLVPKQHSSGGRDRLGSISKQGDRYLRSLFVAGALAVIRYAKIHGTKYRPWVAALLARRPTKVAAIALANKLARRAWAMMARGERYNYPASLRV

SEQ ID NO: 56600 - protein, 352 aa, unidentified
MSTVPVFVGLDYSLTGVQVCVLDREGKMLGNQKVPDQVDAIVHSASRFGPVHSAAIEACCGASDLAEEIVQRHGWLIHLGHPGYVSRIKQNPDKTDFSDAHLLADLERVGYLPRVWLAPKSLRELRTLVRDRQALVRQCQSIRLRITALLRDHRQVSPCHRWTQKWYAWLKHGVELGEHSRWVLDRQLDRLAWMTREIRQAEKHLHEVMQDDRLVQFLLKIKGVGYVTAWTLRTEIGRFDRFRTGRQLARFCGLSPCNRSSGSKMADAGLIRCANPELRRVLIEAAWSLIRHQPRWRKLAASLRERGKKGSVTCAAVANRFVRWLWHQVMNNIENVPPVDRPAVAGVPVHVG

SEQ ID NO: 56601 - protein, 341 aa, unidentified
MKNQVAGLDLHKNQSYITVMDGDGQILEEVNLKSSADSILNFLGKFDKPEVVFEATRNWYWLYEALQRKGYDVTMAHPKKTKAIGEAKIKTDKIDSHTLAHLKRADLIPESYLAPLETRERRELLRHRVFLVRERAKVKSKLRTLLSKLNLNCPYSDVLGKKAICWLKERQEEMPQVFTGKLDDFLQLGGSLSTIIQVVEKKVGNQAADDRIVKLLVTIPGIGEFSAMVIKAEIVTIYRFPDADHLASYCGLVPSTHSSGNYTHKGSITKEGNRWLRWILVEAAGKLKAKSPHFKDFYYRILSKKTKQVARVATARKLAVAIYYMWKREEPFKEPEPRSTG

SEQ ID NO: 56602 - protein, 386 aa, unidentified
MQKLNDLSRSLAPLEPDGTLIAVIEMSQSSWLVAGIVPGVERQPLKKLAADEIALLKLLHRWREEAEKAGRRIERTAVAFEAGRDGFWLARWLRTRSIEAHVIHASSVAVSREHRRAKTDRLDTELLKRAFLGWLRGERDHCKMVAIPTSKDEDAKRPNRERESLVGEQTRIVNRMKATLIRLGIRGFNPKLKKAAGRLEDLRTPEDEPIPPNTMAELRRDMDRRRLVSDQIRQIEEARLDRLKQAPDDGPHAMLRLLARVIGVGIETADMLVQEVLARNMRDRRAIARYAGLTGSPDESGTKRREKGLARSGNARVRRGMIQLAWRFLMFQKNSALAQWFRARTENARGTRKLMIVALARKLLIALWRLVREGVVPDGVVLRPAQ

SEQ ID NO: 56603 - protein, 411 aa, unidentified
MQTLVERGCGLDVHQATVVACLLIVLKNGQVQKQIRTFGTTTRELLALREWLLSQGCTHVAMESTGVYWKPVYAVLEGGALEIVVANAQHVKKVPGRKTDVKDAEWIADLLCHVLLRSSFVPPKPIRELRDLTRYRRKLVESQAAERNRLLKLLETANIKLSSVTTDVFGVSGRLMLEALVEGKATPQEMAELAKGRLRQKIDELGPALEGKLEEHHRFLLRLQLDRLEAAEKDLAVLEQRLQEKLKPYAEQLTLLDEIPGVDWTLAAVIIAELGVDMSVFGSVSQLASWAGVCPGNNESAGKRKSSRIPKGNVYLKTALVEAANSAAKAKGTYLRDKFYRLKARRGYKRAAVAVAHKILVAIYHMFSDRVCYNELGDVYLDKLNKHHLTRNLVHRLERLGYAVTLEQKAA

SEQ ID NO: 56604 - protein, 408 aa, unidentified
MRIIGLDIHRAFAEAVAWKDGKLSRMGRVIMRRDSLEAFAKQLSEDDVVVIEATGNAASVAAVIGPHVSRVVIANPKQVRLIAHAKIKTDTIDASVLAQLYASGFLPEVWIADEATQALRRQVTRRNQIVRQRSRLKNIIQSILHAHLIPSCPHQDLCGPAGRAWLSEQILPGDERLAVERHLREFDRLGDDLKVIERDLARSALADESVQRLMTIPGIDMVVALALKAAIGDVERFAGPEKLVGYLGLNPSVRQSGPGPAYHGRITKQGRGHARGMLVEAGWAAARSPGPLRSFFLRVQTRRGQHVAAVATARKLAILIWHLLTKGESYLWARPALHARKLRNLELKAGHQGARGQKGTAHAYNIKSQRDQERRWVEQAEAAYARFVAGWNPRGPKARTGAAKEERR

SEQ ID NO: 56605 - protein, 367 aa, unidentified
MKKVSTVAAKASRNCSQPTLTIGLDLGDRNSWYCVVDEAGQIQLEQRVRTTAKALREVFGTMPRSRMALEIGTHSPWISRLLNELGHEVMVANARKVRLIGESRKKDDRLDAQTLARLARIDPKLLYPVKHRSAQAQADLAVIRARAGLVRARTGLVNRARGLAKSYGEPLRGCNVRNMNPEKAESLSAELQVALEPLLNAIEGLSERIQEYNERIERLAAESYPQVELLKQIKGVGTLIALTFLLTLEDPHRFGKSRDVGGYLGLQPGRRNSGQSEPQMHISKEGDPYLRTLLVQGAQHILGPFGIDCDLRRWGLKLAERGGRNGKKRAIVATARKLAVLLHHLWVSGEVYEPLHNRSRMTVAAAA

SEQ ID NO: 56606 - protein, 355 aa, unidentified
MTSTRYIGMDVHKESISIAVRNATGKMVMECVIETKASTILQFIDGLRGDLQVTFEEGTSAAWLYDLLKPRVTKLVVCDPRKNKSMREGNQSDKIDARRLAELLRLDHLTPVYHGEHGLRTLKELVRSYLTVTKDLARVMTRVKAIYRSWAIPCTGKQVYARCHRAEWLGKINEPGVRRRAEFYYHQLDVLRTLRQEVRRDLLAESKKHTAWKRLCEIPSLGPIRAAVLLGILQTPHRFRTKRQLWSYGGLAIETQSSADHRSVDGQLERAKKQVLVRGLNRDCNHDLKNLFKGAAVVACSKPGPFAQFYAALVAKGMRPEMARLTLARKIATIVLIVWKRGVCFDAQFLKPQTA

SEQ ID NO: 56607 - protein, 448 aa, unidentified
MIKHNTENGLPIIHVRAAGIDIGSRFHVVAVPTTLAEEPVQTFQAFTADLERMATWLVELGITTVAMESTGVYWIPVYEILETHGLQVILANARDARAVPGRKTDVNDAQWIQRLHACGLLRASFHPEREIAALRSYLRLRERHLDYAAAHIQHMQKALTHMNLQLQHVVSDITGATGMRIIRAIVAGERNATMLAAMRDLRCQSSVETIQRALVGNYQPEHVFALSQALAMYDAYQAQISLCDEQIAQSLQQLSRGKPRPSKALPKPRHRTRQPNALNFDVRTLLYQLVGIDLTQIHGIGPYLALRLVAECGTDLSRWRTAQHFTSWLTLAPGCRISGGKVLSAHTRKTKNRVTAHLRLAAVTIGRTNTALGAFYRRLSARIGKAKAVTATARKIAVLFYNAMRFGMEYQDPGADHYEQQYRERVVKGLHRRAAEFGFTLQAIEGVS

SEQ ID NO: 56608 - protein, 398 aa, unidentified
MSKAFVGIDVAKEHSIVQGIDRDEKKLFYLRFSMDSAGFAELRTAIKGCGVNLEDIAVAMESTGCYHINLFSFLCAEGLRCAVVNPLLISKFVQGSLRKTKTDKKDAMTIAQFLLTNEKKLCVVTSTQDAQDLKDLARERESQSWMIASLKNDLKRLLQGTFPEFETLRKNIYTETMLNFVRQYPSARLIRQAKRKDIDKALICPGEKRKRVQISADDLIEAAKRSVGSAGTAKELIVSEKATTILYLQEKCEKITEALVEACEATRIEDLEIIKTLDGVKNILGSSFLAEMGALSNYKSYKSLIAYMGFDPSTHQSGKHVGPSKISKRGNRHMRRIAHLMTLGSIKSDNIFKEYYLRRIAEGLPKMKALMATSHKLIRVIFSMLTHRMPFKKEVAAV

SEQ ID NO: 56609 - protein, 314 aa, unidentified
MDSMVLYVGIDVAQDQLDIATTADQTWSVKHHPRAMAALARRLQKLSPARIIVESSGKLEQELVVVLAEAKLPVVVVNPRQVRDFAKATGVLAKTDRIDARILARFGEAVKPEVRELPDAQARDLMAHVARRRQLHQMLRAERHRLLRVARPLKKSLERHIAYLEKQLAKLDEDLHDAIRQTPIWQESFDLLQSVPGIGPTTAATMIAELPELGRLSRHEIAALVGVAPFNRDSGKWKGKRSTWGGRSSVRSALYMATLVATQYNAYIRAYYQRLLTRGKAKKTALVACMRKLIVILNSMLKNHQPWNPKIQTA

SEQ ID NO: 56610 - protein, 344 aa, unidentified
MLHAGLDLSRRRLDVCLIDDAGEVLGHTAAPPDADGLRHLAERFGGRPVRAVIESMTGARFVHDTLEELGWEVLVADAQKVKGLAPLACKTDKIDARVLAELSWRDLVPAIWLPDPSIRRERELARFRLHLVRHRTTLKNRIHATLMTFGHPCPVSDLFGQAGRELLDRLAIPDPWRRNVDASLELIDDLELQIARLTVELRRQGADHRYIPLLVTAPGFGWVNAYAVASEIGDIERFASPAKLVGYTGLCPRVYQSGNSDRRGPISKQGSRYLRWALFEAALHACSHPAYAERYQRTKKRLGRQRGPKVAQIDLSRKLTEAIWHMLTRNQPFAPAGARFRLAA

SEQ ID NO: 56611 - protein, 394 aa, unidentified
MRFVGIDVAAERHVVATVDEAETVRLRPTAFTEDAEGYQNLRSLLGPPVDTLVAMEATGHYGKNLFAALVAAGFAVALLNPLRTRRFAGEELQRTQTDAIDAMGIARFAAQKRPAASRLPDRATEELRELVRFRDRLVQDFGDRVRQLHRLVDLGFPEFTRYVRDLGSETATALLRDYPTAAAFQGVSLRRLAGLRYDGRHTIGDALATALLAAAGRSVGRHHGEAYQIQVRYTCEDLDVLRRRLRALERDIERVLDHHEVGRLLTTIEGIGPQTSARLVATFGDFTGCRSGAALACYVGVIPALRQSGKRTSPRARLTPLGAAGLRAKLWMPVLTAVRKNPWLRAYYAGLIARGKLPKVALVAAMRKLLHAVYSVATHRRPFVANLVTAEPRP

SEQ ID NO: 56612 - protein, 386 aa, unidentified
MPQLNDLSRSLVILEQDATLIAVIEMGQSNWLVAGIVPGVERSPLKKLAVDESALLKLLNRWREEAEKAGHRIERIAIAFEAGRDGFWLARWLRARGIEAHVIHASSVAVSREHRRAKTDRLDTELLKRAFLGWLRGERDHCKMVAIPTLAQEDAKRPNRERESLVGEQSRIVNRMKAALARLGIRGFNPKLKKAVERLDGLRTPEGEPIPPNTLAELKHDMERRRLVRSQIRDIEGTRLERLKQAPGDGPHVMVRLLARVIGVGVETADMLVQEVLSRNLRDRRAVARYGGLTGSPDESGKKRREKGLARSGNARVRRGMIQLAWRFLMFQKGSALAHWFYARTKNAPQTRKTMIVALARKLLIALWRLAREGAIPEGVVLRPAL

SEQ ID NO: 56613 - protein, 390 aa, unidentified
MTKRKTETVNDLSRCLDPLDMDATLIAVIEMSQSSWLVAGIVPGVERQPLKKIAIDEHALLKLLSSWRKEAEKKGHKITRVTAAFEAGHDGFWLARRLAAFGIEVHVIHASSVAVTREHRRAKTDRLDTELLKRGFLGWLRGERGHCKMVLVPTLAEEDAKRPSREREALVGEASRTITRIKAAFVRLGIRSFNPKLKAATARLGTLRTPEGEPIPPNTLAALKRDLERHNIIKRQIREIEQTRLDRLAQAPAKGPHPMVLLLARVVGIGVETADMLVHEVLSRNMRDRRAVARYAGLTGSPDESGAKRREKGLARSGNARVRRGMIQLAWRFLWLQKDSALAEWYRQRTQAAPATRKTLIVALARKLLIALWRLAHDGIVPEGVQMRPA

SEQ ID NO: 56614 - protein, 433 aa, unidentified
MSSTHESIPIQRFIGIDSHKHYVMVGGMNQQRKWVLRPRKISMARFRDWAAKNLRPDDAVVLETTSNVWDIHDVVSPLVSKTLVANAYKVRQIAEARVKTDKEDVKRLLTLLIANIVPEVWAPPIHVRELRSLISFRSRIGKQLTMSKNRLHSVVQRFNLIPPDGELLADKNQSWWLEQDFSELTALQLQLDLEIITHLEAQKNKIDQKLALLSNSQPWANDVVFLMQIPGFGLLTSMTILAAVGDISRFSHPKKLVGYAGLGAGIHESGQKHQQKSITKEGRKELRWALGQAAWAAVRSDPYWKEQYKRLSQHKHPNQAIVAIARRLLVSAWHILTKREPYRRSDDETIAYKMMTLVPMRDLVSTHGRNRTPRPHSPAVYQIWLASPRRWTSAHSYCSQRQTQTDCSLQRYCFPLTSAQFARVGLLLRPVYN

SEQ ID NO: 56615 - protein, 375 aa, unidentified
MKEKVRFLGLDVHAETIAVAVAEPDGEVRSLGTIPNRAESIRKMIKKLGRAEKLRACYEAGPTGYVVYWQLAELGVQCEVVAPTLVPIKAGDRVKTDRRDAEKLARCYRSGDLTAVWVPDEGSEALRDLVRAREAAKQDQMRARHRLSKFLLRSGQRPPSGVRPWTRPYLIWVAQLRFTQMAQEATRQDYLHEVEHMRERVARLEQAITEAVKLASPALRQVINDLQALRGIGDISAVTIAAELGQVSRFESARQLMGYCGAVPSEDSSGKRTRRGGITKTGNAHLRRIVVEAAWSYRRPPCIWYGLRRRQESISEETKEIAWKAQHRLHKRYRKLGAAGKDQRKIATAVARELLGFIWAIGTRAEAIVRQQAAA

SEQ ID NO: 56616 - protein, 340 aa, unidentified
MKLYGAIDLHSTNNVTVVIDEQDRVVHQKRLPNDLALILNELSVYQSEIEGIVVESTYNWYWLVDGLMEQGYKLHLANTAAIQQYEGLKYTDDHSDARWLAHLLRLGVSPEGHIYPRADRPVRDLLRKRSQMVRQRTSNLLSIQNLVTRNTGSSINAKRVKGLDGQQVDELLADSDLGLAVKANLSVMLSADEQTEILERTIMERVKLRPQFSFLKTVPGIGEILALTIMLETGDIRRFPSVGNYASYCRCVGSQKISNGKKKGKGNTKNGNRYLAWAFVEAAHFAIQFNSKIKSFDQRKKAKTKAVVAIKAVAHKLCRACYYIMRDRVAFDMSKAFGPK

SEQ ID NO: 56617 - protein, 364 aa, unidentified
MLRVAHFVDAVVGGDTHVDTTSLCVVSPVGAVLAEITIDNDEDGYAQAVTWVLQSVPSERFLVGLEGTRSYGAGLCRALQAVGIRVVEVERPSRGERGRRGKSDTGDAVLAANKVLAMPPDRVPAPRAGDGVREALRLLTVDREQMTTQRTRLVNQLYADLLTGNAEQHALRKKDLTSGTLRKLAGARGRSGRPIDEQARLVVLRRKAQDIVRLDQQIRENERQLNTNLDEVAPQLLEQVGVGPVVAAQLIVSYSHHGRCRSEAAFAALAGVSPIEASSGRITRHRLNRGGDRRLNRALHVVAVTRVKHDPRTRAYIQRRSKDLTDREIRRMLKRYITRDLYGVLRTIDALHPKRTTSTVTPAA

SEQ ID NO: 56618 - protein, 355 aa, unidentified
MISTKYIGMDVHKESISIAVMNVAGKVVMECVIETKASMILQFIDGLRGDLQVTFEEGTSAAWLYDLLKPHVTKLVVCDPRKNKSMREGNQNDKIDARRLAELLRLDHLTPVNHGEHGLRTLKELVRSYLTVTKDLGRVMTRVKAIYRSWAIPCTGKQVYALGHRAEWLDKIHEPGVHRRAEFYYQQLDALRVLRQEVRRDLLAESKKQKAWKRLCEIPSLGPIRAAVLLGILQTPHRFRTKRQLWTYGGLAIEMHSSADHSRVNGQLQRSRKNVLVRGLNRNCNHDLKNLLKGAAVIASSKPGPFQEFYAALLATGMRAEMARLTLARKIATIVLIVWKRGMCFDAQHLKPQTA

SEQ ID NO: 56619 - protein, 346 aa, unidentified
MKVKTIGIDLAKETFGLHGVDGRGRVVVHKRVTRKHLVGFLVKLEPCLVGMEACGSAHYWAREIEKLGHTVRLMSPQFVVPYRKGNKNDPNDAEAICEAVTRPSMRFVPIKCEEQQDLQALHRVREQLIKNRTALANQIRGLLRERGIVVAQAIARLRRALPLILEDVSNGLSGVMRELLGEMAERLRMLDDCLRPYDQRIERLCQQDERCRRLVKVEGVGPLVATALVAAIGNARQFKSGRELSAWLGLVPRQHSSGQRTVLLGISKRGDRYLRTLLIHGARAAARVAERKRDARSIWLSRLKLRGGPNVAAVALANKNARVMWALLARGDSYRVQTTMHSGAAA

SEQ ID NO: 56620 - protein, 404 aa, unidentified
MERIVDRGCGLDVHRDTVAACVRVPGAQDVRTFGTTAAELLALRDWLEAHGVTHVAMESTGVYWKPVFYVLEEAVTCLLVNAAHVKQVPGRKTDVRDCVWLAQLLEHGLLRGSFVPPAPMRELRDLTRYRKVLIQERSREANRLHKVLQDADVKLASVARDILGVSGRAMLEALVQGTTDPAVLADLARGKLRRKRAALRDALAGRFRAHHAFLVSQLLAHLDYLDEAIETLSAQVETVIAPFGGALQQLDTIPGVATRTAEVLVAELGVDMRRFPTERHLASWAGLCPGNHESAGKHRTGTTRKGNPWLRTALIEAALGAIRTRDSAFGARYRRLMRHRGHRKAVIAVAHALLRTAYQLLAHGTTYHDPGPDYYDRRHTHRVTRRAIRQLEAQGYRVTLEPAA

SEQ ID NO: 56621 - protein, 339 aa, unidentified
MRYVGLDSHWRQSTICVLDHRGKKLLSRTIKGPWSKVLEEVGKIRKPFAVCFEASTGYGYLFEHLQAIARRVVVAHPGQLRLIFRSKRKNDRVDAEKLAKLLFLDEVPPVYVPSSEVRSWRGFIEHRHKLVRERTRTKNSIRALLRGQGIQSPRGLWYGPGMKWLRSVSFANELDTVRRDMLYERLCFLTKMLERVETTLNRTASRNPGVQLLQTIPGVGPRTSEAVMAWVDDPNRFQRIKSAGRYFGLVPCQDASARTDHRGHITREGPAIIRWLLTEAAWQGVRRSPPIRTFYERVRRGDPERRKIALVATAHYLLRAMMAMLRTGEVWRSSEEAAA

SEQ ID NO: 56622 - protein, 454 aa, unidentified
MARTKREPQEILDEDHEQVLQRVCAIDVAKGFGQVCVRVPRADGRRASKVSAVDATTGEVLKLGETLLQQGVEMVTLESTSDYWRIFYYLLEACGLRVQLVNARDVKNVPGRPKSDTHDCVWLAKLTERGMLRPSFVPPAAQRVLRDYTRTRVDLTRDRTRHWQRLEKLLEDALIKVTTVASKISTVSVRDMIDALIRGERNPERLADLARGSMRDKRRDLVRALDGRFDTHHGELATILLGQIDSLTTEINRLTTRIDQLIGDLPAAEPPEHHTGQKLSEHPDTELAPTPPAALDRLAGIPGISLEAAQVILAEIGPDMSRFPTAQHLVSWARLSPQLKQSGTKRYGGKTSKGNPYLKGVLGNAAASASRTSTFLGERYRRIVKRRGKGKALVAVARSILVIVWHLLADPNAVYHDLGADYYTTRIDKERRQRHLIQQLEALGLQVTLTPAAA

SEQ ID NO: 56623 - protein, 482 aa, unidentified
MAKRKMSTFERLRSGKMNRKERKEWQQRLCAEDAGLEVVHPDAAGIDVGNASHFVAVPPDRDEPPVREFGSWTADLRRMAEWLKRCRIRTVAMQSTGVYWVALQEILEREGFVVYLVNARATKNLPGRKSDVQECQWLMKLHTYGLLRNSFHPPEQIRAVRTIWRQRDRLVKEAGREVQQMQKALTTMNVQLANAISDVSGVTGQAIIRAILRGQRDPQQLAKLRDYRVAASEAEIAHSLEGNWREDVLFELQQVVDAYDFHQKQIAACDVQLQRYLSAVPMRSRLGAGEPSTADAPSEKPKKQRKHKWQKNQPVFDLAVELQRTMGVDMTAIDGVDVMTTQVILSELGPDLSMSFPSESHFTSWLELAPRRDVSGGKVIRQKSRKSNNRVATALRMAAQSLWRSDSYLGARYRHLKARLGGQKAVKAMARYLACLIYRLLTKGKAYVDRGAAHFQSKRTERELLGLRRKAAELGMQLVAIS

SEQ ID NO: 56624 - protein, 337 aa, unidentified
MKNIKVLGIDLAKNVFQLHGTDAKGKCVLQKRLSREKVTEFLAMLSPCLIGIEASTGAHYWARLFENMGHKVKMMAPQFVKPYVKSNKNDRNDACGIAEAVTRPDMRFVPIKKIEQQDVLLSHRARELAVKQRTAQANQIRGLLAEYGVILPKGIRYLKKITETLETNQDKLTAKSRVIFTRLYEQFKIYDEQVKTYDKEIEMTAIQDAQCREIMKIEGIGALTASATVATIGDAKLFKNGREVSAWLGLVPKQHSSGNTIRLSGMSKRGDRYVRTLLIHGARSVVKNCEKKTDKRSVWVATKKRRSNYNIAAVALANKNARIIWAMLATGECYRGA

SEQ ID NO: 56625 - protein, 358 aa, unidentified
MSIVAHLYNFFIGVDTHARNHVYTIITNTGLLVATRSFPTSRAGIKRALNWAGRRTGGDLDTLWVVEGTASYGAVLTGHIAAAGYSVVEAGRMDAKARFGVGKSDELDSYRIAASVLALRTDQLRWPRQGAGVRQALRVLLAARDAMTTERTRMINSLTALVRTIDLGIDARQSLTDDQVTEIAKWRARNEDIDVSTARDEAIRLAKRVLALNDDLQDNHDRLAELVEASPAAVLLAEPGIGPFSAAVCFTAWSHPGRVRNEAAFAALAGVNPIPASSGNTHRHRLNRGGDRQLNRALHTVITNRMIHDERTRDYVAQRFGEDPTKKSKRELKRKLKWYLARRVFRILNGLETSPAPA

SEQ ID NO: 56626 - protein, 312 aa, unidentified
MAIARMTKVSRSAQVTDVPSDTQGLKAYLCNLRGRKILTIEETNTSHWLYIELLDYVDKIVICDPYRNRLLSEGPKNDKIDAEKLCRLLRAGLLKEVYHSLDKTYDLRKLVSSYEDLIKAGVRLQNQKSAIYRSEGKEKEEDLNNNMLKFILKNINEGIEDYGRRKKEFEKFIAGESQKDNLIKNQISLPGIGTKGAIKIAATVIDAGRFKCAGKYLSYSGLVRHKKISGNRSYGQKRPRYSRKLKSVYRTAAMAAVGGNNPINEYYEYLLRKGLSEDKARNQIARYIARISYGMLKNGEKYDPYRWRKHRA

SEQ ID NO: 56627 - protein, 421 aa, unidentified
MQVLYERCAAVDVGKDDIAVAVRLPGDGPDGRATSKRTFKTFYGVLREAARWLTSLGVTHVAMEATGIYSMPVYHALTGHGNFAQVLVCNAGHVRNVPGRKTDFADAEWLVHLLECGLLRGSFIPPADIKAARDVLRYRTKVVQSRTSELQRPGNVLQDAGIKIDSVASSIATKSGLAMIEALIDGERRPQVLADLAKGKMRSKIPDLALALEGRFGDHHALMCRLHLDHIGHLEEMIARLDAQAGAMMAPFHAQRALLTTIPGIGPLAAAAVISEIGADVSEYFPDAAHLASWTGICPGNHESAGKRHSGKRRHGNQHLQPVLVEAAWAAVRHEGYLKALYHRHVMKWGGYRSPTAKKKAIMVVAHAILVIIWHVLAAGEPYDELGADYFTRRLDPDRETRRLIAKLEALGHQVSLQPAA

SEQ ID NO: 56628 - protein, 338 aa, unidentified
MNIVFLGIDLAKNVFQLCGLNQAGKPVYTKRTGRKELLQTLANIPACLIGIEASSGAFYWQREFEKLGHKVKVISPQYVKPFVRGQKNDGNDAQAIAVALMQPTMQFVPPKSPEQQDIQALHRARQRIVNHRTATVCQIRGLLLDRGIPISSAVSRARRAIPLILEDAENGLSSRMRRTIAELYDLFNDLGRRIHFFDKEIETVFRQSEACQRIAKVKGIGPKTATAVVAAIGKGTEFKNGRHFAAWLGLVPRQHSSGDRQVLMNMTKKGDKHLRTLFIHGARAVVRVATNNNDGHMNQWVNQLKERRGFNKTTVAVANKNARIIWSMLRNETGYQVV

SEQ ID NO: 56629 - protein, 354 aa, unidentified
MKSTKNKFNGTAFVGIDVHKNSWKVCLISEGGFKKEFSCNPETQVLISSLLKLLPEFQFKCTYEAGFSGFWLCDQLNSHEAFECIVVNPADIPTSNKDKSQKEDRRDARKIATQLKADALRGIYVPCEEDLGLREIQRIRYTITSDLTRWKNRTKSFLFRHGITPPTDLFPCSRSHWTGKFIKWLKSIEFKEPSLRFSLDQLIVSVEILRDKKKEILSELQLKIEESKFKDSYLKLIEIPGIGTIGSATIMTEVIDIKRFSSYEKFHSFIGLIPSTNSSAETERVRGITNRANKRLRSILVEASWVAIRHDTDLFNLYHQLKQRMNTNKAIVRVAKKLATRIRYELLTLEMKTT

SEQ ID NO: 56630 - protein, 415 aa, unidentified
MTMEMEVIVERCAFLDVHRDTVMACARTPDGAGGRSEEVAEFGTTTSHLLKLADWLAERRVTLVGMEATGVYWKPVHWVLEGSVPEVWVINARHMRNLPGRKTDVADAIWGASLLEHGLVRPSFIPPEPFRALRDLTRYRKSVIEERARESQRLHKVLEDGGVKLSSVASSVLTKSGREMIDALIGGQRDPETLAEMAKGRMRSKIPQLRDAMAGRFNEHHALLCQAMLARIDQADATVEVLGARIEELLGPYEAAVTLLVTIPGVAHRSAQVILAEIGADMSRFPTAGHLASWAGMCPGNNESAGKHRSGRTRHGSKWLRKALVEAGQAAGRTKDTYLAAQYAQIRGRRGSQRAAVAVGHSILVIAWHLLSTGEPYHDLGGDYFDKHRNNAARQRRLVAQLEAMGHRVTLEPAA

SEQ ID NO: 56631 - protein, 317 aa, unidentified
MFIIGVDYHPSFQEIAFLNQETGECGERQLNHSEGEAEKFYRELRQRGVNVRVGMEATAYARWFERLLAELGFELWIGDPAVIKTKRVRKKKTDREDARLLLRLQLEKHFPIIWMPTPENRDLRQLLWHRHRLVQMRTRIMNQLQAVAMNEGKRWKRKLFSEQGRAQLEKLQLAPWASRRRKELLELLDRLNPTIAELTASVEQEAKRRPEVLRLMTHPGVGPITALAFVLIIGTWERFHCGKQIGSYVGLVPCEDSSAGRQRLGHISKQGNTLLRFLLVEAAQAAVRWDPDWRRRHLHLDEYATNRDLTRAGSSDY

SEQ ID NO: 56632 - protein, 387 aa, unidentified
MTQPGRPAPRSAALDYDSTIIGALEMSDKKWVLAVQLPGVKRHTRHVLEASGEELASLIERLKARCAPAGQPIARVILTHEAGRDGFWLARFLVRRGVEVHVMQPSSLPVDRRARRAKTDVIDVEMLLRTLMAWLRGEPRVCSMVPIPTETDEEARRAHREREDLTGERLSILNKIDSILATLGVKGYRALRRDRRKQLASLRQPDGDPVPQAARIRIERLLDRLELTLRQIKEVETARDAVLKKPAPADEAERMIRSLVDMRAIGPELATLLVREAFSRPIPNRRALGSYAGLAGTPFSSGGNEREQGIGKDGNRRVRAAMVELAWLWLRWQPDSTLSAWFRERVGKAGGRIKRIMIVALARKLLVALWRYAKDGVIPEGAKMKIA

SEQ ID NO: 56633 - protein, 352 aa, unidentified
MNSYIGLDGHSKSCTFVVLDEKGSVKRRAVVETNGQALIEFINQIPGRRYLCLEEGDQSQWLYELLSPFVHDMAIVHGRKRQGNKDDGRDAYNLAHRFRIGDLGPRIFKTPTSLTTLKAHVRSYETLTRDLVRVKNRIKHLHRSHGIGYVKQGCPLCTHAGGNGSGCTKPGFHQSLMLWREQQEKLESLKSEAQKAMLAEASRNPIMRVLKTTPGFGPVRSAELLAIVITPYRFRTSRQFWCYCGLAVVQRSSADWVMQPNGQWRRAPVYQTRGLNQNYNRQAKAIFKGAAMTVIISKSQESLRTDYERLLAHGTKPNLARLTIARKIAAIVLSMWKHQQRYEPRRYQVDTH

SEQ ID NO: 56634 - protein, 461 aa, unidentified
MVRQEKKTTPEPLRVHNPHAAGIDVHAEVHWVAVPPGAAPPPPKDHSPNLPPWVRAFGTCTADLEMLADWLRQCGVTTVAMEATGVYWIALFELLERRGFEVYLVDPRQSKRAPGRPKTDVLDCQWLQRLHSYGLLTASFRPADQVVVLRSYLRQRQMLITYGGQHIQHMQKALEQMNVKLAEVVSDITGVTGMAIIKAILRGQRDPLQLAKLRDARCKRTEAEIARALYGNWRAEHLFALEQAVALYGYYQQKLRDCDGQLQKHLATFADKSGGEILSPKPQRRRRPNNQARFDVRQRLFNMAGVDLTIIEGIDESTALVILSEIGTDMSKFPTCKQFTSWLGLCPQHQGSAGKIKSRRIRRGQNRAARAFRLAGQGCHHAKNALGAFYRRIQARCGGPKAVVATARKIAERVYRLLKYGEAYVRQEMDAYEQTYKIRLTHGLARKAKELGYQLVPVAST

SEQ ID NO: 56635 - protein, 420 aa, unidentified
MKAYNVDDFAVLIGIDWADKKHDICEHPLYSKSYHYSIIKSKPEALHDWAMDLKKRYPNQKIAVVCELKKGPLIYALTKYEHLTLFTVNPSTVAKYRKAFTPSGAKDDPSDAFVEVEILTLHMDKLSVIEPESASTRSLAQLVQYRRSLVQDNVDLSNKITAALKNYYPQALEWFKEKDTFIFCDFITKWPSLAHAKRAKKQTLLDFFNSHNSHYVHVNEARISSIKSAMPLTGDIGVIEPNQMLVEVLIKQFKVLLKGIETLDKAIKLAYKAQPDKVIFDSLPGAGPQLSPRLLVAFGSNRNRYDDAAELQKYAGIAPVIERSGKKMWTHWRYSCPTFLRQTFVEWAGFSIRYSFWAKAYYEQQKSKGKPHNSIIRSLAFKWIRILFRCWKTSTPYDESKYLEALKRRGSPLLKFAINS

SEQ ID NO: 56636 - protein, 423 aa, unidentified
MDKNDDSRLAEFRQLKREIRGSTQHLVVGIDIAKERHYAFFGTPAGRTLLHRLVFDNNKEGFEKLCFQADILKAQHCLTKVVFGMEPTGDYHKPLGEYLIHKGCLVVLVAGNAVKNNRELLDNRWDRNDTKDAANVADLLTQGKCLFYEFPSPPLQELRSLLSLQRRLRKQEQGYRVRTRNHLIARYFPELDPYFGYSEGPAIVKWCLDPREITELPFEEFVRMVSSSNGGEKQRRRLQEIRQKAASSIGCEAHPSVAFEGRVLVEEVRHLQDLLRETAASIRAVCHHFPEYFFLLTIPGFGPDISAKVLEAIGNPHRFENHRQVLKLAGLDLSAERTGKKQDVTPVLSKRGKADLRYGLYQAAFIASTRNKQFMTYFTNKLKGREREKGIGTKMRVKLAAKMLVIAWTIMKKKEKFDPGCIA

SEQ ID NO: 56637 - protein, 347 aa, unidentified
MKHCVGLDVSVKETSVCIVDENGKLCRERKVASHPEDLIAILSDPAFSLERVGVEAGPLSQWLFEGLAKAGLPVFCIETRHTKAFLDALQQNKSDRNDARGIAHMMRVGLLKDVHVQTLTSQKRRALLTARSLLQEKAIDLENEMRGLLRNFGLKVGQASGGTFERRILELVEHDADLREIMEPLLAGRRKLRKGLARLEKRVLAEAKQDMVCRRLMTVPGVGPIVSLAYVSTIDIPSKFRHSRSVGAILGLTPVRKQSGEVSRVGHVSLRGAMMRRLLYEAAQSMMTRVVKWCWLKAWAMNIAKRHGSKKAKVALARRLAVVMHRMWVDGSEFRWTRGDTVSTVAA

SEQ ID NO: 56638 - protein, 342 aa, unidentified
MEITTVGIDLAKSIFQVHAVDAAGHVAVRKALRRAQVVPFFAKLPRCLVGMEACGTAHHWARELTKLGHDVRLMPPAYVKPYVKRGKTDANDAAAICEAVTRPSMRFVPVKSTEQQAALALHRTRDLLVKQRTQLVNMIRGLLAEFGIEMARGLRHALELAARLATGDAAEVPPLAQRVVTGLADQIGAVQIQLTRLEKELLAWHRASDLSQRLATIPGVGIVSATALAASVSEPERFRSGRQFAASLGLTPLQNCSGGKERLGRISRMGDRYLRRLLVVGMTSLIRRAKATPTSVDPRLPALLQRKPVRVVTVAAANRTARVAWAIMTRGGTYRAPVAAAA

SEQ ID NO: 56639 - protein, 356 aa, unidentified
MSIVGGLDVHRNQITFDWVDYDTGEVGRGRIAPATRTVFRAWLERLPAGEAAFAVEACTGWRFVVEELVGAGFAAHLAEPADTASLRGRKKRAKTDRADARHLRELLDQGRLPESWVPPAHLLDLRELVRLPKTLVDQRIEWQQRIHAVLFHHGLPKPPHALTSQAGQAWLQHQDLPTPSRLLVVTGLGEIGAAQNRVAPIDRWLTAYARRQPGCQALGQLYGVGSTTAPTILAELGDARRFRNGDAVVRYCGLDVTVYSSDGKRSRGHLSRQGPEVLRWALFEAAKSASRATAPDHVYYDQVRGRLTANRATLSVARKLIRRTRHVLAGLSDDALAPVDPAGLPPLLPVLNAAAA

SEQ ID NO: 56640 - protein, 387 aa, unidentified
MNYVGIDIAKQTHYASIMNSDGEILVKPFPFPNDHAGFQKLLKHLSSFSKDDVLIGMESTAHYAENLTSFLFTRGFNICIINPIQTSSLRRSNIRKTKTDSVDTYLIIKALSLNHYRLFTERDYDSLQLKNLCRFRQKLMKARTKVKIQLVTYVDLLFPELQYFFKSGIHGKACYELLKTQPNPDRIAKMHLTRLTNLLSKSSHGHFKQSHAVQLKELASQSVGIKNDTLSLQILQSIQQIEMYTAQLAEVEASIHEIMDKLDSVIKTIPGIGNLNGAMIIGEIGDISRFEKPCQLLAYAGLDPSVYQSGNFNAARTRMSKRGSKLLRYALINAAWQTTLVNKTFRDYYNLKISQGRRHYNALGHVAHKLVRVIHKMMTDNVAFDLA

SEQ ID NO: 56641 - protein, 339 aa, unidentified
MDKITTIGLDLAKNVFHVMCCDARGKVVRKKMLRRGEVIRFFSDMKPCLVGMEACASAHYWARELQAMGYQVKLIPPQFVKPYMQGNKNDYNDALAIAEAVVRPKMRVVAPKTTAQQDVQALHRLRERRLQERTALCNQLRGLLAEYGCILPKGVNVMRHRIPELLEDGENGLSGLFRKLLAQGYQQLQELDEHIDCYTRELQAQCQQDEACGRLQTIPGYGPIIASAFRSVVGNGSAYRRGRDVSASLGLVPRQHSSGGKETLLGISKRGDRYLRSLLIHGARSVVLHARNKDDRMSRWINRIKAERGYNKAAVALANKLARIGWGVLHNQTTYHAAR

SEQ ID NO: 56642 - protein, 285 aa, unidentified
MQKISTMRTRGNSNRTCKGQLTIGLDLGDRSSSYCVLNAAGEITLEQKLPTTPDGMKQTFGKMPRCRLAMETGTHSPWVSRLLTALGHEVIVAHAQNVRLIVKSRRKDDRMDARTLARLARLDPELLSPVQHRSAQAQLHLIEIRARAGLVSARTALVNAARGLVKSYGERLGKCGTFQFSQETAIGLSSGLREAVQPLLLEVESLNERIKEYDRRIEKMAKERYPETGLLKQIKGVGDVIATTYVLTIEDPHRFRKSRDAGCFVGLQPGRRNSGESEPQLHISK

SEQ ID NO: 56643 - protein, 460 aa, unidentified
MSKLSKPNTSLEEARPFQGMSLVNQNAAGVDIGAHEIMVCVPGPDNTQLVRSFGNYTADLYAIAKWLGEHQIQTVAMESTGVYWIPLFEVLEIYGFHCLLISSRSLRRVPGRKSDVVDAQWIQTLHTYGLLKGSFRPEADLVALRTLLRHRTRLLEHRAPHILHMQKALLQMNLQLSQVLTDVTGETGLRIIRAIVQGERDPYKLAVMRNYRCKKDESEITKALTGTWRQEHLFVLAQSLDFYDFYTEKIAACDAQIEQSYSAVRPNWKCNEELAKIEAQVLEPKRFAKNAPKDGEKLRVHLKRICGVDLVGVHGISVSLAQTIITEIGADMSQFPNEKHFCSWLGLAPKNDISGGKVLISRTLKTRNRAGQAFRLAAVSVMRADCAFGVFYRRMKSRLGPAQATVATAHLIARVVYRMLKYQVEYEPLSVAEYEKRYHEQQIKYLEKRAAKFGFQLAPA

SEQ ID NO: 56644 - protein, 574 aa, unidentified
MRNVYVGIDLGLKGPHRASVYNPAEERYLDKSFSFGMSFEGFEYLLEEVHTRISSEDECSVSFVMEPTGMAWMPLSCFLVSRGYRVYRVTTQKSSDLRKFLDKHTKSDRADAQALAKLPVVAKEKVYELYLPSPELGTLSRKTRQLAKLIQQAASRKTRIENLFAMINLGALGAFGEQKFHPAGKVFFKYFSNPFAIIELGKEGFFRGFRELCSTQVADSVLEKIYQASVSTTKIYEPMVQTETLPFSFQETEKEICIELDLLDHEERKIAELEKEILTLYRSIDPEGYLMTPQGMGPTIAPAILGIIGDVSRFPNIDAFRAYFGFIPKKRQSSSREKKGMGIHKAAQGLLKKYLFLAAEVARQYDPEFAAFYDRLMKKGHHHYQAVCALANKMAGRLYALLNRMQRAEGSRYVSSTSTIQPSQLLQPQEVGYKLKDLDGRIIDKKEARRIVLERFPSKSQRRQNAAAKRTASTQKKREQGKSEESPTSLQPLSGQPRQLPKYFRDNSSKRSEKTLPAGVILKDTFPELLLQSQIDDDWGQLKKLQDKQEDRIRNLVSVNKLCTGGEKKSEKRS

SEQ ID NO: 56645 - protein, 422 aa, unidentified
MEQTRRCIGLDVHRDFAQVAVWQGGVVTQAGTFATTPEGVREFAAGLGAADEVALEATGNTWAIATLLASHAGRVVVSNPAKTRAIAEAKVKTDKVDAEILAQLLAADYLPSVWLPDAETNALRRQVLRRAHIVRQRTRLKNQVHAILARNLVPRCPAADLFGIKGRAWLDGQDLPADERAAATALLRQLDFHAHELALIDQDLAQVALDHKDVRRLMTIPGVDATVALSIVAAVGDFTRFRTPDRLVSYLGLNPRVRQSGGQPASHGRITKAGPSHARGMLVEAAWSASKAPGPLRAFYQRVRARRGMQVAAVATARKLAVLCWHLIIKGEDYAFALPSLIAHKQRKLELRAGASPARGRKGRSASYSLAAVRAAERDLAAQGEAAYRTMVAAWQPARPASAKRATGAAASKGTRLIKPTG

SEQ ID NO: 56646 - protein, 349 aa, unidentified
MDKESSSQQKLYLGFDVSEKSIEVFGVCGTQSTEKAIRIENSRSSIQSPLTHFKDKEQVCIVMETGTHSTWMSRYIREIGFEVIVAHARDLALIYGASKKNDRIDAEKLARLAQADRKLLHPIEHMSEERQQDLMIIKCRALLIKQRTQLINTIRGMLRTFGIKDHSTSVRNVKNFELSNLPSQVITALSPLLQQIRFTEMQIRYYDREITKLCKKYQVTEILRQIRGVGPAISLTFVLLVGDISRFPDPKRLAAYFGVVPKQDQSGETDKQTNITKAGNSLMRVLLIQGTQYILGPFGTECDLRDYGKRIEARGGVIAKKKARVAVARKLIILMHRLWSNPEKEYIPC

SEQ ID NO: 56647 - protein, 347 aa, unidentified
MNHVGMDLGKRESQLAILTEDGELINMRIRTERHRLVEMFGRRPKARILMEASTESEWVARCLEDLGHEVIVADPNYAPMYAQRTRRVKTDRRDAHALAHACRAGTYRPAHRTSTERWELRARLAVREAVVRTRAAWITRIQSLVRREGCRLRTGAPETFLTRVEEVALPPALTTVIAPLLELLDPINKQIEALDEELERIVAADEVPRHLTTVPGVGPVTATAFVATVDDVTRFRGAHQVEAYLGLIPCEWSSSEVQRRGHITKAGNGRMRWLLVQAAWCILRRRKRPETATLRDWAERIAGRRGRCIAAVALARRLAGILFAIWRDGTVYDATKVRGPLPARRAA

SEQ ID NO: 56648 - protein, 412 aa, unidentified
MDLVYARCAGLDVHKATVVGCVRVPRAPRGDRQAETRTFATTLRGLEELRTWLTAHGITHVAMESTGVYWRPVYAGLEGAVQVLLVNARHVQMVPGRKTDVRDCEWLAQLLECGLLRGSFVPPPAVRDLRDLTRLRKALIRERGHHVNRIEKTLELANIKLGTVVTDIMGKTGRAILEALSAGRDAPEPLVALAQGSIRTKKQAALREAVVGRLTPHYAFLLRQHLSLIEALDLHIVTLDARIEAAMAPFAEAAALVQTMPGVATRAAQAILAETGVDMGVFPTAGHFASWARLCPGTHESAGKRRPTTTGQGAVWLRATLQEAAWAAARTKRSYYRALYHRLKGRRGAKKAIVAVQHAMLVALWHMLKRRVPHHDLGADYFDRRNTARLRHHHVRRLQQLGYQVVLVEEAA

SEQ ID NO: 56649 - protein, 392 aa, unidentified
MYIVGIDIGKNHHEASIVSPEGKQIGRSLRFATTHKGADSLMSFIFKNIGNSPCVFGMEATGHYWYPIYSFLKAKGYTIYVINPIQSDSLRKMYIRQTKNDSIDSFLIAEVIRFGQFGTTSMADENILAMRQLCRYRDSVISSRTEIKLRIGTIMEQIFPEYEKQFSSLWMSTSMGILEKYLTPENIENTPIDELFEIIKDKSHNRLTKAKAISIKEAAADTFGIKIAQDAFSFQLKQLIDRMNFLDKQIEALDIEIMKYYEQFDCYLHTIPGIGIIGAATILAEIGDISRFKNSSALVAFAGIDPTVRQSGEFNSTHNHMSKRGSPYLRHAIFLAATTCSFHNSPLNAYYKKKRDQGKHHLTATGAVARKLTTVIYAVLRDSKPYEPKKFC

SEQ ID NO: 56650 - protein, 400 aa, unidentified
MISVGIDVSKGKSTVCILKPYGEIVSKPFNITHTQKDLSELSSMLFRLNDEVKIVMEATGIYHLPVLTYLQEKGFFVSVINPYLMKSYRNESLRKAKTDKIDSRIIANYGIDHWFKMKEFQTSGEIYEELKLLGQQYRHYMKLHLLSLAELTHLLDLTMPGIKNLLASWNETNRKDKRSDFVERFWHYDVITSMSEQEFTEEYILWAKEKKYVPSQEKAKVIYTLAQESIPTLPSETSSIKMLVTEAVRVLKEVDATLGLILSRMQEIAKTLPEYSIVREMGGVGNTLAPKLIAEIGDVRRFRNGKALVAFAGIDPPPYESGQFVGCNRKISKRGSASLRKVGYETMRSLKMRSRPEDPVYRYVVKKESEGKSKKSAKIAGLNKFLRIYYARVTELYKNI

SEQ ID NO: 56651 - protein, 346 aa, unidentified
MEHHVGIDVSLELSSLCVLDATGKVIREAKVASEPEALVAFLRDLGVTIVRVGLEAGPLSQWLYDGLHRAGFDAVLLETRHVKAALSAMAIKTDRRDARGIAQLLRMGWYRPVHRKSVSSQEVRALLAARKQMQIKAMDLEQTLRGLLRGFGLKVGDVSRGKLAARIRELVSGHAMLERISEPMLTAREALWSEFNKLHREVLAIVKEDQVCRRLMTVPGVGAVVSLTYRAGVDDPARFAKSKSVGAFFGLTPKRYQSGDTDVTGAITRVGDASVRTALHDAANALLSRATKFSTLKRWAMDVAKRRGMRRAKVALARKLATVLHRIWVDGTQFVWGKDPAAMAAT

SEQ ID NO: 56652 - protein, 354 aa, unidentified
MSGEKYIGLDVHQATISVAVMDSQGKLIMESILETKASTILEFLAGLRGTLSLTFEEGTWAAWLYDLLKPHVAKLVVCNPRKNALLKQGNKSDKIDARQLADRLRLNDLKSVYHGETGVRMLRELARSYLTVVKDLSRVMNRLKALYRSWAIPCAGRDVYYTRHRSQWLEKIPEAGTRRRAEQLYQQLDMLQHLRQQARRELLVESRKHTITAKLRQIPSLGPIRSALAVALIQTPHRFRSKRQLWTYSGLGLETRDSGEYHFVKGQVQRKKPVWIRGLNKDYNHDLKGLFKAAAMRASIQPGPFQEFYQRSLAKGIKPTMVRLTLARKIAAITLTVWKKGENFDVEKLKSQAA

SEQ ID NO: 56653 - protein, 408 aa, unidentified
MNNSVGIDVSKGKSMVAVMRPFGEVVAKPYEVRHTASALTALANELKSMDGETRVIMEHTGRYYEPVAQILHDAGIFVSAINPLLIKEYGNNSLRKVKTDKADAIKIARYGLENWGELRKHSAVDTARYQLKNLNRQYDLYNKHKSAFKNNLIAIVDQTYPGANTFFDSPPRSDGHQKWVDFVTTFWHVDCVRSMSLTSFTERYQKWCKRQGYQFKKDKAVEIHIVSKDLIALITKDSLSKILIQEATAQLNAISRTVELFRTEMNELAKQLPEYTKVMELYGTGESLGPQLMAEIGDVRRFAHKGALTAFAGVDPGANQSGTKESKSSKSSKRGSPQLRKTLFILMTILLQKAPYDDPVFRFLDRKRAEGKPYYVYMTAGANKFLRIYYGKIKEHLLTIQDETTSTA

SEQ ID NO: 56654 - protein, 372 aa, unidentified
MNYNTVYVGMDVHKESFSLCAYTIEAEKASHYQRTEADYKKVLNYLEFLRTIYGDDANFICGYEAGCFGYTLYHQLTANNVKCIILAPTTMLEQRSKKRIKTDRRDAEIIAKCLAQHNYSPVHIPTAKDEETKEFLRMRDDHKLALKKVKQQILAFCLRHNYRYDGKSHWTAAHLKWLKALTPEALYKEILDEYLLTYQTLSDKIERLDKRIEELATQDEYKEAVKKLCCFIGVKTHTALSVLVEVGDFKRFASAQHFASYLGLVPGEDSSGDDQNRLGITKAGNRHVRLLLTEASQCYARGQVGFKSKELKSRQSGNTPAVIAYADKANERLRSRYYKMVLNKYKKHNVAKTAIARELACFMWGMMTDNIA

SEQ ID NO: 56655 - protein, 362 aa, unidentified
MWDNPTAKNNPSEEAKMRSNTERVYCGIDLHGNNNVVAILDDEDSRLMRKRLPNDLGVVLATLDPYRKRLQGVAVESTYNWYWLVDGLMDAGYQVHLANTSAIKQYEGLKYTDDDSDALWLARMLRFKTLPQGYIYPREKRAVRDLLRKRNQLVRQRTDDVLSVENLLARNLGMRANAAGIRKMKDEEVDTLEGDPNRAMAIKSTLAVIRGIDVEIAKVEREVLKQVAPDPQFDLLSEVPGIGKILAMTIVLETGDIKRFPSVGNYASYCRRVKSTKLTNNKKKGENNRKNGNSHLAWAYGEAAMQAILNAPAIKTFYERKRAKTNVPSAMNAVGHKLARAFYHVMRTGKAFEMKRAFGRER

SEQ ID NO: 56656 - protein, 387 aa, unidentified
MPEQFDSHNARAAFDHDSTLVVALELSGKSWQVGAVVPGVARRPRRRLEPRDMAGLLKAIERWVAEASAAGRAVRRVALIYEAGRDGFWIARYLLAQGVEVQVVHPASIPVERPGRRAKTDRIDLDMLLRTFLAWLRGEPRVCSMVRIPNEAEEEMRRPGRERERLVSERLQLENRIENLLCLHGIAGFRPRLKKAAERLEALRSFAGTPLPAKTMAELRRLMARHALLSEQLQEIEAERDRVATVAQPDPAEQMIQHLALLVGLGLETATLLVREMFCRSFRDRRAVAGFAGLTGTPFRSGGIEREQGIGKNGNARVRRIVMQLAWRWLRFQPQSALARWFAARTGGAKGRIRTVMIVALARKLLVSLWRYVETGEVPAGARLAAA

SEQ ID NO: 56657 - protein, 363 aa, unidentified
MMTSPIAGIDPHQDTYTIGVVDTNGVELAHAVFGASAAGYLAGVEMLTAHGVELVGIEGSAGWGAHAAIAYVAAGFDCREVPPQRTAAQRRARRLDKTDHVDAIAAARALLAEPTLGPVQALEVYDPLVAKIEAVLEHRRMLVSTRTLVLHHVQDQITKLPIEIRDQLTASGKIEGRLRRLEDIDTSIVSTAAGEYRLSWLIPLVDQDRAARRQIRELERDIDQLLDEHGTTLRDEPGIGPIAAATLLTEVGDPFRFARESKFARWCGTGAVALSSGEGTGLPVKHRLDFGGNRRINSTLYIASVTQHRDLDEARTFIDRKVAEGKTRREARRAHKRHLANRVIRRMWKDESRRREPAHVIAA

SEQ ID NO: 56658 - protein, 311 aa, unidentified
MNNTIGIDISKDTLDAHRLADGQHKQFLNGKTGHAQLVKWIGKQSDPLIIFEATGAYHRQLERVLGTHIIPFVKVNPKQARRFAQACGKLAKTDRVDCEMLAKMGAALQLVPKPFTAENLYDLKELLSARRALIKDRTAAKARKATVINALIKQQLEKRLRQIKNDIAKIDALMLDVAREDQYMSERLDILFSIPGIGVITALMILVDMPEIGALNNKQVASLAGLAPMSQSSGKWMGKARIQGGRPNLRNAIFMPALVAIRHNADLKTKYDQLVTAGKEKKVAITAVMRKLLVLANALLRDNRKWAEKAA

SEQ ID NO: 56659 - protein, 341 aa, unidentified
MSDVRIVGLDIAKSVFQLHGVDDAGATVLQKRLTRARLLPFFEKLPPCLVGIEACATSHFWARELTKLGHEVKLMPAQYVKPYVKRQKNDMADAEAIAEAVTRPSMRFVGAKSPDEQSAMMLHKVRLMLTRQLVMITNATRAHMAEFGIVAPVGRGGVDRLLAIIDDETNEQIPAEARRCLQMLVAQLKLVKLQILDNDRQVLALARSTELGRRLMEVPGIGPLVASALVACVPGPSMFRCGRNMAAWIGLVPKQNSSGGKERLGSITKAGNRYLRQMLFAGAMAVIRRAMQGTRRTWLSQLLARRRPKVAAIALANKNARIAWAMMMSGEHYREPIAIAA

SEQ ID NO: 56660 - protein, 425 aa, unidentified
MKKTDYLSTLFVGIDIGSRTNVVSAIDFNQDFFIRMKPVPNAKEGAETLESLLVDVLSVHHEFNHVIIGLESTGFYGVHIANYLSASDLLAPFGTEVYCLNPKEVAKYKESFNSLDKNDGIDSFVIADFARVGRISIKPWRGAQYLALQRLTRHRLHIAECIAREKTYVLNNIFLKFSEFAMLKKEDHPFSNKYGATAEAILEQYVTNDDIIEASIEELVELIESKSRGRITDPEETARILKAAANGSYRLDKVVAEPITLSISSSFNCIRAFEKELKAIEKAIEHTVQGLNPVEYQVLKSIPGIGHVYAAGILAEIGTIKAFTDNGALAKYCGIVWKENQSGNFRAEDTKMSKAGNRYLRYYVIEATGSVINNCPEYKDFYDKKFAETTTHQHKRALALTSRKFLRMLFGLLDKSQLYSLERSR

SEQ ID NO: 56661 - protein, 430 aa, unidentified
MKSNTQNAKIEAITEKTLVLGIDVGSETHYARAFDYRGIEYSKKPFKFSNTEAGFVTFKEWILDIKERHEKDKVVLGMEPTGHYWFNLGKFLQDNEMKPVLVNPHHVKKSKELDDNNPTKNDRKDPKVIAGLVREGRYMIPYLPDGVYADLRTASNIRFQLQAELTRIQNRISRWFNIYFPEYKTVYGKPDAKSGILILKEAPLPEDILTLGIDGVNQIWRDAKLRAVGKARAKTLIEAAEHSVGSKEGAVSARMEIRMLLEDYESRNIRLQEVMGLIEGLVNQIPMAEKLLEIKGVGIKTVSGFLAEVGDIRRFNDPKELQKLAGLALVENSSGKHKGKTTISRRGRKRLRYLLFEVAMSLVAKNPEFRELHNYYTTRRLNPLKKMQSLMAIAAKLLRVFYAILTKGVGYDPKKMVNDIRRPAAYAQAA

SEQ ID NO: 56662 - protein, 334 aa, unidentified
MQNVTLIGIDLGKHSFHIHCQDKFGKTMLRKKFTRTKLMEFLAGCTSTTVVMEACAGAHFMARRIADLGHDAKLISPQFVRPFVKSNKNDFVDAEAICEAASRPSMRFVQPRTETQQAMRALHRVRESLIRDKVKTTNQMHAFLLEFGISLPKGEAVIKRLSLVLAEHDVPDYLSCLLMKLHAHYLYLVEQITALELELKQSIKADDATQRMMTIPGVGPITASLLSSQPGDGKQFSCSQDFAASMGLVPRQYSTGGKPTLLGISKRGNKNLRRLLVQCARTFMMRLEHQHGRLAEWVQAQLSKKHSNVVACALANKLARIAWAITTRQNEYQA

SEQ ID NO: 56663 - protein, 356 aa, unidentified
MLKYTHKVVYLGIDVHKKTYAVTAICEGQVVKKDTLKADGSFLLSYCKKYFPEAQIQTAYEAGFSGFHLHRYLEENGIKNMVIHAAGIEIASGNRIKTDKRDSLRLATQLSVGRLKGIFVPSKEREDARAVTRLRESFVRKRSSVGSQIKALLFQHGLIPYYSEQKTSSKWIQSLAAREFPSGLRLAIHQYVDLWLEFDERIDKIEQQMACQAQQEGELELLYRSVPGIGPIAARTLANELGDMTQFKNEGQIFSYAGLTPSEYSSGEHIRQGHISRQGKPILRRILVQAAWVAIRKDNDLAQIYDRISAKAGCKKAIVAIARRLIGRIRACIRTGNLYTLRREIILDKTAPAVTS

SEQ ID NO: 56664 - protein, 343 aa, unidentified
MQAVTTIGLDIAKSVFQVHGVDAEGKVLIRRKLKRRYVLSFFEKLRPCLVGIEACATAHHWSRQLKAFGHKVRLMPPVYVKPYVKRQKNDATDAEAICEAVTRANMRFVETKTPEQQSCLMLHRTRQLFIRQQTSVINAIRAHMAELGIVAPVGRKGVEQLLATAGDASDHRLPEVARACVVALGAQLRMLKAQILEFDRMIMVWHRTNESSRRLDAIPGIGPALATALVASVPDPKAFRSSRHFSAWIGLVPKQRSSGGKDRLGSISKQGDRYLRSLFTAGALAVIRYAKIHGTKHRPWLTALLARRPTKVAAIALANKLARMAWAMMARGECYREPAALAA

SEQ ID NO: 56665 - protein, 345 aa, unidentified
MVNLNVIAIDLAKNNYQVCKIGKERQVIYNKEVSRQKLLQLLVSEKQSLVAMESCGGTHYWARKAKEAGHIVKPMSARVVKAFRQGQKTDANDALAIGIAAQQPTVKPSRLLSVNEQCLQSISAMREHFVKQKVALGNLQRGCLLELGIPIAKSDSKLIDAVESLLEDTSFNVPMAFRASLKIVNEQFKRVVKEIIALEKLIEEEIKNDEVCERLSKLEGVGPVGSMMLKVYFSCIEHFKNGREASACAGLTPVQHSSGGKEKIGSISKKSANKKLRSTLYQGALAVVSNVIKRASRTEKDEWLKKLIARRGKKVAAIALANKTIRTAFAMLKKNECYQPKLLTA

SEQ ID NO: 56666 - protein, 408 aa, unidentified
MQVKHNRCAGLDVHKKEVVASFRLVAGSKASHEVRRFATTTPGLIALAEWLEGLRCTHVAMEATGVYWKPVWHMLEGRFELVLANAAHIKGVPGRKSDTNDAMWIADLLAHDLIRPSFVPPQPIQELRDLTRTRKQLTREVVQHTQRIQAVLEEANVKLTSVITDILGPSGRRILKAIVSGDFDPARLSRLGGSRLSATKAELCDSLHGCLREHHRFLIDQHLKTIEQLEATIAAFDARIEAALAPFRDAIERLTDVPGLSETSIAVLLAEVGADVSQFPTAGHLLSWAGLVPRLDESAGKRRSTRVRKGAPWLKTVLIQCAWAAARTKDSYVHAQFLRLKARSGPKKAAVAVAGSILTVAYHMLKDGTYYQDLGADHFIRRDPARVVATLANRIRSLGYEVDLRAAA

SEQ ID NO: 56667 - protein, 339 aa, unidentified
MITIGIDPHKGSHTATAVDEHEAVVGELRVNADRHQRGRLLEWAVDFEPRRWAVEGATGMGALLAQQLLGAGEHVVDVPPKLSARVRLMDTGRIDKSDPNDARSAAVVALRNATLNTVSAESEDRVILRLLADRYHQLTAQRTRSVCRLHAVLCVLIEGGTGRSLNPMRATKLLAGVTINDPITVERVATCHQFVVEIGLLDQALANIRARTVTAVEASKTSVTDVYGIGPIGAAIIVGHSGDIRRFPTGGHYARYNGTAPLEASSGPKTRHRLNPRGNRQLNHAIHTAALTQIAHDHPGRAYYERKQAEGKTKKEAMRALKRRISDVVYRQLIADTRD

SEQ ID NO: 56668 - protein, 326 aa, unidentified
MTDSTSQPVVPLFVGIDVAKDKLDLARSDTGEVLTLVNNPKDILRIVQMFQTTRPTCIVVEATGGLERPLLDALLDAGLPVALVNPGRVRHFAIGLGILAKTDPIDSSVLMEFGRLAEPRLSQKRSANQAELDALVTCRRQLTHVRTEQTNRRQTTSSKSARKAIDAVLKAIEKQIKDLDQQIRKLIESDDDFNSIDKLLRSVPGVGAVLSSTILADLSELGSTDRQSVSALVGVAPFNRDSGHMKGTRSIRGGRAAVRSVLYMATIAAIRFNPVIRCFAQRLQKAGKRSKVTITACMRKLLTLLNAMIRDKLTWEQLDVVKNLDI

SEQ ID NO: 56669 - protein, 484 aa, unidentified
MKKQPTAPDRTAPRSSRSRKPKPPSWKIVHPHAAGIDVGATAHYVAVPPDRVPAGQPAVRRFGEFTTDLDALVEWLRSCLVETVAMESTGVYWIPLFQKLEAAGLTVVLVNARAAKHVPGRKTDVQDCQWLQQLHSYGLLAASFRPNDAICRLRTLVRHRANLVAHAAEQVMHMQAALTQMNLHLHHAVSHLTGETGLRILRAMLAGERDPEKLIQLRDAHITKSTPEQMKAALTGDWRPEQLFVLQQALRAWEFTHEQMDACDRQIEHQLKSLPTVSAPTPPPKPRAPDPLEAENPRPKGQQSRKRNDPLMDLTPELARVCGIDLTRAGGLRELSALVIVSEIGVDMSPWRSAKAFASWLGLCPNNKVSGERVLSTRTRPVINRVATALRMAATGVAESNTWLGSFHRRMRGRLGPAAAITATAHKIANVIYHLLKNKEPYVERDLVKYEQKVYRNKLNRLRKQAATMGYELVPTAEEKALAS

SEQ ID NO: 56670 - protein, 390 aa, unidentified
MLNQEKGNSNGERTAIGIDPCKEFLQLAILSHQNKKTEFKKLPLLPSITAEIAKSTDPKTTQIAIESYGSYGKLYVFELLKKGYDIREINPEISKKLTNLFKEEHSDRGDAESFAKALHLMPNLPKISFTEEKLWLAKLTRSRKKMVKDLNSYLNRFHIALTESYGAVYKGLFRTLSSKKALKFFEAFPTINDTSSHRRKIAQLIGNEKWESLKQAGRWEDGFYLETLRIEIRGLIKIIRAIIETKKMIEARLKKIGEGDEEIQILRTFPGIDYITASILLGEIGDIKRFESESCLSAYCGVSPILWQSGTSKIKFKRRKRYSRRLKGILYFISLSQMRINPESRNYYWRKRKEGKTHWQAMNALSRQLIKIIYYMLKNKEAYYRKQLIH

SEQ ID NO: 56671 - protein, 381 aa, unidentified
MGQVATLYMKGRPNGSNLELFYDLKYRPKESPMRTYYVAMDVHSASIVIAVLNGAGKVVMESVVETGAERVRGFLKQLRGKVYVTFEEGTQANWLHDVVRPLVTEVVVCDPRHNKLLQNGNKNDRVDAKKLAELLRLGSLKAVYHGDNGVRTLKELVRTYDCLVSDTTRVMNRLKAIFRGRAIACGGHEIYRQERRGQWLGKLSEPGAKQRAGFLYDQLAALKPLRHKAKLAMVKEVRRQAAYPWLISVPKLGSVSVAQLIAVVGTPHRFRSKHQFWTYVGLAVVTSSSADHEVVNGVLRRSTKPIATRGLNRNHNHLLKRVFKNAATSACQSGPFKAGYEVRVSRGMAPNLARLTIARQLAATTLVIWKRQEQFDPERKK

SEQ ID NO: 56672 - protein, 342 aa, unidentified
MELNAIGIDLGKTLFHLVGLDASGNVVVRKRCSRTQLLKYTANLRVQRIGMEACSGSHFLGRALREQGHDARLMPAQYVKPYVKTNKSDSIDAEAIAEAVQRPTMRLVPIKTEEQLDLQAVHRLRERWVMRRTAVVNQIRGLLLERGVTLPKGRSHVDEALPEILQDADLKLSGSFRLLLAELQLELEQLAEHIQQMDSAIQHTVKENEACQRLTTIPGVGPVIATALIAAIGNGSGFRKGRDLAAWVGMVPREYSTGGKQKLLGISKRGNNYLRTLFVQGARAVMRYRAKQAPGLNHWLTQLLARTHQNVVIVALANKLIRMAWAVLCKNEVYRAPAVASV

SEQ ID NO: 56673 - protein, 358 aa, unidentified
MERPLQKLDDLSRSPCPLDPASTLIAVIEMSLSSWLVAAIVPGVERQPLKKLAVDESALLKLLHRWREEAAKAGYRIKRIAVAFEAGRDGFWLARWLRARDIEAYVIHASSVAVSREHRRAKTDRLDTDLLKRSFLGWLRCERDHCKMVAIPTIEDEDAKRPHRERESLVGEQSRIVNRMKAALIRLGIRGFNPKLKKAAERLDSLRTPEGEPIPPNTLAELRRDMARRQLVSAQLRQIEHARLERLKQAPSAGAYAMVRLLARVIGVGVETADMLVQEVLSRSMRDRRAVARYAGLTGSPDESGRKRREKGLTRSGNARVRRGMIQLDGAFSCSKRTAPRRSGFETALRVPAALARL

SEQ ID NO: 56674 - protein, 411 aa, unidentified
MQVVHERCCGLDVHKKTVVACILITLANGEVQRHIRTFSTMTAGLLALSDWLESLAVTVIAMESTGIYWRPVFNLLEEGRSVILVNAQHMKAIPGRKTDIKDSEWLADLLRHGLLKASFIPPAPIRELRDLTRYRKNLVQERAREVNRVQKVLETANIKLSSVATDVLGKSGRDMLSALIEGATDAETLAELARGKLRKQLPQLQQALDGRVQAHHRLLLKHILAHIIFLEEILEQLQQEIEQHLCPFEETMSLLMSIPGIAALAAAAILAEIGDDMTRFPSAKHLASWAGVCPGNKQSGGKRLSGKTTQGNATLRAILAEVVWVISHMKDNYLSAQYHRLARRLGKKKVVVAVSHSLLVIIYHVLSTKQPYSDLGADYFEQRDSTRLTQRSVRQLEALGYTVTLVPKEVA

SEQ ID NO: 56675 - protein, 400 aa, unidentified
MLSIGIDVSKGKSTVCGMKPGGEIVYAPFEVQHTREGMSELVSLLRSSGEEVRAVLESTGSYHCPVVAALLENGIFISVVNSLRMKRFCSQSIRKVKTDRIDAMQIALYGLAYWQELQPARLPEDTYRELQLLARQYYQMTSMLIKAKVDFNALCDQVLPGMQELMNDHAGRHKLSDFVLRYHHTTHILEMGETRFRKDYCKWAEKKGYRNCERMAALIFATAQNGIPVLPNAPSTQIVITEAIRVLHTVEASRDAILTQMQALAKTLPEYSLVREMPCIGDTLAPRLIAEIGDVRRFHSKRALIAYAGIDTPPYQSGKFCANNRHISKRGNRYLRKTGYEVMQSYVMHKPANDPIFTFIEKKRGEGKSGKLAMVAGLNKFLRVYYGKVTELYRSLPAIE

SEQ ID NO: 56676 - protein, 346 aa, unidentified
MMLIGCDFHPSWQQVSWLDEGTGETAEQKLVHASGEAEKFYKRLPAPARIGMEATGNCQWFVEMVTAAGHEVWIGDAAKIRASDVRQQKHDKRDAALLLKLLMEGRFPRIWTPSSQQRDLRQLLIHRNKLVRLRAQAKNGLQHLAMNQGVQKKRRLWSKAGQELLRELPLQPWASRRREDLLKVMALFDAQILSLDMAVKEAADNDPNARLLMTQPGVGPVTSLAFVLTMGDVKRFQRGKQVASYLGLIPREYSSGGHQRLGSISKQGNRFMRMLLVEAAQVAVRCDPKLRSEYLHRCHSKPKGVAKVAAARKLAIRLYWMLRTQKRYPEIVSIESSSRVALAGAS

SEQ ID NO: 56677 - protein, 355 aa, unidentified
MDSKKYIGMDVHQATISVAVRDSAGKLVMESILETKANTILEFMRGLGGSLWVTFEEGTSAAWLYDLLKPHVAHVVVCDPRKNALLKAGNKNDRVDPRKLTDLLRAGLLSPVYHGECGVRTLQELARSYLTVTKDLTRVMNRLKALYRSWAIACAGEKVYAPRHRSAWLEKLLQAGVRRRAEQLYQQLDNLVQIRREARQELLRESRKHPASQFLSQIPRLGPVRVALLIALLQTPHRFRTKRQLWAYCGLALQTRSSGEYRFTGGQLQRSQRLPAIRGLNVNHNHDLKNLFKSAATQASGSSDPWADFYQNLLARGMKPAMARLTLARKMAAIVLRIWKKGERFDPEPLKRKSA

SEQ ID NO: 56678 - protein, 326 aa, unidentified
MTTNNTPLPSVEFSQVVSCGCGIDVHQNLIVATINHGNNQVEIKHFDAYTRSLTELREWCKSEGVTHIAMESTGIYWVPVLNILEEDFEIVLVNARHVKGVPGHKTDKKDSVWLSKLLISGLLKNSFIPPEPIRNLRDLVRYRDKVISQIASEKNRIIKCLESCNYKLSSVFSDVSGVSATKIITDLIDGKSEIDHLMEYIHGKVKADRSDIRKSLEGRMTAHHRFLLRTIQESIAQQELVVAKLSREIDRYAEPYAVEIGLLQTIPGVGRDSTIKLISEIGVDMSKFETDQHLSSWAGMSPGNNESAGKKKVPEPPTETNTSNPC

SEQ ID NO: 56679 - protein, 399 aa, unidentified
MTDIEQHGCDVFIGVDVGKGAHHAVALDRQGKRLLDSALPNDEAKLRALITGLKKHGQILLVVDQPATIGALPVAVARAEGIGVAYLPGLAMRRIADLHAGEAKTDARDAYVIAEAARSLPHTLRSLKLADSELAELTMLCGFDDDLAGQITQTSNRIRGLLTQIHPALERVIGAHLDHPAMLDLLEHYPSPVQLAAASEKQLANRLAKLAPRMGKRWATEIVQALSEQTVVVLGTQAASIVLPRLAQQLATLRRQRDEVAKEVERLVTAHPLHPVLTSMPGVGVRTAARLLIDVASRAFASAGHLAAYAGLAPVTRRSGSSIRGEHPSRRGNKQLKRAMFLSAFAALRDPISRAYYARKISQGKRHNQALIALARRRCDVLFAMLRDGTLYSPPQAEN

SEQ ID NO: 56680 - protein, 386 aa, unidentified
MTHSTNILPRSVDYDQTLVLAIELSNKSWVLAAQVPGLSQTKAKRTIDPNKNDLLAAIDGYRTRAAAAGRSVKRVIASYEAGWCGFWLARWLMAHGIEVHVVQPSSVPVDRRMRRGKSDGIDAELLLRTLLAWLRGEPRVCSMVPIPEEADEDARRCVRERSELVSERVGLVNRIGAILATLGADDYNPLLQSRRRRLTELRTGLGDPIPPNALAKIVRLLTRLELVLAQIVELELKRDAVARTDAPDQAGKMIQQLISLRGIGVQSATVLVREAFVRRFANGKALGSYAGLTSTPYSSGGIDREQGIGKAGNRRLRTVMVELAWLWQRYQPGTAQVVWFRERVGSTGRRVRKVMVVALARKLLIALWRFVIDGVMPEGAVTKPSI

SEQ ID NO: 56681 - protein, 410 aa, unidentified
MGSEMCIRDSARAFDYRGVEYSKKPFKFSNTEAGFVTFKAWVLDIKEKHGKDKVIPGMEPTGHYWFNLGKFLQDNEMKPVLVNPHHVKKSKELDDNHPTKNDRKDPKVIAGLVREGRYMIPYLPDGVYADLRTASNIRFQLQAELTRIQNRISRWFNIYFPEYKTVYGKPDAKSGILILKEAPLPEDILTLGIDGVNQIWRDAKLRAVGKARAKTLIEAAEHSVGSKEGAVSARMEIRMLLEDYESKNMRLQEVMVLIEELVKEIPMAEKLLEIKGVGIKTVSGFLAEVGDIRRFNDPKELQKLAGLALVENSSGKHKGKTTISRRGRKRLRYLLFEVAMSLVAKNPEFRELHNYYTTRRLNPLKKMQSLMAIAAKLLRVFYAILTKGVGYDPKKMVNDIRRPAAYAQAA

SEQ ID NO: 56682 - protein, 409 aa, unidentified
MEVLYPRCCGLDIHQKTVVACVLLTEADGTPHRCVRTFGTMTADLLALGDWLDFHAVRHVAMESTGVLWRPVFNVIEEGRTLILVNAQHLKTVPGRKTDVKDSEWLADLLRHGLLRPSFVPPPPIRVLRDLTRYRKSLVELRTQEINRVHKVLETANLKLGAVASNVVGVSGRRMLRAVEQGESDPAVLAELAKGRLREKLPALRLALAGRVQPHHRQLIGELLDHIAYLEQAMQRIERSIADLLAEQEAAVRVLLTLPATGPVTAAAIIAEIGTDMGRFPSARHLASWAGVCPGNKRSAGKQLSGASTKGNTQLKTILCEIAATIARSPGTYLHALYHRIARRRGKPRAMLAVAHSLLVSIYYMLRDQVPYQDLGPDYFDHLQARRLERHYVDRLEALGFQVRLTRAS

SEQ ID NO: 56683 - protein, 356 aa, unidentified
MSRMAGKARIVIGGVDTHADTHEAAVLDEHGRLLAVEGFPTTPSGYQQLLNWMRGFGAVREVGVESSGAYGAALTRHLVAAGVKVVEVNRPHAHTRNRRGKNDAIDAEAAARNVLAGECTAVPKDTTGIVEAIRQLLLARASAVHARAAALHQLGELVVTSPADVRASLTAKTLAGKASQATRWRPDSARLADPAQAARIALRSIGCRIHALSDEIKLLDAQLSTLVTRAAPKTLALLGVGIVHTAQMLITAGQNIERLRSENAFAHMCGADPIEASSGKTERHRLNPGGDRDANRTLYLIAVVRLRYCDRTRAYAIRRAGDGKSKKEIIRCLKRYIAREIYYTLRADLKNLVSAT

SEQ ID NO: 56684 - protein, 371 aa, unidentified
MNDTRFVGLDVHKQSISVAVADGGRSGSVEYLGEVDNDPGAIGKLCERLRRPGKALSFCYEAGPCGYGILRQIKGLGHRCDVVAPSLIPRKPGDRVKTDRRDATMLARLLRAGELTAVWAPDADHEAMRDLIRLRGVVRQVVTRARQNLQGFLLRHGRKHGRGTAWRMAYRRWLSTLAFEHPAQQIAFQDYVDAVTDGERRLKGVEEQILKLLPAWNLCPVVDALQAIRGIALVTAVVLVAEVGDFTRFANPRQLMAYFGLVPGERSSGETTRRGGITKTGNSHARRALVEGALAYRMKPRVGRHKVDRIEALPKAVRDIAWKAQVRLCARYRQLAARGKTANVVTVAIAREMVGFVWSIACMVQSTPKAA

SEQ ID NO: 56685 - protein, 411 aa, unidentified
MGRVVIGMDPHKSSATIEIINDREKILDSGRFSTDTAGYRAMLAAGRKHRDRVWAVEGCNGIGRHLAQRLVADGEPVVDVPAKLSARARVFSTGQGRKTDPVDAHSVALVGLRSQGLRTIQADDATVALRLLIDRREQLGVTRVQVINRIHRLLLELLPGGAKKHLSAAQAKALLGKVRPRDIAAKTRRRLAAELIVDLVALDAKIKAADKELHQLINTTGSTLRDLHGIGPANAARLLGDVGNIARFADKARFASWNGTAPLDASSGDQHRHRLSRAGNRRINRVLHIMAVVQLRTDTKGRRYYDRKVAAGKTSMEAMRCLKRRLSDIVYKQMRDDAQRVATGPGGHVGAATGSSAVNSNPDVDASEKSCPGPVTTNATRVKSSRPDRSSARSRRPTTAPARSRRQAQSA

SEQ ID NO: 56686 - protein, 376 aa, unidentified
MSKVRFVGLDVHAETIAVAVAEPGGEVRSLGTIPNRLESVRKLMSKLGPVKQLKACYEAGPTGYVLYWQLTQMGVPCEVIAPGLVPVKASDRVKTDRRDAEKLARCYRAGELTAVWVPDEAHEALRDLVRAREAAKKDQLKARHRLGKFLLRHGRRPEGIKAWTKQHLEWISTHVHFDQPALEATLEDYLNEVKHVAERIIKLEKAIDEAVQQAPPEIRAVIEALQALRGVAQTTAATIVSELGSLSRFESPRQLMGYSGLVAREHSSGNRIQRGSITKTGNAHLRRVLVEAAWAYQHRPNVTGYLLRRQKSLALSDEVKSIAWKAQHRLNKRYKSFAARGKNKNQIVTALGRELLGFIWAIAITAEQQHKLAAAA

SEQ ID NO: 56687 - protein, 316 aa, unidentified
MTNTPNFVGIDVSKAQLDVALRPSGERDTLVYDAAGIDTLVARLRHVAPTLIVLEATGGWERPLVRALVAAALPVIVANPRHVRDFAKATGQLAKTDRLDAGVLARFAEAVRPTLRPHPDAATDALAALLARRRQLLDMLTAEKNRLSTAPTRVQRRIRAHVTWLTAELARFNEELDEAIRQSPVWCEQEDLLQSTPGVGPVMSRTLLADLPELGTLNSKQIAALVGVAPLNRDSGTLRGKRQVWGGRAPVRAALYMATLVATKCNPVIRSFYLRLRGVGKAPKVALVACMRKLLTILNAMMKHRTPWRALVVQGA

SEQ ID NO: 56688 - protein, 337 aa, unidentified
MKYCGIDLHGNNHWVVIIDEQDRVLYSRRHANDLPRLLAVLAAHRSELCGIVVESTFNWYWLVDGLQEAGYRVLLANTAAIKQYDGLKHRGDESDARQLAHLLRLGLLPEGHIMPKAARAVRDLARKRMQLVQQRTAQILSIESSLSRHSGWTLSSNRIKCLRQADLDEMRLGEMPMLGLKANVAVMQALQTQIDGLEKVLADYCRTEPGYRLLRTVTGIGEVLATVILLETGGIERFADAGNYASYCRCVGSAHLSNGKKKGQGNTKNGNRYLAWAFVEAANFAVRSCEAARRFYQRKKAARNNAVAIKAVAHKLARACYHMLKTQQPFCVERCFA

SEQ ID NO: 56689 - protein, 359 aa, unidentified
MMVLGIDPHKKSHTVVALEAATGELVAELTVAADRRGHERLIAWARRLTPERRFAIEDCRHVSGHLERALIAAGERCVRVPPKLMAQTRRSARRRGKSDAIDAACVARAALREPGLPEARLAGPERALRLLVDHRSDLVGERTRIQNRLRWRLHDLGLGLEVPPKALGRACWLARLEEELAPLPGVQARIARELVARCRTLSAEISGLGREIAVLTEELAPELLALPGCGALSAASLVGETAGAERFASAARFAMHAGVAPLPVSSGQSNRHRLNRRGNRQLNAALHRIALTQLRMHEPAQAFVARKRAEGKSTREALRCLKRHLARIVWRELRNAEARRELLPVCGDPPARAALPLAS

SEQ ID NO: 56690 - protein, 410 aa, unidentified
MEVLYPVCCALDVHQASVTACLRAPGDGPQRRQQVRTFGTTTPELLRLAGWLTAAGCTHVAMESTGIYWRPVYNILEGSFELSVVNAQHVKMVPGRKTDVRDSEWLAQLLELGLLRRSFVPPAAQRELRDLVRYRKRLIEERAREANRVQKVLETANIKLASVVTTVLGVSARAMLKALIAGEGAPDQLADLAKRRLRRKRAALGEALTGRVTAHHRFLLDHLLRHIEFLDGAIAACDRHVETLTAPHAEALTQLDTIPGVARRTAEVIAAELGCDMTRFPTAGHAASWTGLCPGNHESAGKRLSGRTRHANRTLRQALVESARGAVRKRDSYLAAQYRRLVKRRGDKKAIVAVAHSILVIAYHVLRDGQPYRELGGDYFERLNADRLTRYHTKRLAALGYTVTLTKDAA

SEQ ID NO: 56691 - protein, 378 aa, unidentified
MKRILKIGMDVHTTNYTLCAMEPIIGEDDRVFATIKVTPDYKNILMFIENLKLKLGLNDEYDIQCGYEAGCLGYSLYNQLTAAGIKCVILAPTTMLTQQGVRIKTDMRDAYMIAQCLSYGGYHAVYIPTEDDDSVKEYLRMRNDHKLALKKIKQQISAFCIRHGFCYDGTKWTLSHLKWLKKLEITNGLYRETLDEYMASYEEQEAKIERYDKRIGEIAEQTRYHDKVKKLGCFLGIKTHTALSLIVETGDFERFAKGNQYASYLGLAPGENSSSDNIHRLGITKAGNSHLRQLLIEASGGICKGAVGHKSKELRARQNGNTAEVIAYADKANTRLRSRYYKFIRHSKKRNVAVAAIARELACFVWGMMTDNIEMKAA

SEQ ID NO: 56692 - protein, 400 aa, unidentified
MLSIGIDVSKGKSTVCGMKPGGEIVYAPFEVQHTREGMSELVSLLRSSGEEVRAVLESTGSYHCPVVAALLESGIFVSVVNSLRMKRFCSQSIRKVKTDRIDAMQIALYGLAYWQELQPTRLPEDTYRELQLLARQYYQMTSLLIKAKVDFNAICDQVLPGMQELMNDHAGRHKLSDFVLRYRHTTHILEMGETRFRKDYCKWAEKKGYRNCERMAALIFATAQNGIPVLPNAPSTQIVITEAIRVLHTVEASRDAILTQMQALAKTLPEYSLVREMPCIGDTLAPRLIAEIGDVRRFHSKRALIAYAGIDAPPYQSGKFCANNRHISKRGNRYLRKTGYEVMQSYVMHKPANDPIFTFIEKKRGEGKSGKLAMVAGLNKFLRVYYGKVTELYRSLPAIE

SEQ ID NO: 56693 - protein, 400 aa, unidentified
MISVGIDVSKGKSTVCILKPYGEIMCSPFEMLHGEKELNALDDLLNKLDGEIRIVMEATGIYHLPILTFFHEKGYFVSVINPFAMKKYAKDSSIRGAKTDKLDSIMIANYGIEKWFKLQRYKGDEEIYAELKLLGRRYRHYMELHVKALQELTHILDYVMPGIKKMFNSWNEANGKDKLSDFVEQFWHFDLITAMSLEKFTEEYLDWAKEKKYHRSRSKAEAVYELASNGISTLSSGTPSTKMLVQEAISVLRTVDSSLFLILTRMQELAKTLPEYSTVREMGGVGDVLAVKLIAEIGDIRRLHSAKALIAWAGIDPPPYESGQFIGSKRKITKRGSSTLRKVGYEVMRVLKSHPAPKDDAVYNYILKKESEGKSKKHAKIAELNKFLRIYYARVMAVYQ

SEQ ID NO: 56694 - protein, 341 aa, unidentified
MKILALDLGKFKSTACLYDGKDGGVKYRTIKTAPFVLWDLIGRWEPDRVVFEVGTAAGWVHDVVASVEGVEIEVANPNHEGWRWRHVKRKTDRLDALKLARLSAVGQLPQVYVPSASVRQRRQLVSRRTRSKNTIRSLVHAQGRRMPGGRAGWTQASVSKLWKMARDWSEAGEGLWRGMLGEELASLKAVCEQLARVEAKLDELGAADPATRLLRTIPGVGPRTAEAIAAAIDDPHRFANGKQVASYAGLTPRQFQSGQMERSGRISKQGQALLRKLLVEVGWLTLRYNPHLAAFYHRVRRGSPGRRKIAVVAVARKLLVTAWAMLRDGRAWSPPPVAEVA

SEQ ID NO: 56695 - protein, 405 aa, unidentified
MRVVGLDVSRTAAEIAYLENGEVKSGGRIDLVQGTLARWAATQLRTTDHVVLEATGNTTAVINAVRSHVARVVVANPFQVRLIAEARVKTDKIDAAVLAQLYASGFLPEVWIPDDATQTLRRQVARRAQIVRQRVRLKNEVHSVLHTYLIPRCPAADLFGRKGRAWLADQPLPLEERLGVEQRLRELDRLGDDLKTMDRLLGEAVVDNPAVQQLLTITGVNAIVAIGLWAAIGDITRFRSPEKLVSYFGLNPSVYQSGLQPARHGHISKRGRSHARAMLVEAAWAASKAPGPLRAFFHRIRAKRGLQVAAVATARKLAIIAWHVLAKDEPYAHHRPSLLAMKRRALELQAGQPARRGQKGPAAAYSVKQLRDRERATVEREERAYAKRVAHWQARPPSRRRNATA

SEQ ID NO: 56696 - protein, 412 aa, unidentified
MELLHRRCCGLDVHKETVVACLRLVSDGKVTTEVRTFQTTTADLLRLSEWLAANECTHVAMEATGVYWKPVWHILDDGQFKLVLANAAHVKNVPGRKTDVNDAMWLAELLAHGLIRASFVPDTQTQEMRNLLRTRKQLVREQSSHVLRVQKTLEDANIKLDSVLTDLMGKSGRAMIEALIAGETNPVKLAGLADRRVKASPEELREALRGRVTKHHRFLLRLHLNQIDALNAAMATVDAQVEANLGPFRTAVDLIMSIPGIKNLGAQAIASEIGIDMSRFPSDAHLISWAGICPRNDESAGKRRSNRLRKGAPWLKTTLVQCAWAAVKKKDSYLQAQFYRIKARRGPNKAIMAVAASILTAIYHMLKNGTMYQDLGRDHFNRRSKDQQKHSLLKRLADLGYTAEIKPVVATA

SEQ ID NO: 56697 - protein, 342 aa, unidentified
MVTTSTMWCGLDVAKATFVAAIDNHQEDFRILPSRKFQRTQEGIAEMAQWIASKVPEALQDGNSLGFVMESTGKFSCEMLPWIIEAFPGSSPAILNPRITKAFIDSHGLGNRTDAMEARCLARMGTERKSKPTQVLPDEYQQLRELVRTREALVCSRADAKTRLQTMTRGSVVYKAEERVIAVYTQEIDKLEKGMKKLVAKHEELKTNVGIMSSFPGIAFLSACIILSEIGPIREDKSRNELSAYTGLAPCRKESGTSVNKSRLSKHGSPLLRKVLYLCAIHSVKKVPTLTDKYERLVQRGKKPLTARCACMRSMVLILRRMVLNGAKYDPQYEMKIKTPAA

SEQ ID NO: 56698 - protein, 412 aa, unidentified
MADIAAYIGLDWGDERHSVHLQMADGTLEHVELEQKPDVLHAWVTQLKERFAGGQVAIAIEQRKGAVVNALMLYDFLVLYPINPKALARYREAFRTSRAKDDPADSQLLLDLVVRHRDHLRAWIPDTTEARKLQLLCEQRRKLVNHRVALTNRLTSLLKQYFPQALEWVGDLASLQGCDFLAQWPNLDAVQSARPSAVRKFYQAHNCRMASVIDARLAAIKIAQPLTIDPAIVEPLSLSVQTYATQVHGLIRAIQAFDVRIAHVFADHADHDVFASFPGAGDVCAPRLAAAFGTDRSRWDSAAELQSYSGIGPVTERSGKTLWVHHRLACPKFVKQTFHEFADQSIRFSRWARAYYDQQRRRGNDHHAALRALAYKWIRILFRCWKDRTPYNEGRYIHALCRRGSPLVKNFA

SEQ ID NO: 56699 - protein, 342 aa, unidentified
MDEYDGRQFVGIDLHRQRSVVVRQSESGEQLSAVRIVNDPVAWKLQLELAGSDPEVVLEATYGWYWAVDVLHACGARVHLAHPLGVKGFRYRRVKNDVRDAADLADLMRMGRLPEAWIAPPQTRELRELVRYRAKLVAIRSGLKAQIHAVLAKAGVLIAVSDLFGVTGRQRLAEVPLGPAYVQRIRSLLELIDILDSHEARFAAMIAERLSTHHGYQAIQQVPGIGPTLAAVFVAEIGDVQRFTDPAHLCSWAGLTPRHRESNTVVHRGHITKQGSKAVRWAAIEAVQRHPTTAKISADKQRIEARRGKNIAKVAAARKLLTLVYYGLRDGHIRALDRARAA

SEQ ID NO: 56700 - protein, 445 aa, unidentified
MAKRTQDEEVVFPNAAGIDVGGSSHWVAVPRLSTDDPVREFGAMTDDLNAMADWLLACGVDTVALESTGVYWIPVYEVLEQRGLKVWLVDARQMKYVPGRKSDVQDCQWLQKLMSLGFLRAAWRPNGEVCTLRAVARQRDVLLADQASWVLRMQKALVQMNIQLTEVLTDVMGLTGQAIIRAIVAGERDPKVLARHRNGRIKASEAEIVKALTGNWRDEHLFVLGQALAMYDDIGRHLVECDVKLQGLLTELGQSKVDLGKAPRQGSKLRQEFDIRQILANWAGVDLTRINGLGLAVVMKILTEIGPDLSHFETVKQFCSWLGLSPGTKISGGKVLSAKTKRSANRVRQALKMAAMSLWHSDSALGAFYRRLCSRMDKPRANTAVAHKLARMVYFMLTRGEAFVDKGQQHYEEQQRQRSVAALKRRAAALGFEISPSVVLVCKPT

SEQ ID NO: 56701 - protein, 344 aa, unidentified
MMRCKTVGIDLAKNSFYFITLNEHGKQVAKKKLSRNKVIPFFANHEQCTIAMEACGSSHYWGREFQKLGHEVQLLPAQHVKAYLRGQKNDYNDALAIAEASQHGSIRQVAVKSLGQQDEQSILQTRRLLSVEQTRLINHIRGLLSEYGIVIEKSVPAFKRELPLVLEDATNGLTDTFRMLLNRQHQRLLELCEELQWYHDYIKSVAKEDDTCQRLVTMPGIGPIVGMTLKAWMGDGQQFKRGRDASAALGLVPRQHSTGGKPLLLGISKRGDSYTRSQLINGARAVVARSKNKNDMLSSWINRLVEKRGFNRAVIAYANKMLRMAWVIVAKKQRYIPAEKLIAQ

SEQ ID NO: 56702 - protein, 391 aa, unidentified
MGWTPPGLFFGIIVPAGLTLRVSAQTNQEESDMNATTVAVDLAKNVFELAVADPQWKIVERHRLTRGQFERWFANRTVERVVMESCGSAHHWARWLTRLGIEVRLLPPRYVRPYVKRNKTDAADAAALLEAARCADIVPVRVKSIEQQALQSLHRIRSLWIGTRTARINALRGFCREFGLAIAPGSRVGVAQMAGVVADPGSTLPAMMRGTLTLLIEEIRLLEARIVQLEAQLTTTARQSPACATLLSVPGVGLLTATALAAATGGTVAHFKSARHFSAWLGLTPRESSSGTTRHLGRLSKRGDRYLRTLLIHGARSVLWAARAAQRTGRPLDRLRQWALALQARRHHNTAACALANKLARICYATLRDQEPFDRMRLNRKIARQTFVRPA

SEQ ID NO: 56703 - protein, 424 aa, unidentified
MLVPVDAGYSTGVEPIRMEAGINQTTKCEDKHMNTDKYVGLDVHKVATQVVIADEGRTGEVRHYGKISSDLHAMERLVAKLGGPGVTLHFAYEAGPTGFVLYRWFQRHGIDCIVVAPTKIPQAKGVRQKTNRRDAEQLARSLRAGELTAIHVPDEIDEAFRDLTRARSHASRDVKRAKQRLKSFLLRQGYHYSGNANWTEAHRRYLRELVMPSPVLKAVLEEYLLAITAAEERLQRMENLVTTEAPKWRLYPAVQALMCLRGFDLIAASLLVAEINDVRRFAHPRGLMAYLGLVPHEFSTGDDRRLGAITKAGNAQARWLLVEAVQHASLPPKVSEHLARRQEGQPEVYRKISWSMQNRLYKRHWHLTNRRLMPAKVKVALARELCGFVWDLLRQVPLPKIKTPVSRSATRRPTRTSKADVVSC

SEQ ID NO: 56704 - protein, 355 aa, unidentified
MTVTIVEEARPVTCRTAITGGVDTHADTHVAAALDPVGGLLGVGEFPATAAGYARLLGWLGGFGTVCLAGIEGTGSYGAGLARHITAAGIRVVEVDRSDRQDRRRQGKSDPLDAVSAARAAQSGRARGAPKGRDGAVEAIRTLMVARRSAAGERTRTINQARALVLTGPDDLRARFARHKPAALITGLAALRPRPGDVAGHAARIALRELGRRAQFLDGQLVRLDELIIPLVTARAPGPLAIYGAGPRTAALLLIAAGDHPERLRSEAARAHLCGAAPIPASSGKVTRHRLNPGGDRQANHALWRIVFTRLGSDPATRAYAERRTAEGKSKAEIIRCLKRYVAREVYRQLRPAAG

SEQ ID NO: 56705 - protein, 376 aa, unidentified
MREKLRFLGLDVHAETIAVAVAEPGGEVRSLGTIANREDSIRKFIKKLGPPEQLRACYEAGPTGFVLYWQLAQLGVECAVVAPSLVPKKPGDRVKTDRRDALKLARSHRSGDLTAVWVPDEDSEALRDLVRQREAAKQDQLRARHRLTKFLLRTGRRPPLGLKAWTEHYMRWLAQIRYAQPAQEVTLQDCLNEFEHMSARIKRLEEAILEVVKLAPQPMQEVIRGLQALRGVAHISAVTIAAELGNISSRFESARKLMGYCGVFPSEDSSGKRIRKGGITKAGNAHLRRIVVESAWCYRHLPRVGEKLRKRQQGIPAEIIEIAWKAQNRLHRRYVKLMARGKEQRKTMTAVARELLGFIWAIGIKAEAASKQQMAA

SEQ ID NO: 56706 - protein, 343 aa, unidentified
MDHFAGLDVSVKETSVCIVDDTGRIVREVKVASEPEALLPVLKNPAYRFKRVGLEAGPLSQWLFSTLAEAGLPVICVETRHMRAVLKAQINKTDRNDARGMAQMMRAGLYRPVHVKTLRSQKLRMLLTHRKLLQSKAIAIENDLRGTLRNFGLKVGMVGTVKFETRIKELVENLPDLAGLVEPLLVVRRVLREQLGILHRRLLAIVRDDDVCRRLMTVPGVGPVVALTYRATVDVPARFRKSKAVGAVFGLTPAQYQSGEINRPGGISRCGDEMMRVMLYEAAQIMLTRTNKWSWLKAWAMKIARHRGMKKAIVALARRLAVIMHRIWVDGTEFQWTREAAVA

SEQ ID NO: 56707 - protein, 316 aa, unidentified
MKNYIGIDISKATIDVYDGKKSYKFENNEIGFKQVVSLVEDIKNTILIFEPTGIYSYPLTNFCATNKIKVVMVGPKESRDFARSLKVRSKTDKIDAKVLYKYQSHVEAKMIKVPTVNHQSIKIQEMLNTYESIQSNKQRFKNQIESTSKEHKDLVRTLNRMIDNLELEAQKLFNKIELLLLKDEKIKAKYDAISTIPSIGQKSALYLAAFFLKYPLANAKELTALMGLDPVMKDSGMFRGKQRISKHGGQQLRNLLYLPTLCAIQHNDRIKAFYEGLTSRAKTKKLAVIASMRKLILMAFSIFKSEEEYQPLFAKI

SEQ ID NO: 56708 - protein, 368 aa, unidentified
MTVASMPHPPQSSQADACGEEVVLGVDTHKDTHVAAVLTTMGALVTSRCFPTTAAGYQQLLSWAQAVGTLRRAGVECTGSYGAGLTRHLRTEGVQVVEVNQPDKTTRRRRGKTDAVDAEAAARAVLCGRATATAKTGDGPVEMARMFKLAKDSAIKSRTQAINQLKAVLVSADPALRESLSGLSTAKLIRRCAQLDTGVPTDATSAAAWTLRLLAHRIVGLTAEVGDLQTRITNAVNTSTPRLLERNGVGPDSAATLLITAGDNPERLHSEASFAALCGSSPVEASSGKTQRRRLNRGGDRQANAALYRIALSRLRWDPRTRGYVDRRIAEGKTPREAIRCLKRYIAREIYQIIIQSRPTPTMVPSAA

SEQ ID NO: 56709 - protein, 314 aa, unidentified
MNSTIFVGMDISQDTVDVAVQPGTAFQIANDEQGITGAVERLQALQPTLIVFEATGGLEVPAASALAAVGLPVVVLNPRQVRDFARATGQLAKTDRLDAQILARFAEAIRPPVRPVPDEQTQALAALVARRRQLIEMLTAEKNRLRLAAQPIQKRVQAHVTWLEKELESTNADLTATMRKSPVWREQEEVLRSVSGVGLVLTTTLFANLPELGTLTRKEVAALVGVAPFPRDSGTLKGRQAIWGGRAQVRAALYMAALVATRRNSVIRTFYQRLCQAGKAKKLALTACMRKLLTISNAMVKSGTPWRITASQPA

SEQ ID NO: 56710 - protein, 344 aa, unidentified
MSEVITIGLDIAKHVFHVHGADERGRTMFSKRISRGKLLDFFAAQPSCKVALEACGGAHHWARQLTQLGHEVRLIPPAYVKPFAKRQKNDAIDAEAICEAAQRPSMRFVAVKSEERQAVGLLFRTRDLLVRQRTQLINAIRGHLTEYGWIAPKGPSHVAMLADLIDEEEMASSLPEAAHAMFRLMLDLLAGLNSKIADLDKEIARRAREDEVSRRLMTVPGIGPISATAIAALAPPAETFAKGRDFAAWLGLTPLQRSTGGKQKLGATSKMGERTLRRLLIIGSSAVVQQASKRGAPKGSWLEQMLARKPRMLVTVALANKMARIVWALLVKQENYRAPAPARA

SEQ ID NO: 56711 - protein, 350 aa, unidentified
MEYIAFDAHKRYTLASVARPDGQLVREERIEHERGALRQFLERCERGSPVAVETIGNWYWIVDEIEAAGCLPRLVHARKAKLMMGEINKTDKLDVRGLNRLQRTGTLPTVWIPPGELRDQRDLPRTRMVLVRQRTQLKNRLHATLAKYALHDLEVSDFFGERGRTLLRERFALLPTHTAYASRQLLAQVEALGRQVRAFEKRIQATFKPTPAIQRLLTLPGVGLTLGVVIALEVGDVARFASAEKLAGYAGTTPRVHASGGKTRFGPSRPDVNRYLKWAFVEAANAICLTRGRAPHRHVSRLYERIARRKGHAKAIGAVARHLAEATYWVLSKQEAYREPKGVGCFVHGG

SEQ ID NO: 56712 - protein, 334 aa, unidentified
MALKNRIIVGIDVSKDTLAASIFDGSTHEYVYLEYTKKAINKEFIKRFENLKTSVVFVMEATGIYHSKLAYWLHGAGFDVAIINPLIIKRYAQMKLSRVKTDKSDCAIIAEYGYKEELHLFKPKSKETIELGNLLKAVEDFLHQQSITRSQKHALMHQADYSKEIVAVYEKHIAYLTKEIKKLKKKIELLLKQYFTNEYKLLNTIKGVGLMSSAMIISVFDSFKNFDNAKQASSFAGIAPAPYESGTSVKKRGSISKQGNTLARKLLYMATLSGMQFNELLKAQYIRLLQNGKSKKQAIVAVAHKLLRIAFGVLKHNRPFSANYIEERKMLTIC

SEQ ID NO: 56713 - protein, 318 aa, unidentified
MNDKIEFDQVIEKGCGIDIHKSVLVSTVQGKGIKTETRSYDAFTESIEQLRDWLKSLGITHVAMESTGVYWKPVYNILENDFEIVLVNARHLKNIPGDKTDKKDSRRIAKLLLAGLLKGSFIPPKPIREMRDLTRYKRRLIEQIASEKNRIHKFLEDANIKLSSVVSNMSGATATKLIDAMIEGEGRVEELAKLRHGKMKASEQELMVALTGNLTEHHRFMLKMVKQSIKDKELLISELDEQIDNKLKENEMVLDAELLSTIPGVDKEAAAYILSEIGNDMERFPDEQHLASWAGLSPGNNESAGKKKAQRPRMAISG

SEQ ID NO: 56714 - protein, 409 aa, unidentified
MVWSEANKLDYLFGLAKNDRLIAEIRAELAATQAESDRGGKAARRFKSLMGWAPERHLCAKLGMQLQRRGPSMTQVTTIGLDLAKRVFQVHGVDAAGAVVLRRQLKRRQMVPFFTKLPSCLIGMEACGTAHHWGRTLRALGHQVRLIPPAYAKAYVRRNKTDPADAEAICEAVSRPSMRFVPIKSEADQAMAAVHRVRERLIAQRTQMINMLRGQMAEFGVVAAKGPQHVKGLVAELVEPESVPEPLRQVLLGLVRLLTALREQIAVLDQQILAWHRANPCSRRLSAIDGFGPILSSALALRAQEPQRFACGRDLSAWIGLTPKQNSSGGKIRLGAISKKGDVYLRRLLVNGAQAVLNSKRAKDDPWIARLLQTKPRLVAAVALANKMARVAWAVMVRGTDFRRAPAAA

SEQ ID NO: 56715 - protein, 369 aa, unidentified
MAEALKNSIAFVGIDIGKNSFHVVGLDGRGAIVLRQKWSRGQVEARFANMPPCLIGMEACVGAHHLSRGLQKLGHDARLMPARYVRPYSKGQKNDFRDAEAIAEAVQRPTMKFVATKTADQLDLQGLHRVRERLVSQRTGIINQIRALLVSQRTGIINQIRAFLLERGVAVRQGLRFLRNELPSILAAPSDALSPRMVRMIEDLTGDWRRLDERVEGLSKEIEAIARRDAGCERLISVPGIGPIISSAMVAAIGTGDVFSKGRDFAAWLGLVPKQISTGDRTILGKISKRGNRYLRVLFVQAAWVVLIKPKSWERHGLKSWIEAAKKRLHRNVLAIALANKLARIAWSVLAHGRSFEASKFSEAAAQSA

SEQ ID NO: 56716 - protein, 413 aa, unidentified
MSIDPNPTALRVTAGVDWAKDDHVVCVVGDQGEVLDRFTVPHDAAGLKRMAARLLRVGVEQVGIERGDGPVVDTLMQAGLVVFVIPPGQVKNLRSRYGSAGNKDDRFDSYVLADVVRTDVRRLRPMVYDSEQTTALRGSVRARRDLVAHRVAAANQLRAHLQIVFPAAVTIFADIDSAITLTFLGRFTTQEAADWLSPKRLAVWLGSVSYSGGVDPAVLHARLVAAPRGVTGEPAGIHAGTTTALVAVLRTLGAQIQILAASIGEQLDTHPDAAIFTSLPRSGSVRAARLLAEIGDARGRFPTRDSLTCLAGVAPSTRQSGKVKSVTFRWGADKQLRDALCDFAGDSRRANPWADDLYTKAIARGCDHPHAVRILARAWAHVIWRCWQDNLPYDPAAHGALQTLLNQDQPTAA

SEQ ID NO: 56717 - protein, 469 aa, unidentified
MTPRSGKHFRTSETFDDLAVQHRHAAGIDVHAAEHFVAVAEEDVPEGFVNLEAKLPAGVRKFGTNTGDLEALASWLKDCGVTTVAMESTGVYWIALYDLLASQGFEVLLVDPRQTKHAPGRPKSDVKDCQWIRRLHSYGLLTASFRPADEIVRWRGFVRQREMLIRYAAQHVQHMQKTLEEMNVKLTEVVSDIVGQTGMKILKDIVRGERDAMKLAKNRHPNCKMSEAEIASALCGTWRQEHLFVLKQALSLYEFYQKQLRECETQIEACLRSMKDKSNGAAVPESVRKRKRKGEKNEVRFGARELLFKMAGVDLTVIEGINETTALVILSELGTDLSAFAHAKNFVSWLGLCPQHRGSAGKIFKRRTRRGANRVARALRMAAQGCHHAKNALGAFYRRIQARAGGAKAIVATARKLAERVYRLLRYGQEYVRQSEQAYEAAYQDRLAKALAKKAASLGYKLVPETMTA

SEQ ID NO: 56718 - protein, 386 aa, unidentified
MQAPTVSTPITDHISTIFVAIELSQKTWLVTMHSPDRDKISRHKVQGGDHASLLALIDRVRDRAARRLGAVPAVVSCYEAGYDGFWLHRLLMAAGIANYVFDPSSIAVDQRARRVKTDRIDGETMLRTLMAYLRGEPRVVRIVRVPTPEQEDARRDTRERDRLTKEQTAHTNRIKALLRLHGFAVGQPRRRDWLSWLAGQRDWQGQGVPPRVLSEIENEHARLMLVRKQLDALARTPAAADPAPAVAEMARRSELLQRLKSLGPAFATTLTQEVFYKDFRNRREVASYFGLAPSPWQSGGTDRDQGISKAGNPRARCSAVELSWLWLRHQPGSELSQWFRQRTLNAGARIRRIAIVALARKLVVALWRYLTTGLVPAGAVLKPAEA

SEQ ID NO: 56719 - protein, 341 aa, unidentified
MRMFAGLDIGGKHTAICVIDESGKLVWRGIVDAHPEMIDGALQRFKGSLDKVGLESGPFTPHLFRSLEAMGYPMICMDARRAADAIKSRRIKSDKGDAWALAEMLRTGWFSSVYVKSVDTHRLKALLGARDQLVKLKRSLGNQVRGLLRPFGIRLPSRAGGKKFDEAAYLATQKDAILHAAVRALLESLASIEGQQARLDDELDELAKRNEIAWRLMSVPGVGRITALAYMAAIENVDRFRRTRDIGAYLGLTERRYQSAETDVGMGISKQGDAMARHYLYEAANVLLTTVKKRFALRNWGLRLIKTIGPKRARVAVARKLAVLLGRMWKDGAHFEAVVAA

SEQ ID NO: 56720 - protein, 338 aa, unidentified
MKLYGAIDLHSNNNVTVLMDEKDKVVYQKRLTNDLPLILEQLSPYGSSIEGIVVESTYNWYWLVDGLMAKGHRVHLANTAAIQQYAGLKYTDDDSDARWLAHLFRLGVLPEGYIYPKEERAVRGLLRKRSQLVRQKTANLLSIQNLCSRNTGSSISANRIKQLTSEKVDALFTHSDRALAVKANLTVMRSLENEITILERVVKDRIKVKPAYRYLLTVSGIGQILALTIMLERGDIRRFPQVGNFASYCRCVGSEKLSNGKRKGTGNTKNGNKYLSWAFVEAANFAIRFEPLIARYYQRKKAKTHRVVAIKAVAHKRARASYYVMRDEVPFDANRAFA

SEQ ID NO: 56721 - protein, 328 aa, unidentified
MFAGIDIAAERHMLARLDAEGRPIGKPIAISEDREGYETLLRALGAPPVLVAVEATGHYWKNLFAALTAAGHQVALLNPLLARRFQDASLERTKTDAIDATGLARLAFEKRPAPTRLHDEASEVLRELVRHRDRLRQDFDDRVRQLHRLVDLGFPEFTRYVRSLDSMLATCLLAEYPTAHAFARATPRRLARLRYDGRHLVGDELARQLIETAKHSVGHHHGPAYTLQARHICQDLDLWRRRLAEIEHDIEDLLDTHEVGKLLLTIDGIGPQSVARIIAAVGDPARFTCAAAFAAYVGVVPGLRQSGKRSSVRAAIAPLGNARLRMAL

SEQ ID NO: 56722 - protein, 397 aa, unidentified
MYIVGIDIAKRKHEAAVIDGEGTVIIKPFSFTNNCSGYNRLLAMLAKAKLPLDEVSFAMEATGHYWLALFTRLQKEGFRVQVINPVQTNSIRSFYIRQAKTDPRDALLIAEVIRFGHFSESTLHPENIYELRELCRGRHAIVSMQADVKRKVVALLDQVFPEYETAFTNMFGDTSMAILQTCPTPKELSKMPLEELCHLIEVSSHKRFRMAKAQELQALARNSFGFAMAGDVFSTMIRLYAKHLDFLKQQVREMDRKIAEIMDTLDTPITTITGIGPTLGAYILSEIGDISRFSSAAKLAAYAGIDPTMRQSGEYNGVRNRMSKRGSPYLRHAIWLAASSAVLHDPALKLYFQKKRDEGKPYMASVGHACRKMVSIIYAVMRDNKAYTPCIPNEISV

SEQ ID NO: 56723 - protein, 340 aa, unidentified
MIATTKFFIGIDVSKPHFDVALMAVVNHVKQEIATARFDNTVPGIKLFEKWLKSQKTTFNEDSLIVMENTGIYHRLIWTFCSNRSLPIHIGNAAHIKWSFGIARGKNDKIDSIRLCNYAFKEADDLKATAALDPELMLLKDLISARTKLLKQRSGISVSVKELGNVTCKEHQKLIEKALKNAIEGIAKSIKNLEDQIKKIITGNQDFKQNYKLLLSIPGIGHVTAVYLIGCTGNFAGRPSGKELACYAGVAPFEHSSGISIKGKTRVHRMANKELKRLLHMCALSLIQHNQEFKTYYNRKKDEGKHSMSIINAVRNKIALRVAAVIKNQASYKNNYNIAA

SEQ ID NO: 56724 - protein, 432 aa, unidentified
MFGCDAGEGVVLEEDPQVEEIVARVAALDIGKAELVCCVRVPHEGKPGRRLQEVATYSTMTRSLLAMSDHLRCLGVSRVVMEATSDYWKPVFYLLEAQGLDPWLVNAKDVKHLPGRPKTDKLDAVWLCKVAERQMIRPSFVPPPAVRQLRDVTRYRIDLVGARTAEKQRVEKLLEDAQIKLSVVASDIFGISGRQMMAALIGGQTNPKALAQLARGRLRAKLEALEEAFTGHFTDHHAFLLATMLARIDALDADIAALEAKIQEMIAPFAAAVDKLDEIPGVGATGAHIILAEIGLDMSRFPTAAHLSSWARFAPGVKESAGRKKGSGTTGHGNRYLARVLGEAAVAASKTNTFLGERYRRIAKRRGKKRAIVAVGRSILVIIWHLLSNPAARFIDLGSDFYDNRTGPDRKKRNHIRQLEALGYKVTLEPAA

SEQ ID NO: 56725 - protein, 340 aa, unidentified
MDKGTTIAVDLGKRAFSVYWVDAQTGEIGAKAMTRAKLEEFMRTREPSRVVLEAGGSAHYWGRWLVGQGHEVRLIAPQHVRPFVRTNKTDGGDARAIWEAANRPEVKWVAIKSEASQAVLGLHRVRRQLMDMRRMQSNQLKALLYEFGIVAPAKVSAAKLDEWVAVGRVPELLASSLREQIERIGRLKGEELELTRRIERHNASDALAMRLMQAPGIGTLTASALSAELGEGAGSYANGRQYAACKGIAPRLSGTGGKTRPGAISKRGDPYVRTLLIHGARSVITHQRRAKRLSPWLKALLERRPMNVAVVALANKMARTAWALAAHGRSYQENYGAQAA

SEQ ID NO: 56726 - protein, 451 aa, unidentified
MPRRSKRRVVLPAQLKQVHLHAAGVDVGSEFHCVAVPPDRDEQPVRSFGAFTADLEALADWLSRCGIETVAMESTGVYWIALFELLESRGFQVLLVDSRRLKSVPGRKTDILDCQWIQQLHTFGLLSGAFRPVEEVCVLRAYMRQRTMLVQYAAQHIQHLQKALHQMNIKLDKVVSDITGSTGMAILEALLEGERNPLKLAQLRHPQCQNDEATFAKALHGNWREEHLFSLRQAMALYKTYHQQIAECDRQIEHHLGSFSSKSDPTQPAPKKKGGKPSRNQLRFEARQILQRITGVDLTRIDGIDDHTALKILSEIGTDMSRWPTVKHFTSWLGLCPGSRQSGGKKLSGRTKPCANRAAAALRMAASSLHRSQTALGAYLRRMKARLGAPQAITATAHKLARLLYFALKHGWNYVDPGQNWYEHQYQDRILKSLTRKASQLGYQLVPQLSP

SEQ ID NO: 56727 - protein, 487 aa, unidentified
MLDLTQCVVGVDLGDRKSLACVYAQGVVIGWFEFGMTPEGVRAAFEGKGYLRVALEAGAQSGWVSRLLQSLGYPVVVANPRKLKAISANVRKSDRNDARMLAKLVWADPSLLHPIQHRTEERALALTVLTARDAAVTARTRLINTIRSMAKAAGVRLKRGSAQSFALRAEEVPPGLLPAVTGLFTVLETLNAQIADYDQQLKEMLEKSFPEAQRVNQVRGVGPVTSLAFVLTLETPDRFPNGRTAAAFLGLAPRRDQSGEIDRQLRISKTGSNLVRRLLVQCAQYILGPLGRDCDLRRWGHKLMERGGKSAKKRAIVATARKLAVLLFRLWKTGEVWKPLHNAPVENVSENAEVTPSSSDEKRPDPAVSGDCANFPDPGLDPEGRRRDCSTGRGSDSIMHRAPRGPSKSADRSVGPGTVSSAKKEEMRLLPGDAQTAVVPGATDRAKGTRKEMRLLPGDESLPVEMETKKAVRRSTRTSKVEDQPNA

SEQ ID NO: 56728 - protein, 375 aa, unidentified
MAEVNAFIGLDVHKDTISVAVAEAGRGGEVRHLGTIENTPAAIIKLARRLKQKHGSVEFVYEAGPCGYVIYRQLTAAGFICHVCAPSHTPIKPGERIKNDTRDAVALARLFRADELTLVWVPNEIDEAMRDLVRARQSATNDVRRLRTRIQLFLLRHDLRYATKPWSYRHRVWLTDRRFPHPAQQIAFQSYLNALEQAESRKADLERQIAEVTSQWSLRPLVQALQGLRGVGLVIAATIVAEVGDFNRFASPRQLMAYLGLVPGARSSGRKIRPGAITKAGNTAARSLLFEAAWSYRSTPKVGQWMARYRPDEVSQAVKDVAWKAQLRLHGRYKKLLGRGKRPTVAITAVSRELVGFMWAIAKLITPPREGAPAA

SEQ ID NO: 56729 - protein, 332 aa, unidentified
MSVYVGIDVHRKRSQVAVIDQDGQVLANRNVNNGVTPILSVIGGLPSGTPAAFEAAYGWGWLVQLLEDYGFEPHLVHPLQCKAIASARLKNDKVDAAILAQLLRADLLPEAWIAPPAVRQLRALLRHRAQLVRLRTLLQNRIHAVLADHGCDRPAGCWSGPGREWLASLELPAVSAEVVNDALALIDALESVTGRLDLEVRQHARSDPRVKVLTQLPGVGPFTALVLLAEIGDITRFPSARKLASWAGLTPTVRGSDRTVRHGHISKQGSVWVRWILCEAAQKAKHSPQFAASYHSIARRRGTKIATTAIARKLLTRACHLLTDASSGGAPH

SEQ ID NO: 56730 - protein, 389 aa, unidentified
MDEAGKVLVKRRLPEGAAGMTQLHALIGRFLPEDADGAEVVTGIETDRGPWVAALVAAGYVVFPVNPLQASRYRERHGVSGAKSDGGDAHMLADMVRTDSHQLRPAAGDSPEGQGIKVVARAHKTMIWDRTRATQRLRSQLREYFPAALAAFEDLDAPDVLELLGKAPDPDRARRLTRAQVAAALKRARRRDIAGKTDAILAALRGEHLGQPAALTAAYAATARSLIAVITTLNAQVKILEDQVRDHFGRHPDAEIYLSQPGIGAILGARVPGEFGDDPCRYVSAKARKNYGGTSPITRASGKKKVVAARFIHNDRLIDALMSWAFASLNASPGARAFYDEQRAKGLDHNDALRRLANRLVGILHGCLKTRTPYDEATAWSHRESSLAA

SEQ ID NO: 56731 - protein, 374 aa, unidentified
MRDYSEAFVAFDTSKSRNAVAIAEGGRRGEVRFIGEIENSAAATAKLVRKLAGSHGRLTFCYEAGPTGYGLYRQIVSLGHDCIVVAPSLIPQKPGDRVKTNRRDAVGLAKLLRAGELTPVWVPDPRHEAMRDLARGRGAAVEDLRRKRQQVSAFLLRQGLHYAGKKAWSKAHMSWLVSQKLEYPEQRIAFEEMLLAVRQAQERIERLEEAIRVAVPEWSLAEVVTGLMALRGLDLISATAFLAEIGDLSRFRTPRELMAYLGLVPSEHSTGDKVKRGPITKAGNRRARRTLVECSWSYQHPPRIGKKKQEKVAAAPPAVREIAWKAQCRLNGRYRMLIRKGKLKTVAVTAIARELAAFIWAINREIATARAAAI

SEQ ID NO: 56732 - protein, 430 aa, unidentified
MKSNTQNAKIEAITEKTLVLGIDVGSEMHYARAFDYRVIEYSKKPFKFSNTEAGFATFKEWVLDLKERHEKDKVVPGMEPTGHYWFNLGKFLQDNEMKPVLVNPHHVKKSKELDDNNPTKNDRKDPKVIAGLVREGRYMIPYLPEGVYADLRTASNIRFQLQAELTRIQNRISRWFNIYFPEYKTVYGKPDAKSGMLILKAAPLPEDILTLGIDGVNQIWRDAKLRAVGKARAKTLIEAAEHSVGSKEGAVSARMEIRMLLEDYESRNTRLQEVMVLIEELVRKIPMAEKLLEIKGVGIRTVSGFLAEVGDISRFNNPKELQKLAGLALVENSSGKHKGETTISRRGRKRLRYLLFEVAMSLVSKNQEFRELHNYYTTRRLNPLKKMQSLMAIAAKLIRVFYAMLTKGVDYDPKKMVSDIKRPAVYLQAA

SEQ ID NO: 56733 - protein, 370 aa, unidentified
MKKVRFLGLDVHAETIAVAMAEPEGEVRSLGIIPNGEESIRKLVKKLGPAEQLQACYEAGPTGYVLYWQLTALGVKCEVVAPSLVPVKAGDRVKTDGRDAMKLARSYRAGDLTAVWVPNEEHEALRDLVRAREAAKQDQLRARHRLSKFLLRHGRRAPAGIKVWTQKHEEWIKKQVHFEPPAQEYTLLDYLHEVEHMGDRIRRLEQAIAEAVKLAPPRMQEVIQSLRGIAQISAVTVVAELGEISRFEGARQLMGYSGAVSSEHTRGKRMQRGPITKTGNAHLRRIAIEAAWAYRHRPSIGPRLRKRQEGLSEEVKEIAGKAQHRLHKRYRTLSAAGKEKQKVITAVGRELLGFIWAIGVQVERNRKPVA

SEQ ID NO: 56734 - protein, 321 aa, unidentified
MKGQSELFGKYIGIDISKDELHVALTAEGPVWVIKNDAAGVAKMIERLAELKPELIVMEPTGGYELPLAGTFAVAGLSVAIVNARQIRDFARGAGKLVKNDTIDAMIIAFFAERMRPEPRPLADAETMHIDALIRRRKQLQENLLAEENRLRTALVALERVSLQRHIDWLKQEFKSVEKELQVAIKASPLWRVKAELLRSVPGVGKVLCGTLLGGLPELGRLNRGEIAALVGLAPFNHDSGTMRGQRHIRGGRHDVRKALFCATRVSINSKYNPLLNEAFARLHAAGKPKRVAIVACMRKLLVILNAILRTNTPWSPELHA

SEQ ID NO: 56735 - protein, 418 aa, unidentified
MKVVYPICCGVDVHKTFLVATLITSQGITPHYEKKRFSTFNNSILKFKQWLIDNNCYDMCMESTGKYWVPIYNLLEDTIRITVANPKWVKAVKGNKDDKKDSKWIGDLFRLGLVPGSYIPAKPIRILREYTRYRYKLVSCKSSEKNRFQNAFTVCNVALDAVVSDMFGKSASSITDYLISSNTFDPEHCTSLLHGSLKKKADDVVKSIEGYQITQEQKERMIMVRSHLEYVTKSIADLDEKLDKMVAPYESAITLLCTIPGVERASAITIISEIGTDMSQFANSKRLCCWAGLTPGNNESAGKKKSVRITRAGVYLKPALVQVAHAAVKSDKSPYYKIKYERLYKRRGKKRAIIAIARMILTAIYNMFVSGEEWNPSDLYKIDMPQEMVEKQKEKAIKQAIKLLIAQGLIKPTDISVA

SEQ ID NO: 56736 - protein, 419 aa, unidentified
MINRRNEEMLGLYCGIDWATAHHDVAVIDDDGKVVARGRVSNDAAGLAALLILLAEAGDSSDHRVPIGIETDRGLFVAALRETGRTIYPINPLAASRYRARYSVAGAKSDAADAVLLANIVRTDPGAHRPLPADTELAQAIRVLARAQQDAVWARQQVGNQIRDLLKDFYPAAMVAFAGLPQGGLARADARVILTAAPTPAQAAALTPARLRRLLVKAGRQRHLDRDVERLRDIFTDTYLHQPLVVENAMGIQLTSLLRQFDAACTAVAELAEAAIAHFEQHPDAEIITSFPGLGNLAGARVLAEIGDDRTRFADARGLKAFAGSAPITRASGKKTVVLHRHIKNRRLAAVGSIWALSSLRGSPGARRHFDTRRAAGDWNRQAQRHLFNKFLGQLHHCLHTSQLYDEHVAFPPPLQLAA

SEQ ID NO: 56737 - protein, 341 aa, unidentified
MKNTTTICIDLAKEVFQVGVINKYGKLLSNQAVKAKKMALIVAQHPEAVICMEACGSAHYWGRRFGEAGHEVKLVPAHIAAKYRTGNKNDANDVLAIYEASKRPSTYFVSVRTLVQQDLAVQHKLRQGCVKQRTQLANRIRGFGMEYGVTFPKGVPSLRRRVPLALEDAENALTDTGRVVLHKLLMQLRTLDEEIKEITKRLEQHTRQLPVCQKLVKIPGIGWLGAGALYVRLGDGSAFRRGRDASASIGLVPGHRGSGGKNTIGGITKRGDRYLRYLLVHGARSVVNNIRDKDDGLSCWIRQQLATKDINNTTVALANKLSRMAWAILSSGNEYRVPVAQ

SEQ ID NO: 56738 - protein, 389 aa, unidentified
MTVRTVTNLPAVTHGETVRCLFAIELSTMSWVVAFNTPLSEKISRHTLTGCKWKRLLELIEEVRARVSRETGRAVEVVSCYEAGYDGFWLHRKLEAHGIRNYVIDPASLQVDRRARRVKTDRSDTDRLLRSLMAYLRGEPKVWSVVRVPCVAEEDARRLHRERDRLVSERVQHVNRIKGLCALQGIYDYNPLRPQAMARLEQLRTAQGGAFPPRLKSEIMRGLQRLEMVVEMIATLEAERNAIVENEASTHLNAKKIQTLHKLKAIGPEFAAVLVGEIFHRDFNNRRQVASYVGLAPSPFQSGNVAHDQGISKAGNRKGRTTGIELAWMWLRYQPESDLSVWYRARVGATKGRIRRIAIVALARKLLVALWRYLETGLVPRGAVLKGDQ

SEQ ID NO: 56739 - protein, 350 aa, unidentified
MIIIGCDYHPAFQQIAFVDIETGELQERRLRHREEAEKFYRELAAQGIKVRVGMEASGHARWFERLLSELQFELWIGDAAEIRTKRVRKQKTDRQDAQLILQLMLEDRFPEIWVPSWENRDLRQLLWHRHRLVQARTRMMNQLQAVALNEGLRCKKKLFREAGREQLEAFRLAPWASRRRHDLLELLDRLTPTIAELTQAIEQEVEKCPAARRLRTHPGVGPLTALAFVLIIGKADRFQCGKQIASYLGLVPLEKSSGNQRRLGHITKQGSSLLRFLLVEAGQVTARSLPEWRSQYYHLTMRRGRKIAKVAMARKLAVRLYWMMRKEWDYGQLIKFGSYAGKPENRDGVK

SEQ ID NO: 56740 - protein, 413 aa, unidentified
MNSLPTQRFLAIDLHKRYLVIGGVNLRQEVVLNPQRISLQKWPAWARTNLLASDAVVLEATTNAWDIYDQIAPLVGKALVAHPPQVKWIAEARVKTDRHDVLRLAHLLAADLIPEVWVPPVEVRELRALMAHRRRVVQMGTRARNRLHSVLHRHNLKPPQGKIFAQKHREWWLKLDLSPIQLMYIRHDLATLDHVEAQLAEIEEELHRLSTSEPWEEQVSFLLQLPGFGLIVSLTVLGAIGDISRFSHPKKLVGYAGLGASIHASGDKLRTGRITKTGRKELRWILVEAAWRAADTHPYWKAQYERLERRIGSNKAAVALARKLLVAVWYVLAKRTSDRHADPDKVAFKYILWSWKLDDAKRNGMSTREWARYHLMRLKLGDDLTHIMRGGNRYPIAPVEELKSLKPELQASY

SEQ ID NO: 56741 - protein, 371 aa, unidentified
MHDTIFVGMDVHKATISIAVAGGARGGEVRQLGNFLNRADHVGKLVERLSKTGGQRLRFCYEAGPCGYGLHRQITALGHECVVVAPSLIPMKAGDRIKTDRRDAVMLAKLHRAGELTAVWVPDAAHEAMRDLIRARATAVRVLGKARQHLQGFLLRHGRVYAGKKGWTLPYRRWLTTLRFDHPAQQVVLQDYIHSVHDAEERIARLTKQIEDLVPTWSMAPVVEAFQAMRGVAFVAAVTVVAEVGDFTRFDNPRQVMAYLGLTPSEHSSGTAIRRGGITKAGNALARRVLIEGAWTYRMQARVSRKLHDRLEGLPQIVRDIAWKAQVRLCARYRRLAVTGKPKVIVTTAIAREMAGFLWAIARQTQIGSVA

SEQ ID NO: 56742 - protein, 410 aa, unidentified
MIYVGIDWADDHHDVAITDDSAKTLSQFQISHDSSGFATLHGQLAKFKQSPNQILIALETSRGLLVHELLRSDYSVYAVNPRAVNRYKDRYVLSKAKSDSLDALALAHLLRTDRQRFKALRPFPEDYRLLDRLCQDLRKLVEEKSRIFNQITSVLKEFYPKALELLSLDSHIGIAFLKAFPDPQALRNCKKKTFMAFFKKHHYTRPNKIEELWTLIQTPALQPDVVILKVGRFRLLSLLDQLIPLREHLSLYEKEVKAILDKLPEAKSISSLPGVGDRLAPELTAALGPKVPNSEARFQSAEEIMNLSGCVPVTRQSGKWKTVSFRYSCVKGLRRTFRDWAFASLEQSVWARAYYDFYKAMNMPHSTILRNLGKKWARILFVLWSQGTVYNEPLYIQSLKNHNVRWAMAL

SEQ ID NO: 56743 - protein, 420 aa, unidentified
MADICEEAAELVARVAALDVGKKELVACVRVPGEDKPGQRRQEVRAFATATRSLLELRDWLVCQQVSLCVMEATSVYWKPPFYLLEDAVECWVVNARDAKNVPGRPKTDRLDAVWLCKLAERGMLRPSFVPPPWQRELRDLCRYRRTLIQERSREKQRAEKLLEDTQIKLSSVISDIFGKSGRAMLEALIGGQRDPQVLTGLADGRLRASRTVLHEALTGHFRDHHGYLLRMMLDHVDALTAQIEDLTGRIEEAIAPFARQVAQLDEIPGVGKTCAQELIAEIGVDMSRFPTAGHLASWAKFAPLARQSAGRTKPGTTGKGNPWLASALGDAAKGAARTKTFLGSRCHRLARRRGKQRALVAVGNSLLIIAWHLLSDPDARFADLGPDWHDRLAPLRRKRQLIAELERLSGKKVLLQEAA

SEQ ID NO: 56744 - protein, 420 aa, unidentified
MSPLSDQPFTAYVGIDWADLKHDICLQAAGGTRREFDCIAHQVAHIDEWANRLYRRFGGPIAVALELASGPIVAALQKYDFFVLFPINPLTLARYREAFQPSGAKDDPTDAELALDLLLHHPERFSRLRPQSAGMRSLMSLVVQRRQLVGDKTRFTNRLCDTLKQYYPQALEWFEDRDTVLFCDFLTRWPTLAAVRRARTTTLEAFFHAHNCRCARLIGARLASIRAASPLTEDPGIVVPCRLHVLALVAQLRTVLTAIDWFDRETAAVAGTLPDYALFQDLPGAGRQLAPRLLVAFGEQRDRFHGADELQKYSGIAPVTERSGKKSWVHWRWQCPKFLRQTFVEWAGQTINKSFWAGAYYRQQRARGSSHPAAVRALAFKWIRILYRCWQTRTPYDETTYLNALRKRGSPLLRNLGLPG

SEQ ID NO: 56745 - protein, 346 aa, unidentified
MVHFVGLDVSVKETSVCVVDDADKVILEQKVPTEPANIIALLTSLGEPYGRIGIEAGPLSQWLVNALTAAELPVICVETRHMKALLTAQQINKTDRNDARGIAQMMRVGLFKPVHVKTLVAQEQRMLLTTRKLLQRKLLDVESDLRGTLRNFGLKVGVVSGGRYEARVRELVEGFPRLAAIAEALLNVRRVMRQQLAVLHKLDTVRGDPVCRRLMTAPGVGAVVALTYRATVDQPQRFVHSRAVGAHVGLTPKRYQSGEIDYDGGISKCGDALLRTMLYEAAHSLLIQSRKWSWLKAWGIRVAQRRGIRRAIVAVARRLAVVLHRMWVDGSEFRWKKDSAAAPTVA

SEQ ID NO: 56746 - protein, 371 aa, unidentified
MVEQREAFVGIDVAKLRNAVAVAVGDGGRMGEVRYLGEFDADEASMRRLVKRLAAKHESITFCYEAGPTGYGLHRLIKSMGLECTVVAPSLIPRRPGDQVKTNRRDAIGLARLLRAGELTAVWVPDESHEAMRDLVRGSSAAVETQRVHRQHITSFMLKHGRIFPRKKAWSMRYLRWLQEQRFDHPAHQIALQEMVDALRLASERIKRIEAAIEEFLPGWSLEPLVRSLQALRGVDLIVAVTFAAEVGDVTRFENPRQLMSYLGLVPSERSTGTSVRRGGITKAGNSRVRHMLVESAWTYRHPPRIGVKKLYIHERVSPVVREIAWKAQSRLTARYRRLAATGKRTTVVCTAIARELAGFMWSVGRVVQPV

SEQ ID NO: 56747 - protein, 391 aa, unidentified
MKKISTVVAKQTKNFREQKLTIGLDLGDRSSWYCVLDEAGEVVLEQKLGTTPKAMKEVFGKMPRSRIALETGMHSPWVSRVLSELGHEVIVAHARNVRLIGESRRKDDRMDARTLARLARIDPQLLAPVQHRSAQAQAHLMVIRARAGLVRARTSLINTARGLTKSYGERLRGCSPRNMNAEKARQLSPELQAALEPLLAAIESLSERIYEYNQQIERIARESYPQVARLTQVKGVGTLIALTYLLTLEDAQRFRKSRDVGCYVGLQPGRRNSGQSEPQLHISKEGDPYLRTLLVQGAHHILGPFGADSDLRRWGLKLAERGGKNGKKRAVIATARKLAVLLHRLWVSGEGSGRQGCESSKVKVLVPSIACIRTASISGACRGNEARSARM

SEQ ID NO: 56748 - protein, 355 aa, unidentified
MDSLRYIGLDLHRDTISAAVLDSDGTLMLQSVLATRAAAVTDFLSGIRGTLHVTFEECCHSAWLYDLLSSRVAKLVVCNPRKNALLKFGSKSDAIDARKLAELLRAGMLAPVYHGENSVLEIHHLARCYGMLTDDTTRIKSRLKAVFRSQAIACTGKRLYGNKHRDNYLKELGDGGQRRRADYLYQELDALQKLRRQARHELATACRKHPAAKWLQSVPFLGPLRTAILLGRVKTPFRFRTKRQFWAYCGLAIETRDSGEYHLIEGQIERKKKPGLVRGLNQNHNHDLKDLFKGAATTASACEGIFRQFYLGLLHKGMQPEMARLTLARKIAAITLKIWKKGEMFNPEYLMPQAA

SEQ ID NO: 56749 - protein, 338 aa, unidentified
MEWTVAIGVDTHKHMHVAVALDRFGTQLGSREVATTESGYRSLLAWALELGLPAFAVEGSGSYGAGLVRFLQLAGVAIWACERPRRRERRRGKSDLIDAALAARRLLSGDGLCLPRGGGRREELRLLMIERRSAIQARTAALNQLSAIVVTAPEPLRQRLGRLSGERLAGAAARLRPGDDVRTAVVHRLGRRAERLSHEVTEVDRRLLEILTEVAPALLAECGVGPVCAAQLLVSSGDPNRMASEASFAALAGTSPLEASSGQQRRHRLNRGGDRQLNRALHVIALARIHHHAETTAYYQRLLAAGKTAREARRCVKRALARYFYRRLRELPTPALTT

SEQ ID NO: 56750 - protein, 358 aa, unidentified
MQRNKKSFKGQKIFLGIDVHAKSWEVAIAPEVGFVKRFSQKPSAKELFDFLRKNYPEGEYKAVYESGFSGFSTYYALREVGIDCIIVNAADVPTTQYEEVMKTDKVDAAKLARSLKAGLLKGIYILEKAYIDDRSVVRIRTTIRKQLSAYKTRVKHLLYFNGVDLPERFSKKHTHWSRPFIVWLKNDVHLLSDTRESLNLLIRQVEALRGTLLEATRKLRKMSQTERYKRRHDLLRTIPGIGTIIAMSILTEICDVKRFHNEKEFAAYLGLIPTSHSSGEKTAFGEKTFRGNKMLGPMIIEAAWIAITRDEGLGAQYKKFRRTMEAQKAIVKIARKLSNIIFSVLKNEKGYVPYNTGN

SEQ ID NO: 56751 - protein, 342 aa, unidentified
MNHYAGIDVSLECSSVCVVDASGKILREARVASEPEALIAWFRQSGFEFERIGLEAGPLSQWLFAGMKAAGLAVELLETRHVRKAFEAMPVKSDRNDARGIAQLMRLGWFRPVHCKSISAQETRSLLTARKLVQSKLLDVENSLRGILRGFGLKVGKTTGQTFAGRIEELVHGHPHLQMIAKALLAVRAVLRTEFAAFEKQTRRMVRSDMQARLLTSVPAVGPIVALTYASAIDDPTRFKSSKQAGAHFGLTPKKHQSGETDYTGRISKIGDASVRTALYEAANVMLTKPLKGCSQLKSWAMRIKKRAGMSKAKVALARRLAVIMHRMLADGTPFNAAVAAA

SEQ ID NO: 56752 - protein, 418 aa, unidentified
MDKIYDICCGIDVHKKLIVACLNHKRKKELREFGATTRELMELAEWLQKNECEIVAMESTGSYWKPLYNIMESYGLHAIVVNPAHMKAVPGRKTDVKDAEWIAELLQHGLLQPSYIPSKDQRELRELVQYRKSLVGERTRELNRLQKMLEGANIKLSGTVTNINGKSARKILEYILSGNEIDEKKYDEKKYDEMYEEKLIAHNLKASKEQILDDLKGFMSPLQRRMLKELLQHLDELNVHIENLNDEIDNFMKPEEKQASQVIQDVTGIGNTSAQTIIAVIGTDMERFPSDRHISSWAGLCPGDNVSAKKRKSGKIRKGNALLKSTLVLCAHAAVRHKSSYFHAQFKRISTHRGKKRAYVAVAHSILIAIYHILKDGVKYQDLGAEYYNQFNAERKIHAYLKKLKALGWEPPKEAVPA

SEQ ID NO: 56753 - protein, 351 aa, unidentified
MNTQQTVVPKLFIGIDIHKSSWKIHCATDISSGKTFSMNPNPIKLKSYVEQHFTGHEVFTAYEAGCCGYYAHRAFESYGWQSLVANPADIHRKGKERFTKTDHIDAQVIARELKDGRLQGIHIPDLKREQLRSLFRRRNNLVKNYRKIKSLIKGQLLNQGIAVPSEFDNSHWSHNFRDWLDNLDFTYHTARMTLDSHMRYFRFVDQELRDVSTKLRSYCKEYYKKDYMLLRSVPGIGGIVACGIICELGDLRRFNSIKHLSGYVGLAPGIHQSGENLRNTGITRRAHRLMRSYFIEASWQAIRTDPVMQAYCRKPLGKNVKAVIVKIARKLLSRTLAVIKTEIPYEIGVVS

SEQ ID NO: 56754 - protein, 483 aa, unidentified
MKPKQEEKTKKASCRPTPNHWHEMNRKQRREMTRKIQSEDLNLEVMHPDAAGIDIGNESHYVAVPPTRASEPVRRFGCTTGELKQMADWLKQCGIRTVAMQSTGVYWIAVYDILEEAGLEVYLVNARETKNLPGRKSDVQESQWLMKLHTYGLLRNSFRPSQEIRTIRTYWRQRNDLVRAAGRHIQRIQKVMTQMNIQLANVLSDVSGITGQAIVKAILAGERDPHQLAGLRDCRVKASEEEIARSLEGNWQEDLLFVLKQEQDGYEFCQKQMAESDQRLRQYLQQREDRSAGAKLPEEKRKERLRKKKKGNAPQFDLRSELFRTTGTDLTQIDGIDVMTATTILSEAGWDMSKWKTEHHFVSWLRLCPDNQISGDKVIGKGRLPTNNRVTTALRMAASTLRLSNTYLGAQFRRLRTRLGAPIAIKAMAAKLARLVYRMLRYGMQFVDQGAEFYEAQHRKLQINYLKWKAGNLGFQIIEAPAA

SEQ ID NO: 56755 - protein, 343 aa, unidentified
MKLSRIGIDLAKNVYQLHGVDCHGETVWKRRLRRHQWLQVLLDKAEPGCAIGMEACAGAHHWARELQSRGYTVRLIAPQFVKPYVKSNKNDANDAEAICEAMSRPNMRFVTMKSVAQQDIQATHRVRTELKEQRTAKANQIRGLVAEYGLVAPQTLLALRRAIPCWLEDADNGLTDYFRSLLHGLWGDLVALDDRMTELDKQIKTLADSNEVTRRLQQLRGVGPLVATALIATVGTGEQYKKGRQMAAALGLTPRQCSSGDKQRLLGISKRGDVYLRTMLIHGARAVVSQAKHRDDRLSLWVTGIAKRSHPNVAAVALANKTARMAWAMLRNDSNYNPDFATS

SEQ ID NO: 56756 - protein, 289 aa, unidentified
MTVVIGLDPHKATHTAVAVDRAEEELDRIRVEPFGDRVWAIESAAGLGDLLAQQLFGVGERVVDVPVTLAARARLLGTRRSDKNDANDARSVAVAALRAPRLSEVTPADHVAVLRLVAKRNLDLGRERNRAANRLHVMLTELVPGGIPKELTVSKALALLERAQPQTAVDHARYAMALELLDDVRRLDAQKNAMKRRIAAAVVASGTTVTDVFCVGPIVAYLVLGYTGDATRFADCHHFSAYNGTAPVEMSSAGRRVHRLSRRGNRTLNYAIHMAAVGQIRQLHSEGRA

SEQ ID NO: 56757 - protein, 328 aa, unidentified
MAQVELVVVGVDVAKDKVDTCIRSLSQRGTFPSAAAGRRALIRWHKVGKAVMEASGGYERDWAKVVRDAGIEVRIVDPKRVRHFARSAGRLAKNDLIDAEMIAWFAETFTDAPGQAYDREREELMQIVNARQTLIDLQTSLQNRTEHIAPDVVQRMQARLLKKIAAELATLEIAIATAVKTTAHFAELAEIIESVPGLGKGTSSGLIAAMPELGHVSNEVAAALMGVAPYDDDSGQRRGDRHIKGGRRKTRNLFYMACVGAATRHNPVLKAFYARLIAKGKPPKVALTACMRKLICILNTMIARRQKWDATRYKLSDPARPLPSACPA

SEQ ID NO: 56758 - protein, 459 aa, unidentified
MGKAKACKGGKNQLQVIHPRAAGIDVGSKFHVVAVSAEYDPDPVRKFNSFTTDLHRLADWLKAVGVTTIAMESTGVYWIPVFEILESRGFDVILVNAREAKRVPGRKTDIKDAQWLQQLHQYGLLSASFRPGEKIASLRSYLRHRERLTEYAAAHIQHMQKALMQMNLQLQHVVSDITGDTGMRIIRAIIEGERSAAKLASYRDPHCKQSEKTISAALTGNYRPEHVFSLKQAVALYDFYQKQIKECDQEIEKALAALNSDKTAPSEPLPKARRTKKQKNEPGVPIREMLYTLTGVDSTQINGIGPYTTLRLVAECGTDMAKWPTSKHFTSWLTLSPGNKISGGKVLSSRTRRTKNRATTLLRIAAVNIGKTQTALGAFYRRLAARVGKAKAVTATARKLAVLFYTLMRYGKAYVEPGADYYERQYRERVLLALSRKAAALGYRLAQKQETSPVTGNVS

SEQ ID NO: 56759 - protein, 387 aa, unidentified
MVNGRTGSLSSSGEAIVFIAIELSKKGWLVAMRGPLTDRISLHRLSAGDARGVIALAERVRAAAVRELGIEVMVASCYEAGYDGFWLHRVLTGAGVSNHVVDPASIHVDRRARRAKTDRIDAQALLRTLMAYRRGEGRVWSVVEPPTPEEEDARRTHRERQNLLKERGRHVNRIKGLCALQGILDYEPMRGDRHKRLTELKTGDGRPLQPRLLAEILRELARLEVVLRQIAELETEREATLKAAPVGTAAPDQVQHARSLRRLLAIGPETAAVLATEVFFRRFQNRRQLAGYVGLTPSPHMSGGLSREQGIGKAGNPRARTALVEAAWIWLRHQPQSALAKWFSNGVGAQKGRVRRIMIVALARKLLVALWRYVEVGLVPAGAMLRT

SEQ ID NO: 56760 - protein, 411 aa, unidentified
MITITTLFVGIDVGKKSNHIHVLDSDGETLSRFAAPNNLDGAGKIKEKLRRIILDTDFTKVIIGMESTSIYADHLAAFFRNDEFLKTWQCKVYILNAKQVRKFKDSYPELPKMDDVDAFIVAERLRFGRLPVEVRQNEKYIALRNLTRARFQAAQSLSCEKSRFLETLFFKFSTLDSSGIFSDTFGATSLAIVTDFFSVDDIIYTPIEELAAFINEKGKSHFVDPENIAKELQAAAKSSYRLPKTVNDSVNQLLAVRLVGIRAIQNQIKELDKAIESFMSLFPNGLTGIPGIGPVYSAGLLAEIGDITRFKKHASLAKYGGLAWGKHQSGGFEAANTKMILTGNKYLKYYLLETANKVRMHDAEFKRFYQSKFKEVPKHQHKRALALTARKLVRLVYSLLSSNRLYTSPTL

SEQ ID NO: 56761 - protein, 339 aa, unidentified
MVERTQGSHHKGGIDEDGQHTTICAGIDTGKRKLDVVLEGTREQLQVENTSEGHAVLLAWLRRHRVKRVGIEASGGYEQPVVAELRRKRLVVVVFQPAQVRAYAKFHLQRAKNDKIDAALIAACTAAVRKIHAAPDPRLLPFAEQLTMIDQINEDTARLKNRIESCRNAQIKKLWNEDIARLEKREKAELKALVASIRKHPDLAKRLALINSVHGIGLPTAVAILVRLPEIGRITREQAVALAGLAPYDDDSGEQVGVRHIEGGRKRLRRALYTASLAASFRWNQQLIQLYQRLTAAGKEHKRALVACARKMLIFANTVVARGTPWQDCPPEKAALTTG

SEQ ID NO: 56762 - protein, 343 aa, unidentified
MKVTTVGIDLAKQVFQIHGVDDHGKAVIKKQLKRAQLTEFFVNLSPCLVGMEACGSAHHWARKLQDMGHTVRLMAPQYVKPYVKTNKNDAADAEAICEAVTRPNMRFVPIKNIEQQSILAVHRVRQGFVQARTAQANQIRGLLGEFGLVLPQGIHHIYRKTPELLEDASNELTGSFRLLILRLLDHLKELDKQVQEMEREIVQWHRQHEDSKRLEQIPGIGPITASALVASLGDAKSFQNGRQLAAWLGLVPRQHSSGGKQNLLGISKRGDTYLRTLLIHGARAVVLVADRKPDHSPTCRWASKILLRRNKNITAVALANKNARIVWAMLVHNRTYQTDYVPA

SEQ ID NO: 56763 - protein, 428 aa, unidentified
MSYKIAGIDVHKKMLAVVVSDVEIESEYQFERRMFSSNPEQLRSLASWLVEQEAEEVVMESTAQYWKPVWEALERYWKPVREKREGARRRSGTLHLAQALSNRGRRGRKRDFPDAERLVKRLVARELTLSFVPDAEQRLWRTVTRKKYQLRRDRVRIHNQLEALLEEAHIKLSSLVSDLLGASARRMLKALADGETNPAALAVLAHERLRATPEQLCDALGACTDLKPVYRRLLKMTLEQLQILEQQIGQLDQELATLLHPHQDAVQRLAEVPGLGVDSAQQIIAEVGPAAATFPSEKCLSSWVGACPGEEESAGVNYSHRSPKGNRHMRRLLNQVANAAVKVKGSIFEIIYRRSVPRLGHNQTIGVIAHRQCRLIWLILHQGARYEERGPAVSKQSRYQRTWRMIRQLRNLGYRIELPNPQASQAQA

SEQ ID NO: 56764 - protein, 428 aa, unidentified
MKFKQSDGQNQRIERITTSHLVVGIDMAKETHVAQATNYRGIVLTNRHLSFNNTIEGFEKLYRWVQGLHQKHRLSNVIIGMEPTGHYWWNLANWLTSKGMNVVLVNPATTKRNKENRDNSPSKSDPKDALVIADIVSRGYYYDYTKQTLVYQRLRTTMSDREFWVANSVRLQNRIVRWLDIRFPEYTAVFKDWTCKRSMATLKELFSPQDLASKSVEEMITTWRKHMQRAGGSTGMLKAAELISEAKRSVGDTTALDEAKQDLKRLVTEYERIEEMLENMEKQIKSLLSEIPIATQLRSIKGLGPIFVAAILSGAGDLKQYAHGRQLLRKAGLNLAESTSGKRKGQIVVSKRGDSTLRKYLYLATIQLVGVNPVFRELHDHNVKVKQMKKQQSVFKLMGKLARILIGLVQRGETFMPEKATSVLTQAA

SEQ ID NO: 56765 - protein, 300 aa, unidentified
MNGIGIDVSKRQLDVGTTDGEILQVSNSASGFAELDLWLRKHPASQIVLEATGGYEQPVLDFLHKAGHPVARANASRARKLAQGLGQIAKTDRLDAYALAQMAALVKLPPYQPQQKMREFVRARRQAVDALAIARQQQEMVLDRELRRLLQGNITRLQTLVERLGKQIVEQVGQQPQLKMLKSMKGVGPGLQAVLASYLPELGRISGKRIASLVGVAPMSHDSGTMRGKRSIHGGRAEIRQVLYMASMSAMRHEPRLRDFYQSLRARGKEGKVAIVAVMRKMLVILNARVRDAESGLVPA

SEQ ID NO: 56766 - protein, 341 aa, unidentified
MQITTIGLDIAKNVFQVHGIDAAEKVVVRKQLRRGQLLKFFAALPPCLVGMEACATAHYWARELTKLGHEVRLMPAKDVKAYVKRNKNDAADAEAICEAVRRPTMRFVGAKSAEQQGRLMQHRTRDLLMRQRTQVINALRAHLAELGIVAAQGREGLKQLLTIIADEKDARLPIDARASLIVLAAQLQALHTMISSIEKRLTVQHRANVSSKRLESVPGIGIIGASAIAATVTDPNAFRSGRDFAAWIGLVPRQDSTGGKQKLGPISKQGDRYLRRILVVGAHSVLRRAKQNPEKYPWLTKLLARRPFKVVAIALANKMARVAWALLARGGTYRVPALAAA

SEQ ID NO: 56767 - protein, 346 aa, unidentified
MEHYVGLDVSLKLTAICIVDRTGKIEREGVVASNPEAIAAFIKSHAPHVARIGLETGATSTWLWTELNKMGLPVICIDARHAKAALRMQINKSDRNDAVGIARIMQCGWYKEVRVKDLDSHAIKALLVSRALLVKIKRDLENQIRGLLKNLGLVIGRAKMNVFALRAAELTEDRPELAGAVEPLLKAREAIERQIADLDRKVLRLARNDAQVRRFMTAPGVGAITALCFLATIDDPTRFKRSRSVGAYVGLTTRRYASGEVDWTGRISKCGDKLLRSYLYEAANVLLTRVAKWSALKAWGVRLAKRSGLRKAKVAVARKLAVILHRMWIDGTEFNWSSKEVAVQPA

SEQ ID NO: 56768 - protein, 318 aa, unidentified
MPESIVIGIDIAKQTFDAALGVSGSIKTFANDDAGFDTLLANLAGQAVDLIVMEATGGLESNLACALQAAGFAVAVINPRQARDFAKAMGYLAKTDRIDAKALAELAQVLARSPERDRFVTALPTPEQQALQALVARRRQLVAMQVAERQRLSVSHAAARKSIEAMIMAIRTQLDEVETELAKHIETHHADLALRLSSVRGIGPTTVATLIAEVPELGQLSRREISALIGLAPFNRDSGQMRGKRAIFGGRGQVRRGLYMAALAAIRFNAVIKQFYDRLVAAGKPKKVAIVACMRKLLTILNAMVRTGKAWDDSLHTA

SEQ ID NO: 56769 - protein, 451 aa, unidentified
MKILALDLGKFNTMCCFFDTKTRKHSFLNAATERNYLNTLFKKHKVDLVVMEACGPSGWINDLAISHGLKTLVCSTNEDAWKWSNVKRKTDKDDALKLARMAAMNELKAVHMPSETHREFRSLVKYRKTLDCRINKMKCTIRAWFVNHGIEIDTGEKAWNTGRERINSFRKPLSECQPDELWKGELDLELTQFDALTVQLESVVKKLEALGKADPSIQRIRTIPGVGPRTAEILVACIDDPHRFTTGRQVSAYFGLVPRQYQSGETDRNGRITKRGNPLARTILVECAWASLRYNEWAKGVYDRICGKQKTRKKKAAVALARKIAVLAWAMLRDKRDWTPTHMIQVTESFGKMKRELKESLQSMKPKENSDQRKSRLRREAREAKAVADRPKKSVRTATAKRSRSKTTVAPNAAPPSNPTKRTTPKSTARTNLKPKPQPKPRRAGKLVSAG

SEQ ID NO: 56770 - protein, 334 aa, unidentified
MQHIALIGIDLGKYSFHIHCQDISGRKVLRKKLTRIKLFEFLANTPATTVVMEACAGSHYMARKISNLGHSVKLIAAQFVRPYVKSNKNDYIDAEAICEAASRPSMRFVTPKTELQQSMNAWHRTRESLVRDRVKTTNQMHAFLLEFGISLPKGKAVIRRLSSVLNENELPDNLVRLLLRLHDHFVYLDEQIKDIEKILENELKSNDASKLLLTIPGIGPITASLLHAQLGDGLQYRTSRDFASSTGLVPRQYSTGGKQSLLGISKRGNKTLRRLLVQGARSFMRYVHLRDDLLSLWVKEQLNKKHSNIVACALANKLARIAWAVSVKKEAYSI

SEQ ID NO: 56771 - protein, 426 aa, unidentified
MSYKIVGIDVHKKMLAVVVADVAVEGEYQFERCRFGTSPDQLRLLAEWLIQQKAEEVVMESTAQYWKPVWAALERQWKPSCGKREGGDPISGTLHLAQAQSNRGRRGRKRDFPDAERLVKRLVAQELTLSFVPDAEQRLWRTLTRRKYQLTCDKVRWQNQLEALLEEAHIKLSSLVSDLLGASARRMLKALADGETNPAALAALADQRLRATPAQLCDALGACTELDPVYRRLVKMMLEELHLIEQQIDKLDQEIATRLRQGQDAVQRLAEVPGLGVNSAQQIIAEVGVTAATFPSAKQLSSWVGACPGDEESAGVNQSHRSPKGNCHMRRVLNQAANAAVKHKGSIFEIVYRRLEPRLGHNQAIGAIAHRLCRLTLIILHQAVRYEERGPAVKETSKRRRRMKMIRELRKLGYRVEPMAVQFNPA

SEQ ID NO: 56772 - protein, 344 aa, unidentified
MNVTTIGLDLAKSIFQVHGVDANGRVVIRKSLRRAQMLPFFARLPSCLVGMEACGTSHYWARELIKLGHEVRLMPPAYVKPYVKRSKTDAADAEAVCEAVTRPTMRFVPVKSPEQQAALSMHRARDLLVKQRTQLVNMIRGLLAEFGINIPKGLERALLMARRIVDDEAPDVPIEAAKIVGTLSQQALDIHVRLRQIDRDLLVWQRGNDVARRLMTIPGIGPVGATALAASVTDPHQFRSGRQFAAWLGLTPLQKSSGGKERLGRITKMGDKYLRKLLIVGMTSLVRRAKDNPPTIDPRLANLLVRKPVRVATVAMANKTARIIWAIMTRGETYRASHQPALAA

SEQ ID NO: 56773 - protein, 304 aa, unidentified
MLDTDTGELEEKTLEHEGETVREFYSALRGPILVGIEATGSMQWFLELMEELGIECRVGHPAKIRKAETRKQKHDRRDARLLLTLLAENRFPTIWMPSTQQRDLRTLLRHRHQWVRMRSRVQHTLQSIALNHGFRRGHALWSQANQHALRALPLAPHASERRAALLTLYPHLQGSIEELDKEVCEEVQQHPQARRLLTHPGVGPITALATEVFLGDPKRFIDGKALASYIGMIPSEHSSGRRQRLGAMSKQGNTLLRYLWCEAAMHAVERDPELKRFYRRKLVQKGLGKARVAAARKLGIRLGS

SEQ ID NO: 56774 - protein, 342 aa, unidentified
MAITVLGIDLGKNSCSMVGLDGSGAVVLRRRLHRENVIKLASDLAPCLMAMEACCGAHHLGRILRDQGHQVRLISPEYVRPYVKSHKNDDWDAEAIAEAATRPTMRFVELKSSEQLDMQSLHRVRDRLVGERTALLNQLRAVLMERGITIAQGRRKLEQHLTAMLEGDEVRLSRRVRALLEDMRAEWCELDRRIEAFDDEFAALAKTDDAARRLVSIPGIGVLNATALVAAIGNGAIFARGRDLAAWLGLVPRQMTTGGKPRRLGISKRGNKYLRKLLVHGARAALPSLSSSPTPIGQWLQGLMARAHKNTVVVALANKLARIVWAVLRHGGIYNPAAVRAI

SEQ ID NO: 56775 - protein, 362 aa, unidentified
MKKHIMVGCDLHDKSMLLKVAVDRHRPTVERWGTDDDSVPRMIGHLRNWAARLGGARILFAYEACGFGFRLYDELTDAGIECHVLAPSKMPKSARHRKRKTDERDAQLILDSLKAYVLAGVPMPSVWVPDPQTQDDRELVRRRLAVAEDAAASMVRVRWLLKGHGIKVAPANAWTDEYWQWLERLANGGLPAGAGTALGSLMRQVQWLWSERALLDEQVFALASSARHAPVVAALCRHKGVGTLTAMVFLTELGDLSRFANRRQVGSFLGLVPSCHETGESDDRKGHITCQGPGRVRKVLCQAVWSRLRCDEHERKAYDRIVERNSKHKKKAVVARMRVLAVVLWHAGLEAQTAMRAEALTA

SEQ ID NO: 56776 - protein, 377 aa, unidentified
MKRIKFVGLDVHAETIAVAVAEQDGEVRSLGIIPNREDSIRKLVRKLGPVEELRFCYEAGPTGYALYWQLTRMGAQCEVVAPTLVPVKAGDRVKTDRRDALKLARNYRAGELTPVWVPDAAHEALRDLVRAREAAKKDELRARHRLSKFLLRQGRRPPTGVKAWTMKYMEWVKGEVHFEQRAQEATLLDYLHEVEHAAARIARLDGAITEAVQCAPPQMRAVIEALQALRGIAHVAAVTVVAELGELSRFARAKQLMAYGGIVSSEDSSGERRRRGSITKTGNAHLRRVVVEAAWTYRHRPGVGVALRKRQEKVSEEVKEIAWKAQQRLHERYRKLLAKGKNKGVVVTAVGRELLGFIWAIGIQVETAQKESLRRAA

SEQ ID NO: 56777 - protein, 425 aa, unidentified
MKALKSHVAGIDVHKEMLAITVLIGELDGEPKEYQFESSTFTDDLMALGLKLKEMGVTDVAMESSGIYWKPVFNVFNPLGLKVVVANAAHIKNVPGRKTDMNDSRWIAELHRFGLIRASFIPDGEFQRMRLLSRHRTNLTEDLARVKNRIQKVLEDGNIKLSIVVSDIFGVSGLKVLKHIAGGYTHPNILITEVTTKIKRMEEMKKALTNCLTTEHCFVINVLMKQYEELKNRIEEGENELCKKVEPYAHLVEELDKIPGIDAILAMGIIAEASANMSSFKDERAFAAWSGVASGNNESAGKKKRAKCRKGNPALRKMLIQAAQGAIHCKKSFYRSKYNKLSFRLGSKNKAKVAIANKIARVVYKVLAGDQYKDLGYMRGDPREERIKKLLFELKSLGVEIQNHTHQNIYSKRDVKVEASGIVYS

SEQ ID NO: 56778 - protein, 346 aa, unidentified
MEHYVGLDVSLKLTSICIVDRTGKVEREGVVASDPEAIATFIKLHAPHVVRIGLETGATSTWLWTELNKMGLPVICIDARHAKAALKMQINKSDRNDAAGIARIMQCGWYKEVCVKDLDSHATKALLVSRALLVKIKRDIENQIRGLLKNLGLVIGRAKMNMFAVRAAQLAEDRSELLAAVDPLLKAREAVEQQILDLDRKVLRLARNNAQVRRFMTAPGIGPVTALCFLATIDDPARFKRSRSVGAYAGLTTRRYASGEIDWTGRISKCGDKMLRSYLYEAANVLLTRVAKWSALKAWGVKLAKRSGLRKAKVAVARKLAVILHRMWIEGTEFKWSSKEAADQPA

SEQ ID NO: 56779 - protein, 417 aa, unidentified
MKSARSTLPEEPAGGVTAGIDWARDDHAVPVVDARGREVSRCMIEHSAAGLRELVTVLARAGAGEVAIERPDGPVIDALLGAGLTVVVISPNQVKNLRGRYGSAGNKDDRFDAFVLADTLRTDRARLAPLTPDSPATVALRRACRARKDLVSHRVAVANQLRAHLLNVFPGAAGLFARIDSPVSLAFLARFDTQDRADWLTPARMARWLASIGYSGHTDPAVLHARLAAAPRGLTGHDADTQAAITHALHAVLVTLTAQIKTLSAQIGAQLATHADSHVFTSLPRSGTVRAARLLAEIGDCRARFPTPESLACLAGAAPSTRQSGRQRTVTFRWACDKQLRDAVTDFAGDSRRSSPWAASLYNRARARGHDHPHAVRILARAWLFVIWHCWQDSAAYDPARHRALQTLLNQDQQAAA

SEQ ID NO: 56780 - protein, 361 aa, unidentified
MDLPITHTDEEALPVVLGVDTHVDAHVAVALDGLGGRLGHKTVPATEAGYALLAAWAEEFGVLERAGIEGSGSFGVGLTRFLRARGVEVVEVNRPNRQHRRRFGKHDTADAEAAARALQANTATGEPKSADGPAEMVRALHVVRRSAVKARTQAANQLRALLVTAPEGLKAELRGLSTTNLVATAARFRPGAHSEDVRTATKLAMRSVARRHLTLSEEIAELEEQIERLVKEAVPALASLRGVGTDTAASLLVAVGDNPERLKSEASFARLCGVAPVPASSGKTVRHRLNRGGNRDANRALHVLALGRMSWDERTRAYVARRTAEGKSRREILRCLKRYVAREVYRILMAPGALPPSISVP

SEQ ID NO: 56781 - protein, 390 aa, unidentified
MSESFDATRSLAAFDQDTTLVVVVEMSLSKWLVAAIVPGLERRPLKKLDADPEELLKLLHSWRNEAEHSGQLIKRITVAYEAGRDGFWLARWLQGRAVEAQVIHPSSVAVSREHRRAKTDRLDTELLMRAFLGWLRGEKRHCSMAVIPTVDEEDARRPNRERDSLVRERSRIVNRIKATLARFGIRAFKPILRNANKLDSLRIVDGTLLPENTRAELRRNFARMRLLFEQIREIERERLRRLATAPTAPAAEQGAHAMVRLLARVIGVGIETADMLVHEILSRGLRDRRAVARYAGLTGAPDESGKRRREKGLARAGNARVRYGMILLAWRFLQFQKDSALAEWFTARTADGRGGTRKTMIVALARKLLIALWRLVTTGEIPSGFVLRAA

SEQ ID NO: 56782 - protein, 425 aa, unidentified
MRAIGLDVHLEFCEVAIAERDEVRSAGRIETEPEEIELFARSLGADDRVALEVTGNAWEIKRLIEPHVAEVIVVSPTDTGIRGARAKTDRLDARTLAKLLASGELEAVWMPDRATQVMRRRLQRRNQLIWGRSKAKNQIHAVLMRQLIGRPPFSDLFGKRGRHWLAELELQVEERESVDSALRQIEFLDAEIEAVERLIATDALNSAEIRRLMTVPGVNVICAATFVAAIGAIGRFESPRRLVGYLGLDPRVRQSGTSPATHGRISKQGSSAVRHALVEAAWSVVRQPGPIRAFYQRVRSRRGHQVAITAAARKLAALFWCLLTREEDYAYGQPSLTAKKLRLLEIRAGSKGHKGIYTGTFVTRQRMRAAEKELASQAEAAYRRSVRDWHAAQTKKGAGATPGRASCGPSSGQAARQETAPNPAL

SEQ ID NO: 56783 - protein, 351 aa, unidentified
MTIVGGFDVHRKQITFDYVDDDGLVRVGEIRPATRTTLRHWLSEHCPAGDAEFALEGCTGWRYVVDELATAGVVAHLGDPAEIATLRGPKKRAKTDRADARLLRTVLLEGRFPESWIPPAHVVEVRTLGRLYCTLMDERRAWQQRIHAQLFHQGCPPIRALLSVAGRDALAQAELSAAGRQYVDTALGRIDELTVEIDPVRGQLVSFARRQVACQALQARQYGVGWLCAAIMWAEIGDARRFSSSDQLVRFAGLDVTVYSSADKRSPGHLSRQGSPELRWATFEAAKCAARHGSPDHAYYQRLATKHDGHNGKNPTLAVERKILRRSYHTLRELGDAALAMPVPEEQGVAA

SEQ ID NO: 56784 - protein, 343 aa, unidentified
MLDTETGEVVNLTVMHEGDKVREFYTQLPRPVLVGIEATGSMHWFLNLMEELGIKCRVGHPATIRAAAPRKQKNDRLDADLILRLLVENRFPAIWLPTKELLDLRALVLHRHQWVRIRTRIQNALQAIALANGLRRGPSLWSYDGQAKIAFLPLLPHASYRRSMLQEMYRKMAEEIENLTQRVVEQAGQRCGARLLMTHPGVGPVTALATEIFLGDPKRFVDGKALASYVGLIPREYSSGERQRLGKITKQGSPLLRFLWNEAGSHAVRHDPELKRFYRRKLVQKGLGKARVAVARKLGIRLWIMLRDEIDYQEFCRRGQKQHSGAACAGMPEVGYGAKSPAD

SEQ ID NO: 56785 - protein, 350 aa, unidentified
MIMGCDWHPRYQIVAWVEEETGEVMTRRLEHENGEARRFYASLPPGAIVGIEATFPSHWFERLLAECGHHRWVGDSARIRASEVRRQKTDTRDAEHILDLLLAGRFPRIWVPSIKERDLRQLLVHRMKMVRTRTAVKNQLHYLAMSQGVCRKRKLWSARGRAELEGLRLLPWASRRRQELLEWLDQLDRSVEELDRAVEEAGRGREGVALLRTHPGVGPVTGLAFVLTVGPINRFPNSRKLVSYLGLNPSEHSSGGRQRLGAISKQGNRMLRWLLVEAAQTAARLDPELHRTYQRLKFRRASGVAKVAIARRLAVRLYWMLRAQADYAQLVRTSGSPSSAVVPSKSGSTV

SEQ ID NO: 56786 - protein, 453 aa, unidentified
MARKAEKERTKDGLKLKIVNPNAAGIDIAYGEMQVCVPEDRDGENNRCFGSFTCDYEEIASWLKACGITTVAMESTGSYWVGLYFFLEEKGFDVLLANAKDVKNVSGKKTDEADAEWIMLMHSYGLLKPSFHPDAAARSIRELARHRDNMLRSAGKEIQHMQKSLVLMNIKVDTVISDILGKSGKAIIEAILAGNHDPKSLAQLADSRCKASKETIEKSLEGTWDSVHLFELKQSYDLYKYIHTQIADCEAEMDRLLTDYTDGNSTDMQGYVPTKKRVAKKNAISFDAEKHAFSLWGVNVMEVPGMSLGALAVLMGELGSGFAEKFTSAKSFCKWCNLVPNNKISGGKLLSSKVPKQKNRVGQVFRLCANSVKSVKTGLGVYFRRQKSKGGHLQAIVATANKIARIFYVMVTTKTPFDESKVGLDEKELLQRKIALAQRTLDRLNLRLSVAEG

SEQ ID NO: 56787 - protein, 334 aa, unidentified
MGKITTVGIDLAKNVFSVHAVDETGQVVLRKSITRARLMQTVAQWPACSIGMEACSGAHEWARRFQGLGHAVKIMAARFVTPYRRNGKNDGNDAEAICEAMQRPSMRFVPVKSAEQQAILSVHRVRQGFVEERTAMVNRIRGLLAEFGYVMPQRTAEVRKGAAAMAEELPVLARDAINDLLHHLNALDERITGYDRQLEHLAKSNEATKRIMGVPGVGPLTALATVASVGHAHEFSSGRQFAAWLGLVPRQWSTGGKPRLGRITKRGDAYLRTLLIMGARSALQMAAGRSDKLSRWAMALKERRGYHKAVVALAAKNARIIWAILSRGTQFNVA

SEQ ID NO: 56788 - protein, 406 aa, unidentified
MSRQTTRGPGPSSTLVTLDQAGNVVGIDPHKRTLTATIIDPRGGLIASEHFRVSGDGHRALEAWALQFGPIVRVGVEGASAWGRHTAIFLIARGYDVRDVCPNRTAQHDRARQRGKSDTLDCERIARETLAHPLLPKAFKRAGQDAGPDQQTELLAVWWTARCSVIKRRRHLLTESEALLRELPLELIERLPGAKRVRPRLAALPRVTARRRLAPPAAVRVRILAGYREQIAELDAQERRITRQLAELVSQSGSTLGELCGLSTVSVAELLVEIGDPRRFTEGGFARFNASAPLAASTAEGPGEPVRHRYNPGGNRRVNAILHRMAVTQLRCEPRAKKIYADARANGQHTKKEARRVLKRHLSDVIYRRMVRDVASLPAQPLLIAQPRAGAAQSRVARQGRAQRAA

SEQ ID NO: 56789 - protein, 384 aa, unidentified
MRSVCGLDVHKDSVYLCILSEDGELIEKVFGVLTFQLHQMRDLLLAHHVEKVSMESTSVYWIPIWRILAPHFHLQLVNPYFIKQLPGHKSDVADAQWIAECTMKNLISSSFVPPEDIQQLRQYDRRIFDLDEEIVRKLSKLDAVMQRCNIRLSNYVSNVDCKSYKDVVRKISEGVTDPEILIEVIHGRIIKHHGRETILASLTGVVSQAEIDVLRQLREELDLAEEHKQECLERMLEICQEKYPDELRRLQTIPGVSERTATSLIAEIGTDMSKFETANHLAAWSGLRPRNDESNRKFKSRRITHGNVYLRKNIIQCAWAASRTKDCFFSRFSYHQTQVRKKNKMKVIVAVARKLLVAAWHVIHDKTDYVDFQKQDRQSPASNG

SEQ ID NO: 56790 - protein, 349 aa, unidentified
MRIIGCDLHARQQTLAMLDTTTGEVLKATLEHGGNKVREFYSNLPRPVRVGIEATGSMQWFVNLMEELGIECLVGHPAEIRAAEPRKQKHDRRDADLLLSLLVQERFPAIWLPTKELLDLRALLRHRHQWVGLRVKIQNALQAIALANGLRRGSSLWTQAGQQAIASLRLSPHAACRRDELQAMYVQFETEIEKLNQRVEQQARERFGARLLMTHPGVGPITALATEVFLGDPSRFASSKELASYVGMIPGEHSSGKRQRLGGLSKQGNPLLRFLWSEAVIHAVRRDAELKQFYRRKLIQKGLGKARAAVARKLGIRMWIMLRDRIEYNEFCRRGQMQQKVVMPMRGCQ

SEQ ID NO: 56791 - protein, 349 aa, unidentified
MTTQRLSYVGQSVYVGVDVHKDTYAVTCVCNKQIVKTATAKADPAGLTASLSQWFPGARLYTAYEAGFSAFVLHRALTKAGIMNIVVNPASIAVAANDKVKTDRRDSKKLALDLSDGRLQGIYVPTEDEELARLLPRTRAQMVEHRATIARQIKAKLHQFGLIAPASRRLISNRYVREIDAWPLPPDLRVSLTFLAEQWRFATRQLIEMRRLLREQAKAHPAIEQVYRSVPGIGEVVARTLATELGDMTRFANERALCSYTGLTPSAYASGPSVRRGHISRQGSSRVRHLLIETAWRALPRDAVLKEIFDRIAATRGKKRAIVAIARRLTGRIRACFRQGTTYAVGTYA

SEQ ID NO: 56792 - protein, 508 aa, unidentified
MTISNLYWKISGFGTSSIYSRCNPQLLKLFEKAGHPAKVLCVALDYAKAQHTALICNGLGDLLKSSFAVANTAPGAAQLLREVRACAQARKVRGEHVFFGGEDYPSYAENFVRQLRQEQFLVVRVNAWEAKQQRDNFQASSDSLDLLGIARCCLHRRGESVRDLPQAYPNLRIATRDRDKLVRMRTAVSNRIHSYVDRLFGGFLSADQSGLEPFGRASLELMEDRFSPAQLRRRPRQALAQWLGRRGVTQAPEKADQLKQLAKRVLPPAPEQTAMLQQSLAQRVGLYRNLEQSIGRIDREVAYWLARTPGAWLTSIPGFGITLAAGWTAELGPPSQWHSVRQLCSYCGVVPKSKQTGGPDKEPVVGAVQQRCNKRLKNVVLQAAQKVIQYGPEELRETAQQLEARGAHTAFAIAKRLVRLGKYLATTGTVYRPKALMDPATPQATLAAHYQSVWEKLLPKWKDKADLREVFAPEHPLGQWRKMVQELYALELRLPQPRAAHPPSALAP

SEQ ID NO: 56793 - protein, 407 aa, unidentified
MGKDMDVFAGIDWGGDAHQICVLDADGTRLQQRRVTHDVPGLLALDRALDHYPGVAIAIERSEGLLVEHLLAAGRRVFCVSPKISARARERYRLANTKSDAFDAFVLADTLRHEHAHWRPLATGSRLWHELRAVSRDRDRILLAQHAAESRLRATLEAYHPAPLHLFSTLDRDISLAFITDYPTPEAASRVGQARMGRFLTRHGYSGRTPAEVLVERLRPHLLSASPGTVAGKTLAASVFTEQLALLTTHLRAYDRRLDQLLAQHPDASVLFSFPGLGPVTAATLIAEMGEDRARFPSPGVLLAEAGLAPVTRASGRTRQVRFRYAANRRMRHAIDWWTWVAVREDPWSAHLYEQARAAGQGKYRALRGIGTRWTRVLWRCWHTRMPYQPDEHTTRHDYLRQIDQAA

SEQ ID NO: 56794 - protein, 466 aa, unidentified
MARKQKSNKSKKHKRPIQSLETIQPNAAGIDLGSREHWVAGPPQEDKVPNVERFGTTTPELLRLADWLTQQGVKSVAMESTGVYWIPLFEILDSKGFEVLLANARQVTHVPGRKTDMLDCQWLQLLHACGLLRGSFRPSDDICRLRALFRERNTMVDQRSDWVRRMQKSLDQMNICVHHAVSDITGVTGMRIIRAIVDGERDPQALARMRDHRCRKSEEQIAAELTGNWRSEHLFNLHQALKMYDQLCTVVADYDSEILSYIQTLQPEDNNDTAVPPPSTKAKARGIAKRGQEPLRQALYRFSGFDMTTIDGIGVDTASVVISELGLDYTMFPEEGNFVSYLRLAPNLSISAGKKVPSKSKASTCTRVASALRMAALTLRNSKTALGASYRRVAWRKGASVAVFATARKLAQLIYRLVRYGQAYVDAGAKAYETRFNQRRLKFYTKALNDMGYNVEPLAAAEANSG

SEQ ID NO: 56795 - protein, 315 aa, unidentified
MPQELFVGIDISKAELEVAVHGQEGNRTFPNDRRGIAKLIAFLEAAPPTLIVFEPTGGYELALAIALVAAELPGVMVNAKRLRDFAKAIGRLAKTDKLDAKDIAHYAQAIRPQLRRLPDDQERALRRLVSRRRQLLQMVNMERNRLELAPAAERKEINQHLAWLAKRVQSKDDEIDRMLRENPAWQEDEQLLRSVPGIGPVACSALLSELPELGTLSHKQIAALVGVAPYNHDSGKLRGHRCISGGRASVRSALYMAIVCAIVHNPPIHEFYERLKQAGKPSKVALTACMRKLLTMLNAMLRDRTPWQDNVTQTA

SEQ ID NO: 56796 - protein, 349 aa, unidentified
MNAIMNRSYLGKTVFVGTDVHKAKYVVASICEGEIVKRWTTVADPQTLAFQLLKYFKGAKIISGYEAGFSGFTLHRVLISHGIKNKVVHAAGIAVEANNKVKTDKRDAKKIAEELAAGRLCSIYIPTQEEEQKRSLSRGREQAVKRRRTIGNQLKMKLYYLGCDIPKGKKLSESFLKWCENLDLAHEHKFALLELIDAWRQETERIRRFDKELLKQAGQDGLESIYRSAPGIGPVCARTLSNELGDMTRFDNERQLFCWTGLTPSEYSSGDHVRRGHISRQGSSRIRAVLVEVAWRAIAEDRDLELYYQRISARRGGKRAIVAVARKMAGRLRFCLTKGVEWGKMDLAA

SEQ ID NO: 56797 - protein, 335 aa, unidentified
MKNYKMIVGIDVSKLTLDAQLMFDPKDDRKIHLKVSNNDKGIKEIIKAIKSYKVEAQDCFFCFENTGIYSMPLSYNLSKNNADYWVVNALEINRSKGISRGKNDKNDAKEIAFYAFTHLHKLTLTTIPEREIAEMKMLFTEREKLLKTIRIMETTKEAQGFIPKEITKNVIKLNAKTVLLLKNQLKEIENQMNEIVVKNEKILNQQNLITSIPGVGKQTALYLIITTKCFDSFDNWRQLACYAGVAPFEFSSGSSVRGRTKVNHLADKKMKSLLNMCALSIKKYDKEIAEYYKKKVDEGKNPMLVMNNIRCKILSRVFATVNRGTPYVNLQKFAA

SEQ ID NO: 56798 - protein, 386 aa, unidentified
MARPENNLPAAAHDGAARCYLAIELSKRSWVIAASTPLSDKISRYTLTSGSLQELVELIERLCARITRATGQVVEVISCYEAGYDGFWLHRSLAKRGVRNHVIDPASLKVDRRARGAKTDRIDAERLLRSLMAYLRGEPKVWSVVRVPSIAEEDARRLHRERDRLIGERVQHVNRIKGLCAIHGIYDYEPMRLDRLRRLEQLRTAQGEELPERLKGEIGRELQRLALVLEMIRALEAERDAIVTDAAPAQLNADKIRRLNELRALGPEISTVLVGEVFYRSFNNRRQVGSYVGVTPSPFASGTIAREQGISKAGNPKARRTMIELAWLWLRYQPDSALSVWFRERVGTMKGRIRRITIVAMARKLLVALWRYLETGLIPPGALLKA

SEQ ID NO: 56799 - protein, 363 aa, unidentified
MLILAIDLGKAKSLACWYQTGDATHEFRAVPTRPGDFHTLLTDRPVDRVVIEICDAAGWIVDLCRTLGIAVQVANTNQQAWRWKNVKNKCDRGDGLKLARLSAMDQLSLVHVPEKTVREWRSLILYRHKLIDRRTSVRNAVHSILVAQGKAIPGRRSVWSDGTMSKLAALAKPLCECTTMEELWRGHLKMELEHLDELCRRVVELDQKLDALGAADERVRRLRTIPGVGPRLSELVVAMIDDPNRFASARQVSAYAGLVPRRYQSGEMDRSGRISKAGCGKLRKLLTEIAWGMLRHNPHGRGVFDRISKGQKTRRKQAAVALGRKVLCWCWAMLRDGTEWHVPTPRERATHHAVPLLPACTTG

SEQ ID NO: 56800 - protein, 361 aa, unidentified
MDKAHIIFYPALNTKKEVSIMSNIKYFIGLDMACESFAASIYQSPETQPITKEAITNNPDGFNMLISWLKSNNISKSNSIVCMEATGVYSKAVTCYLIAEGFNVCVEPPLKVKRAFEPYGHKTDAVDSKKIAEYAYRYKDELHLYKPKDEILEKIRQLLSARERFVKQSTAIQNALKAYEKEPIQVSLIVKSNTQTLHQLKKHISDIDKELDKFSHQNPNIFQNTNILKSIPGCGMLLTANLMAITGNFEDIKDHKHLAAFIGIVPYQHQSGTSVYKKPRSRHFGPQTTRKLLRLAAQSVATHNSSFRQYYLRKQAEGKAKALVLNNIANKLLKIACAMIRDNKSYIKEHCSIHPMCLKTA

SEQ ID NO: 56801 - protein, 319 aa, unidentified
MAQNDLVVAGIDVAKDKVDVCIRSLSLKRTFASTTQDRRELTSWLRRNEVGKAVMEASGGYEREWAKALRNAKIEVRIVDPKRVRSFARSAGRLAKNDTIDAEMIAWFAETFAEARGQAYDATREQLHQMVHARQALKDMQSKLTSQGEHAAPAAVQRIHARIVKTIAVELVKIEAEITALIQATAHFAKLAEIIESVPGIGRVTSAALIAAMPELGKASDKIVAALLGVAPYDDDSGRRRGERQIRGGRRRTRNVFYMACLGAATQHNPVLKAFYDRLVAKGKLKKVALTACMRKLISILNVMIARREKWDAKRYAVN

SEQ ID NO: 56802 - protein, 340 aa, unidentified
MRALYAGCDLHGNNNLIGIVDGAGKRVFKKKLSNDLSLVRETLKPFQQELVGIAVESTYNWYWLVDGLMEVNYKVHLANPTAIQQYSGMKHSDDNHDAFWLAEMLRLGILPEGYIYPKQERSLRDLLRKRGHLVRLRTSLIISLQNILCRNLGRTMNVNDMKAVKEDRVSPLLEMNEDLALAGRVSKEAIDHLTQQIRKIEWVVQKRVILKEPYRYLLTLPGVGKILSLTIMLETGPIDRFETVGEYVSYCRKVPSQWMSNGKCKGAGNRKNGNRYLAWAYSEASDFARQLYPEARAYYQRKMQKTNAAVAHSALANKLSRAGYYVMRDQVPFRPEKLFG

SEQ ID NO: 56803 - protein, 338 aa, unidentified
MDAPEFYVGIDVASETLAVALTQGPGRTTARPLAVANDPGGFAALAAWLAEHGAAPSDALVCLESTGVYGEALCYWLHDHGFRVVVEDAAKVRRAVPVAGAKTDSLDAQRIADYAARFLDELRPWAPAEAVVEQVRTLLTMREQLTRERGAKQNAQRMLARKVVQTPLANQIASDAVAYLKDRIAEIDREVRRLVGEHPTIGPAVALVMSVPGVGLLLASHLCVATGGFSRPLAPKQTAAWLGICPLEHESGSSVRRRPRSRGYGPSAIRKLLYLASIRLVSIEGSPYHTYFHRKKAEGKNGRLVLNNVGNKLLRVTAAVLRDGRPYEAGHVSVRPAI

SEQ ID NO: 56804 - protein, 342 aa, unidentified
MKQYVGLDVSQKETSVCVVDEVGQVLFEGKAKSDPGALTALLRKRAPQAERIGFETGAMASWLWHELRRVDLPVVCIDARHAHAALSVRMNKSDQNDARGLAELVRVGWYREVKVKSEESQKIRAILVARSRLVAIRRDIENQVRSLIKEYGLLFPRAIGLQFRNQVCELLGEDHQLLSVIAPLLSIHEQICKQQSKFDDEVRQLAKSDETTRRLMTVPGVGVVTALTFRHTIDDPSRFRSASSVGAYLGLTPRRNQSGETDINGKISRWGDRLLRTYLYEAATVLLYRTKKWSNLKAWGMKLAKRIGMRKAKVAIARKIAIVLHCIWVDGTSFDWGQAREA

SEQ ID NO: 56805 - protein, 391 aa, unidentified
MICVGIDVAKDKHDCFIISSEGVVLADVFTIPNNRGGFNCLLGRIQACAMPGNEIKVGLEATGHYSCNILGFLLDNGLDSFVINPLHTNLYRKSLSLRKTKTDRVDARTIAAMLMSDVGLKPYTDTAYHNEELKSLTRYRFDKVKERAQLKQSVARLVCILFPELEKLVPTLHMASVYALLDEFPGAQQIADAHLTHLKAVLHDASKGRYGRDRAIELREAARASIGCRMPAKSLELRHTIRLIRELDAEIDEIESAIQQIMDEIHSPITTIPGIGTRMGAMILAEVGDFSRFDSPDKILAYAGLSPSTYQSGQLTNCYAHMEKRGSRYLRFAIFNATKYVCLWDPTFAAYLAKKRAQGKHYNVAISHAAKKLVRLIYALEKSREPYHQAA

SEQ ID NO: 56806 - protein, 428 aa, unidentified
MNNQERIKYERYCQFRREIRGSMEHLIVGIDIAKDKHYAFFGTSTGTTLFKRLIFDNNLEGYKKLLARVDAIKVQHCLSKVVFGLEPTGNYHKPLGAYLDRCDFMVVIVSGVAVKRNRELLDGRWDKHDTKCAANIADLISQGKCLFYDSPSKEIIDLRNLLSLRKRLKREEHSLRMRIRNNLLAKYFPELDKFYGQCESENLAIVRWCLDPRIIADMEFDQFFKMVTTRERGIAQKKRLRAIWDSAPDSVGCISGESSEFEAEILVEKLRQVRQVIEKTEDLIKNVSKQFPEYSLLLTIPGVGPYVASVILAAIGNPYRFKNRKQVLKLAGYDLSANRSGKTSKAAVPVISKKGNSNLRYALYQAALVASVRNIHFLTYYTNILRGREREKGIKTKMRVRLAAKMLVIAWTMMKKKESFNPDCLTRK

SEQ ID NO: 56807 - protein, 378 aa, unidentified
MKRILKIGMNIHTTNYTLCAMEPIIGEDDRVFATIKVTPDYKNILMFIENLKLKLGLNDEYDIQCGYEAGCLGYSLYNQLTAAGVKCVILAPTTMLTPQGVRIKTDMRDAYMIAQCLSYGGYHAVYIPTEDDDSVKEYLRMRNDHKLALKKIKQQINAFCIRYGFCYDGTKWTQAHLKWLKKLEITNGLYRETLNEYMASYEEQEAKIERYDKRIEEIAEQTKYHDKVKKLECFLGIKTHTALSLIVETGDFERFAKGNQYAAYLGLAPGENSSSDSIRRLGITKAGNSHLRQLLIEASGGICKGAVGHKSKELRARQNGNTADIIAYADKANTRLRSRYYKFIRHGKKRNVAVAAIARELACFVWGMMTDNIEMKVA

SEQ ID NO: 56808 - protein, 377 aa, unidentified
MKIFIGIDFAKEKFDAALIAADSAKGEPIEYGVFENNDKGIRKMLKWVKDTHPKSKREDLVFCGENTGVYSRPVAEFLSSKGYKICIENAYRIKQSSGLIRGKNDRKDAAIIADYILRHEDEAAEFKSEKPVLKNLDTLFKQRRFLVKQASETKCKLESLDFEAGRKYELSATLDKYCIIKGSRLTLKFDKLASLSVSDTAVVECLAMLKIYEWQTDELDRKMKETIEEDDDVKENFDIITSIPGVALQNAVAMILCTDNFEKFGFDARKLACYYGVAVFGKESGTSVYAPPHTSHLANKQLKSLLTQAAVVSVTHCKPIRAYYSRLIAKGKKQQVVLNNVKNKLLHMIMSMVRHRTKYDEDAYGKSAKTYNTQICA

SEQ ID NO: 56809 - protein, 422 aa, unidentified
MLEETHDNDQIIQRVAALDVGKAELTCCIRVSGQGSSGKRLQEVRTYPTMTRWLLVLADRLAELGVTRVVMEATSDYWRGAFYLLEAHGFETWLVNARDVKHLPGRPKTDTLDAVWLCKLAERQLLRPSFVPPRPIRQLRQVTRYRADLVAARTAEKQRVEKLLEDAQIKLSVVASDIFGVSGRAMLAALVAGERDPKRLAQLARARMRAKLSLLEEAFTGFFTDQHAFLLGKMLGRVDALDADLAELDAKLAELIAPLAHAVERLDEIPGVGQTAAHLLIAEIGADMTRFPTAGHLVSWAKFAPGVKESAGKRKGRGSTGHGNPYLARVLGEVAVAASKTDTFLGERYRRIARRRGKKRAIVAVGRSILVIAWHLLSDPEAHFHDLGVGFYDTRIGPERAKRNHIRQLEVLGYKVTLEPAA

SEQ ID NO: 56810 - protein, 333 aa, unidentified
MNMIGIDVSCKELVVVAMVKGKIRKAKSFDNTPAGHQSIIKSLTKLKGEAKVCIEATGIYHFDLSVALSRADGIEVMVINPKAAHNFAKALMTRSKTDAIDAENLAIYAERMPFEAWERPADECISLRAIARRIAALSKQKTQTKNQLHALESTVETPTLVIEQTQQLIEMLDTQIKTLRDSALNLIQENEDLKRAYTLITGIQGIAQASAIQILSELMILPKDMTARQWVAHAGLDPRIFDSGSSVSKKPRVSKVGNKYIRQALYMPALVACRFEPNIKGYYHHLIDDNGLKKVQAVCAVMRKLLHAIHGMLRTNKEFDGARFYTLPTKTNS

SEQ ID NO: 56811 - protein, 361 aa, unidentified
MLRQRTFVGLDVHARSVVGHAMDEHTGEVWQRLLPVDPPGVWGWLESLPQPVKVTYEAGPTGYSLARFLRGRGVACLVAAPSKLVRPAGNRVKTDFKDAEHLCRLLRLDEIVEVILPDAEQEAARDLVRAREDVRGDLMRARHRASKLLLRQGIVYPGRKTWTATHQRWLQQQRFDAPPRQLAFEDAVEAVLLTTDRRDRLDAAIEVMAADSSYTPLVRRLCCLRGISTLTGFGLAVEIGDWHRFSGSSIGAFLGLVPTEDSSGESRSQGSITKAGNGHARRLLVEAAWHHRKSYRSPSRDLRNRWQLAPGPARVRGHEGNRRLHSRWQTFQARRKKDTIAAVAIARELAGWAWSLAVMDD

SEQ ID NO: 56812 - protein, 384 aa, unidentified
MTEQSAAATAFDHHSTLVLALELSGKGWQVGAVLPGVARRPRRSVAPRDVAGLLAQIERWKAEAQRAGRTVLRTVLAYEAGRDGFWIARCLLAHGIEVQIMHPASIPVERRGRRAKTDRIDLDMLLRTLLAWLRGEPRVCSMVRIPSETEEDMRRPERERERLVSERIALENRIENLLCLHGIAGFKPRLKKAAERLDGLRSFAGAPLPPMLREELKRLMMRHRMLSEQLREIEAAREQAAMAAEPDCAVQQIQMLARLVGLGLATASGLTREVFCRSFADRRAIAGFVGLTGTPFNSGGSEREQGISKAGNPRVRRILLQLAWRWLRFQPDSALSCWFVERTGGAKGRIRKIMVVALARKLLVALWRYVETGEVPAGARLAAA

SEQ ID NO: 56813 - protein, 345 aa, unidentified
MEHYAAIDVSLEWSSVCVVDAAGQIVREAKVRSEREALVAFFAESGLSFARIGLEAGPLSQWLYAGLVEAGLPVILIETRHVKAALKTMTVKTDRNDARGMAQLMRMGWFRPVHVKAPMVQEIRALLTARKLLVAKLRDVESSLRGILRGFGLKVGAISKGKFEARIRELVAGQGMLERVAEPLLRARASLCSEYATLHRELLRIVREDEVCARLLTIPGVGAVVAMTFRSAVDQPERFAKSKAVGAHFGLTPKKYQSGEIDRTGRISKVGDAMVRTALFEAANVMLTRAVRLSALKAWALRVASRQGMKKAKVALARKLAVVMHRMWVDGTTFRWGKAGVAVAA

SEQ ID NO: 56814 - protein, 341 aa, unidentified
MEQVSTIGLDLAKHVFQAHGACASGAVVFRKKLRRDQVLAFFAGQPRCVVAMEACASAHHWARTIRELGHEVRLIPPAYVKPFVKRQKNDMADAEAICEAAQRPTMRFVAVKSEAKQASSVIFRTRDLLVGQRTQIINALRGHSSEYGLIAPQGPSHVERLIGHIEDPASGIPDAARSCLARLVEMLRLLQVQIAALDREIAERAKADDAARRLMTVPGIGPLIATAIEALAPPSETFRSGRDFAAWVGLTPVQRSTGGKERLGRTSRMGERTLRRLLIVAASGVVRWARRKGVPAGSWLARMLARKPPMLVIVALANKNARIAWALLTKGGTYRAPAVAA

SEQ ID NO: 56815 - protein, 402 aa, unidentified
MQVWCGVDWAEHHHDVAFVDDDGTLLVKQRITDDATGFRQLLELLTVQTALSSKPISVAIETSRGLMPAAIMAAGFTVYAINPLSVSRYRDRHSPSRAKSDAADALVLANILRTDRDNHRPVPADSELVKSLRVLARAQQDAVWDRQQVANKLRSLLREFYPAFLACFPDLTLMGARVALGLAPSPARARMLRKSSVAAGLRRGGRTRGVDAEAERIVTGLRQEQLRQLQQVEDAMSLQAQAYLHALNAAIDNVTNLEASLTAVFERHPDKAVITSFPGLGVVLGARLLAEIGDDRTRFADARGLKAFAGTAPVTRASGLKTSVTMRVVRNKRLHQAAYLWTLPLLVHSPGARAHYDRRRARGDSYSAAARNLGNRHLGMLYHCLQTRQLYDENKAFPTPQA

SEQ ID NO: 56816 - protein, 431 aa, unidentified
MSKFFYRSTVGIDVSADFSVAAILSPDGEVHRKPFKINHNRNGFDYLVDQIKKAEKEFNMKTAIFMESTGVYHLTLFHFLKDTFETCILNPLITNCNKNVDIRKVKNDKKDALTIAKIGKFQDVKYSCNFDIEIYTLKSLCGDYYKFTDSKSTFKKKLSTDLRVIFPTYNTVFSNITSKTLIAILKTYSSPEAILNADKNKLIKLISAHSRKGQVYSENTYKKLIDAAGEAVYIGLNSPSLFVKIINTISIMEALEIQIENLLKEIHLLMRSNRISAEFKKNVQLIYSIPGVGELTATTIMSEIGNIKSFVKPKHLVAYFGIDPSVSQSGKFNSNKNVMSKHGTRIGRRALYAVALASIRKIRNDEPINKVLLNFYKENMKGKNKKVDLVAIMHKLINYIFSVLKNQKEYELRDPKIHVKMHLNKQSNSAA

SEQ ID NO: 56817 - protein, 380 aa, unidentified
MQPTQGNDITANEVTLCVAFELSRASWKLAFHDGKRDTPAIVTVRAETPQARLDEARAAIEAIGRKWGLCMDTPVAMVYEAGQDGFWIGRALCKQGMDVKVIDPASLPVQRHARRARTDRLDAIRLVNSLRAWLRGERDVMHVVRVPDEQAEAQRHLVRERGELQKEITQHQDRMRKLLRTVGCWDAIGTDFALRLAQGQVRCHNGRALPAELAQRLQRECERLALAQQQLQALEETLVQQLPAPAQQKIAQLSRLKGVGQVGAMRLVLELFWRRFDNRRQVGACVGLVPQPYDSGESRVDQGISKQGNRRVRSLLIEMAWMWLRYQPKSALAAWFAQRTQGQNKRGKRVAIVAVARRLVIDLWKYLEHGVVPQGAAMKG

SEQ ID NO: 56818 - protein, 349 aa, unidentified
MLADELDYVVGADTHLDEHVLAVVAAPAGAVLAKQAVPATARGYQEALRFVEEHADGQRAWAVEGAGHYGAGLARFLAGRGEPVLEVSRSPRAERRLRGKDDSLDAIRVARALLSSETLALPRAGQRREALRLLLIARRSAVDVRREALVQLRSVIVTAPDSLREDLRGLPVGRLLEHCRRLRRSGCASADELATRLVLRSLARRIEAATAEASELEAEILGHVRALAPKLLDEPGVGPIVAAQVIVAWSHPGRVRSEAAFARLAGTAPIPASSGRTTRHRLSRGGDRQLNRALHTVVLHRRQHDPATRAYIERRVAEGKSRREATRLLKRYLARHLYRLLQKQEPLMA

SEQ ID NO: 56819 - protein, 337 aa, unidentified
MKRYVGVDLHRTQFVVCTRWENGEHEIRQWRIGELAKFVEQLRKEDQIAVEAMGTTARFYDAVVKRVERVAVVNPHQFKVISESVKKTDRYDAQALALYLEKDLLPEVRMKPKQNRELMHLAETRDLLVKQRSALKGKINNLLAMQGIELKREALSSKIALERVLALPVSGMVQLELRVLVEQIRSLSESIAELEERLEEEGQQLAGYENLTSIKGIGSLSATVLLTTIGKISDFADENKLAAYLGLVPRIANSNESERSGRITKQGNKLARTALVQCGLVAKRYSPYLQRFYERIKQRRGGGKAKIALARKLVKIVYDTLKNQWVFEDFPSFTLAA

SEQ ID NO: 56820 - protein, 318 aa, unidentified
MEFILHNCCGLDVHKNTVVACILKTSNFSVYNNNTEVEKQIRKFNTFPDELLQLKHWLEQEGCRHVAIESTGVYWIPVYEVLETAFDGEIEIVVTNARHMRNVPGKKSDVKDSEWIAELLGCGLLRSSFIPPQNVRELREVTRYRKNIVHDIGMQKNRIEKTLQMAGIKLSSIISDIFGVSGRNLINVLVNKGHLTPEDVEREARYIVKEKQDKIKIAINGNLSQPKRDFLKVQLECLDYLLAHLITVESSIDKLSTPFIEEVERLVTIPGIAKTSATAIIAEIGTDMSKFPTAEHFTSWAGLAPGSNESAGKKKAHI

SEQ ID NO: 56821 - protein, 410 aa, unidentified
MEQIFERVAGLDVHRDSVSACARVPGPRGGTVSLKARYATTTSGLAELADWLGSGAVSVVGMEATGVYWKPVFYALEDRFDVWLCNAHHVKNVPGRKTDMSDAAWLADVVAHGMVRASFVPPPPIRELRDLTRYRKRQLDTRAAEVQRLEKVLQDAGIKLTSVASGVLSMSGRHMIEALIAGQRDPVVLAEMAIGRMRNKLPELTEALSGHFGPHHAVTARQVLDHIDFLDAGIAAIGEQVSLRMTPFSAAVGLLVEVPGLSQRSAEVVIAETGGDMTRFPSPAHLASWAGVAPGNHESAGKRRQVGTTNGNRWLRRTLIESARAAARTKASYFGAQYAQIARRRGPNKAAVAVAHSLTDVIWHLLSTGERFNDLGADYFERRRDPAREARRLINRLEALGHTVTLTPTS

SEQ ID NO: 56822 - protein, 337 aa, unidentified
MFTERTSVGLDVHARSVAAAAIDGATGELFQTKLTPAHDDIRSWIQKLPGPVAVAYEAGPTGFGLSRSLAAAGIRCQVAAPSKLQRPAGDRVKTDAKDAVHLAKLLRLDEITAVAVPSVEQENARDLVRVREDCRGDLMRARQRLSKLLLRQGIVYYDGNAWTGRHDMWLRRQRFDRPALQLAFESDYETVITTTARRDRLDAAIEAMAADSEFTDVVRRLSCLKGVSTLTAFALAVEIGDWGRFTGNSIGSFVGLVPSEHSSGSSRAQGPITKAGNTHARRLLVEAAWHHRARYAPARPCVNGGNSPHPQPESAATKATDGCTPAGSGSPIARRCP

SEQ ID NO: 56823 - protein, 349 aa, unidentified
MEHGGIDVHKNESQICLQTEQGEILEQRIHTRRDRCAAVLGPRPRARLLIEASTESEWVARCLEELGHEVIVADPNFAPMYATRSRRVKTDRRDAQALLDACVRGSYRRAHRTSEAQRQVRALLTVRENLVRTRARQIQVLRALTRREGLRVRSGEAASFERRLGELDLPECLRAVMGPVLATLEPINQQVEAAERAIQQVVQGNALVRRLRTAPGVGPITAVAFVAALDGVERFAGPHQVECYLGLVPREKSSGERQHKGAITKAGNPRMRWLMVEAAWRVLISRDASGEELRRWAQRIAVRRGRRIAVVALARRLTGILYAMWRDGTDYDPRRSCGRATPGATMAVA

SEQ ID NO: 56824 - protein, 348 aa, unidentified
MHKVGAWSPLAHALLSLREVNPMTLPTLGLDIAKAKFDAALLQNDQLKQHVFSNDSKGFRQLAKWLTKAKATQVHACMEATGTYGEALAQFLYAAQHTVSIVNPVMVKGFAHSELLRTKTDKIDAALLARFCLKQSPRAWTPPPPEIRELQALLRGLESLNQMHQMEANRASSGILSPTVQASVQATLEFLEQEIRNIKKQIHDHMERHPDLKRQRDLLDSIPGIAEQTAAMLLAEFRDIPSFESACEMAAFAGLTPKHHQSGSSVHGKSRLDKMGSARIRKALYMPAIVALRYNAVIQTFGERLRTAGKHSLVIIAAAMRKLIHLAYGVLKSGQAFDPDWASRKIGA

SEQ ID NO: 56825 - protein, 400 aa, unidentified
MNRTRTVAGLDVHKDSIYLCIMGYDQAIIWENTYGVLTPDLRQMHHDMRAHGVTEAAMESTAVYWVPVWTELCESMELRLVNPYFIKQLPGRKSDVKDARWIAECLLKNLIKGSFVPEPIVQDMRKLNRRIMDLCEDTTYNSNKLDAALQRCGFRLSNYVATTKSKSYRSVLKAIIDGQTDPDELLRLVHGRILNKHGRERVKAALTGSFSETDLIVLRQLKETLDLIEKQTADCQQELVRLCKEHYPKPYERLQTIPGVKERAATAIIAETGVDMKMFATAASLVGWCGLKPRNDVSNGRFKSRKVTHGNRYLRQILIEIAWAASRTRNCFFSHFSYLQTTVKKKNKMKIQVAIARKILVAVWHMLSKEEDFIDIYLKRQEELKRTEGQIKLLESYMAD

SEQ ID NO: 56826 - protein, 340 aa, unidentified
MSLVMGLDQHRAQISAEWIETVTGEVSRARVAPADRAAVRRFFAQFKGQALEVALEATTGWRFVVEELQRVGAEVHLAEPAEAAALKGKKKRAKTDWADARHLRELLLIGRVPESWIPPAHILDLRARVRTRHLLSHQKTEWQQRMHAVLYHHGFPQRRNVLSVANREWLAGLALPAAAREQLTIALHVVDALDQRLIPFDRELRAFARSQAGCRALIAQLYGVGELTGVTILAELGDARRFANSRDVVRYSGLDITVYQSDAHRAPGHLSRQGPPALRWALYEAAQRARFPASPDRAYYLQLAERIGGNRACLALARKLLKRSYHILKALGDQALAPIA

SEQ ID NO: 56827 - protein, 284 aa, unidentified
MHYIGVDYHKKYSYVVVKNREGKVEQRGTVNNTKEEFRQALKPYQTGKAVLEATRNWGLIYDWLEEILGDVALAHPLKVRAIAEARIKTDKISADILCDLLRSNLLPEAYVPNKETRESENTLRQRMFFVRVQTMVKELAKGDKKVKLLRSIPGLGPFFSVLVAKEIDDISRFRDEKKLCTYAGLVPSTYASGGKVFHGRITKMGNKWLRWAFIEAVQPAVSCDADLFAYYQRLKMKKGANAAKVATARRLLTIVYRVLKQERLYERRNRRAIRSLAPAALVTS

SEQ ID NO: 56828 - protein, 426 aa, unidentified
MSIAQNAKIRQVSEKTIVVGVDIGSETHHTRAFDWRGIELSKVFSFSSDAEGYESFDAWLVKLKSAYGKSAVIVGAEPTGHYWFTFGEHLKAQKVKLVFVNPMHVKRTKELDDNRAGKSDLKDPKTIAQLVREGRFLEPYIPEDIYAELRVMNDARIRITDEMTAIENRVKRWFAIYFPEHKKAFGSWDCESSLIVLKTASLPKDVVALGADGINALWREKKLRAVGKKRANILYDTAKSSVGVTTGENAARCEMSMLLEDYESKRSQFGRVLETLETLCIQVPGAKKMLAMKGIGLLTVSTFFAEVGDLSRFRSPKQIQKLAGYAIAENSSGKHRGKTGISKRGRKRLRWALFQAVMSLIRHQAGFAQLHKYYTARPDNPLKSKQSKVALACKLIRVFWAIVKKDADFNSNKMMCDIVRNLPSAA

SEQ ID NO: 56829 - protein, 430 aa, unidentified
MGLIVPTAMPPEREDQPMPYEWFVGIDWGSQRHQICVLDRNRRRVGERAIDHDGASLAQLAAWLWTLSTGQPQRVAVAIEVPRGAIVEGLLDRGFHVFALNPKQLDRFRDRHSVAGAKDDRRDAFVLADAVRTDQPSFRRLHLDDPQLLRLRELSRAEETLLEDFRRSANRLQDQLHRFYPQMLQLCSAADASWLWDLIELAPTPAHAALLSEEQVQRVLKAHRIRRVTAHEVLTCLQAPALPVAPGAAEAAQAHCGFLLPCLRVLAEQLQSCSQQVSVLLHTLAEELGEGEGPSNVAIVLSLPGVGRKITAWLFAEAAQPLAERDYQVLRTHGGVAPITKQSGKRRVVVMRRGCNPRLRHALYHMARVAMQRDAHFRRVYAALRAKGQRHGQALRTIGDRLLRILMAMLRDRTCYDASRIRREPVGQMG

SEQ ID NO: 56830 - protein, 360 aa, unidentified
MAKARTVVGLDVHATKIVAAVLDAEAGQLQRFGMSGESTTAAAFCAGLPRPVRVAYEAGPTGYGLARELSRRWVECVVAAPSKIPRASGDRVKTDRRDAEHLVRLLFAGKLHAVRVPGPEEEALRDLVRAREAVRLDLMRSRHRLSKLLLRHGIRFDDGKAWTDRHRQWLATITLPWPAAQATMLDVRGAIDALTHRREQLQREIVGMLPASPWVVQVGRLRCLRGVDTLTAVGLCAEIGDFERFARAEQLMSYVGLVPCESTTGQQRRLGSITKTGSEHARRLLVEAAWHYRPRPKIGKALGDRQDGQPAHAIAIAWSAQQRLHRTWKRLEQRAKRRTIIAAAAARELAGFAWAITQIE

SEQ ID NO: 56831 - protein, 345 aa, unidentified
MSPIMIGLDLAKNVFQLHGVDGEGKVVIRRQLRRAQVEPFFAALGPCVVGMEACGGAHHWARTLRRLGHEVRLMPAQYVKPYVKRNKTDGRDAEAICEAMSRPTMRFVSVKSEDAQAVLAMHRTRALLVRQRTMGANALRATLAEFGIVAAQGNAGLRTLMEQVGSQTCPIPAPAQAALSLLARQWEQVDMAVRELDRRIGRVAREQEAAQRLMEIPGVGPLGATAVLAKVTDVSVFRTARDFAAWLGLTPRESGTGGKQRSGGISKQGDRPLRQLLIMGARSWLNQVRMRGTDDRWLLDLLARRPVKVVVVALAAKMARIIWALLATGQHYRAKAHRAAVAAAA

SEQ ID NO: 56832 - protein, 336 aa, unidentified
MEEAPRRSSTDGFAFFLGIDVGKTALELALRDGEEIVARTTVSNDPEGHSTLVSWLEDQGARPKKACVCMEASGDFEKAIAQRLYEEDYRVSVVNPRRIKGYASSQLQRTKTDSADAALIARFGQREDPRPWKPPSASESRLQELTRARQALKKEKTRAQNRLDEAEDKAVRKAHENLLDEIERQIEDLEEEIEEHIEEDSELNDRCSLLETIPGVGLQTAAIVVSELGAPEQFENARQAAAYAGLVPRHRESGTSVRGKPQMSKVGNGRLRRAMYFPAMTALRFNSAVKAFGNRLKERGKEKMVVVGAAMRKLLHICYGVLKSGRPFDPSLHPGT

SEQ ID NO: 56833 - protein, 367 aa, unidentified
MGEASTFVGLDVHKNTVAVALLRPGQPPLEWSLVNDAGGVCRLIRKLEREAEGPLSCCYEAGPTGFVLQRQLAGAGIDCRVVAPSLIPVKPGARIKTDRRDARKLAELLRAGLLTEVKPPTEEEEAVRDLTRARDDAQRDLTRARNRLSKFLLRRGCVYAVGRKPTWSAKYRAWLRVLTFSRRADQVVFEDYLLAVEQVEARLEALGDEIETFAQQDPWRERVQALRCFHGIDTVTAMAIVAEIHDPRRFAHPRQLMSYLGLVPSERTSGMRERRGGITGTGNRHVRRLLVEAAWHYRHKPVVGRLLRLRRTGQSPKAIALADRALRRLTLRQRRMLYQGKHPNLVNIAVARELTGFIWNVLHPATA

SEQ ID NO: 56834 - protein, 424 aa, unidentified
MKVTYQTCCGVDVHTSFLVATIVKTTGGIEPSYQKKRFSTFNNSILEFKQWLLDNDCHDVCMESTGKYWVPVFNLLEDDINVVIANPKWVKAVKGNKDDTKDSKWIGDLFRLGLVKGSYIPCKKVRILREYTRYRYKLVSCRSSEKNRYQNALTVCNVALDSVVSDIFGKSSTSIIDYLLEQSGSSINHEEIASKLLRSLKSKEDAVIESVEGYQMTDAQKYRMRLVRAHMDYITAEINDVDKMIENMISSNTDFENAVQFLCTIPGVKRDSAITIISEIGTDMSQFSSSRRLCCWAGLTPGSNESAGKKKSVRITRAGVYLKPALVQCAHAAVKSDKSPYYKKKYESLVKRRGKKRAIIAIARMILTAIYQMLSTGEQWNPSNLYKIDMPVALVEKQKAKAIKQAKKLLQREGLLPPDEPLAS

SEQ ID NO: 56835 - protein, 346 aa, unidentified
MLYAGLDLSRKRLDFHLLDADGATVEVGAAPPDADGLHRLTQRLDRYRTPICAAIESMNGARFVHDRLELAGWQVEIADAHKVKGLAPLACKTDRIDAWVLAELSRRELVPAIWLPDPAVRGERERARWRLHLVRHRSSLKQRVHAVLLTHGKPCPVSDLFGVRGRQLLARLALPEPWQGTIEASLRLIDELDREISGCERELRRLGADHRYVPLLCTVPGIGWVLAYTIAAELGDINRFPTPRKLTGYSGLCPRVYQSGERDLRGPLAKQGPRYLRWALVEAATHACTHPAYRDRYQQTKARIGKQRGAKVAQIDLARRLTEAIWHMLSRNQPFAPKGATDPLAA

SEQ ID NO: 56836 - protein, 400 aa, unidentified
MISVGVDVSKGKSTVCILKPYGEVVSSPFEIHHVEKDMEDLDNLLSKLDGEIRIVMEATGIYHLPVVTFLHDKGYFVSVVNPFAMKKYAKDNSIRGAKTNRLDSIMIANYGIEKWFKLQRYEGTEETYAELKLLGRRYRYYMELHVKALQELTHVLDYVLPGIKKMFNSWNEANGKDKLSDFVERSWHFDLITSMSLEKFTEEYIAWAKEKKYHRSRSKAEAVYELASSGIPTLSSSTPSTKMLVQEAVSVLRAVDSSLSLILTRMQELAKSLPEYSVVREMGGVGNVLAVKLIAEIGDVRKLHNAKALIAWAGIDPPPYESGQFIGSKRRITKRGSSTLRKVGYEVMRVLKSHSAPKDDAVYNYILKKESEGKSKKHAKIAGLNKFLRIYYARVMEVYQ

SEQ ID NO: 56837 - protein, 338 aa, unidentified
MKVYAGLDLHATNTYVAMIDAENKVLYKHRHSNDVPSILSALDPFKEDIQGVVVESTFNWYWLVDALTDHGYRVHLANVSAIKQYEGLKQIDDRRSSLWLANLLRLNILPTGYIYPKEERPTRDLLRKRLQLVRHRTSHVLSVKNILARNLGIRMKTYDIKKLRASEVSTLFADVEMRLAIMSSIGLIQHFQEEIDRIETVITKKFKVKEEFKKLLTVPGIGEILGLTIMLEVGHIDRFPTVGDYSSYCRCIRSLHTSNGKVTGYGNSRNGNKYLSWAYLEAAHFARRHHERIQRYYERKRAKTNKVVAIKAVSHKLARASYYVMRDGVDYDEARLFV

SEQ ID NO: 56838 - protein, 468 aa, unidentified
MSTQEAGRNGWQGVAAAQAELRQADPERVLISAWDIGKDVHMWFVRTVAGEVLVAPTKVASLASGYQQMRQALDGLLASGRFDLAVFGHEPTGVYHEALSQNLLQDYGAHCGGEAQPVVRYRWLNPALVKQERQRSTQRQRKTDKIDVAAISQLLADGQGYPAPALTDAESALRLTLRHVQHLVKRQRRLAIGLLRTLDRLWPGALGNASAYQRTHPELPPLLHLVDTHPLQRQRVRVLLEHCADPYALRALGVEGIRSLFSAHDERCGLQTAQHIYAVAQQSLLPPPSLCAVLAAQVQADFGQFRQLEAQIAAGETQAQALLPDTCGQVLTTVPGVGPAQAMRYLSGLGDPDRFATARQVWAYAGFDPNQADSGNRRHDGTISHRGSPYLRSTLYQIGYLTALHCADCTRLYVQGRQRGLVKTLAIIHVANKANRILFALLKTQEPYRSPLSAAEADHWRSLLSQVR

SEQ ID NO: 56839 - protein, 309 aa, unidentified
MDSTKYIGMDVHKEATTIAVMNSAGKLVMESIVETKAATIVQFIEGLRGELYVTLEEGTWAVWLYDLLKPHVTKVVVCNPRKNALLKTGNKSDRIDARKLAELLRAGLLSAVYHGETGLRTLKELCRSYLAISKDLTRTMNRVKALYRSWSIPCGGTSVYAPRHRKEWLRIPYIGPIRAALLIALMQTPHRFRTKRQLWAYSGLALETHSSAEYHYVQGQLQRSKRPVALRGLNQNHNHDLKSIFKGAANKAGSAKGPFHDFYTALVAKGMKPTMARLTLARKIAAITLIVWKRGVCFDAQQLKQQVSV

SEQ ID NO: 56840 - protein, 350 aa, unidentified
MNTKQSFVGKSVFVGIDVHKTTYSVCIVCESEIVGKAAMPADAQVLMRYLKRFEGAKIFSAYEAGYFGFKLHRTLEESGIENIVINPASIEIAANDRVKTDKRDAKKLAELLSLKRLRGIRIPTVAEEEHRMLTRTREQLTQQRTKVSNQILAKIRYLGLEIQDLPGHLGKHFIAQLLAAPLPDEIHSALKAMTTVWETLHQEIKTIDKKLAEQAKRDGEKETTYRSAPGIGPLAARTLANELGDMKQFKNERSLFCFTGLTPSEHSSGEKTKRGHITRQGASRLRYVLVEASWRAIKIDPILAAVFSNIATRRGKQRAIVATARHLVGKLRACFRKNELWKKELKTLAA

SEQ ID NO: 56841 - protein, 361 aa, unidentified
MRVYTRSHRFYCGIDLHARSLHLCILDQDGAVVLDKNIAARPETLLKAIAPFRPDLVLGAECMYAWYWVADLCSREQIPFVLGHALYMKLIYGAKAKSDKIDAGKIARLLRGGNFPLAYVYPKGMRETRDLLRRRTYLVRERSALFTHLQILNGQYNLPPFPKKLSCAANRAELQIADRFADPSVQQSATVDLAVIDVLDEQIGKLELYLTRTAKVDDVQTYHRLQTIPGVGKVLALVLLYEIHDIRRFASEGQFLSYARLVRPDHESAGKVVGAGNQKIGNAHLRWALGEAACLFLRASERAKKWKEKQLKKRAEKRVLAVLAARLARAVYHLWRKEEAFDESRFWQGQGVCGATQGKGR

SEQ ID NO: 56842 - protein, 312 aa, unidentified
MTEIVCGVDVSKRRLDAHVVRSGAFESFSNDAAGIAALADFCRQHGVQLVAMEASGGYERQPFLMLWAAGIPCGLTNPKSVRRYAEAMGILEKTDRLDASVIARFAIAKELKPTSPPTPLQQRLNALVARLRQITDDLTVHKQRRSSAMNDEMLASIDEVIAVLKRQARALEGEIASLIDDDPLWACLDAAFRTIKGVANRSVARILAELPEIGIYSNKAVVKLAGLAPLANDSGARAGQRHIRGGRAGIRSILFLVADIARRFDASLADFHRRLTAAGKKKMVVRIALARKLLVRLNAKAREARACYALAT

SEQ ID NO: 56843 - protein, 356 aa, unidentified
MSRDSKYIGMDVHKEAIVIAVLNDSGKLVMESIVETQASSILQFIYGLRGELHVTWEEGTWAAWLYDLLKPHVHEVLVCNPRRNALLKEGSKSDKVDAHKLADLLRTGMLRPVYHGENGLRTLRELARSYQTISKDLNRVMNRLKALYRGWGIACSGTQVYAARYREEWLHKIPHAGVHRRAEVLYQQLDGLQALRRTLRPELLAESRKHKAAKLLRQIPCIGPIRAARLLALMQTPHRFRSKRQLWTYSGLGIETHESAQYRYVRGQLQRSKNPQRIRGLNQNHNHEMKEIFKGAATRASCGVGPLRDFYVALLDKGMRPEMARLTLARKIAAIALTLWKKEERFDAEQLKPQAA

SEQ ID NO: 56844 - protein, 356 aa, unidentified
MINLSKPDFSGQHIYVGMDVHKKSWSISIMTEHSTHKTFSQPPDPAVLSNYMQRNFPGATYHAAYEAGYSGFWIHDQLRQNGIDCMVVNPADVPTKDKERSGKTDKVDCRKLARCLRNGELEGIYVPARVKVEDRGLLRTRRSMVRKQVRCKNQIKSLLAFYGIHLPNDIVHSNWSYKFIQWIQSIQMERASGNYVFKVYLYELEQLRRVVTALNRQIRILARTDEYKTNVQLLRTVPGISTLTAMTLLTELFNIDRFKSLDKLASYIGLVPDTDSSGETDIIKGMTNRKNRFLRFLIIEDAWIAVRQDPALLMAFERLTKKMPKTRAIIHIARKLLNRIRYVLKNQKEYVPAVVQ

SEQ ID NO: 56845 - protein, 394 aa, unidentified
MKLIGIDIGKNKHFFCVMDQQTGEIISQPVSFSNDKEGFDFLVQKIKSYPKDSILIGMEDTGHYHFALLKYLLDLQYTVALINPKTTDFNRKMQGGITKNDKLDTINICDVLDTPERKKQYRITKVNSFDLYEQKQLTKHHHNLKEEENVYKNRLQKCIDIVFPEFNKLFNSKYGIVYMNILKMFGSAENIANTDIRTIRKCFEIEGRGNRISLTPERLKECARSSIGISSSAEVIQIKHLTAQIELIEEQLTEIDKKIEEFSIQNNSPILSIPGISHFSGTSILAELGDISNYSKPSQIIKFAGVAPLHYESSQFNAQHTAITKKGSKYLRKTLYQIILPVIRHNPVFNKYYQLKISQGKGHRCAQGHCVRKLLRIIYHLLKTNQQFDPQLLR

SEQ ID NO: 56846 - protein, 351 aa, unidentified
MKKIFVGIDVSKKTLDASVIAPSLTEDKPVIISYGKFDNRPCGYRKIVSMARKAAKAVDDAEILFCCETTGGYDHALCDYMSDKHLDIWREHAARIAKTRPDHGKDDRKDSILIAEYAWRNRDRAQMYVPSSRSVRDLRQLLLYRRQLVEMRKQLNVRMTDLKATMQSDPTMSFIYSESEKQVKRLTDCIEKCESMIRETIDSDNEMLKNFGHIMTIKGIGLVSAVAIIAYTGNFKTIDVYKSFACYCGTVPFYEDSGTSIHKREYIGHKSNRMVRSYLIQAAHIATIYNEEMVAYKQRMQSKGKPAGIIVNNVANKLLRLVFSLVANDCDYEREHEFKREERLKKKTMSA

SEQ ID NO: 56847 - protein, 344 aa, unidentified
MGQYVGLDVSLDETKVHVLDEQGRRVWRGSCASTPEAIEVTIRKHAPDAVRIGLETGPLTTWLWQALTDAGLPMVCLDARQAKAALNMRINKTDDNDAEGLAHLVRSGWYREVRVKSREAMLVRSLLGARTQLLGMVTDLSNQIRGLMKTFGLVVPKGAGKIFEANVRRLLEGEALVAGVVLPLLESWRAVRARAADLDRQLLSVVRGSATCRRLMTIPGIGAVVAASFVAAVETPENFTTSRAVGAWIGLTPRRYQSGQVDYDGHISRRGDARLRALLYEAATAMLTRVQGESELRRWGLALKKRLGFKRAAVALARKMAVILHAMWKNGADFDPKAAASVAV

SEQ ID NO: 56848 - protein, 369 aa, unidentified
MGEYSEAFVAFDTSKVKHAVAIAEGGRRGEVRFVGDVASSPATVARLIGKLTGRYAKLHFCYEAGPTGYGLYRQIRELGHECTVVAPSLIPKKPGERVKTNRRDAVSLARLLRAGELTAVWVPDATHEAVRDLVRAREAAAQDLRRKRQQLLSFLLRHGRIFDGRKHWTMAHRRWLADQRFDHPAQQIVFQDGIDAIEDALARLRRLEEQLVAIVPSWSMAPVVEAYQAMRGASFLVAVTFAAEIGDVRHFDNPRQLMGFLGLVPRERSTGETVRRAGLTLAGNHRARRVLVEAAWSYRHPARVSQTMLVRLEGLPKAVRDIAWKAQVRLCGRYRRLSAGGKKLPVVIAAVAREMAAFLWAIGHRVAPA

SEQ ID NO: 56849 - protein, 329 aa, unidentified
MILTDPIHTCLGLDIAKAKFDACLLAGTRALHAQFENSKPGIAALRAWCKKHHAPAPLTVLEATGRYGELAATTLHAAGHRVHIANPRRIKDHARSLGRRNKTDRIDAALIAGFGLTRDLPDWVPASAAQQLLRAFMRRLAELQRILQAERNRIQTAAEPLLSKSITRIVRALEKEIAAIQAQIAAHVQSTPELREDVQRLCQIQGIGERSALWLAAEVPRHLPNGRAAAAWLAVTPRVRQSGTCLRATAPIGSEGNRHLRRVLFMAALVARHRNPRLKSFADRLAAAGKSKMAVLLAVLHKLIKIAFVILKNKSAYDPSHNAFSSPEN

SEQ ID NO: 56850 - protein, 339 aa, unidentified
MMTSFVGVDLHRNNFTYCIRVNGEERKIGKCEITELKGFAAMLGPNTAMAVEATGNTFMFCSSLKAHVGRLVVVNPSQFKVISMSTKKTDKHDAKVLAEFLEKDMLPEVRVKDDLQAKISSLTQTREKLVQLRTVLKNKVNNLLAANFIVLKREELSTEKGLLKALSYHFDPITDTEMLVVVEQIRSLNKSIEKLDKAIEDHGSKMDGFDNLKSIKGIGSKGAAILLATIGNIADFRSAKQLAAYIGIVPRVSNSNDTVCHGRITKSGSKIARTALVQCALIAKRYSPYLNAFHESVKSRRGGAKANIALARKFLDIVYRTLKNNWMFENFTQFKLVKN

SEQ ID NO: 56851 - protein, 374 aa, unidentified
MSSNLTNMKQYILKAAPAAQSVKSEKSSSAKRIVIGVDVHLRSYYAARKIDNAAVGTVAKFGSQEEFLLYVERQRQQAEEVVVLYEAGPLGYVLYRALKAQGVQCHVCAPDSTQQKQTRRKTNQIDARALASNLFNYLNGNERAVRLVRIPSPEQERARLISRQHDALVEERKRLGAKGNALLLSQGYGGCKNWWRPKAFERLSQGIASWVLELLKVWVPVLRQLDGLIAQAKAGLASRAQGARPKGAGAQSLVQLEAELLDWNLYSSKRKIGCLAGMVPSEWSTGTGQRLGSITKVGVPAIRRNVVEMVWRFKKFQPQYGPIQKWKEVLEGSNRTLKKKAVVAIGRQLIVDLWRLQTGRTSAQELKLIMIGGH

SEQ ID NO: 56852 - protein, 371 aa, unidentified
MYIVGIDIGKNHHEASIVSPEGKQISPSLRFATTHKGADSLMSFIFKNIGNSPCVFGMEATGHYWYPIYSFLKAKGYTIYVINPIQSDSLRKMYIRQTKNDSIDSFLIAEVIRFGQFGTTSMADENILAMRQLCRYRDSVISSRTEIKLRIGTIMEQIFPEYEKQFSSLWVSTSMGILEKYLTPENIENAPIDELFEITKDKSHNRLTRAKAISIKEAAADTFGIKIAQDAFSFQLKQLIDRMNFLDKQIEALDCQILEYYENFDCYLHTIPGIGMIAAATILAEIGDINRFKSSSALVAFAGIDPTVRQSGEFSSTHNHMSKRGSPYLRHAIFLAATTCSFHNSPLNAYYKKKRDQGKHHLTATGAVARL

SEQ ID NO: 56853 - protein, 436 aa, unidentified
MTPATADDAGNELLSETFAHNESGITALCDALVCFEVEVVAIERPDGVLVERLLDAGVQVLALHPNQVKAARDRFRASGGKSDRFDCFVLCELARTDRHRFRLLDPDSDQTKALKALTRAREDLVAARVALGNQLRAELERFWPGPIGVFSSIDSPISLAFLARYPSPADARGLGEKRMAAFLKAHRYPMSKTPAELLARLRAAPAGRAGEVETRTRRQIVLRLTRTLAVMVGQIRELEAEIAAALDAHPDGEIFRSFFRSRDSVICAATLLSEIGDCRDRYPHRDAIAADGGQAPVAVESGKRKNAKFRWACNKRLRNALSTLAHNTCRWNPWAADRYANARQRGHNHRRALRTLGRAWARILWRCWQNRTPYDPARHTGLQQHVAVSIPTTSGARADVPATQRMAGAAVTRRAARRAERAALDGTPPSAIPVGG

SEQ ID NO: 56854 - protein, 333 aa, unidentified
MTYIGVDISKKSFVAAFPSANGYLTKEFENTPRGVRKFIGSLPNSCMVVMEATGNYCFLLLYLLHNAKIEAALVNPKQIKHFARMMMTVTKTDAKDACLIALYGEKMNPASYKLPSATILTLKQKRTVISQLNKQLNATHNLLESITVLPYADKTCLNSLKKTISFLEKQIKSLESELVNLAESEFDALLKRLTSIKGIGVTLATALIIATGGFTYFNNAKQLSRYIGICPTVCQSGSSISIHGSINRNGDESLRSMLYIASWSAIRYNASCRQMYERMRSNGKPAKVALVAVSNKLVRQCFAVANSNMSYIDGFVSTKPETQKCVSSKDQTL

SEQ ID NO: 56855 - protein, 317 aa, unidentified
MRNCIGIDISKHSFDVFVLEKNKALVLTNDSEGIFKCVELCQKIQPELVVMEATGGYEALLASTLQAEGFPVAVVNPRRIRDFARAVGQIAKTDKLDAQIIARFAATLEPMPHELIDSNSRKLKALMSRRKQLVEMHTAECNRKEHAIDIEVQRSIEAIVNAIDSQLSNVDKEIENWIQKMPELKQRAEYLQSIPGVGKTTAHMLVTELPELGVFNRRQIAALVGVAPINRDSGVFRGKRMTGGGRKHVRARLFMPTLVATQFNPVVKKYYRTLVDQNGKCKMVALTASMRKLLCIMNTMLKNKQYWQPILWKMLDT

SEQ ID NO: 56856 - protein, 408 aa, unidentified
MNPLFVGIDVSSKNNVAYLMKPDGSKHSSFSVQNNLGGAKLLSERIVSALGSMQLERVVIGLEATSIYGDNLVYALREDGGLGRFRRKIHVLNPKQVKKFKEAYPDLPKNDWVDAFVIADHLRFGRIAKEVYMDDYRYQALRTLTRARFDVIQNLTREKQRFANYLFLKCSGMAQDKGIQNTSATTIALMERFETVDNLANADLDDLTAFVAETGRGRFADPESTAKAVQAAARGSYRLPKTVNDTVNQAMAVSIASMRALKEQVKVLDKAIEQQFEIIPNTLTSIPGVGKVYSAGIIAEIGDIHRFASQASVAKFAGLVWTQHQSGEFEAEHSRMIKSGNRYLRYYLLEAANSVRRCDSEFRRYYDLKFKEVNKYQHKRALALTARKLVRLVFRLLKDNRLYIPPEG

SEQ ID NO: 56857 - protein, 343 aa, unidentified
MQNTIIAVDIAKNVFEVAVSHRTGVVAERHRLSRRRFLPFMGKLKPTTVLLEACGTAHHWARQLQNLGHKPILLPAHATRPYVLRNKTDQADAKALLEASRNKDIKPVPVKSIEQQALMTLHRLRSGWMSVRTARLNAIRGHLRELGFTIPLGARLVVPRLWELLEDAETNIPQFLRPALAEAGREVRELEQRILDIEKQLREVSRQSPLIMRLRTVPGIGLLTATALVAFVGNVQRFSSGRRFACYLGITPREYSSGQRRRLGHISKRGDVYLRTFLIHGARSVLNAAKRAENPDRLRTWVLSLEARAGHNRAAVALANKMARIAWAVWRNESAFQSTPVEA

SEQ ID NO: 56858 - protein, 353 aa, unidentified
MTSLTDLREVVDVVIGVDTHVHTHSAAAIDAATGGVLGEITVDATAEGYAALVEFAGEHATLRAWAIEGTGGHGAGLSRHLSNLHEIVVELDRPKRAKRRNGAKSDPLDAIRAAREALARTRLGTPRSGGDRQALSVLLAARRSAVNAATEAQLQVFSLVIAAPEPIRARFRGQKLPGMLATAAALRVHPSWDVETTTTVVALRSLARRFRALSIEAAEHQKAIVAIVRAWRPDLLEQLGVGPIVAATVLCAWSHPGRIHSEAAFAMLAGVAPIPANSGQVTNRYRLNRYGDRQLNRALHTVAQSRIRYHEPTRDYVARRTTEGKTGREIKRCLTRYIARDLYRLLESGPVTT

SEQ ID NO: 56859 - protein, 421 aa, unidentified
MRGLRAKRVRTVKEGTLIATVDIGVASNTGCCTTVDGRSTKSFRFDNTKEGFEKFWCTTVASKNRFGCDEVLVGYESTGPYAEPLVHYLANKQVKIVQVNPMHTKKMKEVNDNSPLKTDDKDPRVIADIIRLGRALTIVVPEGDAAYLRRLNNARERHVGEQTAFLNQLQQLVFLIFPEFKTVLKNMKGKTAQHILKRYTTPERIGTLSKEALGEEMRKRSMGKFGIKEAESLINLARETVGIKEGLDGIFMDIRHILMQLEAEGRFISEIEAEMGAILERIPCSVRLLSIKGLGIVSVAGLIGEVGDFSKFSTQSEIMKLAGLDLYEISSGKRKGQRRISKRGRSLLRKILFYAAIQMIRKNGIMYDYYARLTSRGMERMRALIAVSRKLLRIIHAIVRDNKDYVRQYQAPERRVIKEAA

SEQ ID NO: 56860 - protein, 353 aa, unidentified
MSTIANTTVTTAPTTYVGLDLGSSICHQTVLNADGSLRRSRSILTSEQSLRSAFAHFEGDVKVHLEASELSAWAHSLLKPLVSEVIISHPRSLAWIGKDSNKDDKIDARKLAELLRLNRVHQVFCQTDDVRRTFKYLVTHYEQLSREQARCKAKIKARLRTLGIIRKDARLFSTAGQTALLDEIESTAIRQMFVQSFAVLNQMLESLAAAKVAMIEAANQFREVKLLQTAPGVGIITACRFVAYLHTPHRFSNKRKLWRYCRLGVTRRESNGKRLAHPKLDSAGVGSLKDVSRKVFEAARRTKTDNSFKRFYEQSLLNTKNAVHARLSTQRKILACLRAMWIGNQPFRNDLTE

SEQ ID NO: 56861 - protein, 441 aa, unidentified
MAMRKREDSPEVFPNAAGIDIGGSSHWVAVPKAASDEPVREFGTMTDDLNAMADWLLACGVDTVALESTGVYWIPVYEILEQRGLTVWLVDARQMKYVPGRKSDVMDCQWLQKLMSLGLLRAAWRPGDEVCVVRAVVRQREVLLTEQASWVQRMQKALVQMNLQLTEVLSDIMGMTGQAIIRAIVTGERDPKILARHRHGRIKRSEDDIVRALTGNWREEHLFVLEQSLAMYDDIARHLGECDARLQALLEQRSRHQPDLGPAPRSGSRQRMEFDLRQRLANWAGVDLTRINGLGVGTVMTLLSEIGPDLSRFASVKHFCSWLGLCPGTKISGGKVLSAGTKRSANRARQALKIAAMALSHSDSALGAFYRRLCARMDKPRANTAVAHKLARMVYFMLTRGEAFVDQGQQRYEEQQQQRSVAALKRRARALGFRLEPETAP

SEQ ID NO: 56862 - protein, 350 aa, unidentified
MMIIGCDLHTRYQQIAMLDTDTGELVERRLEHENGEARAFYAALSGPVRVGIEATGHTHWFEAMLAELGHELWMGDAAKIRASVVRKQKTDARDAAHLLDLLRQDRFPKIWRPSPAERDLRQLVWHRQKLVWMRGAVKNQLHALAMGEGVCRKKKLFTAKGRKELEGLALGPWASYRRQELLRMFDELAAATEQLDAAVEQAAKSQPLAVQLMTHPGVGPVTSLAFVLIIGPVERFERSKQVVSYLGLNPQEHSSGGKQRLGSISKQGNPMMRSLLVEAGHTAARFDPALKRMYQRLKFRRGASVAKVAVARKLAVRMYWMLRSTADYAQLVRMQGSPWATLVGNSPSLG

SEQ ID NO: 56863 - protein, 354 aa, unidentified
MPATIIGVDPHKRSHTAVVLDDCEEIATQIRVTANPNQVEQLLAWAPATDRVWAVENANGLGRLLAQQLVAQGEAVIDVPAPLAARARKLSGHSARKTDEFDARSVVIAARHHGGLRHVAMENATAVLGLLVDRRWQLVAQRQRATCQLHALLTELVPAGADTHLTSKKAAVILRSVVPGTIVELERKLVARELLADIRALDRRIPAANRRLSEALAAYGTTLTDIQGIGDVGAATILSIVDDPSRFATKGHFAAFTGTAPIDASSGDVQRHRLSRRGNRQMNKVLHTAAKTQIRLGGPGRVYYDRKRAEGKSTMEALRALKRQLSDVVYRRLQADHQSRAARGGQMRTSPKAA

SEQ ID NO: 56864 - protein, 308 aa, unidentified
MTLPASRVGCDVSKAWLDFHVAQTGVSTRIANEASAIAAFLARLPREAIVVFEATAPYDRALRQALDAARLHSIRANPARVRDFARAAGFLAKTDAVDARMLTRLPDALDMPEAPAFEPDREALLALNRRRDQLVETRAVERGRLLDEPEATIRNSLVTHIEWLDGAILALEKEIETMLRRPAFEARARLLAWVKGVGRVTVATLIALLPELGSRSAKTIAAIAGLAPLNRDSGTMRGQRHIGGGRRRVRQALYMAALGAIRRIERFKAHYLAVKSRSGHAKVAIVAVARKLLVTLNAMVRTSAPFRA

SEQ ID NO: 56865 - protein, 412 aa, unidentified
MEVLYACCCGIDVHAKMLVACLLKAGQKEVRTFSTMTVDLLHLLDWLTQSGCTHVAIESTGVYWRPVFNILEGTMEVILTNARDAKGYKARKTDVIDAEWLADLLRHGLLKPSFIPPLPIRELRDLTRYRESLVREQTALANRIQKLIESANIKLGQVASDALGASGKLMLRALATGETDAEQMSHLAQGILKRKQPQLQQALTGRFTQAQRWILAELLDQYEHVEAALQRAETRIRQEVENSADPFVADAVPLLDTIPGVGETVAQTIVAEVGVDMERFPTASHLASWAGMCPGNNESAGKRKSGKTTKGSRYLRAALVQAAWAASHQKGTYLAAQYKRLVKRMGKKKALIAVGHSILSIAYHVLQTRMPYQDLGGDYFERRNGDKQRKRLIRQLESLGLKVTVEEIKEAA

SEQ ID NO: 56866 - protein, 423 aa, unidentified
MDVMHERVAGLDVHKETVVACVRIMAGRKAHRECRTFDTTTFGLEALLTWLTESACTHVAMEATGVYWKPVWNILSDGTFELILANAAHIKNVPGRKTDMNDAMWIADLLSCGLVKASFVPEQEIQELRSLLRARKQLTREQTSHLQRIQKTLEEANIKLDSVITDIMGVSGRRMIEAMIKGVKNPFKLAELADRRIRASRKQLYDALHGRLTDHHRFMLRLYLRHYDALEHAINEIDEQVDAAIAKMDAEVAAGQATFRSLIALLCTIPGIAELAAKTILAEIGTDMSRFPTAGHLLAWAGLCPGQNESAGKRKSSRLRKGSPWLKTLMVQCGWAAARKKDSYYKAQFNRLRGRHGGKKAVCAVAASMLTAIYHMLKNGTEHHDLGADHFDRRSTDIKARRLAAQIAKLGFQVELRKLPEVA

SEQ ID NO: 56867 - protein, 337 aa, unidentified
MDNETIEFEQVVARGCGLDVHKETVVATVSGTGIKKETRTFSTFTRSLKELKEWILSLGITHVAMESTGIYWKPVFNILEGSGLTILIVNARHIKYVPGHKTDKKDSEWISRLLLAGLLKGSFVPPKEIRQLRDMTRYRRKLQGAITAEKNRMIKMLEDSNMKLSTVLSKVHGVSGTRIIDALLEGQTDPVLLASLCHGKVKAEKEEIILALEGKLTEHHKFMMGIIRRDIQQTEALINELDVEIEKQLLPYAQEVALLSEIPGVGHQTAGDLISEIGVDMEVFATDKHISSWAGVSPGNNESAGKKKVGEQTTGTNKFDLSSANRHGRHLGPREAF

SEQ ID NO: 56868 - protein, 344 aa, unidentified
MSGAYEGRQVVGMDLHRRRSVLVRMTEAGEALETVRISNDPQVLREAMARAGECPEVVLEATYGWYWAADTLAELGATVHLAHPLGVKAFSYRRVKNDQRDAADLADLLRMGRLPEAWIAPPATRELRHLVRHRAKLVGLRSNLKCQVHAVLAGAGVPVVMSDLFGAGGHQLLDRVELSPTARARVNSVLRLIENLDFEIELFAKLVAGRLREHPGYTAIQVIPGVGPVLAAVFIAEIGDIARFDRPAQLASWAGLTPTHHESDTTVHRGRITKQGSRLVRWAAVEAVQRVPAHTRLGLVREQVAGRRGRNIGVVAAARELIVLVFYGLRDRHIRCLPPRNYAA

SEQ ID NO: 56869 - protein, 344 aa, unidentified
MNYVGIDLHKNTIVLCVMNQDLKVTHRRTFACRQAEAVLDFFRGLGPARAVVEATASYEWLVELLEPVVDQVVLAHPGKLRVIAESTKKTDRLDAQVLAEFLARGQIPAAFRPTARQREHRALVRHRQFLKQSVTALKNKMRRVAADYNADRKDLFTADGWAALRAVALRDADRFVLDSLHAGWQHLEGQLKALGARLKEFAAKAPAKEAEARAKLATIPGVGPVTVDVVVSELGDIRRFHSVKAVCAYAGLVPAVRQSGGKKSKDLGITKAGSPLLRWALVEAAWRVVRQSAAWRRVYETVKKKAGGKKAIVAVARRLLVVMAAMLRDGTNYDLLKVGEASPT

SEQ ID NO: 56870 - protein, 408 aa, unidentified
MNTLYVGIDVSSKSNVIYLMLPNGDKHSNFSVANSHEGSTQLVKRILSALTSHSLDTVLIGLEATSVYGDNLVYFLREDATLAPFNRKIHVLNPKQVKKFHDAYNDLPKNDYVDSFVIADCLRFGRINKEVYMGDYRYKALQNLTRARFFAVQNLVKEKQRFMNVLFKKYSTMTQEKVFSDTFSTTALAVYDEFESAEALANMDLHELTDFIIEKGKNRFPDPDAVAKAIQKAARSSYRLPKTVNDSVNQVLSISITSMKALESQIKEFNKAIKAQMELLPNVLISIPGIGPVYSAGIMAEIGDINRFNSQAALAKYAGLAWKQHQSGGFESEVTRLIPSGNRFLKYYLCEAAFSLVRCDKEYSDFYRLKYKEVNRCQHKRALALTARKFVRLVFRLLKDNRLYCPAK

SEQ ID NO: 56871 - protein, 409 aa, unidentified
MQVLYPRCCGLDIHKKTVVACMLLTDPDGTIRRFVRTFGTMTADLLALGDWLSLHEVTHVAMESTGVLWRPIFNVLEEGRTLLLVNAQHIKAVPGRKTDVKDSEWLADLLRHGLLRPSFIPPPPIRVLRDLTRYRKTLVEARTQEINRIHKVLETANIKLGAVASNVVGVSGRHMLEAIEQGESDPQVLAELAKGRLREKLPALRLALDGRVQAHHRQLIGELLDHIDYLEQAIHRVEESIATLVSKEEKAVQLLLTLPATGPVTAAAIIAEIGTDMGRFPSASHLASWAGVCPGNKRSAGKQLSGASTKGNKQLKTILCEIAATIARTPGTYLHALYQRVARRRGKPRAMRAVAHSLLVSIYYMLRDQLSYQELGPDYFDQMQAQHLERHYVRRLEALGFQVTLTSAS

SEQ ID NO: 56872 - protein, 355 aa, unidentified
MNKIKYIGLDVHKSSISIAVLDATGKLIMEVTIETQAEALLDFIRGLRGTLYVALEEGTCAAWLYALLAPQVAKVVVCDPRQNPRRLGEKKSDRLDARKLAEWLRLGTLKPVYHGDPLEPGLRESARSYRTLVSDTTRVMNRLKALYRGRGIRCAGTRVYSPRWRGEWLEQLPPSGVRPRAELLYQQLDLLMPLRQEARATMLAESRRHAAQKILRSIPALGPVRVALLIALLQTPHRFRGKRQLWAYAGLALVTRSSADYRIVDGQLGRSRQQALVLGLNANHNHVLKALFKDAAASALAHPGPLKDFYATRVAQGMKPELARLTLARKIAAITLTLWKKGERFNVEHLKAQAA

SEQ ID NO: 56873 - protein, 356 aa, unidentified
MNYVGVDYHKKYSVVTCLDDEGHEIGSKRLDNQAEEFQDFFQDLGGPCQVVLEASRTWGVMFDLLEELPEVQAVKLAHPLKVRAIAEAKIKTDKIDARTLAQLLRADLIPAAYIPGKETRHFKEMVRQRVFLVRTRSRLKNRIHVLLDRVHIPLPSVTDLFGKRGTDYLKKLKLPGVDGEILREDLKLLEALNELIKEAEGEIGKLLGKDPRVERLLTIPGVGPILAVVIALEIDEIERFLSPGKLAAYAGLVPSTSSSGGKTFHGKLVPMCNKWLRWALIEAAWLAIRQSPYCRTYYEAHKRHKGSHTAAVALARRLSEIVWHVWKEKRPYEERPLPRPHRLFKTRTASAALAAS

SEQ ID NO: 56874 - protein, 465 aa, unidentified
MKKTARRPRRLKAQVPPLIARDDAAGVDLGATLVTAALPPSRPGLTVRTFATFTPDLQALVAWFKENGIRTVAMEATSVYWIPLYTMLEDAGIEICLVNARHLKNVPGRKTDVADAQWLQQLHAVGLLHASFHPPVAIRVVRALWRQRDALVREAARQVQLMHKALDQMNLHVHHVLSDLMGESGSRMVEAILAGERNATVLAKLRDHRVKASEATLIKALTGDYRAEYLFCLQQAHESFGHFQKQIAACDGHLEAALGKLDSVAETPAPAPAAVTNGKKDKTARKGTNQPAFDVRTHLYRVCGVDLTAVPGINIGVATTVVAEVGPKLTGFKTSKRFCSWLRVAPDPRVSGGQIIGGKVPRGSPRAARAFRLAAHSLHSSHSPLGDVFRRFRSKLGAAAAITALAHKLARIVYHLLTTREPYDEAKVLATTEHYRVRQEASLRKRARSLGYQIIPLQPTIEVVP

SEQ ID NO: 56875 - protein, 409 aa, unidentified
MDVFHERCAGLDVHKEVIHVCVLIGRGSGFQKLTFRYGTFHHQLVEMRQKLVELGVTHVLMESTGVYWMPVYDALEGFVEIVVGNAQHIMNVPGRKTDESDAEWLAKLLRFGLVKPSFVPAREFRELRQLTRYRRAVVQTRASEQNRVEKHLQIAGVKLSSVASHVFGVSGTDMLNSIAEGTTDPGELAGLARGRLRKKMPQLRDAFAGSISEHTQHLIALQMEQMTRLESTIAQAELKIDQKVKPYEELLARLDDMPGLNLRSSIDVLAEIGTDMSPWATHRQIAAMAGLCPGNYISAGKRLKNRSRQGNPYLKSVLVQAACSAINVDGSYYQAKFKALKKRRGHKRALVAIAHAMLVAIYHMIKKGEPYREIGAKVVSDHDLGRKKEYLIKQFQNLGFSVSLTPLTE

SEQ ID NO: 56876 - protein, 369 aa, unidentified
MEQVTTIGLDLAKRVFQVHGVDAAGAVMVRRALRRRQVLAFFAKLPSCLVGIEACATAHYWAREIARLGHDVRLIPPAYAKAYVRRNKNDPADAAAICEAVSRPSMRFVTVKTEVQQAAAGIHKVREMLIKQRTMLINTLRGLMAEFGIVVAEGPRHISELVAILADPADQRIPAPLHDGLMAIVETLRGLERRIERVKKQIVGWGRGSATCRHLITIPGYGPILSTAMAAMVVNPAAFTSGRHLSASLGLVPRQDGTGGKVKLGPISKRGNGYLRRLLVNGAMSVLCSKRAKEDPWLVKLLETKERKVAACALANKMARIGWAVMMRQEDFRRRRHDQPCPDLGEPGTVLAALKTAARAPAAVACGQS

SEQ ID NO: 56877 - protein, 428 aa, unidentified
MKFKQSVGQNQRIERITTSHLVVGIDMAKEVHVAQATNFRGIVLSSRHLSFKNKIEGFEKLQRWIEGLLRKNRLNSIIIGMEPTGHYWYNLANWLVDKGVHVVLVNPATTKRNKENRDNSPSKSDPKDALVIADVVSRGFYYEYTRQATNFQRLRTIMSDREFWVTNSVRLQNRIIRWLDIRFPEYASVFKDWTCPRSIATLKEFPSPLDLKGQSTAEVITGWRKYMKRAGGSTGIQKAAELISQASQSVGDTTALKEAKQDLERLIEEFERIVGILEQIEKDIVTVLGEIPIASQLRSLKGLGPIYTAAILSGAGDLKQYAHGRQLLRKAGLNLAESTSGKRKGEIVLSKRGDATLRKYLYLATLTLVGTNPIFRQLHENNVHNKHMSKQQSVFKLLGKLARILVGMVRHGESFTPEKTFQTYTQAA

SEQ ID NO: 56878 - protein, 362 aa, unidentified
MRKVGDATDSVPTGWTLEARMNATAWLGIDIAKDTFEASLLQDSRVAHGGFDNTPAGFKKLEHWLKKRHVAQAHVCLEATGRYSEAVAEYLHAAGHTVSVINPARLKAFGQATLTRTKTDQTDAALLAQFCQRQQPASWQPPAPEKRALRALVRRRESLLQLRQQEVNRLKSGEDDPLVVRSLKAVVAFLGKQVATVEAAITDQAASTPELQRQIELVDSIPGIGLTTAAALVAEIDFGAYASARQLVAQAGLNPRQRQSGTSVHGKPRLSKQGSSQLRKILYFPAVSAKRHNPVIHKFAEGLAKRGKHKMAIICACMRKLLHLVYGVLKTGRPFDPDYQTKCDASAKSARQAEPAKQLQPA

SEQ ID NO: 56879 - protein, 339 aa, unidentified
MNATTFGLDLAKRVMQVHWVETETGEICRRQLKRGQLLEFFARRSPAVIAMEACGSAHYWGRKLTALGHQVRLIAAQFVRPFVKTNKTDAADAQAIWEAAQRPAMRWVALKSEGQQAVLMLHRMRRQLVEMRTMQVNQLRGLLYEFGAELPPGRQAGLARIPDELAKLEAVLPAMVIDTVREQLARVQGLDKDVAEIERRLAAWKKDDVASQRLLDIPGVGLLTATAAVATIGEARAFKSGREFAAFVGLVPRQSGTGGRVKLLGISKRGDVYLRTLLIHGARSVITHGKQHDAWLTRLLARRPFNAAVVALANKMARTIWALLAHERTYRKDYAAQAA

SEQ ID NO: 56880 - protein, 391 aa, unidentified
MPDVPSSACPATTRTWVALDVHRDSITAGILSAEGGQPEVVQLENAERAIRRFLKRLGDPAKLAVCYEAGPCGYDLYRLLVAMGIACDIVAPSLTPVRPGDRVKTDRRDAKKLVRLYRAGELSFVCPPTPQQEGLRDLVRCREDLRRARTAARQRIGKQLLRHGHIYREGKKAWTRQHHAWVRRQRLDDALAQAALAQMLLQLDTLDAQLSAIDAQLDGVASSEPWADAVRSLSCFRGISSLTALGLLAEIGDFHRFASARELMSFVGLTVSEYSSGNRRIRGSITKTGNGHARRLLVEAAWHYQRPPRLSARIRAQQSFVPPEAFARAWQAQIRLYRRHHHLRSNGKLLPIATIAVARELCGFVWATMTSQPLRDDHPEQTRGRSPVLAA

SEQ ID NO: 56881 - protein, 395 aa, unidentified
MISVGIDVSKRKSTVAIINVMGEVLQTPFDIEHNQNGLHYLFGLIKDYPKDQVRFIMEATGIYHLGLLKEIQQQGYFVHVANPLLIKKYFDAEIRKGKTDRKDAFKLSLYGTEKWFKLTEHSSTEQTYQNLQFLSREYNQLMATKIKLKVQLSNLIERTFPGLEKILKANYFGLLLDFYELFPTASSVKALSEKKFSTKFIKLATKKGHRKGAQIAQKVYQLAHECVTFEPSVEIAGLTVKHCVCLLRSTEEATKAIITQMDELASTLPEYEVVKKMKGVGDKLAPRLIAEIGDVRRFKDGKSLIAYAGIDAPPYQSGQFEGTKRHISKRGSRGLRKCGYEVMMALKSSKPIEDNAVYEYMLKKEAEGKNKKLAKIAGLNKFLRIYYARVMEIYH

SEQ ID NO: 56882 - protein, 409 aa, unidentified
MKMAGIDVHKKVLMVVVVDTSALQEKPARRRFVTLPSELQRFRIWLQEQGVEEAVMESTAQYWRSVWLELEPHMRLHLAQAFSNRAPRGRKHDFKDAERLVRRLIADELILSFVPNGEQRIWRSLTRMKVQLTRDRVRLQNQMECLLEEMRIKLSIVVSNLLGASGLRILHALAQGETDPKKLAERGDERLHCTEEQLVDALTGRVQPMHRGMLALQLQRLQLIDQQMAQLNHRIAQAMKSHQDAVIRLAEVPGLGVDSAQQIIAEVGAQASTFSSAAELAAWVGTCPGKEESAEQNQSSRSAKGNKYLRRVLNQAAHAAVAKKGCHFQVVFRRLMPRLGYKSAIWAVAHRLCRVVWKILHEGVRFIEQGREVGPREKKQRAQLLARALRKLGYEVTITPINQLAPKPA

SEQ ID NO: 56883 - protein, 405 aa, unidentified
MEQVIIGVDPHKLSATIEVVNNQEHLLGSGRFNTNQAGYTAMRSYVKTWPNRVWAVEGANGAGRPLAQRLVEAGEQVVDVPAKLAARVRLFDTGHNRKTDALDAHSIAIVAVRTKGLRVLAADGELEALRMLTDRRDELAHLRVQTVNRLQRLLSELLPGQRKKDLSALQAKAMLATVRPRDIAGKTRRRMAAEELADLVVVDAKLKKIKAELKAMVIARGSTLLQLHGFGPAGAARTLADVGDITRFADRNRFASWTGTAPLDASSGEQIRHRLSRAGNRRMNHVLHIAAIVQLRNDTEGRAYFRRKIAAGKTRMEALRCLKRRLSDVLYQRLVQDARTRDLTSFGTGPGGHCGATQESSAVDLPPHVDTSDKPLPGPAQPTLPRPLRTRKATKASTSRTSLLT

SEQ ID NO: 56884 - protein, 342 aa, unidentified
MNEVSIIGLDLAKNVFQAHGAGADGSVIFRRKLSRVQLLKFLTQQPSCVVAMEACASAHHWGRVIGDLGHEVRLIPPAYVKPFVKRQKNDMADAEAIAEAASRPTMRFVAVKSEEQQGAAMVYRTRDLLVRQRTQTINALRAHLAEQGIIAPTGPAHVGRLAAVIDGDDGALPAAVRDLARLLLDQIAGLGEKVADLDAELRRRASVDDTARRLATIPGVGPITAAAITTFAPPMETFSKGRDFAAWVGLTPRQHSSGGKERLGRTSKMGQRDIRRLLIIGAVAVVRWAARKGAPEGSWLARMLERKPKMLIAVALANRMARTAWALMRKGEDYKDPAMATA

SEQ ID NO: 56885 - protein, 410 aa, unidentified
MEVLIGCCSGLDVHKDSVEACVRKLGSGGRLDQQTRHWGTTTRDLTAMAKWLKAEGVTHVAMESTGVYWKPVFNVLEEEFEVLLVNARMIKHVPGRKTDVADCQWIARLLQHGLLKGSFIPPRWQRELRDLTRQRAQLTDERSRTSNRIQKVLEDANVKLGSVATDVVGVSGRRMLEAIAAGQDDPAQLADLAQRRLRNKIPQLEDALCGKLNDHHRWMLRLLLDQLQATEKFIARLDERIAELTRPHKPVLEKLDAIPGIDRRIGEVLIAEIGLDVIPFPTDAHLASWAGLCPGNNESAGKKRSGKTNKGSRWLRQALVQAAWAASRKKDSYFHAHARNLMRRRGSKRGAIAVAHSLLLVIYHVLKGRAEYRDLGRDYLDRLREQQLVRFHVKRLQQLGLAVTVAPVAA

SEQ ID NO: 56886 - protein, 342 aa, unidentified
MQITTIGLDIAKNVFQVHGIDAAEKVVVRKQLRRSQLLAFFKALPPCLVGMEACATAHYWARELTKLGHQVRLMPAKDVKAYVKRNKNDAADAEAICEAVRRPTMRFVQIKSPEQQGRLMQHRARDLLIRQRTQVINGLRAHLAELGITAAQGNAGLKELLAIIASDEDARLPADAHAVLIVLAAELQAMQTLITSIEKRIMAQHRSSAESKRLETIPGIGIVGATAIAATVTDPKAFRSGRDFAAWIGLVPRQDSTGGKQKLGPISKQGDRYLRRILVVGAIAVLRRARQQPERHPWLTQLLARKPFRVVAVALANKMARIAWVLLAKGGTYREPALAAAA

SEQ ID NO: 56887 - protein, 345 aa, unidentified
MQPMYYIGLDVHKRTISYCVKDSSGAIHAEGTIPATRFDLDRWMKTLPQPWSAAMEATVFTGWIYDHLRPHAAALKVAHPLMLRAIAAAKKKNDRTDAKKICDCLRCDFLPECYMASTAIRERRRTLRYRNLLVRQMVQMKNKIGMLLMEAGVSYNKQRLHKAGYFRELLATNQDIDEGLQSLLRLCRETVVRLQRTESALVRSLERDSLLVERVERLMTIPAVGPITALTWALEVGDVQRFSSIKKAISYCGLCGAEKSSGNTVQRTPLSKQRNKHLQTTLIEAAKMAPRNSSELAMLYDKEKQKGNANRATLAVARKLVAYLMAVDRGQRNFQVVETSNGIAA

SEQ ID NO: 56888 - protein, 451 aa, unidentified
MPRKRVNKKKVTLPVLKPDAAGIDIGATEIYVAVPSDRDAEPVRMFATFTQDLNELADWLQQCRVHTVAMESTGVYWIPLMQILEIRGLEVYLVNAKHVKNVPGRRTDVSDCQWLQYLHSVGLLRASFRPAQDICAVRSLLRHRASLVDMATCHVQHMQKALDQMNLQLHHVISDITGTTGLAILDAILDGNRDVQMLAALRDPRIKASHETIAKSLVGDYRQEHLFTLQQSVGLYREYQRRIAACEEEMQRLMKGLETKADPAILPIAKDSVKKCKVMPPARAMALREEIYRILGVDLTTIPGISVLHVQCILAELGGDVSKFRSAGAFSSWMGLCPDNDISGGKVLWSGTRKVKNRIAVTLRMAAQSLQQSESALGVFYRRMRAKLGAPKAITAAAHKLARIVFHMLTTREPYDESVFAKAEQKNLQRMETRLKAQAQALGYKLLPAQS

SEQ ID NO: 56889 - protein, 336 aa, unidentified
MNGSTGRWVGIDVAKSKLDVALLDERGKVKSHVFANDAKGHAALIAWLHQRGGSPELVRVCLEATGCYSEAVAIALVDAGWSVSVVNPARIKGFAQGELLRNKTDQADAALLARFGLALQPEPWVAPPLELRQLRALVDRLQSLKEMHQQEANRLEAAMNQAGMRDSIESHMQWLQESIRQLERQIDDHIDGHPGLREDAKLITSIPGVGNTTAAKVMAYLGDVRRFRNAKALAAFIGVTPRLKLSGSSVRGRSMISRSGHAAIRHSLYMPALVALKHNPIIKTFGARLKATGLAPKAVVAASMHKLVHLIYGILKSGTPFNPNFMAARLDIQDGI

SEQ ID NO: 56890 - protein, 523 aa, unidentified
MVASKMVPPRGGKQAVRHFGAFREPVYEHGPKLRDRNIGDGVRCKGVDPVWEITLPHDLARSVAEERRPMRHKRAGRGGAVPRLECIEPNAAGIDIGATEIYVAVPPDRDPNPVRSFPTFTEDLLALAAWLLAGRIRTVAMESTGVYWIPLFQILEARGIEVCLVNSRHVKHVPGRKSDVADCQWLQYLHSVGLLRASFRPQDAICRLRSLLRHREGLVEMAGEHVQHMQKALSQMNLQLHHVLSDLTGQSGLAILDAILAGERNPQVLAELRDPRVKASPETIMKSLVGDYRREHLFALRQSLEAYRHYQTLMAACDREIEAYLQDLDSKIDVEQHPLGPEPHPHPPRKNEFRFALRTHLYRILGVDLTAVPGLNAITIHTALAEIGPDLSRFANVAAFTAWLGVSPDNRQSGGQVLSSKTRRTRNRLNRALRIAAQTLHRSQSYLGTYYRRMRARLGAPKAITATAHKLARILFHLLSTGEPYDESVFAQEEQRHHTRMENRLRRQAREFGYELVALPAQA

SEQ ID NO: 56891 - protein, 314 aa, unidentified
MNITEEINVGVDTGKAQLDFYVRPLGQAFCTPNTAAGIHDALQHLKQLQPSRIVIEATGRLELAFVIAAQKAKLPVCIVNPLHVRKFASAAGKLAKTDQLDAQIIARFAEALQPEPTRIKPQNARLISDLLARRSQLLDMSTMEKNRLSILPKALHASLNRHLKQLQAEIKKIEALLDKHIDRTPEWQDKRDLLMSVNGVGKVLAYTLLSDLPELGQLNRKAIAALVGVAPMNRESGDYKGKRHIRGGRTRVRKVLFMAVMSAMQSNPKLKRQYTALKAAGKPPKVAMVACLRKLITILNEMVKTGQHWKPELA

SEQ ID NO: 56892 - protein, 315 aa, unidentified
MYLGIDVSKLTIDCCLISDGLFFERKFKNSKVGFQELKDWLKENGATERLHCCCEATGKYYEAAAEYLSKYYRMSVENPRKIKGFGTAVLQRSKTDRQDAKTIAQYCKALEPRPWQKPTEAQTKLQELTRYQHRLKRQKAAEQTKLQTAPAYLLPLIQSTITHLQQQIKAVQNQLNQFHKDNPDYKIQKERLKTITGIGEAAANSLLSVLIQKDRFKTAAQFVAYLGLDPKENQSGTSIKGRPRISKLGNTHLRTTLFIPAMHAYRSRIFAKYVSRLQKNGKRPKVIIVALMRKLAVIAFTILKNGQDFQVEIYK

SEQ ID NO: 56893 - protein, 335 aa, unidentified
MSVYVGIDVHRKRSQIAVVEDDGAVRVNRNVPNGVEPVLSVIGDLPIGAPVAFEAAYGWGWLVELLEDYGFEPHLVHPLRCKAIASARLKNDKVDAATLAQLLRADLLPEAWIAPLGVRQQRALVRHRCQLVRLRTLLRNRVHAVLADYGCDRPGSYFTSPGRAWLEGLDLPDASRRVVDDLLGLIDALKEPIDALDEQLVAHARGDPRVKALTQLPGVGTLTALIIAAEIGDVTRFPSARKLAAWAGLTPTVRSSDLTVRHGHISKQGSPWLRWILCEAAQTAKRSPDFAATYQRLAHRRGKKIATTAIARRLLARAYHLLRAVPAPHDRQGAR

SEQ ID NO: 56894 - protein, 337 aa, unidentified
MKTYLFIGIDISKATLDACVLSASGSMEIHYHEFSNNSKGFVLLMKWLKEKSEGIAVEDLRVCMENTGIYSLALNCFLHEKSIWQSMENALQIKRSMGVVRGKTDKADCKTIALYAYRFYDKLNPYVLPGKTLLRLRALFSQRERLVGMHSQLLVGNQSMKGYASELVKDIQKQNETLLKNLAKQIKTIDKSLKECLQQDDELQHKAKLIQSVPGIGQQTASYLLIVSRGMQSFATAREFACYSGCAPFAHTSGTSIRGKTKVHFIANKKMKMLLHMAAMNAITFNDELKIYYQRKIAEGKNPMSVLNAVRFKLICRIFSVIKRNEEYQKDYKKIAA

SEQ ID NO: 56895 - protein, 370 aa, unidentified
MLNTTTFVGLDVHARSIKAVALDAMTGEVRSATFAYDAAAVAEWVRSLDPAAKCVYESGVTGFDLQKRLASMGIDCVVGAVSKMIKPPADRKRKNDRNDAEFLARMLSVGNVVEVWVPDDGCEAARDLSRALDDAREDLKRCKQRLSKFLLRHGYAFSETTPTGRRKGNWTAAHWAWIKSISFPEKADNDVLAYYVDAARQAMEDKARLERLVEAEASKPRWKRRVDSVRCLKGIDVTSAADPVFEAGEFSRFKSARSFAAWLGLTPSEHSSGESVRQGGITKAGNKHLRRVLVESAWHYLGCSPHSKGLAKGQAPDPAARRHAAKGVRRLVERRRAMLERGVHKNKANVATARELACWCWAVGRMIENG

SEQ ID NO: 56896 - protein, 339 aa, unidentified
MDKLSIIGLDIAKQVFQVHGVDSAGEVVVRRALRRSQLLKWFAQLPACLIGMEACATAHYWARELSKLGHTVRLIPPAYAKAYVRRNKNDPADAAAICEAVSRPSMRFVAVKSEAQQAAGGLHKVRQMLVKQRSMLTNQLRGLMAEFGIVVGEGPQHVGKLLAILAEPADERLPPLLRAALQAIAESLRGLAQRIAALELQILDWGRANQTYQHLITIPGYGPILASALPAMTVDPAAFRSGRGFAASLGVVPRQDGTGGKVKLGPISKRGNGYLRRLLVNGAMSVLGSKRAKQDPWLVKLLASKPRKLVAVALANKMARIGWAIMMHQEDFRPLPAAA

SEQ ID NO: 56897 - protein, 354 aa, unidentified
MKRTTKYVALDVHQATTVASVREDSGRVIARSVLPTDGSAIMEFVRGMRGAVHVTFEEGTQAQWLHDLLAPLVDRVVVCDRRGVPRHGNKGDHVDADQLAELLRRGGLRAVYHGSAHRAGLKELTRTYQNLVEDSTRVMLRLKALFRARGIPTAGTAVYHRHQRARWLAQLPDGGARFRADALYAELDVLRQLRPKAKAAMVTEARQDPAWPVLRTIPFLGPVRVALLLATMQTPWRFRTKRNLWAYAGLAVVTRSSADYALVAGQPVRRRRAPMTRGLNRNHNRVLKDVFKGAATAATARPGPLQDVYHNVIARGTREELARLTLTRKLAALTLRLWKKGERYDPTKLTTPAR

SEQ ID NO: 56898 - protein, 371 aa, unidentified
MGHHTEAFVGIDTSKSRNAVAIADSGRGGEVRYLGEFPATEAAIRKLVAKLAAKCCHLTFCYEAGPTGYGLYRLLKSLGHDCLVVAPSLVPKKAGDRVKTNRRDALSLAKLLRAGELTAVWVPDERHEAMRDLSRARLAVKKDLQGKRQQISLMLRLGRIYPGKTTWGRAHMRWLMEQKFEHREQRIAFEELLEGIRQESERMERLEDAIREVVPDWSLAEVVAALQAMRGIDLIAAVGVLAEIGDLSRFQNPRELMGYLGLVPTEDSTGDKVKRGGITKAGNGRARRILVEAAWSYRYPPRVSRDKQPKVEAAPRRAREIAWKAQTRLCGRFRSLERKGKRRTVIVTAIARELSAFIWAINRELLPPRQA

SEQ ID NO: 56899 - protein, 311 aa, unidentified
MFVGIDIAAAKLDVAVRPTGEQWVIAHTEAGIADLTERLQARQPTLIVMEATGGRELPLAAALAAAGLRVAVINPRQVRHFAQAIGQLAKTDALDAQVLAHFADALRPVPRALPDEQRQQLLALVTRRRQLVGMLTAERQRLPTATAAVRPRIQLHIDWLQQEMQTWEKELQTAVRASTVWREQENLLRSVPGVGPLTACTLIAELPELGKLDRKAIAALVGVAPFPCESGKKRGQRIVWGGRATVRSVLYMATLVATRCNAVIKAFYQRLLQAGKAKKVALTACMHKLLGILNAMARHRTPWQESAVASP

SEQ ID NO: 56900 - protein, 464 aa, unidentified
MNGDTKAGSGQEGGRKEEGIAALGRRVAGVDVGSKEHWVCAPVREGEGREVGVFGATTAQLEKMATWLIERRVESVALESTGVYWVAVYEVLEARGVKVLLVDSRALARVPGRPKTDRRDCQWIQRLHSCGLLQGAFRPPEQICMLRTLVRDKGNLVAEQGDWVRRMQKSLEQMNVRVHRAVADLTGTTGMALVRAIVKGEREARELAKLRDPRCHKSEEEIAEQLKGHWREDHLFSLGQALKMYEAIQERIEDYEGAILEKLKAMEREECRQQEPPELKNKKKAQTILHRGQEPLRQALYRASGADLTAIDGLGVETVQAVTSEYGTDLSAFPKEKQFVKHVLLAPNRSTSGGKPVKKRNKHGTASSRVAAALRMAALTLRHSQTALGAYYRQIARHKGDDVAVFATARKLATLIYRMLRWGKDYVDEGAEAYENRYREGRLRRLTSLARELGYQLAPLPAKP

SEQ ID NO: 56901 - protein, 430 aa, unidentified
MKSNTQNAKIEAITEKTLVLGIDVGSETHYARAFDYRGIEYSKKPFKFSNTEAGFVTFKEWILDLKERHEKDKVVPGMEPTGHYWFNLGKFLQDNEMKPVLVNPHHVKKSKELDDNNPTKNDRKDPKVIAGLVREGRYMIPYLPDGVYADLRTASNIRFQLQAELTRIQNRISRWFNIYFPEYKTVYGKPDAKSGMLILKAAPLPEDILTLGIDGVNQIWRDAKLRAVGKARAKILIEAAEHSVGSKEGAVSARMEIRMLLEDYESRNTRLQEVIVLIEELVRKIPMAEKLLEIKGVGIRTVSGFLAEVGDISRFNNPKELQKLAGLALVESSSGKHKGETTISRRGRKRLRYLLFEVAMSLVAKNPEFRELHNYYTTRRLNPLKKMQSLMAIAAKLIRVFYAMLTKGVDYDPKKMVSDIKRPAVYLQAA

SEQ ID NO: 56902 - protein, 330 aa, unidentified
MTAVSTLGIDLAKNTFSVHGVDAQGVVTVRRTVSRAKLGELVARLPPCLIGMEACSGAHEWARRFSEAGHTAKLMAPKFVTPYRKSGKNDGNDAEAICEAVGRPNMRFVPIKSVQQQCDLSLHRVRLGFVEERTATLNRIRGLIAEFGYVVPLGTERLRREVRDLLERLPARAASCVRDLLEHAERLRSKALEYEREIRSSLQHNELALRAHTRPGPITASALVATVGNGHDFRNGRQFSAWLGLVPRQYSTGGKTRLGHITKRGDPYLRTLLVMGARSVLQRAYRETDPLSRWALALQQRRGYHRACVAIAAKNARVAWALLAKGAAAA

SEQ ID NO: 56903 - protein, 411 aa, unidentified
MDVVYQTCCGIDVHKMKLVACLCKGHKQEIKEFSAKTKDIKAMVDWLEGNKCEMVAMESTSVYWKPLVNIFEMRGLKYMVVNAKDFKAVPGRKTDVLDSAWLADLLRHGLLKSSFIPSREQRELREATRYRKAITEERARALNRLQKLLEGANIKISSVLSTMTGKTTMNLLDYVLNNDEMMDEKTAETLIISRISASVKEVTEAMEGIMTPFQKTMMKQVLTHLNELSERIEEMDIIIDTYMEEYWEAIKKLEQIPGIGKKSAEIILAEIGLDMNQFPSAGHLASWAGVAPGNNESAGKRKSGRTRKGNKILKSTLAQAAKSAAKNKNSFFHAQYQRIAIRRGKNRATLAVAHSILIAIYHLLKDDQEFIDLGSDYYYQFNTEKKINSYLKKLAALGYRVDEHSTISPVG

SEQ ID NO: 56904 - protein, 326 aa, unidentified
MNVSELIFPGIDVAKETLEVALDDKSKTQCIANSGTEIGALVNRLKPLAERIGVILLEATGGFERPAAAALCAAGLPVMVVNPRQARDFAKSMGYLSKTDAIDARVLSHFGRTLHQSAQRERLLMKLPDAKQEALEALLVRHNQLVAMRVAEGNRLATSHPSQHKSIKLVLKMLDRQIAVIDKNTDGMLKEHFADKLALFKDFKGVGPCMQAALMGALPELGQLTHAQIGKLVGVAPLNADSGRHKGKRITWGGRATVRTTLYMAALSAIRYNPVIKTFYERLLANGKLKKVALVACMHKMLTIMNAIVKSGIPWNPEHQNVPKNA

SEQ ID NO: 56905 - protein, 331 aa, unidentified
MKKVLLCGVDVGSKELAVAIDADSGRVWEGVFANNPAGHRKLIRRLTRSKTTARVCVEATGIYHLDLSLALEQTKGIEVMVANPRVTKDFARAQLRRSKTDRTDALSLLEFVRRMDFDLWVPPSSSILALRALSRRIQALLVTRAQEKNRLHAGESVEATPLAIRESIERHIDAINAEIEALSTSALEEVHTNTVLDRRFTHLVSVKGVAQATAITLLAELSVLPADMTARQWVAHSGLDPKHNESGTSVKGRVRISKVGNRHLRAALFLPAMVASQHEPRVRAYYEKLLAKGKKPMQALVAVMRKLLHAIHGMFQYDADFDGTKFFAERT

SEQ ID NO: 56906 - protein, 343 aa, unidentified
MQTITTIGLDIAKSVFQVHGVDAGGQVIVRRQLKRRYVLTFFQKLSPCLVGIEACASAHHWSRELQALGHTVRLMPPAYVKPYVKRQKNDATDAEAICEAVTRANMRFVPTKTSEQQSGLVLHRARHLFIRQQTSVINAIRAHLAEFGIVAPVGRHGVEELLNVVADPNDKRVPEIARACLSAFGAQLRMIKEQILEFDRLIRAWHRSNEMSMRLDEAPGVGPVLATALVAAVADPKSFRSGRNFSAWIGLVPKQHSSGGKNRLGNISKQGDRYLRGLFVAGALSVIRYAKIHGTKHRPWLTALLARRPTKVAAIALANKIARMVWAMMARGERYKEPFALAR

SEQ ID NO: 56907 - protein, 347 aa, unidentified
MRFYTRQHRHYCGIDLHARTMYLCILDPTGAVLLHRNIPCDPTLFLQAIAPYRDDLVVAVECIFTWYWLADLCARETIPFVLGHALYMKAIHGGKAKNDKIDALKIATLLRGGMIPMAYVYPRDMRSTRDLLRRRLYLVRKRGQLLAHIQNTHHQYNLPGPSRKILYKVNRDGLAERFADPAVRRSIAIDLELVDHLDRLIRDLELDLVRTVKVHDPQTFFRLKSLPGIGKILSMTLLYEIHDIARFPRVQDFASYARLVKCARESSGKILGTGGSKIGNVHLKWAFSEAAVLFLRANPRAQAFLQKLRRQHGKAKALSILAHKLGRAVYFMLQRETVFDMHKFLAA

SEQ ID NO: 56908 - protein, 410 aa, unidentified
MSLFVGIDVSSSDFKVRILNDHGDEPLKRLLALNNQPGCEQIANYLVKAYAQEKPERLVIGLEATSVYSWPLQMFLAEEPRLAPLQPQIYSFNPKVVANFKKAYVDLPKNDWIDAWVIAERLRFGRLPEGSQVDFRYLPLQRLTRFRCHLIEMISREKNYFLTNLFLKFSTLAQGAVFSDTFGATSESLTLEFFSPEEVAARPLDELIDFLMEKGKNHFVNPEATALQLKEAACKAHRLRGSLLQPINLILATSIETIHTLEKQVKKIDKAITAEISHFPNTLITVPGFGPVLSAGIIAEIADIRRFPNEGALAKFTGLTWRSHQSGDFTADDTPLTRTGNSYLRSYFIQAANCVRRNEPEYKSFYERKFSESKTHHHRRALVLTARKLVRMVDALLRSNQIYMPQGNRG

SEQ ID NO: 56909 - protein, 352 aa, unidentified
MDQVSRIGMDTSKRIFQLHGVDQAEQPVLRKKLRRREMMAFFERLPATQVAIEACGSAHHWGRLLGAMGHDVRLIAPQLAKPYVKRGKNDAADAQALCEAMSRPTMRFVPVKTVDQQAALMLASTRERLVRERTRLGNTIRGHAAEFGLVAATGPAQIAALLAQVQADSGLPALVRELFAELAEQFADLERRVARADARLLAWHRENPASKRLAAIPGIGPVTASLLVMKTPDPRAFRSGRDFAAWLGLTPKDHSTAGRVRLGGITRAGDETLRSLLVVGATSVIRHTRLGKARHRSPWLDALLARKCPKLAAIALANKTARIAWKLLTSGAAYDAMRARRAVAATPAPAAA

SEQ ID NO: 56910 - protein, 366 aa, unidentified
MKKISTVHAFGSEIFKEQKLTIGVDLGDRWSFYCVKDEAGQVILEQKLPTTQEAMKQTFGKIPRSLMARETGTHSPWVSRLLTQLGHEVIVAHAQKVQLITKSSRKDDRHDARTLARLARIDPELLGPVQHRSAQAQIHLTVIRARAELVSARTALVNAARGLVKSYGERLPKCGTQQVSRELAAELSTELRDVLEPLLKEIESLNEGIKEYDERMEKIAKEVYPEVSLLKQVKGVGTQIALTYVLTIEDPHRFAKSREVGCFLGLRPGRRNSGQSEPQKKISKEGDRYLRTMMVQGAHYILGPFGEDSDLRRWGLKLAERGGKNAKKRAVVAVARKLAVLLHRLWVSGEVYEPLRNSQKAMRAVA

SEQ ID NO: 56911 - protein, 475 aa, unidentified
MNIKGKKKKNQVITANIFKQQEILAKMEAIKGNLKASTWHQLETKGKFTKNDKLTFISDDMLILGCDIGSETHYLRAIDSRGRELNKSAFSFSNTVEGFESAKDWAVRIAAVNDKKQIVLGLEPTGHYWFCLATWLIANGISVVQVNPYAVKQTKELEDNSQLKDDIKDPKLIANLVKDGNFGMPYLPEKLYADLRRLSMFREQLNEDRIRFLNRLHREMKIYFPEYKDALGKFDGAFSLELLKKAPFPEDLLLLGDDGIKQIWHNAKLRGRGYSRAEEILKHARESVGMKDGADASKTAVKWFVEKIMEIDEELTEIEIQLHQKCKEIPHTQNILEISGIGENILSSILAEMGDISRFDDVKEIQKLSGLGLVACSSGKHKGKTKISHRGRKRLRYWLFQAARSVVVHSEEFRELHVYYTTRPENPLKKMQSLIVIACKLLRVIYTILTKGTVYDPKKLMADIKRPGRLEPVAA

SEQ ID NO: 56912 - protein, 331 aa, unidentified
MFPVGIDVSKNTLDLCMLYDGIKGRIKTRNIQNNRHSVENILRWLRLQHCSPEDVHVVMEATGVYHERLATELHDAGFRVSLANPHRSREFARGMGIMTKTDKVDAYMLACYAFLKKPHRWEPPAPEIRYLGALLRRRDVLLGDALREENRLEKYLSTDTPADIISSCRRMAQLLREEVSNIERQIKAHIKASPALRRDYTLLTSIKSVGPQLGMHMLVVLRSHNFVSAEQAAAFLGVVPIEKRSGTSVRRRPRMSKIGPPQLRAKLYMSALCGKIYNKRMRNIYDEMCLRGKPKMVAIGALMRKLVHWCYGVLKTGTVFNDEDLKPALST

SEQ ID NO: 56913 - protein, 530 aa, unidentified
MVTRSKKRKSKGSKNRFIGKPTGQIQERVRAVGPEHFGIVSVDCAKRRSKWMLCNFYGKVIIEPTTVEHTSGGLRVMTQLVAEACRAEGLTDTVVAVEMTGIYHKPTFRAFRKAGFDTRIVHPFASNHYRRPLHSDQKTDDHDLEAIFHAAVKGYGLAVLPVSEVYQSLQAVSRHRHNLVKQRSRLMMQIRRLLHQTMPGFADLFEEDTLFHKSIALPIALKFTSADAIRDAGVAGITSHLTKTNVRFQTRTIERIVAWASTAADPSELEEIHTRQWQQLNEVRRVFDEQVAAAEREMASFLVKTPYVLLLSVTGINVVSAARLAVEAGPIEHYASARAINGRAGLYPSRYQSDEVDHADGSLVRQCNRKLRGAAMLVAENLIKCHPYYRGLSALWTQRKVDPRDRRCRIANRAMRMVFQLVGGRQVWRGRSVDREHLLAKLQEFHRLHQTPIEQSIRDLNEAFMWLPKSTYTAEAKPLAEWARQKHRGPQRIGDLMIPLLIRLGVTREELGVPSEETLESNTSEARSSD

SEQ ID NO: 56914 - protein, 336 aa, unidentified
MNIKRIGLDLAKLVFQVHGVDHHERVVLRKTLRRSQMIVFFAQLEPCLIGIEACGSSHYWARELTRLGHSVRIIPPQFVKPYLKGNKNDANDAEAICEAVSRPGMRYVAVKSEAQQSMQAEHRVRARLLRDRTALSNEIRGMLGEFGLVLPVGLAALRRALPEILSQQEQWDNRFIRLLCELAEELQILDDRLARYDRRLKQLAQDDDRIRRLQEISGIGPVTASALVAAVGDARQFKNGREMAAWLGLVPRQHSSGGKNRLGHISKRGDSYLRTLLIHGARAVLNTCGNKEDRRSQWLQSVAERRNRNVATVAMANKNARIAWAVLSREEEYRVM

SEQ ID NO: 56915 - protein, 410 aa, unidentified
MERVIERCCGLDVHKKTVVACVHVPGRTGGREQQVRTFGTTTAELLALRDWLGGYGVTHVAMESTGVYWKPIFYVLEDAFTCVLANAAQIAQVPGRKTDVKDCAWIAQLLEHGLVRGSFVPPAPIRELRDLTRYRAALIGEHTRETNRLQKVLEDAGIKLASVASDVLGVSGRAMLNALTQGTHDPDVLADLARGALRRKLPALRQALTGRFRPHHAFLVSQVLAHLDYLDEVIEALSTHLDEVMAPFAEEVSRLDTIPGVNKRTAEVLIAEIGVDMGVFPTAGHLASWAGLCPGNNESAGKHRSGKIRKGNRWLRGALIQAALAGGTRATKGAFAARYRRVMRHRGHKKAVVAVAHAMLVAAYHLLARHTTYQEPGADYYERRHAERVRHRAVQLLERQGYRVTLEPAA

SEQ ID NO: 56916 - protein, 326 aa, unidentified
MEHELHYIGIDTAKEKLDVDVLRPDGRHRTKKFANTTKGHDELVSWLKGHKIDHAHICIEATGTYMEPVAECLYDAGYIVSVINPALGKAFAQSEGLRNKTDTVDARMLAEFCRQKRPAAWEAPHPLERALRALVVRHQALTDMHTQELNRTETAREVQRPSIDAHLLWLEAELKRLEKQIKDLTDDDPDMKHRRKLLESIPGIGEKTSAVLLAYIGLKDRFAHARQFAAFAGLTPRRYESGSSVRGASRMSKAGHVSLRSALYMPAMVATSKTEWGRAFRDRLAANGKKGKVILGAMMRKLAQVAYGVLKSGVPFDASRHNPVAA

SEQ ID NO: 56917 - protein, 395 aa, unidentified
MKTVCGLDVHKGMILMCILKENGEKIIREFTTLTVDIESIRDVMQEQGVQEVGMESTGIYWIPVWRILQGHFDLKLINPWFIKQLPGRKTDVKDSEWIATVIQKNLVRGSYVPGRHIQELRQFERRYVRLCEQSTRIEQEIDRQLHRCNIHITNYATKIGSASVIKVVKAIIEGETTAAVLEKHVHGRIKNKYKGEITASLTGVISGVDRFIFNQNILEYGLILAQQEECLKEMSGYCEKYFMKELQLLCTIPGIQKLSAMIIIAELGVDLKTFATAAALTGWAGLRPRNDESAGKIKSKKITKGNKYLRRILVQCAWAASRQKNCWLKTKFEQLCVRKSSKKALIAISRKLLVIIWNVLSKQEPYKEFIPKIDPQQKQKKIDYHKKIIQQLETV

SEQ ID NO: 56918 - protein, 403 aa, unidentified
MNMKAVGIDVSKGKSMVAILRPYGEIISKPFEVKHTVSGIRSLIEQIQSIDGESRIVMEHTGRYYEPLVRELSKADLFVSAINPKLIKDFGDNSLRKVKSDKADAVKIARYTLDSWTELRQYSLMDEIRNQLKTMNRQFDFYMKHKTAMKNNLISILDQTYPGANTYFDSPAREDGSQKWVDFSATYWHVDCVRKLSLNAFIDHYQKWCKRRKYNFSRSKAVEIYETSKELVSILPKDDLTKLIIKQAVEQLNTASQTVEQLRTMMNEAASKLPEYPVVMAMKGVGKSLGPQLMAEIGDVSRFTHKGALTAFAGVDPGVNESGSYEQKSVPASKRGSNTLRKTLFQVMDVLIKTKPQDDPVYLFMDKKRAQGKPYYVYMTAGANKFLRIYYGRVKEYLSSLPE

SEQ ID NO: 56919 - protein, 337 aa, unidentified
MQAIRIGLDLGKRFFQVHGVDARGAVVLQRKLRRGEVERFFAAVPACLIGMEAGATAHHWARVLMAQGHTVRLVPPAYIKAYLKRGKSDAADAAAICEAIDRPSMHFVAVKSAAQQAALVAHRVRALLVAQRTMTVNALRAHLAEFGLVAGAGIGRVEDLIALVVGADPRLPAAARSVLLALVAQYRALAAQIEIAERAIMAQHKASPASRRLAQVPGIGPITATALVATLGDARAFRSGRHLAAWLGLTPRQNGTGGKMQLGRISKGGDRYLRTLLVLGATAALRSAKRGDPALAWLRALLERKPARLATVAQANKNARIVWAMLTRGEAYRPAPH

SEQ ID NO: 56920 - protein, 316 aa, unidentified
MVPSPLFGGIDVAKATLDIAVRPTAETWSVSNDATGIDALVLRLGALAPPLIVLEATGGYQGPLVAALVAAALPVVVVNPRHIRAFAQAVGILAKTDRIDARVIAHFAEAVKPAPRPLPDAETQELRALLVRRRQLVEMVSAERARLDTVPPSIQDAIQAHIAWLTTQIAGLDDALTRASQTHPVWQAKDDVLQSIPGVGPVLARTMLGQVPEWGTLGPKPLAALIGVAPFNRDSGTLRGRRTVYGGRAEVRAVLYMGALVATRHNPVIKTFYERLLAAGKAKKVALTACMHKLLTIMNAMVRDLKPWQPQEVPSA

SEQ ID NO: 56921 - protein, 465 aa, unidentified
MAQRTPKPDQAAQLPPPLKHVHLNAAGIDVGGESHYVAVPADRDPQPVRQFGCFTPDLYQLADWLEACGVDTVAMESTGVYWIPVFEVLEERGFEVKLVSPQQLRRAPRRKTDVLDCQWLQELHTFGLLSGAFRPEDQVCVLRSYVRQRGMLVRYAGQHIQHMQKALTQMNVQLQHAVSDITGVTGMGIVRAILAGERNPQKLATLREPGCKRDQATIAKALQGNWRPEHLFALQQAVELYDSYQQKIADCDQQILAQLHRFEDRSERGSGTPPPPRPEGRKLRKNQPTFDAAGEVYRITGVDLTKINAIQGNTALKVISEIGTDVRPWPNEKHFTSWLGLCPDNRSSGGKKLRQRKVPPNANRAAEALRIAARSLHRSSSALGAFLRRMKARVGMPKAIEATARKLAVQIYYMLKHGTDYVDRGQDYYERAYQDRVLKNLSSNARKLGYRLVKEEPASTQPQPA

SEQ ID NO: 56922 - protein, 345 aa, unidentified
MQTVTTIGLDIAKSVFQVHGVDAQGKVIVRRQLKRRYVLAFFQKLPPCLIGIEACASSHYWSRELHALGHTVRLMPPAYVKPYVKRQKNDCADAEAICEAVTRASMRFVATKTVEQQSCLMLHRTRHLLIRQQTAVINAIRAHFAEFGIVAPVGRTGVEELLKVASDGNDKRLPDVARVCIAALGAQLQMLKARILEFDRLIMAWHRSNQVSKRLDELPGVGPALATALVGSIADPKAFRSGRDFSAWIGLVPKQHSSGGREKLGGISKQGDRYLRSLFVAGALAVIRYAKKRGSKHRPWLAALLARKPTKVAAIALANKIARMAWAMMAKGERYKQPVALAAAW

SEQ ID NO: 56923 - protein, 319 aa, unidentified
METPQVRFKQVVSRGCGLDVHKMVVVATIDGEGLKKQTREFSTVTSSLKELGDWLLENRITHVAMESTGVFWKPVYNILEPAGITVWVVNAAHVKYVPGHKTDKKDSAWLCKLLLAGLLKPSYIPAKEQRELRDLTRYRTKLVQSNASNKNRIIRILEDANIKLSSVLSSTSGAVGTKLIDKICDGEEITMQDVDEVYHKKLAATKEEIFEACQGFITEHHVYMLQIIRQEIANTQHTIESMNQRIKEVLSPYENALELLKEVPGISSKSVEELVAEIGLDMGVFPTEKHLASWAGMSPGNNESAGKKKADGQQGETSR

SEQ ID NO: 56924 - protein, 341 aa, unidentified
MEQMYFIGVDVSKGKLDIAVINAQKEVLLEKVVVNRLSTIKNFFDKLKGKLDVQADDMLICCENTGIYNRPLQKVASLSGLFLWEESALKIKKAASDLRGKSDKKDAMRIAEYALRYQDLKRKYEEPSDENQQLSSYLKSRDTIILQLTGLKNQLSEAKAMDIVRYKQLLEFYRPLLKAGQIQLKKIDQQITDLIEKNESLKTNIQLLTSIPGIGKQNALQFILHTQNFTAFSSAKHLACYTGVVPFPNQSGVMAKRERISKLANQKLKKLIHLVAMASVRVKGELKDYFIRKVKEGKNKMLVLNAVRNKLIQRMFVVIKRQTPYTPEFYSIKKELNSLAS

SEQ ID NO: 56925 - protein, 348 aa, unidentified
MTIVDAPRPVTGGVDTHLDLNVAAALDPVGGLLAVAEFPATSAGHRRLLGWLAGFGPVTRVGVEGTGSYGAGLARYLRAAGVEVVEVDRPNRQARRRAGKSDPLDAIEAARAALSGRASGLAKTRDGNVEAIRALVVARRSARSAKIMTLNQIRHLSFTAPEELRERLKDVSRQRLAARAAGLRPSRREGADPVTAATKTALRILGRRVLALDEEKARIDALLSGLVTQTAPDLLTLHGVGIDTAATLLVTAGDNPGRLRSEAAWAHLCGTAPIPASSGKVTRWRLNRGGDRQANRALWGIVITRLRNDLRTQAYMTRRLAEGRSTPEVIRILKRYVAREVYHHLPRS

SEQ ID NO: 56926 - protein, 357 aa, unidentified
MKRQKQYILRNEEVFVGLEDSKKTWKLCVRSGGVIVHEASMPAQYEVLRNYFHNKFPGCQIKVIYEAGFRGFELHDRLIADGWGCVVTPPHTVMEEKCQRKKNDRTDCRRLAKNLENGDYHICFVPDRELREDRQISRTYGQVEGDIKRTCNRIRRMLEFHGLDEGFPPGRWTQAMYDLARQKLGRLDMSESLRFSFEVLFRELEYLRGLRRELLRQLRRLARSDRYREDVELLKSAPGIGALTAIRLVLEWGDVRRFARKGDFASFLGLVPSDYSSGEKERRGHITKQGNPRLRAWLVECSWVAIRVDPVLLEKFRRVVRACGSKKKAIVAVARKLALRLRRVLISREPYVIGVLE

SEQ ID NO: 56927 - protein, 329 aa, unidentified
MENIALIGIDLGKNSFHIHCQDRRGKAVYRKKFTRPKLIEFLATCPATTIAMEACGGSHFMARKLEELGHSPKLISPQFVRPFVKSNKNDFVDAEAICEAASRPSMRFVQPRTESQQAMRALHRVRESLVQDKVKTTNQMHAFLLEFGISVPLGAAVISRLSTILEDNSLPLYLSQLLLKLQQHYHYLVEQIKDLESQLKRKLDEDEVGQRLLSILCVGTLTASTISTEIGDGKQYASSRDFAAATGLVPRQYSTGGRTTLLGISKRGNKKIRTLLVQCARVFIQKLEHQSGKLADWVRDLLCRKSNFVVTCALANKLARIAWALTARR

SEQ ID NO: 56928 - protein, 331 aa, unidentified
MNLIGIDVSNETFDIERRCGKVLSQREFSNSKAGHSQAIAWVQRGAEGARVCLEATGIYHLQLALALDRAPGIEVMVINPRAGRRFAEAQMVRAKTDKVDAAILLQYVERMRFTAWVAPSNQQLELQSLAHRLAQIRKEQVRERSRLHAAQRAGAHTRLAQRDIGEHLRYLKRHAERIQAAAIALMKQHECLAEDLQLLDSIPGIAELSAMKLIAELGLLAKGLSPAQWVAQAGLDPRPQESGTSLRTPRRISKQGNANLRAALFMPALAAIRTDPNVNAFYNALLARGKRKMQAIIAVMRKLLHAIWGVLHHRQEWDGAKFYRMPTANTA

SEQ ID NO: 56929 - protein, 390 aa, unidentified
MDVLYQSCAGIDVHQANIVVCILHGPLTSTRPKREMATFDTTTKGLRACHDFLSQFHVEAVGMESTGVYWRPVWHALCDDFKLILAQPAHMKAIPGQKTDKKDAHWIAKLTRIGLLPRSFVPDETIQELRELTRQRKHYVESRNRETNRIHKILQSGGIKLTTYIEDIMGLSGRNLLQLLVDGTPITPRIVHQSVYTSLKKKVPQLMEALDGYFSDHHRFMLKQSLEIYDFYQKQIGLLEERMNVYLSQYENHVEILDSIPGIDVITASVIISEVGVDMSQFPTAGHLASWTGLCPGNNESAGKKRSTKIRHGNSYLKKCLCQAAFAVKKQKGSPLADRFYQIQSRRGSQKATIALAHQLLKIAYILLKEQITYPEFLAQKKTTRDELVA

SEQ ID NO: 56930 - protein, 354 aa, unidentified
MIIIGCDYHPGFQQIAFVDTETGDYGELRLEHCEGAEKFYRDLATQGKKVRVGMEASGHARWFERLLEELHIELWVGDAAVIRAKRGRKAKTDRQDALHILNLLLKDDFPKIWVPSWENRDTRQLLWHRHRMVQARTRMMNQLQAVALNEGLRCKKKLWREHGREQLESFRLAPWASRRREDLLQLLDRINPTIAELTQAIEREAENSPQARRLMTHPGVGPLTALAFVLIIGKAERFQCGKQIAAYLGLVPLEDSSGERRRLGHITKQGNSLLRFLLVEAAQATTRTTPAWRSKYIHLTMRRGKKIAKVAMARKLAIRLFWMMRQGWNYQQVMKFGSHVGQPGNRDGVKSNTV

SEQ ID NO: 56931 - protein, 433 aa, unidentified
MAVQSLHSPRNYYGGGFVVKVVFPTCCGVDVHKTFLVATIITTPADSLQPNYQKKRFSTFNSDLNRFADWLLEHNCLDVCMESTGKYWVPVFNVLEKRGIRVVIANPKWVKAVKGNKDDTKDSKWIGDLFRIGLVKSSFIPDLNIRILREFTRYRYKLVSMKSSEKNRFQNAFTVCNVALDSVVSDMFGKSATAITDYLTSDESFDAEHCVSLLQRSLKKKAEQVLESIEGFSIADEQKARIKIIREHHDFIEEMIATVDTRVNEMVAKYEGNINLLCTIPGIDRRSAITIISEIGTDMGQFGSSKRLCCWAGLTPGNNESAGKKKSVRISRAGVYLKPALVQVAHAAVKDNDHPYYKLKYERIAKRRGKKRAIIAIARMILTAVYSMFCTGEVWNPVDLYKVDMPGCLKEQQLAKAIKQATRFLEKQGLSVA

SEQ ID NO: 56932 - protein, 354 aa, unidentified
MSNQSTPIVATMGIDIGKNTFHVVGLDQRGAIVLRQKWSRGQVEARLVNMPPCLIGMEACGGAHHLSRKLQSYGHDARLMPAKYVRPYSKGQKNDFRDGEAIAEAVQRPTMKFVATKTVDQLDLQALHRVRERLVSQRTGIINQIRAFLLERGVAVRQGLRFLRAELPRILATRSDVLSPRMMRTIEDLAGDWRRLDERIEGLSADITTLAKQDSACQRLMTVPGIGPIISSATVAAIGTGSIFSKGRDFGAWLGLVPKQISTGDRTILGKISKRGNRYLRALFVQAAWVVLIKPQSWERHGLKPWIEAAKKRLHHNVLAIALANKLARIAWAVLNKERNFEYLRTSAMAPRPA

SEQ ID NO: 56933 - protein, 338 aa, unidentified
MAWTVAIGVDTHKDAQVAVALDVLGVEHDQCVVEATLAGYKRLLSWAARLGEPAFAVEGCGSYGAGLARFLETSGCLVCECERPRRGDRRRGKNDLIDAALAARRLLSGEGLSTPRGGGQREQLRVLLVERRGAIQARTAALNQLHALVVTAPDALRERLTGLSNSRLVKTATKLRSSSDGLCEVLRRIAKRAQSLSHEIGEIDRSLLRLVTELAPQLLAECGVGAVCAAQLLVSSGDAKRMTSEASFAALAGTSPVDASSGKQQRHRLNRGGDRQLNWALHVIAIQRVRRDAETAAYYQRMLTAGKTAREAKRCIKRALARHFYHQLRQLTPTPLTT

SEQ ID NO: 56934 - protein, 344 aa, unidentified
MQITTVGIDLAKNVFQVHGANEHGKPVLRKVLRRGQVAAYFSNLPSCLIGMEACASAHHWARKLQALGHEVRLIAPQFVKPYVKSNKNDAADAEAICEAVARPSMRFVPIKNTEQQSVLALHRVRQAFVKARTAQANQIRGLLGEFGLVVPQGISYITERVPALLEDADNGLPARMRPLIYRLLDHLRLLHQQIAEVENEIKLWHRDNEYSRRLEAIPGIGVLTATALAATVGNAHGFDSGRQLAAWLGLVPRQHSSGGKTNLLGMSKRGDAYLRTLLIHGARSVIYRATQRGDERDWLVQLTARRNKNVAAVALANKTARIAWALLAHGREFRSDYATVQATA

SEQ ID NO: 56935 - protein, 431 aa, unidentified
MKNRTNQRLEEISITTLIVGIDIAKTTHYARFADYRGMEIGKAVSFKSNREGFEAIVTRIEQIRNNKITRQPFMEVIIGMEPTGHYWKTLAHYLLESGYRVVGVNPYHTKKAKELDDNSPTKNDKKDALTVARLVKDGRYFNPYLPTDIYAEFRVLANGRESVMKRNNAIKNTITAILDEYFPEIWQVFKKPLTGKTSRQVLKSCPFPAMLLSLGETGLMEEIRKAVKRTVGIKKVRELIITAEKSVGVPYGAESAKMRLRHLLDELEMVERQLSEIETTMEKMLHATSYAESMLSIKGVGIVTAARFLGEVGDPLRFDDARQISNYAGYNLTEDSSGKNKSGTVISKRGRSQLRGLLYQMAFTMVNCNPEMKALHEHLTSRAKNPLKKKQSLVVVSKKIITVIYSLLKKQTTYDPALALGAVRRELMKAA

SEQ ID NO: 56936 - protein, 359 aa, unidentified
MSNKVIFNLDELFISVGIDVGADFSWMSIALPNQQFVGKPYKILHNSIDSLTTAVSKIKEAEELYSLESRIFLESTGIYHYPLFCYLRDKGFNCSVINPIITKNSTNINIRKVHNDRFDSKKAALVGLKPDLKVSLMPSDLALNCRNLCREYYDLMDNRSAYVNKLQGELRMAFPQYLGIFSKVTINTSLTLLETYTSPSAFLKADKQEIIDIIKSTARFGLTYAQNKYNAIIQAATDANQFGYIIDSNIKRIRLYISFIRKYDEEINSILESLHELVDANEDSDFVKQIHLIETFKGAGFLSAVSIMGEIGDFSAFSKPKQLFAYFGLDPAVKQSGKFEGTKVQMSKRGSAIASVLAH

SEQ ID NO: 56937 - protein, 460 aa, unidentified
MNRKQRRETTRKIQSEDLSLEVIHPDAAGIDIGNESHYAAVPPSRDSQPVRRFGCTTAELKAMTDWLKQCGIRTIAMQSTSVYWVAVYDILEQAGLEVYLVNARDTKNLPGRKSDVQESQWLMKLHTYGLLRNSFRPSQEIRTMRTYWRQRNDLVQSAGRHIQRMQKALTQMNIQLANVLSDLSGVTGQAIIKAILAGERNAHKLAEFRDPRVRASKEQIAQSLEGNWQPDLLFVLKQEQESYEFCQKQMAECDRQFNEYLEQREDRSHGASLPEEKRKDRLKKKKGNKPQFDLRQGLFRLTGTDLTRIDGIDVMTATTVISEAGWDMSKWETENHFVSWLRLCPDNRISGDKVIGKGRLPTNNPINVALKMAASTLRLSKTYLGAQFRRLRTRLGAPIAIKAMAAKLARLVYRILRYGIKYIDQGAAFYEAQHRQLQISRLKFKAASLGYRVTPIPAAA

SEQ ID NO: 56938 - protein, 344 aa, unidentified
MKHYAGLDVSVKETSVCIIDEAGKTTREVKVASEPEAILAILMNEALTIERVGLEAGPLSQWLYSGLAETGLPVICVETRHMKAALSAQLNKSDRNDARGIAHMMRVGLYRPVHVKTLASQKRRMLLTSRQLLQAKALDIENDLRGTLRNFGLKVGMVGVAKFEARIRDLVVDHPDLAAITEPLLIARRVLREQLGVLHRRLLAVVRQDEVCRRLMTVPGVGPVVVLTFRATVDVAARFKNSKAVGAVFGLTPRRHQSGEIDRMGSISKSGDAMVRTVLFGAAQVMLTRTIRWSWLKAWGMKIARHRGMKRAIVAVARRMAVIMHRMWADGTEFRWSNTNAATA

SEQ ID NO: 56939 - protein, 335 aa, unidentified
MRYIGLDVHYSTSTYCVLDANGQELQCETVRGHWPTLLERLRTVAGPWTICFEATCGYGYLYRELSRLARRVVVAHPGQLRLIFRAKRKNDRIDARKLAKLLYLDEVPAAYVPSQDVQSWRELIEHRRRMMDHQTTCKNAIRSLLRAHGKIAPKGLWTKKGLAWFRQEEMPTVAARLKRDLLLDELNEAKRRVRTVTKALDEIGEHHPAVLVLRTIPGVGIRTAETVAAYMDNAKRFVRSSQVGAYFGLVPCQDASAGVNRLGHITRQGPATARKYLVEAAWQGVYRSPTIRAYFERIRHGRPERRKIALVATAHYLLRCMHAMLVRNQPWHEAA

SEQ ID NO: 56940 - protein, 391 aa, unidentified
MTKPKTKTVNDFSRCLDPLDMDATLIAVIEMSQSSWLVAGIVPGVERQPLKKLAISEHGLLNLLNRWRAEAEKQGHRITRIAVAFEAGHDGFWLARWLAAQGVEAHVIHASSVAVTREHRRAKTDRLDTELLKRGFLGWLRGERGHCKMVAVPTLAEEDAKRPSREREKLVGEASRIITRVKAAFVRLGIRGFNPKLKAAATRLETLRTPEDEPIPPNTLAALKRDLERHQIVKKQIRELEQTRLQSLAQAPAKGPNVMVLVLARVIGIGVETADMLVQEVLSRNMRDRRAVARYAGLTGSPDESGSKRREKGLARSGNARVRHGMIQLAWRFLVFQKDSALAQWYRQRTAAAPSMRKTLIVALARKLLIALWRLARDGVVPEGVRLRPAA

SEQ ID NO: 56941 - protein, 366 aa, unidentified
MRKPSTTALRRRGKLQGEQLTIGLDLGDRSSFYCVLNGAGEVVLEAKVATTPEAMRRTFEKMPASRIALETGTHSPWLSRLLTELGHEAIVAHARNVRLIGESRRKDDRLDAQALARLARIDPKLLSPIQHRSAQAQADLSVIRARYALVRARTALVCAARGLTKSFGERIRGRNPKGFSPATSEALSPPLQVALAPLLSALEAITARIREYDTQIEKLAEESYPETALLKQVKGVGTLIALTYVLTLEDPRRFRKSRDAGCFVGLQPGRRNSGQSEPQMHITREGDSYLRMVLVQGAQHIIGPFGEDSDLRRWGLKLAERGGKRGKRRAIIAVARKLAVLLHHLWISCEAYEPLHNTRKRRLAAA

SEQ ID NO: 56942 - protein, 388 aa, unidentified
MHLITSATVVATTARANDITLFASLELSKSKWVVTINSPGSEKFSRHVVEGGDGAGLLDLLSRSRAKAEQRYGVPIKAIVIQEAGLDGFWIHRLLLADGIESHVVDAASIAVNRRHRRAKTDAIDGETLLRTLMAWARGERRVCSMVRAPSPEEEDRRRLTRERGTLLKERIQHTNRVKGLLSGQGVRDYNPLRRDRFERLEALRTGDGRELPPLLKAEIRRELDRIAVVETQLAAVERARDALVRTEAAEEPNTPAALLLKLKGIGPEFASLLWLESLFRSFGNRRQVAAYGGLAPSPWQSGSIERDQGISKSGNRRLRKTMIELAWFWLRHQPDSALSRWFQARVGAGKGRIRRIAIVALARKLLVALWRYVTQGVVPEGAVLKAA

SEQ ID NO: 56943 - protein, 321 aa, unidentified
MRVMHERVAGIDVHKDMIKVAIRFPGEKGTRKTEVLEFRTFWGVLQEVARELRRRGVTHVAMEASGVYTEPVYHALCEQDFTGVLVINPKHVKALKGHKTDARDCRRIAELLECGLLRGSYVPSAEQKEMRDLTRYRKKLVQARTSEIQRMQKALESAGIKLGSVLTDITGVSATAMIDALIDGERRPQVMADLARGTLRAAGKQADLTMALAGRFTAHHATLLRMHRDQVKLNNHAIAGLDGQIAAAAGRWQREMDLLMTIPGFGPVAAATWIAEIGPGPHKYFDSHDKLGSFVTLAPGNYVSARKRSGVPLEAWTLRSG

SEQ ID NO: 56944 - protein, 393 aa, unidentified
MVVSVGIDVSKNKHDCFIVSSEGEVLADVFTLPNNMDGFYALLEKIRACTTPQDKIKVGLEATGHYSYNILGFLLDNGLATYVLNPLRTNLYRKSLSLRKTKTDRVDARTIAAMLLSDVGLKPYTNTAYHNEELKSLTRYRFDKVKERAKLKSSISRLVCILFPELEKLVSSLHLATVYALLEEFPGSKQIAKAHLTRLKTLLGNASKGRYGRDMAVTIRSAAQNSVGSCMPAKSLELQHTIRLIRELDAEIAEIEAEIETMMDKIQSPITTIPGMGFRMAAMILAEIGDFSRFESPDKLLAYAGMSPSTYQSGQLKNCYPHMEKRGSRYLRYALYNAAKYVCHWDPTFAAYLAKKRDEGKHYNVALSHATKKLVRLLFALERSRQPYCSLAA

SEQ ID NO: 56945 - protein, 353 aa, unidentified
MKKYIGCDAHTRYSIFVSLREDGGCDPAVRIEHNELEMERYLKQLPAGTPVALESSGNWYWLVRAMEEAGLDPRLAHALEAKKRMPGRNKTDHLDAKGLALMLRNGSLPEVWIPPANLLDLRDLMRTRLATRQQGSELKCRILAALRRYGVRREEEGADLFAESRRPKLAIAIARLPQECRIATTEEWALLRELEQHLEAMEQRIRQRIASLGWVRLLKTLPGVGTILGSTIYLEIGEVSRFPSPEHLASYAGLVPTVHASGGKMWQGPTPRSANHFLKWAFIEAANVIVAHQKGWADKHVVRLYQRLKANKCHGKATTAVARHLAESSWWILTKKQGYREPALATMSSSKNG

SEQ ID NO: 56946 - protein, 432 aa, unidentified
MLKINFMSTLFVGIDVSSKSNVVYAMDFYKNKYIQTSFSNNQPGADELSALIKDCMVAHSDLNTIVIAMESTSVYNIHIANHLSTCEILLPFKPYVFCLNPKMTANYRKAFTAMAKTDPLDAFIIADFARAGLIEIQPWRGSQFLALKRLTRHRLHLTECITREKTYMVSNLYLKFSELQLLSGGNQPFSNIYGAASSAILTEYLSPQEIIDASEEELLTFIAEKSRNRIADISKTTELLKKAARDSYRLDKCLYEPLNISLASSFNCIDTFKKEIKAIDDAIEKTIKGMNPNALTILKSINGIGPVFAAGIIAEIGDINIFHSSDALAKYAGLTWSKNQSGDFDGEDTCMQKAGNTYLRYYLGEAANSVRRYIPEYRDYYAKKYSEVPKHQHKRALALTSRKFVRLVFGLLVKNQLYTGEKLDTEFHIKAN

SEQ ID NO: 56947 - protein, 347 aa, unidentified
MIRIHRPVNHTLCVGVDLHKCSLTAAALDPASGDVTFTKIVCKCRQQIVDYFSALPRPHVVAIESVGFYRWLWELLEPIVDRLVLADATQCRALAGRRIKTDREDAANVAELLAAGRLPIAWAPPSHIAALRDVTRHRHYISRQHARVLHRVKSIMHQVNRPGPARLKAAGLMRYIKAQRDRLPAHLVVQLDMAVDELVLLERQLDRIDVSLKQTLRDERFADIAARLQSFPGVGGVISATILAEVGDFGRFDHRNALTRFAGLDPRVFSSADTVRTGRLSKAGSRELRWALVQAAWVAVRCEPSIKAKWLRIRKRTGGKRAIIAIARRLLLAMRAAERHGVCYHAA

SEQ ID NO: 56948 - protein, 385 aa, unidentified
MLTLDRPDAPAGTEYATVYLAFELSKATWRIGVLLPGSQKMSRFMIDGGDTATLATRLASMRAKAERCGKPVRIVSCYEAGLDAHWLHRWLTAQGVVSYVVDPASIEVNRRGRRAKTDNIDLEKLMRVLLAYLRGEPRVCSMLHVPSVEDEDRKRRTRERERLLQERTAHTNRIKALLVGQGIRDVQPLKPGFIASLEQMHTGDGRMLPPLLKQEIVREHERLMLADKQIAVLEAQSKAELRAAVPGSVAAKIMHLIDLKSIGVISGEKLVNEAFYRSFDNRRQVGSYFGLTGTPYDSGTSRREQGISKAGNRRARTLAIELAWLWLRHQPDSELSRWFRQRVGDLKGRIRRITIVAVARKLMIALWRYLTTGVVPTGAVLRPSF

SEQ ID NO: 56949 - protein, 387 aa, unidentified
MPQPNDLSRSLVTLEQDSTLIAVIEMGQSSWLVAGIVPGIERQPLKKLAADQDGLLQLLHRWRKEAAQAGHPIKRIAVAYEAGRDGFWLARWLRAREIEAYVIHPSSVPVSREHRRAKTDRLDTELLKRAFLGWLRGEPKHCSMAAIPTVEDEDARRPSRERESLVGECTRIVNRVKANLARLGIRGFRPRLAHAPKRLETLRTPEGTAVPANTLAELQRDMVHLRFVKQQIKEIETARAKRLEQASGGGRDAMVRLLARVVGIGIETADMLVQEVFSRKLRDRKAVARYAGLTGAPDESGQKRRERGLAKAGNARVRHAMIELAWGHLLHQKDSALAEWYQRRTVDARGGTRKTMIVALARKLLIALWRLVTTGEAPAGLLLRPAA

SEQ ID NO: 56950 - protein, 344 aa, unidentified
MQIKSVGIDLGKTVFHLVVLGEAGKVLVRKKFSRRQLLTYTANVPTSLIGLEACSGAHFLGRALRKQGHDVRLIAAQFVKPFVKSNKNDFVDAEAIAEAVERKNMRFVPIKTDDQLDLQAIHRVRDRLISRRTAVINQLRAFLLERGLTFARTPAKLRNGLPGIVENSEVNLTAQMRNLIELLWAEWKTVEEQIEGLSRELERISASDAGCTRLRQIPGIGPIVATAIVAAIGNGAAFGKGRDFAAWLGVVPRQYSTGGKTRLLGISKRGNVYLRKVLIHGARAAVLRMKRDRAPIGAWLDALDARAPKNIVVVAMANKLARIAWAVLSSGEDYKPATNLVTAS

SEQ ID NO: 56951 - protein, 387 aa, unidentified
MYFVGIDISKFKHDCAIIDELGDTVTPSWSFSNDWEGFSHLKALLDSLEGEMKIGLESTGHYGQNLKLFLESNGFTFMEFNPLLVSRFVRSKSLRNTKTDSIDALSIAHYVMTVEYKPYPPSFYHLDKLKSLTRFRDSLVRQRSHQLVGLTNVLDKLFPEFKPFFKGKLSVTALYILAHYQTPERIANMNARSYEALRKLSRGKFALSDFVQLKALAKNTVGTQSEYLLDQMNILLELYSQLDSKVDELDAQIKEYVRGIDPPCLSIPGIGELSAAVILSEFGDFCKFQNPSKMLAFAGLEPGYFQSGQSEYTGHMVKHGSSRLRYALMNCCLPLIANEPVFAEYYAKKRAEGKPYRVALTHVAKKLLRVIYTLQTKNIRYDPTVIR

SEQ ID NO: 56952 - protein, 523 aa, unidentified
MPRSRTARSSKAHKSLVLHKPNGLLSPRVQAVGPEHFGIVAVDCAKARSRYFLADFYGRVLLQPTTLTHSSGHFQAAIDRLRQAMIEHQLGDLVVAIERTGEYHRPVQRAFRQAGFEIRLVHPLTSKQYRQPADPGNKTDDTDLAAIFRATTHGFGLCDPVWPDLYRTLQLFRRHRRDLVDKNSQLCCQIREVLHAAMPGYAECFCHLWDDSPAPLVIARHTTSAQAVRQQGLAGLQQIAVQAGLRCREDTFHKILAWAQQAPPAHEHTLDLRRILGDLDDDRLHKTQQILELERSLAQLVVATPYALLLAIPGINIVTVADLAGELGPLQLYLNANAITGRAGLMPSRYQSDQVDHPNGPLRRRGHRRLRAVLMQTADNLVQCNHYFRARADLWKRAGKDARWIRVKVAKIFSRLAYALVAGQQLFRHDCCQPRHYVLGKLLEFHSSHRTAPEQIRQDLETVIGQLPATARAEEAPPLQKLLDELNQRSRGPQPLAKILPLVLARLGQRMLQSEAVREGTSS

SEQ ID NO: 56953 - protein, 363 aa, unidentified
MVESTTVTVGLDVHARSIRLAAVRGDELLEERTLPYDEEAVERLLRRWPLVRCCYEAGPTGFGLYRHLAGCGIECAVVAPGLVPQRPGDRVKTDPRDARKLARLLAGGLLEPIHVPSPELEAARDLVRAREDARLDRMRDRHRLSKFCLRHGRLLPTSSWTVIRRKWLGEQRFEHVAEQITFDTYLHAVDLVDARIEALERAIRETAEQEPWRELVARLRCLRGVDTLTALALVAEIGDFSRFRTAAELMAFVGLVPSEHSSGEHRRQGSITKVGNAHVRRLLVESAWHARRRPKVGYELARRQRGQDATVIERAWRCQQRLYTRWQRMAGRGKPQQKIAVACARELAGFVWAIATDQPLRNT

SEQ ID NO: 56954 - protein, 395 aa, unidentified
MVAAMKPGGELVTTPYEVKHSGIELSRFALDVLCMEPDTRVVMEATGRYHEPVAALLHSEGIFVSVLNPLLIKQSGAGSLRKVKSDPKDALKIAKYGLDNWSTLREYTPMEAIRQQLKLCARQCDLYSKNIVMLTNNLISLSDKTFPGVNELFSSPEKENGHLKWVDFYRTFWHCDCINRMSPDAFEERYKKWCKRKGYHFSADAADALYAASCGLYTTLPRDNNAKLLVTVATDQLIALRENQSKLETEMLNLCKQLPEYETVMAMYGVGKSTGPHLMAELGDIRRFPHRSSIVAFAGVDPGVVGSGKMQLSSVATSKRGSPQLRKALFQVVSAYVKRKPENEAVYQFYAKKRDEGKPYYVCTTAAANKFLRIYYARVKECLNAAESATQAEEG

SEQ ID NO: 56955 - protein, 363 aa, unidentified
MTSMTTPTPTEQQAQPNPGGFFAGVDTHKATHQVAVIDHHGHLVAERGFATTAAGCEAIRSWLAQWPLSRVGVEQTGTYGAELTRILQAQSLQVLEVDRPDVWTRARHGKSDPIDATAAAQAARTGRAVTIPKDTTGIIAAIARLHSVRRSAVKARAAALTQISAEAITTPAALRDRLGTTSRQIATTAARLRADLTRLDDPVQAAKHGLRHLARRIEALDEEIAELDRALDTLVAKAAPRLLARPGVGTAIAAQLLITAGQNIDRIGTDAKFARLAGIAPIPASSGQTHRMRLHRGGDRAANSAIHLVAIGRLRYHQPAIDYLARRTTQGLSKKDTIRAMKRLIARELFGALKADLQALDAI

SEQ ID NO: 56956 - protein, 431 aa, unidentified
MLKINPLSTLYVGIDVSSKSNYVCALDFFKNKYINSSFANNQPGAEELALKILECLNQHPDLTMVVAALESTSVYSIHIANYLSSCEELMRFKPYVFVLNPKCTANYKKSYIGLGKSDPIDAFVIADYARAGNIESEPWRASQFLALKRLTRHRLHLVECMTREKTYLISNLYLKFSELQMLEGDDQPFCDIYGATSSSVLMEYLSPEEILASSEEDLIAFLAEKSRNRIKDISKTADLLKKAARDSYRLDKALYEPLNVSIASSFNCIETFKREIKVIDNAIEKEIKGLNPNAFIILQSIDGIGPVFAGGIIAEIGDITAFHSSDALAKYAGLTWKSNQSGDFDGEDTPMIKAGNRYLRYYLGEAANSMRKHNVEYGAYYRKKYNEVPKHQHKRALALTSRKFVRLVYGLLARNQLYSGVSLDTSIKDSN

SEQ ID NO: 56957 - protein, 312 aa, unidentified
MKIICGVDISKAKLDACIEPGAIFASFDNDPAGIAELAAFCRQHQAGLVAMEATGGYERRAFSLLWEAAMPCAMTNPRSVRRYAEAMGVLEKTDRLDACVIARFAHAKNLQPTPAPTPAQQRLKALVARLRQVTDDLTVQKQRRASLADNAEMLASINEVIALLKRQSRTLEGEIASMIDDDPLWAQLAEAWRSVKGVAGRTVARLMADLPEIGTYSNKAIAKLVGLAPLADDSGKRQGKRSIRGGRASVRSILFLVAAIAAKYDKTLAEFCDRLLAAGKEKMVVRIALAHKLLVRLNAKARDARAQYANAT

SEQ ID NO: 56958 - protein, 372 aa, unidentified
MKQNIVYVGVDVDDVRYHGCALHQYTGEILDFHSRPTLQGLVGQLEKLREYFGAVQLKLCYEASYVGFSLQRDLQDQGYDCAVVAPTSIPRRAGKAVKTDRIDATELAEFYANGLLTVLAVPDAQLEQDRDLLRSRQQLVKQQGDLRRHIQSLLRRNGLHYKAETQRKTYWQTHHYGWIERTIETCSGSLKVNLSLLVRQLKTLDETLAAYSEEVYALALVPRYQEPVKALTCYKGIKQLFALTMITEIGDVKRFTHPRQLVSWVGMDIREYASGGKSHRFGITRQGNRYLRTAFIEANQRGYRSARLGKDVKARRANSAPEYVAIADRCLRRLNKKGNRLLLAGKHPNKVKVACAREMIGFVWESLNRVAA

SEQ ID NO: 56959 - protein, 420 aa, unidentified
MKSASSTLNSTLPESPPNDVTAGIDWARDDHAVAVVDGRGRQIYRCAVDHTAAGLRELVGVLGKYGVDEVAIERPDGPVVDALLGAGLTVVVISPNQVKNLRGRCGSAGNKDDRFDAFVLADTLRTDRARLRPLVPDTDATIALRRACRARKDLVRHRVATANQLRAHLRNVLPAGVGLFSEIDSAITLAFLTRFDTQDKVDWLTPKRLGDWLARQGYSGKVDPAVLHQRVLDAPRGATGVLAASQAHITASYVALLRTLAEQIKALEKRIDQQLDSHADAHIFTSLPRSGRVRAARLLAEIGDCRARFPTPESLTCLAGAAPSTRQSGKLRVVGFRWSCDKQLRDAVTDFAADTRLVNPWAADLYDRARERGHDHAHAVRILARAWLHIIWHCWQDSVPYDPANHRALQRFLAQQNEAA

SEQ ID NO: 56960 - protein, 338 aa, unidentified
MQIYGIDLASEKFDVSFIGEDGKPRHIVVRNTVSQIEKFLDRLPGDARIVAEHTGVYGDRLLKLATLHGVAVSYVSGYAIRHSMGLVRGKSDPIDAARIREYGERNADRLPETEPPSDSLYALRELYATRRMLVQQRKQLQTVLKSDTHRVVSCRKAQEVKNDMVSYLSARIEEIEREMRDIIERDQELSLTSAIVQSVPGIGPVTAMELIIKTGNFRRVPTAKKCATLAGISPWPNATGKTDRGAHVSYMGDKELKSLLFLCARSSAGCLEKMRVYRMKKEQTERKHYFLVMNNIANRVLKIIYALVKKREFYNPDFVPRDPRLKNRLTNFNNKEAS

SEQ ID NO: 56961 - protein, 326 aa, unidentified
MLDEAGNRVWRGRCATEPAAIAAAVRRYAPAALRIGLETGPLTTWLWTALTADGLPMVCLDARHAKKALDMKVNKTDANDAEGLARLVRAGWYREVRVKSRRAMLAKALLGARSQLLSMSLALENQIRGILKTFGRIVPKGAGGLFEKNVRALITDDAEIAAVIMPLLQARGMARSKCAALDRRLIGSVQADVTCRRLMTMPGVGPLTAVAYVAALEKPDTFKRSRAVGAWLGLTPRRFQSGEVDYDGHISRRGDRQLRALLYEAAAVLLTRVRRESALRRWGLLLWKRLGFKRAPTALARRMAVVLHAMWKSGTSFNPTLGAATP

SEQ ID NO: 56962 - protein, 320 aa, unidentified
MSAISVIAGIDVAKAHVDVDVVGVAFAPRRFDNEAEGHSAVTAALKPLGVCLVVLEATGGYEAALACALQGAGLAVAVVNPSQPRRFAQAMGYLAKTDRIDARVLAEFGQTLARRSDLSRFLRPMDDADQQWLAALVTRRRQLVAMMLSERQRLQITPVKLHPSLEAIIQAVKAQLDDVEAQMVGHVKEHFRELDAILQSVSGIGPVTSATLIAELPELGRLNRRQIASLVGVAPFAKDSGTARGRRRVQGGRFDVRRVLYMATLTAAFRNPVLKAHYQRLIGAGKLPKVALVACMRKLLTMLNAMVKAGAMWDPEHCRA

SEQ ID NO: 56963 - protein, 432 aa, unidentified
MKHKQYSTQTEKIKRITPETLVIGVDIASQKHCARGFNFRKMELGPQLYFQNDLAGFRTFIKWLERLTKANNCLDVIVGMEPTGHYYFALDHYLKEKGIEVVLVNPRDVKRQWEVENNASIKSDPRDAGIIGKLLTDGRYSPSIRYEGVKAELREVIKTRDMLIEEKTRLVNQIHQWLSTYFPEYRQVFKTGIGKWLITLLKEAPTPAEIARLKPDGIHRLMQTCRRSMSRSKVNKLYELARQSIGIQAGVQEAKERLKMLLKRLEQNQDDLRKKEKKIKTLTEQIKEAKLLTDITGIGNLTAATFLTEVGDIDQYETPKQIEKLAGLTLTSKSSGNKKGRGHISKMGRKKLRTVLYHIALTLSSKNDAFKKLYHYYKDIRKKPGTKALIKLCCKLIRVLFTILKKGEPFDPEKMLADIQWPENMTPGYSLS

SEQ ID NO: 56964 - protein, 387 aa, unidentified
MPQLNDLSRSLVALDQDSTIIAVVELSQSSWLVAGVLPGIERQPQKKLEPSAERLLGLLHRWRDEAVRAGKKITRIALAFEAGRDGFWLARWLNARGVEAHVIHPSSVAVSREHRRAKTDRLDTEMLKRGFLGWLRGERGHCSMARVPTIAEEDAKRPNRERECLVGERTRIVNRIKATLARMGIRNFKPTLRKAAERLATVRTPEGMPLPPNTLAELQRDMARLGFVVSQIREIEQARQKRLEQETETGPHAMVRQVARVIGIGIETADMLVHEVLSRPMRDRKAVARYAGLTGSPDESGARRREQGLARAGNARVRRGMIQLAWRFLRFQNQSALAQWYRARTADSRPGTRKTMIVALARKLLIALWRFVTTGETLDGVILRPAG

SEQ ID NO: 56965 - protein, 412 aa, unidentified
MVTELGRAIGLDVHRDFCEIAVCEHGKVRSAGRVASTPEALQALAESLLPSDTVAMEVTGGAWAIVRILEPHVKQVIVVSPGDTGITQARAKTDPLDARKLAKLLWAGELEAVWPPDELTRLLRRRLARREQLVRARSRSKNEIHAVLMRCLIGKPSVSDLFGVAGRKWLRGLELPVEEAETVEACMRHIEFLDAEIAEVERVVARYGMSCSEIRRLMSVPGVNVICAATFIAQVGEVRRFKTSRELVGYLGLDPRVRQSGSSPARSGRISKRGSGSVRWALVEAAWSVIHQPGPMRAFYERIRARRGHQVAVVAVARKLAVLFWCMLTREEQYAHQQPSLTAKKMRLLEIQSGTPTLKGKPTGVWATREKMREAEKALALQAEASYVRMVRDWQATAPGRGVGASVTPGRA

SEQ ID NO: 56966 - protein, 337 aa, unidentified
MDIKVIGVDIAKRYFQIHAIDGTGAIVMRRKVTRDVFLKLFADLPSCIVGIEAGSGAHHWARELGKLGHDVRLMPPQFVRPYVKSNKNDAADAEACCEAVQRRGMRFVPTKTIEQQAAMALHRVRDHLICRRTATINALRGHLAECGIVAQVQRTGLKQLFDVVIDDQDDRIDVALKPILKMLVEEICVADARIAELDRQMKDAARNSEACQRLVEVPGIGPVIATAVVAAVCNEKRFSSGRHFAAWLGLTPKQHSSGGKERLLGISKRGDAYMRRQFVNGGRSLVRIAEGRTGGIWDWINALLQRRSFNVVTVAVANKLARIAWAIQARGTRWQPA

SEQ ID NO: 56967 - protein, 341 aa, unidentified
MLLSFVLVRLPEKVINLSRIHIKEEDTLDTIAYIGVDVGKAELVVYSEQLTMLNRTYKNCDDDIRQMLETAQNYSIRIMVICEGTGGYEEKLRLLCYFYKIPCQVVNGARMRQFASSCGQMAKTDKLDSKIIHEYGKVFQLYENYRELSLNPDLEHLYQRYQQLVKLRAMEKNHYENLHDSIIQNSILEHIDDLSQQIKQCLVAIKGVIASDSVLQHNYDYLCSIHGVGEISAIAVLSDLPEIGQLSNKKISAMVGLAPYEKESGQKTNGKHIRGGRFLLRKVLYMAALASIRLDDEMKTFYHRLRAKGKPFKVAIVACMRKLVIAMNTVVKEQRLWLNQT

SEQ ID NO: 56968 - protein, 514 aa, unidentified
MFKRTVRKAKERAYVGKPLGVIQPRVAAVGPERFGIVAVDCGKGASVWMLADFYGRRLLPPQELLHSPGSLACAISQLRELLVRHNLADQIVAIERTGRYHLPVQQAFRAAGFETRIVHPLASRQYRELSDPANKTDATDLDGILRAATNGFGLIERPLEGSYLALCMLARHRRDLVEKRAAVLCQIREYLELTLPGYATCFDDLWDHRYALYLARQCDTPADFTARGLNGLKEMLRKEGRLFQERTLNRVLQWARTALPVGVEASLYRQVWHDLDDDRLEKNRQILRLEQQLAEHLALTPYVLLLSLPGINVVSAAELAGELGPIKHYASARAITGRAGLFPRRYQSHHVDRCGGLSPAGLRPLRFILLVIADNLIQCNPYYRGRALRCKDRQLDARLIRVKTAGAFSRVLFQMVAGGKVFTHPACQQRDYVLQKLLAFHHVHGTPLDQALRNLETARTQIPAQEYAAEAAPLSVELAKSRKLRRRGVKTLQDLLPVLLARLGVGSLQSESSE

SEQ ID NO: 56969 - protein, 349 aa, unidentified
MSQITEVGVDLASRVIQVHARDAAGRVLLARAFSRERFVQWASALVPGTSVTMEACGGAHHMARRLRLLGLDVRLIAPHFVPPYRLQGDRGKNDANDAAAICEAGSRPSMRFVPIKSAAAQGWQAIHRLREGYKEERTALVNRIRGLLEEFGVQAPAGIDALRRELAGLLEDASNELPGVLRLGLQRAQLHWIDLDLQLRWCDEQIALHVASQPAAQAAMHLCGVGPTTASALLASVGDLTQFKSGAQFGAWLGLVPSQHSSGGVARLGRITKRGDSYLRTLLIQAAKSAVMTAHKRHDRLACWVQQLKARVGWQKAVVALANKHARILWAVLAKGRRYDPNHVSFLPT

SEQ ID NO: 56970 - protein, 421 aa, unidentified
MTSILSNTQPTTWVGIDIAKRHNDVLVERPGHRRRRFRVANRLDDYQRFSEFLTDLPERPVIGFEATGNYHRTLAFFLAKKGFSLRLVSSVAAARTREALYNSWDKNDPKDAQVIIHMLKTGVTQYYHDPLIHEINELQELSKTHFQISLHKVRIQHSILTHYLPLYFPEAEKYMTNSRAQWFTHLIERYPCRAAVTKFSQEKFIDDAWSFVGRKVNKTAFLEDFYETATQTIGLPVSEDSEAIRMFRIVLREHQRLCVVRADIEKEAESFLGDNLDYIRLKTLPGIGPILSLTILAEGGDLRRFAHHRQFLKYCGFDLASQQSGQFRGRSKLSKRGNRRLRYAFWMAATIAIRMRENSFRDKYARYTQSDPTNADLKRKALTAVAAKMARVAHGMIKNETNYRPFHERAVPGGAIPSKGR

SEQ ID NO: 56971 - protein, 357 aa, unidentified
MTTTTTAARTILALDLGKYKSVACLYTGDPATATFLTFVTDCDRLRKLVAKHRPDAVVIEACLLAGWVHDLCHEVGLPCHVANTASEAWKFKHQKRKTDRDDALRLAQLFALGQLPTVTVPPPATRQWRALIAGRQRLVGRRVAVQNRVRAILVGQGLAAPRGAKAWTELGLEGIGQFAKPLADCGPDELWRGLLDLALTELRQVRQLADQAEARLDELAQASGAVQLLETVPGVGPRTAEAIVAHLHEPGRFDSGKQVSAYVGLVPRQYQSGESDRRGRITRRGPALLRKLLVECAWVMLRYNPWARAVYQRLSRGKARKKQAIVALARKLLVRCWAMLRDQTPWRDSPAAEAAPA

SEQ ID NO: 56972 - protein, 411 aa, unidentified
MEVVHSRCAGMDISKKDAKVCVRIAGAGRRKTTEMVTTWGSMTRQILALREHLVDQQVTCVVMEATSDYWKPFYYLLEDAGFEVMLVNARHVKTLPGRKTDVADATWLAQLGAHGLVRGSFVPPEPIRQLRDLTRTRTAITRERGREAQRLEKLLEDAGIKLSTVASDILGVSGRAMLEALIAGDTDPAALADLAKRRLRSKIPQLTEALNGRFTEHHAFLARVHLNLIDQHTAAINRLTERIEVMMEPFQGFRDLIRSIPGIGIGTADVIIAETGADMTRFPTAKHLASWAGTTPGNNESAGKVKSSRTRPGNPYLQGALGAAAMACSQNPRTYLGARYRRIASRRGPQKANVAIQHSMLTAIWHMGTTGTLYDDPGGDYFTRLHPDRSKKRAIHQLEAMGYRVTLENAS

SEQ ID NO: 56973 - protein, 299 aa, unidentified
MPHYVGLDAGKNTTSICIVDEDGAVFAEGEVPTEPADIIAFLRGRRLRFRRVGLEAMGLAPWLYEDLAKPGLPIVCIDPRHAHGILKAKLNKTDRNDARGIAEIMRVGVYRAVHVKTSASQEARALLGARKLLINKRKDVDNMIRGLLLQFGLKVPRFRVKTFERTVRGLVGKNKKLLTVVDALLDVRRVIEARARALEQVATATANADPVCCHLMTAPGVGALVALTYRAAVDVPERFTHSRTVGVHFGLTPRTKQSGELLRRGRISKCGDESVRTALFLAARTLLSKVKRHSLETQG

SEQ ID NO: 56974 - protein, 360 aa, unidentified
MSNYITIGMDLGNKRHTVCALDQAGKVMWRREVANTPEALKPFFEGNAGATVAMETGLCCRWISALAKTCGCNVLVGNARKLAAIWKNKQKNDENDALMIAELARASRRLFHPVELRDDKRHEMVQVIELREVAVSQRTQAVNSVRGLCKACGVFIPKCDAARFHKVAKESIPAGMAWKFKPMLRHLKELALTIGRYDDMLEEYAQEHFGDEVGLLRTVPGVGPVTSCAFVAHMADPKRFGRARDAGAYFGLTPGQDQSGDRDAPKRITKTGSASVRRLLVTAANYILRESSADTALKRHGERICARGGKVARRKAKTAVARKLAVIMLAMLKSGKPYDDGLAAKKSGAGNASSAGKLVA

SEQ ID NO: 56975 - protein, 336 aa, unidentified
MAMKTNPYSTLGEAMALGIDVSKARLALCWLLGEVEQHHEIDNQHAALERLAQALVCAGYRGKIVIESTGYYHWLAVVILSGHGLDVRLVNPLLAHKHHQAAIRKTKTDPVDAFQLATMCLTERRLPPSWDRDAQWVQHRHQVGLLRTVERTLQQLTAALNDHGNALAMMGAPNDPMVESLRQQTLALVRAKKHAEAQLAASLAALDEARQARYGSIPGVSRYLAGLMNLLLNPDVRQAKSWIAYVGLDISVRRSGTWVGRSKVTKRGFAYLRKRLYQAAWGAKQNDPHFRAYYDELRAQGRGYVETLLIIARKLLRIAFVLQQRGQMYDPTVAWA

SEQ ID NO: 56976 - protein, 354 aa, unidentified
MSKILAIDLGKFKSVTCLLETDTNATEFWTMATERHYLETVLQRYAPDLVVIEACAIAGWIHDVCTSLGYRVLVCNPAQEPWKWKHLKRKTDRDDALKIAKLAALDQLVPVYVPGREQREFRSLVKYRKAVLGRRTRVQNRIRAIFAQRGMAMTGGLKAWTLGRREELTCHGKPLADCTTDELWRGELDLELAELARLSEQLAQIDKKLDALGTDDQRVRLLRTIPGVGRRTAEVVVAYLDDPRRFKNARQVSSYAGLVPRRYQSGQMDRQGRIHKRGPRLLRSALVEASWVMLRLNPWARALYDRLCGGQKTRKKKAIVAVARKLLVRCWVMLLRKEPWRAVTPLAEPAGACV

SEQ ID NO: 56977 - protein, 350 aa, unidentified
MNNVDVFDSGGIEISAQELHLALQRQGRCEPVRIFPNTSAGHATLRAWLLRGQRPVRLCMESTGLYGLDVALALSGHAQLQLMVANPRAVRHFATALMRRSKTDPLDAAVLQEFAARMPFQPWTRPAPAALDLHALARRITARVEMHTAEKNRWHAAHVSQAIPAAVRRDVARSLQSQQNAIARLTREACRVIAGDARLRAQYALLLSVTGIAQTSAVQILAELSVLSSDLQVRQWVAYSGLDPRAYSSGSSVHKKTRISKAGNRHLRRALYMPALVATQRQPNLRAFYLHLLRLGKSKMQAIVAVMRKLLHAIFGMFRHGQPFDGARLVPLLAVDTAAPLPAFSEAACA

SEQ ID NO: 56978 - protein, 416 aa, unidentified
MSSIDQFAAHIGLDWADKKHDVCIQFNNGERLFHVTEHTPEALDTWLKALHKKVKGNIVVAVELKKGPVVYALQKYPFITVFPVHALSLARYRQTFWPSGAKDDPQDAELALELMLRYPKKIKAIEPDNADIRLLQQLVEQRRQLIEDKRRFVNRIISTLKQYYPQPLGWFSHRGSLLLCELIIRWPSLQQLKRARRDTIRNFLNAKGGRARALTEQRVASIDNAIPLTTDPSVVEANALMATALATQIKVVSEIIKTYDERIETLFDTLPDAELFKSLPSIGPCMGPRMLAALGDNRDRFNSAEEIQNYAGIAPVTERSGQKSWVHWRWQCAKFVRQTFVEWAAKTVNSSYWAKLYYQSLREKGKSHQSAIRALAFKWIRIIYRCWKNRICYNEAKYLLALKERNSPLLKPEKAC

SEQ ID NO: 56979 - protein, 337 aa, unidentified
MHYSGIDLHSNNSVVTVTDEEDRVVAEKRLPNDLAKIVGFLLPWRDELKAVVVESTYNWYWLVDGLQKAGFVVKLANTGAIKQYDGLKRSGDEADARQLAHLLRLGILPTGTILPPAHRAVRDLARKRMQRVRSRTRHILAIENIVARQRGMKINSNQVKRLTADVVDLMLLPADVALVVKSNLAVITTLSEQIELLEKRLQQSMGERSDYDLLTSAPGIGRILATIILLETGPIDRFASVGNFASSARCVDSRHMSNGKKKGEGNTKNGNKYLAWAFVEAANFALRFCAEAKRFYERKKAQTNPVVAIKALAHKLARACYHMLKENKPFDVTRCFA

SEQ ID NO: 56980 - protein, 311 aa, unidentified
MFIGIDVSKGRLDVAVCPSGDRDSVFNDEGGIQALIKRLGEIQPTLIVMEATGGFEHPAMRALASAELPVVVVNPRQVRDFAKATGQLAKTDRIDAWVLARFAEAVRPAVRPLPDEVTLELRALIARRRQLTEMIVAETNRLSSASKAVRKSIKAHVRWLEAELKRADKDLDQAIRQSPIWQENQDLLRSVPSIGPVVSRTLIAELPELGQLNRKQIAALVGIAPLNRDSGTFRGRRSIWGGRATVRATLYMAALVASRRNAVISAFYKRLRDAGKAPKVALVACMRKLLTILNAMIKHKTRWSEITLQTS

SEQ ID NO: 56981 - protein, 412 aa, unidentified
MHHKLTHLYIGVDLHKHQHTAVVINCWHEKKGELTFENKPSAFPQLVKLVKKLAKKEELTPVFGLEDVGGYGRALAIYLKDNGYMVKEVNSALSYAQRKSYPTTQKSDSWDAECVAQVLLNQLDTLPDANPQDIYWTIGQLVSRRNALVKNLSACKNQLHMQLNYQYPSYNKFFSEIDGKTALAFWSRFPAPHCLAGVTEEKLTEILLKASARACSTRKAREILALVEADGDTRREYQESRDFIIQSIVRDIKFKKEEIAEVEQAIGNVMKLLEYKLETMAGINLVTASALVAEIGDIRRFSSPDKLARFAGIAPVNYSSGGKGRNQKSRQGNRVLHGLFYTLAVQQVQTAKGSKMPRNPFFYEYYHRKLAEGKTKGQALICVMRRLVNIIYGMMKHKTAYVAPIVEQQKAG

SEQ ID NO: 56982 - protein, 354 aa, unidentified
MNNITFSNTFFFVGIDTHLKNWRVTIRNSGLELKTFSMNPSPDELYKYLTTHYPEGTYFIVYEAGFCGFWPQRKFNELGINCIIVNPADVPSSGKEKVVKTDPNDSRKLARELENGSLKAIYVPDVNHEQLRSLMRLRFRLVQNQTRIKNRIKMLLYNYGIIIPKEHITNPRWSGYFIHWLKSIKLNSTAGQFTLDNLLLQLEQSRENLKQVLKQLREESKQENISSVISSLVSVPGIAFITAMSLYTEIIDIKRFNSFDNLASFVGLVPSVYSSGETDYTRGISFRHNKFLRPLIVEAAWTAVKTDPALTFKYKELIKTMAKQKAIIRIAKKLLRRIRHVWINQDRYVKALVA

SEQ ID NO: 56983 - protein, 351 aa, unidentified
MVVVGADVHKRSHTFVAVDEVGRRLGEKTVKATTEGHHVALMWAREQFGTDLIWGIEDCRNMSARLERDLLGGDQNVVRVPTKLMAATRKSGRVRGKSDPIDAEAVARAVLREPDLPVASHDEVSRECKLLTDRRDVLVAQRTSAINRLRWNVHELDPERGPEPRSLKAAKHQQALRNWLDTMPGLVAELARAELDDIVRLTAEINALDKRLSERVRAVAPTLLSIEGCAELTAAKLVGEAAGVARFKSEAAFSCHAGVAPIPVWSGNTKGQMRLSRSGNRQLNAAIHRIAVTQIRMPKSPGHAYYQRRINEGKTPAAARRCVKRGIARRVYRALLHDHQTHNHALQHTAA

SEQ ID NO: 56984 - protein, 363 aa, unidentified
MKNYIFVGCDSHEEILVNKFAHNDGPMEMKKCSAKRAGRQKMIEYFTEQSRRAGGAQVVVVYEASAHGFILCDQLRAAGFICHVLAPTKIERSSKQKRNKNDERDAERLLDIVRGHYLAGTKLPAVWVPDAQTRDDREPVRARQDLSEKLTIVKTQMQMLLKRHGLEKPEEVGNNWTKRHRQWVEALSQEGPPIQLGMRQALKTLLRQLQFLEQEIEQIDEAMRELANTARRKPIVDALMSEKGVGLTTALKYATDIGDFPRFRRGRQIGAFFGLAPSSNESGENNDRKGHITREGSPSARQILCQATWSRVQHDPQEREVYQRLVAKNPKKKKIALVACMRRLAVRLWHIGLEAQLRMEAAG

SEQ ID NO: 56985 - protein, 415 aa, unidentified
MALKIVYKICCGIDVHKTFVVACIASTNDKGITSYESHRFSTYTSGLKTLLQWLLDRNCKDVCMESTGKYWIPVYNILESDCSIVLAHPKYVKAIRGKKTDKKDAKWIADLFKHDLVAGSFMPPADIRQLRDLMRYRFKLTCFKSSEKNRLQNCLTVSNIQLGNVVSDTFGKSAQAILDKLLENPADTSFDLEPLVYKNLKKKLPELRDAIDGYITPEQAGKLKVIKAHYENLESRKAELEELILALAAPYQQELTILQTAPGISSPFTAIGIISEIGTNMEAFPSAKHLCSWAGLTPTNNESAGKKKSVRVSKAGCYIKPLLVQCANAVVKSTKHPEMRNRYLRLKKRRGHKKAIIAIARMLLTALYHMLKNGENYNAELYQKSDLLPVDREITVEQALMIARNQGYKIKSATA

SEQ ID NO: 56986 - protein, 397 aa, unidentified
MIAVGIDVSKSKSTVAILNGHGSIRAKPFDVHHVADELQALVDYIKRTSEPPTILMEPTSHYHYPLLKAFTEAELPVCLINPYQMKKYVDTELRKAKTDKRDSLRIAQYALEKSYSLIPYTPQDQKYEDLRFLSRQYSQRISTLTVAKVQLLSLLDETMPGITTILPLKSRDPDNCVLLRFIKRFKSFDVIRKMGKTRFLDSYQVLVKKTKDRFAGSKGLAIYELVLNSVTTRGENPLSAMTQDQCVDLVSTSQKAADEINLQMRIIAETMPEYKVLRSMAGVGDRLGPIILGEIGDIRRFHSGKALNAYAGNDAPPYQSGQFESRNRHISKRGNPALRKACFEVMQALKLTKPQDDPVYLFLLKKEQEGKPYNVAKMAAVNKFLRIYYARAMELYK

SEQ ID NO: 56987 - protein, 345 aa, unidentified
MKVSTVGLDLAKNVFQVHAIDEAGEVLVRKALRRRQVMPFFSRLGPCLIGMEACGTSHFWAREIAALGHEVKLMPPAYVKPYVKRGKTDAGDAAAICEAVERPTMRFVAMKSPEQQSMLALHRSRDLLIRQRTMLVNMIRGQLAEFGIVLAKGIQHALKLVDRLVDGEALDIPALAAKVVIILAGQVRDLQVRIGILERDLKIWSRDNQVVIRLQTIPGIGIITASALAASVTDPQQFTSGRQFAAWLGLTPRARSSGGKERSGRISKMGDQYLRRLLVNGMTSRLRWLRHHPETQPWAAGLLHRKPAKLVAVALANKTARIAWAVMTRGETYRAPQPATREVTM

SEQ ID NO: 56988 - protein, 417 aa, unidentified
MNTEKEIVCGADIHRDFLVATMISRSGLKLQEQFGMDQDGLLAFRSWILDHRCLRVAVESTGNYWYPIFCILEGHVEFILANAFQIRNIECKKTDRLDSERIAIYCLNNLIKPSRIYPKDYRDLRSITRSREALVNARSKLKNQIHQSLAVCCIKLSSVISDSFGKSGRYIIEQLLEGKTIEQIISRIPSKRVRKKADELRKAIRNGLDSVQILLIKTNLDAIDYLSEKIKLLDAEIAVKVKPFEEDLNIILSVPGIGLTSAATILAEMGDYRDFQNADKLAMYFGIVPAVYQSAGKLRTGKITKRGSKHMRRILVQVAKAISKTKKSSRLKRFFLRVFTRSGKKNVAAIALARKVLCIIYHLLMKREDYQEPEVKKNKPKIPSCVSPLSMMDIDEMIKTISQAGYLVKKGLKEGCG

SEQ ID NO: 56989 - protein, 338 aa, unidentified
MNIVFLGIDLAKNVFQICGLNQAGKPVYTKRTGRKELLQMLANIPACLIGIEASTGAFYWQREFEKLGHNVKVISPQYVKPFVRGQKNDGNDAQAIAVALMQPTMHFVPPKSPEQQDIQALHRARQRIVNHRTATVCQIRGLLLDRGITIGAAVSRVRRAVPLILEDAENGLSVRMRSTIAELYDLFNDLERRIHFFDKEIETVFRQSEACQRIAKVKDIGPKTATAVVAAIGKGTEFKNGRHFAAWLGLVPRQHSSGDRQVLMNMTKKGDKHLRTLFIHGARAVVRVAANNNDSHMNQWVNQLKERRGFNKTTVAVANKNARIIWSMLRNETEYQVV

SEQ ID NO: 56990 - protein, 394 aa, unidentified
MKLVGIDVGKNSHHFCVMDKETGEFNVTPSSFPNNKEGFDFLINSLKPYSKKSILIGMEDTGHYHVALLKFLLSNGYTVALINPKTTDLTRKMEGGITKNDKLDTITICDVLDTPERKKQYRITKVDRFDLCEQRQLTRHHHNLKEELNVYCNRLQKSIDLVFPEFNTLFSSKYGIVYMNLLKTFGSAEAIASTDIRTIRKFFEIKGKGNRISLTPEKLKECAKNSIGISSGVETIQIKHLVSQITLIKEQIAEIDKKIEEFSITNNSPILSIPGISHFSGTSILAELGDIGNYSKPSQIIKFAGVAPYHYESSQYNAQHTAITKKGSKYLRKTLYQIILPVINNNPVFKKYYLLKISQGKGHRCAQGHCIRKLLRIIYHLLETGQSFDPALLR

SEQ ID NO: 56991 - protein, 354 aa, unidentified
MEKSNTALYGGLDLHGDNTYCALLDTNKNIVFERKLPNNLEAICQALEPHKQRIKSLAVESTFNWYWLVDGLVDQGYAVHLANPALIELNKGKKHANDKTDARHLAKLLLLGELPTGYVYPRETRGVRDLMRRRGRLVQDRTTEHQRLTGLCARQTGQELSARKILAAAAETPPRLAELLNHHAPSLLMAESSIRHIDHLNTEIKALEKTILNDLPDLDAYALLQTVPGIGPVLARCILLETGPIERFPSAGDYASYCRAVPAEHTSNGKKKDDGNTKCGNRHLAWAFVEAANFAVRFSPEINAWFQRKLTRSRNLRVLAVKALANKLAKSCHFILRDRKPFNLALLLGGTPAK

SEQ ID NO: 56992 - protein, 431 aa, unidentified
MTASDSNARPCNLVAIDIAKAKHDVLVELRNGKRRKMIVRNQLSDFRQLVAFLKRLDGALEIALEPTADYHRNLAYFLKAQGFAVKLVSSIAVARTREALHNSWDKNDPKDAQVILHLLRNGNTQYFYDPVIEQTNDLQELSKTHFQVSLRKTRVQHSLLNHYLPLYFPEAERFLSNSRSSWFARLLIEFPTPQAITQLTEKEFIDRASQLLWRKQAKAPILRALYAKAQESVALPVPLESQAIATFRLTLAQHLELCRIRAELEETAHELLQDQLDYQILRSVPGVGPIIALTVLAEAGDLRRFGHERQFLKFCGLDLATSQSGAYRGRTQLSKRGNSRLRSALWMAARRATHMQENTFRQKFSRYLRSDPTNTDLRRKAYTACTAKMARTIYGLIKHQQFYRAYREDAIPEPGGRTRSHGPLRQAAAVA

SEQ ID NO: 56993 - protein, 450 aa, unidentified
MQFMKKKAGFPVLYPNAAGIDIASREHYVAVNPDAAEQSIRSFGSFTDDLHEIAAWLLQCKVDTVAMEATGIYWVSLYLILEEAGFEVVLVNAKHVKNVSGKKSDVKDAEWIRQLHSCGLLSKGFQPDHFTRTLRAYMRHRKNLTEMAATHIRMMQNALEQMNIKLQNVIADITGKSGQAIIKAIIDGEHDPQNLVKLLDGRIKATKESICKSLHGIWKTENLFELKQSFDLYHTYQEMIKECDLHIKRHIEEKASYCESDQIQSLYPVKKKYKTNKNNLNFDATDMLQKIVGTDLTEIFGITDTNATEIISEIGLDMSKWPTAKHFTAWLNLAPNNKVSGGKLLSSRVPRKRNKAGQIFKMAAFAVQRSKNWLAIFYNRIKMRSGTSRAVTATARKIAVIFYKLMKEKLRFCPLDRDQYLESFKVRQLKKLKQQATRLGLVLVPDNLVT

SEQ ID NO: 56994 - protein, 355 aa, unidentified
MDSTKYIGMDVHKESISIAVMNGAGKIVMECVIETKASMILQFIDGLRGDLQVTFEEGTSAAWLYDLLKPHVRKLVVCDPRKNASMREGHQNDKIDARRLAELLRLNHLHPVYHGEHGLRSLKELVRSYLTITKDLGRVMSRVKAIYRSWAIPCTGKQVYAPRHRAEWLAKIGEPGVRRRAEFYYQQLDALRTVRQQVRRELLAEGKKHKAWKRLCQIPSIGPIRSAVLLGILQTPHRFRTKRQLWTYSGFGIETQSSADHRRVDGQLERAKKQNSIRGLNRNCNHDLKNLFKGAAIVASSKPGPFQEFYTTLLTKGLRPEMARLTLARKIATIVLIVWKRGACFDAQHLKPQTA

SEQ ID NO: 56995 - protein, 371 aa, unidentified
MEHYSEAYVGLDVSKSRNAVAIAEGGRNGEIRYLGEIDNTLEATRKLAAKLGAKYERLQFCYEAGPTGYGLHRWLTDLGHACMVVAPSLIPQRPGDRVKTNRRDAEGLAKLLRAGELTAVWVPDGAHEAIRDLVRARSAVVRDVRGKRQQVTSFLLRHGRSYPGKTAWGARHQRWLSEQAMPHRAQQVTLAEMIGAVRDAEERQKRLEQYLSEAAKEWSLGPVVDALQAMRGIRFVSAVTFMAEVGDLSRFTTPRQLMGYLGLVPSERSTGDSVKRGGITKAGNAAARTMLVESAWSYKHAPRVGAQKRYVIDKLPKAVVDIAWKAQSRLCRRHRTLTQAGKCSVVVNTAVAREMAAFMWAIAGEVRPKTA

SEQ ID NO: 56996 - protein, 377 aa, unidentified
MSKVLFVGLDVHAETIAVAVAEQGGEVRSLGTIPNRLEPIRKLIHKLGPVQHLRACYEAGPTGYVLYWQLTQLGVACDVIAPSLVPTKAGDRVKTDRRDAEKLARCHRAGELTAVWVPDADHEALRDLVRAREAAKKDQLKARHRLGKFLLRHGQRRPDSVRVWTKRHREWIKSHVRFQQAALEATLADYVEEVDHVAARIVKLEKAMDEAVRHAPPEIRAVIEALQALRGVAQTTAASIVSEVGCLSRFPTAPDLMGYSGLVSSEHTTGNRVQRGGITKTGNAHLRRVVVEAAWAYQHRPNVIGYLLRRQKNLAISDEVKDIAWKAQQRLHKRYKAMAARGKNKNQIVAALGRELLGFIWAIGVKTEQQQKLSKAA

SEQ ID NO: 56997 - protein, 375 aa, unidentified
MSASHRGCDGVDASPTALGVPEWWVLVTTEQEASVSEVSTIGLDLAKRVFQAHGADASGKVVFRKRLRREQVLAFFAGRPACVVAMEACSSAHYWAREIGELGHTVRLIPPAYVKPFVKRQKNDTTDAEAICEAAQRPTMRFVSVKSEAAQANAVVFRARDLLVRQRTQAINALRGHLGEYGVVVAKGPSHVAQLIAHVEDPDAGIPEAARTVLRVLTASLQFLSERIDLLDREIARRAREDKEVRRLTTIPGVGPVIATALAAMAPPADAFKRGRDFAAWVGLTPSQHSSGGKQKLGATSKMGERTLRRLLIIGASSVVQKAIKHGTPSGSWLGRMLARKPRMLVIVALANKMARTVWALRATGEIYRAPIVAV

SEQ ID NO: 56998 - protein, 345 aa, unidentified
MNATTVAVDLAKNAFELAGADGNWKVIEKARLTRSQFARWFDNRAVQLVVMEACGSAHHWARTLRARGIEVRLLPAQYVRAYVKRNKTDAVDAVALLEAARATDIKPVAVKSIEQQALQALHRMRSAWMATRTGRINMLRGFCREFGLDVPVGAVRGIAQIARFIADDRSAIPAILRTPMRLALEEIRLMEARIEQVERELAEIARRSPACAALTSVPGIGLLTSTAMLAAVGDPKSFNAGRRYSSFLGLTPREYSSGGTRHLGRISKRGDRYIRMLLTHGARSVLRAATVARRAGRNVDRLRSWALAVQDRTNHNKATCALANKLARIAWAVWVKHERYQPAAT

SEQ ID NO: 56999 - protein, 420 aa, unidentified
MKVVYQTCCGVDVHKSFLVATIIQTTSGVEPSYHKKRFSTFNNSILQFKEWLIENQCRDVCMESTGKYWVPVFNLLEDEINVTIANPKWVKAVKGNKDDTKDSKWIGDLFRLGLVPGSYIPCKPIRILREFTRYRYKLTSCRSSEKNRYQNALTVCNVALDSVVSDIFGKSATSVIDYLIEQSDNSINHEEIASRLLRSLKKKSDSVMESIEGYQMTDSQKYRMRLVRAHMDYITSTINDIDTRMDSLITPYENAVQLLRTIPGVDRNSAITIISEIGTDMTQFSNSKRLCCWAGLTPGNNESAGKKKSVRITRAGVYLKPALVQVAHAAVKSDKTPYYKTKYERISKRRGKKRAIIAIARMILTAVYQMLSTGEEWNPTDLYKIDMPESLKEKQKEKAIKQARKLLISEGIISETQLAS

SEQ ID NO: 57000 - protein, 337 aa, unidentified
MADVYMLAIDLAKRSFQVCATDRAGSVLYNRTISRSKLEVLLKEQSRCIVAMEACATSHFWGRVAEAHGHEVRLIPPIYVKPFVKRQKNDAADAAAIAEAAVRPNIHYVAVKSAEHQARAVAYRTHQCFVGQRTQVINALRGHLAEFGLVFAQGVPHLTDIRAAMQDESVDLPDSVRDVARLYLDHIDTLSAKIDELSLRLREAMKVNAEMRRLCTVPGVGPVTAGAIMAFAPDLGTFASGRNFAAWLGLVPRQRSTGGKARLGSMSKMGQSDIRKLLVVGAMSRIRWIVRKGVLPDNWLGRLMARKPRMVAAVALANKMARIIWAMMTREENYRLA

SEQ ID NO: 57001 - protein, 402 aa, unidentified
MNAVGIDVSKGKSMVAIMRPFGEIVSAPFEIKHTASGINSLVELINSVEGESRIVMEHTGRYYEVLAHQLSEANLFVSAINPKLIKDFDNDSLRKVKSDKADAVKIARYTLDKWQNLKQYNVMDELRNQLKTMNRQFGFYIKHKTAMKNNLIGILDQTYPGVNTYFDSPARSDGSQKWVDFASTYWHVDCVRKMSLNAFIDHYQNWCKRKKYNFSKSKAEEIYGKAKELVPVLPKDAITKLIIKQAVDQLNSASTTVESLRTLMNETASKLPEYPVVMAMKGVGTSLGPQLIAEIGDVSRFTHKSAITAFAGVDPGVNESGSYEQKSVPTSKRGSSDLRKTLFQVMDVLIKTHPQDDPVYQFLDKKRAQGKPYYVYMTAGANKFLRIYYGRVKEYLSSLPES

SEQ ID NO: 57002 - protein, 349 aa, unidentified
MKKPNKTQKQVRETIGIDLGDKVSRYCIIDSDGGVVEEGAFRNQASSIEKHFGDQPRQIALEAGGQSAWISRELKKLGNEVIVANPRDLKWITASDTKNDEGDARKLALLARADARLLAPVEHRTAEQQAELAVIRARDAILRARTLLINSARGIAKGFGVRLPKSITGTFGQRAVEGLPEFLRKALTGLLDQIDALSREITGHDQQIGVLAGQHPELARLESIPGVGRLTALTFVLTLGRAERFAHSRDVAGFLGLRPKQRQSGACDPQLGISKSGDPYLRKLLVQCSHYVLGHWGPDSALRQWGLAKSRGGKKATLRAIVAVARKLSVLLHRLWVSGEFYKPFPKMV

SEQ ID NO: 57003 - protein, 346 aa, unidentified
MRFYQQTHSFYCGVDLHARTMHVCVVDAEGRTQEHVNLPCDPGRFLKLVEPYRERLVVACECLFAWYWLADLCREEGISFVLGHALDMRAIHGGKTKNDKIDSEKIARLLRGGMLPQAYVYPKEMRATRDLLRRRMKLVRLRGQAIAHVTNTFTQYNVAAPEKRLSYHANRVGVAERFSDESVQRAVRSDLAFAEHLDEQLRGIELYLTQHAKIDDPQAFGRLQTVPGIGPILAMVVLYEVHDIGRFGSVQQFVSYCRLVKCSHESAGKKTTGKGNKIGNAHLKWAFSEAALLMLREHPAAKSYVARLEKKHGKAKAISILSARLGRTVYWMLKRKESFEEPRFLK

SEQ ID NO: 57004 - protein, 370 aa, unidentified
MKKNSKNSKSPTRSTKTKLRKTDQVTIGMDLGDKTSRYCVLNAAGEVLLEGSCATTKAGMAQVFGAMPYCRIAIEVGAHSPWVSRTLKRLGHEVIVANARQVKLISQSSRKNDKLDAQMLARLARVDPALLRPIRHRSEEAQKDLMTIRIRAALVESRTGLVNAARGLAKSTGERLAACDADQMEVEKLEQLPADLRETLKLLVEEVESLTEKIKECDRKIEQIARDRYPETKLLRQVSGVGPLIALTYILTIEDKQRFPKSRDVGCYVGLRPKQSESGERQPELRITKEGDVYLRKLLVQGAHCIMAKRAPDTDLKRWGTKLAGRGGKNARKRAIVAVARKLAILLHRLWATGEVYEPLRNSQAMAKAA

SEQ ID NO: 57005 - protein, 364 aa, unidentified
MPMLEGKVDHVIGVDTHRDTHAAAILDRNGGLVAHLEVPSSQAGCEALLRFVAERALGRRCWALEGTGCYGAGLASVLLGHGEWVTEIDRPKRPRGRNGAKSDPLDAIRAGREALSREHLACPRQRGQREALRVLQLARSGAVKVAADARRQLKALLVTAPEPLRAGLRTGTALQQARVCAALGASAADPVEHRATVRALRVTAARMLTAYREARQLEQELRALVTAVAPALLAQPGVGPITAAQLLISWSHPGRLRSEAAFAMLAGVAPIEASSGRVVRHRLNRGGDRQLNRALHTIVMIRETWHEPTRRYVARRIAEGKSDREIRRCLKRTVARGLFRLLTRTVLPATGPGGLGAWRPAPPR

SEQ ID NO: 57006 - protein, 344 aa, unidentified
MAISVLGIDLGKNVCSLVGLDETGAVVLRRRVRRQTLVKLVEQLPQCIVGMEACCGAHHLGRLFRANGHDIRLMSPEYVRPYVKAQKNDDRDAEGIAEAATRPTMRFVELKDEDQLDMQTLHRARSRLVGERTALINQLRAVLLERGIIAPQGRRKLELFLIEMLDECQMPDLSSRMRLLITDMREEWKSLDRRIAVFDDEFKRYAKEDADARLLTTIPGVGVMIATALTAAVGKAEAFEHGRDLAAWLGLVPRQSTTGGKPRLLGISKRGNRYLRTLLIHGARAALPHIAERNTALGRWAKKLLGRVHHNVAAVALANKLARIAWAVLRRNEKFADQPALTTP

SEQ ID NO: 57007 - protein, 318 aa, unidentified
MKSKSDYSIKYYVGVDVCKDKLDLHHRQLQQPRSFANTPAGLRGLLGELKKLSEPIHIVCEPTGGYEKALLEFCFTHHIAVSSVNARQVRDFARAAGQLAKTDAIDARVLCEYGHTFHPPAAVCPSPQQVELSAVVRRKERLTAQLSREKITLQKTTDHYVKGDLRASIRFLQGRVERCQDRIKKLIEANRELKEKARKLEQIKGLGPGTSGVLIAEMPELGSISDKQASRLVGVAPLNRDSGAWRGKRSIHGGRALVRRSLYMPALCAVRFNPILKAFYERLRAKGKAHHVALTAVMRKLVCLANRILKDPLFVPSQ

SEQ ID NO: 57008 - protein, 343 aa, unidentified
MDHFAGLDVSVKETSVCIVDDTGRIVREVKVASEPEALLAVLTNPNYHFKRIGLEAGPLSQWLYSALAEAGLPVICVETRHMRAVLKAQINKTDRNDARGIAQMMRVRLYRPVHVKTLRSQKLRMLLTHRKLLQAKAIAIENDLRSTLRNFGLKVGMVGNVKFEGRIKELVENLPDLAILVEPLLIVRRVLHEQLGILHRRLLDIVRNDDVCRRLMTVPGVGPVVALTYRATVDVPARFKNSKAVGASFGLTPSRHQSGESDRPGSISRCGDEMMRMMLYEAAQVMLTRTNKWSWLKAWAMKIARHRGMKKAIVALARRLAVIMHRMWVDGTEFRWTQDVAAA

SEQ ID NO: 57009 - protein, 344 aa, unidentified
MNYYAGLDVSLRTVNICVINDQGEFIAETKVDSEVTDVVAYFDGLALDILSVGLEAGTMTQFLTYGLQSAGFEVVCMEARQVKAALSAMRNKTDKNDARGIAQLLRSGWYSPVHIKSMDSHRIRLLLSSRKAVLSKCIDLENEIRGLFKVFGIKLPPKLGHGSFDPAVRDIIETDVTLSESLLPLLDARLVLYHCFRKLDNRTRHMAHADLVCQRLMSAPGVGFVTALTYKAGVDDPTRFKHSRTVAAHFGLTPRRFQSGEIDIEGHISRCGDRDVRSTLYTAANAMMTRSSKWSPLKAWGMKLAKTRGHRRAVIAVARKLAVILHRMWIDDTQFQWGSEGARS

SEQ ID NO: 57010 - protein, 393 aa, unidentified
MTVFCGIDWAERHHDVALVDEAGTLLAKARITDDAAGYHKLLALLAEHGDSPDDPIPVAIETSHGLLVASLRTGNRRVFAINPLAAARYRDRHGVSRKKSDPGDALVLANILRTDMHAHRPLPADSELAQAITVLARAQQDAVWTRQQVANQVRSLLREYYPAALLAFQGKQGGLTRADARVILTLAPTPAKAAKLTLAQLRAALKRSGRLRGCDAEAERLRDVFRAEYAHQLPGVENAFGHQLLALLKQLDATCEAADDLAEAATAAFHQHADSEILLSFPGLGPMLGARVLAELGDDRARFADARALKSYAGSAPITRASGKKRFVGRRFVKNNRLINAGFLWAFAASPPHRLTASPPHRLTASPPHRERTRTTDADASMETGMQPHNGTC

SEQ ID NO: 57011 - protein, 402 aa, unidentified
MRVCGVDPTRGDIAVSFVEDMKEFKYQEYDNSIEGFKDVEERIKDYSIDVVCIEGYGDAAKQFAIHLKGKGVKVYEINPLMLERLKESITEHKTDHIDAYTCALFPFFRRDLKELTLDMDKEGLKSLSRLYEKISKQITRYKNQLHAALNQGFGAIYKKIFPRLNKTSLNFYLKYSSYKDIAEASISDIRNTLKSTGSCMYKGKYGLKKAKQIKDRVNNIEYSDLNDFMEIQSSIIKSYCRLLLTLMEEKERIKRKIEETVNMLFPGYKEFFKSIKGLTELGFGRIMAEIQDINRFPDDGHLASYAGQSPKQFQSGTMNEVRNKKRYNRHLAHLIHQLACNNVIKGRNFYNDYIEAKKRYSKKIRAIKNIKRKMVRLLFYGLKEYTEYMQKNQIKREILYIA

SEQ ID NO: 57012 - protein, 344 aa, unidentified
MEISTIAVDLAKNVFQLLGVDDKGHQVFSKRCNRNQFSSFMQLQPPCDVVMEACLSSHYWGRTFVKAGHNVRLLPAQHVTPFVRGNKNDKNDCLAIYEASQRPYLRSVPIKSEVQQTILSLHRLRERLIAARAACINQTHSLLLEFGVSTPCNFRKFSQELTEHLDNPSLHPVFRLMLDEVMEELRVFDVRLKRINHLIDQFNEQSPTAQILMSLPGVGPIIASAFSASIDRGQAFTSPDELAVWLGLTPKQHASGSSNRLGGITKRGDCYLRKQLIHGARTIVYFAHKRQDDFSRWIVQLKARRGVNKTVVATARKLARLMWILLQKNTRYQPQFLKENGQTI

SEQ ID NO: 57013 - protein, 347 aa, unidentified
MRFYNTQHPFDGGIDLHARAMYVCILNQAGETLLHRNMKTTPEAFLNVIAPYRPDIVVAVECMFTWYWLADLCADDEIPFVLGHALYMKAIHGGKAKNDKIDSQKIAVLLRGGMLPQAYVYPAEMRATRDLLRRRMHLAHKRGELLAHVQNTNSQYNLPAIGKNIAYKANRDGVAERFADPAVQKSIEVDLALVSYYDELLRDVELTILKTAKQHDANTLYLLQTVPGIGKILSLVLLYEIHHIDRFPRMQEFASYCRLVKCAKESNGKRSGTSGAKIGNAHLKWAFSEAAVLFLRDNPAGQKFLTRLEKKHDKGKALTILAHKLARAVYYMLKRKVAFDMKRFLND

SEQ ID NO: 57014 - protein, 346 aa, unidentified
MAISVVGVDLSKSVFQLSVADAKHHVIDRKRLSRVQFHRFLAQSTPARLVMEGCGTSNYWGRTAQLHGHEVKLLHAKYVKAYVRRTKTDAADADALVLADRDTSLHPIPIKSEELQALQGLHRIREQWKRARVARICEARALLAEFGISVSVGVRGIGKKLTLATEQAPVLIQPTLMDLIQEIDDLDQRLCRVEHALAAYAKTNPEVQVLLSIQGIGVIVATAFVARVPSIHMFKRGRSFSSWLGLTCREYSSGQTRRLSRITKQGDRYLRTMLIHGARAALMAARRKAANGKSLTRLETWAVNTQVRVGHNKATVALANKMARIMWAVWTRHETFNGDDALRFAA

SEQ ID NO: 57015 - protein, 348 aa, unidentified
MSQILSTITVIGIDIGKNSFHVIGLDEHGAPALRQKWSRGQVEARLANMPPCLIGMEACVGAHHLSRKLKTLGHDARLMPAKYVRPYSKGQKNDFRDAEAIAEAVQRPTMKFVATKTAEQLDLQALHRVRERLVSQRTGIINQIRAFLLERGVAIRQGFRFLRAELPRILAAPPEVLSPRMVRIIGGLAEDWRRLDERIDCLSGEITALARQDAGCERLVSVPGIGPIISSAMVAAIGTGEAFSKGRDFAAWLGLVPKQISTGDRTILGKISKRGNRYLRVLFVQAAWVVLIKPQSWERHGLKRWIEAAKKRLHRNVLAIALANKLARIAWSVLARSRIFEASKLQAV

SEQ ID NO: 57016 - protein, 609 aa, unidentified
MPVPYFHIVFTLPAPIAAIALQNKAVVYDILFKTAAETIRTIGADPKHLGAETGMIAILHTWGQTLTHHPHVHCLVPGGGLASDGRWVACRPGFFLPVRVLSRLYRRLFLDRLQAAFDTGDLKFVGALAPLAEPAGFAGHLKSMRGLEWVVYAKRPFLPDRRRSSTISAATPIASPSPTAVFSTAPMGASASAGRSYGEVDSSRRSGRVAVAKPPTLETTMPSVADRTEAPTTIRTDLAAIFISLELSRSIWLVTSVSPGSGEKMSKHSVRAGDVAALLARFSELKHKALARTGKSFAIVAIQEAGLDGFWLHRALEQEGIESHVVDPASIATSRRRRRAKTDRIDGEALLRALLAYKRGEPRVCTMVRAPTPEDEDRRRLCRERKTLIAERVEHVNRIKGLLFSQGISSYEPLRRDRRQRLEDLRTGDGRSLPTHLKTQISRELDRLELLLDQIKLAEAERDALLAEDQAAAPEPPGRMLLEFKGIGAEFAATLWLEGLFRRFDNRRQLASYAGLAPTPWQSGSVDREQGVSKAGNPRLRAILIELAWLWLRHQPQSALALWFKERVKRNGGRMKKTTIVALARKLLVALWKYVTAGVLIEGAVMKVA

SEQ ID NO: 57017 - protein, 350 aa, unidentified
MRRPKEKVIAGIDLHGNNLVIGVIDQDGKRLTHRKLDCKLEQVEEFLRPLKPRLQSMAVESTFNWYWLVDGLRAQGYAIDLANPAQIEQYSGIKHADDKHDAFHLAELQRLNILPKAHIYDAELRPVRDLLRRRTNLVHQRTALFLSFKSLYTRTTGQPMPLSQLKGMEPKEGKDLYEHPANQLIAQVQLEHIEALDRSISRIEKAVLGCARQIALYPRLLTLPGVGKILGMTITMEVGDIARFRTDGDFASYCRTVDSRRLSNGKQKGQNNPKCGNKYLSWAFVEAANFAKRSDEDCRRWYDRKKARTSTVLATKALACKLAKAAWHVMAKETNYDARRMFPELALKKP

SEQ ID NO: 57018 - protein, 471 aa, unidentified
MSTTPTRTLRRREVPIVSKRKVPLPPQLKRVNLNAAGIDIGAEEHWTAVPPGRDPEGQDVRRFGAFTGDLCALADWLKRCEIETVAMESTGVYWISLYELLVERGFEVLLVDARQAKNVPGRKSDVLDCQWLQELHTYGLLRGAFRPVDQVCILRNYLRQRSMLVAYASHHIQHMQKALEQMNLKLAHVVSDITGLTGMGIIKAILSGERDPVKLAKLRDPRCKSSEATVARALEGHYREEHLFALQQAVELVDFYQRQISACDRQIEACLQQFEEKSTETPVTTRSRKRRRSGMAFDARSYLYRMTGVDLTQIDSIEANTALTVIGEIGLDMSRWPTEKHFGSWLGLAPGSKISGGKRLSSRTKPSANRAAAALRLAAQSLNQSQSALGAYFRRLKARLGAPKALTAAAYKLARIFYRMLKYGAGYVDQGEAAYEERYRDRLLRNLKRRAAELGFQLTTINSSTGRPALT

SEQ ID NO: 57019 - protein, 377 aa, unidentified
MHSENIAAYVGLDVHKETLAVAIAAPERLGEVRYYGTINNEAQAVRRLFQKLQGLYGNILSCYEAGPCGFGLYHQLTAMNIKCQVIAPSRIPKSPTDRIKNDHRDAISLARLLRAGELTPVWIPDLTHEAMRDLIRARAAAKRDSRVARQRILSMLLRTDKRYAGKHWTGKHRTWLANQSFSQPSQQIAFQHYCQSLEQIEDRILQLDQEISRLLPEWSLCNLVCQLQALKGVGQLIAITLVAELGDFSRFSNPKQLMAFLGLVPGEYSSGNSIRPRGITKVGNSELRRLLYEAAWSYRTPAKVGAWLIYYRPDSVTQYSKDIAWKAQQRLCSRYRSLTAKGKKSQVAITAVARELTGFMWDIAFAAQSSFSQQKQN

SEQ ID NO: 57020 - protein, 460 aa, unidentified
MCLAGLAVIDAPWGVCAGCVFFRAPVQGSAKIAVARVVRTGEEGVTNDKRWYAGVDWASESHHVFLTDDDGRKIGERVFRHGGEGLAEMAAWLMATSGAAEGPQIQIAIEVPHGPVVETLIEREFKVHAINPKQMDRFRDRFTLAGAKDDSRDAEVMASALRTDPRCFRLLAVADPIVIELREWSRIADDLAAERNRLTNRMREQLWRYFPAMLELEHDLGAEWFLDLWETVPTPDKAARIRRTTIAKLLKRNRIRRFDVAHVLAVLRKLPVKVAAGATEAASAHIATLVVRIRLVNRQLKQAHHQLDTLTARLIPTEEAEPGQRKQHDVEILASLPGVGRVVLATLLAEAFDALQRHDYAALRSLTGVAPVTKRSGKSCIVVRRQACHDRLANAMYHWARVAIQHDSRSRSKYSALRSRGHSHGRALRSVADRLLNVACAMLKSRTLFNPSLAAPKTTC

SEQ ID NO: 57021 - protein, 414 aa, unidentified
MRKCCCGVDVHKSFIIAVIAKFRNDEVIFSKHMRFSTFTHGLRKFKEWLRTNNCYEVCMESTGKYYMPVYRVVSDEQFHVDVVHPKYVRAPRGKKNDKRDAKRIADMYMRDHIAEYSFIPPADILAVRDIARYRRKTINAMTAEKNRMSNCLTVSCIKLDEVLSDLYGKTGTALIGQIIKTGGCSFDPALFIDKRVKAPMELIKQALDGDVTPSTLAKMRIIQERLNYLKKQKAELESTMESLSQDYSRQIKLLVSAPGIDTISAMTIISEVGVDMNAFSSVKNFLSWVGLVPQNDESAGKKKSTRIGKGNHWLKPLIVQCANAAKNSKNHPEIRDKYLALKKRRGYSKAIIAIAKRIMTAVYYMLKRNEAYNPQVCVDRAPSKGKISLQNLVNYYTSKGYVVVTGDGELLMSA

SEQ ID NO: 57022 - protein, 324 aa, unidentified
MEVEAVYLGIDVSKARLDVAVWPSAECFSVANDPRGIAELVEKVGALKPQAVVLEATGGLEALAASELHAAELTVAVVNPRQVREFARSLGRMGKTDRLDALVLAQFAQSAHSNDRLPELRLRDEAEAELKALVTRRRQLLAMLTAESNRRERAPKVIRKSIVASIRALKRSIAEIEQQVREVMSDSPVQQAKAVLLAAVPGVGPQLTATLLAELPELGSLGRRKIASLVGVAPHPHESGKFYGRRRCWGGRATVRTTLYMAALSGVRFNPALRACYQGLRERGKSHKLALVACMRKLLLILNAILRDSASWNPHHQLDFQHSR

SEQ ID NO: 57023 - protein, 357 aa, unidentified
MIAMKYYTSTTEFNCGIDLHARQMYVCVMDRTGKKLVHTNIRHNDFAYFLKLVAPYRHDLTVCAECMFGWYWLADACAEAGIHFVLAHALYLQAIHGGKNKNDRVDSEKITHLLRTNLIPPGYVYPAAKRPLRALLRQRLLYVWNRSELLSRIQSHQLAYNRPTTRQTLYNRESWSEQLLALEPDPVRQLALQNDLALIGHYDAQLASLEKELLQLTKRTANRDFTLLQTVTGIGEFLGLTILHEIGDIARFPSVKDFLSYCRLVKGTVASAGKIKGLRGAKLGNPYLRWAFGEAAVVAKRDPLVIGPLAQRLEARLGNKFKANTVLAIKLARAVYFMLKTKTVFDPERLVAALSHN

SEQ ID NO: 57024 - protein, 400 aa, unidentified
MSGLKGNFGCIVGIDVSKDKFDACGITGEEAKLFQISASMDRKGFEKLKRQLGTVSVSSVLIGMESTASYHVNLFSYLVAEGYKVILINPLLISNYVKMQLRKTKTDKKDAVVIAQFLLAKGDTLLQRATPSLISDLRDLSRQRESLVDEMTSLKIEIKQLLNITFPELEHMVGIFTKAILKLLQQNPSAIALRDADIDQLSQSLITDSYGHKREEFAKALIKAARSSVGTNSPAKEMIIKQKIGLLLHLEEALQEITDMLIEMARKLMEEDINIMTSIKGIGDKTAANFLVEMGGDINNFECSGKIIAMAGLDPAVYQSGKHEGRGRITKRGNRHLRRIIWMMTTSVIQYTDIFHAYYQKRRKEGLPYKKAVLATAHKLIRVIYAMLTQRKNFCPQGNS

SEQ ID NO: 57025 - protein, 381 aa, unidentified
MDVLYQSCAGIDVHQANIVVCILHGPLTSTRPKREMATFDTTTKGLRACHDFLSQFHVEVVGMESTGVYWRPVWHALCDDFELILAQPAHMKAIPGQKTDKKDAHWIAKLTRIGLLPRSFVPDETIQELRELTRQRKHYVESRNRETNRIHKILQSGGIKLTTYIEDIMGLSGRNLLQLLVDGTPITPRIVHQSVYTSLKKKVPQLLEALDGYFSDHHRFMLKQSLEIYDFYQKQIELLEERMNVYLSQYENHVEILDSIPGIDVITASVIISEVGVDMSQFPTSGHLASWAGLCPGNNESAGKKRSTKIRHGNSYLKKCLCQAAFAIKKQKGSPLADRFYQIQSRRGSQKATIALAHQLLKIAYTRGASSFQNSVSYELE

SEQ ID NO: 57026 - protein, 361 aa, unidentified
MSDATIGEGTKVTVGLDLGDRHIQVCVLDEAGEVVEEARLATRPPALRRRFCGVDPLRIVLEAGTHSPWVSRLLAELGHEVIVANPRKLRLIYQNDSKSDRVDAEYLARVGRLDPALLAPLTHRGAETQADLALLRSRNALVRARTSLISHARGTTKSLGARLPACSTRSFVAKAGACVPDELRPALDPVLAMIAELCTQIHALDERIEEMARQRYPETALLTQVPGVGTLTATVYVLTLEDPERFPRSRSVGSYLGLRPRQRDSGSLQPQLRITKAGDEHLRWLLVGAAHYILGPFGPDTDLRRWGLGLAAQGGRSGKKRAAVAVARKLSVLLLRLWVTGEVYEPLRNARLRDELLSSPT

SEQ ID NO: 57027 - protein, 351 aa, unidentified
MIIGCDFHPRFQQISFLLEENGECGQRRLMHTAEAVEYYRSLRGTRVRIGIEATGSYGWFRRLLSELGHELLVGDATQIRASNPRKQKTDKRDAEHILGLLVADRFPAIWQPPAENEQLRQLLLHRSRLVRLRTRVTNQLDGMAKNEGLLIPGGWSGKRRKAIEALPLPGWYSERRKDLLGLLDRLEERIAPLNKAVSQAAANNAEACLLMTHPGVGPVVSLAYVLTIGNWQRFPRGKQVGSYLGLIPAEESSGDKRRLGHISKQGNTLLRWLLVEAASTAQRYDASWHRQYVRLSMNKHHGVAKVAIAHKLAVRLYWMLRSGEDYQHVRERGSQARQSECPVGRSRRPIE

SEQ ID NO: 57028 - protein, 461 aa, unidentified
MLGAIKPEFELDPGFLEHLRLSPRAIIGPGARFLEFLYTGPHADDAAQEEGMELLHRRCCGLDVHKETVVACLRLVSNGKVTTEVRTFQTTTAALLRLSAWLAANNCAHVAMEATGVYWKPVWHILDDGEFALVLANAAHVKNVPGRKTDVNDAMWLAELLAHGLIRASFVPDTQTQEMRNLLRTRKQLVREQSSHGLRVQKTLEDANIKLDSVLTDLMGKSGRAMIEALIAGETNPAKLASLADRRVKASPEEFREALRGRATKHHRFLLRLHLNQINALDAAMATLDAQVEANLGPFRTAVEQLMSIPGIKNLGAQVIVSEIGIDMSRFPSDAHLISWACMCPRNDESAGKRRSNRARKGATWLKTTLVQCAWAAVKKKGSYLQAQFHRIKSRRGPKKAIIAVAASILTAIYHMLKDGTVYKDLGYNHFDRRSSDQQKKRLIKRLADLGYAVEIKPLAA

SEQ ID NO: 57029 - protein, 351 aa, unidentified
MVVIGVDAHKRTHTLVAVDEVGRKLGERTVATTSDGHLQAVAWAAKWGAEVLFAVEDCRHLTRRLEADLLRAGQRVVRVPTRLMARARRSGRQPGKSDPIDAQAVAQAALREPDLPTARLDGPSRQVKLLCDHRQDLVAERTKLCNRLRWHLHELDPELHVPPRGLRRYRVIDELAGRLAGFDGTVAELARELLGRCRQLTVRINQLERELRDLVRVLAPSLLAVPGCGVLGAATILGETAGASRFRSRHAFARFNGTAPIPVWSGNTVRVRLNRGGNRTVNWALHMIAVTQARGVGPGQAYVERLLTAGKTRTEALRLLRRRLSDVVFRALLADEHRQVQPAAPSVTQAA

SEQ ID NO: 57030 - protein, 342 aa, unidentified
MNQYAGIDVSLECSSVCVVDANGKILREAKVVSEPEALIAWFRSSGFELERIGLEAGPLSQWLFAAMKACGFAVELLETRHVRKAFEAMPVKSDRNDARGIAQLMRLGWFRPVHCKSMSAQETRSLLTARKLVQSKLHDVENSLRGILRGFGLKVGKTTGQKFAGRIEELVTGHPHLQMIAKALLAVRAVLRTEFAAFEKQTRRMVRSDRQARLLTSVPAVGPIVALTYASAIDDPARFKSSKQAGAHFGLTPKKHQSGETDYTGRISKIGDASVRTALYEAANVMLTKPVKGCSQLKSWAMRIKRRAGMSKAKVALARRLAVIMHRMLADGTPFNAAAAAA

SEQ ID NO: 57031 - protein, 457 aa, unidentified
MKRNGCGGKRVNVKRAEGKLSVMRPQVAGIDLGSVEHYVACPPREGKANVKSFGTTTPELSVLADWLRAEGVESVAMESTGVYWIPLYELLEQRGIEVVLVDARQMKHVPGRKTDMIDCQWLQLLHSCGLLRGAFRPADAFCRLRAVVRQKATLIDEQADWLRRMQKSLDQMNVRVHRAVADISGATGMAMIRAIVAGERDPRKLARLRSAHCARTSREMIEELTGNWRQDHLFNLQEALAMYDFIIQRIEAYEAEIQRILGELAPNPDPAPALKNPNKQKSLRARGQEPLRQALYGACAADLTSIDGISTATTEVVLSELGPDLSAFPTERHFVSFLKLSPKLAISGGKPIRKRPKGTASTRVGAALRMAAVTLRNSKTALGGAYRRLARRKGASVAVFATARRLAILIYRMLRYGTAYVDEGLQVYEQRFQEAKLRMCQQIANQFGYKLIQQQTA

SEQ ID NO: 57032 - protein, 430 aa, unidentified
MRNRTNQRIMEIKDNTLIVGIDVAKNEQWARFVTYRGIEVGKAVKFQNDLQGFERIVAIIEEMCNKETQYSATDVIIEMEPTGHYWKPLAIYLSNIGYKVTGVNPFHTKKAKELDDNSQTKSDFKDALTIAKLVAEGRYFVPYLPEGIYGDLRVLTNERVSVQKRSSAVKNTIIAILDEYFPEIYTVFKSPLSGKASRQILRTCPFPECILAMREEDILAEIKKVTKRTVGMKRVNVLIAAAKGSIGVDNGQIAAKNRLRRLVSELDQYEEQLEEIEQEMKEALYTTGYADQLLNIKGVGVVSIASLLGEVGDPLRFTSARQIHNYAGFNLVEDSSGKSKSGTVISKRGRSQLRALLYQMAFTLVGQNPEMKELYRYLITRKSNPLKKKQGLVVIAKKIVSVIHSILKNDDIYRQELVLGAVRQEMILAA

SEQ ID NO: 57033 - protein, 482 aa, unidentified
MKKRNVFQNQSQEILSLFEMAKDRSKVMCIPIDYAKKDHLAMLCDGNGRIIRKPFSVKNSPEGKNYLVDQVKKSCLHHGIRLQHIVFGGEDCGSYTDNFISTLRSENWLVAGVNAYDAKTQRENVQASTDRLDLLGICKMIISCRGNCSPAQSGDYLDLRTLVRQRRKMVNMTTGVKNRIHTFVDQIFPGFLNEKNSGILPFSQCSLLLMEDRFSVHQILRRRRSTLTKLLTRCAIHQPDNCAKKLQQYAAQVLKPPENHLVTLQISLKQQVKLLNCLQESTEQLEREVAESLAQTQGAFLTSIRGIGIILAAGVCAEIGNPNKQKSLSNLISYSGIIPRVKQTGGIQGKPQTKKVGKRCNRILKDYVVQSASHIGLHGPEDLMLDYKRRDTQGQHADFGMGRRYLRMAMGLMRTSQTYLPKNLRGKKSSMKGRGQYYLITWPKLREKWRNVNALDIAFDKDMPLGQWRNMIQELYGIELKL

SEQ ID NO: 57034 - protein, 424 aa, unidentified
MQNTAARKRQQVPGGYLVVGVDPHKKRHAAVAITQDFTTQAKFKFDNTREGLEMMLERARVEMLKSGCRGVIFAIETGGHYWRNIAYYLDERGIPFRFINQYTLKRRREGKDLNHRKNDYRDSEVAAQLLCTGEFVESVIPQGVYAELRTSHNAYQRLVKERTRITNLVKGLLDALFPEFTQVFKDPGGLTALSVLSTCPIPRVIAGMTEDEFVVTIEAQHKGRRLMRKKLKALHYSAKTSIGIDAGARSLSSEIAFLVDKFGLIRRQICIMEGTLVRLVDETEEGKYLLSIRGLNYIAVAGLLAELGCFKLYRSAKQMIKMAGSNPTESESAGKKRSKTPMSKQGRPLLRYCAWTSVIPMLRFNSDFRAWAKQRRERPAHANPLSGREVVGAALNRLLRLAFALVKNQTYYQDVKPALIPVAV

SEQ ID NO: 57035 - protein, 338 aa, unidentified
MSVSLLSIDLAKNIFQLYGVDERGHPVLSRRVSRSKLLEVVVALPCCRIVMEACGGAHYWARRFSAMGHHVQIIAPRFVKPFVKSQKNDRNDAEAIVEAASRPTMRYVAVNSVEQQDIQSMHRVRSLLMRDRIAQINQIRGLLAEYGVVIAQTPLKIRTQLPAIIDDECNELTGLTRSMMRDMYERLVLLDKQIARYDELIHHVHRASPASQRLEKIRGVGPMIATAVIAAAGSASEFSNGRQFAAWLGLTPRQHSSGGKDLLFGITKRGNGYLRMLLVHGARSVVQQAVKHTDALSRWILEVQARRGTNIAVVALANKIARTIWVLLARGVEYVSPV

SEQ ID NO: 57036 - protein, 403 aa, unidentified
MNAVGIDVSKGKSMVTILRPFGEIVSSPFEIKRTSSDILSLIKLIHSIEGESRIVMEHTGHYYEVLAQQFSAAGLFVSAVNPKLVKNFNNDSLRKVKSDKADSIKIARYALDKWQNLKPYSIVDELRTQLKAMNRQFHFYVKQKTAMKNNLIGLIDQTYPNANTYFNSPTRSDGSQKWVDFVSTYWHVDCIRKMSLNAFVEHYQNWCKRKKYAFNKSKAEEIYTKTKELVPVFPKNEITKHIIRQAIDQLNSTSVTVETIRTLMNETASKLPEYSIVMQFKGIGPSLGPQLMAEIGDVTRFTHKGALTAFAGVDPGVNESGSYAQKSVPTSKRGSSNLRKTLFQVMDVLIKTMPQDDPVYQFMDRKRTQGKPYYVYMTAGANKFLRIYYGRVKEYLSVLPDPS

SEQ ID NO: 57037 - protein, 365 aa, unidentified
MNQDTLHVGLDTDKRHIDVAVAEPLPGGEVRYWGKLANEASALDRVLKRLRRSGRRLSVCYEAGPCGYGIYRRLSALPGVSCQVVAPSMTPRRAGVRVKTNRRDCLTLAKLLRAEELTAVWVPDRAHEAMRDLVRARAAAVEDLLRCRQRIGGFLLRQEIRYAGKPWTRKHRAWLGGLEFVEGAHRLMMAELVEALDQAQARRDRLRDHILELVPSWSLAWLVEALQALRGFALINAATLAAEIGDPRRFESPRQLMAYLGMVPSEHSTGAAVRRGGITKTGNARARKALVEAAWTYARPAKLPKPAGQSAALRAIADKARHRLSGRYRRLVARGKRPPVAVIAIARELAGFLWAIAHAAAKHPH

SEQ ID NO: 57038 - protein, 389 aa, unidentified
MKIFVGIDIAKLNHFAAAISSDGEIILEPFKFTNDADGFQLLVSKLESFDKNSLIIGLESTAHYGDNLVRYLVTELYQVCVLNPIKTCQMRKNNVRKTKTDKVDTYVIAKTLMMQDNLRFVSFFDLDMMDLKALGRFRQKTIKQRTRLKIQLTTYVDQVFPEIQYFFKSGLHQNAVYALLKEAPSPKEIASMHMTHLANLLKVNSHGHFTKEQAKELRVLAQKSVGANDSAISIQITQTIQQIELLDSQLEKIEAEMTDIMKFNDSVIMTIPGIGYINGGMILGEIGDIHRFSNPNKLLAFAGLDPSVYQSGNFQAKTTRMSKRGSRVLRYALVNAAWNVVRNNATFKAYYDAKRAEGRSHYNALGHCAGKLVRVIWKMLTDEVKFNLE

SEQ ID NO: 57039 - protein, 348 aa, unidentified
MVTIGVDPHKQTHSGVAVDPLGVRVAQRTVAARRAGFGQLLEWGRSLDSEGVWVIEDVRHVSGSLERFLIDRGETVVRLSPRLMANAREGVRDRGKSDPIDALAIARAALREGIETLPTARLAGAELEIRLLALHRERLVGARTRLINELRWQLHDLWPDWEIPKRVLIRPAWQTKIANRLRRTETTVQVQIARDMIARVRELTRTITQLYEQLTGLVKQVAPQLLAEKGLGVLIAAKLIGEIAGIDRFTSDAQLARISGCAPIPVSSGRTDRHRLDPGGNRQLNHAFHMLALTKIMLDPQTAAYLAKQRRAGKTNTEAIRCLKRHLVRRVYHLLHDPTTIQVTVCLT

SEQ ID NO: 57040 - protein, 449 aa, unidentified
MGNYAGVDWAADKHDVLVADEAGEQLLSATYAHDEMGLRALCRALLRLKVELVAIERPDGLLVERLLDAGLRVLALHPNQVAATRARFRVSGGKSDRFDAFVLCELARTDSHRFRVLEPDSDQTKALRALTRAREDLVRTRVAVANQLRAELERFWPGPIGLFTDLDSQISLAFLESYPSPADARLLGEKRMQAFLGRQGYTGGKKPAQLVDKLRQAPEGRVGEAEQAARRRLVLCLVHTLKTLLAQIKTLEKEIAAAVRAHPDGEIFLSLFKHPDSFLTAAELLAEIGDCRARYPNRDALAGDAGQAAVAIESGKRKTACFRWGCNKRLRSSFCTLADTTRHWHPWADDLYTAARARGHDHPRALRTVGRAWSRVVWRCWQDRTPYDPAHHRALHQHCTVTIPTSSGPVPDLAATQRMLGAAVTEPAARRAEREALDRKPTTATTLEA

SEQ ID NO: 57041 - protein, 345 aa, unidentified
MSEFYEGRQFVGMDLHRRRSVLVRMSETGEHLETVRILNDRDSLAEVMSRAGESPEAVLEATYGWYWAADALAELGATVHLAHPLGVKAFSYRRVKNDQRDAADLADLLRMGRLPHAWIAPPETRELRELVRHRAKLVAMRSQCKAHVHAVLAKRGIWVPMTDLFGVEGNLLLDKVTMPAPYTARIASLRRFIDAFDAEIDLFTGLVQRRLTHDAGYTAIQQIPGIGPVLAAVFVAEIGDVHRFAGPAQLTCWAGLTPSHHESDTTVRRGRITKQGSRLVRWAAIESVKTLPKTSRIGAIRERVAHRRGNRNIGAVAAARKQLELVFYALRDHHIRALHRPPRAA

SEQ ID NO: 57042 - protein, 349 aa, unidentified
MVTLGADTHKATHTVVAIDEVGRPLGEVTVPATAAGHRELVAWASQFEERRFALEDVRHLSRRLEADLIKAGERVVRVPTRLMGQARRSGRTRGKSDSIDALATARAALREEHLPEAVLEGIERELRILVDHREDYVAERTRFENRLLWDLHELVPGYQIPPRALSRRKHLEHLGQVLSPFEGVVADVARERLEHIRQLTARINALESEIIRRVKEIAPTLLALQGCGGLTAAKIVGETAHAGRFHSSAAFARTNGTAPIPASSALNGRHRLNRGGNRQLNCALHRIAVTQVRMHGRGRIYVERRKALGDTKTEAIRALRRRISDEVFRRLLADERARSLTPACMPAAA

SEQ ID NO: 57043 - protein, 358 aa, unidentified
MKYVGIDVHKKMCQAAVLDEDGTPLDEIRFRNDVEGIEDFALKLTTFHDEVKAVVESTGNLWIQIHDRLEEHGFNVVLSNPYKTRLIAEAKVKTDKVDARTLARLLRADMLSICYVPDEEQRSRRELLRHRLKLVQTRTEVKNRIHSLLDKHGLHMPYPTPFSKKNIAWLREQDLGFMDDAILRSALAILEAVDKQVGLMEEKIAALAVEDPRVRLLMTMTGVGYFTAMLLLAEIGDINRFGSDKRLASWAGLAPRVRQSGEKIRIGGVGGPGNKRVRWVMVQCAHSACRFDPRLRGFYERYSKRKGGKKAVVAVAHEMIRIVFYMLKRSEAYRGENRGMTERKLKSMGRKALNGLRN

SEQ ID NO: 57044 - protein, 457 aa, unidentified
MSDVKTVEDPTPAAAPAPEFAARIGLDWADQKHFWTMLDEGGKKTRGQLDNTPEAIEVWAAELAQRWGGRPVALALEQSRGAVITVLSKYAHLVLFPVHPTSLANYRKSFSPSGAKCDPVDGDLILDYLVKHPEQLRCLRPDTVETRSLQFLTEERRKLVDAHTAALQSLIHWLKQVFPQILRWFDDPATPLVADLLMRWPTLQELQKSSPKTLRKFFHQHNCRSEDRTEERLEQLRQAVPATHDPALLRAGTLSIQNATRILASMRQGIAEFDRQIAVTYQAHPDRFITESLPGAGPALEPRLIAAVGSQRDRFPTAYNMNCCFGVAPVTERSGNSVWIHWRWACSTFVRQTFHEWAGCSIRTCDWARQYYDRQRAKGNGHHAAVRSLAFKWIRIFFRCWRDRVAYSDQRYEEALRKRATKPQPAPTPTQADAKITLEWKSCGGFSKLAKVLEVSS

SEQ ID NO: 57045 - protein, 349 aa, unidentified
MSQSLNSAIAVIGIDIGKNSFHVVGLDDRGAIVLRQKWSRGQIEVRLANMPPCLIGMEACVGAHHLSRKLQAFGHDARLMPAKYVRPYSKGQKNDFRDAEAIAEAVQRPTMKFVATKTADQLDLQALHRVRERLVSQRTGIINQIRAFLLERGVAVRQGLRFLRAELPRILATPPDVLSARMVQVISDLAEDWRRLDHRIDDLSNEITLLARQDAGCERLMSVPGIGPIISSAMVAAIGAGEAFSKGRDFAAWLGLVPKQISTGDRTILGKISKRGNRYLRVLFVQAAWVVLIKPMSWERHGLKHWIDAARKRLHRNVLAIALANKLARIAWGVLAGSRTFEASKLQTA

SEQ ID NO: 57046 - protein, 386 aa, unidentified
MAASVTSRIEQDTLAQPTLSLAFELGQDTWKLGFTIGVAQQPRERTIPAGDIVRAQQEIAQAKQRFGLPADARVVSCYEAGRDGFWLHRCLVAHGVQNYVIDSASIEVNRRQRRAKTDRLDVRKLLTMLLRHLAGERKVWSVVRVPSVEEEDRRQLHRELTTAKQDRTRIINRIKGLLAGHGVQLVLQGDVETQLDQVHQWDGEPLPSALRTRLKRAWQQVGFLTTQIQTLESERRALLRRRDDPVIAQVRQLFTLRGIGVNSAWLYVMEFFAWRDFQTPKQVGALAGLTPTPYQSGQARRELGIAKAGNRHIRAMAIEIAWAWRRFQPASALAQWYERRFGAGSARLRKLGIVALARKLLIALWRFVKTGVLPEGAALKTETPSR

SEQ ID NO: 57047 - protein, 422 aa, unidentified
MAGSSTGFTCENGKVARVTATGAVWVGIDAGKASHHAAAVDAGGKRLWSVKVANGQQPIEELIARATGSGAEVRWAVDLVSPAAALLLAALLSSGQKVVYVPGRVVHGMAQVFRGEGKTDAKDALVIADTARMRGDLAELAPTDELVVELTRLTSYRADLMADWVRGINRLRDLLTSIFPALEASFDYSTRSALILLTGYCTPDAVRQAGPGAVAAYLREHGAWAKGIDAMAAAAARAADAQSVALPGESATALLVKKLARQLLDLDREIKDTDKLITSRFRGHPQARIIESLPGMGPILGAQFLVATGGRTLEAFASSGRLASYAGLVPVPKDSGRVAGNYHRPRRYHRPLRQVFYITALSSLRTEGPSKAFYQRKRDENKIHVQALLALARRLVDVLWALLRDNRVYSPIPPSQVTAIAA

SEQ ID NO: 57048 - protein, 318 aa, unidentified
MLIHYIDIAKRNFVIAVSSLSKTKTETNNPKGIAHTIEYLKKHKVALVVTESTGGLEIPAAKAIRRAGIAVIIANPRQTHQFAQSQPLTKTDAKDAKMPAFFAQMTAQKEDSQTMPYQPPTEAEEVLEALVNRRNQPADMRTAEKNRLYQVHETQVGSVKQLIAHFDRLIDELDKQIDDHTHTHFDGKAQVAEQIKGIGSITTATLMAMLPELGRLSHKRIASLAGIAPHPRESGETKFKSRCFGGKSAVRKALYMATVAATRFEPLIRDFHQRPLSEGKPYKVAVTACMRKLLTISNARMRDYFAENDTAENGIRTA

SEQ ID NO: 57049 - protein, 338 aa, unidentified
MSLYAGIDLHASNSYLAVIDETDELVVARRYRNELRLICKGLEPYREELVGIAVESTFNWYWLVDGLQESDYRVHLVNTLAAQQYQGLKYTDDKSDARWLAHMLRLGILPTGWIYPKKERAVRDLLRKRSKLVRQRTASRLGLRNVLERTTARRLSTNALKQVTQDDLFGWIEDPNVRLSIAASLAMIEAASEQIERIETTILEQAVLQDSYRILITIPGVGPVIASTIQYETGDLSRFAAVGNYVSYCRLVKAERSSNQRIKGQGLRKNGNPYLSWAFHEAAHFAVRFQPKARRWYEKKRAKTCALVAIRALAHKLARAAYFMMRDQVAYEPARLFG

SEQ ID NO: 57050 - protein, 342 aa, unidentified
MRIIRIGLDTSKHVFQIHGVDENETPALRRQLRRSEVAKFFAKLPPTRIGLEACGASHHWARRLRGLGHEVLLMPPQYIKPYVKRGKNDAIDAEAICEAMSRPTMRFVTVKSAENQAALMMLGVRDLLVKQRTMLINAIRGHAAEFGVTAAKGSKQVVELLQRLADDAEVPALAREMIGVMAAQLDAVEAKLKAIEARLMAWHRQNQTSQCLATIPGIGPIGGVSFALRVSDPKAFRSARHFAAWVGITPRENSTGGKQRLGKISREGDEGLRRLLVLGATAVIQQADKGRQGKKGRARPWLSKLLARKPKKVAAVALANKMARIIWAMMVSGETYRQPQEA

SEQ ID NO: 57051 - protein, 351 aa, unidentified
MRIIGVDLHTRLQLVAMLDTDTGEVIEKTLEHEGDEVREFYSALPGPVLVGIEATGSMPWFLKLMEELKIECRVGHPAKVRAAEPRKQKHDRRDARLLLNLLAEHRFPAIWMPSTEQRDLRTLLRHRHQWVRMRTRVQHTLQSLALANGLRRGATLWSHVGQHALQALPLAPFAGQRRAALLALYPVFQKAIDELDQQVSEQALLHPQALRLMTHPGVGPVTALATEVFLGDPLRFVDGKAVASYIGLIPSEHSSGRRQRLGKLSKEGNALVRYLWGEATIHAVRRDPELKRFYRRKLMQKGLGKAKTAAARKLGIRLWIMLRDQIDYKEFCRRGQLRQKSGDARAGMPGR

SEQ ID NO: 57052 - protein, 485 aa, unidentified
MAAGKTKDKDADGPGGAGAAELGGYGAEVSEDQVRVVERAAAIDVAKSFGMACTRVPGSRAGRRAQKVWRVEATHREVTALMDHLRAEGIQRLVLESTSDYWRMWYYLAEAAGLEVWLVNARDVKHLPGRGKSDRADCVWLCKLNERGMLRRSFVPPRAVRDLRMLTRTRSRLAQDQARHQARVEKVLEDALLKISVVISDLFGVSGRRFLDALVAGERSPQALAALGDYRLKASREELAEALTGQFRDVHALEIGVHLKILDAINAEIGRLDEEIGKQLALVPRTAPCCVRCGEIGGSHAPGCDAAAMPLLSLAERLDEITGVGIINTRVLIAELGTDPSQFPAPGHAAGWARLTPRTRQSGETAKPGRTGKGNRYLRGALGQCAMTAAKTDTRLGAMYRRIARRRGKQKAIVAVSRVICEIAWILICDPGARFEDLGADYYASRSPERQTRDKIRELKRLNPGMTVLLVPAGQAAVPDAGTAA

SEQ ID NO: 57053 - protein, 313 aa, unidentified
MSEIKVVVGIDVAKASVEVVTLGGTGPAGEFGNDPEGHTELVAQVPAGALVVMEATGGYEAPLACARQAAGLAVAVVNPKRARDFAKGVGSGAKTDRIDARMLAEFGQMLRHKPDFQRYLKPPVDEQVQDLAAWVTRRRQLLSMLLSERQRMEFSRPKVRPSIEAMIESIKRQLDQIDRQMQTHVAHHHEELDRLLRSTRGIGPVASATLIAGLPELGRLSGAEISALVGVAPMARDSGQKKGRRWIQAGRFEVRRVLYMATLTAIRSNPVIRAFYLRLVAAGKVKKVAIVACMHKLLRILNAMVRDHQPFQA

SEQ ID NO: 57054 - protein, 392 aa, unidentified
MKKNNKAEMSVKAETSVKTEKKQAKAKKVSNKVSGEKLTIGIDLGDKTSRYCSLDAQGEKVAEKSVATTKEGMTKAFGAMEPCRTVLEVGTHSPWVSRLLKSFGHEVIVDNPREVRLISGSNRKNDKLDAYTLARLARVDPDLLRPIQHRSEKAQTALLQIRVRAALVETRTGLINTARGLVKALGDRLPKCDADQMGVKQAATLPAEIQQELKPLLEQVESLTEKIKASDAQLERMAETEYPETKLHQQVWGVGTLISLTYVLTVEDPKRFEKSRDTGCYVGLRPRQRDSGDSRPQLGITKEGDEYLRKLLVQGAQRILCQKAPDTDLKRWGLKLCERGGKNAKKRAVVAVARKLAVLLHSLWVTGEVYEPLRHSNARAAAAAAAQSRVAA

SEQ ID NO: 57055 - protein, 320 aa, unidentified
MLSFCGIDVSKDRLDVMVLPDEYSSSVPNDPAGWAILVEQLRGFSIAAIGIEASGGYERGAVRSLQAAGMPVRQVNPFKLRQFAKASGVLAKNDPLDARMIASFVGIMPTRPAQPTTPAAEQLVEMLAVRRQLSAEKTAAENASRLLEDLMLQRLSRRRIARLAADIELLDKRLLEIVATDATLAHRYRLLTSMPGVGPVLACTLIALLPELGGMSRKQVAALVGVAPYAFESGTLKGRRCIWGGRANVRQVLYMAAMSASNWNPALKLFHDRLKRAGKLPKVVIVAVMRKMITTLNAMVRDDIAWADRLSGRHSVTTAR

SEQ ID NO: 57056 - protein, 345 aa, unidentified
MSYYAGIDVSLEQSSVCVLDGEGKIIREAKVASEPEALIAWFGSLGLAMTRIGLEAGPLSQWLFAAMKQAGLPVELLETRHVRNAFKTMPVKTDRKDARGIAELMRMGWFRPVHCKSISAQETRAILTTRTLIEAKLRDVEMSLRGVLRGFGLKVGKTTPTNFAERIKELVSEHSNLQVFAVARLVVGEVLWPEFRGFEKRVRTMARHDERARLLMTTTGVGAVISLTYAAAIDDPARFKNSKQVGAHYGITPKRYQSGEIDYTGRISKIGDKSVRTALYQAAHIILTRPVKASALKSWAMQLAKRVGMAKAKVALARKLAVILHRMLVEGKPFDHKLPNQVAAA

SEQ ID NO: 57057 - protein, 351 aa, unidentified
MTVTIGVDAHKRVHAAVAIDAAGREQDRWRGPNTSAGWQALQAWASALAPVQGWGIEGSGQSGRGLAQTLVRAGATVVEVTPRLTATMRRGSRPQGKSDRLDALAVARVVQQEADALPIVQIEDPTTILAVHVAARERDLAEAPRLRTQLHQHQHQLRAVDAPPWPDLTDPTAVATLVTYQAPGADAVDQARATAVRHLAQRLERVLRQVAETARAIETLARPQLAPLEAICGVAALTAGLLAATLGGRAFAGDAKLAMDAGVAPLEASSSAHVRHRLNRGGNRSLNAIVHRIALTQQRGHPPAQRSLARKRAEGKTRSEALRCLKRYIVRAVFQAWEQCALAPPVPAPLT

SEQ ID NO: 57058 - protein, 300 aa, unidentified
MIDGVLGIDVSKNTIDVSMSGCNKVRARSFANSADGWRHLLAWLISQKIQRVHACLESTGRYSIGIASALYEAGHVVSIVNPAQIRDFARTKLGRNKTDGVDASHIREYCELFKPQPWAPPSEAHRRLGELQTIRAGIIAGLTEWKNRKNSGMIDTVAQSLADVTISHFTRQLGAVDEAITRTIDNDPVLRRKRDLLLSISGVGETLAGIVLAELPGPDVLRSGAEVVAYAGLNPRLHQSGTSIDRMTRISKIGNAVLRAALYMPAMSAMQHNPAIVALVARLKSRGRLKPKQIVVAAMR

SEQ ID NO: 57059 - protein, 356 aa, unidentified
MNTCARSQMLFVGVDVHKETHTAVGVSPFGEKLFEVKIGNQHRDFESLSSKVESVRGVLSPYFGLEDCHGYGERLAEYLVAKYPVIHVPSMLVDRRRQKATHPEKSDSLDAYGVAKVMMNDMDSLPIFTLTEENKSAKQIREISLDREYLVLERARLKNHLHTLLYRIWNVEYQSKFKSPFTLKALRHWLKTKPVCDPFLRRTMKRKVKRLIDLHYEIAELEKEIGELLEKGGYTLQTASGCGPVIAAAIIGEVGDIARFKSPSSFAKYAGCSPRECSSGKTRRHRKTWAGNRRLNCAFHRMALSQISRMGNEKARVYFARKVAEGKSKSQALVCLRRQLINLVWCMLKHKTVYHD

SEQ ID NO: 57060 - protein, 328 aa, unidentified
MSDFKYVVGIDVAKDSLAFSLFDGDKHIVNEIEYTRSKITKTLIKPFADRKEDILFICESTGVYHLRLVMQLHNQGFNVSVVNPFAIKKYAEMKMMRAKTDAVDARLIAAYGAYEDDIHLFVPKSEEVIAIDNLLKAIDDLRSQKTVVSNQYHALKHQVQSSKVAIASYKRHITFIEKEVAQLEQELESLIINNFEEEYRLLQTIPGIGLMSSGVILGIYNAFKTFDNAKQACAFAGICPSPHQSGTSVNGSGTISKRGNSFARKTLYMASLSAIQYNPFAKAQYERLVANGKSKKQALIAAANKILRQAFGVLKSGKAFDRNYMIFQ

SEQ ID NO: 57061 - protein, 341 aa, unidentified
MEEYIGLDVSMKETAVSIRRAGERIWRGKCASDPSIIAELIRKRAPSVKRVVFETGPLSVWFYHSLRTEGLPAICIDARHAKAALDMAANKTDANDADGLAQLAEVGFFREVRVKGFDSMLTRTLVAARTRLVRITTELSNQIRGVMKTFGLLVPAGKGSTFEKNVRSLLADQDRLASIVLPMLEAWRGIRVRAAELGRQLVRDARQSRACRILMSIPGIGAITASSFTTAIEEPDNFRKSRSVGAWVGLTTRRYQSGEVDYDGHISRRGDHHLRGLLYEAAAVVLTRSSTHSTLRTWGLQLRERIGFKRAAVAVARKLAVIMHTMLKTGELFNPNAGAAA

SEQ ID NO: 57062 - protein, 423 aa, unidentified
MDVIHQRVAGLDVHKETIVACVRIMVDAKVSRECRTFDTTTAGLQDLLAWLTASGCSHVAMEATGVYWKPVWNILSDGNLELLVANAAHIKNVPGRKTDVNDATWIADLMACGLIRGSFVPDQAFQELRTLLRTRKQLTREQTRHVQRLQKTLEEANIKLDTVISDIMGLSGRRMVEAMIAGERNPQKLAALADRRIKASPKALYDALHGRLTNHHRFRLRLHLAQYDVLAAAIEAVDQEVDAAIDQMDETMKAGQAFFRSLIRLLSGIPGVNTLSAATILAEITPDMTRFATAGHLVAWAGLCPGQNESAGKRKSSRLRKGAPWLKTTLVQCATSAVKKKDSYFKAQFQRLKSRRGPQKAICAVAAAMLTTIYHMLKDGTQFQDLGAHHFDRRPPEAKARHLVAQLTKLGYTVQLQPLAEAA

SEQ ID NO: 57063 - protein, 355 aa, unidentified
MSQEKYIGMDVHQATISVAVMDARGKLIMECLLETKAATILEFIQGLRGTLALTFEEGTSAAWLHDLLKPHVSRLVVCDPRKNALLKDGNKSDRVDARKLAELLRTHQVKPVYHGKHGTRALKELGRSYLTITKDVTRVMNRIKAVYRSWAIPCAGTSVYTPRHRAEWLAKLVEPGVRIRAEHLYQQLDSLQPVRLEARHELLLESRKHAAVKLLRQIPSIGPIRAALLVALLQTPHRFRTKRQLWAYSGFAVEIHDSGEYRSVRGKLQRNRERITVRGLNDNHNKDVKSLFKSAALSASTRPGPLHDFYVTRVESGMRPTMARLTLARKIAAITLTMWKKGVSFDPKQLQRQAA

SEQ ID NO: 57064 - protein, 365 aa, unidentified
MQKAELSCEADSENYLGGSSETMYFIGLDVHKRTISYCVKDAAGKVHQEGKIGSTRRELDAWVKTVPQPRTIAMEATIFTGWIYDHLLPHAEKVKVAHPLMLRAITAAKRKNDKIDASKIADCLRCDFLPECHMASTEIRDRRRTLRYRGLLVKQMVQMKNRVSGLLLEKGVTHTRQRLHKVGYFAELMSSSEEIDQSIRPLLKLSREHIVRAQKLDYALVSSLERDPMLAERLKRLRTVPGVGPITALTWALEIGDVSRFRSIKQAISYCGLCGAERSSADKVARMPISKQRNKHIQHVLVEAAKLAPRQCHELALLYEKEMQRGNRNRATLAVARKLVCWILAVERRKQDFVPAEKFGGTAAA

SEQ ID NO: 57065 - protein, 339 aa, unidentified
MEREYVGIDLHRRRSVIYRMNADGEKLGCVRIDNDPVTFAAEVVKAGPGAEVVIEATYGWYWAVDLLETLDVHVHLAHPAGNDWGKRRVKNDERDARDLADLLRLGRLAEAWIAPREVRELRELVRYRHKLVQLRTGLKAQVQAVLAKEGVTVKLSEWWGPTGVKELDALTLAPVYTNKVESLRDLVALYNREIAMFEREIHRRVKDDPGFKAIQAIHGVGPTLAAVFVAEIGDVTRFPNPEALCAWAGMTPRHRESDTTVHRGAITKQGSPLLRWAAIEAVSRYHGGEHLAVTFHRIAERRGRNKARTAVARKVLTLVYYGLRDGEIRCLQQQPAEAA

SEQ ID NO: 57066 - protein, 357 aa, unidentified
MHTAQQISFANIHFFVGLDAHLRNWKVTIRLDGLELKTFSMNPSPLELIAYLQKHYPDGIYHIVYEAGFCGFWALRIFRQHNIDCIIVNPADVPTTNKEKVNKSDPIDSRKLAREHENKSLHGIYIPDTFHEELRALMRLRYRIIQSQTRIKNRIKGLLYCQGIQIPLQFSGNARWSLNFILWLQQLQMKTSAGNFTLQSLILQLKEIREHNKNVLKQLRKEAQHPDIAPLIKALQGVPGVAFITAMYLYTEIIDMKRFANDNHLVSFVGLVPSTQTSDENVYSNGISFRQNSFLRTMMIEAAWTAVREDPAMTLKFKELTKRMNSQNAIIRIAKKLVKRIRHVWLKQEEYVYALVA

SEQ ID NO: 57067 - protein, 412 aa, unidentified
MAVFCGIDWAEEHHDVALVDGEGTLVAKRRISDDAAGFTALVQLLADAGDTEDQRIPVAIETNRGLLVACLRATGRQVFTINPMAVSRYRDRYSVSRKKSDAGDALVLANILRTDLAAHRPLPSDSPLAQAISVLARAQQDAVWDRTTAHNKLRSVLREYYPAILDAFADKRGGLLRSEARTLLAAAPTPHAAAELSTAKLRALLTRAGLQRNIDPEAHRLREILQREYLHHPQLVEEAFGRQALALLHQLDAACASAEDLAAAAAEQFDRHPDAEIITSQPGLGSLTGARILAEIGDDRTRFTDARSLKAYAGSAPVTRASGKAITVLHRRVKNQRLAATGYIWAFAALTASPGARAHYDRRKATGDRHIAAQRNLFNRLIGILHHCLQTRQRYDETTAFAATAIPTAAVA

SEQ ID NO: 57068 - protein, 401 aa, unidentified
MISVGIDVSKGKSTVCFMKPYGEKIHKPFEVKHTESDLKHLVDRINKLTEETRVVMESTGAYHYPVLTYLKDRGIFVAVINPLVMSKYINVAIRKGKTDKLDAIKIANFGFDHWYHLVDYSPTADVYDELKTLNRQYLSYMSMRIHTKQTLTNLLDRTMPGIKTLLRNRSDMPDQDKLCDFVKEYWHFDNITCKSQSEFINNYNTWVKSKGYRASTEKAKKIYALALDGIPTLSSNTPSTKMLVEEAVKVLHMIDTTLASILARMRALAKSLMEYDVVMAMPGVGEILGPRLIAEIGDVRRFHSAGALIAFAGLDAPPFQSGNFTATKRSISKRGSASLRKTGYEIMTCIKIHKPSEDGAVYQYMLKKETEGKHKKVAKIAALNKFLRIYYARVKESYVAA

SEQ ID NO: 57069 - protein, 328 aa, unidentified
MFEHYIGVDLHQAFFQACAVTASGDRAWEGRFPRTDAGMTALLARCDQRTAMAVEASTPTWHFADAVCPRVGALRIVDPVKTKLKAGYAAKTDRLDARRLADALRRDSVVGIYYPPVAIRELRELCRFRHAVVQVRTALINRVRAVLLRQGLVDRRRLARTVSDAWLETLTLPPRAAASVAGLRRVLAAVRTEAAAADREVLTLAAADPIAIAVQQIPGIGPVLALLIRAEVGDMRRFPTPGHLASYAGLVPRVDASAGRVRYGRITRRGSPWLRWALVEAAMHGTRRRDRIGRWGRSLAIRKGALKARVALARALCDEIYRQWLAVV

SEQ ID NO: 57070 - protein, 329 aa, unidentified
MQKSYIIGVDVSKDKLDIHCHSHYQSFVVSNDEKGFQKLLKWMQTQVSEELSAIAVVMEYTGIYTYRLEHFLHQSGIDYVKRSALDIKRSAGLKRGKTDKADAQMISRYGWQRKEEFCAMKPLTKTQQHLQQLMAYRDKIVADKASYQARLTELKTQMGEDLNGCIIRSSEHLIQSLQQELKEITSSIEKLLITDKQLYCNYQLAKSVTGIGFATAVHFLIVTENFTRFTQPRKFACYCGVAPFENSSGTSIRGKTKTSHLANKKLKSLLTMAAISAIQHERDLKEKYHQKVKEGKAKMCALNIIRFKLIERIFAVIKRQAVYEIRLAA

SEQ ID NO: 57071 - protein, 358 aa, unidentified
MTKHTTIIGIDLGDKHNQFCVLDNEAGEIEEEGRVKCDAKSMQRFFAARNPALIAMEAGTHSAWVSRLAAAEGHEVVVANPRKLRAIYENERKSDKMDAQMLARLVRADPKLLHAVQPRSAHTQADLALLKSRQAAVEARTKLINHARGIVKSFGARLPGCSTPSFHAKTLEAIPEELRAALEPVYEAIAKLTETIKTYDHRIKTMCESEGYETTVLLSSVPGVGPLTALAFVSVLEDPALFPTGRSVSAYLGLTPRKAQSGQRDPALRITKAGNPFLRKLLVGCAQYILGPFGPPGVLRDWGHKLIERGGRAAKKKAVIAVARKLAAILHRLWSTGELWRPFPDAPDDEACMAEDMA

SEQ ID NO: 57072 - protein, 365 aa, unidentified
MQRNKISFKGQKIFVGIDVHKDSWRVAVTPEVGVVKGHSQNPSAKELFDFLNKHYPDGDYLAVYESGFSGFSTYYALHEVGIDCMVIHAADVPTTQYDEAMKTDKVDATKLARSLKAGLLKGIYIHKKDDLDARAVVRLRKTIQTQLSGYKARVKHMLHCNGVPYPERFSKNTSHWSRFFMQWLKEDVKLLSSTRYSLDILISQVEIIRKSLLMATRKMRELSQSERYKKDYNLLTSIPGIGVSVAMALLTEVGDFNRFHNEKEFASYLGLIPTSHSSGDKVVHGEKTFRGNKILGPQLVEACWIAISKDQGLGAAYFHYKKRMRPQKAIIRIARKLSNIIFAVIKTGKKYEPYQWIEIKTYNGL

SEQ ID NO: 57073 - protein, 338 aa, unidentified
MAIVMGLDQHRAQITADWLNTETGEVSRARVTPAHRDRVRQFVGRFAGQDLEVALEATTGWRFVVEELQAIGADVHLAEPAETSTLRGSKKRAKTDRADARHLRELLMVGRLPEAWIAPGHLLDLRARVRLRHTLVDQRGEWQQRIQAVLYHHGVAQRRDLLTAGKRRWLEGLELPAAAREQITVALTVIDALDAESAPLTRELRAYGRRQPGCRALMRHYGIGALTAVTILAELGDARRFSSSRHAVRYAGLDITVHQSDQRRAPGHLSRQGPPALRWALYEAAQLARRPGSPDHAYYEQAAARLGGNRACLAVARKLLKRSYHTLRELGDEALQPA

SEQ ID NO: 57074 - protein, 490 aa, unidentified
MSQKGRRKPTPVTGPVPEEIPDAEYELVIERVAAVDVAKAAGKVCVRLPAKAGRRVSRVWDVPARTGAVAELGEQLVDLGVEKVTVESTSDYWRIWYYLLEAAGLSVQLVNARDVKNVPGRPKTDKLDAVWLAKLTEKGLLRPSFVPPAEIRRLRDYTRLREDLTHERTRYWQRLEKLLEDALIKVSVVASRLDTMSARDMIDALIAGERDPRRLADLARGRMKAKRSELITALDGRFDDHHGELARLLLAQIDALSTQINILTDRIEDLIAELPAAAALDHGGGDDTAAPDVGDGSDARSQQARAAAELSGRAPRRADPTLEAECARLSAIERLDEITGVGALNAQVIIAETGLDMTRFATPAHLVSWAKLCPRTIQSGAITRGGKTGKGNPYLKGALGQAAAAAARTDTFLGQRYRRIVKRRGKLKALVAVARSILVIVWQLLSNPLARFHDLGSDYHASRIDIERRMRNHIAQLTALGYRVTLEPAA

SEQ ID NO: 57075 - protein, 356 aa, unidentified
MKQDTKARSYVGKQVFIGIDVHKKTYTVVARVEEEVVKKWTTTASPQSLSQQLLKYFAGATIYSAYEAGFSGFVLHRELEAHGIENIVVNAAGIEVAVNDRVKTDKRDALKLATLLEAKRLKRIRIPSEEEEAHRLLSRTRKQLVEDCTAVKNKIRMKFHQFGLIDADETRDMTHKLVKELLANAPSKELAIVINAYWNVWKSLDEEIKKIEQELKQQAKEDPNEKTYRSAPGVGPQSARILSNELGNMSQFCNERQLFSYTGLTPSEYSSGEAIRRGHITHQGNDKVRGILIEIAWRAIEKDQALAQFFNRLFPRTGKKKAIVAVARKLIGRIRAAFQKGEIYQLGYPDTLSQIA

SEQ ID NO: 57076 - protein, 353 aa, unidentified
MGLYTAFDLHSNNAYLGIMDETGKRIFKKKLPNEVEMIKATLLLFKDDIEGIVVESTYNWYWLVDMLMEEGYPVHLANPAKIQQYSGLKYSDDKHDAFWLADMLRLKILPEGYIYPKESRPIRDLLRKRSHLVKLRTSLIISLQNIITRNIGSNLKANDIKALTTDRVQPLLAYNDDLALSGKVSKNAIDALTQQIKVIEKNIEGRIHLTSPYDHLLSIPGVGAIIGATIMLETGPISRFPKVGNYVSYCRKVATGRFSNYKRKGSGNRKNGNRYLACVYSEASDYAKRYDEAARKFFNRKLKSTNAPIAHNALANKLARAAYYIMRDGMDFMSEKAFAWGSGCDGELGVELE

SEQ ID NO: 57077 - protein, 325 aa, unidentified
MIKTMQTQNAVVYAGVDVAKATLQLHLQGQQSEFSNTPKGLHQLCAQLRKVPSVHVVCEATGGYERALVKALHQEQLPVSVTNPARVRAAAQAQGQRAKTDQIDARGLTDYGQRYQPEPTPPTSATQDQLVALTQWLKQLIHGRALAKTHAEHHQDPFVRRQHAKLMTHLQSQIQAVEKQIVALLEQDAALQQRVNCLDAIQGVGPRTAWMVLAHMPELGRLNRQEVAALAGLAPWTRESGTMKGMRCIGGGRPEVRLALYMAALSAARCNPVLRTLYKRLRAKGKLPKVALTAVMRRLLTYMNHCLKALPSETATARAKELKTA

SEQ ID NO: 57078 - protein, 429 aa, unidentified
MSNFFNDFVVGIDVSSKSSVITILMPGGEAYGKKINITNDLKGFDKLLLILTDITENFSKRPKIFMESTGLYHMPLLNYFNKNNFECYVINPIHTKNFAKQSIRKVKNDKVDSLRIAQLAQSPTFFSESFFDEDIFLLKKLCREYDSLVSHRAHYKKKVLSSLNLVFPKFNDIFSDTFSAVPLAILSNYPTYKDFLSAHKSDVVTLMRSTVSHSSEWADKKYKLIYTTAKEAEMLKLPTTCLGTELTCFINIIKTFSKSIDDLKEQILIFHKQIPNFEDNAKLLCTHPEVGLLSAISFLAEIGDIKNFSSPKKLVAFLGVDTSVSQSGAFTSTHNKLTKRGSNLARKILYNLAIASIKTLRNGASANPVLLTYYNKLIKSKPKKIAICAVMHKLINHFFAILRDKKAFELRLPETHKQIYIDKNLLVVI

SEQ ID NO: 57079 - protein, 400 aa, unidentified
MVHDGYGVYLGLDVGKGDHHAVGLTPDGRRLHDAPLPNTEARLRQLFDKLSRHGQVLVVVDQPASIGALPVAVARACGHQVAYLPGLAMRRIADLHPGSAKTDARDAYVIADAARTLPHTLRRVDTGDETLAELEVLVGFDDDLAGEATRISNRIRGLLTQIHPALERVLGPKVHHKAVLELLSRCGGPAGLRKAGRRKLTSIATAHAPRMGERLVEQIMTALDEQTVTVPGTQAAETILPRLADSLRETLRQRDQIGAQVEGMLDAHPLAPVLTSMPGIGVRTAARILLEVGDGTAFATPGHLAAYAGLAPVTRRSGSSIRGEHPPRGGNKNLKRAFFLAAFAALADPVSRAYYDRKRAEGKRHNAALICLARRRCDVLHAMLRNKIPYQPRPTSPATA

SEQ ID NO: 57080 - protein, 350 aa, unidentified
MIHIGMDLHHRNMYLVAITDDGEIFPGRRIDNDRIEDLWQYLAQFGHEPKRVVFEATANSRWMRRLLQVDASVDAVAVTPHKVRIIAETIAKTDKIDATVLATLSKIDMLPRAWLPDEQVEDLRELTRHRAALVVYRTRSKNRVNAALVRRGLIRPYQNIFGTWGRQWLEQVDLPAVMRLEVDHWLETIDFIDERITQAEKMLYGELAKQDCWREDMALLMTVPGVGRLTALTILAELGDYRRFKRRNSVSCYVGLVPRSKRSDRSSRYGHISKRGSPAVRSLLMEVSHNAVRKVPRYGDLYRRVKAKKGANTAKTAVARQMIEDCWTLLIKREPFRLMPVQVESLTRAG

SEQ ID NO: 57081 - protein, 338 aa, unidentified
MNLSRIGLDLAKQVFQVHGVDRHEHVVCRRQLKRAQVRDFFRQLPPCLVAMEACGSAHYWARELRELGHTVRLIAPQFVKPYVKGDKHDAHDAEAICEAASRPSMRYVPVKSAEQQAVQSMHRVRSRLVRARTALCNEVRGLLGEFGLIATRRGRAATMALLETVMATEPASLPAPMGELLRELKDELQTLEARIARLERQIQAHVRGDARIQRLLAVEGIGPISASAVAASAGDARQFRTGRQFAAWLGLVPRQHSTGGQQRLGNISKRGDTYLRTLLIHGARAVVRCCANKTDARSRWLQGLLQRRPANVVAVALANKNARILWALLSRETCYRPG

SEQ ID NO: 57082 - protein, 381 aa, unidentified
MIQVCGLDVHKDSVFACILNENGVVFQEKFGVLTPELEQLAAKLQEHDVSQVCMESTSIYWMPVWRVLEPYVIDLKLVNPYFIKQLPGKKSDVKDAEWIATCLLKDLIRGSYVPADIIQQLRQYDRRISDLNAECVRKLGKLDAAMQRCNIRISNYVATTDGKSYKDVVRLISEGIRDPAELLKVIHARITNRVGKDVILASLTGVISDTDVDVIRQLREEVDLAQRHKDECQSRMDAICQRFFPEQLKNLQTIPGVKGRSATAIIAEVGSDVSSFQDAAHLVSWCGLKPRNEESAGKIKARSITHGNRYLRKTLIECSWAASKTQGCYLNKFSYYQTVVRRKNKMKVQVAIARKILTAVWFVLHDNVAYRDYTPDIVPAA

SEQ ID NO: 57083 - protein, 363 aa, unidentified
MDKFIRIGVDTSKSVFVLHGVNAAEQPVLRKKLRRRQVLEFFAKLEPTKIGLEACGAAHYWARELAALGHEAVLLPPQYVKPYVKRNKNDAADAEAICEAMSRPTMRFVPVKTPEQQAALMLAGTRDALIRRRTQLTNMIRGYAAEFGLTAAKGLDKIEPLLVRIAATTALPRLAKELFAAYGKEYAQLKVQIQKIEAKLMAWHKDNELSRRLVEVPSIGPIGASLMAMKVTDPHAFRCGRNFSAWIGLTPKDHSTAGKTRLGVITRAGDESLRSVLVVGATSVIQQVRRGKGHPSPWLVELVRRKPPKLAAVALANKTARIVWKLMVSGERYNPARAAAVIARISHQISGDDRDDQRITSSA

SEQ ID NO: 57084 - protein, 368 aa, unidentified
MNSIVYVGMDVHKEQYTLCCYSYDTDKVEYKQTILSDYKLVLKYMEQVRSRYKGEVTFVCGYEAGCLGCSLYHQLKDHAVDCKILAPSTMAVTNTHHVKTDKRDAANIARCLAFHTYSEVYVPDNDDNDVKEYIRMRDDQKLYLKKVKQQILAFVLRQGKRFEGGKTYWTIAHLKWLKILELSDLQRETLDEYLLTYEYLKEKISRFDERIEELASAERYEEKVKHMGCLLGIKTHTALSMIVEVGDFERFEKAPKFASFLGLVPSEDSSDTRVNRYSITKARNSHLRRLLVEAAQSYTRGNVGHKSVALRQRQQGNPPEVIAYADKANERLRRRFYKMTLNKGVNRNVAATAIARELACFIWGMMTV

SEQ ID NO: 57085 - protein, 425 aa, unidentified
MNSISNKKINQVTDQTLVVGMDIAKKKHYACFVDERGRVLKKSFPVPQSREGLEWLYQCIVKTMEEFEKTEVIVGIEPTGHYWLNLAYFLDEKGIPLVMTNPMHVKRSKELDDNLPTKHDAKDALVIARLVKDGRFSYPRILKGMEAELRVGATFRSKLVEEQGAIRNQMIRWLDRYFPEFSQVFPSFGKMALAVLEYTPFPSDLAGKELEEVLALYRQSEGLQSPQKPKAKKLMELAQHSIGVTEGQQMARIEIATLVRRYRQLEKEIEALTEQLIELVQTSVEYEWLKTVPGLGDATIVELLSEIGSFSHYQDPRQLIKLAGLTLREHSSGQHKGQKRISKRGRRRLRALLFRVMMPMIRHNEAFRQLHEYYTTRPDHPLRKKQSIVVLCGKLLKVLHAVCTKHQAFDAKRMMQDIFGLETAA

SEQ ID NO: 57086 - protein, 379 aa, unidentified
MRHVCGLDVHKDSVFVCILNEKGVVFQEKFGVLTPELERMVGVIMEHGVTEVGMESTSVYWMPVWRVIDPYVEQKLVNPYFIRQLPGKKSDVKDAEWIATCILKGLVRGSYVPEERIQRLRQYDRRIFDLNDDIVHKLAKLDAALQRCNIRLSNYVSTTDCKSYGDVVDAIARGETSPDALLRCVHGRIVNRHGADVIRSALTGVVTPVDVDVIRQLREEIELARRHRDECQRRMDGLCSEWFPEQYANLQTIPGVKARSATAIIAELGTDMSSFEDAAHLVSWAGLRPRNDESAGRIKARGITHGNKYLRKTLIECAWGASRTRGCFYSRFSHHQTVVRRKSRMKVQVAIARKMLSAIWFILHDGVAYRDFEGDANAA

SEQ ID NO: 57087 - protein, 359 aa, unidentified
MRYVGIDYHKRYSVLCATDERGQELKQRRISGNSATGFAQFFSELGEESKVVMEACWNWGWLYDLLAKIDGIDEVMLAHPYKTRLIAEAQIKTDRLDAQMLAKLLRGDLIAQSHAPSAATRARKHLLRQRLFWVRLRTMLRNRMHAILDRQQGLERPQLKNFFSRRGQTWLEEVQLPCAEDQPLLTQDLEVAELLEEKIKQLDRSIGQSQSEEEKLLESIPGIGPLFSSVIATEIDGVGRFNSATKLAAYAGVVPTTHASGGRVFNGRLLWQCNKWLRWALIEASWSAIQFSGYFGSIYRCARARGKNKNIAITMVAHRMIKIIWLLLTERRPYTETLPDRSEDGMTVVVRRKVLGLAS

SEQ ID NO: 57088 - protein, 443 aa, unidentified
MARKNQKRFEIIHRDCAGIDVGSREHFAAVDPERCDNPVRKFSTFTDDLIALADWLTSVGINVVAMEATGVYWIPLFEVLDARGFDVYLVNSRATRQTSGRKSDVLDCQWIWQLMTHGLLSGAFRPSDAICSMRSLVRQRSNKVRDQAKTLNRIQKALSQMNIQLANVISNIAGVTGMKILRAIIEGERDPHKLAAFRDRRIKADQQTIARSLHGNWRLEHLHALAQEVECYDFFEQQIAACDKAISEALERLPALNNAPQPSAKVLRSPHRSSSEQAALHQALWRMMGVDLTAIPTIGIDTALVLASEVGPDLARFPTSEDFCSWLGVAPPTRISGGRQLPGRPPKVLNRAAQALKQAASNARNDKSFIGASHRARLARMDTSCAIKATAHQLARLIYSMLTKGQPYVEQGMDAYEAKSKERQLRALLRKAHQLGMELVHAA

SEQ ID NO: 57089 - protein, 394 aa, unidentified
MNRIVYIGMDVHTSNYTLCSLDPGYGVEKDNYFAEVQFTNDFIKNVVNYVSNLKKKLKDCEFVCGYEAGCLGYSTYKDLTKVGIKCVIMAPSTMAVQKGGKKVKNDRRDARVIAQCLAYQTYKEVYVLSEHDEAVRGYLRMRDSHNKALKRIKQQIIAFCTGHGLFSPTKSNWTVAHLKWLKDLKFNDPVEQEILNEYLSSLTFLSDKIKAMDVRIEELASEKQYCENVKKLRCIKGIETNVALTLLAEIGDFNRFSKPTDFASYLGLIPGEQSSGDKVRGTGITKAGNSTLRRKLTESAKGYWRGRIGIKSATFKKLEKELPKEVTEYALKANTRLQRKFFNMTHVKGKNMNVAASACAREMACFVWGLITNHYEKAPAVPKTDEELLDLNLG

SEQ ID NO: 57090 - protein, 329 aa, unidentified
MSRKGQNMSTRAIFVGIDVSKAHLDVAVRPDEIEWRSPNTDTGAREAANKLKDLDPDLVVLEATGGMEIPAASALAVLGVPIAVVNPRQVRDFAKSTGRLAKTDALDARVLAHFAEAVRPEPRPLPDEQARQLSALLSRRRQISEMLTAERNRLQSADSTVRRRLKVHIRWLERELSDIDDDLNRAIKESPVWRVKDDILKSVPGIGPVVSFTLLSELPELGRINRKEIAALAGVAPLNRDSGTLVGRRTVWGGRARVRAALYMAALVASRYNPVIRDFYLRLCAAGKPKKVALTACMRKLLLILNSMIKNKTRWNASAAEVRGTLISA

SEQ ID NO: 57091 - protein, 359 aa, unidentified
MDVSREQPKTTAGLDIGDKYSYLCLVDQESGEIIEEGRLRTTPEALRRRFASEPSLRIAIETGTHSPWVSRLLEGCGHEVLVANARKLRLIYSNKRKTDEVDAENLARLARLDPKLLYPVRHRDEGSQAHMAIIRSRQALVDCRTQLVNHVRGAVKSFGARLSKCPARSFHKRAPEQIPEALLPALEPLLEQIASLTERIRDYDRKLVAISEEHYPESALLRQVEGIGPLTALCFVLTLEDPYRFAKSRSVGAYLGLVPAMDQSGDRDPQRRISKEGDELLRKLLVGSAHYVLGPFGSDSDLRRHGEKIASRGGKNSKKRAAVAVARKLSVLLHRLWVTGEVYDPLHNTHRRERREEAA

SEQ ID NO: 57092 - protein, 315 aa, unidentified
MEDSQVFVGIDVSKSCLDVAARPTGEVWQTTNDADGISALAQQLTGMSPSLVVLEATGGLERALTAELSAAGLPVAVVNPRHVRDFARASGALAKTDTLDAQVLARFGQAMEPEPRPLPDAEAQDLQAMVGRRRQLVDMITAEKNRRRIVIARIRPQVEEHIRWLEKSLKDLDQDLDGFIRSSPMWRTKEKVIRSAPGIGPVLSATFLANLPELGMVSGGQISALVGVAPFNRDSGTLRGKRTVWGGRRQVRAALYMAALVASRYNPVIKEFYQRLCSMGKPKKVALTACMRKLLVILNSMVKHGEEWQPNLKIA

SEQ ID NO: 57093 - protein, 350 aa, unidentified
MLIIGCDYHPGFQQIAYVDSETGELQERRLKHPEEAEKFYRDLGEQGVSVRVGMEASGHGRWFERLLEELSFELWMGDAAKIRAKRVRKQRTDRLDAQHILKLMLKDDFPKIWTPSWENRDLRQLLWHRHRMVQTRTRIMNQLQAVAINEGIRYKKRLWRETGRKQLESLSLAPWASRRREDLLQVLDRINPTIAGLTQAIEAEAEKCSQARRLMTHPGVGALTAIAFVLIIGEADRFDCSKQIAAYLGLVPEEESSGERRRLGHISKQGNSLLRFLLVEAAQATVRSDGRWRNQFFHLAQRRGRKIAKVAMARGLAVRLYWMWRRGWDYEQLQSFGSHVGQPGNPHGVR

SEQ ID NO: 57094 - protein, 394 aa, unidentified
MPAQDATVFASESSESAVHIFVSIEMSRAAWVIGVHTPLADKIAIHKIVAGDADAVLALIDRLRSRIVTAQGYTPTVLCCHEAGYEGFWLQRRFGALGIKVIVIDPASLLVNRRAKRAKTDRIDARDMVRALMAHARGEHQVLSTVRVPTVEQDDERRLLRERQRLVKERTAHTNRIKGLLKTQGIAEFDPRAADAKQRLDSLVTGDGRHLGRRLEEEIVRELQRLALVMGQLAQVEAERDRVIREAKSRLDEPTADCHRDGAMLVALNRLKGIGTNDASILVREAFWRDFRNRRELGGWSGLAPAPWASGSVVRDQGITKAGPPLLRAQMIQITWRWLFWQPDSRLSQWFKERTAGATGRMRRIMVVALARKLFVALWRYATTGLVPEGAIVT

SEQ ID NO: 57095 - protein, 370 aa, unidentified
MTSIIYVGMDVHTQSHSVCAYRIGEEEVFAETSFAASADNIEKYLEILKQNFPATGFICGYEAGCLGYSLYRDLTKRGIECRILAPSTMATSPLDNIKKNDRLDARKIARCLAYGSYRKVYVLDEEDDAVKEYIRMRDDANAELKRVKQQITAMCVRHGKQYSGTKNKWTVTYRAWLKKLEMESPLLRETLDEYLLRLQQLEEKLTLYDKRIAEFAESERYADTVKKLTCFKGIATHTAVSLAAEIGDFRRFPTAGAFSAYLGLTPGEHSSSTSHHTLGITKAGNSHIRRLLVESAQSFNRGRIGQKSAALRKRQEGNSHAVIQYADKANERLRRKYMRLTTRTSVNVAKTAIARELACFIWGMMTDHIS

SEQ ID NO: 57096 - protein, 443 aa, unidentified
MSFDRLKRTQRRKRLPGHKLKPSRATLFVQNSKPHLSMKPTYFLGIDAAKHKMRAALSNRSEHVLFEKDLSVEATGLRQLLAAIKRRVNDPEQLLVLIEATGLLHLNWSAALTKAGYAVAVINPLIARRLYTLQNSIRDNKSDPIDARGLCTIGLLHGEKLLVHYRFSLRPEQFTLQRAQSVRKALRSALTNLKKTYQSLMDLSFPELGGLLQLDGVGIRQLLIQAPTPAAIAGKRLSTLEKNWMVRPKAAALKALAADSMADPDLAAASGPALVALLQSIAAMEGRLHALDQQIAKLACTSVDPQTKALIETIPGFGPVNAAKTLAWLPTEILHSGSNRKVAARLQAFMGNDPRLRQSGQWKGHTKMSKRGVEMLRTAFFQSAFSAAHNDPELRAYYQCKRAQGKTHEVALSHLMRILTRRLVAVLRSGKPYQSHYNLKNAA

SEQ ID NO: 57097 - protein, 402 aa, unidentified
MNFFVGLDWASQAHAVCVLDATGQVCWQGSAAHSADGLAELLRRLARLGTPASVSVAIERPSGLVVDTLTDAGYRVVPIHPNALKASRPRYSAAGSKSDPGDAFILADLLRTDGHRFRPLQPLSDETRALRALVRGRDDLVAERVALANQLRALLDRFWSGAAAIFADVDSPIALAFLSRYPTLHSAERLGEKRLARFLVQHAYCGRRSAAELLARLRSAPIAQMGELEAEASGEIVRALVTVLLPLVTQIQQLSAAIAAALPQHPDGPLLQSFPRSGSVNAAQILAELGDDRTRFPTDEQLAAEGGVAPVTHESGKYRGVAFRWACNKRLRQALTTFADHSRHASPWAAAIYAAARRRGCHHPHAIRVLARAWVRVLWRCWQDRRPYDVTLHRAAQRLAAA

SEQ ID NO: 57098 - protein, 351 aa, unidentified
MRIVRQNIGIDVDLKELKVSLQALREDLTIKVVASRTFSNSPVGFKALVKWADQKKEDSQPLHFTMEATGIYHENLAYFLHGQEQATVHVELPNKTAAYKKSLNIKSKTDPIDAKMLGHMGAERHLEAWHPGSGQMREIKKLSRERLRLVDEKTMVSNQLHAEMKSFGPNRSSVRRYDKRIKFLIKQIGEIEKELEIFVAKDKTLQERIDNVCTAKGMGFISAVGIVAETDGFALFKSRNQLVSYAGYDVKEHESGTSVKGKPRISKKGNSNIRRIMYMPAMSAARSDENHKNHYQRIVGKSGIKMKANVAIQRKLLLMVYTLFTKNEPYDPEYRDALKKRLAPKKPEAVG

SEQ ID NO: 57099 - protein, 326 aa, unidentified
MQNHAIAGIDISNLTLDICILKDGKHQSFIINNQVKDIRKFFGTYKNEQVLIAMENTGRYNWSLYEALSTLQHKVYVISPLHIKKSAGLIRGKNDKIDALRIALFIEKHHAGLPQWKPAPVAIEKLKVLLTERSYRMKVKRQLLVQRADHAKMKRLDLDKPMRKLNDQMIELILKQVKQIEAAIQELIKADEQLNKQATLICSVPGVGKVLCWTILAKTAGFTLITEPRKMACYSGVVPFEYQSGSSIKGKSRVSHYADKALKTILHLAAMSAIRLQNDLGDYYRRKVAQGKNKMSVINAVRNKIIHRIFAVIKNQTTYQSRLLIS

SEQ ID NO: 57100 - protein, 342 aa, unidentified
MNDTMIGVDLAKNVFQLHAASMTGHLKYRKKLTRAQFPKFMADQLPSVVVMEACASASHWARELTKLGHEVRLIAPQYVRPFVKRQKNDATDAEAIVIAAQRPEMRFVPPKSEEQQARAALFRARERLVHQRTELVNALRGLLYEFGHTVPQGIRHLKAIEAIVGDSATSLPELVRDECKDLLLQIFEKTTRIEARTKTARKLAETTDTARRLQTMPGVGPMTALAVEAFAPNMGGFRRGRDFAAWLGLVPRQHSSGGRERLGRVSKAGQADIRKLLIIGAMARLTFRGRKSVREGSWLARMLARKPKMLVAIALANRMARQLWAMMTKGEDFRDPVSASAA

SEQ ID NO: 57101 - protein, 361 aa, unidentified
MLYRTSIGLDVHARSIAATAFIPETGEIVQKAFPYDAGKVAEWAKGMPQPARCAYESGPTGSGLKRKPGKAGVPCVVGAVSKMLRPSGDRARTDRRDATFLARMLAVGNIAGVAMPTEAMEAARDLARAREDCRHDLMRARHLLSKFLLRKGIVYPGKTAWTKAHREWLGRLEFADPCERLVFGEYLESVRSPGLRRARPDRAIEERAAGEDMAPAVSALRCVRGIPAVTAFSIAAEIGDFSRFPDARSFMSFVGLVPSEPSGGESVSRGSITRTGSIHVRTLLVEAAWQHARPLRPMSAAAMGDAAGVPADVAEAAARESRRLHSRAAHLRGRGKPASVVNAAIARELAGFVWALVRMAG

SEQ ID NO: 57102 - protein, 443 aa, unidentified
MATLIDAERNTPAYAAWIGLDWADQKHFWTMRTADGKIQRGELRNTPEAVEMWAADLAQRFPGRSIAMALEQARGAVIGMLSKYAHLVLFPVHSTTLANYRKAFSPSGAKGDPSDADLILDLLLKHPDRLRRLQPDTVETRGLQFLTEERRKLVDQQTSELQRLTNWLKQVWPQMLVWFDDLASPLVGDLLLRWPSLQALQKASAKTLRTFFHQHNCRSEERIQQRLDQIRQAVMATTDAALRETATLCIAHSVRALAQMRSAIQTFDRRIAEIYHCHPDRAIMESFPGAGPALEPRLIAAVGSRRGRFDSAHNLACFTGIAPVQESSGNSSWTHWRWACPKFIRQTFHEWAACSIRSCDWARAFYQHQRGKGKGHHAAIRALAYKWIRIFFRCWRDGVPYSAERYQKALQVHAVAGVPPVAQRTLEVSWISCGGFFKLVKNS

SEQ ID NO: 57103 - protein, 371 aa, unidentified
MKSIIYIGMDVHKKTYSLCALLKETGEIIGETKIPADVSLIIKFIENAKKSVDSDDVQIKTGYEAGCLGYSLYWQLAAKGIECDILAPSTMHRSAKNKVVKNDRRDAKNIAANLANGTYKSVYVPTDEDVEIKEYIRMMHDFKIELKKVKQHINAFLLRFGHHYPGKSKWIPAHIKWLKELELSDMYREILDEYLSQLEILSEKIERFKHRLEELSQKETYNEKIGQLRCIKGIDTTAAMTMHAETSDFDRFPTANAFASYCGLTPGEDSSGESYHRLGITKQGNSMIRTTMVEAAQVLVRGTIGKKGKKVKSKQKDQNVKVIDYADKAVVRLQKKYHRMIFRGVKRNIAITAFARELACFVWGIETGHIS

SEQ ID NO: 57104 - protein, 428 aa, unidentified
MNVEESIRLEEFCQLKKEIRGSEEHLIIGIDIAKDKHHAFFGTATGKTLLRRLIFENNIEGFGRLRTRTEAIKVQHRLSKVVFGLEPTANYHKPLAEYLIKCGHNVVLVSGVAVNKNRELLDGRWDKHDTKDSANVADLISQGKCLYYDYPSMPLRDLRNLLSLKRRLKKQEHGTRIRIRNHLLAQYFPEFDRYFGKGCSESLPIVKWCLNPSMISGMGYEEFVQLVAPRIKTMGQEKRLKSIWRMAVDSIGCEVGQALDFEAKLMVEDLQQIKDSIRAVDEHIEDICLGFPEYSYLLTIPGFGPDVSSKVLGAIGNPSRFDNGKQVLKLAGYDLGANRSGKTSDSAVPVISKRGKAYLRYALYQAAFIASTSNSHFIIYYTNKLRGREREKGIKTKMKVKLAVKMLIIAWTLMKKKEPFDPEYLNID

SEQ ID NO: 57105 - protein, 358 aa, unidentified
MKYYTSTTEFNCGIDLHSRQMYVCVMDRAGNKLVHTNIQGNDFAYFLKRIEPYRQSLTVCCECTFNWYWLADACQRVGLTFVLAHALYLKAIHGGKNKNDRIDSEKLAHLLRANLIPPSYVYPGTKRPVRALLRQRLFYVWRRAELLARIQSHQLAEGHTPVKQSRPNRDPWEERLLAQYDNPLHKSTLEIDLHMIRAYDEMLLRLERELLAATRQLASRDYALLNTVPGIGRSLALTILYEMDSVERFPTVKDFTSYCRLVKGSVASAGKIKGTRGAKLGNPYLRWAFGEAAVIGKRDHPLLHAYAQQLEAAHGKFKGNAILAHKLARAVYFMLKNGTGFDVEKLLATAVGGAMQAA

SEQ ID NO: 57106 - protein, 354 aa, unidentified
MEDSAQVVIGVDAHKRAHTLVAADELGRELAAKTLAATAEGHLAALAWASRWPSRRWALEDCRHLTRTLEADLVRAGERVVRVPTQMMAGVRRSGRQPGKSDAIDALAVARAAWREPDLPAARLDGPSRQARLLVDHRDDLVGERTRIQSGIRWHLHEIAPDLEIPARGLKLQHVIDRVADRLASIDGLIAAIARELLDRLRELNRRINELEREIKPMIAALAPALLTIPGCGALTAAKLIGETAGVNRFRSKSAYARWNGTAPQPASSGNTTRFRLNRGGNRQVNAALHRIAITQARSWPPGRDYIAKRIKHGNTKAEALRLLRRRLSDVVYRTMLIDEPVAQPVQAINTHKT

SEQ ID NO: 57107 - protein, 357 aa, unidentified
MSKSRQSEQSRSNSQATVFCGIDVSAATLSVAVEADPEWKLEQRQFANSAVGHRQLMAWLGKSKCPVRVTLEATGVYSIDVALALEEAEGFAVQVLNPRKASDFARSLGRSKTDKTDAVALAEYSRRMEFVAWKRPRREVLELRALGRHMTTLTEEHARLSNRLHAAQASRTAPRCVRDDLKRTMTGIQKRLVRLRREARMRIETEAGMHRKWLRLLAMPGIGEVSAVQILAELAGLDEEMTVRQWVAHSGLDPAHETSGTSVNRPSRISRQGNRYLRRALFMPALTAARFDPHLKAFYRQLLTRHKTKLQALTAVARKMLHAIYGIFKSDTPYDGAKLFPRLAVSISTQPQPIPTY

SEQ ID NO: 57108 - protein, 364 aa, unidentified
MCQAGTGIVPRRSGGVGMFAESVDVVIGVDTHRDSHALALVDAGLGVLIGEERIEANREGYRRALKVASGCGQRRLWAVEGSGSYGAGLARYLQQRGERVLELERPARSGSRGRAKSDALDALRAARAALTGEPLAELRSGGRREALRVLLVSREASVAVRRRGLNQLRALILTAPAELRERLLGLPKGELVKRCIALRPRPDQQPQLRGTLLALRSCGRQVKLASREAATLEHELAALVQQLSPQLLNHYGVGPITAAQLLVSWSHPGRLRSEAAFARLAGAAPIPCSSGKTIRHRLDRGGDRQLNRALHTIVLARRRGDQRTIAYVQRRISEGKTEREAIRSLKRYNARSLYRLMEHTNRDA

SEQ ID NO: 57109 - protein, 401 aa, unidentified
MVLTLFYIGIDIGKRNHEAGLINEKGEPIGKSLRFSNSKAGSEKLLKFINQYNLTPDNSVVGLEATGHYWLSIFSFLHKLGFKTTVFNPLQSDALRHFYIRKTKTDVSDAYLIAQVIRIDSPDETPFIEEDLLRLRNLERLRYSFVDQSSDLKRKIISLLDQVFPEYEQVFSDIFGKSSTEILLHSPLPEDLLKIETEKLASLLNRVSKGRLGESRAHDKASQLKENASNTFGISIGTDVFKLQIQLLLEQISLIEQHLNQIETVMIEISNRQEHFLTTITGISDVTACVILGEIGSIKRFDRPEQLVAFAGLDASVHQSGNFNSSRTRLSKRGSPYLRRAIWQAAFVASFRDPALSLHYQKLRKRGKAHGTAVGAIARKLTHIIFAILRDNKPYEPRPNI

SEQ ID NO: 57110 - protein, 425 aa, unidentified
MNLLVLKGVPMALKIVYKICCGIDVHKTFVVACIASTNDKGITSYESHRFSTYTSGLKTLLQWLLDRNCKDVCMESTGKYWIPVYNILEPDCSIVLAHPKYVKAIRGKKTDKKDAKWIADLFKHDLVAGSFMPPSDIRQLRDLMRYRFKLTCFKSSEKNRLQNCLTVSNIQLGNVVSDTFGKSAQAILDKLLENPADTSFDLEPLVYKSLKKKLPELRDAIDGYITPEQAGKLKVIKAHYENLESRKAELEELILALAAPYQQELTILQTAPGISSPFTAIGIISEIGTNMEAFPSAKHLCSWAGLTPTNNESAGKKKSVRVSKAGCYIKPLLVQCANAVVKSTKHPEMRNRYLRLKKRRGHKKAIIAIARMLLTALYHMLKNGENYNAELYQKSDLLPVDREITVEQALMIARNQGYKIKSATA

SEQ ID NO: 57111 - protein, 347 aa, unidentified
MKNYVGLDVSLTNCAVCVLQEDGTRVFEGECSTDPDEIIKTIYLNADCVERIVHESGPLSIWLSRELDRRGVPVVCIDARAAHKALSARMNKSDRSDAEALAQLARTGWYREVHIKSENSDRLRLLLSARERLVRIRMDIEGQARGILKTFGIRLGVVRKGRSRRDFRDQLSEIVSGDPILEVVFASMIKVHETVCHKTTDLDAEIQKYAKDCPLARRLTSVPGVGPIVALSFIATIDDATRFRRAVDVGAYLGLTPRRYQSGETDWSGRISKRGDQSMRKLLYEAANILIQRVAKFSPLKGWAMRLVQRKGLKKATVATARKMAVILTRLWRDGTEFAWTKEALPA

SEQ ID NO: 57112 - protein, 341 aa, unidentified
MNASKTVVGIDIAKRVFQLHSIDMETGEIVSLQLKREKFLEHFANRQPCLIGMEACGGAQHWARKLMAMGHEVRLLPGKAVKGFVTGNKNDRQDARAIWTAVQQPHLKAVAIKTEEQQAILALHRMRSQLVKFRTAQVNGLRGLLTEYGEVMPQGKAGVRQGIAQALARLADRLPAMVIETLREQWARIGKMDEEIATIEQRIKRWLKQDDACRRIAEIPGVGPLTATAAVAMMGDAKAFNSGREFAAFVGLVPRQIGTGGRVKLLGISKRGDAYLRTLLIHGARSVLTHAKDPGPWVTELRQRRPLNVAVVALANKMARTIWAVLAHDRTYQKGFVSRPV

SEQ ID NO: 57113 - protein, 347 aa, unidentified
MEEFTRVFVDTSKQIFQLHGVNAAEAPVLRRALRRGQVLEFFRRLGPVEIGLEACGASHYWARELSKLGHQVKLIAPQHVKAYVRRGKNDAADAEAGCEAMSRPRTRFVPVKSAEQQAALMLVSVRDRLVRSRTQLANAIRGHAAEFGLVAARGLDKIEPLLAAIAQDATLPELARELFAGLGREWGRLQGEVKALEARLLAWHRADQTSRRLAQIPSVGPIGACLLAMKTPDPKAFRSGRHFAAWIGLTPKDHSTAGRQRLGGITRAGDEMLRATLVAGATAVIRQVRAGKGPRSPWLLRLLQTKPPKLCAVALANKIARIAWRMMLTAEDYDPTRLLRALPQTTA

SEQ ID NO: 57114 - protein, 314 aa, unidentified
MKTSEPHPIYAGVDISKDRLDVSLAHQNPSQYPNNASGIAELRQALGQVPGPVQVICEPSGGYERALLEALWAAQLSVSLVNAARVRSFARARGLLAKTDVIDASGLREFGELLRPEPLPAPSPQRQRLADLVQRREQLVTILATEEQRLAQARDKAVKKLGTSLIRELKSQIEQLEALIAAQIDDDDTLKGQSERLQQVKGVGKVTASTLLAELPELGPLTSNEIGALAGLAPYNRDSGLYRGRRTIRGGRVKVRRVLYMAALVAVRFNPILKAFYDRLVAAGKPKKVALTAVMRKLVVLLNHLLKKPDFILA

SEQ ID NO: 57115 - protein, 463 aa, unidentified
MRKKVQRKNSGRTDKPKVDWKALDIVHPNAAGIDIGGSEHWVAINPEVDEQPVRCFDCFTADLQQMADWLIERGVRSVAMQSTGVYWIPVFEILQQRGLEVYLVNARHTKNLPGRKSDIAECQWLLKLHTFGLLNNSFQPSDEVRRARTLWRHRGGLVAQASSTIQRMQKALTEMNIQLSNVLSDLSGVSGMRIVRAILDGQRDARVLAALADPQVKASKEVIAKSLEGNWRQELLFVLGQEVEMYRMYQDRIAACDLELQQHLRVRASKVDLQAQPLGPRPKGKRARGNSPKFDLRTELYRISGVDWTQVDGIDVQVAQSVIAEVGVDLDAFPREGNFASWLGLCPTNDSSGGKVLNRKTPKVVNRAKVAFRQAASSLIRSQSYLGAQYRRLRTRLGAPKAITAMARKLACLFYRLLKQGQQYVDKGTEYYEQRYREQQVRFVIRRAKQLGIEVVAPAPTNA

SEQ ID NO: 57116 - protein, 317 aa, unidentified
MLAPTVFVGVDVAKATLDVAVRPTSERWSVANDEPGIQSLVARLRPPGAVLVVLEATGGFEHAVAAALGAAGLGVVVANPRQVRAFARATGQLAKTDAIDAQILALFAERVRPTPRPLPDEAAQVLDALLTRRRQLIEMLVAEKNRLSASRRPVRHGITQHIRWLERQLGNVDHELEGAVQASPLWRAQDDLLQSVPGVGPVLSRTLLAELPELGALSRKQIAALVGVAPLARDSGTLRGRRTVWGGRAPVRAVLYMAAVAAARCNPVIRAFYRRLRAAGKPAKVALTACMRKLLTILNAMVRTQTPWRPRAFEVTT

SEQ ID NO: 57117 - protein, 414 aa, unidentified
MKVVYSVCCGVDVHKSFLVGTIISTDNGIQPHYQKKRFSTYNGDIHKFANWLHANDCLDLCMESTGKYWVPVFNILEEQGIRVTIANPKWVKAVKGNKDDTKDSKWIGDLFRLGLVPGSFIPSKPIRILREFTRYRYKLVSMKSSEKNRFQNAFTVCNVALDSVVSDMFGKSASAITDYLLSDDTFNPEHCVSLLQRSLKKKADTVLESIEGYSITLEQKLRMQIVRSHLEYIENSIAQLDTAIDTMVAEQEVLISLMCTIPGVDRNTAITVISEIGTDMAQFGSSKCLCCWAGLTPGNNESAGKKKSVRITRAGVYLKPALVQAAHAAVKATESSYYRLKYEQISKRRGKKRAIIAIARMILTAIFNMMSTGEVWNPCDLYKIDMPEALKEKQKAKAIKQAVKFLEKQGFAVG

SEQ ID NO: 57118 - protein, 417 aa, unidentified
MNFEKEIVCGADIHRDFLIATMISRSGLKLQERFNMNQDGLLAFRSWILAHRCQRLAVESTGGLWYPIFTILEGHVEFILANACQIRNIEHKKTDKLDSERIAIYCLNNLITPSRIYQKDYRDLRSVTRARETLVNAKSKIKNQIHQSLAICCIKLSSVISDSFGKSGRYIIDRLLEGKTIDQIISGIPSKRVRKKEKELREAIRNGIDPVQVLLIKANLDVIDDINKKIRILEAEIAIRVKPFEEDMKIAMSFPGVGFISAATIIAEMGDYRDFPNADKMAKYFGIVPSVYQSAGKLRTGKITKTGSKHMRRILVEVAKAISKTKKDSRLKRFFQRILARCGKKNVAAVALARKVLCILYHLLMNREYYQEPEVRKKQPKIPSTVSPISMMDIDEMIKIISQAGYLVEKDLKEGCG

SEQ ID NO: 57119 - protein, 428 aa, unidentified
MAKSKSKSIVQTDDDTLYYERCAGIDVHKKLLVVCLRIGRRTESRDFGTTTGEIREIVAWLKEHGCQMVAMESTGSFWKPLYNIFEQEGLPAMVCNAYHIKNVPGRKTDWNDAFWIAKCLAQGLLKPSMVPDRDQRERRDMTRFRKSQVEERSRNINRLQKFLEGSNIKLGSWLSDVEGRSATELLELVIGTPDFTVDDVKQRMHGRMKSTPEELYAALDGYITPTQREFLAHVMDVIRQQTAQIEKTDAMIKASLNDEQRAAVAALDAIPGIGVISAEQIIAETGTDMTRFRNQHSFSNWSGTAPGNNESAGKRKSGKSSHGNKTLKSTLTQCAKSAVKNKSTYFSAQYARLAPRRGKNRATLAVAHSMAIAVFFVLSGHEFKDLGADYYTQFNREKKIGSHVRQLSKLGITIPDDVLRAAVDKMVC

SEQ ID NO: 57120 - protein, 469 aa, unidentified
MSLTLGAALGALHCRLERESPVLVCPRWLPGQPCPLLPGKEERVEQTEEPVELVERVCALDIGKASVTACLRVPHEDHSGRRRQEVREYVTRVPALLELADWLRSQSVQLVAMEATSSYWKPLFYLLEAEGFTCWLLNARHVKNVPGRPKTDRLDAVWLAKVVERGMCRPSLVHPKPIRHLRDLCRYRRSLVRERTREMQRVEQLLEDAQIKLSSVISDIFGVSGRQMLAALIAGQRDPKALAQLARGSMRSKLAVLEEALTGHFDDHHGFLCRLMLERVDAVTATIDQVTAQIDRLIAPHAHQVAQLDAICGVGVVAAQELIAEVGVEMGRFPTAAHLVSWAKFAPIDRQSATTKKRGSTGRGNPWLAATLGEIVAALAGTDTFLGERYRRLVRRRGKQRAIVAVGNSVLTIVWHLLADPQAHYQDLGPDFYWSKVNQRRRERDLVRQLEHLTGKKVVLQPPPEQPAA

SEQ ID NO: 57121 - protein, 358 aa, unidentified
MKILALDLGKYKTVGCAYESETGAHQFQRAFTSPTDLERLVREIKPDRVVIEVCSIAGWVCDLMGQLGVAVQVANTSDDAWRWRKVKQKDDRRDALKAARLSAVNQLREVYIPQNEVRQWRALITYRQHLVGRRTKIKNHIRDLLVREGQLLARGSKCWNQLGQELLSSMARPLAEVGPAELWRGELWEELQQLQVIQARIASVEEKLNAIGAADKRVQLLRTIPGVGPRLAEAIVALLDQPQRFRKASQISGYIGMVPKAFDSGESERRGRITRQGNRLVRSLLIEVAWVGLRHNGWLRQTYQRLSAGKKARKKIAIVAVGRKLLVRCWAMLRDNAPGIGSHKLELNRGSEDQGGNV

SEQ ID NO: 57122 - protein, 436 aa, unidentified
MDEVEDEPLFRERVAGIDIGKTTIMVTIRVPSDTRRGRRQQETREFRAVRKDLLALADWLRCWGVTRIGMEATGDYWKPVYFLLEREGFDCVLYHASQVKALPGRPKTDKLDSVWLAKITERGNLPGSFVPPEDIRRLRTHTRYRRHLVQTRTAEKNRCEKLLEDAHLKLSSVISDIHGVSGREMLTAIIAGQRDPKVLAQMARTRMRGKIAQLEEALDCSFFTGQHAFILQMMLANIDHLTAQVTELNARIDELCQPYERQIAQLDAIPGFGIITAQDIIGEIGVDMTVFPTAGHLCSWARQAPQVSESAGKRKGKNATGRGNPYLGGTLGEAAANAGRTSTFPGTKYRRLVKHMPKKKAQGAISRSQLVIAYELLSDPDAEYQDLGTDYYEQRANIRREVRSHARAIERRGYRVILEPIDPGLAPDILPITKAS

SEQ ID NO: 57123 - protein, 385 aa, unidentified
MAASVTSRITQDTLAQPTLSLAFELGQETWKLGFTIGVAQSPRERTIPARDITRVRQEIAQAKRRFGLPEDARVVSCYEAGRDGFWLHRCLVAHGVENYVIDAASIEVNRRQRRAKTDRLDVRKLLTMLLRHLAGERKVWSVVHVPSVEEEDRRQLHRELTTAKQDRTRLLNRMKGLLAGHGVQLGLQGDVATQLDQVQQWDGTPLPCALRTRLKRAWQQVGFLTTQIQTLEAERRTLLRRRDDPVLTQVRQLFTLRGIGINSAWLYVMEFFAWRDFQTPKQVGALAGLTPTPYQSGQARRELGIAKAGNRHIRAMAIEIAWAWRRFQPASALAQWYERRFGAGSARLRKLGIVALARKLLIALWRFVKTGVLPEGAVLKTAPSH

SEQ ID NO: 57124 - protein, 344 aa, unidentified
MTSIDYIGLDIHKKTISFCAKAQDGTILDEGTIPARRDTLRAWAKARPRPWIGAMEATLFTGWIYDLLKPLAHELKVAHPAMLKAITAAKKKNDKVDARTIADLLRCNLLPECYMALSAIRDLRRVLRYRNLVVRQAARMKNRIAGLLMETGTPYNKERLHGRAYFSELLGSLREVSRSVVELLKLSRGQLEFFATIQRRLLKGLCEHPGLSERVARLQTIPGVGEIMALSWALEVGEVNRLPSIAQAASYCGLTSAQHNSAGKEQRGPISKQRNKHLQTILIEATKLAPRHNPQLAVVHERELQRGDRNQATLAVARKLVAYLMAVDKSGKPFAMRASSAEAA

SEQ ID NO: 57125 - protein, 381 aa, unidentified
MRTLGIDVGKDSFTIAAISPKGEVIAKLSCNLNSDGIESFKNFISPSDKIAVEASGPYSSIISAHIQNMGISPYLVNPLLAVRFKQASSLRKTKTDSLDAVWIAKLSQDHSPQPAQGYLKEGIRLLERQIETTSKQIACLKNSILQTLHSLFPELEREFDPFSKGILKLLSKFPSAQAIAQAPQEEITSCFPSKGRKIELKKLLKLARDSIGMSDPSREAVLKALIAQLLCLIDVREELKHKLEEEVERLYQQELELIKTVPGFGSLTSSSFIAEVGDISRFSSAKKLIAYAGLDPSVYQSGRFTAKSHISKRGNRHLRRILFICAQQAVRYSPTFKAYFLRLRARGKTYRQAMVATASKLLRVTYAVLSSGRPFCENPIS

SEQ ID NO: 57126 - protein, 310 aa, unidentified
MGIVNAAIDVGKHQLDVALGSGGERLTEPNEPRAIARLCKRLAAAGCARVLIEGGSYQNLLVGALRAAELPVVIVNPRRVRQFAQSMGRLAKTDALDARVLALYGERLQPPVRELPDEQTRALRELWVRREQLIEMLVMEENRLEHASKALHWSLRAHIDYLRKQIKQADDDLDRAVRNSPMWDKYELLSSVPGVGPVLSVALLSDLPELGRLNRREIAALAGVAPFNQDSGTLHGQRRIAGGRPRLRRVLYAASVAAARCNPLLRPFYLRLRAAGKKPKVAQVAVMRKLLTILNLMLKTSTAWRPPCPA

SEQ ID NO: 57127 - protein, 361 aa, unidentified
MKKIRDYILEGKEIHVGLEDSAKTWKLCVRSGRIVVHEASMAAKYEDLRNYLRNKFPKCKIHVMYEAGFRGFELHDLLVAEGWECVVTPPHTVSQEKCNKQKNDRTDCRRLAKNNESGDYRACHVPPRQQREDRQVSRLYGQLQKNINRECNRIRRTIEFHGLDRYFPCGEWNRSHYREAEQRIKTMDISDSIKFAFATLFDMLHYLRQQRCLVLKRLRAIAQQDNYQKNVELLRGVPGIGFLTAIRLVLEWGDVSRFKRKEEFSAFLGLIPSDHSTGEQDHKGHITKQGNQQVRTWLIECSWVAIRFDPILLEKYRTVLSHCGSGKKAIVAVARKLAIRLRAILLSGEPYQIGLEECSKA

SEQ ID NO: 57128 - protein, 386 aa, unidentified
MRQLNDLSRSLAKFDQDTTLIAVIEMSQSSWLVAGIVPGIERHPLKKLAVDEGVLLQLLQRWQDEAVRIGRKIERTTVAFEAGRDGFWLARWLRAHDIEAYVIHPTSVAVSREHRRAKTDRLDTELLKRAFLGWLRGEPDHCSMAAIPTIEEEDAKRPHRERESLVAERTRIVNRMKGCLARLGIRTFRPTLQRAKNLLATLRTPEGTPLPPNALAEMGRDLARLHFVQDQIHQIETARLERLEQAPDEKSHVMVRLLARVIGVGIETADMLVREVLSRNLRDRRAVARYAGLTGAPDESGSKRREKGLARAGNARVRRGMIQLAWRFLMFQKESALAHWYRGRTVDARHGTRKSLIVAMARKLLIELWRFVTTGQAPVGVELRPA

SEQ ID NO: 57129 - protein, 358 aa, unidentified
MQSNKINFKGQNIFIGIDVHLNSWSVTTITPSGYKRQTSHRADAVELYAYLTKNFPGGIYHAVYESGFCGYSCCYELRELGIDCVIVHAADVPSTQKSRLSKTDSNDSMRLAMSLSNGELNTIYIPPKEVLGDRDILRYRTIVQKGMSRTRSRIKHLLHTNGVSYPREFREPYKHWTRRFIKWLREDVKLLSGKRLELDFLLEDLEHQRSQLLKATGKVRELSRTSRYAEDYGNLISIPGIGLITAMTMLTEVTDIHRFSSQKKFMSYVGLIPVMKDSGETIRQNEITPRGNQRIRRMLIESAWSAVRYDAQMAAAFGTFCRRMKKNRAIVRIARILASRTYHILKTRTKYDTALCTA

SEQ ID NO: 57130 - protein, 347 aa, unidentified
MTIVESTGLITGGVDTHLDVHVAAVVDANGGVLGVESFVTTPDGYRELHDWLVGFGAVARVGVEGTGAYGAGLARHLRGRGVVVIEVDRPNRQERRRNGKSDELDAIEAARAALSGRASGIAKSADGDVEAIRALLVARRSGRNVRVKYMNQIRHLGFTAPDELRQRLRDVPADKLAATAAALRPTVGSDTVMYATKLAIATLGRRVVALDADAKRLDDTLDTLVRRRAPKLLEVYGVGTHTAAILLVAAGDNPDRLKNEAAFAHLCGVAPLPASSGKTQKRFRLNPGGNRQANHALWRIVLTRMAGDERTRTYVARRLTEGRTTREIMRALKRYVARELYPHLVAG

SEQ ID NO: 57131 - protein, 357 aa, unidentified
MNVKVSEKKLKKAWFGVDVSKETFDASVCLSESEVSDIHSMPKKTFERSESGVEEFQAWCNERLTKNNIPEGTELGVVMEATGNYSLILAAWISGMFLNCIVAIADPKSVNAYGKSLKIRNKTDKTDAAILAIYGAERNPTAYIPESKEYATFRGLVRQRKAIVDMITSAKLQAQELSDIKAVINARTNILKYLNKTLVSLEFAIKKHIKEEPKLKKQAELLVSIPGVGFITAALMLGELGDVHRFSSAKKIAAFVGVSPRIHQSGKSVNGKTRMCKEGQKRIRQSLYMSALAAIKYDTNGLARFYHMLVLRKGKTKMAAIGAVMRKIICIIRRLLIDEISYNDAMVTPINMVTKNC

SEQ ID NO: 57132 - protein, 386 aa, unidentified
MVYVGVDISSEKFDAAFYYPDKDKYVVQTFRQSKNGFKKFSSKLSNIHDDVSIAMESTGIYDHSLLEYLRDSGFNVVLLHPYAVKNFLRARSHSKTDAIDARNLAFALFKLGDDAVVSTTASDELLSLRKLVRFRASLVKEYSNLQKQLKGTLKLNMPEILKFFSRVDSVVLVELLCRFPSRKSILEHKDEAIQFLSSFKTWSEDKAKAVVSELESSIGLTDSFDVDSTIISTLVNNLKALKDSIKDVDKQIEKIFSTFPHNPISTIPGMGSITQATIISEIGDIERFPTKEKFVSFLGLDPVIRQSGKSFHSGGISKKGNALLRRLFYTFAVRALRIIPKYRLKYDNMRKRGKHPKVILTAIARKLAELVYAIWKKGVDFDPSMP

SEQ ID NO: 57133 - protein, 429 aa, unidentified
MEEVEDVELVVARIAALDLGKAGLEACVRVPSPQRPGRRMQELRGYGTTTAQLLEMVAWLRQWGVQRAVMESTSTYWKGVYYLLEAEGFECWLVNAREVKNVPGRAKTDRADAIWLAKVAERGMCRPSLVHPAEIRRLRDLTRYRRALVQDRTREQQRIEKLLEDAQIKISSVLSELHGVTARAMMDALIAGQRDPRALAQLAKGRARKKTAQLAEALRGFFTDHHAAILRMMLDNTDRISAQIAALDARIEKEIGPFSGQAARLAEIPGVDAVAAAELIAEIGVDMTRFPSDAHLVSWAKFCPQTHESAGKSKSKGRGRGNPWLAGTLGRIAFANSRADTFLGARYRRLARRRGKQKAIVATGNSVLTVVYYLLSDPMATFCDLGPGYYESRINVHRRARDLVTQLQALTGQHIVIRDGKAVITDAAA

SEQ ID NO: 57134 - protein, 409 aa, unidentified
MEQSHISFEQVVSRGCGLDVHQENVVATIRGNGLEEQTRTFSTFTSSLRDLVAWLEESGITHVAMESTGVYWKPVFNILEPHFELILVNARHIKYVPGHKTDRNDSAWIAKLLLSGLLKGSFIPPQYTRELRELYRYKRKVIGQRSSEYNRLQNILETANIKLSTVVSDVFGVSGWSMITAIIEGEQDPMILANLAKGRLKIKKQELILALEGHLNEHHRFMLSLSKTVILQLNDLLGQVDNRIDQYLKKWEEEVKLLQTIPGVQKQTATAILAEIGTDMHAFPNQHHLASWCGLCPGNNESAGKKKSERINHGNRSLKTALVEAAWAAAHTKDTYLKRKYYTLSIRRGKKRALIAISHKILIAAYFILKNRVPYMEPDNQEWLKKRKQAQINNYLRRLRELEALPPSQ

SEQ ID NO: 57135 - protein, 316 aa, unidentified
MNKHNMLCAGIDTGKRKLEVALTSGLRLQIDNNAEGHAALSGWLRKHRIKRVGIEASGGYEREVVAQLRRWRFVVVVFQPAQVRAYAKFHLQRAKNDKIDAALIALCTADVRKIHAPPDARLIPLAERLTFMEQITEDMARAKNRHESCRDPRTKRHWEAEIARLKGVLRIELKALVADIRQHSDLSKRLDLIASVDGLGIRTALAIAVRMPEIGRVTREQAAALVGLAPFDHDSGDQVGVRHIEGGRERLRKALYTAALPAVFLWNHQLKLMYRRLIAAGKPHKLALVACARKLLIYANTVVERGTSWTSLRAAA

SEQ ID NO: 57136 - protein, 339 aa, unidentified
MKTYVGLDVSLKETSICIVDETGTAIRQGVVLSDPDVIAEYLAEHAPTAQRVGLESGPTSSWLWRELDGRGLPAICIDARHASAALSMQINKSDRNDALGLARIMQTGWFRRVQVKSKASHRIRALLNARSLLVQMRRDLENQIRGLFKSFGLVIGRANGGVFLKRAIDVSRQAPELAGIAGPLLDARADIDRQRLELERQIKRLARETGQSRAFMTVPGVGPMTALAFLSGIDDPARFARSRSVGAYLGLTPRRHASGEVDWTGRISKCGDTLLRTYLFEAANVVLTRTKQSCDLKTWGMKVAARSGGKKARVAMARKLATILHRMWCDGTSFKWSTA

SEQ ID NO: 57137 - protein, 347 aa, unidentified
MNFYTRQHKHYCGIDLHTKAMYVCILDQSGTKLVHKNLPTTSEAFLRIIAPYREDVVVGVECMFTWYWLADLCQKEGSAFVLGHALDMKAIHGGKAKNDKIEAHKIAVLLRGGMIPQAYVYPAEMRATRDLLRRRCHLVRKRAELLAHIQNTNSQYNLPEIGKKLAYKANREGVEEHFPDPSVRKTIEMDVSLIDHYDQLLGEVELYLTRSAKAHDSQTYARLQSVPGIGTILALVILYEIQDIARFPRVQDFVSYCRLVKCAKESNGKRLGTSGKKIGNVHLRWAFAEAAILFLRQNHPGKEYFTKLEHKHGKAKALTVLGHKLARAVYYMLTREQPFDLQRFVSA

SEQ ID NO: 57138 - protein, 411 aa, unidentified
MPKIVHPICCGIDVHKSFVVACIATTDEKLVTTYSKPKRFSTFTNDLRRLAKWLSDNNCKDVCMESTGKYWIPVWNVLEPTCDLVLSHPKYLKAIKGKKTDKRDAKWIADMFKHDLLNGSFIPPAEIRQLRDLVRYHTKLTSYTTGEKNRAQNCLTVSNIKLDDVFSDVFGKAASAITDRLLQNSEPFDVTPYLTKNIKASPEEIQAAVDGMMCAEQAEKLRIIRSHMVSLELCKANLESEILAVAEKFLPQINLVTTVPGIQSFSAVAIIGEIGVDMSVFETSRHLCSWAGLAPQNDNSAGKKKTTRVSRAGVYIKPILVQCANAAIKSNKLPEVRNRYNSIKKRRGHKKAIIAIARMLLTAIYNILKKNEPYNAELYRQSNKPPVQREVTVEQAIFILQRQGYLVTAST

SEQ ID NO: 57139 - protein, 413 aa, unidentified
MEATKRMERLKFVRSKKVLIGIDIGSRVHYVKAITSSQIHPPFPISNDSEGFKTLTSFIKTSLRVSPGQILVAFEPTGPFWEPLAQFLDTNGYSWVFVSAISTHRIKDISDNSPNKTDMKDCGVILELLNQGHYLKHPCRPGIYRDLLNLAKFRYQLANLKRIYTGQLFSLLAIYFPELSTIFHSMHAKTIGTLLMQYQTPQDIKEAGYDGVFKILKKRWRNPAVKIKEILRVAKNSVGVRDGIESYRLQVKNLIMQTNQVNEQMKMVEAKISGLLDKIPEIRNVRNIKGAGDYTLGMVLGYFGRFDNYRNAYELMKYAGLNLFESSSGLRKGQRHMSKRGPGQLRQALYMMAMRMIMYNPVIKRKYKKYAKMKGSKIKSLFAVMCYIVRLLYALIRDQKEFDPKILKKQLAA

SEQ ID NO: 57140 - protein, 342 aa, unidentified
MELSQYHTQKGALMIYVGIDIAKLNHFASTISSDGEIMLQPFKFTNDYDGFHLLLHKLDSLDPDSLIIGLGSTAHYGNNLLEFLVKHNYKVCVINPIQTSAMRKNNIRKTKTDKVDTYIIAKTLMMDPHRFFSQHDLSIMHLKELGRFRMKLIKKRTQGKIQLMSYVDQAFPELQYFFKSGIHQKSVYAVLKEAPTTKDIASMHLTHLSHLLEVSSHGHFKKDTATALRILAQKSVGCNDSSISTQITQTIELIELLDSQVHDVESEMELIVNSLDSVIMTIPGIGFINGGMILGEIGDITRFSSPSKVLAFAGLDPTVYQSGNFNASHTKMSKRGSRPLSL

SEQ ID NO: 57141 - protein, 355 aa, unidentified
MNYEKYIGLDVHQATISVAVMDSTGKLIMESILETKASTILEFLGGLRGTLSVTFEEGTWAAWLYDLLKPHGAHVLACNPRKNAALNQGNRNDKIDARELANRLRLNDLKSVYHGENGIRMLRELARSYLTIVKDLTRVMNRLKALYRSWAIPCAGRDVYYTRHRSQWLAKIREAGPRRRAEQLYQELDMLQHLRQQARRELLSESRKHSIIAKLRQIPALGPIRCALAVALIQTPHRFRSKRQLWKYCGLALETRISGEYVYVQGERRRSKKQLSIRGLNKDHNHDLKGLFKGAATRASVMPGPFQEFYQRSLAKGIKPTMVRLTLARKIAAITLTLWKKGESFDVQKLKSQAA

SEQ ID NO: 57142 - protein, 410 aa, unidentified
MNEIGKRYIGLDVHKHYLIALGVNQELEVVLPARRVELVNLEGWMKKALTKQDEVVLEMTTNTWQLYDELAEYAGRVTVVHPPHVALITRSQVMNDKIAASILARLLAKGLLVGIWVPPQEVRELRGLVAQRQKMTRLATQAKNRLHAVIQRHHLQPPAGNPFGKTNNGWWEALALGQLEKMNLQSDLETLQFAEKQEARMQKEMTSIAAENEEIGRLLHISGFGVITALTVYAAIGDIRRFAEPKKLVGYAGLGARVHDSGLTTRTGKITKAGRRDLRVALVEAAHVAANSHPHWKAELARLQPRLGYNKAIVAIARKLLIGVWHILSQRTTDRFAEPEKVSQKLLHFAYEVGKENRPGRQTAAQFVRERLDALGIGQELTNISWGSKKPIPLPPSVLTETERSDVPNR

SEQ ID NO: 57143 - protein, 349 aa, unidentified
MIARPDAACFVGIDLHKDTLTACVLRGRDREVSYVKLACKCRDQIRSFFASLPQPSAVAIETVGFYRWLWTELEPLAGQLVLCDARGARALAGRRIKTDREDALNVALLLADGRLPLAWAPPENVQLLRNWTRHRNGLTRQHAKVLHHVKSTLNRLNFPGPVRLDAAALQRYLLAGVERFSADDVTMLWQHQRRLIEIEQDRAQSERRISELMRAPEFARIREIIESVPGVGLVTAATVIAEIGDFSRFPDSKAIGRYAGLAPTVYASGNSSRLGHISKTGAPDLRWVLQQAAWTAIRCDAGFKKTWLRIAKTAGKKAAAVAIARKILVLMWTLQRKDEPYKSREPIAA

SEQ ID NO: 57144 - protein, 382 aa, unidentified
MNRIIKIGMDVHSTNYTLCAMEPVLDGEDRIFTNIQVTPDYENVIQFIDNLKERLGSSDSYSIECGYEAGCLGYSLYHQLTKAGVKCTILAPTTMLTQQGKRVKTDKRDAVMIAQCLSYGGYHAVHVPTDQDASVKEYLRMRDDHKLALKKIKQQINAFCLRHGYIYDGHKWSIRHLDWLKKLDLSELYRETLNEYMTSYEEQTAKIERFDKRIEELAADSDYHENVRKLSCLLGIQTHTALSLIVETGDFKRFRKGNTYAAFLGLAPGESSSGEKISRTGITKAGNNHLRTLLIEAATGICKGQVGHKSKALCARQAGNPAEVIAYADRGNIRMRSKYKRMIRREKKRNVAVAAIARELACYVWGIMTNHIEPREEGKKAA

SEQ ID NO: 57145 - protein, 351 aa, unidentified
MEYRVYCGVDFHARQQTISCLTTEDGVVSTHELKHQNKAELKAFYAQFRGPVLVGLEASGYSPWFEQMLEELGHEVWLGEATEIRRRARRRQKNDRRDAELILDLLVHDEFPRIHRPSVKSRELLRMLRYRHKLVQMRTIIKNSLHALSIQSGLSLQARLFTGAGLDQLRSLTMSPVMQYQRDQWLVGLESLNQQIVAATNWLGEQAAGDERVERVRTHPGIGLLTGLALVHTLEPVTRFRNQRKVAAYVGFDPQERSSGEKKRYLGISKAGSRVLRYLLVEAAHTAVKGDPELQRFYLRLQHRHGKAKAKVAAARKLLIRSYILLRDQIDYAEFGRRAVAARLARVASKA

SEQ ID NO: 57146 - protein, 416 aa, unidentified
MYYVGIDWADENHQVFITDDSAQRLDAFSIKNSRSGVEELFERIRYFVKDQKQVLFALETSKGLLIDSILDAGYTVYPINPKSVDRYRDRYKVSYHKTDDFDAMVLANILRTDRHNYRPILPDSPITRELKILTRECCSLIRLKTLLSNQLTSCLKDYYPVALELFCKLDQQITLVFLKNFPTYQQAKQVSLPQWGKFLSKHHYRVGVKKKAHEIYLKLQEPQFNVEPFLANAKARYTLVLVEQLQLLLAQIKSFEDKIEQLLKQHTDGEIFLSLPGAGIRLAARMVSEFGDNRERYKKVSSVQAEAGTTPITESSGKWKFVHFRSACRKSFRNTMHQFAFCSIKESSWAKQRYQQYVASGKKHTQSIRCLANAWLEIIFPMWKNYMPYSEQRHLLKYVKEQKPVNYSRNLNYLSV

SEQ ID NO: 57147 - protein, 342 aa, unidentified
MSRELYIGVDVSKNWLDLAYYDGVSVDWNHGHIRVDNKQSGYNRISKWLKRLGTNKSSVLFCMEHTGLYCHDFRLWLEQEDYIYGMVQPRKMHRFEPDLGEQERALDRIKTDEADSYRIAMYCEKHCRKIRSSPSKLPGEAFFKLKRLLAERKQYAKHTVLYKQQLHDISTYDTDGSRERKQRELEHLKKMIAQTDAEIHQILKEDSRLHRNYELLYSVRGIGLVVALETIILTENFTSITNPRKYACYIGIAPAKKESGISVRGGEHVSKKGFTQAKADLSIACLTALTRDPNIKAYWERKKAEGKHTGVVLNAIKFKMVLRMFAVIKRQKPFVEIDGYRN

SEQ ID NO: 57148 - protein, 454 aa, unidentified
MSRKRVPKRKNAVVPILNPDAAGIDIGASEIYVAVPADRDPEPVRMFLTFTADLRSLADWLQQCQVRTVAMESTGVYWIPLMQLLEDRGLEVYLVNAKHVKNVPGRRTDVSDCQWLQYLHSVGLLRASFRPAQEVCAVRSLLRHRDSLIEMATCHVQHMQKALDQMNLQIHHVISDITGTTGLAIIDAILSGERDAEKLAQLRDPRIRATSETIAKSLVGDYRREHLFTLRQAVALYREYQRKIVDCEAEMQQLMKNLGAKADPSSLPAPKESVKKCKVMNPARALALREEAYRILGVDLTTIPGVSVLHVQTILAELGPDFSKFRSAAAFSSWMGLCPDNDISGGKVLWSGTRRVKNRIALTLRLAAQSLQHSQSALGEFYRRMRAKLGAPKAITAAAHKLARIVYHLLTTRQSYDDSIFTKAEERYRRRAESRLKAQAQALGFTLSPATHLG

SEQ ID NO: 57149 - protein, 466 aa, unidentified
MKENHRRCCGIDVHKSSVTVCVLPPVGQTHLEVKKRKFRTFTRDLRQLRAWLKDCQVTEIAMESTGQYWRPLWNLLEGQFTKVILVNPQHIKGLNGYKTDPKDAQWIADLLESGKLKGSWVPPRPIRELRDLTRQRVHILEDLNRAKNRIEQLCQTGNIKVSSVASDLFGVSGRKMLKAIVEGKRDPGWMADYAKGRLRDKRRELELALEGTFTDEQRWLLEKELRQVEWLEGQVQTLEEEIERRVETAWTIVAEVGADMNAFADARHLTSWAGLCPGNRESGGKRFSGRTRKANRYVKRAMCQAAWAASHTKNTYLSAFYRRMSVRKGAPKAVMALAHHMLVVIYQVLSRNEEYVEFGGDYYDQRNKPKVVARLVTRLMKLGYKVDIQPAEGIGEPAAVAAEPETGAESVPKSSDSSTEASEGAVKPKRRGRPCKCAARGIICKHRTSPETNSMIFRTLPAGKFS

SEQ ID NO: 57150 - protein, 367 aa, unidentified
MKKVSTAVTKQGRNISPPKLTIGLDLGDRNSWYCVLDEAGQIQLEQRVRTNAKALSAVFGAMPRSRIALETGTHSPWISRLLSELEHEVIVAHARKVRLIGESRKKDDRLDAQTLARLARIDPQLLCPVRHRSAQAQADLTMIRARAALVRSRTALVNTARSLAKSYGERLRGCNVRNMNPEKAEALSPELQPALEPLLSAIEELSERISEYNDQIEALAQASYPQVALLKQIKGVGTLIALTFLLTLEDPRRFRKSRDVGCYLGLQPGRRNSGQSEPQMHISKEGDPSLRTLLVQGAQHILGPFGVDCDLRRWGLKLAERGGRNGKKRAIIATARKLAVLLHHLWVSGEVYEPLHNSKRTVLSAAA

SEQ ID NO: 57151 - protein, 325 aa, unidentified
MRRNMQMTSFVGIDVSKETFHACLLSEHREGAKVFPNTSRGFEQLLAWLKNRRAGQLHVCMEATGTYWENLAEHVHGAGHCVSVVNPARIKAFAQSELLRTKTDAVDAALIARFCTSQDPEPWVPPLPEVRILQALTRHYEHLKTTRAQQSVYAQSSVATPIVAKSIREVIATLDAQIAQVEKEIRQHFDDHPDLKRKRDLLTSIPGIGETTAGSLLAEIPQMERFQSAKTVAAYAGLSPRDRRSGTSIHGRPRMCKTGNSRIRKALYLPAVTASRFNPALRPFAERLAAAGKHKMLIIGAVMRKLLVLAYGILRSGVPFEANHA

SEQ ID NO: 57152 - protein, 335 aa, unidentified
MCTPGSTWQWLNTISSCPSRQDDWRPRSLCQWVRQLLRAGHVVHVVYEACGFGFGLYRELKALGVHCYVIAPRKLDEGYTRVKTDPRDAPTLCQRLSRYVEGNTRELAVIRVPSEAEEQARHVSRQREQLVRHRQKLEAQGRSLLVSHSLPAPAHWWKNQTWSRLSKLLPSWICLRLEVHRPALLTLEQQISALSTELEAAAPADVPAGVGKLTTVVMTREICSWERFRNRRAISSYTGLCPGEHSSGTKRIPGSVTKRGNPRLRAALVECAWRMVRFQPNYAPVKKRLSVLAKGARATGAQRKKAIVAVARHLAVDLWRVHTGRNTAAQLGLTI

SEQ ID NO: 57153 - protein, 340 aa, unidentified
MEKRYIGIDLHRNRFTCCIRLENERKYVTEWELEDLKKFAKKLRPTDQVAVEITGNTRLFFDAVQPHVSRVVVVNTNQFQVIRQSVKKTDPHDAKTLAAYLPKDMLPEVRMKNKEHAQLASLTQTRDTLVKLRTALKNKINNILSARGLNLEKEALSSEKKLNEIVSLPFDEIVQIELRVIAEQIRSLNKSIADLEKTIGEEGSKLEGHKGLSSIKGIGKVTGAILLSVIGDVNDFADEAHLASYFGIVPRVANSNETEHSGRIHKRGTKLGRTALVQSSLIAAKYSSYLKRFYEQVKARRGAGKAIIALAKKFLGIIYRTLKNKWVFADFPNFVLAEAS

SEQ ID NO: 57154 - protein, 440 aa, unidentified
MKTKLRIINPNAGGIDIGSEKIFVCANDSGYKSFDTFTEDLRLAAAYLKDCTVNSVAMEATGVYWLPVKDILESEGIEVTLVRAGDANQLPGREKTDGEDCQWIRTLHQHGLLRPCFIPEEIIRELRTIIRLRQDHIEMAAAHIQHMQKAFTLMNLRLHQVISQIQGVSGRRIIESILNGERDAETLTMLCDKQIVRNKKEEVMKSLNGNYREEYLFMLGQAYKAWNFYNQLITECDKKIESWFIRSTNNKPEVDHITPEKSIRHHKPDIENFHAKTLRLTEGKDASQLPGLTDYSVVRIIAEVGLDLKEWKSDKNFVSWLGLAPKRYSSGKMRRRYKGKQHTAAAQIFKEAAQSLLNSKHIGLGSFARKVKSRKGPQIAIKATARKIAVLYYNAITKGMEYVEKGIKEYDSKAKQTEIQRLTKQASRLGFALTEALVHQ

SEQ ID NO: 57155 - protein, 321 aa, unidentified
MTYVGIDVSKATFIVAYSSAKSSKTKTFKNTTKGVHEFIQTLSANEHHCVLEATGNYSSLLVYLLSRANITVSLENPLKIKNFARVMLSVTKTDETDARLIALYGQRMQPAPYKLRSDAILTLKQKRTVIRQLKKQLIATQNLKGSMEALPFFDPKCKKAIEKTIVFLEKQTKGLEEELAALAQSEYKKQIDLLTSIKGIGVTLAAALIMATGGFTYFDNAKQLTRYLGLSPTYQQSGTSVNVKGHINRNGDSSLRGQLYIAAMASLRCNAECKACFDRLRSNGKPGKVAGVAVANKLVRQAFAVVTQEKPYVDGFKSEKP

SEQ ID NO: 57156 - protein, 435 aa, unidentified
MAVLSVLSREVIVDIVHSRCCGLDVHQATVVACVLVSEEGRARPRKEVRTFRTVRCELEELRAWLLEQAVSTVVMEGTGVYWRPVYAVLEGHLDLYVVNARHVRNVPGRKTDVKDSEWLATLLRMGLLRKSFVPCKAIRALRDLTRYRRMLVQSETTEKNRILKVLETAGVKVATFASDVFGVSGMAMLKALASGELPPEQIADLARGRLRQKLADLRLAFDVLIEEHHRILLRDLLERLAQTAKDIARYEELLDTYVAPYEKNLEMLCTIDGIQRRAAIEVFAEVGPDLADFPSDANFAAWTGTCPGKNESAGKAMKARRRRGNPYLQSILVEAALAASRKKATYLRDKYHRLKARRGAMRALFAIAHKLARAVYRVLTTGEPYRDLGPEYLDAKNKDGLVRQLVNRLKRIATLDDVVAHFQPAPIPPPIIPGT

SEQ ID NO: 57157 - protein, 406 aa, unidentified
MEGPIITVDVSKGSCHYQTFIENGHPMRKPKQLSATIDGFQKLGQTIKDLEAKTEREDIPVIFEATGVYHRPLQKYLEDHKIRYYIISPLLSATYRKTDLHSNKTDALDCAHIAKAYYCEKELRQYQAQPQEYKRLYQLSRLYESELVHLRKRKVSLRSMLDIIYPRIDKTFKGNQNLYDPIPMEILKRYPHPSLLLSHREDTIVKAVGHRTGHLKGYTERIVHKIYEKAKECYSGCDIDDIEVLKLPSLIENVQEQKKKCNSLLKEMIEIARTCPYFASVVSIVGIGENLAARIIAELGDVNRFDNRAAIVAYAGLNPKIQQSGDIDGLHLKISKKGNKHLRCLLYLGAQCNYRLRKEDPLYEFTKKKRQQTQCPLSSKAAYTASAHKLLVIIYSLCKNGTLYHS

SEQ ID NO: 57158 - protein, 392 aa, unidentified
MEKIADRPAEPTAVRTDLGAIFVSLELSRSSWVVTALAPGSGERMSRHGIPGGDIAGLLARFAQLRDKAQARTGRHFPIIVIQEAGLDGFWIHRALVNEGVESHVVDPASIATSRRRRRAKTDRLDGETLVRTLLAFKRGEPRVCAMVRAPSPEDEDRRRITRERKVLIAERVEHVNRIKGLLFAQGIRGYEPLRRDRRARLEDLRTGDGRDLPPHLKAQILRELDRLELLLEQIKAVEAERDAALAEEPQDGETPAAAKMLLDIRGIGPEFAALLWSEGLFRHFDNRRQVAAYAGLAPTPWQSGAVSREQGVSKAGNPRLRSTMIQLAWLWLGHQPQSALTRWLRARVEQNGGRLRKTAIVALARKRLVALWKYVTSGVMIEGAAMKPSTP

SEQ ID NO: 57159 - protein, 343 aa, unidentified
MECYVGLDVSLKQTSICVVNERGSVVREGVVDSVPEAIAGFVRSKEPGAVRIGLETGPTATWLWTELARLALPVICIDARQAKAVLKMQVNKNDRNDAAGIARIMQTGWFKEVRVKDLDSHAVKALLASRALLVKIKRDLENQVRGLLKNLGLVIGHGTFNVFALRAKELIADRPELTSAVSPLLTARTAIEQQIGELDRQVLKLSRQDAQARRFMTVPGVGPITALCFKATIDDPARFRRSRSVGAYIGLTTRRHASGELDWSGRISKCGDAMLRMYLFEAAGVLLTRVPKWSALKAWGMRLTKRNGLRKAKVAVARKLAVILHRMWIDGTEFNWSNKEVAA

SEQ ID NO: 57160 - protein, 339 aa, unidentified
MQTVTTIGLDIAKSVFQVHGIDAEGNVVLRRQLKRRYVLVYFQRLPPCLVGIEACASSHHWSRELQALGHTVRLMPPAYVKRHKNDATDAEAICEAVTRPNMRFVATKTPDQQSCLTLHRTRHLFIRQQTSVINVIRAHLAEFGIVAPVGRNGVEQLLGIVADSNDRRLPEVARACVAALGAQLQTLKAQILEFDRRIMAWHRSNEASKRLDEIPGVGPVLATALVASIADPRVFRSGRDFSAWIGLVPKQNSSGGKDRLGNISKRGDRYLRSLFTTGALAVIRYAKIHGTSHRPWLTALLARRPTKVAAIALANKIARMAWAIMARGERYQEPAALAA

SEQ ID NO: 57161 - protein, 379 aa, unidentified
MAYTSTLFIGLDVHKETIAVAYVGEEREAEVISLGTIGTRQKDIDALVRKLQGKGKQLHFVYEAGPCGYWLYRYLTKKKLTCWVVAPSQIPKKAGDRVKTDRRDAVQLARLLRSGDLRPVYIPSVEDEAIRDVVRAREDGLKDLKAAKVRLKAFLLRQDIRYEGQANWTAAHLRWLANVVCPTPAQQIVFQEYVRAVSEQTERLQRLEAELPPLVQTWRWAPVVEAIQALRGVQFIAAVTLIAELGDLTRFETPRQLMSYLGLVPSEHSSGERRRQGSITKTGNSHARRVLVEGAWAYRYPAKVSRHLQLRLERVPKVIQDISWKAQVRLCKRYRRLVARGKNVNQVVVAIAREMAAFVWAIAREVAVGHCDYPGVQLG

SEQ ID NO: 57162 - protein, 387 aa, unidentified
MTYLGIDIAKYTHVATGVNAEGKILIPTFSFANDADGFALLDAAVAPFDREALLIGLESTAHYAENVIAHLLRLGFQVAYINPLTTASLRNSGIRKTKTDKVDSLLIVKALILGNYIPLRQRDVDVVTLRGLCKTRQNLIKLRTRSKIQLGAFVDQLFPELNAFFRSGIHIKTSYRLLKEHARPCQVQKLHLTYLSNLLRKASRGKYAKADAVRLREVAKTSVGIDSPILEVQIRHTIAQIELFDLQLDEVERSIADAMAGLNSRIMSIPGIGPINGAMILSSIGDISRFSHPSKLLAFAGLDPAVRQSGRFNARSTRMSKRGDSMLRYALMNAAHNVARNNRTFGDYYAGKLAQGKAHYNALGHTAHKLVRVIFTILTRNVPFDLP

SEQ ID NO: 57163 - protein, 357 aa, unidentified
MNNHTVQDFVVKGKEVFVGLEDSKTTWKLAVRCEKMLVHQSAMEAKYPVLKQYFANRLPDCTIHLIYEAGFKGFNLFDRLSEDGIDCVVIPPHMVTEPKVNKVKTDKRDARRLASVLENHDFRDSCHVPDKERREDRQITRTLIAVQKDIIRTRTRIRQFLQFHGIAVAIEKDQWGREQFRALKNLVLSDPLRISLSVLLTELEQLWEHQLTLRRALRELCRKERYKRAYEIARTLPGIGWYTAIRFVLELGEDLSRFTSGKKIAGFLGLTPGEYSTGATERKGHITGMGPGFVRATLIENSWAAIRRDPVLLGKFHRVWKTTGSKKKAIVAVARMLIVRFRACIISDTPYAIGIVH

SEQ ID NO: 57164 - protein, 449 aa, unidentified
MSNEKSNEVPAPAAPEPEYAAFVALDWADQKHDWQLVAAGSQKREKGEFDNTPEAVMAWVANLSERFGNRPIAVSLEQSRGSLVYMLLRFPQLVLFPVHPNTAAHFREAFQPSGSKGDASDAGLLLSILLQHRDRLRRLQPDTAETRLLQRLVEQRRQMVNDKTRYSNRLTACLKLYFPQILKWFDDVTSPLVGALLERWPTLEELQRAHDGTLRKFFHQQNCRSEERIRERIDAIRQAVPATTDPGVLGSETVVAGGLIALIATLRAEIGELDTRIAEAYAAHPERALFDSLPGAGPVMAPRLLVAFGTNRQRFTSADEIQCYSGIAPVTVASGKSKWVHFRWACPKFLRQTFHEFAGHSLVKCVWARAYYDLQIHNGKSHHAAVRALAFKWIRVLFRCWKDGKPYDEQVYLQSLQKRNSPLKGLLPSATGLGWNDVAGFQKFSDNPS

SEQ ID NO: 57165 - protein, 345 aa, unidentified
MTNMNYIGLDVHKKTISYCVKDAAGQVHREGKIGSTRRELDCWIKTLPQPRMIAMEATIFTGWIYDHLLPHAEKVKVAHPLMLRAIAAAKKKNDKIDAGKIADCLRCDFLPECHMVSTEIRDRRRILRYRHLLVRQMVQMKNRVSGLLMETGVEHNKQRLHKVRYFHELLSTNQEVHPCIRPLLKISRETIERCQKTEYALVSSLQRDPMLAERIKRLRTIPGVGPITALTWALEIGDVSRFRTIKQAISYCGLCGEEKSSADKVMRMPLSKQRNKHIQHVLVEAAKLAPRQCYELALVHEKEMQKGNRNRATLAVARKMVAYLLAVDRQQRDFVPAEERQAGAA

SEQ ID NO: 57166 - protein, 323 aa, unidentified
MQGKEPSQQSATTRVYIGIDVCKARLDVYIHPLSKRLALANDAAGLKQLKKVIANCDVALIVMEATGKFHRLAHRNLHDSGFKVAVVNPARSRKFADAIGVLAKTDRVDARMLALMGESLAPDALAPPPETMESLQELANGRQGAVAARTALLNQIGDSKTAVLIGELKRQLRAVEMAIAKLQAEIERRIEADPALARRFQILTSIPGIGPIAAIALIAGLNEIGQLSAKEVAMIVGLAPIACDTGQRSGTREIQGGRSHVRNALYMPAHSAAQHNPDLKIFYDRLIENGKCAKAAITAVMRKLVILANSLVRQDRLWMPKHP

SEQ ID NO: 57167 - protein, 327 aa, unidentified
MQAGEAVIGIDISKASFDSVMRGAGKEQHQVFSNDQKGYEKIVAWIRKQPERVVHVGMEATGRYWVGLTEYLYQEGYTVSVINPFQVKRYGDHVLNRNKTDKSDASLIAEFCEKDRERLRVWKPNSPEIKALRSMERRLDELQGMKRQEQNRLKSLVSDLVVKESLQENIKNLEQQIENLMKKIEELVKRHPSLREEQRLLTSIPGIGKLTAIRLMAEIGDFKEFESAAQLAAYAGLSPKQFQSGSSVHKQTRISKQGKRELRKYLYMPAVVATNYNPIVMDLKRRMLASHHVKMEIIVAAMKKLLHLAYGVLKSGKPFDPLFSTQT

SEQ ID NO: 57168 - protein, 468 aa, unidentified
MKNYYLGIDVSKGNSDFVLLNEKKQTVLESFQLDDTFEGHNKLFKILSEFFTQQPDTKIFAAVESTGGYENNWYHLLHKYQGQLNLSVARLNPYGVNYNSKADLKRIKTDAISAVSIAEYLISHPEKVSYQTEDPFASLRRQWTFIKMLTKQRVQLLNQLESLLYVANTEILYHCRNKVNLWTLKLLKQYPTAKHLAKARVSTISKIPYITETLAKELINKAKHSVASETDETIAEIITATVNQILSLRKTICLQVKKLQSSCNLPEVALLKSFSGIADYSAVGLIIEIGSVERFSSVKKLACFFGVHPVFSQSGDKISGYRMSKRGRKEPRQILFNVARFAIVHNPLIKEIYIDHLKKGMSKMAAIGAIMHKILRIVYGILKNNTPFNPEIDRANRLRNLSKKKDESLVVNKMLEPIDCKAPVSRRQLKKRKEQEKSQNLKPLNAEQIVSVFAGSDSRSFPFASTQT

SEQ ID NO: 57169 - protein, 355 aa, unidentified
MTQFSRIGLDTSKAVFTLHCVDQTGHPVLRLDLRRAQLLPFFKKHASTVVAMEACGGSHHWARKLMALGHEVRLIPAQYVKPYLKRGKNDRNDAEAICEAAGRPGMRPVLTKTEDQQAQAMVMKVRRTLVDQRTQLINALRGHAAEFGLIAGKGTANVAPLLATIAAETTIPAIAREMMALLGHQIDHLDHRIGELEARFAAMHEANAISQLLATAPGIGPIIALTFAIEVDPAAFQSGRHLAAWLGLTPREHSTGGKQRMGGISRAGNERLRALLVNGAMSVIHAVTTRGGKLATPWLLAMLARRPKKLVAVALANKMARMIWAMMTRGEAWRRPLAAMAGQRPAASIRLAAQA

SEQ ID NO: 57170 - protein, 399 aa, unidentified
MTPSQIVVIGADTHLDTIHLAALSETGKPLGDAEFPTRPSGYYVAVKWAQSFGTVTLAGVEGTNSYGAGLTRALQDGGIDVVEVNRPDRAARRRRGKSDPLDAYAAARTALSGHGLAAPKDERTLALSALLTARRGAVKAHTAATNQIQSLLVTAPSELRECYRRYTTRGLVKELARCRPTAHTDPTAVAVLTALKALAYRAQFLHHQEHELTEQIHTLTQQMNPGLRAAHGVGPDTAAALLITAGMNPHRLRSEAAFAALCGAAPVPASSGKTTRHRLSRGGDRTANNALYRIALVRMSNDPRTPDYVARQTANGRSKIEIIRLLKRAVAREVFRLLSQPCAIDDYSDLRPARQAKNITLTTVANHLDVWPNDISRLERGLKRDDTLAANYREYLSAA

SEQ ID NO: 57171 - protein, 341 aa, unidentified
MDDYIGLDVSLKETAVSVRRDGKRIWRGKCLSDPSLLAAVIRKRAPDAKRVVFETGPLSVWFYHALSAEGLPAICIDARHAKAALDMAPNKTDANDADGLAQLAEVGFFREVRVKGYDSMLARTLVAARTRLVRITTELSNQIRGLMKTFGLVVPPSKGGKFEANVRSLLAGHDGLELIILPVLEAWRSVRIRAAELGRQLLADARHSRACQLLMSIPGVGAITATAFTAAIEDPANFRTSRSVGAWLGLTTRRYQSGEVDYDGHISRRGDAHLRGLLYEAATVVLTRAHADSSLRAWGLRLREKIGFKRAAVAVARKLAVIMHAMLKSGEVFDRNASAVA

SEQ ID NO: 57172 - protein, 393 aa, unidentified
MRKPEPQHKPLNDLSRSLTPFDPNRTLIGVIELSKKNWLVAGMIPGVERQPLKKLVADENELLKLLERWRAEAEKAGHKIDRIAVAFETGRDGFWLARWLRARGIEAHVIHAASVAVSREHRRAKTDRLDTQQLMRAFLGWLRGERQHCKMAAIPTLEEEDAKRPHRERETLVGERTTIINRLKATLARLGIRNFNPKLVKAPERLKHVRTPEGEPIPRNTQAELLRDMQRLRLVREQIGHIEKARLEHLKRNPNTGPNLMVSILARVIGVGIETADMLVQEVLSRNLRDRRAVARYGGVTGSPDESGSRSREKGLSRSGNARVRRGMIQLAWRFLEFQKDSALAKWFRARTENAPRSRKKMIVALARKLLIALWHLVRDGVVPEGVVLRPAH

SEQ ID NO: 57173 - protein, 345 aa, unidentified
MNITTVGIDLAKNVFQVHAVDARGKVVLRKQLRRAQVAGFFSNMPPCLIGMEACASAHHWGRTFERFGHTVRLMASQFVKPYVKTNKNDVADAEAICEAVGRENMRFVPIKSVEQQAILSVHRVRQGFVKARTAQANQIRGLLGEFGLVIPKGICNVAKRVPELLEDASNELPVPFRHLIDRLSEHLKELDRQVKEFEKGIIAWHRSSELSRKLENIPGIGPLAASALVASIADPHSFDNGRQVSAWLGLVPRQHSSGGKPTLLGKSQRGDAYLRTLLIHGARSAILAAQHRVDNTNGWLKNLLARRHPNIAAVALANKNVRTVWALLAHGREFKADYAPNHIAT

SEQ ID NO: 57174 - protein, 431 aa, unidentified
MRPNAGGIDIGATEIFVAVPADRDTETVRSFPTFTEDLHTLADWLQQCRVDTVAMESTGVYWIPLFQILEARGIEVHLVNAQHVHHVPGRKSDVLDCQWLQYLHSVGLLRASFRPEQAICEIRSLMRHRESLVQMACVHVQHMQKSLDQMNLQIHHVISDITGVTGLAIVDAIVAGNTNPEELAKLRDYRIKASVETVTKSLVGDYRAEHIFTLKQSLKAYRYYQQLIADCDQEVQQRIESFETKDGGTGNTGDGDSPNTTMGTFDLRAHFQRIFGVDLIAIPGFDVLRVQTIFSELGADLSDFPTPASFSSWLNLCPKDGISAGRKIRGPKLKTKNRVSQVFRMAGQSLHNNRSFLGDYYRRQRARFGPLQAVKNAGHKLSRIFYHVVTTRQPYDETVFAKLEARHQQHRLRKLQNLAKQMGYSVVPTPA

SEQ ID NO: 57175 - protein, 370 aa, unidentified
MSVRRILAKTIDTDLEYEAIGIDLAKNCVSAALLTTDGEVVCIDRLDYSELEKSAQALSPTTFAMEPCTEMNYLVQKLEAWGHRCLVIGGKNVQNYVENHFSGQKTDLNDAQALAFLAQDTQLRTIKAKDVEQQKYASLTTLREQYIKQYRQTIVSLKGICQAWGLNISKGISGKARLKDLIENHAAFPEELKESLVDMVTHAQTAQKALNKITKTLEELAKSDKVCQLIQTIPGLGSICSCRLRATVGDIKRFKSPKDFPAYYGLVPRSIATGHNERKGKITHRGDRTMRSLMVQAAGSLVNMATKGKLKSKQLTKWILKKQKEKMPWGKLVCAVAAKLLRIVRAVLISSKPYNPKIAGVAKCSLPKGS

SEQ ID NO: 57176 - protein, 337 aa, unidentified
MYYTGIDLHKFSSYLTTVNSSGAIVKQENIKNVAHNFIHYFASLPGEHKTTVESTMTWYWLNDLLSSINIPLVLAHAKYVKAIAYAKVKTDKVDSHTLAQLLRMDYIPAAHKISNENRTLRDALRARLKIVQRHTSVTNSMHLLLAKYNYDSPTQLTGIPEFQYEQLSEVEELLNEQMLDLEKQLYPFLIPNDDIQHLLWIPGIGKMNAFTILLEIDDINRFQDVKNFFSYCRLTPSARNSGGKSKQRSSKDGNKYLKIAFSDAAIHAVQYYPVIRKYHNSLLRKKNKQVAKTIIAKEIAEIVYHVLKNKSDFNNKFRGQHIEPKSLQWPRVVNPYV

SEQ ID NO: 57177 - protein, 366 aa, unidentified
MKKQAKQAIRLKKLCNEVTRILNLGLDEHYWQVTVTMQEDGGRIKVVGKMSHEAFLDWVKKKVAEGWEIRSCYEAGACGYWLHRELEKLGVKNLVVTPRAMGKTGQKQKTDKRDAVELCDTLDRYLRGQHRALSVVKVPTPEEEAKRALIRHHRQIMKDRCRCEARGKGLLCAQGIRVRSCWWKDQSWQKLSTDPRLKEWLKQQLEHWRSQILSAQEKQLSLREEIAALAPARLPKGVGAYSAAVLHYELRGFERFKNRRQISSITGLCPGVHQSNGHGKEGSINRCGIGAVRWVLVEMVWRLMIWQPQYPPVRRLAAGLVKSRRAKKRLVVEAARRLAIDLWRLSTGQTTPEKLGLIMQDHSQSH

SEQ ID NO: 57178 - protein, 377 aa, unidentified
MGEHTEAFVGIDAAKARNAIAVAEGGRGGEVRYLGEVDASEQGMRRLVARIAARYDRVHFCYEAGPTGYGLHRLITGLGHDCTVVAPSLVPRKPGDRVKTNRRDAVALARLLRAGELTPVWVPDEGHEAMRDLVRARAAAVETLRVHKQQVASFLLKHGRHFPRKTPWGARYMRWLQEQKFAHPAHQIVLQEAVEAVRLARGRVLRLEGLIEELLPTWSLAPVVNALQALRGVSLVVAVTFVAEIGDLRRFESPRRLMAYLGPVPSERSTGDAVRRGGITKSLPRTRSGAGNGRVRHLLVESAWTYRHPPRVGAKKLAQLERASPKVREVAWKAQSRLTARYRALAARGKRLTVVCTAIARELAGFMWAVARESRPA

SEQ ID NO: 57179 - protein, 466 aa, unidentified
MRKPQVIPDEDHEVVYERVAAVDVAKASGVVCMRAPDPKRPGRYVNRIWDNVPATRARIAELGAELLRGQVQMVTLESTSDYWRVWYYVLESIGLAVQLVSASQAKNLKGRPKTDKLDAMWLARLTQWGMLRPSFVPPAAIRRVRDFTRARTDLVHERTRVLQRLEKLLEDAMVKITSVVSDGLKAKSVVAMVAALVAGERDPRTLADLAKGPLRAKKDALAEALDGMFDSHHGVIAQALLDQVAFLDQRITQMEAGAIEALAQVEESWGVDATGETGPGRGTGPDSLVLAAVYRLAEIPGISVWLAIVIIAEIGLTMSVFPTPAHLVSWMGLCRSAAQSGTRHGKGKAKKGNSYARAAAGQAAIGAAGTATFLGERYARIARRRGKAIAQVAVARSIMNIVWHLLSDPAARYRDLGPDFYASRISRDKKIRTHIRGLTALDVTAEDICAALGIAVADIPSGGHAA

SEQ ID NO: 57180 - protein, 382 aa, unidentified
MPAYADPTPKPISADTIFLAFELSGTSWLVALHAPDADKVERHRLPAGVAAEVLGLIARTKARVTRRLGTTPRVACCYEAGRDGFWLHRVLEAEGIASHVMDPTSLQVDRRARRAKTDRLDAQALLRALMAWSRGERQVCSMVRPPSPEHEDERRLSRERGTLLKERLRLSNRIKGLCAAQGIYDYEPLGADRRERLARLVTGDGRALPGRLAAEIGRQLDCLELVLRHLAEVEAVRDARAAQAREEGGSKLAALLRLKGIGPEVATVLELEVFHRHFANRRDVAAYAGLAPSPYASGGTSREQGISKAGNRRARKALIELAWLWLRHQPESALARWYRDRVGTATGRVKRIAIVALARKLLVAIWRYVETGLVPAEAAVRT

SEQ ID NO: 57181 - protein, 335 aa, unidentified
MNKFKYYIGIDVSKLTLDVTVLQEVENSTKSEHYKIENKEKSIAQFVKKQFGKYPKEEVLFCFEDTGIYSLPLAYYLNDNVLAYWQRPAIEIKRSRGITRGKSDKIDSKDIAFYAFTQKYKFRPNKLSIKEIQQLRLLFTEREKVLKSLSSFEKTSENEDFMLKEVFASVASVNKTIVAQLQKVLKTIESKMLAIISSEDTLNQQFKLITSIPGIGMQTAVYLLIATKGFSAFENWRQLACYAGVAPFPYQSGTSINGRNKVHHFADKKLKSLLNMCAIVAVRYDRELKDYYERKVAEEKPKMLVINNVRGKLLARVFAVINRKTPFINTQKFAS

SEQ ID NO: 57182 - protein, 378 aa, unidentified
MGWLPPSPDGIAMCQSVIVGDHVAERMAMKYTMIGVDLAKNVFQLHGASLTGEVRFRRKLSRGQFLRFMGSQPACIVVMEACGSAHHWAREMAALGHEVKLIAPQYVRPFVKRQKNDAADAEAIVIAARQPEMRFVEPKTPDQQARAILFRARERIVHQRTELVNALRAMLYEYGHVVPVGIGHIKRLEAALNDVANNLPDLVREEGLDLLAQIGEMTAKIDSKTQKLASLAKQTDVARRLQTMPGIGPMTAVAVEAFAPAMESFKSGRDFAAWLGLVPRQFSSGGKERLGKVSKAGQADIRRLLIIGAMARVNWASRKEASADPWMMRMLGRKPRMLVAIALANKMARMIWAMLMRQEDYRNPTLMKAAITNVGKEV

SEQ ID NO: 57183 - protein, 355 aa, unidentified
MPSKADTAVARTIGIDTGKNTLRMIGLDEKGAIVLREKVSRTRIAARFVNLPPCLVGIEAGMASHHVARELVALGHEVKQVPPAYSKPFRQGHKNDFRDAHAVAEAVERPSTRCVPIKTDGQLDLQALHRVRSRLIGNRTAVINQIRGFLLEHGIPVRQGYRFLRQQLPQILATRTDVLSPRMVRIVGDLMADWKYLDERIEGVTDEIEALAHADEGCQQLITVPGIGPIISSAMVAAIGNGAAFCKGRDFAAWLGLVPKQMSTGDRTILGRITKRGNRYLRMLFIQGARAVLLRPASWAKHSFGSWLTAATRRLHRNVLTVALANKLARIAWTVLAQGRRYEARVEPRVEPAAA

SEQ ID NO: 57184 - protein, 343 aa, unidentified
MGSVIRRGRSRHTMSALVCGLDVHKDSTYATILNSEGKIVDQTRMENQKVASYLSQFKVEKVAMESSTAVTPLYRQLKKEGFNAVVSHPRKTKLIAEAKIKSDRVDSKAIAQLLRMDWLPLSYVPDVATAGLREKVRRRAFLVRERVKLRVKIKSFLAYEGIKWPEESGLWTKEGISWLRSQNLAPVESYLRIIDVFDSEIKVLSKEIKQLAEEDEEVKLLMSIPGVGYYSALLVKSEIGEVGRFPFAEKLCSYAGLVPSTYASGGVVSHGRITKEGSKWLRWVMMECAQVHVNRYDSSISRAYRCIAGRRGKKVARLAAARKLLVCCFSVLKNKRPYYDQTV

SEQ ID NO: 57185 - protein, 358 aa, unidentified
MLNQRKGLNFEGQNIYVGIDVHLKSWSVAVLSENCILKKFSQNPDSKALHKFLTTNYPDASYYSVYEAGFSGFWTHEELIKLGINNIVVNASDVPTMMKEKLRKTDAIDCVKLARGLRSGDLTGIYTPQRDALEIRSLIRLRSQIVKDMTRDKNRIKAFLYFYGIKLPEQFDRPSTHWSKRFMQWLREIELLTPYGKKALDLHIKKAEYQRDLLLQETKAIRKLCGGILKDEMKLITSVPGIGITIGISFLTEIGDIGRFKNAYQLAAYIGLIPMCHSSGEKENNGEMTIRKHTILRCYIIEAAWRAIRSDPAMTTAYEGYRVRMGANKAIVKIARKLVNRIFFVLKRKQEYVTCIVR

SEQ ID NO: 57186 - protein, 362 aa, unidentified
MTTVRQLNVFEEEAKMRFYSQQHRYYCGIDLHARTMYLCIIDQSGTVLVHRNMPSERGALLRAIDSYRDDLVIAVECIFTWYWIADLCDQLEIPFVLGHALYMKAIHGGKSKNDKIDSQKIAGMLRGGMFPLAYAYPQAMRSTRDLLRRRNYLMHHQSELLAHIQNTRSQYNLPAFEKRIAARSNRVDLADHFEEPMVRKSIEADIRVLDTLHEVLLTLEQSVLTQARHHDPVALQLLRTVPGIGKVLSLVILYEIQDVRRFPEVGNFISYARLVKCPHESAGKKSGSGNNKIGNAHLKWAFSEAAVLFLRDHKPAKDYHHKLVGRYGKAKALSIIAQKLGRTVYYMLKRKEVFDPNKFFSS

SEQ ID NO: 57187 - protein, 359 aa, unidentified
MVWTPPILAAMVVVASITSGSRTMPSVVGVDSAKRVFQVHTVDELTGEIRRWTLSRSKLLEFFGNMRPSIVAMEACGSSHHWARRFTAMGHEARLIATKFVRPFVKTNKTDAADAAAIWEAAQRPGMRFVPVKSEQQQGIMALHNMRDLLVKSRTAQIHQIRAVFYEFGFVLPRGRHWGLKALPGAFAAIEECVSALVLDSLRGQLELIHDLSRRIEAIERQLEIYERSDDRCRRLRAIPGVGPLTATAIVASVGDAREFRTAREFAAWIGVVPRQSGTGGRVRLLGISKRGSPYLRAMIIHCARAVAARQKQPGPWLTNLMQTKHWNVAVVAQANKIARVIWALLAHECEYRPAPSMA

SEQ ID NO: 57188 - protein, 404 aa, unidentified
MKQEPRRLAGIDWASRAHAVCVLEPGGGIRARFDVPTTGKSFAGLIKRLAKLRVGDVAIERPDGPLVEAMLKEGIRVFVIAPRMLKALRQRYGATGAKSDPGDAYVLADVLRTDGHRLKPIQADPPETKVLRALTRTRKDLVEARVALVNQLRAQLELCFPGAIGLFNELDSAVSIAFLRRYPTALRARALGEARLAAFLRRIGYCGRRPVGELLARVKEAPAAGIAGAEAEGRGVCVLALLDAIETCNAQARELEAEVVERLELHRDAHVFTSLPKAGRGVRAASLLAEIGDARERFPDEESLGALAGVAPVTRASGKARSVGFRWACDKKLRNALIDFADDSRHASPWAARVYTDAISRGKRHPHAVRILARAWVRVIWRMWQDREPYDVTKHGGAAMLQAA

SEQ ID NO: 57189 - protein, 368 aa, unidentified
MEKFITFVGLDVHKNTIEVALADAGRNAEVRHYGKIGGGLDDLDRLVKKLSSTNKELHFVYEAGPCGYDIFRSLTDKGFDCAVVSPAHIPKKPADRIKTDRRDAMMLARLHRAGELTYVFVPRADDEAMRDLTRAREDAKKAQRVAQQQLNGMLLRLGFRYPKDNWTKQHFLWLADQKMPMPAQQVVFQEYINAINETNARVERLTQQIETLVPTWRMAPVVKALQALRGVSLIVAVTTIAELGDLTRFDHPKKLMTYLGLVPSEHSSGEKTQRGKITKTGNGHARRVLVEAAQAYSHPARITRPLLKRQEGLSQEVRDIAWKCQVRLCTRFRRLMAKGKNRNAVITATARELAAFMWAIANHTPIAV

SEQ ID NO: 57190 - protein, 307 aa, unidentified
MTAVGIDVGKASLDLAVNGQAAVTRYPNTRAGITKAVKRLRTLKATRIVVEATGGYEEPLLEACCDGGLWIARVNPRQARDFARATGELAKTDAIDARLLALMADLFADRLRCHVALPLWQRELRGWLRRRSQVVMTLQAQKQQSAMAPSEVRKLVARTIAALVREQAAIDAAIRTLVKEHATPAVQSSKGLGPVFQATVLALLPELGHLDRRQIAKLVGVAPMNRDSGQGSGKRRIRGGRSSVRVALYMATLAAVRWDPMMKAHYLQLRERGKLGKIALVACMRKLLGIVNARRRDELRAEGHAMV

SEQ ID NO: 57191 - protein, 344 aa, unidentified
MNSTTIAIDVAKSVFEVAISEQPGQVRDRQRLSRERFRRFLEERPAATVLMEACGSAHHWARHAQAHGHRAVLVPPHVVRPYVLRNKTDRTDAKGLLEAFRNEDVHPVPVKSETQQALAALHRLRSTWLATRTARINTVRGVLREFGLIIPTGAHHVVPQARTLLEEADSGVPGLLRPALAVALEEIREIEARIRAVEQQLEAAAAQTLSVGQLRTIPGIGLLTATALVAAVGDVQRFPSGRHFASYLGLTPREDSTGPRRRLGAISKRGDTYLRMLLIHGARSVLCHAKTTTAPPPDRLRAWALQVERLRGHNKAAVALANKLARIVWAVWRHGTDYMGTPAL

SEQ ID NO: 57192 - protein, 343 aa, unidentified
MQTITTIGLDIAKSVFQVHGVDATGQVVIRRQLKRRSVLAFFQKLPPCLVGIEACASSHHWSRELQALGHTVRLIPPAYVKPYVKRQKNDATDAEAICEAVTRANMRFVPTKTPEQQSGLVLHRTRHLFIRQQTAVINAIRAHLAEFGIVAPVGRHGVEELLNVVADPNDKRVPEMARACLLAFGAQLRRIKEQVLEFDRLIRAWHRSNEVSMRLDEAPGIGPVLATAVVATVADPTSFRSGRNFSAWIGIVPKQHSSGGKTRLGNISKQGDRYLRGLFVAGALAVIRYAKIHGTKHRPWLTALLERRPTKVAAIALANKLARMVWAMMVKGERYKEPVALAR

SEQ ID NO: 57193 - protein, 431 aa, unidentified
MNSSSNNDPTQNNYAAFIAIDWADQKHTFSLQVAGQAKKETGTLEQKPEIIGPWVAKLRERFGGRPIAVAVEQSRGALIHALLAYDFLMLYPIHPTTVAKFREAFKFSGAKSDPLDTDQILAILTKHLELLKPLNPDTPETRLLGRLVEDRRKTVDLRTSHIQALLASLKEYFPQAIELVSGNLSSRLAGDLLKKWPTLESFQQAKPSTIKRFYYGHNVRSPEVIATALKLAISAQPLTTDSAIIESSRRVSEMHSLMIQALNPVIDAYDQRIEKVFHDHPEFPLFSQLPGAGPVMAPRLSAFFGTDRSRYSKAQNVQTFCGISPVTKSSGKTRVVYFRRACPQFQRQSFHEFARLSVASCQWARNYVDYYTGKGKNYNTVVRALAFKWIRILFRCWKDRTPYDDNKYMEILKRRGSIFATLHLEQKNENC

SEQ ID NO: 57194 - protein, 311 aa, unidentified
MATSSETYVGIDVSKDRLDVAVLGEERGWQVDNTQEGIAKLVQQMENLQPKLIVVEATGGYQRAVVEALFVADLAVAVVNPARVRQFARAFGLLAKTDKLDAQVLAVFGQRVQPKPYTGKSEAEKQLGALLVRRRQLEAMLKAEQNRLRTVSPSLLGSVQRSITFLREEKKILDEQIPQFLHEQQAWQAQTQILRSAPGVGPVTTATLLAELAELGKMDRKKIAALVGVAPMNYDSGKKRGYRKTKGGRTYVRSVLYMSTLVATRYNPLIRAQYQHLLKRGKEKKLAITACIRKFLTILNAMMRDQQPFRI

SEQ ID NO: 57195 - protein, 312 aa, unidentified
MAELSFCGIDVSKDRLDVVVLPAEYVFSAGNDLTGLVELVSKLRCLSVAAIGIEASGGYERSAVRALLAAGFSVGAVNLFKIRQFAKASGVLAKNDRLDARLIAMFVATMPTRPVQRNAATERLAEILMARRQLSEQKVAAENASRLFEDVVLMRLYRRRIARLEADIALLNKRLTELVAADSALAQRYALLISMPGVGPVLAITLIALLPELGQMSRKQVAALVGVAPYDFDSGKLRGVRCIRGGRAPVRRVLYMAALIASRCNPALKLFHDRLDSAGKRSKVVMVAVMRKILTMLNAMVRDNIGWRPKSA

SEQ ID NO: 57196 - protein, 387 aa, unidentified
MQTITDRPEAPTAIRNDLGAIFVSLELSRSTWLITSLSPGGEKMSKYSVRGGDVAGLLERFAQLQKKAQARTGRNFPIIVIQEAGLDGFWIHRVLQNEGIESHVVDPASVATSRRRRRAKTDRIDGEALLRTLLAYKRGEPRVCAMVKAPTPEEEDRRRLCRERKVLTNERVRHVNRIKGLLFCQGVFGYEPLRRNRRQRLDELRTGDGRPLPKHLKAQISRELDRLELLLEQIKAVETERDALLAAQQVVAPAPASMLLDFNGIGPEFTAVLWLEGLFRHFDNRRQIASYAGLAPTPWKSGSIDHEQGVSKAGNPRLRTTLIQLAWLWLRHQPQSALALWFKERVTRNGGRLKKTTIVALARKLLVALWKYVTAGVVIEGAVMKAA

SEQ ID NO: 57197 - protein, 281 aa, unidentified
MDGSRDEPKMTAGLDLGDKYSYLCLIDTESGEVVEEGRLRTSPEAFRRRFFSEQPMRIAIEAGTHSPWASRVLEEYGHEVLVANARKLRLIYANKRKRDEIDAENLARLARLDPKLLYPLRHRGEASQAHMAIIRSREALVGCRTQLVNHVRGAVKSFGRRLPKCPARSFHKRAAEHIPEALWPALGPILETIGSLTQRIRDYERQLETISKEHYPETDLLRQVEGIGPLTALTFVLTLEDPHRFERSRSVGAYLGLVPATAQSGDRDPQKRIFRRRETRC

SEQ ID NO: 57198 - protein, 466 aa, unidentified
MAADEGMAGGAGAAGGAAEVAEDSTQVVEYAAAIDVAKGSGMVCTRVPGSRADRRRQQTWAVAATFTAVTALMDRLRCEGIQRLVLESTSDYWRMWYYLAEAAGLEVWLVNARDVKHLPGRGKSDKADCVWLCKLNERGMLRRSFVPPQPVRDLRALTRTRARLAQDQARHQARVEKILEDALLKISVVISDLFGFSGRRFLDALVAGERSPAALAALWDKRLRATRAELAQALTGRFRDIHALEIAVHLRLIDAICAEITALDEQIGQQLALVPGTAPACAACGLAGGGHVPGCADADAEVLDLAGRLDEITGVGAVNARVLIAELGTDPSQFPTPGHAAGWARLTPRSRQSGETAKPGRTGKGNRYLRGALGQAAMTAARTDTRLGAMYRRIARKRGKQKAIVAVSRVICEIAWILICDPSARYAELGPDYYSPRSPARQTRDKIREIERLNPGKKVILADAAA

SEQ ID NO: 57199 - protein, 342 aa, unidentified
MGQVTTIGVDIAKSVFQVHGVDATGEVILRRRLTRARVVPFFAKLAPCLVGIEACATSYHWARELRKLGHDVRLMPPSYVKAYAKRQKNDTADAEAICEAVTRPTMRFVEVKSPEQQSIMVVHGTRTMLMRQRIQLSNAIRGHMAEFGVVAPVGREGLLTLTDTLHDEADDRVPAEARHCLQMLAAQLRLVNAQILENDRRIRLSARATDVGRRLMGIPGVGPVLASAFVATVPDPHAFRSGRNLAAWIGLVPRQNSSGGKERLGGITKQGNRYLRQLLFVGAMAVIRYAERHGTRRPWLVRLLARRTTKIAAAALANKTARMVWAIMTSGQSYREPELRTA

SEQ ID NO: 57200 - protein, 429 aa, unidentified
MNSTQNKKIEQVKETTMIVGIDIGSEKHYFRAFNWRGIELTRKPVAFSNSMEGFNSFYNTIVELIQKSELEEALVGIEPTGHYWFDLGQFMGEKNIKFVMVNPHHVHKSKELDDNSPSKNDRKDPRVIAGLVRDGRYFYSYMPTGVYAELRNASNRRFVLVEEQTRAKNRLQKWIAVYFPEYKGIYTRIDAKGGLLVLKQAPTPEEIVRLGVEGIIKIWKDAKLRGNGHKKAMLILNAAMKSIGLKAGLTEARMEIQDLIEDYELQTKRLERVNDLIKELCQQIRYADKLLEIKGIGITTIAGFIAEVGDITRFDSAKELQKLAGLELVADSSGKHNGKTKISKRGRKRLRYLLFEAAISVVGKNEEFKEIHRYYTTREKNPLKKMQSLIAVACKLIRVFHVILTKGISYDASKMLKDIQHPGEPLKAA

SEQ ID NO: 57201 - protein, 459 aa, unidentified
MNRNRSKSRVARTMPLINPNAAAIDVGATMHMAAVGADRAREPVRSFGTFTADLYRLVDWFTECGVETVVMESTSVYWIPIFELLDARGFTVFLVNARDAKHVPGRKTDVSDAQWLQRLHSFGLLRASFRPKGQIAELRSYVRQRERLLEYAASHIQHMQKALTEMNVQLHHVVADITGATGLRIIRAILAGERDPEVLASLRDSRCQASAETIAKALTGNYRSEHLFALEQALALYQTYHEKTSACDVRIEAVLKELSIHHGRGHGAVPPPRRRHRTDQANALAFDVRAALFALLGRDITVINGLGAYLSLKLIAECGTDLSSWPSSKHFTSWLGLAPSNKISGGKMLSSRTRRSGGRAAALLRLAAVTVGRTDTALGAFYRRLSSRIGKAKAVTATARKVAVLFYNAVRHGMEYLDPGASSYETRYRTRVVNNLHRRAKAFGFVLQPMEPKAGAAVS

SEQ ID NO: 57202 - protein, 404 aa, unidentified
MYNAVGIDVSKGKSTVAVLQPGSTVIRKPFDVSHTSQNLNELADYLSSLDGTTKIVMECTGRYHEPMVKALSEAGLFVSIVNPHLIKNFGNNSLRKVKSDPADAHKIARYTLDNWTELRQYSSMDSTRTQLKTLNSQFSFFMKQKVAAKANLIALLDNTYPGVNKLFDSPTREDGSEKWVDYAYSFWHADCVRKIGLKAFTERYKSFCKKHHYIFQQDKPEKLFNASKELVAVFPKEKTYKLLIQQSIQQLNLASEHVERLRREMNELASTLPEYSTVMGIYGVGKTYGPQLIAEIGDVSRFTHREALTAFAGVDPGVDESGQHKSKSNRASKVGSARLRKTLFQIMTTLLQNAPEADPVYRFLDKKRSQGKPYYVYMTAGANKFLRIYYGKVKECLRNLEQTE

SEQ ID NO: 57203 - protein, 315 aa, unidentified
MIVGIDVSKKSFDVAWNNAGKSYHQAHDYNDKAIELLLSETPSDSHFVMEATGVYHSKLALKLHQAGRKVSVVNPVVIKRFAQMGLTRVKSDKADAQLICRYGEHSELALWEPSKEEIHKLQQAHSWLDDLIRDQTRLLNRKEAHRHHAVPSLFVKREMKAHEKSLKEQIRRCEGYLRAIVKKCFPELYDRLISIPAIGPKTAIELIVITKGFTQFDSVKALSAYAGISPTTYSSGTSIKGKGGIAKMGRGRIRQLLYLCSWTTKRSNKACVELHQRLSEAGKPPKVINIAIAHKLLRQAYAVATQGVEYSESCA

SEQ ID NO: 57204 - protein, 415 aa, unidentified
MTSEFRFYAGIDWASEEHQVCLIDPDCKILEERIIQHSGAGLAQLIQWFDNLSGGNPATIGVGIEVPRGAVVESLVERNFAVFSLNPKQMDRFRDRHSVAGAKDDRRDAFVLADSLRTDQHCFHRVRLDEPPIIRIRELSRLDDELRGEFNRLTNRLREQLNRYFPQTLQLGGKVDEPWLWSLLETAPEPALARRLTVAQLTKLLRTHRIRRVEPAELRTALQAPAFHLAPGTVQAASEHVLLLLPRLRLVRQQRGEVSRRMQEVLDELSAGSEHRDVPLLQSLPGVGRVVTSTMLAEAWQPLAERDYHALRSYAGSAPITRRSGKKTIVQMRQGCNTRLRDALYHWARVSIQTDSHSRAHYAALRRKGHSHGRALRGVADRWLAVLVAMLRTGVPYDPSRRGLAPGEETGGGQF

SEQ ID NO: 57205 - protein, 389 aa, unidentified
MSGSKITPPNTAAGHKRLTRDVGKVRPVRVALEATGVYHLDVAMFLHEAAGFSVMVVNPKASHNFGKAMLTRNKTDPVDAVVLLEFCERMPWEQWRPPSRAAFELRSLSRHGTSLRLRLAAEKTRLKQCDAVDLCSRLVREDVAVGIAELTRRIEDNQGHGLLAIASDEELERQFALLQSIVGFGEVAGVQLLAELAVLPEDMSAKQWVAHAGLDPRRHESGTSVHRPSRISKVGNRYVRRSLYMPALVASQRDAHVAGFYQHLVKAGKPRKVAVVAVMRKLLHAAWGIFRSGQPWDPTRFYRLAVESETTAGDELAPSATQNVAAGVAETAQTSAEVQVDAARATDEAAGSVGVMSRAKQEAGLGSAEVDGHHIASLQRSAAHAQSRT

SEQ ID NO: 57206 - protein, 419 aa, unidentified
MTRLPTAEFAAFVGLDWADAKHDVCLQAAGSETREFSVLVHTPDAIDAWVSTLRTRFKGQPIAICLELNKGPLVYALRKYDHLVLFPVNPLTLARYREAFAPSHAKDDPTDAELQLELLLKHRNQLTPLKPQSSAMRALERLVEHRRRLVGDKVRTTNRLTSTLKDYFPHVLHWFHDKDTALFCDFLAQWPTLKAAQLARRSTLERFFRAHHVRYADVIDQRIQAIKSATPLTTDEGVIVPNALLVQALITQLRVILHAIAVFDHAIAQRAQSHPDFPLFNALPGAGAVFAPRLLVAFGEQRERYASADELQQYAGIAPVTERSGNKTWVHWRLQCPTFLRQTFVEWAAESIRHSFWARAYYQQQRDKGTSHQAAVRALAFKWIRVVFRCWQNRTPYDESVYLTALKQRGSPLIHTLAH

SEQ ID NO: 57207 - protein, 370 aa, unidentified
MKEGITRYLGLDAHKATITVAIGEASGPPTLYGTIANDPSAVSKLIRRLGRAASLVAAYEAGPTGYTLHRQLTALGVECVVVAPSLIPRRAGDRVKTDNRDAVTLARLLRSGDLTPVWVPEVADEALRDLVRARYDAKADLLRARHRLGKFLLRQGGQPPAGTRAWTIRYQTWLSQLRFQQPAAQVVFDDYRATIRAAEDRIRRLEADLRRCATDSRQVALIAALQALRGIGFLSAVTIVAETFDLRRFARARGFMGFTGLTSSEHSSGPARWRGAITRTGNAYLRHVLIQAAHNARHAPRQSAALKQRQAGLPPDLVELAWRAQLRLHQRYRHLSGRLGRPKAVTAVARELAGFVWAIGQRMAAEAPAA

SEQ ID NO: 57208 - protein, 358 aa, unidentified
MNRKAGMSAGQVIGTVDGQQVFGLDIAKSVFQVHTVDMGSGEIVNQQLKRAKVLTYFANRTPCLIGIEACGGAHHWARKLTAQGHNVRLIHAKAVRPFVGGNKTDAADARAIWLAIQQPGTKFVGMKTLEQQATLVLHRQRELLMKMKAMQSNALRGLLYEFGATFARGRNALFAEIETALEALVGDIPQYVADSLREQVKRIKDFAKDIKAIEGRLAQRLRDDKDMQRVAQMPGVGLLTATAAIATMGQASAFKSGREFCAWLGLVPRQSGTGGKVKLLEISKRGDTYLRTLLIHGARSVLTHTKEPGPWLEQLKARRPVNVVIVAQAAKMARAIWAVTAKQEDYQRGYCSVKPKAA

SEQ ID NO: 57209 - protein, 408 aa, unidentified
MDRVNPRCAGLDVHKDSVWACARVDGGKPLVEKFGTTSRELLRLGDWLAGHGVTVVAMESTGVFWKPVWNLLEDRFALMLVNARHVKQVPGRKTDVTDCDWICQLLEHGLLKASFVPDRPRRELRDLTRQRTQLLGDRARVVNRVQKTLEDANVKLASVATDITGKSGRAILDALAEGKLPPEQMAELVHKRMEAKKPALREALAGKVTDHHRFMLKQLLEQVDHLDRMVGSFDARIEEVMSPLGREAVRRLDQVPGFDVRTGQNVLAEIGTDMSRFPSPHHLASWAGICPGNDKSAGKRRSGRTRKANRWLKAALTQAAWGASRTRRSYYSAQHRRIAARRGAKRATVAVAHALLVTAYCLLSDPRPYADLGAGYFDQPQSPQRQAERMVRKLQRLGYSVELKRPAA

SEQ ID NO: 57210 - protein, 367 aa, unidentified
MRKSITVAEGQTRDFAERKYTVGLDLGDRWSWYCVLDERGEVVFEHKLSTTPKALGEVFGVMPQSRVALETGTHSPWISRLMKELGHEVIVAQASKVRLIGESRKKDDRLDARTLARLARIDPELLGPIQHRSARAQADLIMIRARAGLVRARTALINAARGLTKSYGERLQGCNPRNMDAEKRKGLSAELQLALEPLLRAIESLSQQILDYNERIEQMAGDGYPEVARLRQVKGVGTLIALTYVLTLEDPQRFTKSREAGCYVGLQPGRRNSGSSTPQLHISKEGDPYLRTLLVQGAQHILGPFGEDSDLRRWGLKLAERGGKNGKKRAVIAVARKLAVLLHRLWVSGEAYEPLRNQRAVELPAAA

SEQ ID NO: 57211 - protein, 325 aa, unidentified
MRKKGYLVMGSSSTCFVGIDVSKTTLDVVIHPSGEYLQFPNSSDGHRQLIERLKTMELGAIVLEACGWERACTAALVDANLPAAVINPRQARALAKGLGKLAKNDRIDAGILAYCAQHCQVKKAVKVPEKQLQLEALVMRRRQLVALRATEQMRLDQTLVKEVKKDVQQSVTFLTKHIDKVEKQIAKLIDSDDHFGELSKIIDSVPGIGPTTAAVIVAELPELGSLNRRQASALVGVAPYQHDSGNRKGKRSIYGGRLPLRCSLYMATLTAISKNEVIKTFYQRLSAAGKPFKLAMVACMRKLLSILNQMVKNRQHWNQHLLKSA

SEQ ID NO: 57212 - protein, 482 aa, unidentified
MKPRPQEKNKRATNHPTQHHWHEMNRKQRRETMRKIQSEDLTLEVLHPDAAGIDIGNESHYVAVPPSRDTQPVRRCGCTTAELKAMADWLKQCGIRTVAMQSTGVYWVAAYDIFEQAGLEVYLVNARDTKNLPGRKSDVQESQWLMKLHTYGLLRNSFRPSQEIRTMRTYWRQRNDLVQSAGRHILRMQKALTQMNVQLANVLSDISGVTGQAIIKAILAGERDPHKLAQLRDRRVKASQEQIARYLEGNWQEDLLFVLKQEQEAYEFCQQQIAECDRQLAQYLQQREDRSQGAPLPEEKRKGRLKKKRANKPQFDLREGLFRMTGTDLTRIDSIDVMTAMTVLSEAGWDMSKWKTEDHFVSWLRLCPDNRISGNKVIGKGRLPTNNPITIAFKMAASTLRLSKTYLGAQFRRFRTRLGAPIAIKAMAAKLARLVYRMLRYGMKYVDQGAAFYELQHRQLQVKQLKWKAAKLGFQIVQATAA

SEQ ID NO: 57213 - protein, 412 aa, unidentified
MKIAGIDVHKKVLMVVVVDTSVPEEKPARRRFVTLPSELQRFRIWLQEQGVEEAVMESTAQYWRSVWLELEPHMRLHLAQAFSNRAPRGRKHDFKDAERLVRRLIADELILSFVPNGEQRIWRSLTRMKVQLTRDRVRLQNQIECLLEEMRIKLSIVVSNLLGASGLRILQALAKGETDAKRLAQLGDERLRCTEEQLVDALTGRVQPMHREMLALQLQRLQLIDQQMAELNRMIAQAMRPHQEAVIRLAEVPGLGVDSAQQIIAEVGAQASTFSSAAELTSWVGTCPGKEESAEQNHSSRSAKGNKYLRRVLNQAAHAAVAKKGSHFQVVFRRLLPRLGYKSAIWAVAHRLCRLVWKILHEGVRFIEQGCEPDPRAKKERARMLARALRKLGYEVAIKPINQVAATNGIRI

SEQ ID NO: 57214 - protein, 401 aa, unidentified
MNAVGIDVSKGKSMVCVMRPFGEVVLEPFEVLHTAQNLRDLAEKLKALDGETRVVLESTGNYHKPVAFVLHDAGLFVSVVNPVLIHDYDNNSLRRVKTDRKDAVKIANYTLDKWTRLRQYLPEDDTRLALKNCYRQYQQAVAIRTMLKNNLISSLDLTFPDANKLFASPPKSNGCEKWVDFIGDFWHSECVSSLSEEVFAKKYLKWCQKHGYIFTRSKSDEIYACALNSASLPKSPTSKLLIQQQVAQLKAVSQSVAAFQQEMLRLSQQLPEFDTVMEMYGVGPSLGPQLMAEIGDVRRFSSKKSLIAFAGIEPLPNDSGKVVGNDKGISKVGSAVLRRTLFLIMSVILQTQPQDEPVFQFMNKKRSEGKPCKVYMMASANKFLRIYYARVKAVMDSERSQ

SEQ ID NO: 57215 - protein, 452 aa, unidentified
MAKRSKKRCEELPILHPHAAGIDVGASELFVAVSADRDPQPVRSFPTFTRDLNALADWLQQCGVRSVAMESTSVYWIPVYQILESRGLEVYLVNAQHVKNVPGRKTDVSDCQWLQYLHSVGLLRASFRPPGFICAIRSLWRHRSSLIQMAAEHVLHMQKALDQMNLQIHRVLNDITGLSGLRILDAILSGERDPVNLARLCHSGVKSSQDTIAKSLEGDYRPEHLFALRQSLAAFHYYQQLVVEVDQEIQGQLGSLGTATTAEPTVPKRTKASAYQRRRYEPKTFDLRSELYRIFGVDLTNVPGISAITAQTILCEIGTDVSRFRNASAFASWLGLCPENKISGGKVLYTKSRRVRSRVATALRMAANSLHHAKDYLGEFFRRITRKLGKPQAITATAHKLARIVYHLLSTKEAYNETVFHRCDEEAIKRAHYRLRKQAAQLGFQVIPLQNG

SEQ ID NO: 57216 - protein, 345 aa, unidentified
MRNSNVIGIDLAKDVIQVCKIDKHGELISNKAISPSKLKEQLTKTVPSIVAMEGCGACHYWSRLAQKQGHDVRVISPKKVKGFLQGHKTDANDALAIAIASIQIGMKFSQIKTEEQQSLQTLETSRKFLGKELVALNNHIRAYLYEYGITSRRGRKSLRETMAIVLDDLDTQLPTCLKNTLGLLWERYKLTVEQLTEAEKYKAHLVNQLEPCQRLMDLEGIGKVCASMLYANIGDGREFKNGRQASVYIGITPKQHSSGGKTYFTGIDKQGGNKELRAALYQGALSVIYKLPDEPRTVKEAWLIELVKRAGVKRTCIALANKTVRTAWALLSTGKSYEPALLGRP

SEQ ID NO: 57217 - protein, 457 aa, unidentified
MARHSSRSTRQRDKLQVVHPNAAAIDIGSRFHVVAIPPDRDPQPVRRFDTFTGDLRRLADWLAEKNIVTIAMESTGVYWIPVYELLEERGFDVILVNAREAKNVPGRKTDINDAQWLQRLHSYGLLRGSFRPTQELASLRALLRQRERLLEYCASHIQHMQKALMEMNLQLHHVVSDITGKTGMRILRAIVQGQHDSAVLASFRDPRCKASEETIRQSLEGHYREEHLLTLRQSLALYDTYHEHVAECDQLIEATLKRLSLATPAPEGSLPDARHRDANPNAPAFDVRHSLFQVLGIDLTQIHGLGPYLVLKLISECGTDMSRWPTVKHFTSWLALSPGSKISGGKVLSSRTRRTKNRAAALLRLAATTIGRSQTGLGAFYRRLASRLGKAKAVTATARKIAVLFYNVLRYGWVYQDPGADYYEERYHQRIVRNLQRRAQSLGFELAPITDPSQRVS

SEQ ID NO: 57218 - protein, 346 aa, unidentified
MTIVEDARAITGGVDTHADTHVAAALDRLGGLLGVREFPATAAGYAGLLGWLGGFGTVALVGVEGTGSYGAGLARHLAAAGVRVVEVDRADRQDRHRAGKSDPLDAVSAARAAQSGRAAGAPKGRDGAVEAIRALMVAKRSARAERTQAINQARALIVTGPDELRARFARHTPAQLVAGLAALRPRPGEVPGYATRVALRELGRRARFLDAQIEQLDELIVPLVTSRAPGLLALHGVGPDTAALLLIAAGDHPGRLRSEAAWAHLCGAAPIPASSGKVTRRRLNRGGNREANHALWRIVITRMGFHPATRAYVARRSKEGLSKKEIIRCLKRYVAREVYPHLRPAR

SEQ ID NO: 57219 - protein, 320 aa, unidentified
MGEPYNVGIDVSIDRLDVAIRPGGRAFCVTNDAAGWAELVARLPRGTIAAIGLEPSGGYERGVVRALLAAGLSVRRINPNKLRQFARAAGALAKNDRIDARLIADYVTVMPTRVVERNPDVERLAETVTMRRQLCDEHIAVESQASHLEDALLQRMAKRRLIRIKADIALLNKRLAELVAAQPELAGRFRLLCSMPGVGATLAYTLLALMPELGQIGRKQIAALVGLAPYDFDSGRFRGQRHIYGGRLGVRYTLYMPALAAIRFNPALRAFHRRLVAAGKKPKVAIVAVMRKMLTTLNAILRDGDSWIDGHSGRHTVPAI

SEQ ID NO: 57220 - protein, 316 aa, unidentified
MGPSPLSVGIDVSKATLDIAVRPTAETWSVSNDASGLDALVLRLGAWAPTLIVLEAPGGSQGPLVAALVAAALPVVVVNPRHLRALAQAVGLLANTDRLDARVIAPCAEAVKPAPRPLPDAETPELRALLVRRRQLVEMVSAERARLDTVPPSIQDASQAHIAWLTTQIAGLDDALTRASQTPPVWPAKDDVWQSIPGVGPVLARTMLGQGPELGTLGPKPLAALIGVAPVNRDSGTLRGRRPVYGGRAEVRAVLYMGALVATRHNPVIKAFYKRLLAAGTAKQVALTACMHQLLTIMNAMVRDLKPWQPQEVPSA

SEQ ID NO: 57221 - protein, 479 aa, unidentified
MEQEEAGQPPPRRLVGIDLGIASRHSVRVLEADGRVVCRSSCVPTVESLGRLEQAALAGAPEGTRLVVVFEPTGPAWLPIAVFFAQRGHAVHRVSSAKAADLRRFLRRHAKSNGIDAETLARIPLADPGGLQPLELPGTAAAALDRRVRACARLTQAAAEHKTRIKDLVRQLMPVTPLTGDIGQADLEVLEHYSDPRALLAAGLAELTQMITAASHHQQGHDRARQWRDAAAAAVELYQDHPAVPFAELAAEVATEIRLLRAIQTELAAHAAARERHYMQADPGQLARSLPGFAEISAPVLVAAIGRPGRFRDGTKFKSYVGLAPKASETGETDRKGQSMSKAGPSLLRATFYRAADTARRQDPQLARIYYVQMTERGATHLKACCIVAGHLAERAWAVLNRGTPYEICDNQGNPVTPAEAKKIIADRWTVPEEIRKRRRNRKIAGKAPQPPLTRPDTRGDLPRPRSSRPHAKAVNPAT

SEQ ID NO: 57222 - protein, 311 aa, unidentified
MCLYVGIDISKAHADVHVRPSGRSARFGNDAEGWGQLLQWLGDDVGSGRVVLEASGGYERALARRLLGTGLKVSVVNPRQVRDFARASGRLAKTDRLDAAVLAHYAEVFTPRTLSLPTAAEQALAEFSALRTSIVAQIGALSRQLEHHDMPEVVRITKRMIAVLKAKQALLERRIAETMAGEPVLRDKAARLLSVPGIGPVVATTLITQLPELGTTDRRRIAALVGVAPINRDSGFMRGRRTIAGGRSAVRRDLFLATMSAIRCNDALRAHYQKLVKAGCKKKVAIVACMRKFIVMLNAMIRDGTPWKSPA

SEQ ID NO: 57223 - protein, 358 aa, unidentified
MTTTATAADTILALDLGKYKSVACVSYSALDHRFTRLATSRDELARLIDKHRPAVVLIEACLLAGWVCDLCGQLGVVCRVANTASEAWKFKHLKRKTDRDDALRLAEIYRLGKFPAVTIPAKEVRERRALIETRQKLVGRRVALQNRIRAVFVGQGMAAPRGARAWTHLGLAGMAAHARPLADCGPDELWRGRLHLALAELAHVQGLLAQADHKLDELARSDAGTRLLQTIPGVGPRTAEAVTAFLPRPELFRTTKQVSAYGGFVPRQYQSTDTDHKGRITKRGPRTLRKLLVECAWVMLRYNAWARAVYGRLTHGGQTRKKQAIVAVARKLLVRCWAMLRDGTVWRDEALAAAKAAT

SEQ ID NO: 57224 - protein, 394 aa, unidentified
MKLVGIDVGKNSHHFCVMDKETGELNVTLSSFPNNKEGFDFLINSLKPYSKKSILIGMEDTGHYHVALLKFLLSNGYTVALINPKTTDLTRKMEGGITKNDKLDTITICDVLDTPERKKQYRITKVDRFDLYEQRQLTRHHHNLKEELNVYCNRLQKSIDLVFPEFNTLFSSKYGVVYMNLLKTFGSAEAIASTDIRTIRKCFEIKGRGGRISLTAEKLKECAKNSIGISSEVETIQIKHLVRQITLIKEQIAEIDKKIEEFSITNNSPILSIPGISHFSGTSILAELGDIGNYSKPSQIIKFAGVAPYHYESSQYNAQHTAITKKGSKYLRKTLYQIILPVINNNPVFKKYYRLKISQGKGHRCAQGHCIRKLLRIIYHLLETGQSFDPALLR

SEQ ID NO: 57225 - protein, 361 aa, unidentified
MHATTVAVDLAKSVFQLAVADATWKVVESHRLTRAQFERWFQNRDVTLVIMEACGSAHHWARWINGLGIEVKLLPAAYVRAYVKRNKTDAADACALLEAARASDIVPVRVKSVEQQALQGLHRTRSLWMSTRTSRINALRGFCREFGLAIPQGARTGVEAISRVLADPNSPVPGLIRGSMKLLVEEIRLLEARIAQLERELSVVAKHSPACTTLLMIPGVGLLTATAMVATTGGQVSHFKDARHFASWFGLTPREFSSGSRQVLGRISKRGDRYLRMLLTHGARSVLRAATVARRAGKKIDGLRTWATTVEGRTNHNKAACALANKLARICYATLRDATPYGQPAPRQQRKIARKAFAVAV

SEQ ID NO: 57226 - protein, 342 aa, unidentified
MQITTIGLDIAKNVFQIHGIDAAEKVVVRKQLRRGQVLAFFKALAPCLVGMEACATAHYWARELTKLGHQVRLMPAKDVKAYVKRNKNDAADAEAICEAVRRPTMRFVQVKSAEQQSQLMLHRTRDLLIRQRTQVINALRAHLGELGITAAQGQAGLRELLAIIAGSADERLPAEAHASLIVLAAELQAMQTLIASIEKRIIAHHRLDEASKRLRSIPGIGLVGATAIAATVTDPRAFRSGRDLAAWIGLVPRQDSTGGKQKLGPISKQGDRYLRRILVVGAHAVLKLARQKPEKYPWLTQLLARKPFKIVAVALANKMARIAWALLVKGGPYRARALVAAA

SEQ ID NO: 57227 - protein, 364 aa, unidentified
MGFSTILGLDLGKFKSVCCVMNVSTHAQTFETIQTTPQGLHDLLTLHIAAAAAAAAEPAGVWLVIETCDTAGWVHDLATSLGVSCTVVHTIGDERWRWRKVKRKTDKDDAIKLARLALLDELPPAVHMPDARQRQKRRLMLHRRSVVTRRTRSRNAIRSIFNQQGLQLVKGNKQWTKNGLAQLNADARPIEDCGDEDLWRGRLHVELELMASTDAQLKALDKKLDALADDRMILLQSIKGVGPRLAEAVVLHLDDPHRFKSGEQVASFAGLVPKQLQSGQTLRLGHITGRGPALLRSLLVESAWVVWRLNDWAQAFVEKVSRGGKGRRKLAIVALARKLLIILWAMLKTNQPFRAPGVRAATTT

SEQ ID NO: 57228 - protein, 350 aa, unidentified
MLIIGCDYHPGFEQIAFVDTDSGEYQEQRLPHREEAEKFYRDLAAQGRKVRVGMEASGHARWFERLLAELNFELWMGDAAKIRAKRVRKKKTDREDARHILKLMLKDDFPKIWVPSWDNRDLRQLLWHRHRMVQMRTRIMNQLQAVALNEGLRCKKRLWREKGRQQLESMRLATWATRRRHDLLELLDRLNPTITELTQLIEQEAEKYPAAQRLMTHPGVGALTALAFMLIIGETERFGCSKQIAAYLGLVPEEDSSGESRRLGHISKQGSGLMRFFLVEAAQVTVRSDPEWRNKFFHLAMRRGRKIAKVAMARRLAVRLYWMWRKQWDYEQLKKFSPHAGQPGPGVGVK

SEQ ID NO: 57229 - protein, 362 aa, unidentified
MEFFCGLDVAMDETAVCVVDDHGAVHLETTAVTDPDALFAVLKPFLPRMRRVGHEAGSLSPWLHPELKKLGLPAVCLETQHVRAAMSAQRNKTDKADALGIAHIMRTGWFRQAHIKSESCYRTKLLLTHRRNLKAKFLDLENAIRHSLKAFGIRLGKVGRGTFDQAVRTAVAEDPLSSELMDAMLSARAALWRQYCRLHDLVVKMVARSELCRRFMAIPGVGPVTALSFMTAIDDPSRFRRSRDVAAYFGLTSRRWQSGTSIDVQGRISKAGDADVRRSLYEAASGLMTRFKGRDKVKSWGQAIAKRSCHRKACVAVARKLAVIMHAMWSDGTFYVGDSAVSRSDAARRAHIKDRRLLGAHR

SEQ ID NO: 57230 - protein, 381 aa, unidentified
MTTKATRNTQAKTSEGPLFMAFELSEKTWKLGFTTGPGQKPRERNMTARDHERVLDEIAHAKRRLGLPETAPVVSCYEAGREGFWLHRFLEAHGITNQVVDSSAIEVSRRQRRAKSDGLDVRKLLRMLIRYHEGERQVWQVVHVPSVEAEDQRHLHRDLETLKQERGDTTRRIKGLLSSQGLRVKNLTRLPEQLDALRLWDGSPIPPGVRQRVLRVYAHHQFLGEQIAAVEAERGTQLQDANDASIEKVRQLMLLKGIGINGAWLLVMEFFGWRAFKNRREVGGLAGLTPTPYQSGDSAREQGITKSGNRHVRWMTTELAWSWLRFQPDSALSVWFRERYGSGGKRLRRIGIVAVARKLLIALWRFLETGALPEGAALKMR

SEQ ID NO: 57231 - protein, 387 aa, unidentified
MTRVVISMDPHKRSVTIEVMAPDESVLGGGRYGTDEPGYGALLRAAKQWPDRVWAIEGCSGIGRHVAVRLVADGEQVVDVPPKLSARARVFSTGQGRKTDATDAHSIALVGTRMAGLRPVVDDQQLAVLRVLADRRRALGEDHTRMVAQLHHLLLELIPGGAKKDLSAAQAKALLAKVRPRDLAGKTRRRVAAELITDLERIYARKKAADKELRELITDTGTSLLTLNGIGPSGAARLLVDVGDITRFPTKGHFASWNGTAPLDASSGDRVRHRLSRAGNRQINRTLHIMATVQLRNPTEGRAYYDRKKAAGKTSMEAMRCLKRRLSDVVYRAMVNDAVEAMTGPGGHRGTSTEPSVAGSHPHTGSSDQSLPGPATAEPTTALPAAS

SEQ ID NO: 57232 - protein, 360 aa, unidentified
MTKARSLVGLDVHAAKIVAVVLDAETGQLQTFAMSGESAGAAGFCAGLPRPARVAYEAGPTGYGLARELAKRGVECVVAAPSKIPRASGDRVKTDRRDAELLARLLMAGKLHPVRVPGDEEEALRDLVRAREAVRVDLMRCRHRLSKLLLRHGIRFDDGAAWTQRHHDWLATVTLDWPAAQATLLDARGAIDALTHRREQLEQGIIAMIPDSPWSVQVGRLRCLRGIDTLTAVGLCAEIGDFERFARAEQLMSYVGLVPCENTTGQQRRLGSITKTGSGHARRLLVEAAWHYRVRPSVGRALTDRQQDQPAEAIAVAWSAQQRLHRTWRRLEARAKRRTIIAVAAARELAGFAWAITQIE

SEQ ID NO: 57233 - protein, 358 aa, unidentified
MRIIGCDLHARQQRIAMLNTETGEVVEKILRHEADKVREFYASLPGQVRVGIEATGSMHWFLKLMEELGIDCQVGHPAKIRAAEPRKQKHDRRDAALQLKLLVENRFPSIWMPPTEQRDLRVLLLHRHQWVRMRTRVQNTLQAIALSSGLRRGSTLWSQAGQHAIASLPLTPNAAHRRTQLQTLYRKLDRQIGKLDERVRDQALRRPGAKLLMTHPGVGAVTALATDMFLGDPTRFANGKALASYVGMIPSEHSSGGRQRLGQLSKQGSPLLRFLWGEAAMHAVHQDPGLKHFYRHKLQQKGLGKARVAAARKLGIRLYIMLRDQIDYEEFCRRGQLRQKCGSAHAGMSDRNHGPAVQ

SEQ ID NO: 57234 - protein, 417 aa, unidentified
MKKHNNSRKKSEQPSKRAKARGPVQRDTKEVLAELVGKLKEKLDPKKVTATSGEKHQQGELRPNFDRLTVGVDLGDQWSHYCILGLEGETLAEGQLRTTPQDVAEFFEALNAARVVVEVGTHSAWVQEVIRGYGHEVLVANPRLMEGSKRRKRKNDRIDANKLARLGRVDPQSLHPIEHRSPEVRQDLVLLRARDALVAARTELINATRGLVKSMGTRLPKCSSPSFAQTVEEAVPTQIREALLPLVRMTAGLSDGIQGYDEKIEKLASEKYGHTALLRQVKGVGPITSLAYVLTLENPRRFVKSRDVGPYLGLVPKQEDSGESQPQLGISKAGDTMVRRLLVGSAHYILGPFGPDTDLRRYGLRLCECGGKNAKKRAAVAVARKLAVLLHRLWVSGEVYEPLRQGRSATTAHAVAA

SEQ ID NO: 57235 - protein, 347 aa, unidentified
MVHVGLDLSRTGLDVHVMDEAGTPLAVTTAVPDNGGLAVLAERIRGLGDGPVCVAIESMNGARFVHDQLELAGWQVEIADAQKVKGLAPLACKTDKIDAWVLAELCRRDLVPAIWLPSPTVRAERERARWRLHLVRHRTALKNRIHATLLTFGHPCPVSDLFGVGGRQLLARLELPEPWAGDVAAALHLIDELDHQIIESERALRRMGADHRYVPLLMTAPGVGWVLGYTIAAEIGDISRFASPTKLAGYTGPCPRVYQSGGKDHRGPLARNGPKYLRWALIEAATHAARHPVYAQRYRRTKARLGRQRGPKVAQVDLARRLSEAIWHMLSTNRPFAPAGAAESLAS

SEQ ID NO: 57236 - protein, 349 aa, unidentified
MAEQRISSTGERIDVGIDVHKETYTVTCLCQRQMVKTATVPADPVRLAASLPRWFPGARIFSAYEAGFSGFVLHRVLTTAGITNIVVNPASVAVAANDKVKTDRRDAKKLARDLADGRLRGIYVPTTAEELARLLPRTRAQLVAHRATITRQIKAKLHQFGLIPPGSRRLMSRRYLREIAAWALPPELHVSLTLLADQWRFATRQLLEIRRLLREQAKAQAALETVYRSVPGIGEVVARTLATELGDMTRFANERALLSYTGLTPSEDSSGASMRRGHISRQGVSRLRHVLVETAWRALPGDPLLHAMFERIAATRGKQRAIVAIARRLIGRIRACFRHGTTYAVGTAG

SEQ ID NO: 57237 - protein, 339 aa, unidentified
MNHTTVGVDIAKNVMQLHYIDAETGEIVNKPVKRAAFLEHFANRAPCLIGTEACGGSQHWARKLTAMGHLVKLMPGKFVKAFVMGNKNDSADARAIWMAAQQSGKSVAVKTETQQAVLGLHRMREQLVKFRTMQINSLRGLLTEYGEVMAKGRAALDKAIPDMLERLVDRLPTILIDTLREQWNGLAELDKQIAQIERRLQAWMKEDKACKAIAAIPGIGLLTATAAVATMGDAKAFRSGREFAAWIGLVPRQTGSGGKVRLHGISKRGDTYLRKLLIHGARSVLFHSKKPGSWLEQIRERRPMNVTVVAQANKMARTIWAIMAHDRPYESGYVSAKPV

SEQ ID NO: 57238 - protein, 343 aa, unidentified
MAEVTFPQLVQRACGIDVHLKVVVATIDGVGLERETRSFKTFTSSLNELKEWLLSNGVTHVAMESTGVYWKPVYKILEDSIPNVWIVNARHIKNVPGHKTDKMDSEWICKLLLAGLLKPSYIPPKEQRQLRDLTRYRNKLIQQIASEKNRMMRILEDCNIKLSSVVSNTSGSTATSLIDMLCEGKKLTLDDIKSVYHGKLSAVPEELLEACTGFVEEHHIYLLQMIRKDIDQTQILVDKLSQRIKTLLSKYENVLELLKEIPGFSTKVVEDLVSEIGLDMSHFPSEKHLSSWAGLSPGNNESAGKKKSARITHGNKSKGGDNRSRMGLRPVPRIRFSVSDTIA

SEQ ID NO: 57239 - protein, 342 aa, unidentified
MGVVIGVDSHKRTHTVVALDAVGRRLGQRTVAATADGHLALLGWAASWPGARFAVEDCRHLTRRLESDLLAAGRRVIRVPAQLTAEVRRGARQPGKSDPIDAEAVALAAIRHADLPVAVLDGPARQVRLLVDHRRDLVEERARVVNRLRWHLHELDPSLEIPTRGLRRYCIQDQLEAWLAPLDGVVARIARELLVRIRQLTRQANELEREITLLVRELAPSLLQLPGCAALCAATIVGQTAGAARFRSAAAYARFTGTAPIPIWSGHPRVRLNRGGNRTINTTLHLIAVTQARGVGPGHAYVQRILARGKTRTEAMRLLRRRLSDAAYRALLTDERRHNTPT

SEQ ID NO: 57240 - protein, 394 aa, unidentified
MKLVGIDVGKNSHHFCVMDKETGEFNVTPTSFSNNKEGFDFLINSLKPYSKKSILIGMEDTGHYHVALLKFLLSNGYTVALINPKTTDLTRKMEGGITKNDKLDTITICDVLDTPERKKQYRITKVDRFDLYEQRQLTRHHHNLKEELNVYCNRLQKSIDLVFPEFNTLFSSKYSIVYMNLLKTFGSAEAIASTDIRTIRKCFEIKGRGNRISLTPEKLKECAKNSIGISSEVETIQIKHLVSQITLIKEQIAEIDKKIEEFSITNNSPILSIPGISHFSGTSILAELGDIGNYSKPSQIIKFAGVAPYHYESSQYNAQHTGITKKGSKYLRKTLYQIILPVINNNPVFKKYYLLKISQGKGHRCAQGHCIRKLLRIIYNLLETGQSFDPALLR

SEQ ID NO: 57241 - protein, 355 aa, unidentified
MDSKKYIGMDVHKESISIAVMNGAGKIVMECVIETKASMILQFFDGLRGDLQVTFEEGTSAAWLYDLLKPHVSKVVVCDPRKNASMKEGNRSDKIDARRLAELLRLNHLNPVYHGEHGLRSLKELVRSYLTITKDLGRVMSRVKAIYRSWAIPCTGKQVYAPRHRAEWLGKITEPGVRRRAEFYYQQLDALRTVRQEVRRELLAEGKKHQSWKRLCQIPSIGPIRAAVLLGILQTPHRFRTKRQLWTYSGFGIETHSSADHRNVDGQLQRAKKPVSIRGLNRNCNHDLKNLFKGAAIVASSKPGPFQEFYTALLTKGIRPEMARLTLARKIATIVLMVWKRGVCFDAQHLKPQTA

SEQ ID NO: 57242 - protein, 347 aa, unidentified
MKRYVGLDVSQDACAMCILEEDGACVFEGVCPTDPDAILQAISDHAGAVERIVHESGPLSIWLSRELAVRGAPVVCIDARAANKALSARMNKSDRSDAEALAQLARAGWYREVHIKSEDSDRLRLLLSARDRLIRIRMDIEGQTRGILKTFGIRLGPVRAGRSRRSFRDQLEEIVSGDPILEAVFACLIATHKIVCIEATKLDAEIQANAKQSALARRLTTVPGVGPIIALSFIATIDDPARFRRAVDVGAYLGLTPRRYQSGKTDWSGRISKRGDSAMRKLLYEAANILIQRVTRFSPLKSWAMRLVQRKGLKKATVATARKLAVILTRLWRDGTTFAWTKEELPA

SEQ ID NO: 57243 - protein, 403 aa, unidentified
MNNVAGIDVSKGKSMVSVLRPFGEVVAKPFSIGHTGSELKELADYLKSLDGETRVVMEHTGRYYEPVARFLHEEGVFVSAVNPKLIKDYGNNTLRKVKTDKADARKIARYGLDNWAELRQHTPMDTIRMQLKTLNRQQSLYSKTKTMMKNNLIALLDQTYPGVNALFDSPVREDGSQKWVDFATAFWHVDCVRNMSLTAFAERYRKWCKRHGYNFSQSKAVEVHTGAQDLIAMLPKDALTKTMVRQAIDALNAVSASLERLKAEMQALAAQLPEYPVVMAMHGVGDSLGPQLMAELGDVARFTHRNAITAFAGVDPGADQSGTHEAKSTRVSKSGPPELRRALFLVMDCLLKTQPQDDPVYRFMDKKRAEGKPYLVYMTAGANKFLRIYYGRVKEYLASLEEN

SEQ ID NO: 57244 - protein, 428 aa, unidentified
MYKVDRIRVERFRQLKAEIRGSQEYLIVGIDVAKDKHNAFFGTATGKTLLKRLVFGNNMEGFYKLLTFVEAVKVKHGLSKEVFGLEPTANYHKPLGEYLIKCGLDVVLVSGLAVKRNRELLDGRWDKHDTKDSANVADLVSQGKCLYYDYPCMPLRDLRDLLSLRRRLKKREHGARVRIRNHLFAQYFPELDRHYARSGSEGSAIVRWCLAPSVIAGLEYDDFVGLVAPGKKRMGQQRRLRAIWHSAVDSIGCDAGESLEFEAQMMVQELQHTKEAIRLIDDKIEEICLQFPEYSCLLTIPGFGPDVSAKVLGAIGNPFRFDTGKQALKLAGMDLSANRSGKKSQGSIPVLSKKGKAELRYALYQAALIASSKNTNFVIYYTNKLRGREKEKGIKTKMRVKLAAKMLIIAWTLMKKQEPFNPEYLNLQ

SEQ ID NO: 57245 - protein, 315 aa, unidentified
MTKHLPPVNVGVDVGKNQLDLYLIERDRALTVPNEEQAILVLVRSLSRYRVERIVVEATGRLEQPFVRAALAAGLPVIVVSPLKIRRFADVIGQLAKTDQIDARLIAQFAATVKPLPRPASDANAQAIKDLVVRRRQLTSLRTMEKNRRQVMPNDLKPSFDRILKALDRELKSLEQLINLAIDQHASSRHKRELLTSMPGIGNCVAATLIGDLPELGSLDRRQIASLTGVAPFNRDSGTLRGKRRIRGGRAHSRTALFLSAMVATRFNPDIKRFYQRLLTAGKHKKVALTACIRKIVTALNAMLRDNLPWRSAIA

SEQ ID NO: 57246 - protein, 412 aa, unidentified
MTATNQFAAHVGLDWADKKHDVCVQFKNGERVFHVIEHTAEALDVWLTELHQKVKGRIAIALELKKGPVVYALQKYPFITVFPVHALSLARYRQAFSPSGAKDDPQDAELALELMLRYPQKIKAIEPDNADIRLLQQLVEQRRQLVEDKRRFVNRLINTLKQYYPQPLEWFSHRGSLLLCELIMRWPSLQQLKRARHDTNRNFLNAKGGRAMALTEQRVVSIDNSIPLTTDPSVIEANALMATALATQIKVVSEIIKTYDERIETLFNSLPDAGLFKSLPGMGPCMGPRMLAALGDNRDRFNSAEEIQNYAGIAPVTERSGQKSWVHWRWQCAKFVRQTFVEWTAKTVNSSYWARLYYQGQREKGKSHQSAIRALAFKWIRIIYRCWKTRTRYDEAKYLLALEARKSPLLKP

SEQ ID NO: 57247 - protein, 361 aa, unidentified
MKKDYHGRRILATGTDVNIGIDVHKESWHVTVMSEGEEIFHGRMPSSYQAFKRFLARFKNCRIRVAYEAGPCGFWLYDKLMADGVKTIVTPPSLIPMESGNKVKTDKKDSRKLANLLGKGMLKEVHVLSAKERSEREIVRTRRQLVGHCSDVARQIKSKLLFNGIQYSASGRERWTKGYIKWLRELSCKEESLKISLMSLLDLYEYLSQQIKKISKELVALSQMERYRARVALVRSVPGIGLLNAMELLVELQEIGRFKSARELASYTGLTPSEYSTGQHIRQGGITRCGNKRVRAALVESSWILVGKDPYMRCKYTKLKNRKGGKRAIVAIARNLVVRLRKMLITNEPYRIGMQVKVVNP

SEQ ID NO: 57248 - protein, 452 aa, unidentified
MLAMMAPQEIEDEEYEQVVERVAAVDVAKGSGMVCTRVPHPARPGKRQTRVWEVEATTGAVMELADHLAAGRIGKVTLESTSDYWRIWFYLLEAAGLEVQLVNARDVTNVPGRPKSDKLDCVWQAKLTERGMLRPSFVPPAEIRALRDYTRLRTDLTRERTRHWSRLEKLLEDALIKVTSVASKIGSLSVRDMLEALIAGQRDPEVLAGLARGKMRAKHDRLVEALTGRFDDHHAELARVLLDQIDALTVHIDKITGRVEELIQAIPGSWGVDADGVTGPGAGLGPGAPVLPAVARLDQVTGIGAPAAQVIIAEVGLEMSVFPTAGHLVSWAKLSPRTIQSGAKNRPGRTGKGNPYLKGVLGEAAAAAGRTATFLGERYRRIARRRGKLRALVAVARAILVIVWHLLADPAARFCELGPGYYASRIDTDRKTRNHVRQLEALGYAVTLAHAA

SEQ ID NO: 57249 - protein, 417 aa, unidentified
MKNLLRILEYVGMMCWLVRASLDSYEVGVKIGSDIAAIKMLHRERMEECRVEPMQEVVEMIYIGIDVHKKFCVACIKDRDGAVLAQLKFPNNSKGIDKLLELVDGRPAKAVVESTGNLWLRLYITLEEVGVEVILSNPSKTKAIAEARLKNDKVDASILADLLRANLVAQCYVPPSSVRELREILRVRMNLVKDRTRVKNRIHALLDRYEPPKFEGTDMFGKGGMKWLRGIELTSTDSFVLNTYTNQIEFLNGLVQDLERAIAQVAVDDEDCQLLMTIPGISFYTAMMVSSEIGDIERFPSSNKLVSWLGLAPRVRQSGNTLHHGHITKMGSPRVRGVLVQAAHTAVRYDNHFRSKYERIGARRGKGKAIVAVARELAVACFHMLKRREPYKFMDIGLVRRKYKRMESVAKSTLCIG

SEQ ID NO: 57250 - protein, 392 aa, unidentified
MKGYDVIVGVDVGKSFHHMRAIDKMGQDLANRQIGQHEARLIEAFAEMGAHGSVLVVVDQPNNIGSLAIASARKAGCDVAYLPGLAMRRAAGMLPGDAKTDELDAYVIAMTARSMPQALRAVAEESELRADLIALASCDDDARCDMTREINRLRAHLVEAHPAFEQALGDNADSMFAMRLLQRFGGPWGMKRAGKGAVMRWVRSQKRPAMKLLERLLTSLGEMAEAPPGAALREEISIPACARRIAELASVRRDNVRRAKELLKDCPTYHLLSSMPGVGIKTAVAFVIHVDIALFDSASKLASYAGIAPRTRQSGTSIKGESAGRAGNKALKNALFLSAFASIRSDPLAREYYDRKRAEGKKHNAAVICLARRRLKIMFAIVRDQKPYCAAA

SEQ ID NO: 57251 - protein, 355 aa, unidentified
MPSKTDTAVARTIGIDTGKNTLHMIGLDEKGAIVLREKVSRIRIAARFVNVPPCLIGIEAGMASHHIARELTALGHEVKQVPPAYSKPFRQGHKNDFRDAHAVAEAVERPSTLCVPIKTDGQLDLQALHRVRSRLVGNRTAVINQIRGFLLEHGIPVRQGHRFLRQQLPQILATRADVLSPRMIRIIGDLIEDWRYLDERIETVTDEIEALARADEGCQQLITVPGVGPIISSAMVAAIGNGAAFCKGRDFAAWLGLVPKQMSTGDRTILGRITKRGNRYLRTLFIQGARAVLLHPTSWARHSFGPWLTTAARRMHRNVLTVALANKLARIAWTVLAQGRRYEARVEPRIEPAAA

SEQ ID NO: 57252 - protein, 320 aa, unidentified
MMAQNEVIVVGIDVAKDKVDACIRSLSLRQTCPSTAQGHRKLMAWLRKHKVTKAVMEASGGYERAWAKVLREAGIEVRIVDPRRVRSFAQSAGRLAKNDAIDAEMIAWFAETFSEAPSQVHDAAREELQILVKARLGLIDYRMRLVSQSEHAAPGLVQKAHAHILKSLASEIAKLEAAICAKVRSTPDFAERAEIIESVPGLAGTSAANLVAGMPELGQVSDGIAAALIGAAPYDDDSGKRRGERHIKGGRRWVRNALYMPCVGAATQNNPVLKAYYQRLLAKGKEPKVALVACMRKLIVILNTMIARRQKWDSSRDAVS

SEQ ID NO: 57253 - protein, 344 aa, unidentified
MSNLDTCGIEISAQQLVVRLRRQGDLEPLRTFTNTPEGREMVLRCLRHAGRVVRVCLESSGLYGLDLALALSAAPGIEVMVANPRAVRHFAMALMKRSKSDPLDAGVLEEFAARMPFRVWKRPSARALGLHALARRLHELVEIQTAEKSRRHAAGLSETTPAVVRRDLARSLRAQERAIERLTRQARKLIAQDPELTERFELLDSVPGIGETSAVQLLGELAVLAPDLDARQWVAYAGLDPREHTSGTSVHKKPRISKSGNAHLRHALFMPALVAVQHDPYLGGFYQHLLAKGKFKMQALVAVMRKLLHAFHAMFKNHQPYDGSKLFRIPSIPAQEVPRAAVAC

SEQ ID NO: 57254 - protein, 364 aa, unidentified
MTKYTFWVGFDDDAKAIDVAVYREFEEAPYRETRFGRDDRGLGRLVKMLRELPGQVRCVYEAGPCGYALQRYLSARAIACEVAAPSKTPRRPGDRVKTNRADARKLAKLYRSNELTMVAVPDEAQEALRDLMRARGDVREDVLRWRHRVSKLLLRYGHRYEKTAWTLSHLRWIDTIRLAEEKTQAVLDEYKAGLRIALEQLARFDERVAAAAREPVHAPFVASMSALRGISTIGSMTLRAEFGDLKRFHDASALMAATGLVPSEFSTGDSRRQGSITKTGNAHVRHVLVEGAWQYRHRPSLRSKVSKRRKQLANPQVIAIAEKADVRLFRKYWKLVNRGKRSTVAAVAAARELAGFIWAVGQTL

SEQ ID NO: 57255 - protein, 379 aa, unidentified
MRTVCGLDVHKDSVFVCIINENSVLFQEKFGVLTPDLEHMVEVLHEYEVTEVCMESTSIYWIPVWRVLDPYFCLKLVNPYFIKQLPGKKSDVKDAEWIATCLLKDLIRGSYVPEDRIQQLRQYDRRIFDLSKEIVYKLTKLDAALQRCNIRISNYVSTTDGKSYKSVVEKIASGETDPETLTKLIHGRTINRVGREIITASLSGVITQVDIDVIHQMNEEVKLAQKHKDECLAKMEELCNMWFPDQMENLQTIPGVKVRSATSIIAELGTDMSSFQDAAHLVSWSGLKPRNEESAGKIKSRKITHGNKYLRQTLIECSWAASHKQGCFYNKFSYHQTVVRHKNKLKVQVAIARKMLTAIWFILHNNVAYKDYTPDIVAE

SEQ ID NO: 57256 - protein, 339 aa, unidentified
MELYSGIDLHANNHVVGIVDEKGKRVMKQKLVNDPELTLNLLEPYRAELVGIVVESTYNWYWLVDTLMDHEYQVHLANPSAIQQYSGLKYLDDDHDAFWLANLLRLGTLKEGYIYPKQERPLRDLLRKRWHLVKLRTSLVISLKNIMARNFGIRWSASRIKGQSLDSIVSPLPQEDNVALVIRTSKASIDFLTVQIEQVESSVLKQAKEKPSYDKLLSLPGVGKILGLTIQLETGSVSRFQKVGHYASYCRKVESRWLSNEKIKGRGNPKNGNKYLAWAFSEAAEHARRSDPASRTFYNRKLSQSNAAVAHSALAHKLARAAYYIMRDNVAFEEARMFA

SEQ ID NO: 57257 - protein, 392 aa, unidentified
MIYVGIDVASQKHDCFLLKDTGEVFSKTSFTIKNDFEGYKKLHNSILQFVESTKDSNVRIGLESTGHYSKNILLYLIKQGYQTTLINPILTNMDRKASTVRKTKTDKIDAEAICKFLDKNRFDFKPYTLLSYHIDALKSLTRQRFSLVKQMTQQKLIFQRLVNVIFPELLSHFSNDYGESVLNILYSYPTPKKLAKAHKESITKLLHSRCKITSSEILELAKNSIGQSEEYLGFELKHTIDMILFYQSQIEIYNKQIEIELNETEYGKIITSIPGVGIITGAMIISEIGDINNFTTLDQLLAYAGLDPSVYESGKFESSHNKPSKRGSKYLRWAIHQASSVIWQHDNTFKDYYLKKIKESKHHYVAIGHIDKKLIRVIFSLLKNKSMFIPQK

SEQ ID NO: 57258 - protein, 412 aa, unidentified
MTETNQFAAHVGLDWADKKHDVCVQFKNGERTFHVIEHTPEALDVWLTELHQKVKGRIAIAVELKKGPVVYALQKYPFITVFPVHALSLARYRQAFSPSGAKDDPQDAELALELMLRYPQKIKAIEPDNADIRLLQQLVEQRRQLVEDKRRFVNRLINTLKQYYPQPLEWFSHRGSLLLCELIMRWPSLQQLKRARRDTIRNFLNAKGGRAMALTEQRVVSIDNAIPLTTDPSVIEANALMATALATQIKVVSEIIKTYDERIETLFDTLPDAGLFKSLPGMGPCMGPRMLAALGDNRDRFNSAEEIQNYAGIAPVTERSGQKSWVHWRWQCAKFVRQTFVEWAAKTVNSSYWARLYYQGQREKGKSHQSAIRALAFKWIRIIYRCWKTKTRYDEAKYLLALEARHSPLLKP

SEQ ID NO: 57259 - protein, 353 aa, unidentified
MANPMANLTIGVDLGDRYSELYGVDAAGACVETGRIRTTVAGLEQWLGGRPPARVVVEAGTHSPWASRVLQRLGHEVLVANPRKLRGLYENDSKDDRVDAEYLARVGRLDPALLKPITHRGEAAQADLAVLSSRDVLVRARTLLINHTRGVVKALGGRLPRCSAEAFARRVGPHVPPAVRPALAPVLEQLQQLTTTIRGFDRAVEHRCAQSYPETARLRQVTGVGPVTALAYVVVLDDPTRFRRSRAVGAYLGLRPRRSQSGEQDPQLRITKAGNPFLRRLVVQAAHYILGPHGPDCDLRRHGERIAARGGKNAKKRAVIAVARKLAVLLHHLWISGAVYEPLRHRPALAQAS

SEQ ID NO: 57260 - protein, 312 aa, unidentified
MDILHTAPHRCFGIDVAKDNLVVSDGGACVTIPNNRRGIRAFLKERQPDFIICEPTGGYELILLEECLGAGLACHRADVMKLKAYIRSMGTLGKSDAIDARHMAIYGRERWASLPLWREPDPDEARLQAFVRRRADLVALKVAEQNRSKAGGAKALAASFKAMLGVIQRQIDGLEKQIAALVENSARLRRRIDICMTVSGVGFLSAASLLAQIPELGSMDRRQAAALAGTAPHPSESGNANGRRRQRGGRPQVKTTLFMPAMCAAQGKGQFAPFYKRLIQNGKPPIVAVAATMRKIIITINARIRDHQEQQS

SEQ ID NO: 57261 - protein, 384 aa, unidentified
MLTDQAYTGSGDGLVLAVSLELAAAKWKVALHDGRRDKPAVHTVAEPQAAARLQEVLDLIEAHKEKWSLPADVRIAVSYEAGQEAFWICRALQARHIECYVVDPASIPVERHQRRAKTDRLDVIKLVINLRAWLRGERDRMHVVHAPSPQDEASRQLMRERGQLQKEVLQHLDRMRKLLATLGCWDAVNHRAFAGRLQRDEVCCHDGAPLPRQLRERLLRECERLALVEQQLAALEKTRQTEVPALARQRCDALERLHGIGEVGASRLALELFWREFKNRREVGACVGLVPQPYDSGDSQADQGISKQGNRRVRALLIEIAWNWLRYQPNSALTKWFNQRTQGTGPNRRARRIAIVAVARRLTIALWRYLRDGELPKGAQLKSI

SEQ ID NO: 57262 - protein, 422 aa, unidentified
MLSFEKRERAQCAAACVGVDAGKFRHALVVRPRGHADSKPFTFPTTRAGFDDAVRQIRSCVPDAAPADVLIGIEFAGCYGFTLAHYLDQLGFPVVSVLPASTKQWKHVVHGQPLKTDPKDALVITDLLAQGQFVTFPFLKPAYADLRYLSAARQRLSLRRRAVISQIRTLLQVIFPEFETVFPYMLKKTPLLLLRQYPSPQDLLAAPKRTVLRFPREHSRGQFKAETCDKLLAAAEATIGLPGAQSRLRSDITRSLDRLALYERQLKEIDGELVEALAAVPEAQHLLSIPMVAPVTAAIFLGSIGDPQAYETAEQVLKVAGLSLIERSSGILHGTQRLSKRGRPLLRAIAYMFAVRSVTEGGLFRQEYEALLERNGHKPIKALAAVMRSALKLMFSIARDRRTFTPEPPPWRRRLPAGGVAV

SEQ ID NO: 57263 - protein, 338 aa, unidentified
MTYYAGIDVSLESASVCVIDAAGKTIREGKVASEPEALADWLKATGVSLERVGLEAGPLSQWLHVGLRQAGIAAELLETRHVRRAFEIMPVKTDRKDAHGIADLMRMGWFRPVHCKSIDAQETRAMLTARKLVQKQVFEVESSLRGILRGFGLKVGKTTPVKFEGRVKELVAGNPSLERTADSLLATRAVLRREFNGFERQLRGMARNDTRARLLISTPGVGTIVALTYAAAIDDPSRFTSSKTAGAHFGLTPKRYQSGQIDYSGRISKLGDASVRAALYEAAHVILTKPLKGCTALKSWALRIARRAGMSKAKVALARKLAVIMHRMLANGTTFQSA

SEQ ID NO: 57264 - protein, 368 aa, unidentified
MEVVYPCCCGLDVHKKSITACVLWAEAKGKSRKEKRRFGTFTHDLLQLADWLGESGVTHVAMESTGVYWKPVWNILAEQFKVLLVNAQHIKAVPGRKTDQKDSEWIADLLQHGLLRGSFVPPQPTRELRDLTRYRVSLAQEINRIANRIQKVLEDANIKLASVATDALGASGRAILEAMLAGEQDAARLAELSKGLLRNKIPELKLALEGRMTEHHRFLLRQLFDHLRFTESKLSQIEQEIDRRMRPFQDEVIRLCTIPGVDQVTAWGILSEIGLDMNQFPSAEHLSSWACLCPGNFESAGKRLSGKMRKGNVSLRRCLSQAAWAISMTKNNYLSALYRRIAARRGGQTRDHGGSSRAPGHCLSHVET

SEQ ID NO: 57265 - protein, 325 aa, unidentified
MTSFCPLGIDVAKRSFDAVLLLPEGRTRHHQFANHPAGFAALQSWLRRHATGAVHAGLEATGRYGEALALFLHQAGARVSVINPARTHAFAKSELARNKTDKLDAALIARFVATQAPPAWTPAPAEQRQLQTVVRRLEALQAMRQAEQNRLDLESADSPIRDSLAQHVAHLDQQLRQLRRDLAAHVRAHPTLADQSRLLQSIPGIGETTALKLLAELPALSQRRSARQVAAYAGLNPAQRQSGSSVHGRGHLSKIGNARLRRALYLPAVVAMRCNPLLRVFAERLHQRGKAPMIIVGAVMRKLLHQACGVLKHAQSFNPNHVHAS

SEQ ID NO: 57266 - protein, 424 aa, unidentified
MLGVGIDWAESFHDVALGQPGKGVIEQFRIDHTVAGVHRLVARCLELEPDPAEVRIVLETRHGLLVEALVDAGFTVLPINPDLVARRRGPAKKKDDAEDARICCLMALDQFLELRKLIPHGELAGELRSITRDDERAARDERRLLNRLRADLLTTFPAALVIAGDDLGSPVMLKLLARWPGHQQLAAVSGEEIEAFARAAKHGWPARFAARVADALTSDQLPVKEYLVRAKETTIMLTATQLLALRQARKSWERRMGELLLGSPRYGRAKQPKEPDSGKAIPGGDIYLSFPGLGDILAARVAGEIGDHIEQFDAPSGLQCYGGTAPVTRRSGRSELVVARRLAYNHYLGAAVHQWAFCSLTKSRWAREFYDAKIAAGKGHHAALRALGNRWLEILWHCLMKGVHYDETVHIRNRQRALQPRVAA

SEQ ID NO: 57267 - protein, 423 aa, unidentified
MKTYILRDPNAVESQLPQPQSRRDLDLTATVEAICGKAAPPPSLRTGSILYVGLDVHNDSIAVSLAPSDSAEVRRYGIIGGQHADVLQLLKRLQAAHPGAVLKFCYEAGPRGYPLCRFIRQQGAPCLVVAPSRVPRQPGDRVKTDRRDADQLARLLRAGELTGIYVPDPQDEAVRDLIRARYQVQRQQHRARQQLKMFLLRHNIRYAGTKAWSAAHLRFLATVKMPFAEQQFVFQEMVNGITEAGQRLARYEKQIAAVVEGWRWAPVVQALMSLRGVAVLTAATLVAELGDLNRFPSAPQLMSYLGLCPGEHTTGETRKQGGITKMGNGIARKALIEAAWHYRLPARLSRTVLARQEGLPKAVTEAAWNAQTRLHQRYKHLTGVGRKKSQVAAAALGRELAGFVWAIGRLVQPRPLPPVAGQS

SEQ ID NO: 57268 - protein, 389 aa, unidentified
MKIFVGIDIAKLNHFAAAISSDGEILLEPFKFTNDADGFQLLVSKLESFDKNSIIIGLESTAHYGDNLVRYLVAEFYQVCVLNPIKTCQMRKNNVRKTKTDKVDTFVIAKTLMMQDDLRFITFFDLDMMDLKALGRFRQKTIKQRTRLKIQLTTYVDQVFPEIQYFFKSGLHQHAVYALLKEAPSPKEIASMHMTHLANLLKVNSHGHFTKEQAKELRVLAQKSVGANDSAISIQITQTIQQIELLDSQLEKIEAEMTDIMKFNDSVIMTIPGIGYINGGMILGEIGDIHRFSNPNKLLAFAGLDPSVYQSGNFQAKTTRMSKRGSRVLRYALVNAAWNVVRNSATFKAYYDAKRAEGRSHYNALGHCAGKLVRVIWKMLTDEVEFNLE

SEQ ID NO: 57269 - protein, 479 aa, unidentified
MEERRLLGIDLGIASPHTAVALRTDGSEVARRRCVPTVDSLAAVEQAALRDAPEGTRLEVVIEPSGPAWLPIAVFFGRRGHTVYRVSSAKAADLRRFLSRHAKSNGIDAKTLARLPLVDPENLYPVELPGADRASLDRRVRACDRLTRAAATHKIRIKDLVRQLMPTSPLTGELTRADLAVLERYADPNALLMQGKARLVALIKRASNNHAGPERAEAWLGAAHAAVEVYAGDSAVAFADLAAEVATEVRLLRAVEAELAEHAEARESAYGRVDPEGLARSLPGVAEVGGPVLQAAVGRAQRFGSAAAFKSFTGLTPRASETGETDRKGQPMSKAGPHLLRTQLLRSADTARTIDPQLARIYHTQMVERGANHLKALCVVAAHLAERSWVVLARGEPYVVRDADGRPVGREEARAIIAEHFTVPEEVRRRRRSKKVGKAPHQVLVGQVSTRSKAQYEAAFPAPNRRPPRPRRQPAPRAT

SEQ ID NO: 57270 - protein, 349 aa, unidentified
MKYRTINSEFYCGVDVHPKRSHLSILDNTGKKYLSRNIVNNFDNFKEILNPFLPNIVVGCESTYSYYWLADGCHQHLIPFYLGHALYMKAISQNKQKNDKLDAKTIAELLRTNFFPEAYPYPRLMRPTRDLLRRRHRLVRIRAEAYSHIQMVAHQYAIEGIGSEQVKNRNNRDRLIDTFKTEDLLSMITSDLDVIDCFSPIITKLEKEIMGNAIHHNPKDFLILQTTPGVGDMLSLIVLYETHDIQRFPKHQHYASYSRVVRCSQTSNGKITGKKNNNMGNPYLKWAFNSIIISAKQSSELIKKHYQRLESRYGTSNARARIAHKFNTSIYYMLKNSQPFNEKRFVQGK

SEQ ID NO: 57271 - protein, 339 aa, unidentified
MFEFSTVGVDLAKNVIQVHGVDADGKAVLRRQLRRNQCLSFFEGRPGCLIGMEACSGAHHWGRRLQEMGHEVQLMPPSYVKPYVKRGKIDAADVEAICEAVTRPSMRFVPVKSEMNSAALVLHRARDFLVGQVTQTGNAIRAHMAEFGIVTAKGSKRVAELADKLDALPEAARLPIQVLLDQLAETQDRIDRLTDEIDEVHRQSEVSRRLASIPGVGVLTATAIAATTPDVGNFSSARDYAAWLGLTPKQHSTGGKPRSGGISKMGNRYIRRLLYLGAMAQIMVRRRSRQPGTDWLARKLATKETRVVAIALANRMARTIYALLRDGTSYRPQVRVMPA

SEQ ID NO: 57272 - protein, 387 aa, unidentified
MPQPNDLSRSLVALDQNTTIIAVVELSQSSWLIGGIVPGIERQPHKKLEPSPERLLAVLHRWRDEAVRAGRKITRIALAFEAGRDGFWLARWLRARGVEAHVIHPSSVAVSREHRRAKTDRLDTELLKRGFLGWLRGERGHCTMARVPTSAEEDAKRPNRERECLVRERTRIVNRMKGTLARLGIRNFKPTLRKAAERLATLHTPEGSVLPPNVSAELQRDMARLGFVVSQIKEIEGARQKRLEQEPETEPHAMVRQLARVVGVGVETADILVNEVLSRPMRDRRAVARYAGLTGSPDESGAKRREQGLARAGNARVRRGMIQLAWRFLRFQKESPLARWYRARTADSRIGTRKTMIVALARKLVIALWRFVTTGETLEGVILRPAG

SEQ ID NO: 57273 - protein, 418 aa, unidentified
MRLLFIGDDWAEDHHDIEVVGDDGRRLARARLPEGLEGITRLHALVAEHAPSSWTELPDVEAAAQVVVGIETDRGPWVTALRAAGYQIFAINPLSAARYRQRHSTSGAKSDAADAHLLAEIVRLDRDHHRPIAGDSDLADAVKLLARAHQTAIWERTRHVLRLRSTLREFFPAAVDAFEDLAAEDALALLQRAPDPGRAAKLTRVQLAAALKAARRHYVETKADGLLAALRRPILRQSSVLEGAYAAIVVAEVKVIGALNEQISALGTVVGEHFGRHPTAEIYLSQPGLGTVLAARALGEFGDDTGRFSDARGRKNYSGQSPITRASGKKTVVLARFATNRRLGAALHLQAYSALISSPGARAYYDTLRGRNIGHHAALRQLANRLVGILHGCLKNGTKYNEDTAWAHRRAHTENVAA

SEQ ID NO: 57274 - protein, 445 aa, unidentified
MTNFYLGIDVSKGYADFVLFDANKKPVMDSFQLDDTFPGHCSLYAILEDFLQRHPEATVYAALESTGGYENNWFNALCSFQASLNVHCARLNPCGVKNNSKAALNRIKTDPLSARDVAEYMIAHPDKVYFDQEDQFASLRKQAKFISILTKQRTQLFNQLETIIYSAYPDILTYCRDNTPDWVLSFLQQYPTAAHAAQAQVADVAKIPYVTKQKAQQLIHEAQNSVASATDETSAQLVSTIVGQIKQLNTTIKKQTKLLYDNCSLPEVELLKSFPGIGEYAAIVLMLHIQTVHRFPSVKKLCAYFGVHPVFNESGDASGLFRMSKQGNREVRHILFMAAFSGITHNPLIKEYYHRQLQKGLSGMAALGACMHKILRIIYGMLKSGQPFDPEIDKYNRENSKAYNKEKKQEGKQRRYQNFDNNAPVSRRQRQKRKEQSEPQSTSST

SEQ ID NO: 57275 - protein, 296 aa, unidentified
METKRHIGIDLHRNGFTACVRLENGRNYLSEWKLEDLPRFTRKLGAGDEIAVEMTGNTRFCHAAVAPHVARVVTVDPNQFQVISQSVKKTDPNDARNLALDLAKDLLPEVRMKEKTEAQIASLTQTRDTLVKLRTALKNKINNILAAHGINLAKEALSSEKALAAVLEMQFDEMVEVELQVIVKQIRGLNQSIAKLEQTIRDRGQKLKGHRNLTSIKGIGNLGASILLSVIGDIGDFADDGKLAAYFGIVPRVQNSNETERCGRITKRGAKRGGGKAILALARKFLGIIYRTLTGC

SEQ ID NO: 57276 - protein, 362 aa, unidentified
MPKMIWLGMDVHAASITVAQYEDQAPSATVQTIANDPAQVRRLVRRLPAGCDVRACYEAGSCGYGLHRQLTALGVHCDVIAPALIPRRPGERIKTDRRDAEKLGRFHRSGELTTITVPTPSQEAVRDLVRAREDVRRDRTAARQRLAKFLLRHGHRYPGSHWTKRHWEWVCGRPFEGAARTVFVHYCDHVLALNERLAHLEREIHTFADSPVYQPVVARLSCLRGLATLSALMLIAELYDLRRFRTPRELMAYLGLVPSEHSSGARERRGRITKTGNALARRLLIEAAWAYRHPARQTRRVHQALTTQPPEVHAISDRALHRLTARYRRLLSRGKTPHHAVTAIARELCGFVWAIALVPDLA

SEQ ID NO: 57277 - protein, 382 aa, unidentified
MTGTEPHAWGTGLMDDITFVGLDVHKATVCIAVAEGGRGGEVRQLGVFENRPEILSKVASRLSKGGRRLSFCYEAGPCGYGLHRLLTGYGHECVVVAPSLIPMKAGNRVKTDRRDALMLAKLHRAGELTAIWIPDAAHEAMRDLVRARATAVRVLAKARQHLQGFLLRHERIYHGARAWTLAYRRWLTTVRFEHPAQQIVLQDYIHAVQEAETRRDRLTQQIQELLPNWSMAPVVAALQSMRGVALVVAVTVVAEVGDFRRFANPRQLMAYLGLVPSEHSSGSSVRRGGITKAGNALARRVLIEGAWTYRMSARVSCKLHDRLEGLPAAVRDIAWKAQLRLCARYRRLAATGRPKVVVTTAIAREMVGFIWAIARLAQPALV

SEQ ID NO: 57278 - protein, 402 aa, unidentified
MNAVGIDVSKGKSMVTIMRPFGEVVASPFEVTHNGNELGKLATSIKSLHGETKVIMECTGNYYYPIAHALHAAGLFVSVVNAKLIHDFSNNTIRKVKTDKADSIKIASYGLTHWLELPEYIPEEDVRRMLKAFCRQYTKYGKLKVALKNNFISLTDEAFPGLNELFTSQPRKSDGHEKWMDFAFRFWHCECVCSLTPKVFAERYQKWCKRAGYYFTQAKADDIYISACGHLVGMPKNETTKLLITQAVNQINAISESIAVIAREMKRLAAMLPEYPVVSQFYGVGDILGPQLMAEIGDIYRYRNKGSLVCYAGLEASPFQSGKFESANRSISKKGSPHLRKTLFLVMDSYIQHSPADEPIYQFLDRKRAEGKHYYSYMTAGSAKFLRIYYARVKEYLDKIEE

SEQ ID NO: 57279 - protein, 347 aa, unidentified
MKFYTNQHKFYCGIDLHARKMYLCILNSIGEIVLHRNINTDREVFLKTIEPFREDIVVAVECMFTWYWIADLCTQERIPFVLGHALYMKAIHGGKAKNDKIDSHKIGALLRGGMIPMAYVYPAKMRATRDLLRRRNHLMRKRAELYAHIQNTRSQYNLSDPLGCIAKPQNRDGIVERFNDPSVQKMIDTDLTVIEAYDPIIAKMERDIIKMADQHDPVAYALLKSIPGIGRILGLVILYEIENISRFPTVQDFASYCRLVKSAKESNGKKYGSSGKKIGNAHLKWAFSEASVLFLKGNEPGKKYLDRLANKHGKGKALSILAHKLGRSVYFMLKNKKPFDQDQFLGL

SEQ ID NO: 57280 - protein, 355 aa, unidentified
MNSEKYIGLDVHQATISVAVLDSTGKLVMESILETKAATILEFFTGLRGTLSVTFEEGTWAAWLYDVLHPHVANLIVCNPRKNALIKDGSKSDRIDAHKLAELLYLNKLSSVYHGENGVRMLRELARSYLTMVKDLTRVMSRLKAVYRSWAIPCTGRDVYYTRHRAEWLGKIKEAGVRRRAERLYQQLDMLQHLRQQARRELLAESRKHPITARLRQVPSLGPIRSALAVALIQTPHRFRTKRQLWAYSGLALETRTSAEYRYVKGQLHRAKKQISIRGLNKDHNHDLKGLFKGAATRASVLPGPFQDFYQRSLAKGIKPTMARLTLARKIAAITLTLWKKGENFDADKLKSQAA

SEQ ID NO: 57281 - protein, 339 aa, unidentified
MQVYGIDLSKEKFDVNFFDTDGKEKNKTVKNGLASISKFLDKVPEGCVLCAENTGSYGDLLVFMCNQFGVSIALVPGYTVKHSLGILKGKSDPIDAARLREYGERFFDRLTFKEYHSENVSELRQLYSLRSQLVKSRKQLRTGEHAREQMPMQSIRVNRVLQASLHALDEQIKAVEEEMSLIIKSEPELSENYELAVSVTGVGPVIATDLIIRTGNFRTIDTARRAASYAGVCPFPNASGNMAGKSRTSPFADKQLKSLLYMGAKSAVKHNKEYRLYYQKKQQEGKPHYLIMNNVMNKLLRTIYSVVNSKTPYNRDYICLDPRERECNKNQNGSEKIVA

SEQ ID NO: 57282 - protein, 411 aa, unidentified
MEQLYERCCALDVHKATVSACVRVPDRNGARRELKARFSTMTSELLALRDWLVGLGVRQVAMEATGVYWKPVWYVLEDEFELILCNAAHVKNVPGRKTDASDAQWLCQLLEHGLLRGSFVPPKPIRELRDLSRYRKTLIKERQREANRLHKVLEDAGIKLGCVAADILGVSGRAMIDALVAGHADPEALAELARGRLRAKLPALRLALEGRFSRHHARLVSHILHHIDYLDETIASLSDEVGELIAPFEPQLELLETITGVGRRAAECMLAELGPDMTRFPTHRHCARWARISPGNNESGGKHRHGTTGVGNPWLREILIECARAASRSRDTYLKAQYLRLRSRRGDSKAIVAVAHSILISAYYVLARNEPYSDLGFDHYQRLEHHDHQVRRLTRQLEALGHRVTLEPLAA

SEQ ID NO: 57283 - protein, 348 aa, unidentified
MVTIGVDPHKDSHQAVAVNELGSQLAEHACTAVVDGFGKLLGWGRGLDPERVWVIEDCRHVSGPLERFLLDHGERVARLAPHLMAEARTHVGRRGKSDPIDALAVARAALAHGLERLPTARLAGPELEIRLIQQHHQRLVKQRTALINDLRWHLHDLWPDLEIPSRRLGSTQVQNRIARKLKTAQRTARVRVAIDELRRIRELTRTISSLIAELKQLVSQTAPQLLAETGVGPITAALVIGEIAGIDRFDSDSKLARTAACAPIPVSSGRTDRHRLDRGGNRQLNYAIHMIALTRLRYDPETALYIAKQRARGKTQREAIRSLKRHLIRRIYRLLSTPNTIPQTVCLT

SEQ ID NO: 57284 - protein, 413 aa, unidentified
MLKIIYPICCGIDVHKTFIIACIASTNDKGITSYKSKRFSTFTKGLRELSDWLYSHSCTEICMESTGKYWIPVYNILEATCKITLAHPKYVKAIRGKKTDKKDAKWIADLFKHDLVVASFMPPLPIRQLRDLMRYRFKLTNFCSSEKNRMQNCLTVSNIQLASVMSDTFGKSSMKIIDYLLEHPHEKDFDFVPLLHSSMLHKVEPIRLALDGMITQEQQQKMNIILQHYDELKACKSNLESVILSLSEPYTTERFLVSTVPGIKNPFSAITILSEIGVDMSVFPTAKHLCSWAGATPQNNESAGKKHSVRISRAGVYIKPLLVQCANAIVKSDKHPEIKGRYLSIKKRRGHKRAIIAIARMLLTAIYHILKKREPYNAELYKKADIIPHTRQITVEQAILIAQRHGYSVLIDG

SEQ ID NO: 57285 - protein, 398 aa, unidentified
MKTCGLDVHKDSIFCAIYNGKEYSEVKEYDTTTPKIRQMGEYLRSEGVERVAMESTSTYWVPVWDVLLEMGFKLMLVNPFLIKQMPGRKSDVKDAQWIACLLYKGMLRGSMIPSPVIQELRTYSRKYTKLQEQKTRTLQKMDRIMVMSGFRIGSCMSNLGTKSVMNIITALIAGETNPEVLSKLVYGSTANKKSGKLREALTGNLKEHYRQQLEWDKQEYDLFEKQTEQCLTQMRRICHEHYSEEMTLLQTIPGVSEISAMIIIAETGGDMNVFENSGKITGWAGLRPRNDESAGKYKSTATTKGNKYLRSVLVQVSWAASRIKNGWFKEKFNRLSMRKSRKKALIAIARKLLTVTWNVIYYKTPYKSQLAHIYDPIKVEAKMDYHQREMERMQKLLQ

SEQ ID NO: 57286 - protein, 408 aa, unidentified
MSAAVFGEDLALLPTSTAAAPDEKPCVVPASGATLAPVKRKRRSRVMEYFTGLDVSVDETAICVVGDDGKVAFETAVETDPAAIAEALRPYADRMRRVGHEAGSLSPWLHTELLAEGVPAVCLETRHVRAALSAQRNKTDANDALGIAHIMRTGWFRQAHVKTDACYRIRLLLVQRRNLKRKFLDLENAIRHSLKVFGIRLGKVGRGAMEKAVRESVAGDAMTAGLMDCMLRARAALWAEYLTLHKLVVQIAMRDELCRRFMAIPGVGPVTALSFSSAIDDPQRFRRSRNVAAYFGLTSKRWQSGTSIDVHGRISKAGDPDVRRALYEAASAMLTRFKGRDMIKTWGLKLAKTKCHAKARVAVARKLAIVMHAMWRDGTFYVGDPDASGYDNDASNAAKLRRLSRANS

SEQ ID NO: 57287 - protein, 351 aa, unidentified
MNILAMDLGKSNTVVCYYDCNNGRHRFGKVKTTPMQIHNLLAEHLPDRVVFETCSASGWVYDICSALKLSTQVANPNTQAWRWKNVKNKNDKKDALKLAQLSAMNQLPVVHMPKPVLRQKRTLIHYRQTLVARAVQIKNNIRAILDKQGYSMPAGKSGWTNKSIEQLNQISLPIENCDANNLWRGQLYVELEMLTANNKALSDVTGKLDELAKSDSHIKLLQTAVGVGPRLAEAVVAFIDEPERFKSGKQVGSYVGLTPKQYQSGNMDHQGKISGQGNKLLRSLLVEVSWLGLRHNEWMRQTYHRLLRGSPSRKKIAITAVARKLLVRCWAMLRDGQPWRDMEVVKDKQAA

SEQ ID NO: 57288 - protein, 320 aa, unidentified
MYVGIDVAKAELVVAMGATGPVTTFPNDDVGLTALVGAMREAKPTLIVLEATGGYEIPCTAALAAAPLPVAVINPRSVRSFAKATGTLAKTDRIDARLLAQFGERVQPEPRPLPTAAQHELEALVTRRRQLLEMRTAEQHRLGQALGGHRQRVKQSLRKHLAYLDRELRITETDLRDRMQASPVWRARDDLLQSVPGIGPTVSQTLVAELPELGRLNRREIAKLVGVAPLNRDSGTRRGRRMTLGGRASVRAILYMACLSAIRHNPVLRAFYQRLTRAGKVKKLALVACMRKLLTIVNQMVRTGQHWRPSPSIACQLQPT

SEQ ID NO: 57289 - protein, 324 aa, unidentified
MTLPSLGIDISKLKFDICLSRQGGKFRHKVFPNSPAGFSQLSAWLIKYKVERVHACLEATGTYGEALATYLHEAGHVVSVVNPAAIKAYGQSYLSRTKTDKADATLIAQFCSERCPPEWQPLPAEIRGLQALVRRLDSLLEMRQMEANRLEVSTAAEAVTESLVGHLAFLDEEVARTERLIRTHIGNHPGLQEQRDLLLTIPGIGSTTAAKILGEILDVKLYESARQLAAFAGLVPRLHESGSSIKRKARLSKTGAPRLRKALYFPAIVAIKHNPRIRALAERLKERGKCPMQIIGAAMRKLVHIAYGVLRSGSPFNPELAKTA

SEQ ID NO: 57290 - protein, 394 aa, unidentified
MRFVGIDVGAERHVVASVDAVQAVVLKPTGFTEDAGGYQHLLTLLGPATDTLVAMEATGHYWKNVFAVLVTQGFAGALLNPLRTRRFAADDLQRTKTDAIDAVGIARFAAQKRPAASRLPDPATEELRELLRYRDRLSQDFGDRERQLHRLLDLGFPEFPRYVHDVGSELATAILRVYPTAVAFQGVAVRRLGGLRYAGQHKVGAELAAALLEAAAASVGQHHGAAYRVQVQDLGEDLDVLRRRLRTLDRDIERLLARHEVGTRLTTIDGIGPQTAARLVATFGDFSGVRSGAALACYVGAIPGLRQSGKRTSSRARLTPIGAARLRAKLYMPVLSAVRCNPWLRAYYEALIARGKLPKVALIAAMRKLLHAVYRVATHRRPFVPHVVAQEARP

SEQ ID NO: 57291 - protein, 379 aa, unidentified
MGKSIRFVGLDVHGETIAGAVAEEDGSELDFGVIGNRPEVVRRLIKRLGSVEKLRVCYEAGPCGYVLYWQLTGLGVDCQVVAPGLVPQKPGDRVKTDRRDAKKLARMYRSGLLTAVWVPEADEEALRDLVRAREAAKKDELRARHRLGKFLLRRGCRAPQAVKAWTKRHWQWLQGLRLERPAQEVVFIDYLHEVDHAGERLVRLERAIDEAVERVPASKRAVIEGLQALRGVSKVTAVTVYSEVGELSRFARPKLMMGYTGMVSSEHSSASRIRRGAITKTGNAHLRRVLVQAAWAYCRRPNLSPALKKRQAGLSEEIKEISWKAQHRLYGRYRRLVSKGKTPQQAITAVARELVGFIWAIGVHVEGQIRQESQGHAAA

SEQ ID NO: 57292 - protein, 410 aa, unidentified
MSRTNDFSVLIGLDWASSKHDVCIQYADGTRELAVVKHSAEAIEQWITELHQQHPGQIAIALELSKGPIVYALQKYSFVTLFPINPTMLCRYRRALSPSGAKNDPTDASIALELLVRYPDKITPLKMADDKIRKLAFLVEERRRLVDEKKRYVNRLINALKQYYPQPLEWFTHRDSQLFVEFITRWPSLDRIKRAKPDTIARFLTSRGSFAKLVSPRLEAIKSATPLTYDSVVIESNKLLAITLANQILPIITAIKTFEQEIEAIYHEMPDAALYESLPGVGKCLGPRLLVAFGEDIHRFGSAQEVQKYAGIAPVTERSGKTAWVHWRWGCSKFIRQTFTEWSAKSVLYSYWAQLYYEQQKKKGNSHHQAVRSLAFKWIRILYRCWKTKTPYNETQYLKVLKERNSPLLG

SEQ ID NO: 57293 - protein, 348 aa, unidentified
MSKRNQYVGLDVSLNETSIAVIDEADKVVWRGRVASTPEAIGEALKKYAPRSARVGLEAGQLSSWLYHGLAAKGLPVICIDARHAKAALSLKVNKTDANDAYGLAQIMRVGWYREVAVKGHDCQALRALLIARAQIVSQITTLKNCVRGILKTFGRVLPKKLRATFIASAREVIDGDATLEPILEPMLRALAATMEQLQVYDRAAIRHARDDETARLLMSAPGVGTIVAIGYITGVETPARFSHSTSVGAYFGMTPRRYQSGEVDKAGRVSKCGDGMVRGLLFEAAKVLLSRSAKPSDLQAWGRALAKRIGSKKATMAVARKLAVILHRMWSTGERFRWSATPASAAC

SEQ ID NO: 57294 - protein, 453 aa, unidentified
MGREPECVGVVLARLVSQLAFDEGRPLRFIGLDVHRDFCEVAISDGGRARSAGRIDTSPQALELFACSLAPTDRVVLESTGNARAIARILEPHVDEVVLANPMQVRAICHAKVKNDRFDARTLAELLAVDLIPRVWITDECTRVLRRLTSRRAQLVRQRTRVKNEVSAVLVRNLKGRPPASDVFGKRGRRWLAELELPADERDTVAACLRQIDFLDGEIAGVDRHLAAHALASAEMRRLMTIPGVDVTTAATLIAAIGDIRRFESAKRLVGYLGLDARVHQSGVSAARHGRISKEGTSAARHVLVQAAWAAIKTPGPLRAFYQRVKARRGAQIAIVAVARKLAMLCWQLLTREQDYAYQRPTLVARKLRTLELRAGAPHARTTSTAARASTAKQRAAHERQLAEQAEHAYRRLIADWKATGPNKGAGAPPGRASQGSSSDQAARQAPAPEPAL

SEQ ID NO: 57295 - protein, 402 aa, unidentified
MNAVGIDVSKGKSMVAIMRPFGEIVSAPFEIKHTASDIHSLVELINSVEGESRIVMEHTGRYYEVLAHQLSETNLFVSAINPKLIKDFDNDSLRKVKSDKADAVKIARYALDKWQNLKQYSVMDELRNQLKTMNRQFGFYMKHKTAMKNNLIGILDQTYPGVNTYFDSPARSDGSQKWVDFASTYWHVDCVRKMSLNAFIDHYQNWCKRKKYNFSQSKAEEIYGKAKELVPVLPKDNITKLIIKQAVNQLNIASATVESLRTLMNETASQLPEYPVVMAMKGVGTSLGPQLMAEIGDVSRFTHKGAITAFAGVDPGVNESGSYEQKNVPTSKRGSSNLRKTLFQVMDALIKTHPQDDPVYQFIDKKRAQGKPYYVYMTAGANKFLRIYYGRVKEYLSSLPES

SEQ ID NO: 57296 - protein, 353 aa, unidentified
MEQFIGCDAHKKFSIFASIDEKGEYGPTFRVGHAREVFRAFLKDLPAGSKIALETSGCYYWMVDEMEQARHIPLLAHALTAKRRMEGRHKTNERDARGLAMLLRNGTLPVVWIPPAELRDQREMLRWRMCLSRMRTRVKNRIHGVLQRHNIDIAVSDLFGDGGRVKLLERVDELPPYSRLSLLDQLQMVDTVETEISECEQVLQEMLYPSAERDLLDSLPCVGKILSAVLALEIGDVRRFGGPDRLVSYAGLVPVARESADWKRKDRCPRDCNTYLKWAYVEAANLISMQRKRWPERHVVQLYERVKQSTKMHGKATLAVARHLAEASYWMLRKQEVYQEPNSKRQLLSSTHG

SEQ ID NO: 57297 - protein, 460 aa, unidentified
MEKYSEKWTKSTVRTALLTVVHPETAAVDVHPNEMWGAIRPDHPSGKTVRRFGAVTYDLRQLVKWFKDSGVTTVAMEATGVYWLPLYELLEVEGIRVCLVNARHVKNVPGRPKTDVRDCQWLQKLHASGLLTASFIPDASTRQLRGLLRHRDRLTRLQSQHILRMQKALREMNVHLDAVVTDIMGVTGLRILKALMQGRRDFDVIAQECRHPLIKATPEQIAVAIDGTYTLDSMFVLGQELEAYDFTGTQVAKLDVQLEQLLQLATAGQPAIALPDQGLTGREKRQGDAPAFNVQQYLYQITGVDLTRIPGIGANASLILLSEIGNDMSRWRSSDAFCSWLGVCPNLQKSAGKIHGSRPRRTCSHAKHILRLCASSLKNHHGHLGAFFRRIRARSGSPAAITATAHKLARIIFAMLGGKKAYSELGEDYYDKRYRERILRNMKRKAQLYGFQLVPLEQAS

SEQ ID NO: 57298 - protein, 314 aa, unidentified
MTIVVAGIDVSKNSLNIHLNGKDGTATNDALGFRKIAGILKGGGAERVVIEATGRLHRALLQSLHDRGFAVCVVNPRQSRDFAKAGGELAKTDRVDARILAAFGAAFPAMPPTAPADAAIDRLRDMLVLREALVDQRAQLKAAFDEVGDPVPDGPVPKVLSELSAGVSEFDRRIEELVAGSEELADSYEILTSVPGIGPVTAASLIAWMGELGAIGNRQAAALIGVAPFARDSGSLKGGRHVAGGRRRPRDVLYMAAMSACMFNPDMKELYGRLKERGKPHKVAVTAVMRKLIVTANALLRDGRMWEDRTADAA

SEQ ID NO: 57299 - protein, 316 aa, unidentified
MTEAGGFVGIDVAKAELEVVVRPSGARWTVTNNASGLAQLQERLQALAPALIVLEATGGYEVAVVAALATAALPVVVLNARQVRDFARATGRLAKTDAIDAGVLAHFAEVVRPPVRPLPDAMTQSLQAWLMRRRQLVEMLLAEEQRRSRAPRPIQRQIDQHVRWLRAQLGAVEKDLAQTLRESPVWREKDNLLRSVPGVGPVLTTTLLGDVPELGQLNRKQIAALIGVAPLNRDSGTYRGRRAVWGGRARVRATLYMATLTAARYNPVIRAFYERLVAAGKPKKVALTACMRKLLTILNAMIARRTAWKPPAAVSA

SEQ ID NO: 57300 - protein, 354 aa, unidentified
MANTTRPELPAFSSIGIDIGKDVFHLVGFARSGQIVLRRKIKRLALVSTFEALSPCIVGMEACLSAHFVSRTLRKLGFEPRIIPAKYTKPFVKGQKNDYNDAEAIAEAALRPNLNLVAEKTQAQLDLQALHRVRSRLVSRRTATINQIRAFLIEQGIAVRTGAHALRNSLLAIVKNRKDEISPRMCGIIMGLYEDWLWLDQRIEGTTSEIEAISQCEGNCQRLMSVPGIGPVISTAVVAAIGMGEAFERGRDFGAWLGLVPRQYSTGGRPILGRISKRGSKYLRTLFVQAAQIILMRPKNWEKFSFGPWLKEASKRMHKNKLAAALANKLARIAWSILRHGKDFDTHRIEVTAI

SEQ ID NO: 57301 - protein, 489 aa, unidentified
MSTARKQQGKKKDPMLNARAPQRKVRGSHCQQGKANQRGSELTITNPDAAGIDVGSQVHYVAVPEGRAQESVRSFGAYTAQLDELVQWLKDCRIKTVAMESTGVYWIPLYQKLEEAGFEVLLVDARQAKHVPGRKSDVQDCQWLQQLHSYGLLRAAFRPEDSICRLRTLQRHRKNLVESAAMWIQHMQKALNEMNLHLHHVLSDISGQSGLRILDAILAGERDPRKLASLADRRVEKSQAQIEAALTGDYRPELLFVLSQSLQNYRQIQEQIAQCDLNIEKQLAKMADCANPNQASEAIQQSQDSAGCRPRKRKPKDALELSLAGHLKRILGVDLTTIPGLNILAVLNLLSEIGTNMGKWRNEKAFVSWMGLSPDNKISGQRVLSSRTRKVVNRAATTLRLSVMVLGKTNTPLGSFYRRKRAQLGAPKAITATARKLGCLIYRLIKNGQGYKEPDLHTYELKYKDQILNSLRKRANSFGFDLVQVPKAA

SEQ ID NO: 57302 - protein, 351 aa, unidentified
MERYIGMDVHSQTCTLAVVDQKGRQIRKDVVETNGKVLVEYLRLIPGRKHLCLEEGTQSQWLSEILSPHVQDLAVIWPEKKPGNKNDELDALSLAEQMRAGNLAKKVFKAPESFTALRQLARCYEMVTGDVARTKNRIRGLFRSRGVSTEEIGAVRQAGCETAEKQLKQGARQVVEMLFKELEGQEAVKKGVQALLLAEARKHSAMKLLETVPGFGPVRAAQLLSVVVTPDRFRTLRQFWSYCGLGIVMRSSSDWVQAPNGGWDRSPVKKVRGLNRNFSRTAKNLMKGAATTVICQMHDNPLNADYRRLLEGGTKPNLAKLTIARKIAGAARAVWRNKEEYNPDRGRKGTK

SEQ ID NO: 57303 - protein, 412 aa, unidentified
MFYVGIDIAKRSHVACIMCEDNTLEIKPFEFSSTKSGFEKLRAQLSSLACDISEVLIGMEATGLLFDNLYRFLQSLGYRVVLLNPYQSAKFREMDTMKRVKNDNIDAQMIAALIKSGRFSEGYVNNDQLQSLRTLYRHRASLDDQLKSIKRQTQTVLNVIFPELEQVISNPFNITGLALLEKYPTAKHYEYASIDRILKTFRGIKGNNFNEAKAKKLLMLAKDSIYSGADKEGYEATIRSNITLMRLLKEQIQLAEDAMLALFETKKTTKEEQDEMADLIDNLRTIPGISDKTILALLAECGNLDRFHNAKALTGYLGLYPTLEQSGDSQKNGRLAKRGAKLAKKAIYLAAIAAIRHNKELRQVYMNYRSKGRAKKECIIITARKLLAIIYAIYTRNVPYNPQRVFIAQPNI

SEQ ID NO: 57304 - protein, 387 aa, unidentified
MKEDTPTFFVGIDWGEESSQVCVMDHAGRVLKERSVKHSGEALERLFEELTEIAGGRPELMALAIETPRGAIVDGLVERGFKVFSINPKQLDRFRDRHTVAGAKDDRRDAFVLADSLRTDGPLFRRVKLDDAVIVELRELSRLRDDLVAEKRRHSNRLRQQLHRFFPQVLELSSAADELWVWALLKLAPTPKHAERLSARRLQKLLERFRIRRFNVLEAARVLSMPPLPVAPGVTEAAHARIKVLVPQLELIHQQLVDCEAQIKALLERLESGEGQEEHRGVRILLSLPGIGRSVAATMLTEAFQPLAERDYSALRSICGVAPVTRCSGKSHSVQMRRACNHRLREAVYHMARVNMQRDPLGRQRYEALRSRDTVMAAPCGGWPIAS

SEQ ID NO: 57305 - protein, 351 aa, unidentified
MLIVGCDYHPSFQQIAWVDTESGECGERPLLHSTGEAERFYRNLKEQGVKVRVGIEATGHSRWFERLLMELEYELWVGDAAEIKAKRVRKQKNDREDARLLRTLLVENRFPRVWLADQLNRDLRQLLWHRHRLVQMRTRVMNQLQALALNEGVQRKKGLWSQAGRAQLESFQLLPWATRRREDLLKLLDGLTPCIQALTAEVNKQAEQYPEAQRLMTHPGVGPLTALAYVLIIGSPDRFRCGKQIGCYVGLIPSEESSANRQRLGHITKEGNSLLRFLLLEAAQAAVRSDADWRREFLHLTMRRGRQIAVVALARKLAVRLYWMWRNGRDYQKSLKFSSHVGQPGTGYGVK

SEQ ID NO: 57306 - protein, 417 aa, unidentified
MQVVYARCAGLDVHKKTVSACVSVCEAEGGKRQQTRVFGTFTRDLLALADWLREHGVRQVAMEATGVYWRPVWAVLEGQFEQMLVNPQHIKAVPGRKTDTRDCEWIADLLQHGLLKGSFVPPTPIQDLRDLTRYRAELRQSQNRVANRIQKLLEQANLKLSSVASNALGVSGRHMLEAIIAGQENPPQLAQMARGKLKSKIPQLEQALEGRVREHHRFLLAEYLDEWEALGERIRRMEDKIDKHIGFFESAVTLWQTLPGVDRVTACNLVAEIGVDMKQFPTGQHLASWAGLCPGNHESAGKRESGKTREGNKWLRRSLCQAAWAVTRKKNCYLSAQFKRLAARRGVKRAVMAVAHTMLIIGYHMLNSDQGYHELGGNYFEQTNKHQLQRYFVKRLQRLGLKVTLEPWQLEFSLPGG

SEQ ID NO: 57307 - protein, 490 aa, unidentified
MFMTTLPVLNPKAGAVDVGSEQMHVSIAGDAPKVFGSTTAQLQALRDYLLEQGVSSVAMEATGVYWLCLYAVLEQAGLEVVMVNGRHVKNLPGRKTDMKDCQWQATLHAHGLLRGGFVPKEQIRRLQDYQRLRADHITMAATHQLHMQKALERMNIKFHDVISHLTGVSGLKVIRAILAGERDPAALLALCDPLIQKKKAARVRESLVGTWKEEHLFALRQALAGWEFYQGQIAECDRALEHVLKEIAPGDPGTPAAPGWGRRNGVNAPQIEGLSGLLCRLCDGKNPTAIPGITDYTLLQLVAETGTDLAQHWRTEKHFTAWLGVAPGSRQSGKRRGPKTFAQPCGANFLRDRPQRGPDGGQGAGGILSPPEKSAGWLGRQRGPGPQVGATLLARNGAWHPLRGRRIKEIPRPSRANRTALAAKARQKTRNDSPATNQNRLTVHGKKPKPIKSPAPAGRHIPSLLEFTLQRVRPPPNKLKLELQPAMPLL

SEQ ID NO: 57308 - protein, 395 aa, unidentified
MSAEGEAIRSNDYRKDTTVKAPSTRPAAVLGLDVGKSSHWACLIDRDGEVLSSAPVRNREAELDALFASVPAGTLVVVDQFRNIGSLAVRRARAAGLGVAHLPGLAASRAAGLFAGEAKTDERDAAVIARTALGVPDSLSGVPGRGEALEAARALSSQRDHVVACATRDKNRLRAVLLESCPALEAAVDLSDRRWLELLAGFGGAWGIARSGAEGPRAEAAGEAAAASTAPPPALIEAENRQVRFLAARISEALDEAGALEAETAALLEGDETYACLLTVPGIGPRTAAQLAVSVDIGRFPDHDHLASYCGIAPRVRSSGTSVRSVRASRRGDARLKSLLIFSCNSLVRSSGRYGEYYRACRARGMGHGRALKAVARKRLRAIYAVMRDRVPYRE

SEQ ID NO: 57309 - protein, 422 aa, unidentified
MRYMGKRRNRVCGADVHNDLIVATIQCSDETTLREQFGTTRSELERFRGWLIANKCEQVAFEATGVYWFPVYDVLSPSIDTIVANPWMIKALPKDKSDDHDSKSIASFCLNGQIKRSRVFSNEGRDLRTMTRARSGYVKTRTQFRNRIHKYLALRGIKLRSGIRGIFGKSGRHVLNGLIEGKNIDEILDGIPSGRIRKKREIIRSAIAIGFDDITKFLIKDALEVLDNLENRIENMSRDILGRTLKKSKDLAIVMSVPGISFVSGSKILSEIGDYHDFGTPEQLAKWCGLTPGLNESAGKKRSCGITKQGSKHLRTILVEVAHVVSRMKHNRFTGFFNRIMARKNRNVAIVALARKLICIIYHLLVNQELYDPGLKKATKSKSKRNAQAQESSSEDQLQDKVAAIVDAYYRIDAKNVSKGGG

SEQ ID NO: 57310 - protein, 466 aa, unidentified
MGKSSTSEDEKTVGGRDRVRKGLEPKHPDAAGIDVGSRVHYVAVPPDRDEQPVRRFGCTTPELHEMAKWLRACDIRTVVVESTGVYWIPVVQVLEEYSLEVLLVDARHVRNVPGRKTDVQDCQWLQELHTYGLLSPAFRPSQEILPLRSYWRHRAELVGYGAQQIQRMHKALEQMNVQVQKIVSDLSGQTGMRIIRAIVQGERNPVRLAQLRHASVKHDEETYVKALTGTYRTEHVFALRHAVELYDTFQEKIAECDREIASYMQSLQGPNEGETIGTKPPKKRGRFRRKNQPHFDLREELYRFTGVDLTQIDGIDAMTAQTVISEQGIDMSRFPTEKHFTSHLGLCPNNRISGGKVLRSRTRKVQSRAAKALRVAAQSLHRSRTAIGAFYRRLRARLGAPKAITATARKIAIQIYRMLKYGKDYIDQGEQAYQEQYKERLTKNLAKQARKLGLQLLNAQTGQLLS

SEQ ID NO: 57311 - protein, 507 aa, unidentified
MRRSFSRQYRACFLMQNTNLLFLLYRMISILASSVARQLSRSCRLFQLGSDTFPRQLRIGVCDFDAGSGIALLHSRQHRGTAASKGVQNMPARFRDLHDVPHQLQRLLRQMDAALGIAVAVMRPFGEVVISPFEVRHTDSELSELARQLKSLNGETRVVMEATGNYHAPVAKLLHDAGLYVSVINAKLVHGYGNNDLRQVKTDRKDAVKLANYGLDRWLTLPRYVPEEDTRLLLKNCYRQYRQYSKVQTVLKNNLISLLDTVFPNANRLFSSSIRGDGSEKWVDFVAEFWHCRCVSEKSEKTFTNKYQRWCRKHGYNFREAKAHTIYAEARGHIGVMPKSETTKLLVEQAVAQLRATSTALAALKHEMQSLASQLPEYPVVMGMFGVGPTLGPQLMAEIGDVRRFYSKKALVAYAGLDAPPNDSGDVTGRHKSMSKVGASSLRRTLFLVMSVYLQNAPLDESVYQFMDKKRAEGKPYRVYMMASANKFLRIYYATVKAYLESLEHTA

SEQ ID NO: 57312 - protein, 403 aa, unidentified
MNNVAGIDVSKGKSMVSVLRPFGEVVAKPFSVGHTGSELKELADYLKSLDGETRVVMEHTGRYYEPVARFLHDEGVFVSAVNPKLIKDYGNNTLRKVKTDKADSRKIARYGIDNWAELRQHTPMDTIRMQLKTLNRQQSLYTKTKTMMKNNLIALLDQTYPGVNALFDSPVREDGSQKWVDFATAFWHVDCVRNMSLTAFAERYRKWCKRHGYNFSQSKAVEVHAGAQDLIAMLPRDALTKTMVRQAIDALNAVSASLERLKAEMQALAAQLPEYPVVMAMHGVGDSLGPQLMAELGDVTRFTHRNAITAFAGVDPGADQSGTHEAKSTRVSKSGPPELRRALFLVMDCLLKTMPQDDPVYRFMDKKRAEGKPYLVYMTAGANKFLRIYYGRVKEYLAQLENS

SEQ ID NO: 57313 - protein, 313 aa, unidentified
MNELFVGIDVSKARLDVAVGGVEQFSVSNDLAGHTQLCERLRELNPRLIVMEATGGLERAVAAQLTAQELALRVVNPRQVRQFAQAAGILAKTDQLDAAVLVRFAQAMQLEPRALPSEQVQALQALIARRHELTEMLTMERNRLRLAHPSVRRALKKSIQWLESQLKDTDDDIGGMLRECGVWREKVELLESVPGIARVTSLRLVTTLPELGTLNRRQISALAGVAPFNQDSGQWRGRRRIYGGRAAARSALYMAALVGSRHNPVLRAFYRRLRTAGKPAKVALTACMRKLLTILNSMLRDGRRWSPTLVDVA

SEQ ID NO: 57314 - protein, 328 aa, unidentified
MRGTTPLGIDIAKATFDVALASDRRLAQATFANDATGYAALERWLVKQGAGPVQACMEATGRYGERLAEVLFEQGHTVSVVNPARIKKYAESQLQRHKTDARDALVILDFCRTQPLPLWRPLAEAQRQLQEMVRYHDSLQELRQREANRLTSGIRSPVVIGPIQQHLAYLDRQIAALAAQIQQQLDQNDSLDHKRALLSTIPGIGRLTAARLLAELPDIATFTSAKQLAAYAGLTPSQHVSGSSIHRRPRLSKMGRSSLRKYLFMPALAALRYNPVIKALRQRLLARGKPRMLIVGAAMRKLLHIVYGVLKSGRPFDPTRAQIALQSP

SEQ ID NO: 57315 - protein, 453 aa, unidentified
MVQRNGLTRGDRRRNSRIEAVRAVVRPDRAVLAIDLGEDKQVAALIDQDCRVLGRRVVRVKAHALGGLLAWAGQLALRSGFAGVVVGCEPTGHRWRSVMDLAEAASMGFVCVQSLRVHLEREADDYTRDKTDHKDAVLIGRLVVRLECYLPERADADWARLRHLGARRARLVTEATSCQQQIADLLGCCWPAALAAAAKPLESTTWLACMSVVVDAVDAGTDLAALAAGGLDAFTATARAHLARFGVKRLYHRIVRGLFTALTDQAGVAAQRPGALERVGLVLADWRATQARLSDVESRMVGVLDAMDLTALITSVPGVSAVGAAVILAETGDLSRFASARSVVKHAGLNPAENTSATFRGTTRVSHRGRPRLRVAAWRAVWGALQHNPLLANRYTHLTTRARDQLAPGQARAACAATLLRWFYAIVTGRRAFDTAIASGTSRTTARPQALAA

SEQ ID NO: 57316 - protein, 472 aa, unidentified
MKTTSDVSAQSNSRQRNKRNKAKSLSPINPNAAGIDIGADSHWVSVPPSRDPQPVRCFGCFTSDLYALANWLKECSVETVAMESTGVYWIPLFQVLETQGFEVKLVNAHHVKTVPGRKSDVLDCQWLQQLHSYGLLSGSFRPDDQVCILRSYIRQRDSLIKSASTHIQRMQKALTQMNLQLHRVISDITGTTGMAIIRAIVAGERNPQVLAALKNYRIKSSTTDIAKALTGDYRVEHIFVLQQELQLYEIYQTAIAECDRQIEQYLTQLTARVDVEAAPILPAKKRRNKPQGNEPSFDLRTHLYRISGVDFTRIDGLGVLTVQTILSEVGLDPTRFPSVKHFCSWLGLCPGSRITGGKVKSSQTRSVVNRASNAFRMAAQALKNSRSALGAFYRRLRSRLGTPKAITATAHKIARLFYYLWTRGEAYVDPGMDYYERKYQERLVHNLTKKAHSLGFELIPQSASPSVTDSVS

SEQ ID NO: 57317 - protein, 409 aa, unidentified
MKTQKEVLYLGLDVHAENIAVAIAEAGRDGEVRNHGMISSDLHSVEKLIRRLGHPGNELRVCYEAGPCGFVLARFLKKKGVACDVVAPSLTPKGSGDKIKTDRRDARMLARLHRAGELTAVHVPDERDEAIRDLCRARTDAVHDLRSGRNQLKAFLLRNGYRYTETTAWSTAHMRYLRELTLPHAAMKVVLEEYMHCIDATSERIERIEVHMKALLEEWHLAPVVKALMGFKGYQIVAAMITVSEIGDIHRFAHPRQLMAYLGLVPSESSSGGSRAQGTITKCGNGHLRWIFNECAQHYRLTPKVSSLLTTRQGDIPKAHRRQVLEISWRCQNRLYERGRKLAARGKTRQKVQIAMARELSAFVWEVMRLVTPLADGSHAPSTTRTTQPTERAQPTASKKGRSYTLTPK

SEQ ID NO: 57318 - protein, 411 aa, unidentified
MKDLLEISCGLDVHKDKIVACILSGPIGKTTVSEIREFTTLIPDMAALRDWIVSCNCHHVAMESTGIYWQPIYEILEDAYSGDITLLVVNARHMKNVPGKKTDMRDSEWIATLLRAGLLNGSFIPDKQIREFRYLNRYRKSIIRDITSQKNRVEKFLQSSGFRLSTFISDIFGASGRNIICHLIQHGCIDRESLDSCLKTKTRNHINEILVAVNGTLSQIQQDFLEMLMDHYDSLKSHLAEIETALEEAMAPFSLHIEQLTSIYGINTTASCAIIAEIGTDMSYFKTAEHICSWAGLCPGNNESAGKRKSTSITKGNPYIKSMLCETAWVIAGKRNTYLSPRYWRIKQKNGAKNAIVALARKHLVIIYTTLKQGTRLMRTALKRAEKTGHKNSYHIMPRFIVSCRNSASMT

SEQ ID NO: 57319 - protein, 348 aa, unidentified
MDLAKEVIVVCAGDAQGRSVYVKQFSFAGFAEWAVKLASCTFGMEACGSAHHWARFLGEHGHRPKLMAAEFVVPFRKSQGAKNDRNDAQAILTAVRQPDMRFVTVKSVDQQAMLAWHRARAGFGEERTALLNRTRGLLAEFGMWLGRSSAVLIRHLPQLAQDERLPARFRPILANALNHLRHIDQCIADCDAEIHNHVRHSDEAKRIQALAGVGPLTASAVIATVANPRDFKNGRQMAAWTGLVPRQNSSGGKQRLGVITKRGDSYLRGLLTQGARSTLQGALKREALKRSRLEQWIFALHGRVGYHKTLVAIANKHVRIIWAILANGESYDPNAWQRHAPTRSTVSA

SEQ ID NO: 57320 - protein, 324 aa, unidentified
MEKLYAGLDIHKEKFAGCIMDKDGNITREHTFPSSQKAVERFLDGIPSSDIMIAIEACGLWRGAHRILTNMGYSVKLANPKKTHDIACQKKTDKVDARILADLLRTHYLPEIWIPDEQTLQFRDLTRHKATLTRLKTQVQGKIRGYLLRKGVKYGKLSKEDTLATLTDDPDINNLIQVYHSVKQEEKEVMRRIKKIAQNSKQTTMLMSMPGIAEFSSLMILAEIGDIRRFKSPKELVSYSGLCRGIYQTGSTERSVPNTAVNKWLKWIIYECSGRASMLDPRFQNYYYKIKEKKGFKTARRATARKMLTIIWHMLTNEEPYHAA

SEQ ID NO: 57321 - protein, 355 aa, unidentified
MLFLGIDQHARQITISLRNEDGDVVLARQVSTQPKKINEFFERLTRERLQKDESFVATLEVCGFNDWLIRMLKDYRCQKIILIQPENRKKQKTDRRDASALSELLWANRARLLQGKPVKGLRQVDISSTADQENRRLTMLRRNAGRARTRIINSLRHILRRHNLQWQMPTKTFPTIKAIAWLKTIVLPEVDRLELDYLLADLEHIEQRLGELEKAIAERCSTNEDVILLGSMPGIATFTATSLACRIGRVERFPRSRSLANYWGLTPGCRDSGEKKNRQGSITKAGSGMARWLLAQVTHNVLRKDGQLREWFNRIKRRRGASIARVAVMRKLATIIWHMLTRRLSYWECRQLTTE

SEQ ID NO: 57322 - protein, 345 aa, unidentified
MELHTIGIDLGKTVFHLVGLNQRGEVVVRKKFSRKQLLHFTANLQVELIGMEACGGAHFLGRALQEQGHAVRLMPAQYVKPYVKTNKSDYIDAEAIAEAVTRPRMRFVPIKSDDQLDLQSLHRVRERWVMRRTAVVNQIRGLLLERGITIRKGRCHVDAALPGILEDASTKLSGALRLLLAQLRLELDHLQTRIDEADAVIQQTAGENEACRRLVAIPGVGPVTATAIIAAIGNGAAFRKGREFSAWLGMVPGEYTTGGKQKLLGISKRGNTYLRRLFVQGARAVLQQSAKQSSGLSAWLTQLTARTHPNVAAVALANKLARMAWAVLAKNEPYRPPVLADAATD

SEQ ID NO: 57323 - protein, 355 aa, unidentified
MTSTKYIGMDVHKESISIAVRNAAGKIVMECVIETKASTILQFIDGLCGEIHLTFEEGTWAAWLHDLLKPHVSKVVVCDPRRNALLQEGNQNDRVDARKLAELLHNNQLRSVYHGDHGLRTLKELVRSYLTITKGLTRVMTRVKAIYRSWAIPCSGKQVYAPRHRAEWLAKISELGVRRRAEFYYQQLDALRTVRQQVRRELLAEAKKHPAWKRLCGIPSIGPIRAAVLLGILQTPHRFRTKRQLWTYSGAGIQTSSSADHRVVQGQLERKKKQVEIRGLNRNYNHDLKNLFKGAAIVAATKPGPFAEFYAKLLAKGLRPEMARLTLARKIATIVLIVWKRGVCFDAQHLKPQTV

SEQ ID NO: 57324 - protein, 358 aa, unidentified
MGKCNVLKKNGKRIEVGTGDEVYVGLDVHTSHTNVTVRLNGQEAAKWMSPPQPAQLIKSLMPIRDAARKVVYEAGPCGFELYRELKKAGFPAEVWPPGKMPRPANQGNKTDRLDASTLATYAEKDLVEPIVVPTRREEAERQVMRTRNQLMKKLRRVKQQIKSFLTMHGIEQPEGLGHWTRAAVGRLRRLPLRDGLRTCLDVLVDELSSLEGLVKTVEKKLRDIGRSEKHADSEKILRSHPGIGRLTAMNFMLEVYRPERFEVHRQVSTFVGLVPRVSQSGDTRRDGPLKRAGRESLRAMLVQAAWQWVRRDARANKIYQRLVGNTGCAQKAIVGMARKICVNLWCMWTRGEYYRPDG

SEQ ID NO: 57325 - protein, 428 aa, unidentified
MKFKEIDAQNQRVEQITTSHLVIGIDMAKEIHVAQATNFRGLVVSKRHLSFSNSVEGFEKLSRWMSELLQKHRLNRLIIGMEPTGHYWFNLANWLTDKNLHVVMVNPATTKRNKENRDNSPSKNDPKDALTIADSVSRGFYYEYTRQSHEFQRLKTLMSDREFWVTNSVRLQNRIVRWLDIRFPEYPSVFKDWTCKRSLATLKTFPCPQDLEKHTVADVLSAWRVHMQRAGGTTGTEKAALLIAQAKRSVGERVAVDEAKADLKRLIEEFERVTSMLEQIEKDIEALLSEIPMAQQLRTIKGLGKIFTAAILAGTGDLRQYAHGRQVLRKAGLNLAQSKSGKRKGQIVLSKRGDSTLRKYLYLATVQLVWNNPVFRHLHEHNVHEKMMKKQQSIFKLIGKLARILVGIVQRGEEFTPEKTVLNWTEAA

SEQ ID NO: 57326 - protein, 428 aa, unidentified
MDFEVKHLICAGLDVHKKTVVAAVCITDPVTLEATYKVKSFSTNNSQIAAMRDWLLSYNCLHVCMESTGKYWIPVFNILEPHMHVILTHPKYVKAIKGKKTDKRDAKWIANLFRFDIVKASFIPPADIRALRELSRYRLKLSYMRSAEKNRYQNSMTISRIRIDCVLTDPFGKTASSIMNYLLSDVPFDEKECAKLIHGGIKVSNEEIFDSIRGFEILSEQRFKMSHAKQHMELLSSYMDEIETELFRLSRPYDEVIKRISRIAGFTERSALFVISEIGADMGVFESDKHLCSWAGLTPANNESANKKKSTRCSKAGQYLKPLLIQCALAAVKSRKNPYYAIKYNRLAKRRGRKKAIIAIARMMLTSIYHVILNNEEWKPDDYEAIIHPSKPEKVALTLDNVIQFLGEQGADPETLKLLQQQCAVHSG

SEQ ID NO: 57327 - protein, 428 aa, unidentified
MLIYRVAAIDVHKKMLAVVVADVAGEGEYQFERRKFGATPDQLHLLAQWLSQQEVEEVVMESTAQYWKPVWGALERYWKPGRQKRDGATKMSGTLHLCQAKSNRGPRGRKNDFADGERMIKRLVAQELVLSFVPDPEQRLWRTVTRRKWQLTRDRVRFQNQLESLLEQAHIKLSSWVSDLLGLSARRMLKALAAGETDPAALAALADCRLRATPEQLRDALGACAQLHGVYRRLLKMALEELQLMEEQIEKLDREAAGLLQQHQDAVQRVAGVPGFGTDSALQMIAEVGPEAAAFRSEKALASWVGVCPGDEESAGESKSTRSPKGNRNMRRLLNQAAQSAVKVKGSIFDVTFRRLLPRLGYKQAVWAIAHRLCRLLWKILHEGVRYEERGPAVSAKSKRTRTARMIKELQKLGYRVEAAPLAAITPA

SEQ ID NO: 57328 - protein, 451 aa, unidentified
MSGTKKSRNKRDISPTHPDAAAIDIGATMHVAAVRPDKISEPVRSFGTFTGDLHRLADWFTKCGVRTVAMESTGVYWIPVFEILDQRGFEVIVVNARDAKHVPGRKTDISDAQWLQRLHEYGLLRASFRLKGEVAVMRAYLRQRERLLDYAASHIQHMQKALTQMNLQLHHVVADITGVTGMAIIRALVAGERDPTVLASYRDPRCHASAETIRQALVGNDREEHIFALTQALELYDVYQAKVALCDVRIEAVLKRLRKASSTPVGKPPTVRTTQKQSNDPAFDVRAALYGLLGCDVTQIHGLGPYLTLKLVAECGTNLSAWPDAKHFTSWLCLSPSNKISGGKVLSSRTRRSGSRAAALLRLAAVAVGRTQTALGAFYRRLSARVGKAKAVTATARKIAVLFYNTLRHGMEYSDPGASHYEENYRRRVLTNLERRAKSFGYTLQPAPTSG

SEQ ID NO: 57329 - protein, 466 aa, unidentified
MSKPEQNSGPKVAGRKGSKTKPVVRECQPDAAGCDIGAREIFVAVPADRDANPVRHCGTFTGELNKMAEWLVQNKIKTVAMESTGVYWIPVYDVFEKHGLEVRLVNPRNMKNVPGKRTDYHECQWIQYLHSMGLLAGAFRPDAEVRAVRILTRHRNDLVDMASQHVQHIQKALTQMNVQFQHVISDITGLTGLAILDAIISGERDPAVLAQLRDPHVKASPETLRQSLEGNWDPTQIVVLKQRLELYRIHREKIDESDQEIEKLLAAFVPQVDPEKKPMPEDRKQKQRRRKKKTGSPGFDMRKEGYKLFGVDLTQVPGLMASVFTLFSEVGRDMTRWPTAAHFASWLGLCPDNDISGGKVLWRANRQVKNRAGTLFRLAAHSLHRDQTQMGHYLRRMKAKQGPAAATTATAHKIAVIFYTMIKNQVEYDATLWADRDLMREKRMEARLRKQAALSGFKLVPLEATA

SEQ ID NO: 57330 - protein, 345 aa, unidentified
MFYVGVDLHKSFTQVYGFNDATGEVVERRVSNDKGSIRAVMSQFGENAKVVLEATRNWYWFVDLLQEMGIDVVLSNPLQTKAIAYAKVKTDKVDARMLSHLLRADLIPFAWIPSMEERGIREMLRTRLTLVRIRARFKNLVRSILAKLNIVLSHGDIWRGKGRKELEQLNLPSPYNEILPHYLSIIDNLDKYIEEWNRKIERIAKETPEVFLLKSVPGIGTISALTILYETGPIDRFPSAKRYSSYAGLVPRVKGSGGKFKTGHLSRQANMYLKWIYVEIATGIVRIGKGYLYEYYKKQMYKKGKNVAKIALARKISRMVYHLLKQHITYDTFVERNVNKMRRTG

SEQ ID NO: 57331 - protein, 447 aa, unidentified
MRCLGLDVHKDFAELAQALPGGAVRQLGRIRTTAADLRAFAESLGPDDQVAMEATINTFAIARLLEEHAGRVVVSNPMRTRAIADAKIKTDKVDAGVLAQLLAADYLPGVWQPDESTRVIRRLVARRAHIVRQRTRLKNQVHAILLRNLVTGCPATDLFGNRGRAWLQQVSLPADEREALDSNLRLFDLFGAELVVADSACAGAAVGRDDVRRLMTVPGIDFAVALALVAAIGDIQRFPSSQRLVSYFGLDPRVRQSGGQPARTGLHITKVGRAHARGMLVEAAWAVARTPGPLHAFFDRVRARRGPQIAAVALARKLAVLTWHLLTRQQDYLWARPALVAAKYRKLDLRAGAPSRRGQRGAAANYWESAAARERDRALPAAAEVEYRRLTDNWKERLRPLAVTEGRNGRGRPKGEATLRPEAGRAAEVTSPSSALLRGGRPRPDGG

SEQ ID NO: 57332 - protein, 353 aa, unidentified
MATAEGRRSGEVRFEGTIVNKLDAVRRLVEKHARRHGQLQFCYEAGPCGYAIYRQITRLGHDCTVVAPSLTPTRPGDRVKTDRRDAVTLARLHRAGELAAVWVPDEAHEAMRDLVRARTAAMESQRRARQQLQGFLLRHNRIFTGGHNWTKKHRRWLTPVRFDHPAHQIVLQDAIDAIDDAGARRARREAQVAELLPQWSMAPVVEAIQAMRGVGFITAVTVAAETGGLRRFESPRQLMSHLGLVPSEHALGGRTRRGGITEAGSKDTRRVLIESAWTYRTNARIGPTHQSRLDGLPKPVREIAWNAQVRLCSRYRRLAARGKPQTVVTTAIAREMAAFIWAIARHVQPAETV

SEQ ID NO: 57333 - protein, 347 aa, unidentified
MDNPEGMGADVGGLDVSAKELVVMVRREGKTESCRSFPNTSAGHQELRRYLTHRRERVRVCMESTGLYGLDAALALQADPRIELMVANPRAVKDFSRALLQRSKTDPLDALLLLEYAARMPFQRWQPPAAEGLQITALARRIHALTEQCTMEKNRLHAVEATATTLRVIVQDLRRSVRGLETAIAKLSRAAHQIVAATPELERRFLLLQSTPGIGAVSALQLLGELVLIPANCDVRQWVAYAGLDPRQHESGSSVHQKARISKVGNRHIRRALYMPALTAVRFAPHLRAFYLHLQARGKCKMVALVAVMRKLLHAIFGMFKYDAPFDGAKLCPALCLATPPEVACAA

SEQ ID NO: 57334 - protein, 315 aa, unidentified
MTQTSITTAGIDTSKAKLDIAVHGRIERWQVANALPGWRALAANLTRAGVTRVGIEATGGYERGVVEHLRAAGFTVLVLQPMQVKAFGRVHLRHAKNDALDAILIAACAAAMGPPRIAPDPRLADLAGYLTFLEQIEEDIARFKTRLEHIDEPRLRSLVGSDIRRLKARRKAQIRTIAKLLRGHDDLASRLDLVLSIPGIGERTALALIIRMPELGQVSREEAAALAGLAPFDNDSGLRKGQRHIAGGRGRLRKSLFAAALPAAFRWNKALIALYARLIANGKAHNAALIACARKLLVYANTVVQRGTPWVENAA

SEQ ID NO: 57335 - protein, 454 aa, unidentified
MQRMLWIGISSYRIDGSRKAPTTALCKIVNQLDTARRFMWNKVTLQSALWIQHHKSSLEVAFMVCVGIDVAKDKHDCFILSSEGEVLADVFTIENNREGFDTLLRQIRSCTSPTDIIKVGLEATGHYSYNILGFLLEKGMPPYLINPLHTNLYRKSLSLRQTKTDRIDARTIATMLMSDVDLKSYTNTAYHNEELKSLTRYRFDKVSERAKLKQSVSRLVNILFPELEKLVPTLHMVSVYAMLSEFPGAKQIAEAHLTHFKTVLLEASKGRYDREKAVAIRDAARRSVGSVMPAKSLELRHTIRLIQELDKEIEEVEAEIFAILDTMQSPITTIPGMGPRMGAMILAEVGDFSRFDSADKLLAYAGLSPSTYQSGKLNATGAYAHMEKRGSRYLRYAIFNATKYVCIWDPTFKAYLARKRSEGKHYSVAISHAAKKLVRLIYAMQKSGRPYQPS

SEQ ID NO: 57336 - protein, 351 aa, unidentified
MHSITNTELSSHEETRCQFNGGRCAIKMGIDVHQDFHVVVEQVGGTNPKPPQRFGKQAFVHWAAKLKQSGAEVHAVYEACGFGFTLQRQLAALGIDCHVVCPQKLDERNKRVKTDGLDAKALCLKLDRFVQGNRDALALVRVPTEEEERSRAIHRQREQLVGARKRLEAQGRSLMVNHGLEPVQNWWKPRTFAALPVAQWMRELLLNSQPILLALQEKIAALTVQLQSAAAPNQPRGLGKMTSVVIDREIGDWYRFNNRRQIASYTGLCPGEYSSGNTRLQSCVTKHGNPRLRAALVELAWRLVRFQPNYKPVVKWRHILAKVVAVARQLAVDLWRIETGRLRAEQLGLTI

SEQ ID NO: 57337 - protein, 430 aa, unidentified
MTFTGLDLHKQEVEAALLSQDGRLLHRSRFPATRAALEAFAAAHLSPLDSVVAVEATTNTWPVAAILQPLVHKLVVGNPLRTKAIASAKIKTDKVDALVLAQLLRTDYLPEVWIPDCHTRLMRQRSTERAMLSADRTRIKNRIHSVLHQRLIAAPCTDLFSMKNIAWLKALELDPFGRDSLDRHLRQLDRVEQELAALTSQIAVHAHQTPAVKLLMTLPGVDFTVAETILAALGDLSRFPTPDHAASYLGLVPSTRQSGDHCYHGPITKQGARHARWLLVQAAQHAALHPGPIGAFFRRIAKKKNRNVAVVAVAHKLVVLAWHMLKNNEPYRYAQPKTLQAKLSRLRILATKQKRKGGNAKGQPRPPQYGKGCTKAVPSLDQLYLKEGLPPLSQQLKPGEEAMLESRNLTAFAAAVRVPKRIPKGASKKA

SEQ ID NO: 57338 - protein, 315 aa, unidentified
MANLTKSKTVVNVGVDVGKQYLDVCIHEKDLYWCEDNTAAGIKRLLKRLSHYQVERLVMEATGRYEFELAQMAYERQLPVCIVKPLRVRRYAGANDQLAKTDKLDAQIIAEFAAVLKPKVSPEKSKNLIAIKDLVTRRRQLINLRTQESNRSGIMGKTLEVSCRRIIRYINAEIERIEKQLARHVSEQAEWTEKQGLLKTVPGVGDTLVYTLLADLPELGELNNKEISKLVGVAPINRDSGKLRGKRRIQGGRANIRTVLYMATLSATQCNPIIKAFYKKLVAQGKHKKVALTACMRKFIILLNTMIKNKTEWAF

SEQ ID NO: 57339 - protein, 343 aa, unidentified
MDYFAGLDVSVKDTSVCIVDDTGKIVREVKVASEPEALLQVLRGPSYRFKRIGLEAGPLSQWLFSALGEANLPVICVETRHMRAVLKAQINKTDRNDARGMAQMMRVGLYRPVHVKTVRSQKLRMLLTHRKLLQSKAIAIENDLRGTLRNFGLKVGIAGRTRFEARVEELVEDVPDLAVLVEPLLVVRRVIHEQIAVLHRRLLTLVRDDEVCRRLMTIPGVGPVVALTYRATVDVPARFRKSKSVGAVFGLTCSRNQSGERDLPGVISRCGDEMMRAMLYEAAQSLLVHSKRWCWLKAWAMQIAKRRGMKRAIVALARRLAVIMHRIWVNGTEFRWTREAAAV

SEQ ID NO: 57340 - protein, 365 aa, unidentified
MNHLAIDLGSRESQICVRNSEGVILEAERRATTGLWKYLAGKEKCRVVVESCAEAFAIADAARKAGHEVRVVPTSLVRALGVGSRGIKNDVRDAQNLSKASCRMEDLPSVHVPGEVSRERKAMSAMREALVEVRTKLVNTARSWLRTQGVGVLAGGTLPTFPVRYRRYAEKKGKPLPSHVERVLQTIEELNPKIAEADKELEATAEQDATCKLLMTAPGVGPVTAVRYAAAIDEVRRFNDAHGVESYLGLIPGENSSGDAKKRRMKGITKAGPPRVRWALTQAAWTALRCRKHDPMVAWARQIEARRGKKVAVMALVRKLAGVLFAMWRDGKPYDPRHESMGKVERARGGEATRGADVTATPLPS

SEQ ID NO: 57341 - protein, 338 aa, unidentified
MTCIGFDHHKKWTQAAAVDDQGKIIREMRVLNDNSSLKGFLKGLPQPLKGVVEAGPTWGWIYDTLTELGVKMIVANPSAVRAIAAAKIKTDKIDARMLATLLRVGLIPEVYVPTEVVRSQKMLWRERIWLVRMHVRLKNRIHRLLNHYHLEVPEFSDLFGAAGRRFLEELKLPEPGNRILNAQLKLLQSYRLQIEEVQRWAVKATQGHPNRAYLESLPGFGKVFAPIVALEIDDPKRFASPGKLASYCGLVPSLYSSGGKSWQGGIGKEGNHWLKWAFVEAAWAAIRSSAYFRVVYQRLRQRKTAQVSIIACARRLCEIAYHLLKERRCYEERPFRCA

SEQ ID NO: 57342 - protein, 426 aa, unidentified
METVEQLDPAAYVGVDWASEEHAICVLGVDGRKKSSFMVAHSRGGLAELVKRLKRLGPAGRVPVGVERPDGRLVDALLVAGHPVVPVSPNAIKAWRESEVVSGAKDDPGDAEVIAEYLRLRSHKLTVLAPFSEQTRALRAVVRARDDLVEQRVGAHNQLEACLDAFWPGAKALFADICSEIALAFLERYPTPGSARGLGEKRMAAFLARHAYSGRRPASELLNRLHAAPEGIGDGPEANARRDAVLGYVTVIRALNTSIKSLERSIAARLGEHPDGEVFTSLPRSGRINAAQMLAQWGDCRQAYDHPDAVAALAGVTPVTKQSGKHHAVQFRWACDKRFRQAMVTFADNSRHASPWAADIYQRARARGCDHPHAVRILGRAWIRVIWRCWVDRVAYDPAHHGAAIKLAAQSAPGAAAADAAEQQAA

SEQ ID NO: 57343 - protein, 457 aa, unidentified
MRLRTRVPEVIPMSKSKPYAALPVNRVLLPQLTQGRAGREVVVGADIGKFEILAVPRWGSADFGRPWRVENPRQIPELVRLVAQLAQGRQLRVALEPSGTYGDALRQALHDAGVAVLRVSPKAAHDYAEVFDGVPSQHDGKDAQVVAELAALGKAQPWAYQPASPWEQELTYWVEWMVAHRQILTTWQGRLEGLLARHWPEATEVLKLSSGTLLRVLKQYGDPKALAADSEAAQRLARWGRAFLSPEKIEHLLAGARSSVGVRVGDWQRRQIQDYAEHALAARREAERAQRHLRGLAEGHAVLQAQGKVVGVPTACVLWASTGDPRNYHAASAYRKAMGLNLVERSSGQYQGRLRISKRGIARTRQWLYFAALRLVQNCGVRPWYEAKKARDKDDARRVIVAVMRKLAMALYHVGVRNEEFRPRRLFGRICGRRGSSAELGSGVRNQRGAAEVSARG

SEQ ID NO: 57344 - protein, 468 aa, unidentified
MKDNRRRSPGKPRVSRTVLDQINRNAAGIDCGSAEHFVAVPPDRDPTPVRAFGTFTTDLHRLADWLTACGVTSVAMEATGVYWIPIFELLEARGFEVLLVNARHVKNVPGRKSDVSDCEWLRELHSVGLLRGSFRPDDGIVALRTYLRHRQTLIETASTYIQRMQKALIEMNVQLPLVVSDITGATGLRILRDIVAGRRDPAQLAQHRDPRCRATEAEIQAALTGHYRADHLFVLQQNLELFDTCQAQIAHCDTTIERHLHQLTATRPAPPGPLPAARQRRRHTPKNNDVGFDVRPTLFQLTGGVDLTQIDGVAALTALKLVSEIGTDMNRWPTEKHFTSWLTLAPRNKITGGRLVTSRTQPSANRTAAILRMAAMTLGRTSTALGAFYRRIAARRDKPHAVTATARKLAILVYRALTGNFIYRDPGADHYNAEQRARLIRRLRHRAATLGFELVNRTTGEVLSAGVS

SEQ ID NO: 57345 - protein, 345 aa, unidentified
MELHTIGIDLGKTVFHLVGLNLRGEVVVRKKFSRKRLLHFTANLKVELIGMEACGGAHFLGRALREQGHEVRLMPAQYVKPYVKTNKSDYIDSEAIAEAVARPRMRFVPIKTDDQLDLQSLHRVRERWVMRRTAVINQIRGLLLERGITLRKGRCHVDAALPGILEDASAKLSGALRVLLAQLRLELAHLETRINEADAVINKTAGENEACRRLVAIPGIGPVTATAIVAAIGNGAAFRKGREFAAWLGVVPREYSTGGKQKLLGISKRGNSYLRRLFVQGARAVLQQSAKQSSGLSAWLAQLTSRTHRNVAGVALANKLARMAWAVLAKNEKYRPPMLAGAATA

SEQ ID NO: 57346 - protein, 346 aa, unidentified
MLYAGLDLSRKRLDVHLLDQAGATVEAKAARPDADGLRTLALRLGRFGVPIRAAIESMNGARFVHDQLERQGWEVEIADAVKIKGLAPLACKTDRIDAWVLAELSRRELVPAIWLPDPAVRAERERARFRLHLVRHRTSLKQRVHAVLLAHGRPCPVSDLFGASGRKLLARLQLPEPWAGSVEASLYLIDELEREIDACERELQRLGAEHRYVPLLRSVPGIAWVLAYTIAAEIGDIARFPTPRRLVGYSGLCPRVYQSGDSDRRGPLAKQGPKYLRWALVEAATGACRHPVYRERYERTKARLGKQRGAKVAQVDLARRLAEAIWHMLSRNRPFAPAGATCPLAA

SEQ ID NO: 57347 - protein, 353 aa, unidentified
MTDIVTHIDRIATIGMDLGKRSFHLIGMDTRGKVIMRQQLSRGRLERHMANLQPCLVGIEACAGAHHIGRRLSTFGHNVRLIPGQYVKPFRKGQKNDYRDAEAIAEAVQRPTMRFVPIKSAEQLDLQALHRIRSRLVSHRTAVINQLRGFLLECGVIVPQGPARLREILPSVLAQRTDVLSPRMIRLIEELADDWRRLDDRVDAVTSEVQTLARQDECCRRLTSVPGIGALTASAVVAAIGNGAAFSRGRDFGAWLGLVPKQLSTGDRTILGRLSKRGNKYVRTLFIIGARAVLAKPGSWAKFGLQGWLAAAAKRLHHNVLAAALANKLARIAWSVLYHGRSFARDFEPQSVS

SEQ ID NO: 57348 - protein, 373 aa, unidentified
MKKTTRWVGLDVHAETIAIAVAEKDGTVGFVSTIPNRPDAIRRALKKLEKGGKLHACYEAGPCGYGLYWQLAEMGIECDVVAPTLIPVKAGDKVKTDRRDAEKLARLLRSGDLTAVWVPDAEQQALRDLVRARHAAKRDQLRHRHRLGKFLLQLDARRPEKILAWGIKHMTWLEGLTLPHASHQEVLVDYLNEVKRAKERIERLEQAIDAGIARAPKHLQELIAALQTLRGVAKIGAATLVTEVGRFSRFESARQLMAYVGVVPREHSSGGSTHRGSISKTGNARMRHVVGEAAWSYRHRPANGPGLKKRQEGQNEDVKAIAWKAQHRLHKRFQKLSAQGKHHGRVVTAISRELLGFVWAIGCKVEAEIDAAA

SEQ ID NO: 57349 - protein, 347 aa, unidentified
MIIIGCDLHTRSEQIAMLDTETGEFEERRLEHEDGEARRFYAGLKEPALVGIESTGYTRWFADMLAELGHELVVGEAGKIRAKETRKQKHDRRDAEHILNLLLRGDFPTIWLPSAEERDVRVLLEHRHQLVELRTRAQNGLQAIALSYGLRRRRRLWSERGQEELKKLPLREGMERRRADLLRLVRQLDTWIQELDRRIEQEVAQREEAQRLMTHPGVGPQTALATVLVLGPVERFPDDRHLTSYLGLIPQEDSSAGRQRFGHLTKQGNRLLRWLLVEAAQTASRYDPRLARAYRRLAFRKGRAVAKVAIARKLAIRLYIMLRDKIDYPEFCRRGSHAGMPEEVALA

SEQ ID NO: 57350 - protein, 411 aa, unidentified
MNNTLFVGIDISKRSNVATFMNCEGKVVGRLTFSNNGSGADRLVAKILSYYEKEDFEAIRIGMENTSVYSKNLVWFLYEHEALNEYKLSIIPLNAIMVANYKKSFLDMDKDDITDSFAIADFIRIRPGLLPFKLDDRQEALKIMTRSRYNYVQALSRMKSQFLTRLFLSFSEMEAGKPFYSIFSKTSLSLLEEEFTLDELAEKPIPELVEFLQEKGGGKFQNPEEIAKVLKKAASSSYRVPAMVRESLNRTMASDMEIMRILENEIHNCDKNIEKLMKSVPAILVSIPGIGPVLAAGIMSEIGDISRFQKQESLGKMAGFKWKRNQSGKKESEDKAAVLSGNKKLRYYLVEAANRVRIHDPVFEAYYRKKYAESKTHAHKRALILTARKLVRVIFYLLKENKLYKPDVGIS

SEQ ID NO: 57351 - protein, 358 aa, unidentified
MNRKAGISAAQVIGTVDGKQVFGLDIAKSVFQVHTVDMGSGEIVNQQLKRAKVLTYFASRTPCLIGIEACGGAHHWARKLTAQGHSVRLIHAKAVRPFVGGNKTDAADARAIWLAIQQPGTKFVGMKTLEQQATLVLHRQRELLMKMKAMQSNALRGLLYEFGATFARGKNALFAEIETALEALVGDIPQYVADSLREQVKRVKDLAKDILAIEGRLAQRLRDDKDMQRVAQMPGVGLLTATAAIATMGQASAFKSGREFCAWLGLVPRQSGTGGKVKLLEISKRGDTYLRTLLIHGARSVLTHAREPGPWLEQIKARRPVNVVIVAQAAKMARAIWAVTAKQEDYQRGYCSVKPKAA

SEQ ID NO: 57352 - protein, 428 aa, unidentified
MAVIGRAIGLDVHLDFCEVAICEAGEVRSVGRIETTPERLELFAGSLGPEDRVALEVTGNAWEIARILEPHVAKVIVVSPADTGIRQARAKTDRLDARTLARLLAAGELDAVWAPDEWTRVMRRRLSRREQLVRSRSRAKNEVHAVLMRRLKGRPPVSDLFGVKGRQWLRELEFPVEEQETVDGCLRHIEFLDQEIAQVERLIATEALDSGEIRRLMSVPGVNVIAAATFMAAVGDIRRFRTQRQLVGYLGLDPKVRQSGIAPAKSGRISKQGSASARWALVEAAWSVVRQPGPLHAFHARLRVRRPSQIATVAVARKLACLFWCLLTRGEDYAHQQPSLTAKKLRLLELRAGAPAQKGTPTGVWATRQAMREGERRLAEQAEASYTRTVRDWQAARPAAAKVGASVTPGRASQKPTKGKVARQTTSP

SEQ ID NO: 57353 - protein, 371 aa, unidentified
MNSILYVGMDVHKENYTLCCYSFDRDKVEYRQTVPSDYRLILKYLEQVRRKYPEEVEFICGYEAGCLGYSLYHQLTDHGVKCIILAPTTMGITNTNRVKTDRKDAANIARCLAFHTYSAVYVPDGEDNAVKEYLRMRDDQKLALKKIKQQITAFVLRLGKQYTGGKSLWTENHLKWLRGLDLTLLEKETLQEYLITYDYLTDKLERLDARIEELARNERYGERVRRLGCFIGIKPHTALSLLVEVGDFRRFEKAPNFAGFLGLVPGEDSSGGGRNRLAITKAGNSHLRRLLVESSQSYSRGTIGFKSKELKKRQEGNPPEVVAYADRANERLRRRYYRMTLKNGAKRNVAIVAVARELACFIWGIMTDEIA

SEQ ID NO: 57354 - protein, 416 aa, unidentified
MWVENQLHKFIWRVLLMISVGIDVSKGKSTVCILKPYGEILSGPFEVEHTDISLDELKVMLLRLNEEVKIVMEATGVYHLPILDYLLEAGLFVSVVSPLLMKKYRSRDIRNVKTDKRDALNIANYGIDYWYRLEKYQPQELVYNELKLLGRQYRSYMEMRIKAVQNLTHLLDYTMPGIKGKLSGWNEKSGKDKLSDFASEFWHFDNIKKYSEAKFIEKYNCWAKKKGYRQSCEKAEKIYYLACTGIPTIASTTPSTKMLIVEAIKVLREINNTLGVIITRMKELSKTLPEYETVRAMGGVGDVLASKLIAEIGDVRRFHSKNALIAHAGIDVPPYESGQFIGRRRKITKRGSAHLRKIGYEVMRCLKAMKEPEDGAVHQFILKKEAEGKPKKVAKIAGLNKFLKIYYARVMEVYQP

SEQ ID NO: 57355 - protein, 374 aa, unidentified
MSNHSEAFVGFDTSKLRNAVAIADGGRTGELRFLGEIDNTEAATAKLVKKLAAKYQRVTFCYEAGPTGYGLYRQIKGLGHECIVAAPSLIPKRPGDKVKTNRRDAVSLAKLLRAGELTAVWVPDRHHEAMRDLVRTREAAMLDLRCQRQRVSAFLLRQGRPYAGRNSWSKAHMNWLASQTFDYPEQRIAFEEMMLAIRQAQERLDRLEQAIRGAVPDWSLAEVATALMAMRGIDLIAATTVLTEVGDLSRFRTPHELMAYLGLVPSEASTGNTIKRGPITKAGNRRARRMLVECAWSYQHPPRVGRAKQQKVDAASPAVREIAWKAQCRLYRRYRALIRRGKLKTVAITAVARELAGFIWAVSREITSARVAAK

SEQ ID NO: 57356 - protein, 392 aa, unidentified
MYLKQSVGLDVSSREFKAAFDVMDHQQQIKVKATHSFENGLSGFKELDRWVQKHCDPSAPITFTMEATGVYYENLAWHLHRKGFTVSVVLPNKARKYMQSLGIKSKNDKIDAKGLAQMGAQQQLKPWKPVSEQLLQLRHLTRHLESLQRLSTIFGNQAHALEHSRVGSKLVKKHLQQSKKSIVRQVDEVKAAIIALVEKDDKLRPRIKNICKIKGVSVLTVAVIVAETNGFTTFENQRQLVSYAGYDVVEDQSGKHVGKTKISKKGNSHIRRALHMPALNVVRYEQRPFPDLYARVYECSKIKMKGYVAVQKKLLTIIYALWKKNEAFDENYQPKMTSGNEESNVLFPLSGKESNELNGDGQKEVVPQQGGTTQDGHRCNESPNALFPLVQT

SEQ ID NO: 57357 - protein, 391 aa, unidentified
MIFVGIDVAKDTHYAAVSDDSGAVLVKPFAFQNNAEGFCLLLKKLSEFDRSKLLIGLESTGIYSENLICFLYESGFRLAVINPIQTATLRKTAIRKTKTDKVDTMLIIKSLMVNSYRLYSQRDADSLKLRTLCRFRQNLKKSKARLKIQLAGYVNLVFPEFGKFFKSGIHIAASYALLKKYSSPKEIAALRTSTLCTLLSNASHGRFGKDTAEALKSLALSSVGVKNPYISIQIAQTIAQIELLEQQIKDLNSAIEEAMESLNSVLMTVPGIGAVNAACILGEIGDIKRFSKPCKLLAYAGLDPTVRQSGQFTAKSTRMSKRGSALLRFALINSAWQLTLNDTTFKAYYDLKRSQGLNHYGALGHVAHKLTRVIFKLLTSDTPFNPAKLVA

SEQ ID NO: 57358 - protein, 358 aa, unidentified
MTTVSKKQKWFNTIQLTHDDDLYVGIDTHKESFHVALWLNDAPAIDFVTPPHTDKLVAILEKLRPALHLVVYEAGPTGYSLARALKDADLPVSVVAPSKTPRQSAPDSKTDSLDARKLAEYAAKGLLRHITIPTRHQEARRQLTRLRQQLVAKQTRVKLQIKGFLLQHGIDQPAGLSHWSGNAVEHLKNIRLSKPLRYCLDTLIEELLFALAQVKSAEQKIKEAFSEKPICTTVKLLATHPGVGPTIAAAFAAEIFNPKRFRDKTQLAKYVGLAPSVHQSGQTLRDGPILKTGRPQLRCNLIQGAWAWIRKDTNAYKTFIRLVHNTGHQNKAITAMARKLAVHLWMMACENKPYNCAV

SEQ ID NO: 57359 - protein, 426 aa, unidentified
MNTNEVTRYQQFRQFRSEIKKSSDYLVIGIDVAKDKHYSFFGSARGETFLRRLIFENSITGFEKLKSRIESIQAARGKQKIVLGLEPTGNYHKALGQWLIDQCYQLVLVTGKAVKENRETLDGRWDKNDTKDSANVADLVAQGKCQFYENPDPQIIQLRNLLSLRKRLKREEHSLRMRIRNSLVCKYFPEMDRCWGTCLQENLSIVRYFLDPKKITAMTFRDFLIRVSTKDRGDRQLKRLRKIYDAAADSIGCPVGPGAEFEAEMLVERLLGVRKRIEETRSRVKEVAEQFASYKKLQTIPGIGPYISALIIATIGDPNRFKSYKQVIRLAGLDLNAKRSGKRSNLAVPVISKRGDADLRYGLYQAALIASYRNEHFIKYYTRTLKGRERERGIRTKMRVKLASKLLIIAWTLMKKSEEFDPSLLT

SEQ ID NO: 57360 - protein, 428 aa, unidentified
MSNQELIRRKQYCQIVKEITGSDQYLVVGIDVGKDKHHGFMGSATGKSLFRKLIFKNNLDGFSRLLKTADEIKVQNGLCKIVYGLEPTGNYHKPLARHLIRCDSNVVLVSGEATKKNRSLLDGRWDKHDTKCAANIADLVSRGRCLYYDCPSPSIFELRSLLSLRRRLKREEHGLKMRIRNSLLAQYFPELDRFYSACESESLAIVQWFLNPDTISAMEFGEFFHMVTKTRRGIAQTLRMRKIHGLATESVGCPLGPAGEFEADLLVEKLKQVRQQIQKTADLIRNFCLEFDEYSYLLTIPGFGPYISARVLASIADPFRFENRKQLIKLAGYDLCAKRSGKTSDKAVPVISKKGNGELRYALYQAANVAAAKVDLFRTYFTRLLRGRERERGIKTKMRVKLAAKMLVIAWTLMKKREPFDPAYLNIE

SEQ ID NO: 57361 - protein, 301 aa, unidentified
MDNHTQYSGFAGVDLAKKVMQIHFVTGDGEITDKQVKRAEFLDFFRNRTKCLIGMEACGASQDWARKLEAMGHEVHLMSPKAVKPFVSGQKNDYNDAIGIYKAMFNGVRRVPVKSTEIRDLQTLRRIRSQVTKDKVKEINHVRGLLAEYGIVMGKSITAFNKGISSALESLKERGDVSPLVAEELQTTVESIKTKIERQKRLDREIEQLARGCKNYENFLKTPGVGPFTAAMLCVLLCDPAIFANGRQLAAYIGLAPRSRGSGGKNFIIGIPSKFNCDSESRAVFVECAQALLDIKISHPG

SEQ ID NO: 57362 - protein, 313 aa, unidentified
MSQNISSIIYAGLDVAKASLALCLQGTCHSIKNNPAGYRAMLKLFQPFAHLCVVCEATGGYEKAAVTALQQAGVPVAVVEPGRVRHFACAQGRRAKSDPIDAAVLAHYGQAMKPSPTTALSAAQQRLRHCSTRRQQLVQMTIDERGRAEHYADAISRRQSQQLLRLLEKQIQQCEQTIASLLEEDQELLARAQRLDQIPGVGPVVTATVLAEMPELGKVSDNAAAALAGVAPYDRDSGQQQGKRSVSGGRKTVRCVLYMAALSAIKHDRILRTFYARLREAGKKPKVALTAVMRKLVVLMNRLLKNPHFQLAT

SEQ ID NO: 57363 - protein, 358 aa, unidentified
MVKVTTIGIDVAKDVFGLHGVDGEGRVAFKKRLVRSRLVEFLSKLPPCLVGIEACSSAHYWARKIEQLGHRVRLMSPRFVKPYRKSDKNDANDAEAICEAVTRPSMRFVPIKSEAQHEVQALHRVREQLLKSRTALVNQLRGLLAERGIIAPQGIARARRLLLGILADPERHGLSGLFGETLQEMAERLRFLDERVGAYDDRIERVFKEDERCKRLAKIEGVGPLVATAVVAAVGNASEFKSGRELSAWLGLVPRQYSSGNRNQLLGISKRGDRYLRTILIHGARAALRRADHKRDQRSRWVMRIKLARGYNKAAVALANKNARIIWALLTRGEKYRPPAISVALPTADRISLIQVQA

SEQ ID NO: 57364 - protein, 426 aa, unidentified
MRVMYERVAGIDVHMDMIKVGVRVPGHRAWTRTSEVLEYRTFFGVLLTMAADLRKRGVTHVVMEASGVYTEPVYYALAGQGFEQVAVINPAHAKALKGHKTDAKDCLRLAELFECGLLRGSYIPSPELKDLRDLTRYRAKTVQARTSEIQRLAEALESAGIKLDSVVSDLTGKSATLMIEGLIDGERRGQVLADLAIGRMRTAGKLADLSQALAGRLAEHHAALCRLHRDQIMLFNAAVDDLEARIAAKTAPYQRELDLLKSIDGFGDTVAQAWLAEIGPAPHEYFASHEKLASWVTLCPGNYVSAGKRSHGRTGKAGTYIKPMLVQAAWSAIKTEGRLQARYHRLVRRLGGPKNPAAVKKAILAIARTLLKIAYEVLRSGKPYEDPGADFYTRRDSPEQRRAYLLRQLEKLSPGCTITIAPAEAA

SEQ ID NO: 57365 - protein, 408 aa, unidentified
MDVVHLRCAGLDVHKDTVVACARVVEGKQVEQEVRTFGTTTKELLSLSDWLTERRCTHVAMESTGVFWKPVWHVLEGSFELVLANAGSIRSLPGRKTDVNDAIWIADLLAHGLIRGSFVPPQPVQELRDLARTRTQLVREVARHTQRIQKTLEDANLKLTGLISDVLGITGRAILEALIAGETDLDALANLRRRGIKASHEELVEALRGSVRDHHRFLLQLHLRQIDALEQAVRDLEGRMETLLEPFRPQLELLTTIPGVSETTARVLLAEIGFDMARFATSGHLVSWAGLCPRLDESAGKRRSNRLRPGNTWLKTALVQAAWAATRKKDSGLRAQYLRLKSRRGPKKAVIAVAASMLTSAYFMLQRGVPYADLGPSHLDARDPKKTAQRLVRRLNDLGFEVELRRAA

SEQ ID NO: 57366 - protein, 329 aa, unidentified
MSNLLKKVIGVDVGSKFLTLSFLDDEKGEQVLNLPNNERSILSFLSKISPSDYCFVIEATGNYSSRLLHLSIGKGFESSLINCMSVKHFARMKNIITKTDAEDAKLIRNYGEMFRPEFYIPKTQDIEYLDQEIKLLNDLEEEKRRYAVKLKALRFHPVVNPSTEKHYEKRLKQLEKEIKEVEARLPQLQDEEFTETKNLLQSVSGIGEKTSLQLMTATSGFKNFHSSKSLVKYFGLAPRIYQSGKKSYSPGKCRTSKTYIRSILYVCSWTAIKHNQKCKELYLRLLEKGKAKKLALIAVCNKLLRICFSVVKNKTPFQQDFQNKLKILT

SEQ ID NO: 57367 - protein, 388 aa, unidentified
MPQTPNDLSRSLTALEQTATLVAVVEMSQASWLVAGMIPGLERQPLKKIAPNEAALLSLLQRWQEEAIKICQTIRRITVAYEAGRDGFWLARWLCSRGIEAHVIHPTSVAVSREHKRAKTDRLDTAMLIRVFLGWLRGERGHCGMVAVPTLEEEDAKRPSRERENLVGERTRIINRMKSALVRLGIRGFKPELRRAPQHLEKLRTPEDVPIPLRTLEELRRDMARLAMVRAQIEAIAQIRLQRLEQAPQDGAHAMVRMLANIIGVGVETADMLVREILAKELRDRRALARYAGLTGSPNESGSKRREKGLAKSGNARVRRGLIQLAWRFLRFQKDSALAQWYRTRTEGAKGARKTSLIVALARKLLIALWRLVTIGEVPQGIVLRQAT

SEQ ID NO: 57368 - protein, 340 aa, unidentified
MTKLYVGIDVAKDKFDVSYTIDGQNFFGYSTFVNDKKGIKKFFKQAENFMQKYEQKEIHFCMEATGIYHFELCEYLQNSAHIVSVVNPLKTKSFSKSLMLRTKNDKVDSSMLSLYAFLHNPPHTPKLPESIRKFRSLVRYKESLSESRTQEIARLKSSLDADVKQLINKKIRFIEKQTSETIFKIQNLIKEDKFLSTQMKLLKTVDCVGDKVAWVMLAEFKFEDIESISPKAMVAHAGLSPREYSSGSSVRTRSHISRMGNSRLRKILFLPALSCIHRDNYFTHFYLHLIERGKSKKLAVIAVMRKILLTSMGVLKNQQPFDPNWAEKTRTKYLESLKVA

SEQ ID NO: 57369 - protein, 362 aa, unidentified
MLKQEQQVKKISFEGEQIFVGIDTHKKTWKVSLYHQQTSLKTFTHEPNSKQLVRYLRRHYPGADFHCAYEAGFSGFWLQKQLTKEGIDCIVVNPADIPTSHKDKEFKTDPRDCRKIARALRSNLLEGIYIPTDAGLEYRKIVRLYHDMSRNYTRYKNKVKAIINFHGIEYPEEFRSENNHWSKRFYLWLKQLTLSTEYGNWSLQWYVEECLRTKEQKRIALAKVRELSKTECLLNNVTCLRSISGIGLVTAMTIITEIEDIKRFKNLDTLCAYIGLVPSTSSSGEKERIGEITRRGNKYLRHVIVESAWMAIRRDPVLLNAYLRVKNKSESNKAIIRVSRKLAARIMYVLVNQKPYEVKYMQ

SEQ ID NO: 57370 - protein, 347 aa, unidentified
MEYFAGLDVSLETVNVCIVNAAGDILLEKKIAAAPAAIIHLLKSFGSPFKRIGLEAGPTSSWLYGELRAAGYGAICLECRHVKAGLSAMRNKTDRNDARGIAQLVRLGWFRQVHVKSEEAQRTRMLLVNRQQLLTKALDIENSVRGSLKVFGLRVGVVARRGFEARVLELVAGDPIVLAVTKPMLRVRRALLEEFERLDRLCQQLARRDPVCRRLMTVPGVGVVVALTYRTGVDAPERFSKSRDVGAHFGLTPKRYSSGQTDYDGRISRCGDEMVRTALYQAANVLLHHGRWSSLRSWAMRIAKRGSVKGAKVALARRLAVVMHRMWTDGTDFRWSDTSRMTAPTAA

SEQ ID NO: 57371 - protein, 341 aa, unidentified
MKTLLYCGIDLHSSNAVYVITDSLDKVLLKKRLPNDLSTILATLKPFRKQLATVVVESTYNWYWLVDGLMEAGYPVKLANPAAIDQYDGIKQADDLIDAAFLARLARLNILPTGYIYPKEERPVRDLLRRRTLLVRHRTAVKLSLQNMFMRQAALNLSWRGIRKLSTKERSEALNDKDYLLFVTKEQLELIEQLNAHITQFEDKVLERAELKPEYEYLLTLPGVGMILGLTIMLETGDITRFPHVGDYTSYCRCVRANKISNGKSKGKNNGKNGNPHLAWAFVEVVHHVIRTCPQAKQFYDRKKSKRNGALASKALAAKWSKAAYYVMKRQEAFDLKRVFG

SEQ ID NO: 57372 - protein, 353 aa, unidentified
MVTIGVDTHKRLIVAVALDAAGQVIGDWSGDNTPDGSRHLQIWAVELGPDRVWGIEGSGQYGRGLAQQVVASGATVYEVNPRWTAAARQRARQPGKSDRRDALAIAQVVRQEGAHLPQLQPEDATSVVALLTSERTDAVGMATQVRNQLHQYLHQLDPTDRTVESHLTHPRTVATLVTYTVAADAPALTQTRAAAVRRLATHLRLLQTQIDDLTAEIEAQARQHWHALTDLPGVGDLTAGMLAGYLGPGNRFATDAQLASYAGVAPLETGSAGTVRHRLNRQGQRQLNAVIHRIALTQARCCRAARDYLDRRRGEGKTWREALRALKRFIVRAIWRQWQRCLAAQNGAVTPTS

SEQ ID NO: 57373 - protein, 509 aa, unidentified
MQRGRITLWRVSVVGIARGRDWFRSSARILFGDAVGTVFPLGRLVLQKTIGLPLAGNVRKNIKLIAMKALPVLDPKAAAIDVGSEKLHVSIAGDTPKIFGTFTSDLEALRDWFKAQGVRTVAMEATGVYWLYLYEVLEAAGLAAVVVNGRHVQNVPGRKTDMADCQWLATLHAHGLLRGGFVPPADIRRLQDYQRLRADHITGAASQTQKMQQALERMNVKLHDVISDLTGVSGLKVVRAILAGERQPDRLLALCDEQIQKKKAAAVRESLRGCWKKEQLFALRQALELWETYQQKIRDCDRELEKLLQELAGPQSPVGGLGVGPVQLAPVKGPGKNGPVIERLGELLARICGGRDATQIPGLSTYMVLQLISEAGADMTRWPTEKHFISWLGLAGGRKQSGKRKGSIKAHRNRAGRMFCAAARALAQSVDKALGGFYRRLRGRVGGLAANVALARKLAQLFYRLLRHGMQYVEKGLRDYEAKVLETEARLLRKLAKKQGFTLVAAAAN

SEQ ID NO: 57374 - protein, 318 aa, unidentified
MPESIVIGIDIAKQTFDAALGVSGSIKTFANDDAGFDTLLANLAGQAVDLIVMEATGGLESNLACALQAAGFAVAVINPRQARDFAKAMGYLAKTDRIDAKALAELAQVLACSPERDRFVTVLPTPEQQALQALVARRRQLVAMQVAERQRLSVSHAAARKSIEGMIMAIRTQLDEVETELAKHIETHHADLALRLSSVRGIGPTTVATLIAEVPELGQLSRREISALIGLAPFNRDSGQMRGKRAIFGGRGQVRRGLYMAALAAIRFNAVIKQFYDRLVAAGKPKKVAIVACMRKLLTILNAMVRTGKAWDDSLHTA

SEQ ID NO: 57375 - protein, 331 aa, unidentified
MKLKRIGVDLAKAVFQLHGVDSHEQVKLRKQVKRGGMLNVFRQMEPCLVAMEACGSAHYWARELRKLGHEVRLIAPQFVKPYVKSGKNDANDAEAICEAASRPQMRYVAVKTAEQQAGQALHRVRSRLVKARTALANEMRGLLLEFGIVMAKGIAACRRQATEALEDAENGLPGMMRELLAQLTEELTQLDAHIAKLDRQIKRQCAEDARIKRLMEIDGLGPISASAVVAAIGDARQFASGRDLSAWLGLVPKQHSSGGKERLGSISKRGDTYLRTLLIHGARAVVTACKNKVDRKSMWIKGLMARRNKNIATVALANKNALSREEDYRAA

SEQ ID NO: 57376 - protein, 364 aa, unidentified
MTKVRTWAGLDVHAAASVACVVDAESGEVSVHRLAGRTSALAAFCARLPAPARVAYEAGPTGFELARALDAAGVGCVVAAPGKIERPAQERVKTDRRDAERLARLLMIGGLHPVRVPSSEEEALRDLVRAREDVRGDLMRARHRLSKLLLRHDVRYDDTASGWTAAHRAWLARVELGERAAQATLLDYLGAIDALIVRRHTLERMIGELVPVSPWAEQVARLRCLRGIDTLSAVGLCAEIGDFARFERPGKLMSYLGLVPSEHSSGQTRRQGAITKSGSRHARRLLVEAAWHYRRPPRNGTTLQRRQEGQPAQVLAISWKAQQRLHRLWRRLDSERGKRKTIVAVAVARHLAGFCWAITTDPTT

SEQ ID NO: 57377 - protein, 334 aa, unidentified
MEQITTVGIDLAKRVFALHGVDAAGRVVLRSTLRREQLLEVMAKLPPCVVGMEAGSGAHDWARQLQRLGHTPKLMAAKFVSPYRRKGKNDGNDAEAICEAVSRPGMRFVPVKSLEQQALLSLHRVRQGFIVERTATINRVRGLLAEFGVVLPVRAVVVRREACKAAESLPALGHRAIEDLLAHLRTLDERIAAYDRELEQQARQCEPARRLMKIRGIGALSALAIVATVGNARDFRSGRQFAAWLGLTPRQHSSGGKTRLGHITKRGDAYLRCLLVQGARSVLHTASRHADRMSRWAQTLESRRGYHRTLVAIASKNARIAWALLSRNEVLRPA

SEQ ID NO: 57378 - protein, 370 aa, unidentified
MKKHSTTPKSPKQASACKGGPITIGLDLGDKTSRYCVLGANGEVMSEGSVGTTRKAMAEKFAKMRRCRVAIEVGTHSPWLSRWLSSLGFEVIVANARQVQLISASSRKNDRLDARLLARLARVDPQLLRPIRHRSETAQADLMRIRVRAALVEARTRLVNAARGFAKAMGERLPACDTDSMGVERMESLPEGMRDTLKPLLEQVESLTEKIKESDVKIEQIARTQYPETELLRQVSGVGTLIALTFVLTLEDRERFRKSRDVGCYVGLRPKQSESGQSQPQLRITKEGDVYLRTLLVQAAHCILSRRGPDTDLKRWGLKLASRGGKNAKKRAVVAVARKLAVLLHRLWVCGEVYEPLRNSQASGSSKKAA

SEQ ID NO: 57379 - protein, 338 aa, unidentified
MKRYLGVDLHRNCFTVYTRQEDGSGESREWSIRSLKAFAKTVTANDAVAVEATGNVRLFSEALKGCGCRIVVVNPHQFEVISRSVKKTDEHDAKVLAEFLAKDMLPEVRMKDEAHARVASLAQTRDKLVKLRTTLKNKVNNLLAARGILIRKESLTSEKGLVGVLAAPVSELEHLELEILVGEIRHLNESIKKLEGLLHGQGPKLPGWENLTSIKGIGDTGASILLSTIGKIEDFADEGKLAAYFGIVPRVSNSNETEHSGRITKRGCKLGRTTLVQCALIAARYSPYLQTYYRRIAAHRGTGKAIIALARKFLGIIYKTLKNNWVFEDFPNFVLAKT

SEQ ID NO: 57380 - protein, 318 aa, unidentified
MTPAAPALFVGIDVAKDFLDIHVRPTGLAFRVANDEDGIADLLGRLQGLRPVAIVLEATGGYEVPVVAALAAAGLTPAVVNPRQVRRFAEGVGRLAKTDPLDAAVLAHFADAVRPEPRPVPDAEARALSDLLARRRQLVQMRVSEQHRLPTASGIIRKNIQSHIDYLDRQIDKLEADLASAVKASPAWRERDELLQSVPGVGPQVSRTLLAELPELGSVPGRQLAALCGLAPFNRDSGRRSAPRSIRGGRCHVRAALYQAALVAMRFNAPLKGVYQGLLARGKAKKVALIAVARRLLVILNALVRTGTPWKEKLAIGT

SEQ ID NO: 57381 - protein, 355 aa, unidentified
MNDAKYIGLDVHQATISATVLDAEGKLVMEAILETKAETVLQLIHGLRGSLHVTFEEGTSAAWLYTLIKPHVTRVLVCDPRKNALLKVGNKSDRIDAHKLAELLRSNLLRPVFHDDTGLRTLREMARSYLTITKDVTRVMRRLKAIYRSWAIPCGGQQVYSPRYRAEWLGKISEASVRRRAELYYQQLDALVYLHRQAKKELLAEGRKHQATKLLRQIPSIGPIRSVLLVALLQTPHRFRTKRQLWSYSGLALETRNSGEYRFQDGQLKRSKKVFAIRGLNKNHNHDLKNVFKGAAIRAAAIEGPFQKFYEALVAKGMKPAMARLTLARKIAAITLIVWKKGARFDAEHLKQQAA

SEQ ID NO: 57382 - protein, 361 aa, unidentified
MRCAGIDLHKRSLTICIIDKETGETFTTRFSCQEEARIVEFFEKQKPFQAVVEATATYDWLWVLLEPLAERLVLAHPKKLRIIAESKKKTDRFDARNLAWMLAKDEIPEAYRPSPRQREYQHLIKHRHGLIRQSSRLKVQIRSILAARNLDRRDIFSAQGGLCIDALDISAAERFRLRELFSLLELISDHLGTANREIKKFRDAATEAEKKSHAIAKSVPGVGDVVADVVLATLGDVSRFPSIKKVTAYAGVVPGVRQSDTKRRDLRITKEGPRILRWALIEAAWRAVQYSSYWEDIFKRIARARGRKKAAVAVARRLLGVIYTLLKKGERYVRRKGEVAIGRVTRPMPRLEQLTPAAGKA

SEQ ID NO: 57383 - protein, 321 aa, unidentified
MTYIGIDVSKDTFVVAYSPDKNSKTKTFKNTTKGIHEFIRTISKEEHHCVMEATGNYSALLVYLLSEAGITTSLENPLKVKNFARAMLSTVKTDEIDARLIALYGEKMQPAPYKLRSDAILTLKQKRTVIRQLKKQLIATRNLKGSMEVLPFFDAKCKKSIDKTIAFLEKQIKDLEEDLTSLAKSEYKKQMDLLTSVKGIGITLAAALIMATGGFTYFDNAKQLTRHLGLSPTYQQSGTSVNFKGHINRNGDSSLRSQLYVAAFASLRCNTECRACYDRLRSNGKPGKVAVIAVANKLIRQAFAVVTQEKPYVDGYISSKK

SEQ ID NO: 57384 - protein, 344 aa, unidentified
MEITTIGLDLAKSIFQVHGVDAAGKVVVRKALRRSQVLPFFTRTPRCLVGIEACGTSHHWARELIALGHEVRLMPPAYVKPYVKRGKTDAADAEAICEAVTRPTMRFVSVKSRDQQAALSMHRTRNLLVKQRTQLVNMMRGLLAEFGIDIPKGLERALMMAREIVDGAAPDVPPEAVKIIGTLSQQALDVHVRLREIDRDLLVWQRSSDVARRLMTIPGIGPVGATAFAATVGDASQFRSGRQFAAWLGLTPLQMSSGGKERLGRITKMGDKYLRKLLIVGMTSLVRRAKYKPETVDPRLADLLARKPVRVATVAMANKAARVIWAIMTRGETYRSGHVPALAA

SEQ ID NO: 57385 - protein, 392 aa, unidentified
MRFIGIDIGAEHHVVAIVDEAGGVLLRATTFSEDADGYAKLRELLGSPDETLCAMEATGHYWQNLFAFLAAAGFQIALLNPLRTHRFAGEDLRRAKTDAIDAVSIARFAQQKRPRISVLPDAATRELRELVRLRDRLVQDMGDRVRQLHQTVAVTFPEFTKHVRDLSSYRATSLLLAWPSGAAFREASVEAIAAIKYDGRRHIGSELATSLWEAAGRSVGCHDGPSHRLKARYACEDISTLRERIKGLDGDIESSLKQHQIGQLLTSIEGVGPNTAARMIAEVNLLEFHSASALAAYVGVAPSVNHSGKRTPQRGAICSIGHAQLRAKLWMPTLYAVHHNAWLRHFYEGLVARGKPKKLALIAAMRKLLAAMLSIARSGKPFESRLPELATG

SEQ ID NO: 57386 - protein, 412 aa, unidentified
MDAIIERCCGIDVHKQSLTACLLAGSLEGKPEITIKTFSTMTNDLLQLKDWLEKAGCTHIAIESTGVYWKPVFNLLEESLEVVLVNARDVKNVPGRKTDVKDCQWLAQLLRCGLLKPSFIPEREIRELRDLTRYRRKLTQDLTAEKNRVQKVLEDANIKLSSVATDIFGVSGRIMMDALLNQETAPEQLAELAKGRLRNKIPELVEALTGNLRAHHRFMIEQSLQHIAFLTESIARLDVQIDKCMAPFRQVEANLKTIPGVKKKTAEGIVAEIGVEMEQFPTAAHLASWAGMAPGNNESAGKRRSGHTTHGDKWLRTTLVEAAWAASKSKGSYFKAQYHRLAGKRGKKRALVAVGHSILTIAYYMIKNNCAYKELGEDYFDQINHDAVLKRQVKRLEKLGYKVTLEPVPQAA

SEQ ID NO: 57387 - protein, 423 aa, unidentified
MNELTLCVGADVHLDEIVLRAVDKTDGHEVLERFHVTNNLPGAQSAATTLAQAATQGGYTRLEIGWEATGLLWVPFHRFLETSPLLHPFTPALVCFNPKLVANFKDGLVLRRPKNDERDAWDVAARVRFGEWPVSYVPADFWQGLRRLTRYRYQLARNLSREEMRFQSYAFLKASDWKRVKPFADVFGATSIALLTEFTVAELAALSHDQLVDLLTHRGHGRFEDPTATARAVQEALRTSYPIDPHMDEMVTATLATGWEHIRSIKRLMKRQDQHIARYITPVPNPLITVKGLGAVITAGILAEVVDITRFPEHKHVAQYIGLTWEKRSTGNFVSQNTRLTKVGNVYLRYYLILGAEQVRRHNFEYQAYYWRKYQEVSKYQHKRALVLTARKLVRLVHALLTKNQPYVMRHAAPQSEEPIESD

SEQ ID NO: 57388 - protein, 378 aa, unidentified
MKSIRYLGLDVDSEKIAVAVADPGGDVRSLGSIPNREESVRRLVKKLGPANRLRACYEAGPHGYGLYWQLSKLGVNCDVVAPTLVPVKSGDRVKTNRRDAEKLARCHRSGDLTAVWVPDAEHEALRDLVRARETAKKDQLRARHRLGKFLLRRGLRAAAGVKSWTSKHLLWVKTLHFEHAAQEATFLDYLHEVEHAAERVVRLEHALDQAIEGAPEEMRALVAGLQALRGIKMVSAATVVAEVGPLSRFARPKQLMGYSGLVSSEDSTGSSVRRGAITKTGNAHLRRIAVEAAWAYQYRPALSPVLKKRQEGVSEEVKEIAWKAQHRLCSRYRRLLARGKLRQKVATAIARELLGFIWAIGIQVEKEQQAAPRRRRVA

SEQ ID NO: 57389 - protein, 336 aa, unidentified
MSHYCGIDLHSNNHVVVVIDDEDKRVFEKRLNNDLSLTLKALSPYDETLHGIAVESTFNWYWLVDGLQEHGYDLRLVNTAAVKQYDGLKYSGDHHDAFHLAHLMRLGILPTGYIYPKEQRAIRDLLRRRLSLVRTASTQLISVQSQIWRSTGLRIKSTDLRKPDFISPRVDDYTLQAIHAGLAVYQTLHREIDVLEKSAYQAVKLTDAFKLLQTVTGIGKILGLTIMLETGTIGRFAGPGNYASYCRCVDSTRTSNGKKKGEGNAKAGNKYLSWAFSEAAHFAVRFEPLAQRFYERKKAKTNGIIAIRAVARKLARATWMMLKHQVPYDAKRMFPG

SEQ ID NO: 57390 - protein, 356 aa, unidentified
MLYLGIDQHARQITISLRDDSGDVLQARQVSTRPEKIQAFFAKLTRDRLRDGESFIAVVEVCGFNDWLIRLLRDYRCHQVILIQPEERKKCKTDRRDAAALSELLWVNRGRFLAGKPVRGLRQVDIACTTDQENRRLTTLRKEGSQARTRIVNKIKHMLRRHNMQWDMPTKTFPTQRAIAWLKQLVLPAIDRLEMNYLLVDLEQVEQRVQELEQVIIKRCGNSKDAQLLCSMPGVSYFTATSLACRIGRVGRFPRARSLANYWGLTPGCRNSGEHNQRLGRITKAGSNMARWLLAQVTHQALRKDARLREWYKRIKRRRGSTVARVAVMRKLATIIWHMLSKRQTYAECRAIAAVA

SEQ ID NO: 57391 - protein, 338 aa, unidentified
MNIVFLGIDLAKNVFQLCGLNQAGKPVYTKRTDRKELLLTLANIPACLIGIEASTGAFYWQREFEKLGHKVKVISPQYVKPFVRGQKNDGNDAQAIAVALMQPTMQFIPPKSPEQQDIQALHRARQRIVNHRTATVCQIRGLLLDRGIPIGNAVSRARRAIPLILEDAGNGLSSRMRRKIAELYDLFNDLERRIHFFDKEIETVFRQSEACQRIAKVKGIGPKTATAVVAAIGKGTEFKNGRHFAAWLGLVPRQHSSGDRQVLMNMTKKGDKHLRTLFIHGARAVVRVATNNNDGYMNQCVNQLKERRGFNKTTVAVANKNARIIWSMLRNETEYQVV

SEQ ID NO: 57392 - protein, 334 aa, unidentified
MEIIKQVFGIDISMNSFVVRVGIIKSDQETEIGTHKEFVNSNQGIKQFFKYSQQQKLKGVTQHFLMEATGVYYEALAYFLKSRDVHVIVLLPNKAKYFGKTLEIKSKTDALDAYILTQMGLEKRLSEWEPPSELMKELKLLTREHVSLMNLKTDAKNRIHAKTHSFKPGKDTVRRLRREIKLYETLIKEVELSIRSLLQRDLKIWVKIQKILRVNGVGLMTVAKVLAETNAFALIRNGKQLASYAGLDVVFKESGKYQGKTKISKKGNQHLRQSVYMPAISAIKTNPKMKTYYNRMLNKGKPKKSGIVAVARKLLLLIYFLWINDVEYNPAYLG

SEQ ID NO: 57393 - protein, 482 aa, unidentified
MKKRNIFQNQSQEILTLFEKVKDRSKVMCIPMDYAKKDHMVMFCNGNGKILRKPFSIKNSPEGLEYLIDQVTRSCRHHGIDIKHTFLGGEDCGTYANNFIEALRSENWLVAGVNALDAKRQRENVQASTDRLDLLGISKMLLNCRGNCSPAQSGIYWNLRTLCRQRQKLVVTKSGVKNRIHTLVDQIFPGFLSEAKSGIQPFSPASLILMEDRFSVHQISRRRPTALIKFLAKQGLPNPERRAEKLLRYAGQTLKPSKDHIVTLQLSLKQQVKLFLCLQDSTDQFKKDIAEHLAQIPGAFLTTIRGIGLILAAGVSAEIGHPDKQKTLTNLVSYAGIIPKLKQTGGEHGKTQVGRVGKRCNRILKNYVVQSGLHMGIHGPDELKADYKRREAREQHADFGMARRFLRMAMCLMRTHQSYLPKRLRTQQCSMEERGRYYHKAWPLMKEKWRRVKMLDVAFDKKMPLGQWRNMIQELYGIDLSL

SEQ ID NO: 57394 - protein, 345 aa, unidentified
MASLADVIDVVIGVDTHKHTHTAAVVTGAGACLETHTVNADSDGYAALVELAEAHSPVRAWAIEGTGSYGAGLVRHLRARGEWIIELDRPHRPARRHGAKSDAIDAERAARDALARSDHGEPRDGGRRAALAALLVARRSAVQAAGDAQRQLQALITTAPECLRGRFVGQSTTVMVATAARLRLTASWDLETQTTAQVLRSLARRSLELSAEVDTHTAAIAAIVTDWRPDLLALTGVGPIVAAVVLCAWSHPGRIRNDAAFAMLAGACPIPASSGLTNRHRLNRSGDRQLNRALHVIALTRLRHDPATRDYAARRRAEGKTDREIKRCLKRYIARQLYRQLEPAA

SEQ ID NO: 57395 - protein, 410 aa, unidentified
MRKENIIYVGIDLHKETHTAVMLDCWNHKLGEITFENKPAQFHKLTRKVSRFVTEEKTAVYGLENAYGYGRALAVWLLEKGFVVKDVNTALSYAQRKSVPMYQKSDSYDAEAVALVLINMLDRLPDAIPNDKYWTLSQLVNRRDNINIHQQRLKNQLHEQLCMAYPSYKKFFQDIGRPTALYFFHEYPSPVHLRGKTAEELAGELRPVSHNNCSVKRAEKILELVKSDGETCRDCQESRDIITRSLAYDLEHYRKQMEEVEAAIEAMLPEFGCTLMTMPGIDIITAANILAEIGNIDRFPNAKKLAKFAGIAPINFSSAGKGKDMCPKQGNRRLQAIFYFLAIQMVQVAPSGTPRNAVFREYFLKRLEEGKNKPQALICIARRLVNIVYGMLKNHTEYREPERKTGDETV

SEQ ID NO: 57396 - protein, 402 aa, unidentified
MNAVGIDVSKGKSMVAIMRPFGEIVSPPFEIKHTTSDINSLVELINSVEGESRIVMEHTGRYYEVLAHQLSKANLFVSAINPKLIKDFDNDSLRKVKSDKADAVKIARYALDKWQNLKQYNVMDELRNQLKTMNRQFGFYMKHKTAMKNNLIGILDQTYPGVNTYFDSPARSDGSQKWVDFASTYWHVDCVRKMSLNAFIDHYQNWCKRKKYNFSQSKAEEIYGKAKELVPVLPKDAITKLIIKQAVDQLNSASTTVESLRTLMNETASKLPEYPVVMAMKGVGTSLGPQLMAEIGDVSRFTHKSAITAFAGVDPGVNESGSYEQKSVPTSKRGSSVLRKTLFQVMDVLIKTHPQDDPVYQFIDKKRAQGKPYYVYMTAGANKFLRIYYGRVKEYLSSLPES

SEQ ID NO: 57397 - protein, 385 aa, unidentified
MSEAFDPRKSTTAFDQASTLVVVVELSGKSWRVGANAPGVSRRPLRTFAARDIGAVLEAIERWKGEANKAGCEVGRVVVGYEAGLDGFWIARALTAHGVEVYVMHPASISVERRGRRAKTDRIDVDILLRTLLGWLRGEPRHCTMAPIPSEAEEDMREPGRQREALTAARLKVENQMRSPRFGIANFRPRLKKAAELLTRLRTFDGQPLPPNTMASLERLLAQHQLLSKQLKEIETAREQVVAVADPDRLQRMIQMLAGLVGVGVETATTLVHEVFSRRFRDRRALAAFVGMTGTPYDSGGSTREQGLSKNGNPRVRRMLTQLMWRWTIFQPQSLLTRWFVARTGGAKGRMKKIMAVALARKLLVALWRYVETGVVPEGVRLAAA

SEQ ID NO: 57398 - protein, 422 aa, unidentified
MLGIGIDWAEEFHDVAFGTPEKGVVEQFRISHGPDGVGALIDRALRLEPDPAEVRVVLETRHGLLVEALIDAGFTVLPVNPDLVARRRGPARKKDDAEDARICCLLALDRHAGLKALVPHGEFGGELRAIARDDERAARDQRRLLNRLRADLQTTYPAALTLAGADLGAPTVLRLLQRWPTQPELAQASRDDLISFARAGRHGWPDRFADQVAAALATPSLPTRDYLVRAKAAGIRLAAVQLLALHEARRGWEQRMAELLLGGRRTGRDHTVTDPDPGNAFPGGAIYLSMAGLGDRLAARVAGEIGEHIEQFTSPNGLQCYAGQAPVTRRSGKSDFVVARRLAHNRYLGDAVHQWAFCSLRQSGWAREFYDQKIAAGKSHHNALRALGNRWLEILWHCLTKGVLYDEAVHVANRNRATGHAA

SEQ ID NO: 57399 - protein, 428 aa, unidentified
MNEGERIRLEDFRQLKKEIRGSERHLIVGIDIAKHQHKAFFGTATGKTLLRVLVFENTIEGFNRLRSRAEALKVQHCLSKVIYGMEPTANYHKPLAEYLIKCGHHVVLVSGVAVNKNRELLDGRWDKHDSKDAANVADLISQGKCLYYDYPSGRLRDLRSLLSLKRRLKKQEHGVKVRIRNHLLAQYFPEFDRYFAKGCSESLAIVKWCLHPSMIAGMEYDEFIEVVAPRMKTLGQEKRLKSIWELAIDSIGCDGGQSLNFEAKLMVEDLQQTRDSIRAVDEHIEAICLHFREYRYLLSIPGFGPDISSKVLGAIGNPFRFNSGKQVLKLTGYDLSAHRSGKGSDSAVPVISKRGKAYLRYALYQAAFIASTSNPHFIAYYTNKLRGREREKGIRTKMRVKLAAKMLIIAWTLMKRKEPFNPDYLKVD

SEQ ID NO: 57400 - protein, 341 aa, unidentified
MENCGIDVHQKSSQVTVVDQEGEVLERATIPTTRAGLERWFGRRERMRILVEASGSSPWVVRLLLELGHEVEVIDPRRVRLIAQSTLKTDRIDADILAELARLRIKLRTLVWQRSEASQRQRGHLRVRRALVEARARFIVTIRGLLRSFGVRVASCRSDRFVARCQASAIPPELSEVITPLLFAIRDLDTRIAAMDEVVEQVGHLYPAVESFQDIPGVGPVVALAYLLSVEDPSRFRRSRDVPGYLGLRPNLRASADVVRRGRITKEGDSDVRRLLVQAAHAHLRSHADTAFKRWAESLIPRIGKRKAIVALARKLAVLMHRLWITGEVYQPFPNNTAMAA

SEQ ID NO: 57401 - protein, 346 aa, unidentified
MKQIIRIGMDTSKHFFQLHGVDTAEQVVLRKKLKRKDVLEFFGKLPPTVIGMEACGAGHYWARELRALGHEVRLMAPQHIKAYVKRNKNDGRDAEGLCEAMSRPTMQFVAVKSEQQQAALMLAGVRQQLIARRTQLGNAIRGYAAEFGLIAARGLDKLEPLLEQLAQAPSVPELAREMFAMQGRDYTRLQEELKAVDKKLLAWHRANADSRRLTQIPGVGPIGATLLVMKMPDPRTFPSGRHFAAWLGLTPKDHSTAGKTRLGKITRAGDEMLRSVLVAGATAVIQQARRSRGRQLRWLLDLLKRKPPKLAAVALANKIARIAWKLMTTGESYDGTRMPGASGVAA

SEQ ID NO: 57402 - protein, 296 aa, unidentified
MRCDNNASGWSALVNKLLAAKVDLVVIEATGGYERGLVRALQLAGVTVARVNPRQARDFAKSMGVLAKTDQVDARVLRDFADVLARHKDRQKYITAPTEAHREELAALVTRRRQLVDMRVAESNRLEHAVARTARSIRSVIKTLDKQLADVDKDIDDLLERHFKQQRELLDSIKGVGPVTIVTMTALVPELGRLDRRQISKLIGVAPLANDSGQHKGRRSIWGGRKDVRSVLYMAILSAIRFNDVIKAFYDRLIAAGKLKKVAMVACMRKLLTILNAMLRDQTLWNAAKHLQPSAT

SEQ ID NO: 57403 - protein, 416 aa, unidentified
MTEQIHVSAGLDLHKKFIIATLLTDTGFKEQRRFERTESGLFNLKEWTIEHKCEVVACESTSDFWVPICTLMEGHVTVIVGNARDIKMFSHKKTDKVDSELIAQLALKGMIRPSRIFDRNHREFRSLSRLRHKLVQKKTDIKNEIHHILDSELFRLSSVLTDLFGKSGLRILQGITNGSPMDEIIKKLPLNIRKKTVQLNEILQTTISPEAILRLKYCLNLLKCLDDEIGNLTECIFQYANEWFKQEMQILKSVPGIGNIAAVTLLAEIGNFSDFPTGDKLASWLGLVPNVYQSADKLRTGSITKRGSDHARWILVQIAHAASRKRNTVFQKFYDQKKPMIGAGKTIVALARKIVTIVWHLITHSEFFNNENDDGNPSSKTVKIRIPVIVTLDEILRILNRAAVVLKDPDPDIRGC

SEQ ID NO: 57404 - protein, 351 aa, unidentified
MLILALDLGSTSRKATKTYATVLNTDSGEIQRTSVPTTSVGLLELIGAYRPTRVVVEVTRGCGWVMDLCRGAGVEEIQAANPMDPAWRNRTSKTDRNDADLLARLSASGQLRTVHIPKREVREWRDLIGYRHRLVRERTRIKNHIRSILLTQGLPTGRLWNQDGLARLAELVKSMESCSVSELWRGELWIDLIRLREIGAHIATITKRLDALVASSEPAAELLAVDGVGGRCAEIITASIDDPLRFHNRKEIGAYFGLVPRVLQSGGSLRHGRITKAGDGLARAMLVEVVHLGIRRDGWMRDTYQRYLRDDPLRVKRALTATARRLVVRLWAKLRDHRRKHPTVSTISLAA

SEQ ID NO: 57405 - protein, 343 aa, unidentified
MSEYAGKQFVGIDLHRRRSVIVRTTDGGEVLETVRILNDVDRLRSVMANAGVDPEVVLEATYGWYWAVDALHDAGANVHLAHPLGVKMFEYRRVKNDVRDAKDLADLLRMGRLPEAWIAPPETRELRELVRHRAKLVGLRSHCKAEVHAVLAKCGIQISMTDLFGLEGLDLLDRLDLAAPYAARVASLRRLLDDLDFEIDVFARLARARLATDPGYVAVQQIPGIGPVLGAVFVAEVGDIGRFGTANQLACWAGLTPKHRESDTHVHRGRITKQGSRLVRWAAVESVKSLPSHTRVGTLRDRVADRRGPNIGAVAAARRQVEYVFYALRDHHVRALDHHRAAA

SEQ ID NO: 57406 - protein, 355 aa, unidentified
MDSKKYIGMDVHQATISIAVMDSRGKVVMDSVIETKAATILEFIQGVRGALWVTFEEGTCAAWLHDLLKPHVAKVVVCDPRKNALLKVGNKNDRIDARKLAELLRGGLLSPVYHEGASVRTLKELARSYLTITKDLTRVRNRIKGLYRSWAIPCAGQKVYSPRYRSAWLKQLTEAGVQRRAEWLYQQLDDLQPLRREARRELVAESHKHPANKILCEVPWLGPIRVALLIALIQTPHRFRTKRQLWAYSGLALRTRVSGEYRVTGDQLQRVKRQPSLRGLNENHNHELKALCKSTATRASTAAGPFGDFYAALLATGMRPTMARLTVARKIAAIILTICKKGDRFDPEHLKRQAA

SEQ ID NO: 57407 - protein, 420 aa, unidentified
MKVVYPICCGVDVHKSFLVATIIKTTSGVQPSYQKKRFSTFNNSIFEFKKWLLDNSCRDLCMESTGKYWVPVFNLLEDEINVTIANPKWVKAVKGNKDDTKDSKWIGDLFRLGLVPGSYIPCKEIRILREFTRYRYKLTSARSSEKNRFQNALTVCNVALDSVVSDIFGKSATSVIDYLLEQSDNSINHEEISSRLLRSLKKKSESVIESIEGYQMTDSQKYRMRLVHAHMDYIMSTISDIDSMINTLVEPYDNAVKLLCTIPGVDRNSAITIISEIGTDMTQFSNSKRLCCWAGLTPGNNESAGKKKSVRIARAGVYLKPALVQAAHAAVKSDKSPYYKAKYERIMKRRGKKRAIIAIARMILTAAYHMLSTGEVWNPTDLYKIDMPEPLKEKQKEKAIKQAKKLLIAEGILDESLLAS

SEQ ID NO: 57408 - protein, 354 aa, unidentified
MRFYDQQHRFYCGVDLHARTMYLCILDQAGRVVFDRNLPAEPQRFLQAVAPFRDDLVVAVECLFCWYWLADLCAKEHIAFVLGHALYMKAIHGGKSKNDQIDAGKIARLLRGGNIPVAYVYPAGMRATRDLLRRRMYLVHQRAEAIAHIQNTNSQYNFAPFGKKLAYAANRAERNVAARFTEASVRRMIDSDLALIDHDDALLGDVELYLVRTAKVDDVNTFHRLRSVPGIGKILALVLLYEIHDIRRFATVGAFLSYARLVRCAHTSADKKLGAGGKKIGNAHRRWAFAEAACLFLRPSERAKQWLQRQEKKRGKGKALGILAAKLGRTVYHLLTKQVAFEERRFWNDGTGQR

SEQ ID NO: 57409 - protein, 411 aa, unidentified
MEQIHDRVAGLDVHRDQVTVCVRTPGPRGGVQMEKARFDTTTGGLAALAGWLAGREVTLAAMEATGVYWKPIYYALEDRFLVWLCNAHHVKNVPGRKTDMSDAEWLADVAAHGMVRPSFVPPPPIRELRELTRYRKTQVDARAAEIARLEKVLQDAGIKLTSVASKVLTQSGRAMIEALIAGERDPAALAGLAKGKLRPKIPQLTAALHGHFGEHHAIAAARILAHLDFLDDTIAVLDGQIAARVAGHCQSAARLLADVPGLERRSVEVIIAETGADMSCFPSPAHLASWAGLCPGNHESAGKRRKVATTPGNPWLRRTLIESARAAARTKDSYFGAQYRQIARRRGPNKAAVAVAHSLLDVIWHMLTTGEVFADLGADYFTSRQDKEHQTRRLVSQLEKLGYTVQLAATE

SEQ ID NO: 57410 - protein, 504 aa, unidentified
MTAPTIRGQPASTRATPGGPQAQAQRQAFRRRKAKAKARNETRRQDEAAQVAALPVLRPHACGIDIGSRSHWVCVGFEAADSGLVQEFPAHTPGLKDLVAFLREHQVKTVAMESTGIYWVPLYELLQAEGFEVLLVDPSYSHQLRGRPKTDRRDCQWIYRLHSVGLLAAAFRPDEQTCQLRAYLRQRANLIRSASRHVQHVQKALEQMNLKLTEVLSDITGLTGRSIIQAILRGTRAPEKLAKHRDKQCKASEAQIAQALTGSYREEHLFELKLAHEAWQFTLRQVEKVDAQIALQLGRMKSDRALPPLRPKPRPKRRANSPGFDVRTALYYVAGIDLTEIEGVSELTALTLIGEIGPAGLSRFASVKKFCSWLGLCPNWKKTGGRVKSSRTRRGVNRAAQALRLAAQSLHHSRGALGGFLRRMKGRLGGQAAVTATAHKVARIVYLALKHGMTYVRQNQEEYEAQMKEKQVKALKRKARQLGLEVVEKTQASGATAAAAAVQG

SEQ ID NO: 57411 - protein, 334 aa, unidentified
MKNYSLIIGVDISKLTLDVTGINGSNKSVLQHQVIDNTKTKIKSFFKKMITKYGKGEILVAFENTGVYGYFLAYELYTLGMDYCNLSALEVHKSVGIKRGKSDKIDALIIAQYILANGFKLQLSTFTELHLTELKVLHTQREKVIKAIRTFGNNKETELFLPKKIIKELTKTSTSIIKNLKKNLKLIDLQILKIINSNESLKRDYKLTISVPGIGPQTATYLLIVTKGFTTFNNARQLACYAGVAPFPYQSGTSISGRNKVSHLADKKLKSLLNMCALNAKRWDYQLKGYFDNKVKKGKNKMLVINNIRNKILHRVFAVIKRQQPYVNTHNFAS

SEQ ID NO: 57412 - protein, 333 aa, unidentified
MGFEPEPSKEGSWMMAQNGLVVAGIDVAKGKVDACIRALSQRRTFESTAEGRRQLISWLRKHKATKVVMEASGGYEREWAKALREKEMAVRIVDPKRVRHFAQSAGRLAKNDAIDADTIAWFAETFGEAPGQAYDAEREKLLQIVNARRGLLETETMLANQGEHSVPDVVRKMQARLSKKIALEVAKLDAAIAAMIKATPHFAKLAEIIESVPGLGEGAAAGLIAGMPELGQVSDKVAAALLGVAPYDDDSGKRRGERQIKGGRRRIRNLFYMPCMGAATRHNPVLKAFYDRLIAKGKPKKVAIVACMRKLIVILNIMIARGEKWDAKRYAVG

SEQ ID NO: 57413 - protein, 412 aa, unidentified
MQVVHQRCAGLDVHKRTVVACVLVTQPDGSARPVVRTFGTTTGALTALSAWLREQPVERVVMERTGVFWWPVFTILEEGGHAVVLVNPQHVKPVPGRTTDVADSHWLADLLRHGLLRASFIPPAPIRALREVLRYRKTLVQERAQEVNRLQKVLERANLKRAAVASDVLGGSGRQMLEAIVRGEEDPAELAELAKGRLRAKRPALRLALEGRVKPHHRVLLRAILAHVDVLEGALEALDAELAHALAPFAPELALLETIPGVSRTAAAILLAEVGADMGQFASAKHLASWAGVCPGNHQSGGRRRSGRTTHGNVWLKGVLGEIALAAVRTRGTSFGARFRRLARRQGKLKALVAVMHNVLTVVYAVLHGRVPYRELGPEYAARPNPQRAARRHVAQLEQLGYRVALTPVEAA

SEQ ID NO: 57414 - protein, 343 aa, unidentified
MSNDTRIGVDVAKAVFEIAISDRPGYVMRRERLPRGQFLAFMTQQPQATVVMEACGSAHHGARKIQGLGHRIVLLPPHHVRPYIRRNKTDRTDAKGILEASRNEDIRAVPVKTVGQQVLTSLHRLRSGWMRERTARLNALRGLLRELGVFIPMGAREVVPLVWSLIEDADSELPEALRSIFAEACREIREIEARVKQVERQLEATAEQLPAVEYLRTIPGIGLLIATALVAFIGDIRRFPSGRHFASYLGLTPREYSSGLKRNLGRISKRGDGYLRTLLIHGARSVLVHARKQQPDRLREWANKLAKTHVHNKAAVAVANKLARIVWAVWHHERPFALIAKVA

SEQ ID NO: 57415 - protein, 351 aa, unidentified
MEFVGIDWATRRAAWCAVDAAGRRLGEGAVPADEGGLLRLVADRGLEVTAAVEMMSGAAWIAETLRSVGWTVRVADARRARALAPLAAKTDRIDARVLAELARRELVPEVWVPSVADRALLEQLLRRMHLIRLRTSAKNRIFGLLSQWGVRAGVTHLRRPGAVDALGERGVPEVWRASITEAIAVIDMLDARIAPIDAGLVQLARDDPRAALLRTIPGIGGLLGLTFAAEIGDISRFPSASKLVGYSGLVPRVRQSGESSRTGRLAKAGSPLLRWAAVEAAQHAWRAQNPWHRLYVDVRARHGHGNAAKSAVARKILIAVWHVWSRQQPFKPAASCAASIVPASSGQPLVA

SEQ ID NO: 57416 - protein, 362 aa, unidentified
MTAVMIGVDPHKGSHTAVVIGPAEEPLGELRVRASAGQVEKLVAWAADWPERTWAVEGAAGLGRLLAQQLVAAGERVLDVQPKLACRVRLLQAGDTNKNDPNDALSVAVAARRSKTARPVMAEDYPAVLKVWSKRHRDLARLRNQVACRLHAVLCDLVPGGHPKEISAAQAARILEQSSPSGAVDRARAELAAQFPGDMRRLDAQLRGTRKKLAAAVRASGTTLTEVFGVGPVIAGTIIGDIADVSRFPGRDHFAAYNGTAPVEVSSGNRKIHRLSLRGNRRINHAIHMAAITQIRHRHSDGRAYYDKKVTEGKTHKEALRSLKRRISDAIFACLLARVSDDHGFLIASPLVRRHIEAGLSL

SEQ ID NO: 57417 - protein, 376 aa, unidentified
MENVTYVGLDVHKAFHQVAMLIPGCEAPVEWRAETDTRGLRRLIRRLERDADGVIHVAYEAGPCGYGLQRELETHGIACMVVAPSLIPRKPGDRIKTDRRDARKLAELLRANALTPVMPPTPEEEAARDLFRAREDARQDLLRARHRLGKWLLRQGIAYTRGKKAWTREYHAWLRTLRLDDPTAQTVFDAYRVRVEQQESACRGLEEALATLAAQPAYAEAVGYLRCFRGIDTLTAIGIVVELFDFGRFDSPRGLMSYLGLVPSEHSTGGHPRRGAITKTGNRPVRRLHIEAAWHARHPVHVSRPLAARRQGQPAWVIAIADQAMARLHRRYWRMVGRGKPTNQAAVAVARELAGFVWAVLYPPAMGLDPASAITR

SEQ ID NO: 57418 - protein, 409 aa, unidentified
MRIIGLDIHRAFAEAVAWDDGKLKRLGRVDMRRHLLEAFAKKLSKEDVVVVEATGNASSVAAVIAPHVKKVVIANPKQVRIIAHAKIKTDTIDAKVLAQLYASGFLPEVWIPDEPTQALRRQVTRRNQIVRQRSRLKNIIQSILHSHLIPSCPHADLCGAGGRAWLFHQVLPEDERLAVERHLREFDRLGEDLKVIERDLARSALGNEGVKRLMTIPGVDMVVALAIAAAIGEVRRFDRPEKLVGYLGLNPSVRQSGPGPAYHGRITKQGRGHARGMLVEAAWAAARTPGPLRAFFLRVRARRGQHVAAVATARKLAVIIWHLLSKGESYAWARPALHARKLRDLELKAGYRAERGQKGAAHAYNIKSHRDQERRWVEQAEAAYARFVAGWNPRGPKRARTGAANEVRQ

SEQ ID NO: 57419 - protein, 373 aa, unidentified
MTKAELGVVVGVDAHTDTHDAAVLDDCGRLLATATFAANSAGYAQLLAWARRFGAIGVFGVESTGSYAAGLVRYLRGADVEVREVNQPHAHTRRRRGKSDPIDAEMAARHVLADSRPVTAKDTTGIVEAVRQLRVAREGAVKARSAALNALTGLIVTASEDLRQQLTARKTIRARATLCARFRPDPSRLHEPEQAAKAAMRSIARRVVELDSEIKLLDRQLNQLVTQAAPLTISRLAVSTGHAATLLVTAGQNIDRLRHEASFAALCGASPIPVSSGRTDRHRLNYGGDRDANRALHMIAVCRLRYCQRTRAYAARRTAEGKTKTEIIRCIKRYIARELYHALVADLLALPGTPGPIISVTCGAGPIGHTIRS

SEQ ID NO: 57420 - protein, 313 aa, unidentified
MTYTTRSIGIDISKSSFDVCLLPEGEADTFTNNTSGIAKFLSWVADREDIERLILEPTGGYERMVTDALLAAGLPVAKVNARYIRQFARASGQLAKTDKVDAFVLADYGRRMETRLLEQPSEQQQELSDLVVRYKQLSHMIVQEKNRREKLLNKARDWIEEALNFLLEQRQAVVEAMEECLEQDAALKARAKVLTSIKGIGLRTACFLLAGLPELGHLDKGQIAKLVGLAPINRDSGLMRGRRTITGGRKHVRDALYVATLPAIRFDPEMKAFYQRLRENGKPGKVALIAVTRKILIRANAKMRDHYAAALDT

SEQ ID NO: 57421 - protein, 366 aa, unidentified
MEKGTTFVALDDSKRKVVVAILRPGASEPEQRELPKEPHLIRRLFQRLAREGRVRACYEAGVSGYDLYRQITACGVECEVIAPALTPRRPGQRIKTDRRDAAKLVRLFRAGELTPIHVPNEAEEAVRDLLRCREDVRRDVLRWRHRLLKFLDRHGRLYVSGKNWSQRHWAWIRSQHFDLPTLQRTLEATLFALEQALARVAALDQDVAALAATDPYRTPVGWLRCFRGIDTLSAMILIAEIVDFQRFQHPRALMAYLGLVPSEYSSGERQRRGAITKAGNTHARRVLVEAAWHYRHSPRIGGALRQRTEGQPPAIVGQAWRAQQRLHRRYRHLTGHGKRAPIAVVAIARELVGFLWAAMTHAAAAA

SEQ ID NO: 57422 - protein, 344 aa, unidentified
MTVKCMAGIDLHSNYLFCAIVDMKGKRVFEKKLPCELASVLAALQPFKKRLEKIAVESTYNWYWLVDGLQDHGYPVVLANPAAMKQYDGLKHADDKSDGFFLAEMARLNILPTGLICDRAVRPVRDLLRRRMGLVHKRTSVMLSLKSLHTRMTGRDLSTGRIKAMEPQEAETLFEHPADQLITRLDLQLVEQLSRSIEQIEAAILATVKGRADYQVLQTMPGVGKILGLTITLETVDPKRFEGPGQYASYCRCVDSRRLSNGKKKGENNGKCGNKYLAWAFVEAANFAQRHDAGCRKFYDRKKAQVNGIVATKALACKLAKAAWHMMSQNTHYDAGRMFPGVKK

SEQ ID NO: 57423 - protein, 408 aa, unidentified
MRRGGGREGILAVVRPTREPVVTKIASSPSPAAVDYDVTLIFSVETSNKNWVLAAHVPGLGQVKAKQTIEPNVDALSKAIEGYRRRATASGAAVERVIVVYEAGYGGFWLARWLDAQGVEVHVVQPSSVPVERRKRRAKSDKIDADLLLRTLLAWLRGEPRVCSMVRVPDEADEDARRPTREREELVRERISLTNRIGATLATLGVDDYNPLRRDRRTKLETLRTPLGKSLPEHARAKILRILERLELILGQIAAIERRRDAALEDEAPGREEGMIQRLAGLRGIGAQSATVLVYEAFIRSFANGKALGSYAGLTGTPFNSGGSEREQGVSKSGNRRLRGAMGELAWLWLRYQPESALAKWFRERLAGANGRMKKILLVALARKLLIALWRYVTQGVVPEGAVFLPAS

SEQ ID NO: 57424 - protein, 351 aa, unidentified
MTILAEQFVHVIGVDTHKLTLSAAVLNASGGLREVCEVGASAAGHRQLMTLASRYVGPVLWAVEGTGSYGASLTEHLLAAGQTVTEVDRPKRGARKRGKSDEIDAIRAGRDGLAMSHLNPPRRRREREQLRVLLTTRAELVKTRTSLSNHLQQLVVTSSEGLRGHLLETRDQAHSSERLSHKCLSLRVGHQLTTEEQTRVRTMREVAQLIEELTTRADAYQTQIKALVEQLAPGMLCQPGLGPLTAAQVLLSWSHAGRLTSEAAFAALAGVAPIPASSGQTVRFRLNRGGDRKLNAALHIVVLNRCRYHPPTRDYMARRLSQGKTTREIRRCLKRYLARQLFRFLGRLDKG

SEQ ID NO: 57425 - protein, 326 aa, unidentified
MEHELHYIGIDTAKEKLDVDVLRPDGRHRTKKFANTTKGHDELVSWLKGHKIDHAHICIEATGTYMEPVAECLYDAGYIVSVINPALGKAFAQSEGLRNKTDTVDARMLAEFCRQKRPAAWEAPHPLERALRALVVRHQALTDMHTQELNRTETAREVQRPSIDAHLLWLEAELKRLEKQIKDLTDDDPDMKHRRKLLESIPGIGEKTSAVLLAYIGLKDRFAHARQFAAFAGLTPRRYESGSSVRGSSRMSKAGHVSLRRALYMPAMVATSKTEWGRAFRDRLAANGKKGKVILGAMMRKLAQVAYGVLKSGVPFDASRHNPVAA

SEQ ID NO: 57426 - protein, 295 aa, unidentified
MSTTIGVDVAKSVFEVAVSNRPGRIVKRHRLSRGQFARFLATRAPATVVMEACGMAHFWGRQAVASGHRVVLLPPHAVRPYVPRNKTDRADATALLEAARNATIHPVPVKSVTQQALTGLHRLRSTWLATRTARINIVRGLLREFGVTIPVGARQVVPRIAALLAGPDDTVPAVLHPALAAVISELRELDVRLRTVEQQLTAIAAAMRAVERLRTIPGIGLLTATGLVAFVGDARRFPTARHFASYLGLTPREHSSGLRRRLGAISKRGDTYLRMLLIHGARAVLCHAKKAITPA

SEQ ID NO: 57427 - protein, 387 aa, unidentified
MYYIGIDISKFKHDCAVINGDGKVVTPSWSFYVDCEGFAKLKAFLDSLEGEKRIGFESTGHYGENLKLFLEANNFTFMELNPLLVKRFVAGKSLRRTKSDPIDTINISEYLMTVEYKPYPKSFYHIKALKSLTRFRSNLIRQRSRQLVDLTNILDLMFPEFKPFFNGKFGATALYILSTYTNPQHIANMNAKSYEVLRKKSRGHFTADHFIELKRLAKNTVGHSSEYLESELKIILDIYSQMDSKVAQLEEEIERLVTEMDIMSVTIPGIGINTAAEIVGECGDICNFASASKLLAFAGMEPGYYQSGTSEHFGRMVKHGSPFLRNAIMSCCMPVIHNNIVFAEYYGKKIAEGKPHNVALTHCAKKLLRVIYTLETKHIPFDQDKLR

SEQ ID NO: 57428 - protein, 390 aa, unidentified
MYIVGIDIGKRNHEASIMNAAGKQYGKPIRFANSHTGFNKLMDWVKNISGADDVVFGMEATGHYWLALYTHLCHEGYAVHVINAVQSDALRGMYIRQAKNDSRDSFIIAEVIRFGRFCETAVSAPELHALRELCRHRFWIVDSVSDLKRKVIALLDQVFPEYENLFTNTFGKTSLQLLSEYTTPEELLAVDTAKLAETIYTASRGHHGIEKAQEIQNTARNSFGILLASDSIALLIRQYIEQIRFVEKQVDRIDTEIARLLSAFDNQLTTITGIGPTLAATILSEIGDIRKFASPGKLAAFAGIDPTMKQSGNFVGSHVHMSKRGSPYLRRAIWLAATIAAFKDPSISVYYQRKRSEGKSHFTALGHVSRKMVNIIFAVLRDNTPYSPAI

SEQ ID NO: 57429 - protein, 349 aa, unidentified
MREGSLSEAFIIGLDIAKYVFHAHGVDERGRAIFSKRISRKKLLDFFAAQPSCTVALEACGGAHHWARQLSQLGHEVRLIPPAYVKPFVKRQKNDAIDAEAICEAAQRPNMRFVAVKSEQQQAAGLVFRTRDLLVRQRTQLINAIRGHLTEFGWIAPKGPSHVAMLAGLIEEEEMAGSLPEAARAMLRLMLDLLADLDGKIADLDKEIARRAREDEVSRRLMTVPGIGPISATAIAALAPPAETFAKGRDFAAWLGLTPLQRSTGGKHKLGSTSKMGERTLRRLLIIGSSAVVLQASKRGAPKGSWLEQMLARKPRMLVTVALANKTARIIWALLVKKENYRAPVVAKA

SEQ ID NO: 57430 - protein, 424 aa, unidentified
METREFRLGTQDTIVGIDLGSIEHQVVIKDAEGKRLTRFRISHSREGMEELLRRAQTAAKSQDAKGARQVIFAFEATGHIWEAVAHYLQEHGQLYVIVNPLATFRVREARQMSREKTDVTDAEQIAELIRSGLVTRTQLDDPKYHHLRFAWREYERLRDERSRLKTLLSHQTYGFFPELLKVWSMVNQPGSLSVIRLGLTPHQIAALTVSEFIHQVKQHTRGRRVWRHKLIQAHHWAQRTVAPPNFHMALAQEARRIVDRLDQVSDQMEAVRKEIVDLLKNIEEAAYLWTIPGLGWATVAGLIAHIGSIDKYSHGRQLVKLAGTNPSQRDTGQRLSKVHRMTKRGRAGMRQILYMATLACLQHNPRIRAHYDRLIQREDRPLAKMAALGACMNKLLLYSFAVMKRRQPFDTEHSWQESQQRLAA

SEQ ID NO: 57431 - protein, 305 aa, unidentified
MLNDSTTFLGLDLGDKHSHLAILDQGGEMIEETRLPTTQAAFHRKFSTLSACRVAMEVGAQSRWVSHLLKELGHEVLVANARKLRAIYANPRKDDRTDAETLARLARLDPHLLSPIHHRSPKAQADLAVIRSRDALVRSRTLLINHVRGIVKSFGDRLPSCSANYFAKKVASDIPEPLQPALMPILETIASLTQQIRAYDRQIKSLCEIKYPETKLLRNVSGVGPLTALAYTLTLEDPQRFPKSRDVGPAIGLVPKRDQSGGRDPQLRITKTGNIFLRRLRVSSAQYILGPFGPDCLCPARVRIA

SEQ ID NO: 57432 - protein, 348 aa, unidentified
MRFYTGRHRYYCGIDLHARTMYLCILDHESGDVLLHRNLRCDPELFLEAVAPYRDGLVVATECIFCWYWLADLCVREGIAFVLGHALYMKAIHGGKAKNDKIDSHKIAVLLRGGAFPPAYVYPRRMRATRDLLRRRLFFVRKRGELFTHVRNTFHQYNLPAPSGQLLYKKNRVGLALAFAHEPSVRASIEADLALADPYDDVIRRIERVVQAEANVHDPDAFELLRTVPGIGKILGLTLLYEIQEIGRFPSVQDFSSYSRLVKSVHTSAGKRTGSGGAKIGNVHLKWAFSEAAVLFLKDNPRAQAHLKRLRKKHGHGKGLAILAARIGRSVYFMLKNREVFDMNRFFA

SEQ ID NO: 57433 - protein, 314 aa, unidentified
MADKLIVGVDVSKGWLDACIAGPGPSRVERLSNDREAIGAWLDRIEPAVVAFEPTGGYERVLRDCLRERRIFFIRVHPNDVIAFRKSRGIKAKTDRIDAQLIGAFAAEAISRHGVRPDISGNELLRALAARRRQVADALQAERCRMELAAAEAVRTSLKVVIGALRQSLDTLDKEIANTIAAAPELAELSGLLQTVHGIGPMIAALMIAHLPEIGHLSAKEIAALVGLAPQTRQSGKTRYREHTSHGRPDIRRALFNAARAAIRHPSPFKDFYDRLVSHNQRPGKVALTAVMRKILITANAVARDKQPWRLAEG

SEQ ID NO: 57434 - protein, 291 aa, unidentified
MLDRDTGEIVERIVKHEGTAVRDFYAGLPPPIVVGIEATGSMGWFLRLMEELGITCRVGDPAKVRAVETRRQKHDRRDARLLLQLLTEGRFPAIWMPSAELRDLRALLLHRDQWVRMRTRVKNALQGLALAHGLRRGASLWSRDGQARLTALPLPPHAGSRRSELQALHDHLTTHIEALDQQVSAQVDGRPQARRLMTHPGVGPVTALATEVFLGDPSRFADGKAVASYIGLIPSESRVAIASVAADSPSRAIRCCAFCGAKRPFMPRGAIRHSRASIDGSCSRRGSAKRA

SEQ ID NO: 57435 - protein, 397 aa, unidentified
MLAVGIDVSKSKSTISIIRSDGTILLKPCDFSHTISDIARLTALIRSYQEESKIALESTGHYHYPILKSLLKEDFTIFVINPFLVKKFMDNTIRKGKTDKKDAIRIARFVLEKSYQLKPYSPMDQKYDDLKFLSRQYSQSISMKVKARVQMANLLDEIMPGIQNIIPISSRYLENTLFFDFVEKYQSYERIAQMGEKRFVNSYTAFAKKHRCRGSQKKALAIYEAASNSIITRSPDVSTTLALSQCLLLLKQASSSADLLLNQMQSIAYTMPEYSIVRSMYGVGDRLAPILIAEIGDVRRFTSAKALNAYAGNDAPPYQSGQFEGTNRHISKRGSAYLRKACYEVMQSLKVHKPENDPVYQFIIKKESEGKHKTVAKMAGVNKFLRIYYARVMELYK

SEQ ID NO: 57436 - protein, 379 aa, unidentified
MGICRARKLQEESVVKDNITYWVGMDVHADSIQVAVYRENETSPLEEYTNLTDTKAQARLLKKLRGLSGDVRCVYEAGPCGYELQRFLTSKGIRCEVTAPALIPRKAGDRVKTDRRDARNLGRLYRSGDLTMIHIPEQEQEAIRDLVRAREDAVEDVMRKRHRLGKFLLRHGHRYQGKRWKQAHMNWMKTIHFDIVSLQTVMDEYLLVLAQAEDQLKRLTLAIEEISKTPECEKSVAALMTLRGVQTVTAMTILSEIGDMRRFGKAREFMAAIGLVPSEYSSGKRTCRGSITKTGNVHVRRVLVEAAWHYRHKTVGPGIRARRIGQPPEVIDVAQKADARLCRKYWRIADRGKRLTTVVVAVARELAGFVWAIGQLVHA

SEQ ID NO: 57437 - protein, 290 aa, unidentified
MEQYVALDVSLKEISVCVINAAGAVMFEGKVAAEPTALMGLIRTKAPRLAKIGLETGATSSWLYHALSSVGLPVVLMDARHAHAALSMRPTKSDRSDARGLAEILRMGWYRAVTAKSFTSHERLALLAARRRLVAIRTDLDAQLRGLLMTFGLILGPGNTDALVRRAEALAEGQPVISGLVTRLAEVRRHVVTQVAALDRDIRRLARSEPTLKRFMTVPGVGPITAVAFLSTNDEPTRFKHARDVGPYLGLTPTRYRSGETDRHGRISKCGDAFTRTCLYEAANGHWQVV

SEQ ID NO: 57438 - protein, 352 aa, unidentified
MTVTIVETRTQACAITGGVDTHAEVHVAAALDPVGGLLGVQEFPATPAGYAQLLGWLGGFGTVCLAGIEGTGSYGAGLARHAAAAGIRVVEVDRADRQDRRRQGKSDPLDAVSAARAAQSGRAAGAPKGRDGAVEAIRALMVAKRSARAARTQAINQARALVLTGPDDLRIRFSGHTPVNLIGELASLRPRPGAPVGYPTRIALCELGRRAVFLDRQLQRLDALMIPLVTARAPGLLALYGVGADTAALLLIATGDHLERLRSEAAWAHLCATAPIPASSGKVTRHRLNPGGDRQANHALWRIVITQMGSHPPTRAYVTRRTNEGLSKKEIIRCLKTLRRPQVYPHLRGPAS

SEQ ID NO: 57439 - protein, 348 aa, unidentified
MVDVGVDLHKNYSQVAVLDAWGEIRQEHIEHQGRDMEEFVRKLEPGSRLAVEATGNWWWFVDLVESQGHQVVMSNPKETKAIAHARLKNDRVDAEKLAILLRSGFLPQVWIAPAPIRYAKEVLRYRSLLVGMRTKLRNHLGAMLRKRNRQAPGQKLWGRKGRAYVESVALNPEADQMRGEALEQIKALDRLIGGWDQALGRRAKGDQLTRRLMSVPGVGVQTALAFQTFVGEVERFASAKKVASYFGLAPRERSSGNRRQLGHITKEGDSLMRHLLVEAALIATRRPGPLREFYRRLLRHKGKAKARVAVARKLTEILYQLWKQGCDYHGYLLRGLRTVGEPVIRTGL

SEQ ID NO: 57440 - protein, 419 aa, unidentified
MKKDNNSRKKSELNSKRAKSGSTEHRGTKEVLAELVGRLREKLNPKVASADPRQEGPRDRGSLRPNLDRLTVGVDLGDQWSNYCILDLEGDTLAEGKLRTTQEEFSEFFQGLNAARVVVEVGTHSAWVREVIVGCGHEVLVANPRLMEGSKRRKRKNDRIDANKLARLGRVDPQSLHPLEHRSTEVRQDLVMLRARDALVSTRTELINTTRGLVKSMGKRLPSCSSRSFASKTEEGVPVEIREALLPLLQIADAVSDCIKEYDRRMEEMANQKYGHTKLLRQVKGVGPITALAYALTLENPQRFAKSRDVGPYLGLVPKQEDSGESQPQLGISKAGDSMVRKLLVGSAQYILGPFGPDTALRRYGLRLCDRRGTNAKKRAVVAVARKLAVLLHRLWVTGEVYEPLHHSMSLPTGTATAA

SEQ ID NO: 57441 - protein, 363 aa, unidentified
MIKLCSIDVTKYEHVTSIYNPSTGEIILDSLYFDNNDKGFNTLLSNLSKLNKKNEILTDFESTSHYHQTLFNFLTSRKYKCYLINPYMTSKFSSISLRDAKNDNIDSRAVSQFLSFEYRYLNEEEFLMNELKELANQRYFLITNSSKMRIKPKSYLDRVFPELESIVNINTLTIRSILKEYPTAKAIPEARINKLKNIAKTASKGKYSLSKIETVKQVAKTSIKIHSISISLKNIIQYIEKLELKEKQIDTIEKEIQKHPTVLNSPLHPLIGINSIEITYIMSAIISITRFSSPEKIVAYAGFDPKVRQSGTWQASKTRMSKRGNKLLRSALIWTAFNMTHKPGPVKDYYDLKNHKASLITML

SEQ ID NO: 57442 - protein, 374 aa, unidentified
MGHDSGAFVGIDTSKLRNAVAVAEEGRGGEVRYLGEIDTTEATTRKLVTKLAAKYRQLTFCYEAGPTGYGLYRLIRKLGHDCIVAAPSLIPKKPGDRVKTNRRDAVGLAKLLRAGELTAVWVPDERHEAMRDLSRAREAARKDLKGKRQQVSSFMLRLGRHFPGKKTWGPAHMNWLMMQKLEHREQRIALEELLGAVRQESERVERLEQAIRDAVPEWSLAEVVTALQAMRGIDLVAAVTVLAEIGDLSRFQNPRALMGYLGLVPSESSTGDTVNRGGITKAGNGRVRRILVESAWSYRYPPRVSREKQMKVAAAPRAVREIAWKAQMRLCGRFRSLTRKGKRPTVVATAIARELAAFIWAINREVVGSHATAN

SEQ ID NO: 57443 - protein, 404 aa, unidentified
MLFVGVDWAEDHHDVCVMAEDGVVLGKRRVPDSVVGIGDLHGLIAEHAGDDEAVVVGIETDRGLVVHSLLAAGYEVFAINPLAAARYRDRHTTSGAKSDAGDAKMLADLVRTDRHNHRPIAGDSDLAEGVKLLARAHQNAIWGRQRQLNALRSALREYYPVALVAFGTDLASTDALAILAIAPTPELGRGLSRSKIAAALRKGGRQRNIERRAEEIQNALRAEQLEAAALITGAHGLITRSAVMLITSFNGQIAELEAALSEHFEQHPDAKVVLSLPGLGTVLGARVLGEFGDDRTRFSGPKSRKNYAGTSPLTKASGRSRVVLSRFARNKRLGDACEQWAFCALNSSPGARHYYDQLRARGKSHRQALRQVANRLVGILHVCLERGALYDELVAFPQESELAA

SEQ ID NO: 57444 - protein, 349 aa, unidentified
MEDYGGRQIVGMDLHRKRSVLVRMTEDGRRLGTAKITNGPAELRAQIARAGKNPQVVLEATYGWYWAADTLAAAGAEVHLAHPLGVKAFSYRRARNDERDSADLADLPRMGRLPEAQLAPHEVRELREITRYRQKLVHLRTSCKDQVHGVLAKLGVTVTCTDIFGMAGSAWLDQLGLPQPYGGKVTSPRHLAGELTTEITMLSEVIASLLAGDRGYQVIQQLPGIGPVLAAVITAEIGDVTRFRNAAQLCSRAGLTPRHRESDARVARGHVTGQGSRLLRFSSALAVSGCIGVAFRQQSRSAGGSRVMSQLRLVSDAESGSEVWRTSHARAGLAVPGSKRGSGGLRSAA

SEQ ID NO: 57445 - protein, 349 aa, unidentified
MILVGCDLHTRKQQVALLNTDTGELWDQELSHDGDAIERFYATLPPPVTVGIESTGYSLWFHALLQRLGHTLLVGEAAKIRAMVVRKIKTDRRDARHLRDLLKDDRFPVVWIPDPATRDLRALIKHRLRLVRIRTMVKNGLHAIALNQRLALGPSLWSRAGLAQLHALVLPPHTRRRRDDSLELLQWLNGHINELDLHVATAAAADPDACRLMSHPGVGPLTALTTVLVLGPVGRFPNSKHVVSYIGLAPAVSASADKYRLGHISKQGSALLRWVLGQAAPLATRGDAALKRIYFAVLRRRGRPKAKVALARRLLIRLYVMLRDQIDYDEFCRRGRTQRPGLEPARIPV

SEQ ID NO: 57446 - protein, 315 aa, unidentified
MSDVPCFIGIDVAKAQLDIAIRPAGVRWAVPNDASGVTTLVDRVQVLQPTLIVLEATGGLERAVTSALATAGLPVVVVNPRQVRDFARATGQLAKTDALDARALAHFADVIRPTPRPLPDAQMQELRALLGRRQQLIVMRTAEQNRLAGTSARLMQDIAAHITWLNASIAALDDDLEALLRASPLWREHDALLQSAPGIGPVCARTLLLELPELGTLTRQQIAALVGVAPLNCDSGTMRGRRTIWGGRAHVRTVLYMGTLVATRFNPRIKIFYERLLAAGKVKKVALTACMRKFLTILNAMLKHRTPWQAQEVQN

SEQ ID NO: 57447 - protein, 417 aa, unidentified
MKKDSNSLKTSEAHARRRKLGAAVERKPQEVMAELVAKLAQQLDEEIVPAAEGKKGERDRVRPNLDRLTVGVDLGDQWSNYCILGLSGETLAEGKFRTRRQEVTEFFQGLAKSRVVVEVGTHSAWVGEVIAGFGHEVLVANPRLMDGSKRRRRKNDRIDAEKLARLGRIDPKSLHPIQHRSTEVREDLLVLRAREALVESRTKLISAVRGLVKSMGARVSNCSSPSFSQKAAAEIPDEVRETLQPLLRLIATLSDEIKTFDRRIDKLAAEKYMHTQLLRQVVGVGPVTALGYVLTLETPLRFARSRDVGPYLGLVPRQEDSGDIQPQLGISKAGDRMVRKLLVGSAHYILGPFGPDTDLRRFGMRLCERGGKNAKKRAAVAVARKLAVLLHRLWVSGEVYEPLGHGTLTKIAHAAAA

SEQ ID NO: 57448 - protein, 371 aa, unidentified
MSEPSTFVGMDVHRRDIAVAMLIGDRRDPVEWRVANEQSAVRRLGQRLRREGGSQVHCVYEAGPCGYALQRQLQGLGLACDVVAPSMIPIRPGDRIKTDRRDARKLAELARGRLLTIVRPPSEDEEAVRDVCRGRDDVRVDLMRARHRLGKFLLRRGRVFERPAWSQAHRWWLGQQTFERRAEQIMFEDYLLAVEQAQARRHSLELHLEDLARGPRYTEAVGWLRCFRGIDTITAITLLAELHDFRRFRSPSQLMAYLGLVPSEYSSGPQKRRGGITRTGNRHVRRLLIEAAWHNRHKPSVSVALAERRHGQPASIIALADKAQLRLRRRYRRMEGRGKHPTKIVVAVARELVGYLWVALTPHARALTRNS

SEQ ID NO: 57449 - protein, 471 aa, unidentified
MKLPANQDKNQPVPVVKPSSTLEEINQNAAGIDLGSGEHWVCVPTDRADKNVRQFGCFTPDLIAMADWLKECRINTVAMEATGVYWIPVFQILEAKGFEVKLVNAHHVKTVPGRKTDVLDCQWLQKLHTYGLLSGSFRPEDQVCVLRSYIRQRDTLIKSASAHIQRIQKALIQMNLHLHKVISDVTGLTGMKIIKAILAGEQDPQVLAKLKDPHIKSSTADIAASLTGDYRREHLFVLQQELTLYEIYQQQISAVDAEIEKCLASFQPKTLDYPPTTGRKRRKKPTANHPDFDLHKYLYRMAGVDFTLIDGLDALTVQTILSEVGLNPKRFPSVKHFTSWLGLCPGQKVTGGKVKSSQTRTVVNRAANAFRMAAFSLTHSRSALGAFYRRLRSRLGAPKAITATAHKLARLFYQIWTTAGRYSDPGMEYYEQKYQDLILKNLQKKAQAFGLQLVPKSQDKEEASFYQTLST

SEQ ID NO: 57450 - protein, 367 aa, unidentified
MRLSVGVDLHKKQFTVYWRIEGREDGRNGRYVTDERGYGQFEKELEVFVGRGYEVTVAVESTGNTRYFKNRIEKLGISVVVVNTLKFKIVNESVKKTDRHDASTIAEFLEKDILPQARLCSQESEELRRLLKTRTTLVRTIVVVKNQIHGLLLSFGIESARGSLQSKQERRRVQDVLAAQQLTGAAVDPLFETIDRLSVEIKKLEKIIEEKTKDDRVVQLIRTIPGAGLITAATIRAYLDDIRRFEEAKHLSAYAGLVPWVQNSAEREHYGRITKRGPNELRTALVQVVLGMVRSKRRTGSYRIMERYDRLKRVKGSGRSIIATARTLSEIIWHMLDRDEPFDETQMKDPEIRKKAREMQAAAFNAA

SEQ ID NO: 57451 - protein, 364 aa, unidentified
MVQRGLGRTSHKHQWEKHSMKHYAGLDVSVKETSLCILDETGKVCRELKVTSHPDDLVQVLRDPAWRLERVGLEAGPLSQWLYSGLAAAGLPVICIETRHTKAFLKAQVNKTDRNDARGIAQMMRVNLFRPVHVKTLASQHRRTLLTARKLLQEKAIAIENDIRGLLRNFGLKVGIIGKVRFEDRIRELVAGLPELAEIMACLLEARQSLRERFATLHRKVLATVRDDDICRRLMTIPGVGPVVSLAFSATIDIPARFKNSKAVGPALGLTPVLNQSGESNRIGRVSLCGDAMMRALLYEAAQVLLTRVQKWSWLKAWAMAVARRRGLQKAIVALARRLAVIMHRLWSDGTEFRWTKEGAVATA

SEQ ID NO: 57452 - protein, 388 aa, unidentified
MSKKTAAASTIEITSPARTLMLAFELGEGSWLLGFSAGFGEPVLRRKISSRDTRALLREIEKAKEKLDLPPDASVKSCYEAGRDGFWLHRFLDSRGIENFVIDSASIEVNRRSKRAKTDRLDVNGLVDLLARHLAGSRKPVFSVLTIPSPEAEDLRQLGRELKLVKKDRTRVSNRIKGLLANQGLLIDRNKDMARQLAGLRLWNGTKLPGHLRARLERYASDYGYYSQRIQELERERKAVLRANEGEATEKVWRLLWLRGVGIETAWCYGMEFFGWREFKNRKQVGSLAGLTPTPHDSGTQVREKGIGKDGSRWVRGVAIEQAWAWLRFQPESELSQWYQERFGKGSKRLRKIGIVALARKLLIALWRYVETGLLPEGAVIASAVRLP

SEQ ID NO: 57453 - protein, 340 aa, unidentified
MHILGLDAHSATFSMIILNGQGKVCQEVKRDTSAENLIEVVRAAPGPKVLVVEESHLAQWVKRTVERYVDKLIICDPKRNSWISQDEFNDDASSAQKLAELYRGGYIKEIRHPDDEGAKLRGLFLHYYDLNQQLTRFKNKLKAVFRQEAISTAGKGIYKDEDHELWLKMLREQKHLQHAARQRFELIDTLERLKRETYEVLVKLARKDKAFVFLEDLPGVGPMIATGYLALIDTPDRFSRKNKLWSYAGFGNKRHTSDEQVYEEHASKCGNRPLKWVVLEHFLHAVQQTRKPNRFKRYYDELRRKGLDETAARRAVCRALLSTVRAVWMKGEPYRDDPLN

SEQ ID NO: 57454 - protein, 347 aa, unidentified
MVTIGIDPHKASHTAVALDPSGEMLGELRVVADASMLRRLRRWASSWPQRVWAIEGATGLGRLLAQQLVAAGEMVFDVPSALAARARVLARGHGRKTDGIDARSVALVAQHRSDLLTVAADDHTTVLRLLSDRRDELTGERRRTVNRLHRVLRDLRPGGAPRQLSADRATRLLTAIRPASAVDLERKAIARQLIADVRRLDRALLENRRRCEQAVASSGSTLTDIFGISDVLAAKILGHTGDITRFASAHHYASYTGTAPVEASSGEQTRHRLSRAGNRSLNHALHMAARVQTMHPGPGRKHYQRKRAEQKTPTEALRSLKRQLAKVVYRQLRNDHTSQPLTQSGLT

SEQ ID NO: 57455 - protein, 348 aa, unidentified
MMNLSIGIDVGDSDCFITGLTEVGELIFEGKMIDTNNEEEWRELLMDLSSRFKTQAAFEIGPHYEWLFDLLMEYCFDVQVINPSDFALINRSVKKTDKIDSIKIAKALHRGDLPTVYIPAKAVRADRRLVSFVHKHSQSLSKVKGRIRSLLKPLRMKCPYGDVLGKGSRQWMSEEVLPKLEDQEKMFLEMLLAQGDLLMEQRAKLDSKVSKRLTEYENAKYLQSIPGFGPLTSLAVASAIDDVSRFAEPGRLSSYFGVCGSIFQSGSFRRMGPMTKRGNVHVRWLLSQSLLHLHNRDPKARQRYKRLKRGKPTGVARGAQMRWLTEIIWRLLTNKDFYRIASKPRTAS

SEQ ID NO: 57456 - protein, 344 aa, unidentified
MDHFAGLDVSVKETSICIVDDTGRIVREVKVASEPEALLKVLGNPAYRFKRIGLEAGPLSQWLFSGLAEAGLPVVCVETRHMQAVLKAQINKTDRNDARGIAQMMRAGLYRPVHVKTLRSQKFRMLLTHRKLLLSKAIAIENDLRGTLRNFGLKVGMVGKVRFEARIQELVENIPDMAVLVEPLLIVRRVLREQIVILHRRLLAIVRDDEVCRRLMTIPGVGPVVALTYRATVDVPARFRKSKSVGAVFGLTCSKYQSGEVDWSGKISRCGDEMMRVMLYEAAQSMMHSKKWSWLKAWAMQIARRRGMKKAIVALARRLAVIMHRIWIDGTEFRWTREQAASAA

SEQ ID NO: 57457 - protein, 350 aa, unidentified
MEIYTIGIDLGKTVFHMVGLNVRGEAVVRKKFSRTQLLRFTAKLRVELIGMEACGGAHFLGHALREQGHEVRLIPAQYVKPYVKTNKSDYIDAEAIAEAVGRPTMRFVPIKTDDQLDLQSLHRVRERWVMRRTAVINQIRGLLFERGITLRKGRCHLETALPDILEDADSKLSSAVRLLLVQLKMELAQLAMRLEEADALIQKTAQESEVCRRLDAIPGIGPVTATALLAAIGNGGAFRKGREFAAWVGLVPREHSTGGKQKLLGISKRGNGYLRRLFVQGARAVLQFREKQSPGLRAWLAHLTSRTHYNVAGVALANKLARIAWAVLAKGEVYRPPLLVSSASADLACR

SEQ ID NO: 57458 - protein, 323 aa, unidentified
MQRIIIGVDVSQDFLDGHIRPTSVRQRFANTSAGIAELVAWVRPLAAERILFESTGPYQIAAVGALLAEGFPVVVVNARQVRDFAKAMNYLAKTDTIDAAVIAHFGEVATTKVRPLESEEIRTLRDLYDRRGQLVHMRAMEKNQRHSASVARVSANVLHSIDKHIEYLEKQIHDLEQRMDRLIEKSAAFQARNEILQTITGIGPHVSRTLLVHLPELGQYTRQKIAALVGLAPFNDDSGEHVGHRHIRGGRNKVRVGMYQAAIAAIRHCPRMKAFYATLKARGKASRVAIIAIARKILVLANALVRDMKPYENRTNSICLKST

SEQ ID NO: 57459 - protein, 376 aa, unidentified
MKKIRFVGLDVHAETIAVAVAEPDGEVRSLGTIPNREESVRKLVKKLGPPHQLRACYEAGPTGYVLYWLLTSLGVKCDVVAPTLIPVKAGDRVKTDRRDGLKLARLHRSGDLTAVWVPDEAHEALRDLVRAREAAKQDQLRARHRLSKFLLRHGKRFPEAGKAWTLKYMAWIGQVRFTQPAQEYAMLDYLHEVEHMNGRVLRLEQAIEEAVKLAPVWMQEVVQALQALRGVAKISAATLVSELGEISRFDNPRKLMAYSGAVPSEDSSGERVQRGAITKTGNAHLRRVVIEAAWSYRLRPGIGPALRQRQKGVSEEVKEIAWKAQNRLHKKYQRLMAAGKDQRKIVTAVGRELLGFIWAIGRATETRCRQQSAMTA

SEQ ID NO: 57460 - protein, 424 aa, unidentified
MKVTYQTCCGVDVHKSFLVATIVKTTGGIEPSYQKKRFSTFNNSILEFKQWLLDNNCHDVCMESTGKYWVPVFNLLEDEINVVIANPKWVKAVKGNKDDTKDSKWIGDLFRLGLVKGSYIPCKIVRILREYTRYRYKLVSCRSSEKNRYQNALTVCNVALDSVVSDIFGKSSTSIIDYLLEQSGASINHEEIASKLLRSLKSKEDAVIESVEGYQMTDAQKYRMRLVRAHIDYITAEINDVDKMIENMISSNSDSENAVQLLCTIPGVKHDSAITIISEIGTDMSQFSSSKRLCCWAGLTPGSNESAGKKKSVRITRAGVYLKPALVQCAHAAVKSDKSPYYKKKYESLVKRRGKKRAIIAIARMILTAIYQMLSTGEQWNPSDLYKVDMPVALVEKQKAKAIRQAKKLLQREGMLPPDESLAS

SEQ ID NO: 57461 - protein, 483 aa, unidentified
MAKKSAKRKQKKLLNQVCHPNAGGIDIGSREIMAAVGADKSDDPVRAFSTHNQGLREAVAWLKECGIETVAFEATGNYWVCLYDFLQTAGIAPWLVNARHVKGVPGRKTDVQDAQWLQQLHTAGLVRRSFVPDQEVLSLRYLQRHRDDLVRGGGREIQHMQKVFNEMNVQLHHVISDIDGWSGQRIIKAIIEGERDPETLADLRHSSCKTPRGEVILALDGNYRDEYILVLKQCYHRWQQAHQQITEVDRQIGQMLSQFERDEPCDSEKQDDESEKLGRIYIVKPASEAEDKSEAALPIMATRNQSKKREPVYDIQSEAARIYGTDLTLIPGVSSGVLSALLTEIGGRNAFIKKFKSGHHLASWLGLCPDNRISGNKNLGSKTRKVKSRLAYQLRMGAMTLWRSESELGQYSRRMKSKLGKPEGITATAHKMIRIIYKLIATATTYEDKIAGNMSESRKQRRIKGLQKAAERLGFQLIEAQTV

SEQ ID NO: 57462 - protein, 412 aa, unidentified
MLDSSEVESTAADGVFIGLDWGNAHHQLCVLDAAGRMLDQGNFAHDVVGASELTDRLTRHGPVHGIAIERSEGLLVETLQGQGHRLFCMSPKMSARARERYRLAPTKSDAFDAFVLADSLRHEHRHWRPLATPSPVLAELRALTRDRERLIQNQRDVENQLRAIVLTFHPGVLHLFSSLDRDITLAFLRDYPTPTHAARVGTARMAAFCARHGYSGRTRPELLVERLRANLLSASAGTTAGKAFSTALFVDQLELLNIQLRAITKRIRERLVEHADAAIFLSFPGMGEVTAAIMLAEMGEDRARFPNPGVLLAESGTAPVTRSSGRSRQVTFRYAANKRMRHAIDWWAFVAVRENEWARDAYQHARARGQLHNRALRGIGARWTRILWRCWQDGTTYDPALHLKDQPADITA

SEQ ID NO: 57463 - protein, 410 aa, unidentified
MGQAAKQCTIDVAETLNGVRAMSQVNDLSYSPTAFDQDSTLIAVIELSLKNWLVAGLVPGLARRPLKKLAADRDALLRLLERWRTEAEKAGKVIKRVAVAFEAGRDGFWLARWLRRQGIEAYVIHAASIAMPRQHRRAKSDRLDTESLTRGFLGWLRGEKRHCQMCHVPSLEEEDARRPGRERDRLTREQTRLVNRIKALLSWLGISGFNAKLRGAEDRLAQLRTPEGLPLPENTAAELRHYVERLQLVRQQIKEIERQRAARLAAEPNQPNQPNQAIKLLQQIVGIGPETADTLTNEVLLRPLRDRRAVARYGGLTGAPDESGSKRREKGLARAGNLRVRHTMVQLAWRWLMFQKDSALACWFFQRTQNASPLVRKKMIVALARKLLIALWRYVTTGEIPQGVALRPAV

SEQ ID NO: 57464 - protein, 353 aa, unidentified
MAHPTAPQLTVGVDTHLDVHVAHAADHLGRRVATVQVPTTPAGYQRLLAWARGLGDPVAWGVEGTGSYGAALARFLAAQGQVVVEVNRPDRAARRRHGKSDPVDAQAAAKAVQAGDATVVPKAGTGQVEMIRSLRVARQTAMRARTQTINALKALLVTAPAELREQLRGMSVTRLVRAAAGQEPGPITSPLAAAMLALRTLARRHQALSAEIDSLTSELDRLVATAAPKLVALFGVGQDSAGALLVAAGDNPGRLHSDACFSMLCGSSPIQASSGKTTRHRLNRGGDRQANAALHRIVVVRLCHDQQTKDYMVRRLTEGKTKKEIIRCLKRYVAREVFAVLSQIGQDTPTATA

SEQ ID NO: 57465 - protein, 324 aa, unidentified
MGNLIYVGLDIGKFQLSCSLPGRRVFDVTNDPAGIGELLRRAASLAPPERLCFVMESTSEYSSCTAETLLELAPVQAAIVPPACVNGFKRAGLVRTKNDQVDAVAIREFAQVKAPPPWLPPSAAQRRLRSLQLVMHSLRQAVTQQKCIREKLASARRPDGCALDSIDRVVAALEEEHAQLQWEFDAVVAADQALARDSAQMLSIPGVGPVVRNVLLAVCYQQLWELPQRKLLAYCGMSPREHQSGRHQGRTLMSKAGDARIRRVLYMAALVAVRKGGLLHEYFQRHRAMGKPGKVALVSVMRKLLYLIQGVVKSQKPFDFAYTT

SEQ ID NO: 57466 - protein, 408 aa, unidentified
MQVTFGIDVSKSTSAVCELIGESKNELTIANDRPGFIQLLKELAAFSKHPQIIFEATGVYSRRLQAFLEDYGYEYVILNPLKAKKEMDMGLRHNKTDKTDAYHLALIQRLHHHPVNQLQSQTYKQLNSLSRFYDQLTSDLVMAKNRLHQSLQSTFSEIETLFCSAKGKNYWQIVLHYPHCDLVRKDNQKQIIDWLMQLKGIGFKHAQKTADKLIELARKAYPVVSSDSVEVEQVQYYAHRLLGLSEQRKQIIERMVKLANSLPNNDLKNLESIPGFAQTTAVRVLAELGDLRRFSNPNKINAFIGIDPGRYQSGEMDSSLSITKHGNAVARKLLYRAIGQIDNASKTNPCHIADYYESKKLSSQTKGFKKIAIASIHKLIRTIYALISNDQLYDYNVAKHNQKDFSRN

SEQ ID NO: 57467 - protein, 421 aa, unidentified
MRKADTRKVKAVGDDTLIVAVDIGMEMNRGYCTTPDGRSSKTFKFDNTRVGMDTLWDMIMISKNRFKCNEVIVGYESTGPYGEPMPHYLMKKPVRIAQVNPMHTKKVKEINDNSSLKTDDKDPRVIADIIKLGRALSIVIPEGDAAYLRRLNNSRERHVRERTALYNQLQQLLFLLFPEFRTVIKNIKCKTPLYLLKKYPTPEVISALDKHVLGEEMRKPSQGKFREHHADMPINLAKDTVGIREGAVGLSMDIRHILVQLEMLTNLIAEIESEMEIALGRIPYSSKLLSIKGVGVISVAGIIGEIGDFKKFKTRSEIMKLAGLDLYEISSGKMKGQRRIAKRGRSLLRKILYYVAIQTIRKNGILHDYYTRLTDGGMKRMKTLVAVSRKLLGIIYAIVRDDSEYSVNFESMKRQVIKKAA

SEQ ID NO: 57468 - protein, 429 aa, unidentified
MNEVNDRLTLFRSLKASVRGSERYLLVGVDIAKNTHHAFFGTPNGRTLRKNLVFDNTVKGFESLRALVRDLQKQHGLVEVVYGVEPTASYHKPLAEYLIKNQEHVVYVSNVAVARNRAMLDGRWDKNDKKDAANVADLVGQGRCLYYDIPDESLRELRSLIAFRSRLKKEEHALRMRLRNNVFAQYFPELDKLTIHPGQPNDVVLSIAQHCLDPQRIAAMEFEEFVKLVTVRKVTVAQEKRLRGLWEISSRSAGCQVHDAARWEAQTLVRRFKSVIEDIRDTEKRMAAVAEKFPEYQCLLSIPGFGPIVSAMVLAAIGNASRFVNRKQLLRLAGLDLSASRSGQTSDTAKAVISKQRKAVLRYALVQAAMIASSKNSEIRGYFSKLIQGRELECGIRLKMKVKLAAKLLIVAWTLMKTGEKFEASCFSG

SEQ ID NO: 57469 - protein, 343 aa, unidentified
MNVFIGLDVSLASTAICVLGPQGKIVDELEAASEPEALVRAMTSLPYAVDAIGLEAGPLSQWLSKGIEEAGFDVVLMETRLVKAALKAMPIKTDRRDAQGIARLLQMGWYRPVHRKSVSSQEIRALLTARKSVQQVIINLELSMRGVLRNFGLKLGHVTRIRYEARVRELVEQNEILSASTEALLRARAQLRVELAELDAKIADLAKQDDVCRLMMTMPGVGRIVALTVKSAIDDPTRFVRSKDVGPWVGLTPRRTQSGEMDIVGQITRAGDRALRTALYQAAMILMHRGSPNWLQAWALRVAHRRGSKRALIALARRIGVVLHRMWRDGTPFRHAQSSPATV

SEQ ID NO: 57470 - protein, 340 aa, unidentified
MLYVGLDIHTKHIAVCVLSETGQVVQRARVRGIEEMLRLLEGLPDRFEVCYEASCGYGHYHDLLKPLAARVLVAHPGRLRLIFRSRDKNDRKDAERLAKLLYLGEAPTVHVPSLDVRTWRELINCRSQVIAKRTRAKNALRALLRGAGVVPPKSPGLWTKKGLAWLRQLGLPTASQQLRRDLLLEEVEALNGQVRRIEQELNRRAQQTPAVARLRSIPGVGSRTAEAVVAFIDDPHRFPHAKAVGRYFGLVPSQDQSGDKNRLGHITREGPAVVRQLVAEATWQAARRSPTVRAFFERTQRGDPQRKKIAVVATAHYLVRVMWALLKRGTVWQENEAPGK

SEQ ID NO: 57471 - protein, 389 aa, unidentified
MAMTTCVGRCACREHNAATAALGDGVDAPRRHLRAKVKVSTYHPKEASMAQATTIGLDIAKHVFQAHGADAAGHMLFRKRLARTKLLGFFAAHPPCLVAMEACAGSHYWGRQIAKLGHTVRLIPPAYVKPFVKRQKNDAADAEAICEAAQRPSMRFVPVKDETQQANGVVFRARDLLVHQRTQCVNALRGHLSEYGYVFPQGITHVPILIAHVEDPNASLPESARAILKILIETFTALEEQIKKLDAEINRRSKADPATRRLMTIPGVGPIAATAIIALVPAAEGFRTGRDFAAWLGLTPLQKSTGGKQKLGAISKRGERTIRRLLILGASAVIRQACLRGAPAGSWLAQMLTRKPKMLVTVALANKMARVVWALLVKGGDYKAPAAAA

SEQ ID NO: 57472 - protein, 343 aa, unidentified
MEQYVGMDVSLKETSICVVDGSGEVVFEGTVTSEPVAIAEVIRSKAAGALRIGLETGPTSTWLWHELRALGLPVICIDARHAKAALSMQINKSDRNDAVGLARIMQCGWYKEVRVKSVACHEIRAVLNSRGLLVKIKRDLENQIRGLLKNLGLVIGKAGGNVFRRRAEELIGGQGLLGEAVRPLLEVREKVSREIAALHQKLLDLARNDADSRRSMTVPGIGPITALAFRSAIDDPSRFRRSRSVGAYIGLTPRRHASGEVDWSGRISKCGDRMLRTYLFEAAGVLLTRVAHWCKLKVWGHRLWKRIGFKKAKIAVARKLAVILHRMWRDQTDFIWSTKETPA

SEQ ID NO: 57473 - protein, 338 aa, unidentified
MSSLPSPYHVFVGIDIAATSASVACATDPRTVEPAFTIAQTLAGFADLVTRLQQRHLPPAAVLVVLEATNTYWMSLALHLHDAGYAVSVINPAQAHQFAKALLKRAKTDAIDAQTLAQLAATLQPNPWKPPPAIYEELRQRLQQREDLLRALTQERNRLDALRHRPSVIASVRERSERWIAWCEAEIATLDTELTALLDQAGEWRAAAERLRSVPGIGPITAGWLLVETLAFTTCATPQQAAAFAGLAPHAYESGTSIRRRGRIGQGGNAALRRARSMASVSAGRHNPHIKAFYERLRAAGKPVKVARCAAARKLLHLCWAVVTRDVNYDPRYGLHTP

SEQ ID NO: 57474 - protein, 416 aa, unidentified
MSEAPNSSPFERYLALDAHKHYVVVGGVNAQLEIVLRARRMDMEQYPQWAKENLTARDCLVIEASTNTWDLYDTTAAVAGKVVVAHPMAVKLIANARVKTDTKDVFRLAHLLVGGLIPEVWVPPVPVRELRGLIAHRRRLIKMRTMTRNRLHSLAHRHNLILPEGGAFVDKNQAWWKDLSLSPVEKLHLEQDLAMLEFLGPKVQAVDAELARLSSSESWKQAVPYLMQLPGFGLIVTMTLLSAIGDIQRFPSSKQLVGYSGLNASLHQSGQANYSGRITKQGRKELRLALVEAAWTAVKTNPYWREQYQKLVHRMTDNKAIVAIARRLLVTAWHVLTERATDRRADPDMIASKLMAWSWKLTDAQRGGLTSRQFVRYGLMRLKIGQEINRIRHRNNRPIASEEEVLELLSDLNLSI

SEQ ID NO: 57475 - protein, 401 aa, unidentified
MEIIIGVDPHKLSVTIEVIDDHEQVLATGRFATDNAGYAAMRKHVVAWPERTWAVEGSNGAGRPLAQRLLADGERVVDVPAKLAARARVLDTGHGRKTDAHDAHSVAVAAVRAKGLRVLSHDPQLEALRMLVDRRDELVRQRVQTVNRLQRLLGELTPGRVKKDITALQAKAMLASIRPRDVLGKTRRRLAAEQLADLVAVEKKIKSLGKELKAVIQDSGSTLMDLPGVGPIVATRVLADVGDVARFADRNRFASWTGTAPIEASSGETVRHRLSRAGNRRMNHMIHIAAATQIRLDTEGRRYYRRKLGAGKTRAEAMRCLKRRISDALYRQLVADARMRAANEETGPGGHCGATHQSSAVDLPPHIDTSDQPLPGPAKPTLQPAKPPRNTTAKKSLTRAR

SEQ ID NO: 57476 - protein, 377 aa, unidentified
MSIVMGIDQHRAQITAEWIDLVTGEVSRARVRPADRAGVRRFLARFDCTQLEVALEATTGWRFVVEELRAAGAEVHLAEPAETAALRGNKRRAKSDRADARHLRELLLSGRLPESWIATDHILDLRSQVRLRHTLIEQHTEWQQRIQAVLYHHGCPHRRGLMVADGRDWLAAQPLPEAAREQITVALAMLDALELQLAPLSRQLRVYARAQTGCKALIDAYYGIGELCAVTILAELGDCRRFANSRDAVRYGGMDITVYQSDRHRAPGHLSRQGPPALRWALYEAAQVARRPSSPDRAYYEQAAERLGGNRACLALARKLLKRCYHTLRELGDDALAPPAEQTRAPAGSAAARRASSGSPRQVNAPASREANGALAA

SEQ ID NO: 57477 - protein, 387 aa, unidentified
MIDIVIGLDVHKRSVYATVMENDGNIIIQRNMENNMEQVNKFLSVYKDHDIVIESSTSGKYLCKELLKLNYTIHLINPAKVPEISNNYKKTDREDSFQLADVYRKGGMKEIYIPSGEIENIRSLVRYRHSLGEELTLKKNKIHALLTSYGIIIKATDPFGRKGLREIESNYSNLNYSDRIVLRSLLSDISYIKDREREIETEISSISDNNNNIKLLMTIPGINFYTAAGILSEIGTINRFDNKLKFASYTGLIPSEYSSGTKTVKGHITKHGPSILRFFLVETVHSLIKFTKKFKSKYLSIVRRLGKKRSIIAIARILAETIYSMLKNNVKFVDQERKETINPNELYFRRLEELSMKKINNMRRIANNGNVQGDSANLIYRGGIKDC

SEQ ID NO: 57478 - protein, 331 aa, unidentified
MSILTVGIDTAKNVFAVHGVDVAGKVQLRQPKVARGKLNALVASLPPCTIGIEACTGAHYWARQFQAHGHTVKLMAPKLVTPYRMSGKRGKNDAADAAAICEAVGRSNMRFVPVKTEEQQSRLMVHRARQGFVTTRTATINRIRGLLAEFGVVLPLKAEVVRREAAAKLEDLPGYANLVIGDLLSEVHHLDERIKQYDAHIHGMARECTAAKQLMQLMGIGEVTATAIVAMVGNAAEFDSGRQFAAWLGLVPGQYSSGGKIRLGRITKAGDAYLRGLLVIGARAVLNAAANKTDSLSRWALGLAARRGYWKGRSGHRGEERAHGLGGAHQG

SEQ ID NO: 57479 - protein, 487 aa, unidentified
MVHPPDQSDVVKARAEKERQAQGRKAKSQAQARAKAKGKRGQGQKTVELDSLAQINLNAAGLDIGAAEIWACVPEERDEVSVRVFKTYTIDLQGLADWLGACGVETVAMESTGVYWLPVYEILEERGFEVYLVNARHTKNVSGRKTDILDCQWIQQLHTYGLLRASFQPAEEIATLRAYVRQQQNLIRYRSAHIQHLQKALQLMNLQLTQVISDITGETGLQIIRAIVAGEQDPVKLAQFRNPRCHSSEAEIAKALQGNYRAEHLFALRQALELYDFYTEQIRACDTQLEQQYALFTPQVDVEAQPLPPRQRRGSPNEPDFDLRTSLYQMTGVDLTRIDGLNTLTVQTIISEIGLDMSCWPTVKHFTAWLGLAPNNKITGGKVRRRETKKTTNRAATALRLGAQAVSRSDSALGAFYRRKRAQLGAPKAITATAHRIARIIYVMLKNKTEYHDPGADYYEEQHRQRAIANLKRKAKKLGLEVVSAAA

SEQ ID NO: 57480 - protein, 422 aa, unidentified
MKNVTDSGQKVKGQKLLMALERASWVLGIDIGKEKLSCALLLKDETFRCRFDVEASLHGFQMMLERVKTETKGNGAVMFALEPTGHYWMVLGQFFEDHNQSYVLVHPLVVARSREVKQLNRGKTDAFDARLIAELACRGSVTRTQIPEDDWATIRFYAREYMDREKEIAREKNRMMSYLETTLPGFLEIFPRPLGMNSRACLRVLANFREVLQGDIVQFESQARKHITGKRLMTSRVRRLFEMLQRGDALGLRAGRKTLFWRIINSLDRLELYEKQQDMASKALISLYEQCEFKPYLDSVWGTSPLTNSLVLGFMGNPTSYDTPASLIKMAGCDPVPNESGKFKGKASISHRGRNLLRKAGDRISFLLEKRNTVFRNFMHHLTARPKNKPTKRQARIACINKYFRIIWVLCNHRVLFNPALA

SEQ ID NO: 57481 - protein, 411 aa, unidentified
MQVIYERCCGLDVHKRTITACRLRWLGSEWQKEIRQFGTMTKDLLALSDWLVKEGCTQVAMESTGVYWKPVYNILEGQVELLVVNAQHLKAVPGRKTDVRDAEWIAELLAHGLLRGSFVPPPSVRELRELTRYRSSVVRDRARTVNRLQKVLEAANIKLASVVSDIDGVSARLMLEGLVAGQRDTEQLASLAKGRLKEKHGQLVEALSCRLQPHQSFLIAEHLAQIDYLEGAIERLSGQIEEKLRPFEPQIGWLDTIPGINRRTAEVLWAETGGDMGRFASARHLASWAGMCPGNNESAGKRRSGRTRKGSPWLRHCLVEAAHGAAHTKNKYLRSQYHRIAARRGKKKALLAVGHSILVIAYHLLTRKQAYADLGANYFDERDRQAVTKRCVNRLQKLGYEISLEKLQMAA

SEQ ID NO: 57482 - protein, 347 aa, unidentified
MRRIAVDLAKSVYQVAESVRSGQVVQRKRLNREAFRRYIQEQGETVEWVMEACGTAHYWGRTMQAQGHAVLLIHPRYVRPYRRRNKTDRNDCDAMLEAARCTDMHPVPVKSHEQQQVQQLHGLRETWKKSRTQRINLLRGILREAGIEAPVSTAAFLRVAHELVERAELAPLRPQLHIVLAEINLHEQCVAECEHQLKRWHADDEVVRKLDEVSGIGVLTASALKAAVGRPERFASGRQLSAWLGMTPREFSSGERRKLGHISRQGNVYVRTLLIHGSRAALLAAQRCQARTPEKLTPLQRWAVETAARIGHNKAAVALANKLVRICWAVWCHERRFSGDWRSVRPA

SEQ ID NO: 57483 - protein, 453 aa, unidentified
MAPRHQKTKQKVSSLPVLTPHAAGIDIGAREIWVAVPPGSDPKPVRAFDTFTDDLLKLRDWLLACGVQTVAMESTGVYWIALFQILEAAGLEVCLVNARHCKNLPGRKTDIQDCQWLQYLHTVGLLRASFRPPEHICALRTILRHRHRLLRCAADQVRLMHKALTQMNVQLQHVISDLVGMTGEAIVQAILAGERDPVKLAALKDHRIKASRDTIARSLHGDWRPEHLFTLSQGYQTWQHYQKQITACDEQIEQQLASWDTRVDLNAQPLPAPRTTHRTPQRNEPQFDARSECYRILGVDLTQVPSFQTPTVLLLLSELGPDCAPKFPTAKHFSSWLGLCPDNRITGGKIMSSATRDVKSRVAEALRLAAQSLWHAQNYFGELYRRWKARLGTPKAITAMAHKLARILWHLLKFKVPFNPEIFRKEEEKLRRKKLARLQNTAAALGYRLIESQ

SEQ ID NO: 57484 - protein, 367 aa, unidentified
MRYIGLDLAQTTSHKALVIDEGGQVITPVMSVKTSAISLELLFQHAREGAPADEPLIVVMEPTGMAWFPIAVFCQRQGVKVYLVNSQQVADLRRFYRKHAKSDRIDARVLARLPIVNPEKLHALQLIGARQMACQRGCKELDRMTDLMVAIQNRLRAIDRFAWPGLEQVLSENIAPLTRWFRENWYDPGTVLAVGAAGLLAAWQENGPKSAEMPESDEWATALVQLAEEVRALYGHEAAFLDYGYLQAEVSREQALLATLEAEHQQLQLGTVRPLYRQLHPSRNLETLYGVGQDGAAVYFSFVGDPQRFPDHASFRGWSGMIPRSSQSGGSEAKGLSISRAGPGLVKKFSFLGAETARQWDPQIAAI

SEQ ID NO: 57485 - protein, 402 aa, unidentified
MDARDMDYEVFCGIDVGKSGHFAVSFRRDSLEPEMRRAIAADEADIRRALADASGGSRMLVVVDQPGGFGELPVAVARDMGFDAAFISPKDFHDLAVLYSEGKSDAADALVIADAPRRHPRLVRLVAEREEALSGLRVLPRARADAVRERTRAYNRLHDCLERVCPPLEELFAGDALHTSLARAVIARYGGPAGLRRAGEKRAAQWASKLKGQANRGPEKIREAFEAIGRMGVALPAAGAVEAQAKRLAARLDQLEEEVAAAEREIARIADSLPEIALLQSMPGIGPVYASVIVAEIGGIGRFADGNRLASYAGIAPVKDQSGKRDSSKKSKKGNRRLKAAFLGSADAALDCDGASRAYYDRKRAEGKLHRQALRALARRRADVIYAILSSGRPYRQPAPAA

SEQ ID NO: 57486 - protein, 387 aa, unidentified
MSQTIAAPIPAAVDYERTLVLAIEVSNKSWVLAAQVPGLPHTKAKRTINPEAEALLAAITGYRTRAAASGCSIERVIAVYEAGWSGFWLARWLMRRGVEVYVVQPSSVPVDRRMRRAKSDGIDAELLLRTLLAWLRGEPRVCSMVPVPDEADEDARRCVRERTELISERIGLTNRIGAVLATLGVSDYNPLLRNRCRRLAELRTGLGEPLPANAHAKIKRLLARLELVLTQIAELERERDAVVETEAPDKASKMIQQLTGLRGIGVQSATVLVREAFVRRFANGKALGSYAGLASSPYSSGGIDREQGIGKAGNRRVRTVMVELAWLWTRYQPDAAQVCWFRERVGSTGPRVRKIMVVALARKLLIALWRFVIDGVVPEGAVLKPAA

SEQ ID NO: 57487 - protein, 373 aa, unidentified
MPTNLRYVGLDVHAETIAVAVAEADGEVRSLGILPNRLEAVAKLIRKLGPREHLRVCYEAGPCGYVLYWQLTRLGVHCDVVAPTLVPMKPGDRVKTDRRDAEKLARCYRAGDLTAVWVPDAAHEALRDLVRAREAAKQDQLRARHRLGKFLLRQGRRPPEGVKPWTQRHRRWLDALHFELPAQQATLADYLSEVDHAAARVARLESALDEAVAAAPAPMRAVIAALQTLRGIRQVIAATIVSEVGSLARFTHPRELMGYSGTVPSEHSSGDRVHRGAITKTGNAHLRRVLVEAAWAYRFPPKCAKGLRQRQRGQPAAIIDIAWKAQQRLCHRYHRLLARGKPTPHVITAIARELVGFIWAIGVAVERGQAMAA

SEQ ID NO: 57488 - protein, 343 aa, unidentified
MDVSTIGLDVAKSVFQVHGIDAEGQVVVRRQLRRRQILRFFEKLAPCLVGIEACATAHYWGREIAVLGHEVRLMPAHYVKAYVKRGKNDAADAEAICEAVQRPTMRFVSLKSPEQQSLLMLHRTRELLVRQRTMLANAIRGHMAEFGIVARTGLPQIKELLAVIADADDARLPPEARACLEGLARQFLSLNEEICAADKRLHAWHRSNPVSQRLATIPGVGPVTASALVASITDPSVFKSGRELAAWIGLVPRQNSTGGKQRLGKISKQGDQYLRWLLVAGAMAVIRHAKRRGSANQPWLDDLIARRPTKVAAVALANKMARMAWALLRHGGAYRQPVITASL

SEQ ID NO: 57489 - protein, 418 aa, unidentified
MTKSFDSTFIQIIHPVCCGLDVHKDKISACLITLDDNGKEQSEIMEFSTFTKDLLKMKKWLSENDCPILAMESTGVYWHPIHNVISDSMEVILVNARHIKNVPGRKTDISDSKWIAGLLRHGLLKGSFIPPENIREWRELTRLRKTYTESFADYKRRIHKLFITANIKIDSVVSDLFGLTGRNLIDLLCNEADLTLANIEKCTKGSLKKKNLELHESLQGFFKEHHRFQLIGMMDTIITFEKRVTEINERLQNLTKGHQDLLDRLDEIPGIDKKSAQSIVSEIGVTLDEFMTMSALVSWAGLCPGNNESAGKRKSGRNSVRNHPFKTILVQVAWAAVKTKGSYYKAKYYKLKARRGAKKAIVAIAHRIAKAIYKIIKHGDTYRDLGEDYLAVPSRQKTLMNLNRKAKEMGFKLVPCEV

SEQ ID NO: 57490 - protein, 338 aa, unidentified
MTKYFVGLDIHKEEIQGCVINDQGEVISNQRFLNTTKALDYFLEKQDKDTAFVMEACGMYEPIYDRIEEQGYEVTLAHPLKVKAIAYSKKKTDEIDAKILADLLRVKLIPESYVPPKHVRFRRSIIRNRTYLVRQRSNLKHHTHSILLKNGIKAKYTDIFGKGGMEWLTKIELPYADRLALDNILSIVNTFNQKIELSDDLINGIVKNDKQVNKLLTIPGIGNYLALLITSEIDDVKRFRTAKKLCAYVGIVPAVYQSGNTTKIGSITKLGSSLVRWGLVEAAQRAIVSDKHFKEMFEKLEKRKGRQKAIVAIARKMLTYIYIMLTNNIDYEVLVVNK

SEQ ID NO: 57491 - protein, 346 aa, unidentified
MKKIFIGIDFSKEKFDVVIIMAENLEEKAPRVHEQFANDKAGYRKFLKWVKENSHGVDMSLWLFCGENTGDYSKGLANFLYGKGCDMWLENAKCIKDSCGIRRLKSDRADAAMIAEYAMRNHDRMTLYEPLSGPLAQLRELFLFRQMNVRKRSGYIVRKGEKGRTLDSSPAKSFMARKCKHMIAELDKTIKECDKMIEALIASDRDLQETYEIVTSVPGIGVQNAVCMMVYTDNFKRFDCNPRKIACYYGIAPFGHDSGTSVHCDPHVHYMANKTIKGILTQAALCAINHCPPVAHYYARLIERGKKTMVALNNVKNKLVRIVTALVRTKQKFIPEYEFAKRYAMG

SEQ ID NO: 57492 - protein, 414 aa, unidentified
MALIRWVGRAIGLDVHRDFCVVAICEEGVVRSAGRVPSTPEGLRALAASLLPSDRVALEVTGSCWEVARILEPFVQRVIVVSPDDTGISSARAKTDKLDARTLAGLLWKGELDAVWMPDERCQVLRRRLARREQLIRGRTRAKNEIQAVLARRLQPKPGFADLFGVTGRRWLADLELPVEERESVDAGLRQIAFLDSEIAAVDKLIARQALDWPEIRRLMTVSGVNLICAASFLAAIGEPSRFMTSRKLVAYLGLDPKVRQSGEAPARSGRISKRGSANARWALVEAAWSVVKQPGPLRAFYERTRARRGHGKAIVATARKLTVLFWCMLTRGEDYAHQRPALTKKKLRQLELTAGAPARTKEAAGIWSTNRAILHAERALAEQAEVSYQRMVTDQQAGRPSRKVGATATSERA

SEQ ID NO: 57493 - protein, 394 aa, unidentified
MKLIGIDIGKNKHFFCIMDQQTGEIIFQPVSFSNDKEGFDFLIQKINSYPKDSVLIGMEDTGHYHFALLKYLLNLQYTVALINPKTTDFNRKMQGGITKNDKLDTINICDVLDTPERKKQYRISKVNSFDLYEQKQLTRHHHNLKEEENVYKNRLQKCIDIVFPEFNKLFNSKYSTVYMNILKTFGSAENIANTDIRTIRKCFEIEGRGNRISLTPERLKECARSSIGISSSAEVIQIKHLTAQIELIEEQLTEIDKKIEEFSIQNNSPILSIPGISHFSGTSILAELGDISNYSKPSQIIKFAGVAPLHYESSQFNAQHTSITKKGSKYLRKTLYQIILPVIKHNPVFNKYYQLKISQGKGHRCAQGHCVRKLLRIIYHLLKTNQQFDPQLLR

SEQ ID NO: 57494 - protein, 477 aa, unidentified
MIYYVGIDVSKGRMDSVILIGRGRDAIIIKRMKLDDTPRGWSRFLRELMEILEADRDARLEVGCEWTGGYEQRWLMLAYELSQCYGERVQVYGIHGQDVAQYGKLFRNRSKTDMVSAELIALYLMSGKKEGVTRFDPSRTTVRSLLSLIRYYTEEQQRKKNILHQLIHRFYPFILYDKATRGFPQYILELLIAYSRPELLARASVKELVRIPYLSESRARRLKEQAQTHIQFFQTTEAEGELIRTLARELLECKARLKRLEQQWESLHTSSKTLELLLTIPGIGKKTALVLMSYMGSIHRFPSRAKFVAFFGLAPNYEKSGDKTKRRKISKRGPSFARKCLYMAAMAAQRECPKFRKLYEHHLNKSGNHFYAMTCLMHHLLRIVYAVLSSEQPYDPNYKHKPRPSSSSSSSHHVSRSPLLPEVIVVNDGTHAPVSCIERSKRKNLNHHQSSRLAPVNPLKLNSNHRSLCPSPHPLPD

SEQ ID NO: 57495 - protein, 557 aa, unidentified
MRGIERISRSCLSNAGYETRFQRLDLYLMPMNPGRCPDTLSKVIHSRAERASKAERSEAVNNFAAMHFESNLRSGQNGSGRKVPGRTRSACPDPARIEPRTPVGPGAFVTKSERTTPCEGLRIRTTHDKSQGPRASKTMNEPICWESITHYAGFDWAKDHHDVVIVNQQGKIVQDLTFDHSAEGWAKWKEVVAAYPHLAVAIETNQGAAVEQLLQSGVVVYPVNPKSAERYRDRKAPSGTKTDFLDAWSLGDALRVDGHGWRALKPLDPLIHELRLLCRDEVELIGKRTELVNQLQAALHEYYPAALKAFDDWTATPSWKFVQQFPTPELLQKAGRGKWEKFLHVHHLYRPEINEKRLEIFSKAHEFCSSAAVTRAKSRLALAVIKLLQALEIQLEDYRKEIRRLFNEHPDHDLFGSLPGAGEKLAPRLLSEMGSDRSLFESAQALQCYVGTAPVSFQSGQVHQVYVPFLCNKSFRHAVHLWADLSRKFCSWAQVYYQQLRAKGKTHATALRCLGQRWLKILWKMWQTKTCYNPDLHMANQLKHGSWVLTIKAGGTK

SEQ ID NO: 57496 - protein, 360 aa, unidentified
MLYCTSIGLDVHARSVKAAALIHDTGEVIEASFAYDPDAIIKWVKKLPGPAKCIYESGPTGFDLLRKLRASKIHCVIGATSKMFRPSGDKIRNDPRSAVFLARMLAVGNIVEIYVPSEEDEAARDLARAREDARQELVNAKQRLSKFLLRKGILYDEGKSAWTKTHRKWLNQIKLLTDVEQLVLSEYLMTVEEAERKRDRLDAKIAELARSERWKGLVQIFCLLRGISVMTAFTIASEIGDFSRFKNAGSFYSFLGLVPSLTESGESSSRGSITKTGNTHVRKLLIEAAWHHKRRFRPAAQKFPEDIAPEIVQAAKKANLRLHDRSKHFSTRKLLPNKANTAIAREMAGFIWALADMALA

SEQ ID NO: 57497 - protein, 408 aa, unidentified
MEVLHPRCAGLDVHKDTVVAAVRCVSAPVHREVRSFPTTTKGLLELTEWLSSHGCTHVAMEATGVYWKPVWHLLEGQFELVLANAQHIRNVPGRKTDVNDAMWISELLAHGLIRSSFVPPAHIQELRDLTRTRKQLVREMSQHILRIQKVLEDANIKVASVLSNVMGRSGRAMLTAIIEGETDPEKLADLAQGTARKKRAALIEALRGRVTPHHRAMLKLHLQLIDALQAALQEVDSAVGKALEPIRACATLLTTMPGVSDTVANVIVAEIGTEMSRFPTASHLVSWARLCPRNDESAGKRRSTRISKGANWLKTTLVTAAWAAVRTKGTYLRAQFLRLKARRGAKKAIIAIAASMLTACYYMLRDGVPYADLGANHFDHQDKGKTIGRLVRRLRDLGCEVDVRALAA

SEQ ID NO: 57498 - protein, 337 aa, unidentified
MEYFAGLDVSMEETDVSVVDRDGKVILEARTPTAPKTIAAALAKGPAVERVLFETGRMAPMLFHGLTALGLPVVCVESRQAYQALRSLAAHKTDRNDARGLAHLARTGFFKPVHVKSLPSHAVRALLIARKKLVGQRVTLENQIRGLAVAFGVRLPRGLSSGFAEKAMAAGCGIPGLDGAMRGLLAARDAILKAIVAINTDMKSLERSSSACRRLMTIPGVGRLTALAFAAAIDDPDRFRRSRDVGAYLGLVPRRYQSGEIDYTGSISKCGDARLRTLLYEAANVMLTRYRGSLALKTWALDIARRSTMRKARVALARRLAVIMFAMLKHGAEFEPA

SEQ ID NO: 57499 - protein, 351 aa, unidentified
MVFAQIITTYFCGIDLHARSMFVTVMNKAGEVLFRRDMPNDFNVFLKFMEPYLSSLAVGVESTYNWYWLADACRSAKIPFYLGHALYMKAITGGKKKNDRIDSKTIADLMRSNMFPLAYAYPKEMRATRDLLRRRHRMVSLRAEAYTHIQLIFTQQGILNIDGAAVKSKKTRHTLVENFSQPDLKMTIESDLNVIEAFDPIVAKLERQIIAQAKYHDRQAYELLQTVPGIGEMLALTILYEMHSAARFESPQQFSSYCRVVKCERTSCGKSTGGGNQKIGNPYLKWALGQIIIHAQAFSPRIKRYYEQLLAKFGKGRAKSIIAHQFAVAIYYMLKNGKVFDEVRFVQSRMK

SEQ ID NO: 57500 - protein, 475 aa, unidentified
MNVNGKRKKNQVVTANIFEQQELLKKAEVIRANLTASTWRELETNGKFDKNEKLSFISDDMLILGCDVGSETHYLRAIDTRGRELSKSAFPFSNDSEGFQSAKEWAVTIAAENNKNQIVLGLEPTGHYWFCLATWMISNGISVVQVNPYAVKQTKEVEDNSQLKDDTKDPKLIANLVKDGNFGMPYLPEKLYAELRRLSMFRDQLNEDRIRSINRMHREMKIYFPEYKDALGKVDGTFSLELLKQAPFPEDLTALGEDGIRQIWHDAKLRGRGYSRAGEILQYAKVSVGIKDGAAAGKTAVQWFVRKIMELDAELAVIEEQINQKCQEIPHTGNILEISGIGENTLSGILAEMGDISRFDDVKEIQKLSGLGLVACSSGKHKGETKISHRGRKRLRYWLFQAAKSAVAHAEEFKELHVYYTTRADNPLKKMQSLIVIACKLLRIIYTILKKGTVYDPKKMLLDIRRPEKKEAIAA

SEQ ID NO: 57501 - protein, 411 aa, unidentified
MEVVFPQCSGLDVHKKTVTAYVRIQRGGEVHKEIRTFSTMSEDLLVLRDWLKAHGVTHVAMESTGVFWRPVYHLLEDDFELLLVNARHIKRVPGRKTDVKDCEWIGELLAHGLLKGSFIPPKPIRDLRDLTRYRKSLMDERTREVNRLHKLLESANIKLSVVASDLMGVSGRAMLEALLGGNTDPQVLADLARGKLRKKLPELSKALAGRFQDHHRFMLEQILGHIDFLDESIEKVSQEVATRTVPFEAQMKLLDTIVGLDRKTVENVIAEVGIDRDQFPTHRHLASWTGICPGNNESAGKRKSGKTTKGNRWLRRALIQAAWAAARSKDTYLGAQYQRLVRRRGKKKAVVAVAHSILVIAYHVLRNQTSYRELGADYFDRLNLTHLKRYHLRRLENLGFKVTVEPLKQAA

SEQ ID NO: 57502 - protein, 425 aa, unidentified
MICAAVERCAGIDVGKKWLSVCIMIGPLDGEPRVERHRFGVNVADLQQLRDWLSKEEVTHAVMESTGSYWKPVFNVLEDSVKVYLANPHEVKNRKGHKTDDKDGWWLAHLLRHAMIHPSFIPPRPLRELRDLTRRRERLNGAGSAEKNRVQKVLEDANVKLGNVLTDVFGVSGQLMLEALLKGEAKPEEIAQFARKRAKKKIPEIIAALEGHQMSEHHRKMIRYSLSHMKFIEEQIEEIDRDIAAKIQEAGLDRQWQILQTVPGVQQRSAAKILAETGADMTQFPSQRNLSSWAGICPGNNRSAGKNRSNRPTGGNRWLRGALTECAWAAAAKKNCFLKEKFWRITTKSRGKKNSALLAVAHTILQLVYEVLRTGQPYRDRQAPALSGQQKDRLIRHHVRRLGKLGVRVYSLSAGAGSQKALSAN

SEQ ID NO: 57503 - protein, 334 aa, unidentified
MVQIYGIDLSMEKFDVSFCTSDGKLMHKQITNNLKCISTFLLKLPNDALLCAEYTGVYGDLLVFLAEQNKVPISLVSGYEIKHSLGLQRGKSDLIDADRIREYADRFKDKLQLTHFQSEQIYELEELYRTRNLLIESRKRIQTAMKSEDHKPFVSLAANQARNSSLLALNSQIAQLENQIQELIYSNKELKENYEIVTSITGIGPVTACDLIIKTGNFKRIDTARKCAAYAAVAPYPKSSGKMSCNNKISNMGDVQLKSLLFLCANSAKVHNKEILLYFRKKYEVEKKPFFLVMNNISNKLLHIMYALIKKQEKYDRTYIQLDPREKQIQELIN

SEQ ID NO: 57504 - protein, 358 aa, unidentified
MRCSSDTPYQLFVGVDIAAMTATVAWQAPRQKPSKPITIEQTTEDFASLHQRLMKTGVTPEQTLVVFEATGVYWLSLATFLSRQGYAVSVVNPTQAHPFAKALLKRAKTDAIDAQTLTELAALLQPALWTPPPAIYEELEQRLTQRDALLLMRGQLRNQLHALGHLPVVVAPVRQRMQALDQTLTTQLADIETELAALPPTEDLEAPEEGEPSLDRAWALTVAKLQTIPGIGLLTALWIVVTTMNFTLCSSAEQAAAYAGLAPMPRESGTSMHKRPYIGHTGNRRLRTAFYLATLSAARHNPVIKPFYDRLRAAGKPAKVARCAAARKLLHLAFAVGTNKEDFDPHYQPGSKQQAAMA

SEQ ID NO: 57505 - protein, 365 aa, unidentified
MHDSTTNTVSVGLDVHAASVRLAAVRADELLGEGTLPYDHAAVGRAIARWPGARVCYEAGPTGFGLYRYLTAAGIACEVVAPGLVPQRPGERVKTDSRDARKLARLYAGGLLEPIAVPSPELEAARDLVRAREDARLDRMRDRHRMSKFLLRNERRMPFKSWGAGRRKWLGEQAFEQPARQQTFDTYLLTLDLVDRRAEALERQIAEIAETGPWEELVGRLRCLRGIDTLTALGIVAEIGDFSRFRTAEEFMSFVGLVPSERSSGEKRRQGSITKAGNAHVRRLLVEAAWHARLSPKVSYELARRQRGQDPAVLERAWRCQQRLHKRWRRMAARGKPHQKTVVACARELAGFVWAIATDQPLRRS

SEQ ID NO: 57506 - protein, 352 aa, unidentified
MLIIGCDYHPSMQQIAFVDTETGERGERRLMHRDGEAERFYRELKQRRVEVRVGMEATGYARWFERLLAELSFELWIGDPARIRARRVRKQKTDRQDAQLLLRLLLEEDGFPRIWVPSPENRDLRQLLWHRHRLVQMRTRIMNQLQAVAMNEGLRRKRALWSEAGRKQLESFLLAPWATRRRKDLLELMDRLNPTIRELTGAVEKEAENKPEVQLLMSHPGVGPLTALAFVLIIGTPQRFHCGKQMGSYLGLIPCEDSSADRQRLGHFSKQGSSLLRFLLVEAAQVAARVDAEWRRRFLHLAMRRGRKIAKVAMARRVAVGLYWMWRKEWDYQQVVKFGSHVGQLELRHGVQ

SEQ ID NO: 57507 - protein, 384 aa, unidentified
MWEAPVIRQRTSVGLDVHARSVLGCALDGDTGEVFQQRLSPDHGEIVAWLGDLPGPVAVAYEAGPTGFGLARALAAAGITCEVAAPSKLIRPTGDRVKTDARDAAHLARLLHLGQITAVTIPSASQEAARDLVRAREDCRGDLMTARHRVSKLLLRQGIVYSGGTTWNRDHERWLRAQRFDNPALQLTFEAAFDAMLACRDRRTRLDDAITAMAADSEFTPVVHRLGCIRGIATLTAFGLAVEVGDWHRLTGRSIGAYVGLVPCEYSSGDSRSQGGVTKTGNGHARRLLVEAAWHHRSPYRPSEQLRGRWGLACPAARARGQAANRRLHARWRSFDARKKRSVVANVAIAGNWPAGAGHWRSCPTDPPTIVQMNNADAAASVLE

SEQ ID NO: 57508 - protein, 387 aa, unidentified
MYYIGIDVSKYKHDCFIATEAEKIKAFQFDNNRLGFDLFLTTIKSLDQSQEIRIGLEATGHYGMNLKQFICASGYTFLEFNPYLTHQFSKAMSLRKTKTDKVDAKTISSMLGPVDYKTLHTSFYHINELKQCVRYRDLKMKHRSKILVELTNILDRTFPEFKAFFNHRLIGSAMFILKRFKSRSRIARFKQTDYDPINSYSKGKITNVKFQKLKLLAMNSIGYETDTDILLISESIQSYESLTSTIETIENKIIELMKDIPQTLTSIPGLTLISAANIIAEIGDFKNFSNPAQVISFAGFDSSVNQSGTMETRGHLVKRGSGLLRMTFWQVTFSALKFIPTLYEYYLKKKAEGKHHKVALTHCTRKLIRTIYNLGYNQLVFDQTQFR

SEQ ID NO: 57509 - protein, 423 aa, unidentified
MKIVYQICCGVDVHKRFFVATLITTTNGLEAKYTKKRFSTFNNSIKEFKAWLIENDCYDVCMESTGKYWIPIYNLLEDKIRVVIASPKWVKAVKGNKDDVKDSKWIGDLFRFGLVPSSYIPEKLIRLLREYTRYRAKLVACKSGEKNRFQNAFTVCNIALDSVVTDMFGKSASLITNYLLTVDSFDPEYCKSLLQKSLKKKADEVVESIDGYYIADEQKKRMLMLKDHLNYLEAAILRLDEQLNAMVEPYESTIILLCTIPGIERASAIAIISEIGTDMSHFDSSKRLCCWAGLTPGNNESAGKKKSVKINRAGVYLKPALVQVAHAAVKSNASNYYKIKYERISKRRGKKRAIIAIARMILTAVYHMFSTGEVWNPTDLFKVDMPPELKDKQKQKSIKQAVNLLIANGVITSSDVILNFIAT

SEQ ID NO: 57510 - protein, 362 aa, unidentified
MTTEEKQRTLFVGIDVHKDTHTAVGISPFGEKMFELTVGNYQKDFDDLAKEVRAIGERSLLSPFIGLEDCSGYGERIANALYIDGFPVVHVPPILVDRLRKRQTHPEKSDSLDALGVAKVMMHDTDSLPVYSISERSASAKFLKELSQDREYLTVERSRLRNQLHLLLHRIYNTEYASYFKDPFALKALRHWARVKPACDPYLLRAMKRKVNRMLELHIAIKELEGDMQSIIEEASYTLPTASGCGVVLAATIIGEIGDIERFRAPASLAKYAGCAPREQSSGKTVRYRKTKSGNRRLNCAFHRMALSQISPTGNDAARAYFKKKVSEGKTKSQALVCLRRHMVTVVYMMLKHGTEYRYPQA

SEQ ID NO: 57511 - protein, 479 aa, unidentified
MCKPPEHTLIGRSEGERQATLKIARTMLQNGIDRNTVMKMTGLTEDDWHKSATNPPFLALSAGPSVKTGGPAGRHQTQAQPASHSDLTVSLSQLRSLSDVLSADLSVGHCRQKRHQGLSVRDKHRLPGARLRMYKANRRDGLCERSLTMFPVGIDVSKNTLDLCILYDGIKGRIKTRNIQNNRHSVENILRWLRLQHCGPEDVHVVMEATGVYHERLATELHDAGFRVSLANPHRSREFARGMGIMTKTDKVDAYMLACYAFLKKPHYWEPPAPEIRYLGALLRRRDVLLGDALREEKRLEKYLSTDTPADIISSCRRMAQLLREEVSNIERQIKAHIKASPALRRDYTLLNSIKSVGPQLGMHMLVVLRSHNFASAEQAAAFLGVVPIEKRSGTSVRSRPRMSKIGPPQLRAKLYMSALCGKIYNKRMRNIYDEMCLRGKPKMVAIGALMRKLVHWCYGVLKTGTVFNDEGLKQVLST

SEQ ID NO: 57512 - protein, 357 aa, unidentified
MNTPLKSLDFAGERFYVGLDVHKKSWAVTIRCHSQHLKTFSMNPSPEELHRYLHKQYPGGEFHSVYEAGFCGFWIHRRLEQLGIHNLVVHPPDVPSTHKEKSNKRDPVDSKKLARELEAGSLLGIYIPNEPHQHLRSLCRQRQQVVRKQTRVKNQIKSLLHFNGLAIPQPHEMSPWSGAFIKWLETLKFSHAAGQETMIGYVAELQSHRQQVAEITKRLRRHSQDEKLFPVLKLLLSVPGIGFVIAMTLHTEIIAIGRFNRFDAFASFVGLVPSVSGSGEQEWDNGITSRSSSFMRYLLIEAAWVAIREDPALTLAFTELCRRMKKQEAIVRIAKKLLRRIYSVWKNQKEYVFAVVA

SEQ ID NO: 57513 - protein, 315 aa, unidentified
MTSPTPVIGIDVAKDSLSLFCADSGQAIEIGNDTRSIHTWLKKLPTSSAIAIEATGIYHLDVASLAQAQGHQVYIINGYRLSNYRKGIGGRNKDDRSDARLLARYLTHEREQLQPWQPPPEAYRRLQILLHRRAVLVRSGVSLRQSFSQEPLLKDVLKPLLEQLSTVEKRLEKLISQVLSESGLAEQSKRCQAVEGIGPLTAAGLNMAFLRGTFRNSDAFIAFLGLDVRMKESGRYCGQRKITKQGDPEIRRLLHNAAMAAARTQRWQEVYQGYLKRGLKRTEALTILARKLARIAFALMQKQVDYNPRQGGSLT

SEQ ID NO: 57514 - protein, 397 aa, unidentified
MYIVGIDIAKRKHEAAVIDGEGTVIIKPFSFTNNCSGYNRLLAMLTRAKLPLDEVSFAMEATGHYWLALFTRLQKEGFRVQVINPVQTNSIRSFYIRQAKTDPRDALLIAEVIRFGHFSESTLHPENIYELRELCRGRHAIVSMQADVKRKVVALLDQVFPEYETAFTNLFGDTSMAILQTCPTPKELSEMPLEELCHLIEVSSHKRFRMAKARELQELARNSFGFAMAGDVFSTMIRLYAKHLDFLKQQVREMDRKIAEIMETLDTPITTITGIGLTLGAYILSEIGDISRFSSAAKLAAYAGIDPTMRQSGEYNGVRNRMSKRGSPYLRHAIWLAASSAVLHDPALKLYFQKKRDEGKPYMASVGHACRKMVSIIYAVMRDNKAYTPCIPNEISV

SEQ ID NO: 57515 - protein, 411 aa, unidentified
MSKTLFVGIDLGSEDNVVVGMDDTGKDVGRFSTTNDLPGTERLIEKTLDLVALTGAETVKIGMEATNLYWWHLHQALCDDPGLKALDAAVYVINPKVIDGFKRVYPDMAKTDRIDARVIADCLRFGRVQPSLPPDLRYAPLQRLTRYRYHLVRTVANEKNRALSLVFLKFSTYGKGRPFSNVFGKASQAVLTELTPDEVVQRPLHELVQIIAENGSHRLGDIEELAQILKTQARNAFRLHPKMRDAVDVALAMSLETIRFLEGQEKKLNNVIARELAAIPQTIGTIPGLGPVYTAGIVAEIGDVSRFRDDDALAKFAGLTWREHQSSKFTAQDLPLTRSGNFYLRYYLVEAANSVRVREPEFAAFYQRKYREAKHHHHKRALVLTARKLVRMVFALLSKGQIYQERRTRSS

SEQ ID NO: 57516 - protein, 418 aa, unidentified
MTTQVFKYHAGIDWASDHYDACVVDESGTALGKERFEHSGDGVGKCIDWLLQMAGGDASSIAVAIEVPHGAMVESLIEHNLAVFAINPKQMDRFRDRHTVAGAKDDDLDAYVMADSLRTDQRCFHRVELDEPAVIRLRELSRMADDLQTDSNRLANQLWEQLRRYYPQMLKLSSAANEDWVWDLLESAPLPSTVGKLKLAKVKAILQAHRIRRVSAEQVLEQLRQPALRLAPGAAEAASEHVLMLLPRLRLLQDQRAATAKRIRGILEELCTAPADGEGREHRDAEILLSLPGIGPVIAATMLAEASQPLRERDYQALRNYAGAAPVTRRSGKKKVIVMRHACNERLRDALYHWARCSVQNDARAKQHYAEMRARGHSHGRALRGLSDRHLAMLMSMLKSGTLYDPSRRGRAALAQVS

SEQ ID NO: 57517 - protein, 349 aa, unidentified
MTLFVGLDVSVRETAVCIVDDAGKVVREQKVPTEPDDIVRLLASIGEDYGRVGIEAGPLSQWLVNGLTAAGLPVVCVETRHMMALLKAQQINKSDRNDARGIAQMMRVGLFKPVHVKTQMAQEQRMLLTSRKLLQRKLLDVESDLRGTLRNFGLKVGVVSVGKFEARIRELVASYPRLALVVEPILAVRRVMRQQFVVLHKMLLDTVRHDPVCRRLMTAPGVGVVVALTYRATVDQPQRFIHSRAVGAHVGLTPRRHQSGEIDYDGGVSKSGDTMLRTMLYEAAQSLLTQSGKWSWLKAWGMRVAQRRGMQRAIVAVARRLAVVLHRMWVDGTEFRWSNSTTAVPSQAA

SEQ ID NO: 57518 - protein, 374 aa, unidentified
MRRLIDRCAGIDVGQALLVVCVRLVNGRGELSQEVRSFGATTPDLLVLRDWLASLGVTHVAMESTGVYWKAPYYMLEDDFEVLLVNAAHLKHVPGRKTDVIDAQWIAEILSYGLLRPSFVPPRPFRELRDLTRYRKALIRARTSEVNRLHKVLEDAGVKLATVATDVMGVSGREMMRALIGGVADPQVLADLARARLRAKLPELRKALTARFRDHHAFLLTRMLTNIEALEADIDVLSERIAELVEPWAGQLMILDSITGVGPRAAEVILAEIGPDMRRFPTAGHLASWAGRCPGQRNSAGRRGSAKPRKGSPQLSAVGGLFDRGVHPDPGAFIARIGEGRQSSGGGGVERPEHVRAGRGQVVYTVVYRARLDR

SEQ ID NO: 57519 - protein, 315 aa, unidentified
MTQTSITTAGIDTSKAKLDVAVHNRAERWQVANALSGWRVLAANLAKAGVKRIGIEATGGYERGVVAHLSAAGFTVLVLQPIQVKAFGRVYLRRAKNDALDAVLIAACAATLDQPRIAPDPRLAELADHLTFLEQIEEDIARFKTRLEHIDTAGLRRIVNSDIARLKARRAAQIRDIAKRLRIHDDLALRFDLVLSIPGIGERTALALIIRMPELGRISREEAAALAGLAPFDDDSGQHRGSRHIAGGRSRLRRSLFAAALPAAFRWNRALVALYTRLTACGKAHKAALIACARKLLIYANTVVQRGTPWTEKAA

SEQ ID NO: 57520 - protein, 340 aa, unidentified
MEQYVGLDVSQKETTVCVIDGDGKRVWQGTCRSIPDAMAEVVRTKAPQAIKVAMETGPLAVWHWHELKAAGVPIVCIHARHAKAALSMQINKTDANDAFGLAQIVRTGWYRPVDVKSMESHKLRLLVAARARLVSMRTALYSQIRGLLKTFGVVLAPGKGSSFEQLVLRGVPNDRYVEVVIESLLSTWRHLSTELKKFNREIERAARAIPACRRLMTVPGVGSLTSVAYATTVDEPRRFRRSKDLGPYLGLTPRQYQSGEVDRAGSISKCGDRMTRSLLFEAAGVLLFRNRQTSALRDWGLKLSRRAGTRKARVAVARKLAVLLHRLWTNECVFEAYVTV

SEQ ID NO: 57521 - protein, 351 aa, unidentified
MIAINTDIIIANIGVDIGKNAFHICAMNAKGTIVLRERLTRAALPKRLANIPPCLIGMEACAGAHHIGRKLASLGHDVRLMPAKYVKPFLKGHKNDYRDAEAIAEAVQRPTMRFVPFKSDEQLDLQALHRVRSRLVGQRTAVINQIRAFLLEHGVPVRQGPGALRQALPSILAQRTDTLSSRIIRLIEGLIDDWRRFDQRIADVTSEIEQLAKQSENCKGLMSVPGIGSITASAMVAAIGDGSAFSRGRDFAAWLGLVPKQISTGDRTILGGISRRGNSYLRTLFIQGARSVLQRFEGWEKKSFGRWLIAASKRLHKNVLAVALANKLARIAWSVLYHARGYDAAPTPKAA

SEQ ID NO: 57522 - protein, 465 aa, unidentified
MRPSDDRRPRTPRRSPSVLDRINPHAAGIDCGSAEHYVAVPPDRDATPVRSFSTFTHDLHRLADWLTACRVTSVAMEATGVYWIPVYEILEARGIEVQLVNARHVKNVPGRKSDVSDCEWLRDLHSVGLLRGSFRPAAVIVALRAYLRHRQTLVESTAMYIHRMQKALAQMNLQLTLVVTDITGDTGLRILRDIVAGQHDPTHLAQYRHRRCNASAAEIAAALTGHYRPEHLFVLQQNLELYDACRVQITACDRAIETHLQAVAATVPTPTSPLPIARVKRTPRGHDPRFEIRTPLHQLTGVDLSQIDGIAPYTALRLVSEIGTDMQRWPTEKHFTSWLTLAPKNKISGGRLLSSRTQPSANRAAAILRMTAMSLGRTQTALGAFYRRLAVRIGKAQAITATARKIAILVYRTLKGDFAYRDPGANGYDAQQRKRTLRNIRQRAEALGFALVNRQTGELLETVVS

SEQ ID NO: 57523 - protein, 387 aa, unidentified
MRPISQTTTQNLSHRQWDDTTLYASLELSQATWLVTSLSPGSEKMSKYSTPGGDGATLLGLLRRLQVRAEQITGGPVEIVVIQEAGLDGFWVHRLLNANGIESHVVDPASIAVPRRRRRAKTDSIDGETLLRTLLAWRRGEPRVCAMVVPPTPEQEDRRRTSRERAILLQERVRHVNRIKGLLAGQGITNYEPLHKDRRAHLAALKTGDGQPLPLRLKAELLREIELIELLIRQIAEVEVERDTVELDAEGNQSPVALLARLKAIGPQIAAVLYLEGLYRSFANRREVAAYAGLVPTPWRSGTIDREQGISKAGNRRLRHIMIELAWLWVRHQPDSALSRWFRARVGTERGRIRRIAIVALARKLLIALWRYVTHGEVPEGAVLKAA

SEQ ID NO: 57524 - protein, 406 aa, unidentified
MEVLYSHCCGLDVHKKSVVACAMTPAGKELRTFGTITVELMALADWVQATGCTHVAMESTGVYWKPIYNLLEATGLHLLVVNAETIKTVPGRKTDIKDAEWITDLLRHGLLRGSFIPARPQRELRELVRYRRAMIEERAREVNRIQKVLEGANIKLGDVTSSVVNKSGRAMLEAMIHGETDPAVIAELARGRLRSKRAALQGAVHGLIGPHQMMLLDLQLQHLVALEAMIDRLTQATAERMHADEPALQVVDTIPGVGRRIAEDVLAEIGTDMTRFPSEAHLASWAGVCPGNDESAGKRQSGRARHGNPYVRTALVEAAHAAARTKDTYLGALYRRLAARRGKKRAALAVAHAILVSMYHMLKTGTVYQDLGPTHFDRLHQAAIARRAIERLEALGYKVSLEQCPA

SEQ ID NO: 57525 - protein, 447 aa, unidentified
MESIVAVGIDVAKEKLDVAVFNGKKFVTRIYPNTKEGIERFLEDVEEKYVEKPDDSNEINNTESQNRTSQTIKNININPEKSNSVSKVSKDSIHFVMEATGSYNTKVLYAISDRGYPVYVLNPIVSRRYSEEQMKRTTTDKEVSKLLAGYAYSSILSFKSGIPSESYNTLMSFKFDSSKKDNLELRVLIKTLESLMRTRTRILNEIEALNQYPDGFVDSAIESLKRLLQEIEIEIKNIQHKIDEIVNREENKDLYGRLTSIPGVGKRTASAIIAYFGEFSTFDNFKTVASYIGLTPSIKESGKSVKKKGYSISKIGNPYLRQILFMASLSASKHNPQCNTLYERLLEKGKDKKLIQIAVAHKLLRQIFAIAKYGRVYDPHYGVEVKEKEGKDKGKENEDKRNTNKQKGNTSTSPSKNTNTKQNISIHTKFPYDPPFIQDTYPNIIDY

SEQ ID NO: 57526 - protein, 373 aa, unidentified
MPTNLWCLGLDVHAETIAVAVAEPDGEVRPLGIIPNRPEAVAKLIRKLGLRGQLRACYEAGPCGYVLYWQLTKLGVHCDVVAPTLVPTKPGDRVKTDRRDAAKLARCYRAGDLTPVWVPDAAHEALRDLVRAREAAKQDQLRARHRLGKFLLRHGIRPPAGAKPWTQQHRRWLDTLTLALPALDATLGDYLHEIDHAAARLERLKTALDAAIDTAPAALRTVIAALQCLRGIRQVTAATIVSEVGPLSRFTHPRQLMGYSGTVPSEHSSGTSVHRGAITKTGNAHLRRVLVEAAWAYRFPPKCTKALRTRQRGQPDAITAIAWKAQHRLSTRYRRLLGRGKPTPHVITAVARELVGFIWAIGVAVERELAMAA

SEQ ID NO: 57527 - protein, 349 aa, unidentified
MLIIGCDFHSRFQQIAMLDPQTGEVIERRLEHENGEARKFYAGLPTPARVGMEATGYAQWFERMLAEQGHQLWVGDATEIRAAMVRKQKTDSRDACHILDLLLRDKFPRIWIPSSDERDVRQLLRHRFKLVCLRTSLKNQLHAMAMGHGICRKKKLWTPVGRKELQGLSLGPWASRRRRELLDMLDQLEPVMDELDGAVIQEAEKRPAAMRLMTQPGVGPVTALAFVLTIGPVERFQKSKKLVSYLGLNPSENSSAGKQRLSGISKQGNSMLRYLLVEAAQTASIYDPELRRDYQRLKFRRGSGVAKVAIARKLAVRLYWKLREQPSQVPPTPMQGSPETSVVVERLSS

SEQ ID NO: 57528 - protein, 359 aa, unidentified
MRVYVGMDLHSTNCYTGILDEDDQPRFGRRLPNDRTKILGALAPYRKKIVGIAVESTYNWYWLVDALMEEGYRVHLANPAAMKQYSGIKHLDDEHDAFWLARLLKLGILPEGYIYPREQRAVRDVLRQRSRFVVQKTALKHTLQQLYCNNTGVRLTNNAIGRLDPAGIREGLVEEDRVYNGVRLLEAIRYLEHQTDAIERYVFKRVHGRPPYSALTGVPGIGAVLALTILLETGPIARFGSAGQYASYCRCVPSAYWSNAKQKGMGNTRNGNKYLSWAFAEAANFCIRYCGPAKAFYQRKCAQTNPPSAYRAVANKLAKACFYLMRDGAAFDERRLFGSGTVRVEAAEPEPGLVTNHQV

SEQ ID NO: 57529 - protein, 337 aa, unidentified
MDRQYVGIDFHRRRSVIVRMSADGERLGLHRIVNDPFELTEVIALCGEAPEVVIEATYGWYWAVDLLQELGATVHLANPRALNWGDRRVKNDVNDATDLADMLRLNRLAEAWIAPPALRQLRELVRYRAKLVQLRSGLKAQVHAVMAKEGALPVVTDMFGPAGTRQLDRLELAAPFARRVRSLRELIDCYDREITGLERDIHQHLKGHRGYQAVQAINGIGRVSAAVLVAEIGDVSRFPTPAHLCSWVGLTPKHRESDLKTRRGRISKQGSRLVRATLIEGISRYHGGTYLAGHYHQLAKRRGRNKARVALARKILTLVFYGLRDGEIRCLAHTTAA

SEQ ID NO: 57530 - protein, 366 aa, unidentified
MEPIYIGVDFHARQQTICYLKTETGELVTCELKHQDKQKVRAFYAQFGGRVIVGLEASGYSPWFERLLEELGCTVWLGHATEIRRRARWRQKNDRRDAELILDLMLHNEFPRLHRPAVQSREVLRMLRYRQKLIKIRTMSKNSLQAIALQAGLAKGSRLFTKAGQQELATAEMSPVMHWQREHWLQLMEPLNQQVLETMVWFKAQSKGDVWITRLRTHPGIGLLTSLCLVHTLQPVSRFRNTRKVAAYAGFDPVERSSAERKCFLGISKAGSRLLRYLLVEAAQTAVRKDEDLKRFYQRLAERRGRPKAKVAAARKLLIRAYIMLRDEIDYAEFRHRAVAARLARRGQGPTNVPEVLIGQPASPEQ

SEQ ID NO: 57531 - protein, 345 aa, unidentified
MQSLARSRSYDLFVGIDVSAATVTVSWMAACDRPTRSVTIPQTADGYHQLQTQLLATGVPAPAILIVLEATGSYWITLATTLAQAQFAVAVINPAQAHDFANALLKRAKTDALDAQMLAELGARLQPEPWMPPPDVYVELQQRLMQREALIQIRTQVRNQRHALSRQPRIIAEVQQRMDRLLDTLNDQIAEIEGELAAALRQDESWSVAAERLQTITGVGMVTASWILVTTLNFTLCPTAEAAASHAGLAPYVRSSGSSVRGRAQIGQAGNRHLRRALYLASFSATRYNPIIKTFYERLRAAGKPPKVARCAAARKLLHIAWAVVTKEQDFNPHHCVRPVLRAAA

SEQ ID NO: 57532 - protein, 369 aa, unidentified
MNDITYVGLDVHKATVCVATAESGRGGEVREVGVFENRPDVLRKMVARLGRQRRRLNFCYEAGPCGYGLHRLLIGLGHDCVVVAPSLIPMKAGDRVKTDRRDALMLVKLHRAGELTPIWIPDAAHEAMRDLVRARATAVRAVSKARQHLQGFLLRHDRIYHGARAWTLAYRRWLTTVRFDHPAQQIVLQDYIHAVEDAEVRRDRLTRQIEELMPSWSMAPVAAALQAMRGVALIVAVTVVAEVGDFRRFANARQLMAYLGLVPSEHSSGSSIRRGGITKAGNALARRVLIEGAWTYRMSARVSRKLHDRLEPLSPAIRDIAWKAQVRLCARYRRLAASGKPKVVVTTAIAREMVGFIWAIARVTQPELI

SEQ ID NO: 57533 - protein, 354 aa, unidentified
MMIIGCDYHPAFQQIAFVDTDTGELQEQRLQHREEAEMFYRNLAAQGMKVRVGMEASGHARWFERLLAELNFELWIGDAAEIRTKRVRKQKTDRQDAQLILRLMMEDRFPRIWVPSWENRDLRQLLWHRHRMVQARTRIMNQLQAGALNEGVRSKKRLWREAGREQLEAFPLAPWASRRRRDLLELLDRFTPAIAELTQAIEQEAEKCPTAQRLRTHPGVGPLTALAFVLIIGTAERFQCSKQIASYLGLVPLEESSGNRRRLGHITKQGNALLRFLLVEAAQVSVRSIPEWRSKYFHLAMRRGRKIAKVAMARRLAVQMFWMWRKGWDYEQVRKLGSHAGKPGTGDGVQSNTE

SEQ ID NO: 57534 - protein, 402 aa, unidentified
MNAVGIDVSKSKSVVAIMRPFGEIVSTPFEIKHTASDIHSLIELINSVEGESRIVMEHTGRYYEVLAHQLSKANLFVSAINPKLIKDFDNDSLRKVKSDKADAVKIARYALDKWQNLKQYNVMDELRNHLKTMNRQFGFYMKHKTAMKNNLIGILDQTYPGVNTYFDSPARSDGSQKWVDFASTYWHVDCVRKMSLNAFIDHYQNWCKRKKYNFSQSKAEEIYGKAKELVPVLPKDAITKLIIKQAVDQLNSASTTVESLRTLMNETASKLPEYPVVMAMKGVGTSLGPQLMAEIGNVSRFTHKSAITAFAGVDPGVNESGTYEQKSVPTSKRGSADLRKTLFQVMDVLIKTHPQDDPVYQFLDKKRAQGKPYYVYMTAGANKFLRIYYGRVKEYLSSLPES

SEQ ID NO: 57535 - protein, 390 aa, unidentified
MNIIKQNAGIDMSKLDFTACVCQRTSVIDDDLIISNVRKFANTKTGFNQFIKWISKISDRNIVLSFTMEATGVYHEQLANHLHKLKKKVSILLPNTVTHFAKSLNLKSKTDNIDAVTIAMMGCERKLITWEPPKLIFKKLRALSRLCRSLKGDKTRLTNRLQQLRCSFEPISEAIQMNESNIIQLDRQILELENKMVEVLKTDEQTWNKVKKLETIIGVGLKTIAVILGETNGFDLIRNQRQLASFCGYDIVRKQSGTSVNGKQRISKKGNSHIRAAMYFPAIVAIQHNPSMRKVYDRIMQNKTAKKIGQVAIQRRLLGLVYTLWKKDEEFVKNYNTDQISDDQQKEDSSTLSTRRVEQIPYETKVDELIPSPSTQNEHLHDQASEALLR

SEQ ID NO: 57536 - protein, 415 aa, unidentified
MYYVGIDIAKSFHVVSVIDDAETKVINKPFKINNDAKGFEKLLTIFDSITLDKSEFTIGLEATGIYGENLQEFLKSKGYSVKLLNPFQTSRYREQITLKKVKNDEIDSLVIALLLKSGKFSSGYITDDEYQSLRTLYRNRATIQADMKDVKKRILTQITVTFPEFEGFIKPFNVTGLVLLDKYPTAHHYKHSSVDRIMKLFRHIQGNNFTQSKALQLLELSKESIYSGKAKDARAIAIRSTIRLLQMYLSELDIIEAEILSLLQNSSVETTVDEAGIEIQKTDTLLHNLKTIPGVAEKTIAALISECGDLTRFPTIPKFIGYLGLFPTENSSGNSKHIGHLSKRGSPLAKHALYMSAVSCLIHNTQLKQFYDTKRSQGKSKKEALIAVSRKIATIIYSIFKYNVPYNPNRVFAKS

SEQ ID NO: 57537 - protein, 345 aa, unidentified
MELHTIGIDLGKTIFHLVGLNLRGEVVVRKKFSRKQLLHFTANLQVELIGMEACGGAHFLGRALREQGHEVRLMPAQYVKPYVKTNKSDYIDAEAIAEAVGRPKMRFVPIKTDDQLDLQSLHRVRERWVMRRTAVVNQIRGLLLERGITLRKGRCYVNAALPGILEDAGAKLSGALRVLLAQLNLELDHLQMRIDEADAVIKQTVGENEACQRLVAIPGIGPITATAIIAAIGNGAAFKKGREFAAWLGIVPGEYTTGGKQKLLGISKRGNSYLRRLFVHGARAVLQQSAKQSSGLSSWLARLTARTHRNVAAVALANKLARLAWAVLAKNEQYRPAVVADVAAA

SEQ ID NO: 57538 - protein, 324 aa, unidentified
MSGFVAHRWVGIDVSKAQLDVAVLPDDTTFRVRNDTAGWQELLARLGAATSTGIVLEATGGYHVGVTLALAAMGLPPAVLNPEQTYAFIRSEGQRTKTDRTDARLLARFGQQKQPGPSPVLSDNARDLKELVACRDDFTKLLTMEKNRRQQATARTHAHHQAVIDHLVAERRAVEHEIAQLIAADPALATRTALLQSMPGIGPVLGAVLVAGLPELGQADAKGLAALAGVAPHTQQSGQRSPRAAIVGGRRTICKALYQMAQTAVLHNPVIRAHYQQLRQRLPHKPAVIACARRMLGILNAMVRDGLTWPETQVGQGHFLPPPT

SEQ ID NO: 57539 - protein, 461 aa, unidentified
MLAQEMLYVGVDVGKRAHVAGFISSTLLQRHQRFEHCPALAFDNSREGFRSLIDRINTYVPLTQVQALLEVTGHYHRALLQYLQELDIPVFVIHVQKRQEGLLKTDKRDALGLANQLYNQLEKGIQVGDPLQAVRRLISPTEAAASLRGIVRHHYELVAESTQRKNKLTAICDELFPEFTRLLRNPNLPTALALRERFPTPADLVNATFWELRAARGRTCSVSDAKLLELQRLAAQSIGTKNPARIRGLVVEQQQLIRELHVIEEHLAQLETEIALVVESCREGTILTSIPGIGPQAAATLIAMIGTIANFDRAAQLKSYMGWVPKVAQSGSSLDWTRLSPRGVRQMKQTMYLIVWRAIQWDAEWKAMYERLISRKCRSDERTRRLIGREKVIGRLAGQMIGVIYALLKKDQELLAQLAPGVEPPEPTLYDSEIHRQHRLGRYQPHEARGKGPQLIQLPSS

SEQ ID NO: 57540 - protein, 340 aa, unidentified
MQQATIIGIDLAKNTFQFHGAAPDGAVVFRKKLSRGKVLPFLASQPSAMVAMEACASAHHWGREIAALGHKVRLIAPIYVKPFVKRQKNDTADAEAVAEAASRPTMRFVEVKSVEQQGQGMLFRTRDLLVRQRTQTINALRGHLAEFGIVAAQGPARVEVLTKAVEDGTTPLPEMARDLARLLLGQIAELGEKIGTLEKEIRRRAPKDAKIARLMTIPGVGAICATAVHAFAPSMSTFGSGRDFAAWVGLTPRQHSTGGKARLGGTSKMGQRDIRRLLIIGASAVVTWAARKGPRPGSWLARMIARKPHMLVVVALANKMARMIWAITTRETLYKDPVAA

SEQ ID NO: 57541 - protein, 347 aa, unidentified
MIIVGIDAHSRSHAAAAIDEHGRLLEGIEVAAGVCELARLCAWIGALPQPRLVAIENARGYGLAIVRLLLAQGEELVDVPATLTCDGRRSSGQRGKHDQGDALVIARIGLRDQERLPRLDASVLDDELKLLVDARDQLIVEAGRWRNRAHALLRVAAPGYQAKTGAFASAGSVRRARAIARRAAHHDPTRGRLAVQALDRLTALERDAGKLEREIRELLRARHCAHLLAICGVGPIVAAKILGETRGIGRFRNAAAYAAHTGTAPIPASSGRVHRHRLNRGGNRQLNRALYTIAMVQARWDPSARAYLERKLAEGKSAAEARRCLKRHLANVVYRALIADQEAPALT

SEQ ID NO: 57542 - protein, 368 aa, unidentified
MNTVYCTTIGADVSDRTTKICVMSKESGKPKIVRETAIPTTPDGFRAFLEGQDKSAPLVFETGTHCRWIDKVGTGMGFKTIVANPARLRMITESNTKNDKNDARTLARMALADVELLHPVRLRDDEHQKMVNLHEIRDQLVKERTAEVLQIRAIAKSMGFRIPDCSAECFHNIAKNSIPKELGDIVWPLMKELKSKAVTIKAVEKQMRKLAKSDVFKAQVERLMEIPNVGFITATCFVAVTGGDMDKFDRPRDIGPWLGVTPKQDQSGDIDRQCHITKAGSMMLRWKLTECAQRVLQKNSADMDLKVKGLRIRARGGKIAKGKSITAVARGLAVLMVAMLKKPDVPYVPLSEDKAKELAQIRAAMAAA

SEQ ID NO: 57543 - protein, 322 aa, unidentified
MLFTGIDISKLTFNASILNDNKYLDHKFKNNDQGFKAFIKWVEKFKLNSIFCMESTGIYSLSLAKFLDQQQKTTLLVNPIKTHAFCRMEMSRNKTDKADAQNIAKFCQYLFDTEQISKYIFKPRSEAFEELRYLIVRLEQINQLKAQEKNHLEASKSKKTIHSIKSFLRHIEKQIIALEKDIKDLVTSNSDIKKQVALLNSIPAIGDKTAWRILAYLGDVSLFSSSKQVTSYAGLNPRVEQSGSSINKSRLSKMGNKRLRKSMYMHALVAIRHHPKMVDMYNKLQERGKPKKVAIAAVMRKLLVIAYGVLKSGKNYDLNYIS

SEQ ID NO: 57544 - protein, 398 aa, unidentified
MLSIGIDVSKGKSTVCGMKPGGEIVYTPFEVQHTREGMSELVSLLRGSGEEVRVVLESTGSYHCPVVAALLENGIFVSVVNSLRMKRFCSQSIRRVKTDQIDAMQIALYGLAYWQELQPTRLPENTYRELQLLARQYYQMTSLLIKAKVDFNALCDQVLPGMQELMSDHAGRHKLSDFVLRYRHTTHILEMGETRFRKDYCKWAEKKGYRNHERMAALIFATAQNGIPVLPDAPSTQIVITEAIRVLHTVEASRDAILTQMQALAKTLPEYSLVREMPCIGDTLAPRLIAEIGDVRRFHSKRALIAYAGIDAPPYQSGKFSANNRHISKRGNRYLRKTGYEVMQSYVMHKPANDPIFTFIEKKRGEGKSGKLAMVAGLNKFLRVYYGKVTELYRSLPQ

SEQ ID NO: 57545 - protein, 401 aa, unidentified
MVSDFKKGRYNLMKIFVGIDIAKLNHFAAAISSDGEILLEPFKFTNDADGFQLLVSKLESFDKNSIIIGLESTAHYGDNLVRYLVAEFYQVCVLNPIKTCQMRKNNVRKTKTDKVDTFVIAKTLMMQDDLRFITFFDLDMMDLKALGRFRQKTIKQRTRLKIQLTTYVDQVFPEIQYFFKSGLHQHAVYALLKEAPSPKEIASMHMTHLANLLKVNSHGHFTKELAKELRVLAQKSVGANDSAISIQITQTIQQIELLDSQLEKIEAEMTDIMKFNDSVIMTIPGIGYINGGMILGEIGDIHRFSNPNKLLAFAGLDPSVYQSGNFQAKTTRMSKRGSRVLRYALVNAAWNVVRNNATFKAYYDAKRAEGRSHYNALGHCAGKLVRVIWKMLTDEVEFNLE

SEQ ID NO: 57546 - protein, 367 aa, unidentified
MKKHTTMNKPVSATDVSVCTTVAVDLAKKVFQVAGEDALGQLAYEQRIKSREAFQVFLQKLPEGVTVLMETGPGAQAWARLLQAQGNLVRILPAQRVAEHRSGAKNDRNDAHAILRAGRDSSIASVPVKSVAALAMQAWHRVRRGYVQRRTAMGNQIRGLLLEQGIALAQGDVGLKQGVTRVLEDTRQPLPALLRELIDEMLNEWKRLGERIAALTGRLEACAAADPTAKRLMTVRGIGPITATALLAKQVEPERFANARQFAAYFGIVPDQHSSGQKVRLGKMTKRGDAYVRSLMVVGSHAVLKQLRPDSEHPDDRRLQRWLQRLGRKGAAVRLANRNLRIAWVLLCSEQTYQRKPNACREMEMSH

SEQ ID NO: 57547 - protein, 345 aa, unidentified
MSQQELYVGLDVSLESTSICVVDDKGKAMWRGVCRSDPAEIAAVLSARAPGALRVGIETGQTSNWLTLELRKRGIPVVCMDARHAKAALQLQINKTDANDALGLAQVVRTGWYREIAVKSMDAQALRSLLVARSQLIGHQHAIGNTVRGLLKAFGIVIPCGAKGRFPALVRVAAEENATVMVIVDPLLKAWQALRDQAAAFDRQISARAKSDAVARRLMTAPGVGVVVALAYTAVIDDPARFHHSASVGAYLGLTPRRYQSGEVDVSGHISRRGDGLLRSYLYEAATVILARYSRPSRLKSWGTALVKRIGTRRARVALARKLAVVLHRMWMDGSTFDNAMSTAA

SEQ ID NO: 57548 - protein, 420 aa, unidentified
MSNPLTTLYVGIDVSKDSNVVCCLSFEGKKLFSGSFKNNNDESQNLQSKIVEILKNNSFDSIQIVLESTGVYSFHIGLFLSSSEMLNAVNTTVFVVNPKMTKNYSKSYIDMTKSDPSDSFMLADFARCGRTKMLKPFRGKQRLALQRLTRYRKHLVDLLCQEKMYVLNNIFIKFSEFNNKSHDFKTFSDTFSTSAIEILTNYYSPEIIASTPVDKLADSLRKYSKNKFSDPEAIASKLQSAARASYRLDKIMYEPINACIASSFCLIRAYEKQIKDVEEQIGSLIKGLDNQNEYNSLISIPGIGPVYASGILSEIGSISDFNSDDALANFAGLTWKKTQSGSFDASDTPMQKNGNSYLRYYLIEATQNIISNIPSYKEYFDKKKSEVTTHAYPRARVLTARKVLRLIYSLVSQNKLYQPK

SEQ ID NO: 57549 - protein, 340 aa, unidentified
MKHSVVGMDIAKRVFQLHCVAADTGEIERIKLRRDEVLPFFAQRTSSLVAMEACGSSHWWARQLRALGHEVRLLASKSVRPFVHSNKTDAADARAIWTAVQQPEARLVGVKSEQQQAILALHRVRAQLMKFRIMQTNALRGLLYEFGEVLPEGSVALAKSLPLALAALSERVPRMLIDTLHEQWARVQSINAEIATIERRLASALRESEACRQIAAIPGVGLLTATAAVAAIGEANSFASGREFAAWLGLVPRQTGTGGRVRQLGLSKRGDRYLRTLLMHGARAVIARGKHSPWVAGLLKRRPYSVVVAALANKLARTIWALLAKGRAFDPAVFNVSPQA

SEQ ID NO: 57550 - protein, 407 aa, unidentified
MLFVGDDWAQDHHDVYLMDEAGARLAARRLPEGLAGIGQLHELIANHAEDPAEVIIGIETDRGLWVGALAAGGYQVYAINPMAVARYRDRHRVSGAKSDGADAKLLADLVRTDRHNHRALDGDSPQAEAVKVLARAHQSLIWTRARQASMLRSALRKYYPAALRAFPNLGDRDRDRDALAVLGRAPTPEQGARLSLSKIAAALKAGGRKRNIDERAREIQAMMRTEHLGAPETLTAAFAATTRATVNILLELTDQISDLETTLADHFEKHPDADIYRSLPGLGVILGARVLGEFGDDPNRFTNAKCRKNYAGTSPLTIASGKKKAVLARHVRNPHLYDALDRWAFATLLCSPGARSYYDQHRANGDTHHQALRALANRLVGILHGCLRHHALYDEHTAWDHRIPTAA

SEQ ID NO: 57551 - protein, 402 aa, unidentified
MLKIVYPICCGLDVHKSFVYACIASTDSCGVTTYRSHRFSTFTNGLKSLLQWLLENQCHDVCMESTGKYWIPVYNILEQDCKVVLAHPKYVKAIKGKKTDKKDAKWIADIFKHDLVNGSFIPPADVRQLRDLMRYRSKLTSFNTGEKNRAQNCLTVSNLKLDDVFSDVFGKTASAILERLLENEEPFDVRPFLHKNLKHSPEEIQEAINGVICTEQAEKLRIIRSHMEHIALCKANLESVILSLAEKYTHQIDIVCSVPGIDTFSAITVISEIGVDMSVFPTDKHLCSWAGLTPQNNESAGKKKTTRISRAGAYIKPLLVQCALCAVRSIALKKRRGHKKAIIAIARMLLTAIYHMLKNDKPYSPRLRKTSDMPPAHREVSLEQAVYILQRQGYIISPPAAT

SEQ ID NO: 57552 - protein, 346 aa, unidentified
MAVDLAKRVFQLAGENVLGEVIYEKRIKSREAFYTFLRALSPSMVVLMETGPGAQAWARQLQSQGNLARILPAQHVADHRSGAKNDRNDALAILRAGRDSSIASVPIKSATALAMQALHRARQSYVRRRTAMSNQMRGLLLEHGVALAQGEVAISQGIPRILEDATQPVPDLLRELIDEMLGEWRQLGERIKVLTGRLEMAANDDATAKRLMTVRGIGPIIATALIAKECDPKSFANARQFAAYFGMVPEQHSSGERVRLGKMSKRGDRYLRSLAIQGAHAVLRQIKPDSEQADDQRLQRWMNRLGRKEAAVRLANRNLRIVWVLLQNDQTYRRQPVNDQRMAMSS

SEQ ID NO: 57553 - protein, 352 aa, unidentified
MSQPHNSMEETKMKLYGAIDLHSTNNVTVVIDEQDRVVYQKRLPNDLALILMELSVYQTELQGIVVESTYNWYWLVDGLMEQGYKVHLANTAAIQQYEGLKYTDDHSDARWLAHVLRLGVLPEGYIYPRADRPVRDLLRKRSQLVRQRTTNLLSIQNLVTRNTGESLSANQIKGLDVQQVDELLPNGDLALAVKANLSVMCSADEQTKILERTVTQRVKLSPQFSLLKTVPGIGQILALTIMLETGDIRRFCSVGNFASYCRCVGSQKVSNGKKKGKGNTKNGNKYLAWAFVEAANFAIRFNSKIKSFYQRKKAKTKGVVAIKAVAHKMCRACYYIMRDHVAFDVTKAFGQK

SEQ ID NO: 57554 - protein, 342 aa, unidentified
MSEVITIGLDLAKNVFQVHGVDGTGQTVIRRQLRRSQVVAFFKKQPPCLVGMEACATSHHWARAIRALGHEVRLMPPRYVKAYVKRNKNDAADAEAICEAVTRPSMRFVAIKTAEQQSVLVLHRTRELLVRQRTAVVNAIRAHMAEFGVVARVGLPQVKLLIEVIADAEDDRIPPEARTCLKGLVVHFISLTREIVGAERRIQKWHRSNQASRRLETIPGIGPITASALAASITDPSLFKSGRDMAAWIGLVPREDSSGGKQRMGRISKQGDQYLRWLLVAGAMTVIRHAKRRGTNIPWLADLIARKPTKVAAVALANKTARIAWVLLSHDVTYRKPAPVAG

SEQ ID NO: 57555 - protein, 397 aa, unidentified
MYIVGIDIAKRKHEAAVIDGEGAVIIKPFSFTNNCSGYNRLLAMLAKAKLPLDEVSFAMEATGHYWLALFTRLQKEGFRVQVINPVQTNSIRSFYIRQAKTDPRDALLIAEVIRFGHFSESTLHPENIYELRELCRGRHAIVSMQADVKRKVVALLDQVFPEYETAFTNMFSDTSMAILQTCPTPKELSEMPLEELCHLIEVSSHKRFRMAKAQELQALARNSFGFAMAGDVFSTMIRLYAKHLDFLKQQVREMDRKIAEIMETLDTPITTITGIGPTLGAYILSEIGDISRFSSAAKLAAYAGIDPTMRQSGEYNGVRNRMSKRGSPYLRHAIWLAASSAVLHDPALKLYFQKKRDEGKPYMASVGHACRKMVSIIYAVMRDNKAYTPYIPNEISA

SEQ ID NO: 57556 - protein, 315 aa, unidentified
MVTGIDCSKDYFDVVLIDKDKKVFEGRFTNNAKGFKEALPHIQESHVVMEHTGPYSFSLACLLYDSHVRVSVVNPLVIRRFSQTRMIRTKTDRKDALIIAEYGLMYQPQLWSMPNEKIQEIRQWETCLRGMIKCKVMLMNQYHAFEHSGNFVDAVREKMEVQVQNQELEIMQVESKIQALIQEVFPELHKNLTSIPGIGPKSAVLMIVLTNGFRDFENHKQVISYFGLAPRIYESGSSVRGRSGICKMGMSSLRAVLFMAARTARLYNPTCKDLYDRLRSAGKAHRVAMIAVVNKLIKQAFAIAKSGESYRLVKS

SEQ ID NO: 57557 - protein, 350 aa, unidentified
MLIIGCDYHPSCQQTAFVDTESGEFGERRLVHPEEAEQFYGDLQQRNMAVRVGMESSGHSRWFERLLHQLGFELWIGDPAEIRTKRVRKQKTDRQDAQLLLRLLMEDRFPRIWVADAENRDLRQLLWHRHRLVQMRTRVMNQLHVVALNEGLQRKKALWRPAGRKELESLVLAPWSSRRRQDLLELLDHLTPQIQKLTQALEDEVEKRAVTRRLMTHPGVGPLTALAFELVIGTPNRFHCGKQIASYVGLVPTEASSGDRRRLGHISKQGNALLRFLLVEAAQVTVRSLPEWRSRFFHLAMRRGRKIAKVAMARKLAVHLYWMWRQGCDYGQMQKLGSHAGAPGNPDGEQ

SEQ ID NO: 57558 - protein, 333 aa, unidentified
MQDLSTKQHFVGCDVSKDTLDLALYQPKTDYRKFEHVQISNDTEGFKQLLQWLKARKIKKNEVAIAFEHTGAYSIALAEWLHKKKITFSMLHPLDVKNACSRGRNKTDEVDAKFIADYAYTMREKLAPSGPEPKNIKHLRELRNERDLCVRCRASYLCQIKVQTEAQTIARMHKVVDFMTVQIHQIEEEIKKIIAADETIATNYHLLISIPGIGMVNAVNTIVATGNFTRFQTSRQYAKFCSVSPMAVQSGTSVHSGNHVCKKGHNELKATLSEAARSAIIHDPQLRHYYQRKRSQGKSHGCVMNAVKFKLICRMFAVIKRQQPYVNTECYRG

SEQ ID NO: 57559 - protein, 379 aa, unidentified
MQSIQTWAGIDVSAKTLAICRWRNEKEEERSFANDGAGHREVCKWLGKGARVVLEATGVYHLQLAMALEKFGAEVMVINPRVAKDFARALSNRSKTDAVDARALLEYVRRMEFRRWQAPGAAVSELRELGRRLTELVRTSAEEKNRLHARSVAATSRTVIADLKQHILVLDQRIKGIEQAALKLIGLDQDLTEQFELLRAAPGIGARSVILLLTELAVLDPTMTTRQIVAHAGLDPRVYESGTSVQKTVRISKVGNRRIRAILYMNALSAIRYDRGARLFYLRLLARGKKRMQALVAVMRKLLHGIWIVLQRRVRFDSSILFAASLAQAESSDSAIPATEPEPEQDHPKGRSEAEELPEQLDPARAEATRSPNRKSKTA

SEQ ID NO: 57560 - protein, 407 aa, unidentified
MDVVIERACGMDVHKDNITACIMTPEGKEIQTFSTKTVYLLQLVDWIKQHNCTHVAMESTSVYWKPIVNLLEAEDIEFLVVNAQHMKAVPGRKTDVKDAEWIAKLLRHGLLKASYIPDRNQRELRELVRYRRSIIEERARQHNRIQKVLEGANIKLGSVVSDVLGVSARDMLDAIADGEEDPEKLANFARRSMKKKKVELELALKGYINSHQRLMLKTILAHIDFLTEQIEMLDKEVADRVSSHQEDVLRLDSIPGIATRMAEQILSEIGTDVKKQFPTAAHMCSWAGLVPGQNESAGKRKSAKTKKGNKYLRSALTEAAHSVRGSKNYLGALYRRTASRKGKKRAGIVVAHAMLRISYYLLTRKEMYVDLGEDYFDKQRQQSIVRHSLRRLESLGYTVTLEEPKAS

SEQ ID NO: 57561 - protein, 346 aa, unidentified
MEHYVGIDVSLELLSVCVVDGRGKIVKEAKVASEPEALVYFLKELGFPVNRIGFEAGPLSQWLHAGLTQAGFEAVLLETRHVKAALSAMPVKTDRKDACGLAQLLRMGWFRQVHAKSIGSQEIRALLVARKQLLGRLLDVELSIRGILRGFGLKVGQVTRKTFEARIRELVTGHTTLERIAEAMLSARATLKAQYEKLHKAVLAIVREDAVCRRLITVPGVGPVVAVTFKSAVDDPSRIAKSKAVGALFGLTPRKYQSGEKDVTGGITRTGDEMVRTALYEAANVLLSRITRFSKLKRWGMDVAKRRGSKRAKVALARKIGVILHRMWIDGTTYRWAEAKPIAAQG

SEQ ID NO: 57562 - protein, 341 aa, unidentified
MRYIGADLHKKSITFCVVETDRQTINVVKRQRIMCCEVHRIEEFLKSHTPCEVTVEATIGYEWFATLAAETATKVVLAHAGKLRVIAESTRKTDKIDAYVLAEFLARNMIPAAWQPTARVRQHRALVRRRCKVQSRITSIKNTLRGILTRYNKDLSHLFSKVGREHYETIKASLLAEDAWVLDDLFEELKQQTTRLKKVDDHLVEFAATAPVKEREARAVLDSMPGVGAVTIDTILAELGDWTRFRNADAVVSYAGLDPGVRESDGHRKDLKISKAGSSLLRWIMIQLAHRMKRTTVRWARAFEQISRRAGKKKATVAIARRLLLVVFAMLRDGRAYQMAA

SEQ ID NO: 57563 - protein, 417 aa, unidentified
MEEEQKARPCRYIALDIHKYYSVVAGVDREGEEILPACRVEHMDLENWLAKHLLPTDRVVIESTTNAWHVYDLLEPLVAEVLVANPIKVKQIACARVKTDKKDTFILARLMAANLVPTVWVPPQHVRELRQLISHRRRMASMHTQVVNRMHSVAHRHHLNHPKGKDFQAKNTGWQKDESLSRLEKMQLELDMETRAHLETQIERMTRELGRMSHEEPWASDMLYLMQVPGCGVVTGMTILAAIGDITRFETPKTLASYSGLVPGLEQSGAKLRGKGITKEGRRELRWVMVEVAWRAVKADPHWKKYFEELKRRMHPNQAIVAIARHLLTMVWYVLIRHEPYSHYSPERIAYKYLTWSWALDEEQRQGMTRPQFARHYLMRLGIGNELKRVALNPKYPYKLASMEEVLALKPEFRPPE

SEQ ID NO: 57564 - protein, 350 aa, unidentified
MNVNQYIGFDVHKKSVSYCVKIADGIIVEEGKLRATHEALRQWAEKRQESWRGAMEATLFSGWIYDALKPFAAELQVGHPAMMKAIGASKKKNDKLDARKIADLVRCDLLPACYVAPAEIRELRRLLRYRNLVVRQAVRMKNRMSGLLMEVGAEYNKQQLHGKQYFMELLDTLAEAPDSVKDLLQLSRGAMEMFETTQQQLLVRLKRDQLLSKRVTLLESIRGVGEVTALTWALEVGDPHRFSSVAHAVSYCGLTSALVSSADKQQRGPISKQRNAHLQTVLIEAAKLAPRWNPQLAAVHARELERGNRNRATLAVARKLVAYLLAVDKSGQAFQVRNQPAAAMAEGKVA

SEQ ID NO: 57565 - protein, 336 aa, unidentified
MRYIGVDLHTTQITVCYLKAEAEFEIRKYQLVEMDKFVNTLEAGDEIAVEATCNTRWFAEQVQEKVSRVVLVNPREFEVVKNSVKKTDKRDALNLARFLKADLLPEVRAKREETERVQSLVNTRTKLVRLKTSLINKIHALFVSNGRKLKKASLASDKGLEKVLLSEWSAIERIELEIIIEQIRSLKVSIKKLDTAIEAESGKLKGFESLVSMSGIGSLSAGILLAVIGNIKDFATADKLASYFGIVPRVSNSNEKVNHGRITKRGNKTGRTTLVQCSLAAIKKSEYLKKYYEQVKARRGHGKAKIALARKYLGIIYNTLQNDWVFEDFNNFVLAE

SEQ ID NO: 57566 - protein, 340 aa, unidentified
MKLYTGFDLHSSNSYLGIIDEHGKRTFNRKLPNDPAVIVDTLRPFRNDITDIAVESTYNWYWLVDLLMAEGYRVHLANPSAIQKYTGLKYSDDRHDAFWLAEMMRLGILPEGYIYPKEDRPIRDLLRKRSHLVRLRTSLIISLQNIVSRNNGIKLKVGDVKALKTDRVAPLLADNDDLALAGKVSKETIDFLTHKIKAIEHVVEGKVKLREPYDRLLGVPGIGKILALTIMLETGPISRFDKVGNFVSYCRKVSSKWVSNDKSKGKGNKKSGNKYLAWAFSEAAEFARRLHDESRAYYNRKMQRTNFMTAHNALAHKLARAAYYIMRDHVPFLQEKLFTS

SEQ ID NO: 57567 - protein, 433 aa, unidentified
MKVLYERVAGIDVHKDMIKVAIRSPGEKPWTRKTEILEFRTFYGVLQEMARELRRRGVTHVVMEASGIYTEPVYYALCEQDFTQVAVINPAHAKALRGHKTDAKDCARLAELSGCGLLRGSYIPPAELKEVRDLTRYRMKTVQARTSEIQRLAKALESAGIKLGSVASDITGVSATAMIESLTGGERRGAVLADLARGRMRTAGKLADLSMALAGRFTGHHALLCRLHRDRIAVFDAAVADLDQRVAGKAARWQREQGLLTSVPGFGDVVAQAWLGEIGPAPHRHFATCEKLASWVTLCPGNNISAKKRKHGRTGDAGTYIKPMLIQAAWSAIRVKGRLQARYNRLVRRFGGEKNPAAKKKAITAIAHTLLKIAYQVLKSGMPYTEPGADFYTRRESPEQRQAWLERQLQKLHPGRTVTVTVSPPEPALLPGA

SEQ ID NO: 57568 - protein, 393 aa, unidentified
MICVGIDVAKDKHDCFILSSEGEVLADVFTIPNNRDGFETLLQRIRSCAFPADKIKVGLEATGHYSYNILGFLLDCGLATYVINPLHTNLYRKSLSLRKTKTDRIDARTIAAMLMSDVNLKSYTDTAYHNEELKSLTRYRFDKVRQRAKLKQSVSRLVNILFPELETIVPTLHMASVYALLSEFPGAQQIADTHLTHLKTLLDDASKGRYDREKAVEIREAARRSIGSRMPAKSLELRHTIQLIRELDKEIAEVEDSIEEIMNSIQSPITTIPGMGLRMGAMILAEVGDFANFDSPDKILAYAGLSPSTYESGKLSLAGSYSHMEKRGSRYLRYAIFNATKYVCHWDSTFAAYLAKKRAEGKHYNVAISHAAKKLVRVIYSLQKSGQAYQTAA

SEQ ID NO: 57569 - protein, 318 aa, unidentified
MGGVNAAIEVGKQQLVVQLGSQGEQFSEANQPRAIKRIAKRLGQAGCERVLIEGGSYQSVLIAGLRAAELPVVIVNPRRVREFARSIGQLAKTDKIDARILALYGEQTQPPLRELPDEQSQALRALWVRREQLIEMLVMEKNRLEHTAEKAKAVRHNLCSHIDYLRKQVKQADNDLDREVRNSALWDKYEMLNSVPGVGPVLSVALLSDLPELGRLNRGEIAALAGVAPFNCDSGTLRGQRRIDGGRSRLRRVLYIATVAAVRCNPVLKLFYLRLRAAGKPPKVALVAVARKLLTILNAMLKTKTAWRPPCPARPELT

SEQ ID NO: 57570 - protein, 355 aa, unidentified
MERYIGMDVHAASCTLAVISEKGWKLKDFPVETNGQALVEAIRMIPGHKHLVMEEGLQSAWLYETLSPHVDELVVTGVTESRGPKSDKRDAYGLAEKLRVGNLDKHVFKAPRQFTRLREFSRTHMTLVGDVVRTQARIKSVYRSRGVLVTGIDVYGSRRRNEWLEQLPSSTQIRATRLYDHLDFLLEQKKQAEADLLREGKKHPIVKTLETAPGFGPIRAARLVPIVITPHRFRTKRQFWSYCGLGIVTRSSSDWVQTTDGAWVKARVPQTRGLSLQHNRFLKDIFKGAATTVITQRKKDPIHARYERLLDGGTKPTLAKLSLARRIAATVLRMWKNEEEYDPGRAGLPAQTREG

SEQ ID NO: 57571 - protein, 338 aa, unidentified
MNIVFLGIDLAKNVFQLCGLNQAGKPVYTKRTGRKELLQTLANIPACLIGIEASTGAFYWQREFEKLGHKVKVISPQYVKPFVRGQKNDGNDAQAIAVALRQPTMQFVPPKSPEQQDIQTLHRARQRIVNHRTATVCQIRGLLLDRGIPIGSAVSRARRAIPLILEDAENGLSSRMRRTIAELYDLFNDLGRRIHFFDKEIETVFRQSEACQRIAKVKGIGPKTATAVVAAIGKGTEFKNDRHFAAWLGLVPRQHSSGDRQVLMNMTKKGDRHLRTLFIHGARAVVRVATNNNDGHMNQWVNQLKERRGFNKTTVAVANKNARIIWSMLRNETEYQVV

SEQ ID NO: 57572 - protein, 383 aa, unidentified
MKAVCGLDVHKDSIYLCILHPDGELFEQVFGVLTFQLHEMCKLLKKHHVSEVSMESTSIYWVPIWRVLSPHFTLRLVNPYFIKQLPGHKSDVKDAQWIAECTMKELVNGSFVPPEIIQQLRQYDRRIFDLNEEIVRKESKVDAVLQRCNIRLSNYVSNIECKSYRTVVRRLSEGVTDPQELIKEIHGRIINKHGRETILASMDGVVSQAEIDVLRQLREEIDIAESHKKECQDKMSEICQKYFPEELRRLQTIPGIKERAATSLIAEIGTDMSKFETANHLAAWSGLRPRNDESNKKVKSRKTTHGNSYLRRTIIQCAWAASRQKDCFFSWFSYHQIVVRRKNKMKVIVAVARKMLVAVWHVLHDNVEYIDFKHDCEESANNG

SEQ ID NO: 57573 - protein, 391 aa, unidentified
MIFVGIDVAKDTHYAAVSDDSGAVLVKPFAFQNNAEGFCLLLKKLSEFDRSKLLIGLESTGIYSENLICFLYESGFRLAVINPIQTATLRKTAIRKTKTDKVDTMLIIKSLMVNSYRLYSQRDADSLKLRTLCRFRQNLKKSKARLKIQLAGYVNLVFPEFGKFFKSGIHIAASYALLKKYSSPKEIAALRTSTLCTLLSNASHGRFGKDTAEALKSLALSSVGVKNPYISIQIAQTIAQIELLEQQIKDLNSAIEEAMESINSVLMTVPGIGAVNAACILGEIGDIKRFSKPCKLLAYAGLDPTVRQSGQFTAKSTRMSKRGSALLRFALINSAWQLTLNDTTFKAYYDLKRSQGLNHYGALGHVAHKLTRVIFKLLTSDTPFNPAKLVA

SEQ ID NO: 57574 - protein, 367 aa, unidentified
MDEHITAYVGLDVHKESTAISVADSGRGAPRFVGTVGSELRQILKALRPLGAAAGVMVAYEAGPCGFGLARQLRSEGYHCDVIAVAKTPRRPGDRVKTDRRDSLALARYLRAGELTPVTIPDSRDEAIRDLSRTREDAVRARLKARQQLKAMLLRLGKRYDGKTSWTAAHERHLSTISFSHAAQDIAFSEYRMAVREANDRVERITTALRDQAASWRFAPVVAALSTLRGIDFITAVTLVAELGDLGRFAHPKDLMSYLGLVPSEYTSGESRTQGAITKTGNGHARRVLIESAWNYRFPPRLSRALEVRAEGQSAVVREIAWRAQLRLCSRYRKLTGRGMHKNKICVAIARELSAFVWDVARHSAVH

SEQ ID NO: 57575 - protein, 415 aa, unidentified
MDVIVDRCAGLDVHKKTVMATVRCPGGRGGRGQATREFATFTGRLVELRDWLVAEGVSQVAMEATGVYWKPVWHVLEEAPGLQLLLVNPAHFKNLPGRKTDVADSEWLCQLLECGLLRGSFIPPADIARLRDLTRYRTKIVQERVRETQRIQKVLEDAGIKLDSVATDVLGVSCRRMIEALISGERDPEVLAEMALTRMRPKIGVLREALVGRFGDHHALLLRMHLDHIDQLNGIEARIDAEVDALMGPFVEPATRLLSVPGIGKRVGEVIVAEIGVDMSRFPTAGHLASWVGLCPGHHESAGKHRSGKARKGNPALRAAMCEAAWAASHGKDTYLAAQFKRFKRRFGTKGETKAIFAVAHTMIVIVWHILAEGTTYEELGPDYFERRTDAEARQRQLVRQLEALGHKVILEPAA

SEQ ID NO: 57576 - protein, 373 aa, unidentified
MKKNSTTAQSPKRAAARQAGPKTIGMDLGDKTSRYCVLGAGGERVSEGSVATTRKAMAQRFSRMSRCRVAIEVGTHSPWLSRLLSSLGFEVIVANARQVRLISDSSRKNDRLDAQLLARLARVDPQLLRPIQHRSEPAQTDLMTIRIRAGLVEARTSLINTARGLAKALGERLPVCDTDTMGVEKLEGLPAPMREQLRPLLEAVKSLTERIHELDSTIEQIARSKYPETELLRQVSGVGTLIALTFVLTVEDRDRFQKSRDVGCYVGLRPKQSESGQSQPQLRISKEGDLYLRKMLVQAAHCILSRRGPDTDLKRWGLKLAERGGKNAKKRAIVAVARKLAVLLHRLWVGGEVYEPLRNSQAAAQSSKKKKAA

SEQ ID NO: 57577 - protein, 356 aa, unidentified
MTIVAHSRSFVIGVDTHAKTHTYAVIQTASGQLLGCQQFPTTPQGIARAIAWVGRMTGGDAETLWAIEGVATYGAKLARAAAESGYEVAEAPRMNAKARHGIGKSDPLDAHAIATAVLPLEEDRLRRPRADDGTRQALRVLVTARDQLAQEKTMNVNALTALLRTNDLGIDARKPLTAAQIGQASRWQHRTEPLALATARSEAVRLARRILELEDALTVNHARLSELITASPAAPLLEETGIGAYTAAVVITAWSHPGRVRNDAAFAALAGVNPIPASSGNTTRHRLNRGGDRRLNKALHYIAITRMSRHPGTKAYLEKRLAEGRSRREIRRCIKRYLARHLYRTLNTLYAAPETS

SEQ ID NO: 57578 - protein, 355 aa, unidentified
MTSMTETPPDVSLTIYLGVDTHKHTHHAAIIDHLGRPLADREFPATDTGHRQLLAWLAGTGSVAAAGVEGTGSYGAGLTHVLRRAGLTVVDVDRPDRRSRRRHGKSDQIDAYAAATAALTGRATTIPKTHDGNVEAIRFLHNARRSVVKAKADAITTLKAMIVNAPEPLRAALRPLTDAALLRTCAALRPDPIAPDHLISAVKTALRSLARRILDLTAESRALLKNIETLIVHTAPALLARCGVGVETAAQLLITVGDNPERIASEGAFANLCGVAPIPASSGKTTRYRLNRGGDRQANRALHMIVLARLKYDERTRAYRDKRLAENKTKRDIIRCLKRAVAREMFPLLNPRTSG

SEQ ID NO: 57579 - protein, 348 aa, unidentified
MQVTTLGIDLAKNVFCVHGCDANGKPVLRKQLSRRQLLSLVANLPQCLVAMEACASAHYWAREIEKLGHQVRLIAPRFVRPFVKANKNDASDAEAICEAASRPSMRFVAVKSTAQQDVQAVHRVRQQLIKTRTALVNQARGLLAEYGIVVAQGVSRLRRALPAILEDRDNGLSGVMRELLAEIAERLRFIDDRLRKYDLTIHRLFRQDERCQRVAAVEGVGPLSATALVAAVGNATDFKSGRELAAYLGLVPRHRASGGRTVLLGISKRGDRYLRTLLFHGARSALYRIERQRGARAIWAARLKLRRGANVAAVALANKNARVLWALLSRGQSYKPAPFPARVPQAGG

SEQ ID NO: 57580 - protein, 353 aa, unidentified
MITIGVDAHKQMHMAVAVDEAGREVAHWRGPNSPSGWRQVGAWGAALDGACRWGIEGAWNYGRGLAQDLVASGAEVYEVNPRWTAQQRQHSRKPEKSDRLDARAVARLVWREAAALPVVAADDETAVLELLVTEREGAVAEATRLRNQVHQLLLQLDPEYHTQLPSLRTSAGVAAAANYTAPASDTLAQHRAGAVRRLAERLQLALAQAKDLADQIAGLVAVRFAPLTQICGVSLLTAGALAGILGPGRRFATDAQLAAYAGVAPLEASSAGRVRHRLSRGGNRRLNAILYRIVLTQSRHAPAAQAYLARRMSEGKTRREAVRALKRFVVRAIWRRWQECLAPPETVPSGRAA

SEQ ID NO: 57581 - protein, 340 aa, unidentified
MVHVGVDLHKRMSQIAVLTADGELTQHRLPNDPARLEPFFAQLPTPSPIAIEASATWWWLVDLLQRLGHQPVLSHPKETKAIASARLKNDKVDAQRLALLLRGDLLPTVWIPPAALREARELIRNRGGLIWLRTQIRNRRLAMLARRNLQPTHTKRWLTVRGQRELQALALTAAPTTIREDCLALLPVLDAQIRRLDADLSQQWGQDARVQRLMTIPGIGPFLAILLVLELGDVQRFPSAKHVASYVGLTPRIRASADRVRSGHISKEGNRLLRWALVLAATQAARRPGPLRAWFRAVQHRKGKKIARVALARRLAEIVYHVWKDDVDYWTVLRRVVVRG

SEQ ID NO: 57582 - protein, 352 aa, unidentified
MTLVGCDLHSRKQQVAVLDTDTGEVLEQELLHEGDAVERFYRALPRPVTVGIEATGYALWFHALMQKLEHTLLVGEAAKIRAMVVRKTKTDRRDAQHLLDLLKHERFPIVWVPDPTTRDLRALIAHRVRLVRMRTMVKNGLHAIALNQRMALGPSLWTKRGLAQLQALSLPPHTACRREDSLELLTWLTTRIDQLDARIMEAAAADAQAQRLLTHPGVGPLTALITVLVLGPADRFPTSKHVVSYVGLAPAINASADKYHLGKITKQGNALLRWILGQAAPLAARADGELKRGYFTVLHRRGRPKAKVALARKLLVRLYIMLRDQIDYDEFRRRGRARRVQTERHPVAAPAM

SEQ ID NO: 57583 - protein, 362 aa, unidentified
MSYRNRNDAQWREKPERTVGLDLGDRFSHYCILNAHGEVIEEGRIATTEKGLRQQFANVPRQRIALECGTHSPWVSRRLQQWGHQVIVANPRAVPSITHSVSKNDRHDAEQLARLAHSDPELLKPIQHRRQTRQQDLNWLRARHTLVRARTLVINSLRGLAKSAGGRLPNCSSESFPKRVAEHIPASLTPLATPVLEQVATLNTHIAALDQQIETLAQRYPEISLLRTAPGVGPVVAAAYVLTLDRPDSVAHSRQMGARLGLRPKQHQSGDRDPQQGITKISNRYLRSLLVQSAHYVLGRFGPDSALRRWGLQLAGTGNQGAKKRAVVAVARKLAVLLHAMWRTGQSYRPFPPLRAVPNSNP

SEQ ID NO: 57584 - protein, 409 aa, unidentified
MNAVGIDVSKGKSMVAIMRPFGEVVASPTEVAHTDSDLRKLANSLKRLKGETKVIMECTGHYFHPIARVLREAGLFVSAVHAKLIHDYGNNTIRKVKTDKADSLKIANYGLSNWLELPEYVPEDDIRHMLKAYSRQYTKYGKVKTMLKNNFIALTDQAFPGVNVLFTSPPRKGDGHEKWMDFAMKFWHCECVCGSTAKAFSGRYQKWCKKEGYKFSQDKAGDIYAAACGHVPIMPNNESTKLLVTQAVRQLNAVSESIAVIAGEMKRLAMMLPEYPVVSEFFGVGDILGPQLMAEIGDVRRFNNKGSLVCYAGLEAPPYQSGKFESRDRSISKKGSPHLRKTLFQVMVCYLQLAPAGDPVYQFIDRKRAEGKHYYSYMTAASAKFLRIYYARVKEYLAMTCTIRDEAAA

SEQ ID NO: 57585 - protein, 313 aa, unidentified
MDKSFVGIDVSQDRLDVYVRPLGNRWWVPNTTQGRNLLVKRLGVLKLELVVLESTGGLERAVARMLQEAGIPTAVVNPRQIRDFAKATGRLAKTDALDAEVLAWFAEVIRPDPRPLADEGTAQLRELVVRRQQLIKMATAERNRLKRASPKMKPRIRRHLEWLEEEIARLDEEIEEMKLEREEWANRDRLLRSVPGVGPVLSATLIGCLPELGALRGKEIAALVGVAPFNRDSGQWCGKRGIWGGRAPVRAVLYMAAVAATRWNPVIREFYLRLTGAGKPAKVALVACMRKLLVILNAIVRDRQPWRYSPAST

SEQ ID NO: 57586 - protein, 372 aa, unidentified
MSPNSITWVGMDAHKNSIKVAALLPEQAESVEWTEDTTAEAIRRLARRLQRLAPGEVRCCYEAGPTGYGLQRQLRAGGVACTVIAPSLTPVQPGSRIKTDRRDARKLAELFRAGLLTEVHPPSESDEALRDLCRCRDDVRVDLLRARHRLSKFLLRRHCCYRQTKHHWGSRHWAWLEQLRFDDAMSQTTFDSYLLAVQQLAERQRQLDLRLAEFGGQEPYREPVAWLRCFKGIDTVTAVCLVAELHDFRRFRSPRQLMAYVGLVPSECSSGERERRGTITRTGNRHVRRLLVEAAWHHRHRPALSGPLRARREGQPVRVLAIADRAQERLCARYRRMSQAGKILPKTIVAMARELTAYLWAVLHPAAAPTRS

SEQ ID NO: 57587 - protein, 344 aa, unidentified
MLYVGLDLSRKRLDWQALDLNGERVAVGAVPPDRDGLAKLGQRLGDAPVLAVIESMSGARFVHDQLERAGWDVRIADALKARGLAPLACKTDKIDCWVLAELARLNLVPEIWLPDPAVRAERERARFRLHLVKHRRSLKNRVHSILFQHGVPNPHSDLFGVGGRRLLERLALPEPWESTVESSLSLIDTLDEQIHACERELRRLGADHPYIPLLLTCPGIAWTLAYTIAAEIGDIGRFPSARKLVGYTGLCPRVDQSGERDRRGPLRKNGPDYLRWALIEAAHVAGRNPHYRPIVERMRARHGRTHGSKIAAIDIARRLTESIWHMLTNKQPFAPAGAPCPLTA

SEQ ID NO: 57588 - protein, 431 aa, unidentified
MNDVTRFVHFNEFRNGIRGSRTHLIVGIDIAKDKHHAFFGTAYGQTLWRRLIFTNDLIGYSRLIEQVQAVSSQHQLEQVVFGMEPTSNYHKPLAHWLIKQDYLVVLVGGKAVKDNRELLTGRWDKNDTKDSANVADLISQGKCLFYEHPDDNVVSVRNLLVLRKQLKKEEHRLRMRIRNGLLAKYFPEMDRHWGNSLEENLAIVRWYLDPRKIANTEFDQFFNHVTTTDRGLRQIRRLKAIYQAAGESVGLPVDASAGYEAQMLVERLKLVKEQVSQTMQRVESVCQNIAGYQLLQTIPGFGPYIGAVVLTALANPFRFNSRKQVIRLAGLDLNASRSGKKSRDSVPVISKKGDADLRYALYQAALVASYNNNCFRRVYHRMLEGRHAERGIKTKARVKLAAKMLVVAWTMLKNNEPFDALRMLGESFQQR

SEQ ID NO: 57589 - protein, 357 aa, unidentified
MKGKIKQLDFTGETIYTALDVHKKSWTVTTGSREFELEHYTQNPNAKELARHLKKRYPGAQHLVAYEAGFCGFGIQRSLKEEGIDCIVVNAADIPTSNKEKSRKQDKIDSRKIYKRLAAGDLEGIYVPLTEMEHARSLVRERSRIVDDQTRCKNRIWSLLMFSSLSANTDKPKQYWSRKFVESLKQLDCGSKPLRDALDIAIEEYILIRQLLSKATKKVRELSNDTLFAEVQGFLRSVPGIGLINGMIIHTEIQFICRFKTLDQLCSYAGIVPDSNSSGDKERITGITHRSNNYLREAIIESSWVIIRKDPAMLMLYKSYCARMDENKAIIKIARHLLNRIRYVWMNQTTYEIGIAA

SEQ ID NO: 57590 - protein, 341 aa, unidentified
MQITTIGLDIAKNVFQVHGIDGDEKVVVRKQLRRNQVLQFFDELPPCLVGLEACATSHYWARELARLGHEVRLMPAKDVKAYIKRNKNDAADAEAICEAVRRPTMRFVQIKSADQQAQLMQHRARDLLMQQRTQLINAMRSHLAELGIIAPQGREGVKELLAIIAHDDNRHLPVDARASLVVLAAQLQALQTMIGAIEKRIVKQHRASKESKRIQTVPGIGEIGASAIAATVTNPRIFRSGRDFAAWIGLVPRQMSTGGKPKLGPISKQGDRYLRRLLVVGAISVMRRAKLDPGKFPWITQMLARRPFKVVAVALANKMARTAWALMMSGKTCRAARYAAA

SEQ ID NO: 57591 - protein, 403 aa, unidentified
MEGPLISLDVSKGKSNYRFFENGTDRKGKKGVIRHDIQGFDSIRDEAEKMEKRLRIKPSVIFESTGVYSDVVEKYFTGKGFDVYVISPLLSASMRKEGVRPAKNDSLDTLSIAKVFYSKDDLRKCSGNDKKAERLREMSYELDMMNRRIRPMKCQFLRLLDKVWPCLDEVSDYSSRFMLDFIIAFGHPENIKTVKGVLSVIRKSEMGTAGRKDKIAQDLFDYCHTHLSAVSKDSSYVELLKRMAIELKAMAKKKSELIDRMAEEARNKDEFARLLTIPAVAKTTALKIMARVGDISRFRNAEALVAYCGLDPRVYQSGKMTGGHRTITKKGDCILRSTLFLAVKLMVMLYPDTKVARFVAAKAKNGLSYKQAVVAGSAKLARIIYSMLTHHENYVEFNADIVA

SEQ ID NO: 57592 - protein, 461 aa, unidentified
MSAAARRPRKTGTTAAVPVPNCHAAGIDVGATEIFVAVPEDSDPRIVRSFHTFTTDLIALADWLKQSGIQTVALESTGVYWIPLFQILETRGFKVCLVNARHLHNVPGRKTDVCDSQWLQYLHACGLLHASFRPSEQVCAVRSLLRHRENLVRHAASHVQEMQKSLTQMNLQLHNVISDITGKSGLAILDHILAGERDPEELAAYCDIRIKATKETIVKSLVGDYRCEHLFTLRQALGAYRQYQQFIAECDAEIEKLLSQFDSRLDPPAPGEPLPKSTSDKKARGNCLKFQNADMNSEFYRLFGTDLTLVPAFGTLTICTLFGEIGPDLSAFQSEKDFTSWLGLCPGNKITGGKVISSKTKHVTSRAARAFRMAAQSLWHSHSFLGDYHRRMCARLGKTEAVTATAHKLARIFYHLVTTREQYDESIFAREQAKMQERKERRLRREADRMGFNLVPRAEVT

SEQ ID NO: 57593 - protein, 415 aa, unidentified
MRMETGSKGRIDTRKENIIYVGIDLHKETHTAVMLDCWNQKLGEITFDNKPSVFHKLTRKVSRFVTKEKTAVYGLKNAYGYGRALAVWLLEKGCAVKDVNTALSYAQRKSVPMYQKNDSYDAEAVALVLINMLDKLPDAVPDDAYWTLGQLVNRRDNICSHQQRLKKQLHEQLCVAYPSYKGFFGDISRATALYFRLNYPSPEHLRGKTAEELASELRPISHNNCSIKRAEKILERVRTDGQTAREHQASRDAITRSIAGDLEHYREQLKIVESAIDTMLPSFRCTLMTMPGVDVTTAANMLSEIGDIHRFPNADKLAKFTGICPINLSSAGKGKDMCPKQGNRRLQSIFYFMAIQMIQVSTNGTPRNKVFREYYLKRVAEGKNKQQVLICIARRLVNIVYGMLKNHTEYREPEQ

SEQ ID NO: 57594 - protein, 451 aa, unidentified
MSRPQVIDDEEHERVHDRVAAVDVAKDSGMVCTRIPHPSRPGARRSMVWTVKARMGAIRTLGRQLKRDGIEVVTLESTSDYWRIWFFVLEACGLAVQLVNAAQAKNLPGRPKTDKLDAQWLARLTEMGLLRASFVPPRAIRVLRDYTRARTRLVQERTRCYQRLEKLLESALVKLSSVASKLTTESAKDMIKAMIAGQRDPGVLAGLARTSMKAKHDDLVEALDGMFDDHHGELARLLLDQIAFLDERITQLTARITAAVAAMPEAWGIDADGTTGPDAGTGPDAAVLPAAARLAEIPGISEDLARSIIAETGLDMSRFLDAAHLVSWAGLCPSARQSGPRTRSGKKGQGNGYLRGALGQAAIGAARTDTFLGERYWRIARRRGKAKAQVAVARSILVIIWHLLADPEARYTDLGYGYYQARTDKDRRVRNHIRQIEALLGHPITITSKAA

SEQ ID NO: 57595 - protein, 426 aa, unidentified
METQWFVGVDWATQAHQVCVLDAQGGRVGERSVAHSGTGLEELCQWLLEISGGEAAQVHVGIEVPHGAVVETLLERGFAVFAINPKQLDRFRDRFTVAGAKDDRRDAYVLADSLRTDAGCFRRLVVDQPLVIELREWSRMAEDLQQERTRLSNRLRDQLRRYYPQCFAITDDVAAPWFLDLWALVPTPADAGRGRADRVTRLLRRHRIRRIDAAAILTHLRSPALVVATGTTAAATAHIRILSARLRLVQQQLTDCHAQLDVLCARLDAEAEPPAGEHDEQRDGAILRSLPGVGRIVLATLLAEASQPLAARDYHALRALSGVAPVTRQSGRRCVVVMRKACQLRLRTAVYHWARVASQCDPPTRARYRALRARGHSHGRALRSVADRLLRIACAMLRAGTLYDAERAAARPMPGHAEPMIASHGG

SEQ ID NO: 57596 - protein, 312 aa, unidentified
MSHPVYVGLDVSKQHLDLAFVPAQPPQRVPHTDDAITGLVTQLRELGPALIVLEATGGYETDVATALALAGLPVALINPRHVRDFARALGRLAKTDAIDAQVLALFAERVRPAPRPLPDEAHQALAALVTRRRQLVEMLTTERLRLPLANGPIRRDVQAHIHWLEQRVHETNKDLRAALKTSPLWQATTRLLQSVPGIGPTTAAVLIAELPELGHLSRRQLGALVGVAPFNHDSGHYRGVRRIWGGRAHVRRALYMATLVATRFNPVIRDFYQHLLALGKPKLVALVACMRKLLTILNAMIKTQREWAPAHP

SEQ ID NO: 57597 - protein, 363 aa, unidentified
MSNVLMVGADVHDESIRVRYATGVADPTGKSFGGNRKSRESMIQFLRHEAERLGVQKIVVAYEASSAGYLLWDELKAAGIECHVLAPTKIKTSVEERKKKTDDKDALRIFEALKNHVVAKSKLPSIWIPDEETRDAREIVRCRADWGHKITAVKCEIQSLLKRQGLEKPGGMESNWTQAHRIWVKGHVEEGAKLLKEGVRQVLKSLMRELEFLEQEALELDRGVAEKAELPRYRKAVDALDAMTGIRVLTAMIFLTELGNMGRFKNRRNVGGILGLVPSSNESGAANDRKGHITRLGSGRLRRALCQAVWCRIRSDSGPDRAFYEKVVARNPKKKMIAVVACMRRLGVKMWHVASSVQQKKTA

SEQ ID NO: 57598 - protein, 336 aa, unidentified
MLYVGLDVHSRQSSLCILNAGGGTVNQIQVNGPRAAVVERLRKLSEPFSVCYEASIGYGQLYESLRPLAAHVAVAHPGKLRLIYGDKRKNDRVDAAKLAKLLLLDMVPRVHVPGVDVRAWRSLITFRQRVLQQLVRAKNQIRGVLRENDLAGPKWLWSKKQLAWLESLPLHPVARLKLDLAVEELTSVTAKIKRVEKALQAYADRHPAVKLLMTIPGVGIRTAETFVAWVDDMTRFRRTRQLGAYFGLVPCQDASADRNRLGHITRDGPPVMRKLATEAAWTAVKKCPAFRAYFERIVAGKPERRKIAIVATSHRLIRIMGAMMRDGTAYDANYKG

SEQ ID NO: 57599 - protein, 337 aa, unidentified
MEQQQQYVGIDLHRRRSVIVRRNEAGQTLDTVRIDNHPVALAAELAKAGEHPEVILEATYGWYWAADVLEECGAKVHLAHPLGNNWGHRRVKNDERDATDLVDLLRLGRLAEAWIAPPPLRELRELIRYRGKLVHLRTSLKSQVHAVLAKEGVTVPMSDLFGVGGQVLLDEVRLADAYRVRVESLRKLIEHVNREITMLEAQTAPYFAGDLGYHAVQAIPGVGPVLAAIFVAEIGDISRFTSARHLCSWAGLTPTHHESDEKVRRGHITKQGSRLVRWAAVEAVARQRADTPIRRHHHSVGERRGTQIGRVAAARKLLILVYYGLRDGEIRCLAETG

SEQ ID NO: 57600 - protein, 343 aa, unidentified
MQIHSVGIDLGKTIFHLVALGAAGKVLLKKKFTQRQLITFTANLQTTLIGLEACAGAHFLGRALREQGHDVKLIPAQFVRPFVKSNKNDFLDAEAIAEAVDRQNMRFVPIKTDDQLDLQALHRVRDRLITRRTSVINQLRAFLLERGLVFAKSPAKLRERMPEILENAEQGLTPRVRNLLALLWNEWKGLEQQVVDLNHEVELIASSDAACLRLRQIPGIGPLVATAIVASIGNGAAFHKGREFAAWMGLVPKQYSTGGKAKLSGISKRGNRYLRKILIHGARAMVLRCKRERIPMGAWMTALETRAPRNVLIVAAANKLARIAWAVLSSGQDYRAVQEPFAA

SEQ ID NO: 57601 - protein, 413 aa, unidentified
MEILHTRCAGLDVHKKVVVATILVSDEHGQLTKETRSFETMTASLLALSDWLTGFGITHAAMESTGEYWKPIFNILEENFEILLVNAQHIKAVPGRKTDVKDSEWIADLLRYGLLKASFVPPKGQRELRDLTRFRTTFIKERATLINRVQKALEGANIKLASVVTNIEGVSGRAILDAIIEGKATPEAMAELAKGRLRTKRDALEQALAGRVQAHHRFILQELLCQIDSLDETIERFDTEIQDYCRPFDVAIEHLDTIPGVARETAEVIVSEIGVDMSRFPTANHLASWAGVAPGNYESAGKRLSGRTTKGNQALATALTQAAWAASHTKNTYLSAQYHRIASRRGRKKAIVAVAHSILIIAYHLIMDKQTYQDLGGNYFDRRNSEATAKRLVQRLEKLGYKINLDRPIAVAA

SEQ ID NO: 57602 - protein, 340 aa, unidentified
MHTTIIGLDIAKSVFQLHAEDASGKVLWKKRLRREELEPFLRKLPPGLIGMEACGSAHHWGRVISADGHEVRLMHAKYVKAYVKRGKSDVRDAEAICEAVQRPNMRFVPIKSVEQQIDRSLERARDLLVKRRTQLMNATRGLLAEFGVIARVGLRGFKTLSDKVDAGDAAIPKPLLTAVKPLLEQWRGLHASIDELEERLVKRARSDERMRRLMKIPGVGPFTAHALVTAIGDPRRFSTGRDFAAWAGLTPLTDSSAEKTRIGHISRQGDHSLRRLLVLGAANMARHAKAKPSEARAWLLGIIGRRPVKVAMVAQAAKTARIAWALLRSGENYRASTAVA

SEQ ID NO: 57603 - protein, 341 aa, unidentified
MSDYSYFCGIDLAKNHFSLHAVDKNGKVILHKSVTRSKLLTTLANMPLMRIGVEACGGAHYWARTLNKLGHDTRIMAVKYVIPYRTKGKNDLNDAVAICEAVQRPSTRFVPVKSPEQQAILSVHRMREHWVREHTALMNRMRALLSEFGLVIPVGRSSLMKSVPLMLEDAENELPHLARSVIADAYHHLDELNQRISDTEQIFDSFAKVSDNVQRVMKVRGIGPQTATAILASIGNGSQFDKSRDFSAWLGLVPKQYSTGGKPRLGRITKHGDKYLRTLLVHGARTVIANLGDKQDRLSQWCRGVLERRGMNRAIVALAAKNARIIWSLLHNQTEYENYAA

SEQ ID NO: 57604 - protein, 333 aa, unidentified
MSSVTVFVGLDYHQAFVQACIMDAEGRVLSNRKCANSAAALLEAVEPYGPLVAAAIESCCGAADLAEELVAGGWQVSLAHAGYVHKVKQSPDKTDWSDARLLADLLRVGYLPKVWLPPAGLRQLRHVVRHRQQLAQARRNAKLRVTALLRAERVEFTGSRWTKSWIQAVRTGAALGEQGRWVVNQLLDEIDHLQRRIAVVEERLEALTADDPFVAALRNLNGIGLVTAVTLRAELGTMSRFRSGKQVARFCGLTPRNASSGLKQADAGLIKAGNAALRALLIEAAHRLMRHDPRWHQLGLTLRLRGKPGSVAAAAVANRWVRWLYHQLLPLAA

SEQ ID NO: 57605 - protein, 299 aa, unidentified
MNVPGKTVLKPLTFSNNKAGFELLDLSFRQLNQDCLIALEDTGHYAFNLLNFLHEQGYKVYTYTPLLIKEFAKSLSLRKTKTDKKDAHGIALKLLSDPNREQFQHDNRQIELKILARHIHRLKKKQSDWKVQYTRCLDIIFPELDKIVGKHSEYTYQLLTRYPNPQKRLEAGFDKLIEIKRLTASKIQDILSVAPRSIGTTSPAREFEIIEIIKHYKRLIDKAETCVNDLMAEFNSVITTVTGIGGRLGAVILAEIRNIHAFDNPAQLQAFAGLDSSIYQSDQIDLAGRMVKRSSPHLR

SEQ ID NO: 57606 - protein, 469 aa, unidentified
MRMPSSSAWWPLSRSISTFSRRSSESGLAPAQCREFVAWLQVAFGASPSRAYDPARLSRAQYHYRSRRRDPAALRLRIRELACMLKPDQRGKVGGPRRPSDWTVQPENSLGPDEPVPEYIAHGPRAGLREARTVYRAVSAQRQAGEAKTMSEQPVVVGIDVAKAHVDVAVLGAPTAAGRFDNDGAGHMALIEALSPLAAALVVMEATGGYEAPLACSLQAAGLAVAVVNPRQARDFARSFGQLAKTDRIDAAGLAEFAAALLGRPDLGRYLKPLATAEQQDLVALVNRRRQLLTMLGMEEQRLAAARPAVRRSIQTLIRAIRKQLDEVDGTMARHVTKHFTELGELLRSASGIGPVASATLIADLPELGHLSRRQVCALVGVAPFACESGSMRGRRRIRGGRFELRRTLYMATLAAITHNPVIRAHYRRLLAAGKLKKVALVACMRKLLTILNAMARTHTPFQIDHRSA

SEQ ID NO: 57607 - protein, 336 aa, unidentified
MKVTLIGIDLAKTIFQICGVNQAGKAAFNRQIRRPKLLDALRRYPDASIAMEACSGSNYWGRELKRLGFKVMLIPPQHVKPFVKGNKNDRNDAFAICEAARRPRMTTVEPRSLSQTDTMVIHRIRERQIGMRTAVINQIRGLLNEYGIVVAQGKIRLQTELPYLLEDAENELTPMARHYLQHAFQEWQFLDQSIAELDRDIAAQVKQDDQARRLLQIRGVGPMIASATSALAGRGTCYRNGRHFAANLGLVPREQSSGGKQKLGRITRRGNQYLRKLLVQGAWSVIRYAHRNEDRVSRWARQLIERRGKQVAAVAVANKLARIIWAMSYHQSEYRP

SEQ ID NO: 57608 - protein, 405 aa, unidentified
MNAVGIDVSKSKSTVTIRRPGDEVLMPPCDIPHTQSAINALIEQIKSLDGETKVCMEHTGRYYEPVANWLSDAGIFVSAVNPILIRDFGDDSLRAPKTDKADSKKIARYALDRWAKLKQYGSMDKTRNQLKTMNRQFGFYMDQKTAMKNNLISLLDQAYPGANDFFDSPARSDGSQKWVDFVYTYWHVDCVRGKSLQAFTEHYQKWCKRNGYNFSASKAEKIYQNSSDLIAVFPKDDSTKTLIRQAVTMLNTASQTVEALRLEMDQTASSLPEYPVVMAMNGVGPSLGPQLMAEIGDVTRFTHREALTAFAGVDPGKNDSGKHNQKSVRTSKKGSPSLRKTLFQIMDGLIKRSPIDDPVYAFMDKKRSEGKPYYVYMTAGANKFLRIYYGRVREYLASLGESKES

SEQ ID NO: 57609 - protein, 365 aa, unidentified
MNANAALPVVGIDVANTVFQLAVADGTWRVTEEHRLTRSQMERWFANRAVGLVVMEACGSAHHWGRWLNALGIEVRLLPALYVRAYVKRNKTDAADACALLEAARCADITPVKVKSIEQQALQGLHRTRSLWMATRTSRINALRGFCREFGIVIAPGARLGVERIARVLADPHSDVPELIRGTMKLLIEEIRLLEARVAQLERELTVVARTSGACTRLLTIPGVGLLTATAMVAATSGSVQHFRDARHFASWFGLTPKEHSSGELRRLGRISKRGDRYLRMLLTHGARSVLHAADRAVQAGRNIDPLRQWALTVQARTNHNKAACALANKLARICYATLRDAQSYGEPVRRPNKKIERTSFELAS

SEQ ID NO: 57610 - protein, 334 aa, unidentified
MQNITLIGIDLGKHSFHIHCQDKSGKALLRKKFTRTKLMQFLATCPPSVVVMEACAGAHFMALCISDFGHETKLISPQFVRPFVKSNKNDFVDAEAICEAASRPSMRFVQPRTETQQAMRALHRVRESLIRDKVKTTNQIHGFLLEFGISLPIGDAVIKRLSLVLAEHEIPEYLSRLLVRLHTHYFYLVEQIAELESELSQSINADDTAQRIMTIPGVGPITASLLSSQLGDGKQFSCSRDFAASTGLVPRQYSTGGKSTLLGISKRGDKNLRRLLVQCARSFIMRLERKHGKLAEWVREQLNKKHSNVVTCALANKLARIAWAITTQKKEYQA

SEQ ID NO: 57611 - protein, 416 aa, unidentified
MNAVGIDVSSRKSTVAVLRPLGEVVCLPFDVTHDIAGLASLVEKLKALDGETRVVMEHTGRYYEAVEKALHEAGLFVCAVNPLLIKEYGANSLRRVKTDKADAVKIARYALDNWADLRDFTPMDAIRYDLKTLNRQFQLASKQRTASANNLIALLEQSFPGIRKCFDSPVRSDGTQKWVDFAHSFWHVDCVRKQPFPAFCERYRKWCKRHAYLFKLSNAEEVYALAKRAVVLTPKSKVVKVLVQEAANQLISISRSVEVYRAEMDRLAAMLPEYPVVMAMYGVGKSYGPQLMAEIGDVRRFERKQALVAFAGIDPMPNQSGDKNVRSNKSSKRGSPYLRKTLFNVIRTYLQCAPQDEPVFQFLNRKRAEGKPFYVYMLAAANKFLRRYYAKLRDYFASLDTLQPVASIPTILKAAL

SEQ ID NO: 57612 - protein, 410 aa, unidentified
MLGVGIDWSEDFHVAALAGPDDVTFTLRRVDHNPFALEAFIAQLHALEPEPTLVRVVLETSHGVLVRRLIEAGFTVMPVNPDLVARRRNSARKKDDSEDARIACRMALDIREGLRPLVPHSPDAAELQALARDDARLGRDERRLTNRLRADLIAVYPAAVAIAAGEYGRLTFLRMLERWPSQDQLVPVSDDELLEFAKACGNRWRKRWAQRVRVALDTEQFVVPEHLMRAKAGTIRFNAGRLLALHTERQRLARRIEEIFGGDEDRAPFPGSEIYLSFPGLGLLLAARVAGEIGQNIEVFAVPAALKAYAGKAPVTRKSGKSEHIIEHRQAHNHALGDAAQTWAFCSLSCSSWARDYYAAQRGRGKSHHGALRALANRWLGILWHCLTTAQHYDENIHVANRERMQPRAA

SEQ ID NO: 57613 - protein, 342 aa, unidentified
MTRYVPIDLHRQRSVVMQMTAEGEVLEWVRLANEPEALVAEVTKHTDEPIEVAIEATYGWYWAVDALQAAGVSVHLAAPSRLSAFEGRRVKNDQLDCQILGDLLRANMLPEAWISTPDVRHQRELVRYRAKLVGLRSGLKAQVHAVIAKRGLAVPMTDLFGKGGRELLAHLLETDPWFHSAYGERVESLLVLITTFDAEIEGLNHSITHVFREHAGYWAIQEIPGIGPVLAAIFVAEIGPVDRFTSAGHLTSWCGLTPRHRESDTTVHRGRITKQGNRLVRWAAIEAAQKLRRDSWLYDQREALAERRNSRPVAKVAAARKIVTLVYYGLRDGHIRCLQPVA

SEQ ID NO: 57614 - protein, 348 aa, unidentified
MLHAGLDLSRKRLDYCLLTEDGERVGIGAAPPDADGLVSFARRVERDHGVVEVRAAIESMNGARFVHDALERCGWEVEVADAVKVKGLAPLACKTDKIDAWVLAELSRRELVPAIWLPSFELRGERERARWRLFLVRKRSSLKHRVHAQLLAFGHACPVSDLFGRSGRELLGRLEFPEPWRSGVLAAVGMIEDLDAQITEIDRELKAAGADHRYIPLLMSAPGIAWVLGYTIAAEIGDINRFASPTKLCGYTGLCPKTYQSGSKDRRGHLTHAGPKYLRWALIEAAQHAGRHPLYRERYLQTKRRLGKQRGAKVAQVDIARRLAEAIWHMLTRNQPFAPAGATSALAA

SEQ ID NO: 57615 - protein, 394 aa, unidentified
MTATRTPVIDQKTPALYLAFELGWSEWKLAFAAAPADAPRLRGIGARNTQTLLKEITQAKKRFGLPEDAPVRSCYEAGRDGFWLHRYLLAQGIANSVVDSASIEVQRRGRRRKTDRLDAAKLLNMLQRWHGGEQKVWSVVQVPGADDEDRRQLHRDLVELKAERTQHVNRLKGLLAGCGLALAQVNETFPEVLAGLRTWDGRPVPPALQQRLLREHERWRFVGRQIKDVENERDRTIRKSEEPPVSKVRQLLNLRGIGVNSAWLYVMEFFSWRQIRNRKQLGSLAGLTPTPYQSGDSAGEQGISKAGNRRLRAMAVEIAWCWLQYQPDSALSAWYQQRFAKGSSRQRRIGIVALARKLLVALWRYLEVGEVPKGATVVDWKTKYRGRKQAAAAV

SEQ ID NO: 57616 - protein, 427 aa, unidentified
MEVIHPRCAGIDVSKRDAKVCVRIQGRGRKATSSTVTTWTSMTSSILALRQHLIAEQVTCVVMESTAAYWKPFYFLLDDALNVMLVNARHARNVPGRKTDVSDAAWLAELGAHGLVRASFVPPEPIRVLRDLTRARTTIAQARTKEIGRLETLLEDAGIKLSSVACEITGVSGRAMLEALIAGQRDPAVLADLAKRQLRKKIPELTEALQGRFNDHHAFMVRLYLDRIDAHEADITLLDARIEEAIAPFRATRELLVSIPGWSQVVADVFIAETGADMNVFPTPGQLASWAGVTPSCNESAGRVKSAKTLPGNRHLKAALGIAALSASRSTNTYFGARFRRIAGRRPARSGTKKSRRQSAAGQTAIVALEHKMLTCAWHMLVNGTFYQDPGPDYYTRHRPAKTKARAIQQLQALGYNVTLEPHTDAA

SEQ ID NO: 57617 - protein, 436 aa, unidentified
MFVGHRFRTDPDELDTLWARLPKDAERIEVVMEPTRNAWVALAAWFRRHGATVVMVPPEQSADLRDYYNKHTKTDRLDSKVLARLPLLHPEGLHREDSLGPGDELKRAVKIRSGLVHRRTACMARLDALLEILGPAWIAALGSDMTLTALRFLARYANPVQVKRLGKARLAAFFRRSSRQAWADERADAVIEAAATTLRLWGADGGELDFDALAADVAAEARLALTLTDEINGFDKRIGALYDKADPAGIVRSVPGAGRVCAPQILGRLGDPTRFANLAAVRSFAGLVPAADSSGQADGHRGPTKAGDCCLREALFIAADHARKVDPTLAVRYQRLMLAGKHHDSAVCTLAAVLLTRIAACLRAGTHYLVRDTDGRVITEAQGRAIVAERYTVPPEVRAARRKVTPHRHPRRNERNERAKTGVATRSKASPVPQPA

SEQ ID NO: 57618 - protein, 412 aa, unidentified
MQVVHPVCCGIDVHAKMLVACLILANGEKKKRTFSTMTAELLQLRDWLVAVQCTQVAIESTGVYWKPVFNILEDALTVILINPEHAHALRGRKTDVKDAEWLADLLRHGLLRPSFIPPPVIRELRELTRYRESVVREQSSVANRIQKLLESGNLKLGQVASDALGVSGRMILKALAKGESDPRKLAALARGKLKEKSLSLEQALQGRLTVNQRFVLGELLRRWEQLEAADARVTSEIDKYVQANPKLARARELLDSIPGIGPRVAEVIMAEIGIEMASVFADAAHLASWAGICPGNKATGGKRLSGRTRKGNTYLRSALVQAAWGASLKKHCYLSSQFQRLVKRLGRKKALVAVAHSLLVIIFHVLQNDQTYTELGGDYFDRRHVEQQRDYYVRRLQMLGLKVTLEELPQAA

SEQ ID NO: 57619 - protein, 387 aa, unidentified
MTKNKGRVVGLDVHPDSFAGAVVQGSDPASAVVSSTSTRVELEQLEHWALRHTSTEDTLVLEASGNAFAVAARLRAIGREVEILDSHRAGKVGKVYCANDRVDAVKIARIYLSALSPIVWQPDQKTLERREIFSAYQAVVKESTRARQQLRSMLNEHCVRLEKGFRLCHPQAIRRLLALREWTPARRMLLQQLHGSLVAARVRRTMLRRHMAQEIVAEEALLRLTRLCGINLITLYGVAAAVGDVRRFTHSKKLVAYLGLNPSVSQSGNFQGSGALKRHGRGALRALLIQSGKKLLEVNNPLQKWGLAVAARRGRNKAAVAVARKLCVALWHVMMGHAIGTLERLDTLQTKLSKFATEIGPAALIAFGYNNKADFVEKKLYVLRSYP

SEQ ID NO: 57620 - protein, 338 aa, unidentified
MDHYVGIDLHSTNSYIVIIDNDNKRVFKKKTKNDLRLVVEALKPYQEQIKGVVVESTYNWYWLVDGLIEEGYTIHLAHPSAIKQYEGLKHSDDVTDAFYLADLLRLGILRTGYIYPKEERPVRDLLRKRLQLVQQRTLQILSFQNLVARNLGKSMNGNAVKKLSEDDGEHPFHDKHLVVSGKASISTILFLTEKIKQLEKTIHKVAKLKDEYTLLMTVPGIQKILALTIMYETGPIERFRKVGNYASYCRCVGSKRISNAKVKGKGNRRNGNKHLSRAYVEAAHHAMWHYEYVQRYYQKKMVKTNTLVARKTIAHKLARACYYIIRDQTVFDPKRVFV

SEQ ID NO: 57621 - protein, 353 aa, unidentified
MSKILAIDLGKNNSAVCIFDRSSLKCKYKTPRTRKQVMHDLFVDFADQIEIVLFETGSQMGWVADILWALNIPFKVANTNHVAWKWKNNPNKSDRKDAQRLAMMYHTGFFPTVHVPKREVRQKRSLINYRDDVVKRITKIKNSIRAILGREDIHLPSGKKGWTIKALSPIREMAIPLKEIENLKELWKGHLNSELNQLDEINEELKAVESKLNALGEADEKIKLLRTIQGVGPRLSEAVVAIIDDPHRFKNGRHVSSYVGMVPRRWQSGQVDITGRISKCGNKLLRTLLVEVSWLGLREPWMREIYNKIKRGDKKRSKVAIVALARKLLVICWAMLKNGTTFDVDYAKRFAKC

SEQ ID NO: 57622 - protein, 340 aa, unidentified
MSHTTYAVDIAKRIFQVHWVDAETGEMHSRPLRRGQVTGFFANRPASTIALEACGSGHYWARTLGALGHEVRLLHPKYIRPFVRTNKTDAADAEAIWTAAHQPGIRPVAVKSEEQQAMLGLHRMREQLVKFRTMQVNQVRGLLNEFGFVFRNGRRAGLAEIRAALAELEDRVPGVLMTSVHAQLARLEIIDRDVAAIERQMQSWQRRESDCQRLAAIPGIGPITATALVASIGNARAFRSGREFASFLGLVPRQSGTGGRVKLLGISKRGDGYLRKLLVHGARTVLFRSKTVSPWMSGLLKRRHRNVATVALANKMARIAWALMAHARSYRADWQLASAA

SEQ ID NO: 57623 - protein, 476 aa, unidentified
MHIWTGSQGQIQSRRKPMSRKRKSNPKSDQKTGAALLSCLNLNAAGVDIGATEIYIAVPGDRDPQPVRCFSTFTEDLHAAAAWLKACQIETVAMESTGVYWIPLFQILEARGFKVFLVNAHHVKNVPGRKSDVSDCQWLQYLHSVGLLRGSFRPEQAVCSVRSILRHRDSLVQMASSHVQHMQKALDQMNLQLHHVISDITGRTGIAILEAILAGERNPHTLAALRDRRIKASADTIAKALVGDYRREHVFTLRQSLAAFRHYQELIAACDREIAQSLEEFESKLDPPVDPPPVSPSPSNDGSKPKASEPSFDLQTHLHRIFGVDLTQIPGINVLTAQTLLAEIGPDFSRFPSGPELASWLGLCPDNRISGGKVLSVKTRKVKNRAATALRMAAQSLHRSQSFLGLFYRRMRTKLGAPKAITATAHKLARILYHMVTTGHAYDETICAQNEVQNRHRMEARLRKQARELGLQLVAI

SEQ ID NO: 57624 - protein, 338 aa, unidentified
MNSVTILGIDIGKNSFHLHGQDAQGHQVLRKKLNRSQLLPLLAQIPPCKVAMESCGGSQFLAREITKLGHQVQLIAPQHVKAYVTGNKNDFIDAEAICEAASRPRTRSVQVKSVDQQVLSTVHKLRKSLVSRRTGVINQVHGFLLEFGVIFPAGYAALDRVPVLMEEHNLPLRLRQAINRMLDDIRQLTSEIKALDIEIKQQVNGSDAGKRLQSIPGIGPLIASALVADVGDASMYKSSRDFSASLGLVPRQYSTGGQTTLLGISKRGDRYLRTLLMQGAQTLLYRFDKRNDALGVWARSLLARKPLNKVACALANKMARIVWALLTKGGTYNGHFTA

SEQ ID NO: 57625 - protein, 419 aa, unidentified
MNNINPIHPRMTRTYCGVDSHKDSHTIAFLNCFHEKLGEITIGSAPSEFGKFIKRAKKYLQPNTTFAFAFEDVSAYGRAFVKYLVEKGYLVKHADASKVATERGQVLHKTDSYDAECCARVLINQFNKLPDANPQDKFWVITNLVTRRNAIVKINVMVKNSLHAAIADSYPHYKKFFSRIITDSALAFYEAFPSPHHLESVTMEQLAAFLHTASKGRLSSTKSETILKHVQRDKVQKSEFQDVQDFNVRSLIRQVKNNLDELTFIDVEIEKILTHFDYPLTTIKGINSLTAAKLIAEIGDIKRFKNAKALAKYSGVSPVMYASGMTSLQMANARGNRKLNEIFFKIALQSITPIGKNNALLNPIFYTYFHKKISEGKTKNQAIKAVQRRLVNIIFSVMKYNRSYENPEIIYLPKDTASA

SEQ ID NO: 57626 - protein, 367 aa, unidentified
MFIERTSVGLDVHARSVRAAVIDTATGEVIERRLSPEPAAVLGFVTEVAGVHGPVAVTYEAGPTGYGLARALLAAGYRCQVAAPSKLLRPGGDRVKTDAKDAMLLARLARNDDIVAVTIPTVAQESARDLVRARDDARTTLMAARHRLSKLLLRHGLVYDGEAWTGRHDAWLRRVRKEHLLGSGTGMVAAFDDGYDATVHALARRDRLDAVIHAMAADSEFTPVTRRVCCLRGISTTTGFALAVEIGDWDRLTGASIGAYLGLVPSEHSSGGSRSQGGITKTGNSHARRLLIEAAWHHKPLYRPGKTIQDRWALAPAAAAARGDAGNRRLHHRWAVLAAHRKRHTVANTAIARELAGWCWSLAVMDQ

SEQ ID NO: 57627 - protein, 470 aa, unidentified
MTPRYHNQGCRPSARARLRVTHPHAAGIDVHATVHWVAVPAQDAPAPPPDHPPNLPPHVRSFGACTADLIALADWLTICRIRTVVMESTGIYWIPLFELLESRGFAVLLVEPRQSRHAPGRPKSDVLDCQWLQRLHSYGLLSGSFRPAEQIVVLRSYLRQRQMLIRHAGQHVQHMQKAMEQMNVKLTEVVSDVSGVTGMAIIRAILKGERNPLELAKLRNDKCKRTQAEIARALYGNWRAEHLFALQQAVTLYDCYREQLRVCDEQMQKYLATFADRSQGRPRPRRHGRARRERRRNDPAFDVAGVLFRMSGVDLTVLEGIDPNTALVLMSEIGPDVSRFPTVKHFCSWLGLSPQHQLSAGKIRKRRVQRGASRAGRALRLAAQACHHAQNVLGAFYRRIQARAGAPKAIVATAHKLAERVYRLLKHGSEYVCQDLEAYEAAYRQRVVKGLARKAATLGYRLEPTTATGT

SEQ ID NO: 57628 - protein, 411 aa, unidentified
MDKIYDKCCGIDVHKKLIVACFRYGRKQEVREFGATTRELLSLTDWLKEGGCEMVAMESTASYWKPLYNILESSDLNAMVVNARHMKAVPGRKTDVKDAEWIADLLQHGLLQPSYIPGKDQRELRELVRYRKSLVGERTRELNRLQKMLEGANIKLSGTVSDINGKSARSILEYLLTGESIDEAKYDEMYKRKVIAHNLKATKEQIIDDLNGVMSSLQRRMMKELLIHLDELNIHIRNLDDEIDNFMKPEEKQASQAIQDVTGIGNTSAQAIISVIGTDMKRFPTDKHISSWAGLCPGDNESAKKRKSGKTRKGNSLLRTTLITCAHAAVKNKKSYFHAQFMRISAHRGTKRAYVAVAHSMLIAIYHILKDGVVFKDLGADYYNQFNKERKIAAYLKKLKALGWEAPVVAA

SEQ ID NO: 57629 - protein, 349 aa, unidentified
MSDGIAVGRQFVGVDLHLHRSVIGRIDEQGQQLGWVRIDNDPKALVAECRKAGRGAPVAIEATYGWYWAVDALVAAKFDVHLAHPYGMKAMRKRKRVKTDWRDAYELANLLRLGSLPEGYISPPELRELRELVRHRQQLVKLATSLKAGVRALLAKHNIRLAARQLDGDAAIAVMDQLQLPGTYATRLAAQRRLLLALSEEIAAVEVELARRLKDHPGYRRLLTIGGIGPTLAAIFIAEIGDINRFHDAAALCCWAGITPRHYESDRTVRRGHISKEGNSLVRWAAVEAVQRNCEPAIKAVREGILARRGKDARNTAKVAAARVLLEAIFHVLRDGYSHRLNNEWHAIA

SEQ ID NO: 57630 - protein, 335 aa, unidentified
MKEITTVGVDLAKSVFTVHGVDAMGRVVLRKTVRREQLVELIAGLPPCLIGMEACGGAHEWGRKFQIYGHRVGIMMARFVTPYRKSSKNDGNDAEAICEAVARPNMRFVPVKSAEQQAILSLHRVRQGFIEQRTATINRIRGLLAEFGVVLPQRAEQVRRAAVVMAEGLPVLAREAIADLRAHLTYLDERITRYERQLVSLARQREAAVRIQRLPGVGPLTASAITASISDGHEFANGRQFAAWLGLVPRQYSTGGKARLGRITKRGDPYLRTLLMLGARAVLQSAGPKTDRLSRWALALRARRGYHRAIIAVAAKNARIIWSLLANNREFVLPV

SEQ ID NO: 57631 - protein, 378 aa, unidentified
MTAVLQQKDNTMSHVLYLTFELSNKKWKLGFSNGQKKRIRTLQAGDWPTLLAEIKQAKARLNCTEDSTVVSCYEAGRDGFWIHRALVAEQIKSHVIDSASIEVNRRKRRVKTDKIDVAAMLRLLMRFMSGEKEALNTIRVPTVLEEDQRRLNRERDRLIKERGAHSARIKSLLIAHGIRLEKMSDLPRLLATAKAAVIGYDLPEDLKSELMREYERYDLVAQQIKKQEQLQIDRAESQDIPAMKHIQHLRSLKGVGWQSSWVLTMEFFNWREFKNARQLGACAGLTPIPYDSGDSIKEQGISKAGNKRIRKLMVELSWLWLRYQPASHLSQWFNRRFAQGGKRMRRIGIVALARKLLIALWRYLDQGVLPEGAILKIV

SEQ ID NO: 57632 - protein, 332 aa, unidentified
MNSHSCPEHWAGELAFPGRGARNDKPESMTTLSYLGIDVCKAHLDVAGTDPRSQRYANTPAAITAWLKTLPPNVHLVVEATGGYERALVSACHQAALPISVLNPARVRAFARAGGRLAKTDALDATVLRDFGAALQPAAHPPPDPTRRQLAELVNARDQLVALRTQLTNAQEHLTLGLLRRNFAAQVRSLSTRIARIEEAITACIQSSPALLVRATELRSHHGVGPQTTATLLAHLPELGQANRAQIAALAGLAPFNRDSGQSHGPRFTSGGRPRVRRALYLATLSAIRSQSPIASFYHHLRSAGKPAKVALIASARKLLCFLNSSLKPLPA

SEQ ID NO: 57633 - protein, 351 aa, unidentified
MSAAYAGRQFVGVDLHRRRSVIVRMAESGERLETVRIVNDPERLAAVMTRAGEAPEVVLEATYGWYWAADALAELGAHVHLAHPLGVKAFEYRRVKNDERDAADLADLLRMGRLPEAWIAPPATRELRELVRHRAKLVALRAHCKAQVHAVLAKCGVPVPMSDLFGLEGLALLERVTLPGVYRARVASLRRLIEALEFEIELFAGMARARLARDPGYTAIRTIPGIGGVLAAVFVAEIGEVSRFPDPTRLASWAGLTPRHRESDTHVHRGPITKQGSRLVRWAAVESVQVLPAHTRIGAIRERVAARRGRNIGVVAAAREQLELVYYGLRDHTVRAPLHRPPAAPARTAAA

SEQ ID NO: 57634 - protein, 359 aa, unidentified
MDATTVAVDLAKNVFELVAADQHWKVVERARLTRTQFQRWFGNRDVSLVVMEACGSAHHWARVLQQQGIQVRLLPPRYVRAYVKRNKTDAADAAALLEAVRCADIVPVRIKSVEQQALQSLHRVRSAWVATRTARINTLRGLCREFGILISAGARLGDEQISRVLVDPHSNVPAMLRETLKLLVEEIRLLEVRIAQLERELSEAAKLSPACCTLLTVPGVGLLTATALVASTGGSVQHFKDARHFASWFGLTPKEHSSGSSRYLGRISKRGDRYLRTLLTHGARAVLRAASLAQRRGAGLDPLRRWGLLLQSRSNYNKATCGLANKLARICYASLRDQQPYQSLRLAKKLERQTFPMPA

SEQ ID NO: 57635 - protein, 368 aa, unidentified
MREQQNNRQERTIIGLDLGDRWHRFCVLGESGQVVKEGSVANNRVALSELSSRYPGALVVMEAGCHSPWVSRHLEQAGCEVIVSNPRKTRAIYQHERKSDRRDALMLARIARMEPALLYPVRHGSEEAQQDLLRIKLRDSLVRARVGLINSLRFTLKSLGYTIANPSTERFHKVIQSALPESVVQMIAPSMQAIEELSLRIKLLDREIRTLAHTKYPETSWLEQIPGVGPITALYFVLKIGDPARFERVRDVGAFIGLCPRRDQSGENDPQLRISKRGDAYLRRLLVSSAQYILGPFAPPSALRQYGLALAAGATARAKKRAVVAVARKLAVLLLTLWKNKSSYQTFPQHSSREKMRTNDLERLRCIA

SEQ ID NO: 57636 - protein, 414 aa, unidentified
MDVLHERCVGLDISKKDAKACVRTPSTKRRGSFTTETTTWGSTTNAVLALRDHLLAARVTLVVIEATSDYWKPFYYVLAGELNVILVNARQVKNLPGRKTDVSDAAWLAQLGAHGLVRPSFVPPEPVRELRDLTRARTTATRERSRVVQRLEKLLEDTGIKLSAVASDIMGVSGRAMLEALIRGEADPQVLADLAKRKLRNKIPELTEALTGRFREHHAFLTRLHLDQYDQLTTMIEQLTGRIEEAMAPFRGALDLLDTIPGINRAVAEVIIAETGGDMNRFATAKHLASWAGVCPGHHESAGRTKNTKVRPGNPYLKGALGIAAFGAVRTKDTYLQARYKRLTARRGPLRALVAVEHSIITALWHMLTDNVPYQELGATYYTQRDPERATRRAVNQLNQLGYTVTLNPREAAV

SEQ ID NO: 57637 - protein, 341 aa, unidentified
MSEVSTIGLDLAKRVFQAHGADASGKVVFRKRLRREQVLAFFAGRPACVVAMEACSSAHYWAREIGELGHTVRLIPPAYVKPFVKRQKNDTTDAEAICEAAQRPTMRFVSVKSKAAQANAVVFRVRDLLVRQRTQAINALRGHLGEYGVVVAKGPSHVAKLIAHVEDPAADLPEAARTVLRALTASLQFLSERIDLLDREVARRAREDKEVRRLTTIPGVGPVIATALAALAPPADAFRRGRDFAAWVGLTPSQHSSGGKQKLGATSKMGERTLRRLLIIGASSVVQKAIKHGTRSGSWLGRMLARKPRMLVIVALANKMARTVWALQATGEIYRAPVVAA

SEQ ID NO: 57638 - protein, 269 aa, unidentified
MTNYIGVDVSKDSFDAHGTSLGSRQFSNDGTGFKLFRKWIGVSAHVVMEASGPYYLRLADDLYRTGFLVSVINPLVIRRFCQMNLQRAKTDRKDAIAIAQFAQLTNPSVWSPAPEHLQQLLQMQSVMEQLSKQLTSTRNALEALNQHPHLYESALKSLQQVERVQQQQIVQLEKEIMELTKQHYQAEFDSLVSIPGIGKKTAVLLILSTHGFGRFENVKQFVAYTGIAPRIFQSGKTINKKPKISKLGMADLRRSIFMCALKAIKYNQG

SEQ ID NO: 57639 - protein, 343 aa, unidentified
MEDYDGRQVVGMDLHRRRSVLVRMTEDGRRLGTAKITNSPAALRKEIARAGKHPKVVLEATYGWYWAADVLAAAGAEVHLAHPLGVKAFTCRRVKNDERDGADLADLLRMGRLPEAWIAPAEVRELRELTRCRQKLVHLRTSCKDQVHGVLAKLGVEVTCTDIFGTAGAAWLDGLRLPQPYAGKVTSLRHLAGELSAEIAMLSEVIASLLAGDRGYQVIQQLPGIGPVLAAVITAEIGDITRFRNAGQLCSWAGLTPGPRTPSSPGAGRKPRTSPRSRPPASCSPWSSTGCATGRSAACPSLPATCPSRRPGERHEQPSLAGGQARGRQSFCPAATLAARASP

SEQ ID NO: 57640 - protein, 365 aa, unidentified
MSSVPSAAELIHLGMDTSVKEIVCAVLRPGEEIPVVDRVSSDEESVRRLIGRFADRRLLSACYEAGPGGYELHRLLTSMGVACDVVAPSLIPKGASEKVKTDKRDSVRLALTHRAGLLTPIRVPSPAEEAVRDLVRARGDLLDDRKRMQQRLNAVLLRHGRTWRGAKRAYAHRVWVDRQVFDEPALAEAFALYRGGLDAREAELRAAEARLAAWAGREPLAAPVARLGCYRGIAQLTGLTLAAEVAGWRRFASAPAFMGFAGLIPAEYSSGSRTRRGHITKAGPEGVRTALVEAAWACRYRPAIGATLRRRQAGAPLETLARSWTAQQRLHARYKKMTARGKPAGVAVVAVARELAGFVWAEMTS

SEQ ID NO: 57641 - protein, 409 aa, unidentified
MPERMVYEMIDCEAPVLAFDVSKGCSHCQGFVSFGKPLGRPIKVAHTKSGMAAAEGISKPLEEKTGRRPKVVLEATGVYSKPVIRWAESLGLEVCLISPLESAKVRKSRVRPTKTDALDCGVIAEVAYTRSLRRATPRSSLYSQLYSLSRRRAAIADRLVASKNQYRKSLDCVWPLLDEACDPFSGYAMWAVGKYRHPERLAKAKAESIAKAMGGAGIRVGRASKQAAASKLIAYAKDALSGCSPNDGEVDALMSAMSDVRRDMEALDEATERLIALAKELPHFAQILSIDGTGDVLAALLCAEIGEPSRFSCRNGLVAYAGLDPTILQSGRNDGLHYSITRKGNAFLRKYLYLAVENMAVHKASNAITEFYSKKKSSGLCHKAAATAACRKLLVCIWGMLRSGTFFNK

SEQ ID NO: 57642 - protein, 340 aa, unidentified
MQINTIGLDIAKNVFQVHGIDGEGRTVLCRKIRRDRLVKLFESIEPCLIGMEACATAHHWARQLTALGHQVKLMPPAYVKAYVKRNKNDAADAEAICEAVRRPTMRFVPVKSADAQSALMLHRARHLLVRQRTAQVSAMRAHLAEYGVIAPKGIAHVRDLLTVLESGAAMLPDLARQTLIIIAQMIDALSQQIRKIEVELLAWHRASAVSQRLESIPGIGFITASALAATVCDARAFRSGRQFAAWLGLVPRQNSSGGKDRMGGISKMGDRYLRHLLVVGATAIVRYTRRKATAVSVWANRLLERKPARLVTVAVANKMARIAWAVMARQEVYRAAPIAA

SEQ ID NO: 57643 - protein, 350 aa, unidentified
MMIIGGDYHPGFQQIAFVDTETGELQERRLEHREEAEKFYRDLGAQGVKVRVGMEASGHARWFERLLAELQVELWTGDAAAINAKRVRKQKTDRQDAQLILRLMLKDDFPQIWVPNWENRDLRQLLWHRHRMVQARTRIMNQLQAVSLNEGLRCKKRLWRDAGREQLDSFKLAPWASRRRHDLLALLDRLTPTIAELTAAIEQEVERCPAAQRLQTHPGVGALTALAFVLIIGRAERFQCGKQIASYLGLVPLEDSSGQRRRLGHITKQGNSLLRFLLVEAAQVTVRSLPEWRSKYYHMALRRGRKIAKVAMARKLAVRLYWMMRKEWDYEQMRKFGSYAGKPGNRDGVK

SEQ ID NO: 57644 - protein, 345 aa, unidentified
MGPMYYIGLDVHKRTISYCVKDSSGKIHAAGSIPATRLDLDRWLKALPQPWSAAMEATLFSGWIYDYLKPHAAALKVAHPLMLRAIAAAKKKNDRIDASKICDCLRCDFLPECYMASTEIRERRRTLRYRSLLVRQMVQTKNKIAVLLMEAGVSYNKQKLHKAGYFRELLATNPNIDEGLCSLLRLCRETVVRLQRTESGLVRSLQRDFLLMERVQRLMTIPAVGPVTALTWALEIGDVRRLSSIKKAISYCGLCGAEKSTGNTTQRTPLSKQRNRHLQTTLIEAAKMAPRISPDLASLYDREKQKGNANRATLAVARKLVAYLVAVDRRDKDFLVVKNENRTAA

SEQ ID NO: 57645 - protein, 355 aa, unidentified
MDSKKYIGMDVHQATISIAVMDSRGKVVMDSVIETKAATILEFIQGVRGALWVTFEEGTCAAWLYELLKPHVAKVVVCDPRKNALLKVGNKNDRIDARKLAELLRGGLVSPVYHEGASVRTLKELARSYLTITKDLTRVRNRIKGLYRSWAIPCAGQKVYSPRYRSAWLKQLTEAGVQRRAEWLYQQLDDLQPLRREARRELVTESHKHPANKILCAVPWLGPIRVALLIALIQTPHRFRTKRQLWAYSGLALRTRVSGEYRVTGDQLQRVKRQPSVRGLNENHNHELKALFKSTATRASTAAGPFGDFYAALLATGMRPTMARLTVARKIAAIILTIWKKGDRFDPEHLKRQAA

SEQ ID NO: 57646 - protein, 345 aa, unidentified
MKITTTGIDLAKTMFQVHGVDERGKAVLRKQLKRKDVLSFFANLEPCLIGMEACGSAHYWARKLSALGHTVRLMAPQFVKPYVKTNKSDRNDAEAICEAVARPNMRFVAVKTAPMQAVLALHRARQGFVKARTAQANQIRGLLAEFGIVIPKGIGHIAKRLPEILEDGENALPGMMRELLQRLGGNLQDMDKQVRELERQIVLWHRENEASRKLEAIAGIGPLSASALVATVGDAKNFKNARQVPAWLGMVPRHEGTGGNVKLGGISKRGDVYLRTLLIHGARAVIAHIERKPDHADAWLKKLLARRNKNVAAVALAAKNARIAWALLAHERSYQHDYVATRKAA

SEQ ID NO: 57647 - protein, 400 aa, unidentified
MRAVFGIDVSKVNSEVAILVNGEKVHGYTMPNDAIGFTWLLGDLKTVHNPEIVFEATGVYSRRLQSFLDEHGYAYTRLNPLEAKKQLDSLRVRKTDQIDAEKLAQSQFVLNRKPTYVQEEVYQNLRDLSRFYQNLTEDIVRAKNRLHKALQVTFPELENILSTPSGEQYWNLVIAFPCKDFVLELSKDKLSESIRQSTSKRISDKRVAYLVEKLIALANQSYCAVKKTSPMLEEVRYYTKELLRLSEQRQAVLDEMVELAQPLSEYDILLSIPGIAETTATSIIGELGDIRRFQSANQINAFIGIDLRHYESGNFLAKEHITKRGNPYARKILFKCIHNIASASHTNPCHIADFYEKRKKQSQTTSTKPHTIASIHRLIRTMYYLIMHNKLYDYASTQNR

SEQ ID NO: 57648 - protein, 468 aa, unidentified
MTPRKQKNLRQPPSADALRVAHPHAAGMDVHSAVHWVAVPAEDAPPPPANHPPNLPAHVRCFGACTADLIALADWLQQCGVKTIAMESTGVYWIPLFELLEARGFEVFLVDPRQSRHAPGRPKSDVHDCQWLQRLHSYGLLTASFRPADQVVVLRSYLRQRQMLIRYAGQHIQHMQKALEQMNVKLTEVVSNITGVTGMAIIRAILRGQRNPLELAKLRNDKCKRTEAEIARALYGNWRGEHLFALKQAVTLYEFYRQQLQECDGQLQAHLGTFADQSRGQSRPPRQRRYTKKANEPVFDVGGALYRMSGVDLTVLEAIDPSTALVLLSEVGPDVSRFPTVKRFTSWLGLCPQHQSSAGKIHRRRVRRGAHRAGRALRLAVRSCWRAKNALGAFYRRIQARAGAPKAIVATARKLAERVYRLLKYGAEYVCQEIAVYEAAYQARLVKGLAKRAAELGYRLEPTTITGT

SEQ ID NO: 57649 - protein, 343 aa, unidentified
MTKLNVIGVDLAKNVIQVSVLSPSNRELRNSSLTRRKFAEFLGRQRPSLVAFEACATSHYWARVAQRHGHQVKIIPAKAVFPFRQGHKTDENDALAVAEAARRPNVKLAPLKTVEQQGMQAIQRSRELLVHERVSLSNHLRGLLMEFGIVIPQGFASLYRLLPEILEDGENELPDLYRPTLNLLYGRLCDLREDLERLNREIEALVQANPVCRRLTALEGVGPIGSVLLYATLGTGEAFANGRQFSAYLGLTPKQFSSGGKVNLVGISKRVANKRLRAVLITGARAYVYRMKEPKTAKDRWLWAIVERSGKCKAAVALANKNVRTAWAMLTQNTEYQCYPLAA

SEQ ID NO: 57650 - protein, 396 aa, unidentified
MQTLVERGCGMDVHQATVVACLLVVLKNGKVQKQIRTFGTTTRELLSLREWLLSEGCTHVAMESTGVYWKPIYAILEGAFEIVVANAQHVKKVPGRKTDVKDAEWIADLLCHGLLRSSFVPPQPIRELRELTRYRRKLVESRSAERNRLLKLLETANIKLASVATDVFGVSGRLMLQALVQATATSQQMADLAKGLLRKKIPELELALEGKVEEHHRFLLSVQLRRLQAVEEDLGLLEQRLQEKLKPYAMQLALLQEIPGVDWTLGAVIISELGVDMSVFGNVSQLASWAGICPGNNESAGKRRSSRIPKGNVYLKTALVEAANAAAKAKGTYLRDKFYRLKARRGYKRAAVAVAHKILVAIYHMFSHQVCYNELGDLYLDTLNKHHLTRNLVQEL

SEQ ID NO: 57651 - protein, 400 aa, unidentified
MRTVFGIDVSKASSEVAILVNGERVHSYTMPNDIIGFSHLLKDLKTVSNPEIIFEATGVYSRRLQAFLEENSYDYTRLNPLEAKKQLDSLRVRKTDKIDAEKLASSQFVLNRKPTYVQEEVYQNLHDLSRFYQNLTEDIVRTKNRLHKVLQVAFPEIENLLSTPTGEQYWNLVSIFPTKHWVLELSEVELKETIRNSTSKRISENRVGNLAEKLVGLAKQSYSAISKTSPMIEEVKYNAQELIRLTNRREQVLQQLIALAEPLPEYEILLSIPGIAETTATSIIGELGDIRRFKSANQINAFIGIDLKHYELGDFLGQEHITKRGNPYARKIMYKCIHNIASASHTNPCHIADFYEKRKRQSQTTSTKPHTIASIHRLIRTMYYLIMHNKLYDYTLAKSH

SEQ ID NO: 57652 - protein, 427 aa, unidentified
MIKTNTCTDFAALIGLDWGWDSHAIALAPADAPTQTSPLKHSAESLHQWLDQLEKTYEGRAIAVAVEASKGAVVAALLERPWMTVYPIHPATSTRQRSAFRPSGAKDDTPDALVLLFILQHHRDRLRPLQPDDEATRTLANLVEARRKAVDRRSLLANQLKSTLKNYFPQALDLVGEDLAIPMALDFLDKWPRLTDVQASKDITLRNFYYRHNIRRAELIQSRIDFRRSARLLTRDSAMIEVNVRIVRMLVAELRVLAEHIIEFERAIEEAFAEHPEKSFFRELPGAGPVMAPRLLTAFGTARDLFPDAPSMQRYFGVAPVTEKSGGRRWIHWRWNAPKFLRQTFVEWAGQTVVFCPWAKAYYEQQRNKRTGHHAILRALAFKWLRILWRCWQTHQDYDQEKYLQQLEKRRSPIAARARQLALEMAT

SEQ ID NO: 57653 - protein, 329 aa, unidentified
MQENQEYVGVDVSKDTLDMLVYSTSEIRSYANNDAGIAEATTWLKQLKPAITVMEATGGMEVSLYIALQEANLPVAVINPRQIRDFAKSVGILAKTDKVDAKVLARYAATIQPEARPLPDEEARRLDTLVTRRRQLVGMITAEGNRFATIRDKMMKQRIHAHIDWLKQELAAIDKDMSQMMKDNPRWRAKDKLLRSVPGVGPVLSTTLIAELSELGRLNRKRIAALVGVAPLNRDSGKHRGKRSIWGGRCSVRQPLYMATLTAVRFNPKIRSFYEHLLANGKEKKVALIACMHKLLTILNAMVKHSSYWSCTYSDLNNSVIPVPAKTVA

SEQ ID NO: 57654 - protein, 341 aa, unidentified
MNSVTLGIDLGKRWFHVVGCDAAGKVVLREKLGRNQLLQLMAQHPPCLVGIETCCGSQYLARQFQGFGHDVKLLPAQYVKPFVKSQKNDFNDAQAIAEAVQLPTMRFVPLKSEEQMDVQALHRARERMLQQRLALTNQIRGLLLDRGIEIAQGFYALRTVLPALLEKEDSGLTPMMRDLGRMLLDMWNRTESTIEQMNDRLKCLSRESDLCRRLQTIPGVGVLLSTAIVSAVGNASTFRRARDLAAWVGLVPQQHTTGGKPRLLGITKRGNSYLRRLFVQGARALWVWKDKHPNDPIQHWLIQLAERRHAHIAVCALANKLVRIAWAVMRSGAEFNLHYHA

SEQ ID NO: 57655 - protein, 312 aa, unidentified
MSSCVTPNRFLGCDVGKASITVFDSHTQRTYAVPNKPAALRAFAKSLDAFCLLICEATGGYEAALLAALVTAGIAAHRADARKVKAFIRSFGTLGKSDTIDAKGLSRYGAERHAQLARWQPRDEDRLNLQSLVLTRHDLVKSHTAYQNRLAAPHSAAVRRHLRRVIATLASEIEKIEAEISKLLDSSSSLGLATKVLESIAGIGEATAPALLALLPELGTLKRRQITSLAGLAPHPNQSAEREGYRRTRGGRRAVKDALFMAAQSAARHHPELSALYERLVARGKKKIVAIAAVRRKLLVIANAKLRDALTA

SEQ ID NO: 57656 - protein, 343 aa, unidentified
MYYIGLDVHKRTISYCVKDAAGHVHREGKIGSTRRELDGWIKTLPEPRMMAMEATIFSGWIYDHLLPHAEKVKVAHPLMLRAIAAAKKKNDRIDAAKIADCLRCDFLPECHMASTEIRDRRRTLRYRGLLVRQMVQMKNRVSGLLMETGVDYNKRRLHKVGYFADLMSANEEVQESIRPLLRLSREHIVRAQRLDYALVSSLERDPLLSERLTRLRTVPGVGPITALTWALEIGDFTRFRSVKQAISYCGLCGDERSSADKVMRMPLSKQRNKHIQRALIEAAKLAPRECHELAMVRERELQKGNPNRATLAVARKMVCYMLAVERRKQNFVPAEKFKCTAAA

SEQ ID NO: 57657 - protein, 432 aa, unidentified
MRPNAGGIDIGATEIFVAVPADRDTETVRSFPSFTQDLHDLADWLQHCRVDTVAMESTGVYWIPLFQILEARGIEVHLVNAQHVHHVPGRKSDVLDCQWLQYLHSVGLLRTSFRPEQAVCEIRSLMRHRESLVQMACVHVQHMHKSLDQMNLQIHHVISDITGVTGLAIVDAIVDGNTNPEQLAKLRDYRIKASVETVTKSLVGDYRPEHIFTLKQSLKAYRYYQQLISDCDQEVQQRIESFKTKDDGSANTGDACGSTDSAAPPFDLRTHLERIFGVDLTAIPGFDVLRVQTIFSELGADLSDFPTPASFSSWLNLCPKDGTSAGRRIAGPRLKTKNRVTQVFRMAGQSLHNNKSFLGDYYRSQRARFGPVKAIKNAGHKLSRIFFHVVTTRQPYDETVFAKLEARHQHRRLRKLQNVAKQMGYSLVPTQA

SEQ ID NO: 57658 - protein, 320 aa, unidentified
MTSRGAEKMKNDTIGVDVSKDHLDAHRLADGATRRFANTKGGHKALIKWLTETPLYRVVFEPTGPYHRAVERALGIAGVPFVKVNPRQARRFAEATGKLAKTDRLDAAILARMGAMLELEARPARSELLLELKELYVAREALVKDRTAAKNRGKALTLSLLKRQNAQRLEQIDRQMATVEAAILQIVEADASLADRFAILTSIPGVSNITAFALLIAMPELGALEAGQAASLAGLAPIARQSGRWTGRSFIRGGRADVRQALYMPALVAARFNPDMKAKYAHLIETGKPAKVALTAIMRKLVVLANALLKANRTWTPRTA

SEQ ID NO: 57659 - protein, 333 aa, unidentified
MKNYRTYLGIDVAKLTLDYCLVTDDQQLEREQILNTQKSINSFLKNLKKAGHELDQILFVFENTGIYSSLLSLVLSENELDYSQVPALEIKRSLGITRGKSDKVDAKEIAYYAKRNTDKITLSVLPELNLQQLKIIFSEREKTIAAIKVFERTMENEMFLSKEVFGTVKAINRQTVKYLKKQLAMLDDKIKKLIREDEVLYKQQQLLKSIPGIGEITSVYLLMVTKGFTAFTNGRKFACYSGVAPFEHSSGTSIKGKTRVSHLADKKMKSLLHMVSLTAIKYDPELKEYYARKKAEGKHTMLVLNNIKCKIVYRIFAVIQRESNFINLHKFAA

SEQ ID NO: 57660 - protein, 432 aa, unidentified
MPLVHLNAAGIDIGDSLHVVAVPSDRDPVNVRRFGAFTEDLENIADWLEECRIDTVAMESTGVYWKNLFAVLIERGIDVYLVNAKHTRNITGKKDDESDAEWIQRLHSCGLLKSSFLPDDCTETLRTLVRQRRSLTQDSSRYVLRMQKALELMNIKIHTVINDITGKTGIAILKAIIGGERNAQNFLSLIDGRIKAKPEAILKSLQGHWREEHLFLLKQCYNLYQYMQLQIEVCDREIEKVLQLMANGKDKEATLQGGGQQRKSKNQPRFNTVSYLKGIHRVDVTQIFGISEISALEILSETGRDLSKWATENRFVSWLNLCPNNKKTGGKLISSQLLKKKPNAACQAFRMAANSLKQSQHWLGDYFRRMRSKGGQKYAIVATAHKLAIIYYKMVRYKEPFTPFNLDKYREKYRLARIKYFERMLHQLKHAA

SEQ ID NO: 57661 - protein, 346 aa, unidentified
MRFYNRPHTYYCGIDLHVKTMYVCIVDGVGQVLVHHNVPSTPAAFLEVVAPYRDGLVVAVECMFTWYWLADLCAAEGITFVLGHALAMKAIHGGKAKNDRIDSHKIAVLLRGGMLPQAYVYPAAMRSTRDLIRRRLHLVRKRGQLLAHIQNTRAQYNLPVFGRKLAYRTNRDGVVEHFPDPSVQKSIAVDLALIDQYDALVIDLELTIVREAKRHNADAFHRLRSVPGIGKVLALTILYEIHDITRFDRVQEFASYARLVKCKKQSGGKTLGTGGAKMGNVHLKWAFSEAAVLFLRHTEGNKLIARIEKQHGKGKALSILAHKIGRAVFYMLSRGTVFSMEKFLAA

SEQ ID NO: 57662 - protein, 499 aa, unidentified
MHSIYSKADEPVLKFFEQIKDSSKLLCVALDYAKSKHTVLFCNGAGEILKKSFAVENAAAGLEELLQQVQATCHHRGIPLKHVFFGGEDRPGYAANFCAALIGKKFLVVRISAAEAKKARQNSKASSDLLDLQGIAHCLLQRTGRLVAVQNEAYTHLRILVRERDYLVAWQTALTNHLYPYADQLFPGFLDAHSAVTPFGPACWWLLEKDFSAPQIARRASQRLVQGLTKLHVHQPLKVAEELQEQARHVLVPVAEKIKPSQIALTQLVPIHHCLAQAVAGLDREVAMVLARTPAAVLTSLPGIGVTLAAGLGAETGVLHKMPSLDGLACYAGLVPRSDQTGGPDQPPVLGHKSHKVNKRLKHYLMSGGEHIARIPGSQAQLLAQRAEEKKQHVLVVLAKHLAGLMRSLLLRQTIYLPPELFAKDSSASSRAEYYQQLWPKWLDKWKRSQADVSQVFAPTNPLGQWRTMVQKLHKISLPLPGSAQSSKVCVTTEESPTL

SEQ ID NO: 57663 - protein, 408 aa, unidentified
MAHKLAGIDVHKKVVMVVVVDTHNSDSKPERRRFLTMPGELHQLSSWLRDRGVEEAVMESTAQYWRSVWMELEPHMRLHLAQAYSNRAPRGRKHDFRDAERLVRRLIAEELILSFVPSEEQRIWRNLSRMRLQLVRDRVRLHGQIECLLEEMRIKLSVVVADLFGVSGLRILHAMAEGETDAESLAKLGDERLRCPRERLIEALTGRSHPTHRQMLALQLERLRLIEQQLKSLNNLLAQAMMPHQEAVLRLAQVPGFGIDSAQQVIAEVGVTASSFASAAEFTSWVGTCPGKEESAEENRSSRSAKGNKYMRRILCQTAHAAARSKGTHFQTVFRRLLPRLGYQSAIWAIAHRLCRLVWKILHEGVHYIEQGAGLEPQVLMNRARYLARQLRKFGYDLHVTTTNPSPA

SEQ ID NO: 57664 - protein, 394 aa, unidentified
MEHFIGIDNSSLDHKVRVIDENGHLNLSFTITNDFDGFEKLNHELNQLKESKIGFELPHGPLIDYLHEHGYKLYSLNPLKIKRFKESLKVSGNKNDDIDAVAIAEYLRSNNRYTRELLYNSHKIEKLKNLSIIHTRMIHNRARHINKLHFVVRQYFPLQEALFGDFACTVQLKMLIKYPTFADLNNASDKEIAEFLKLNKYRRQDYIDKIIRKIRNYNQLISEDVEFAYRIEAEYLCDLLLVTNHRIKEIETEMNKITDAHNLGKVFKSLPGAGNILSCKLLSIFGDNKDRFDNYNGMQCLFGTAPKNYQSGMYHKVIMRKACSKSARAVLYEFAFSSLRFSKWSRDYYDRQKERGKTHSVAVRALSNKWIRVIYKLWKEEIIYEESKKVTAAA

SEQ ID NO: 57665 - protein, 420 aa, unidentified
MAPLSNQQFKAFVGLDWADTKHDICLQQAGDDRREFDCIPHQVTRIDEWAKALHQRFGGPIAVALELATGPIVSVLQKHVFVTLFPINPAMLAKYREAFKPSRAKDDPTDAELALDLLLRHPERFSPLRPQSVGMRSLLSLIEQRRELVGDKTRFTNRLTNALKQYYPQALEWFDDIDTVLFCDFLTRWPTLPAVRRAGRKTLETFFHVHNCRRAKLIEGRLESIRCAVSLTDDPGIVAPHRLLALMLVAQLRTALAAIDVFDKEIAAVARTLPDFDLFDSLPGAGPHLTPRLLAAFGEQRDRFRGADELQKYSGIAPVTERSGKKCWVHWRWQCPTFLRQTFVEWAGQTINKSFWAGAYYRQQRAKGSSYQAAVRALAFKWIRILYRCWQTGTRYDESIYLNALRKRGSPLLRNLGLPG

SEQ ID NO: 57666 - protein, 375 aa, unidentified
MSEITRCLIARVGVDLAKQVIQVHAVDASGRRVLSRALKRDQFMGWCSQLPAGCVVAMEACSSAHHWARGLRALGLDARLIAAHFVSPYRMEGKSGKNDMTDAAAICEAASRPSMRFVPIKSCEQQGVMSLHRIREGFKEERTACINRIRGVLAEFGLVFGKSPKVLRARLADVIEDAANELSTTARLVVQRAFEHWRELDEHMRWCDSQVGQHVRGSAQAKRAAKVTGIGELGASALVAGVGEFQQFSSGAQFGAWLGIVPSQNSSGGKASLGRITKRGDDYLRTLLIQGAKSAVMSAGKRDDPISRWLVQLTARVGWQKACVAMANKNARILWAVMTREQGFDPRHVSVKPQAKVPLNERAAAPAQAAVSCPA

SEQ ID NO: 57667 - protein, 405 aa, unidentified
MSVHQAAPVTSSTIVVAVDVGKCSAVLSVTNGQRCRLLGPIGFALTCSGMSAAIVEISSVIESCAQVKVAVEAAGHYHRPVLDYRWPPGWEVLELNPAHVAEQRRVAGRRRLKTDAIDLEAITELVLAGRGQPAGATPQLLGEIGAWGAHRQRRIAVRAATKNQLLAQLDRAFPGLTMVLSDVLATKIGRLIAAELADPARVRALGPSRLIRFACAREVRLRRELAERLVSAAREALPVADAAVARRVLAADVALLVDLDIQIAAAETELAALIPHSPFSTLTSVPGWGVVRVANYAAALGDPNRWPGPRQIYRAAGLSPMQYESAGKRRDGTISREGSVALRRALIDLGMGLWVQDPAAKAYAAGLKSRGKRGGIIGCALAHRATRIAYALVRDHARYDPSRWN

SEQ ID NO: 57668 - protein, 395 aa, unidentified
MDLLLVGIDVSKAFFSAVGIDSEGKGSFSGSYPMDSSGFEGLIKAMTSHCEDLSKVVIGMESTGCYHINLYSFLISRQLHTIVINPLLIANYAKLSLRKTKTDKKDAGTIAKFLLDHRQEISQLSVNQDLQDLRDLSRERESLCHLISAIKVEIKRVLRTTFPELESIGNLYTRSMIRFVQEYPSARLVRAAKPKAIAKTLKQPSVGNKLTLTAEDIIKAARNSVATVSPAKEIIVRGKIATLLHLQERLAEVTKLLTDLCQRTKLEDLGILRSIKGVGPNTAAPFLAEMGEVNNYSSHKKIIAYAGIDPSVHESGKFVGMSKLSKRGNRHLRRAIYLMTASVVSQNAFFKAYFLKRKRDGLAPQKALFATAHKLIRIIFAMLSQRTYFKVEEAQ

SEQ ID NO: 57669 - protein, 393 aa, unidentified
MYIVGIDIAKRKHEAAVIDGDGAVIIKPFSFTNNCSGYNRLLAMLTKAKLPLDEVSFAMEATGHYWLALFTRLQKEGFRVQVINPVQTNSIRSFYIRQAKTDPRDALLIAEVIRFGHFSESTLHPENIYELRELCRGRHAIVSMQADVKRKVVALLDQVFPEYETAFTNMFGDTSMAILQTCPTPKELSEMRLEELCHLIEVSSHKRFRMAKAQELQALARNSFGFAMAGDVFSTMIRLYAKHLDFLKQQVREMDRKIAEIMETLDTPITTITGIGLTLGAYILSEIGDISRFSSAAKLAAYAGIDPTMRQSGEYNGVRNRMSKRGSPYLRHAIWLAASSAVLHDPALKLYFQKKRDEGKPYMASVGHACRKMVSIIYAVMRDNKAYTPYNPK

SEQ ID NO: 57670 - protein, 365 aa, unidentified
MASLPSGPGVVHVGMDTSVREIVCGVLRPGMEVPAVDRVPNDEESVRRLIGRLGDRRLLAVCYEAGPSGYELHRLLASMGVACEVIAPSLVPKGSSDRVKTDRRDAVRLTLALRAGMLTPVRVPSPSEEAVRDLVRARGDLLDDRRRAQQRLGAFLLRHGRVWGGTKWTCAHRAWVDRQEFGEPAMQETLDAYRGALEAREAELRAAEARLGAWAGREPLAPAVARLGAYRGIAGLTALTLAAEVVDWRRFATARAFMGFTGLVPAEYSSGARTRRGSITKAGPEGIRTALVESAWAYRHRPAVGALLRRRQAGADPGTLARSWKAQQRLHATWRKMAARGKPPGVTATAVARELAGFVWAEMTS

SEQ ID NO: 57671 - protein, 342 aa, unidentified
MLLIGVDYHPSFQAIAFLIEETGECGEQELNHSDGQADKFYRDLKQRGICVRVGMEATGYSRWFERLLAELGFELWIGDPAEIKAKRVKKQKFDREDARLLLRLLRENNFPQIWVPGPENRDLRQLLWHRHRLVQMRTRIMNQLHALAMNEGYRWKKKLFSEQGRTQLEKLALAPWASRRRQELLELLDRMNPTIGELTAAVEQEARKRPEVLRLMTHPGVGPLTALAYVLIIGTPERFHCGKQIGTYVGMIPCEDSSARKQRLGHISKQGNSLLRFLLVEAAQAAARIHPDWKRRYIHLAMRRHKSIAKVAMGRRLAVRLYWMWRNGCEYSPSLEFGSYAG

SEQ ID NO: 57672 - protein, 441 aa, unidentified
MGNLEKIHDNAAGIDIGSEKIFVATDKQPVKSYRTFTNTLQECVKNLQSQNIRTVAMEATGVYWITIYDMLEKVGMDVWLVNPADSKNLPGRKTDVQDCQWIQQLHSFGLLRRSFIPKEVFRQLRTYNRLREDHIQMASSHIQHMQKALISMNIRLPEVLSQVHGKSGMLMIESILSGNTDAKHLLSLCDFRLRKNKGEEILQALQGFYSEEHLFELKQAYDAYYFYQKQIQDCDKKMEIILEKMSSENSISDEEILQKANKETKRVRHHNPQIDKLHYKLIRITEGRDATTLPGFTDYNYLRVLSELGNDISRWPTEKHFTSWLGLAPGQNRSGKINKRTKKRSSTKAGQVFKQAAQTLLISKHIALGAFAKRIKAKRGPAIAIKATARKLAVMYYNLMKYGADYVEAGTKKYEEKYRSQLIKFMQKKAAELNLQVIDIQ

SEQ ID NO: 57673 - protein, 416 aa, unidentified
MPEEGEPVHYYLGVDWADQTHAVWVVDERGTKITARTVPHTAEGLSEWGRELDEWRAQGIELWAAIERPEGRVVDFLLDHGVVVYPVNPKALDRARDRFRQSGAKSDPFDARVLADFLRTDHASFRALQPSSEAAQELKLLTEDCQRQIRQQTRLVNQLTATLKAYYPRGLEVAELTTALAREFLQAYPTPAAVAGLTERQWQRWARAHRLSEARTQELWAVLQRPQLPVPAHVVRAKARLLQTLLTELEPVVAAVGAYRQAVEDFFAALPAAQWIRTLPIGEHGVTAPTLWARLGDAPGRWESFQHLQAHAGAVPVTVKSGKQHVVHFRFACDKMLRHVVDQVAFLSLRSSEWARAYYDQQRARGHSHRETLRALGAKWLKIIFVLWDRQVPYDEQYHLATMARQQLRQRSKKIA

SEQ ID NO: 57674 - protein, 340 aa, unidentified
MDATTYGLDVAKRVFQMYWVEAETGEIVNRRFGRDELIRFLAQRPPGQVALEACGSAHWWARKIKALGHEVVLLHAKFIRPFVQTNKTDAADARAIWTAVQQPGMRTVATKTEDQQAMLSLHRIRALLVKFRTMQVNQLRGLLYEFGATFRAGRAAGLAEIRARTAELEDALPGTMMCCLQDQLRRIEELQRDIDLLEKRIGVWQKQDAACHAITAIPGIGRLTATALVATMGDAKSFRSGREFAAFLGLVPRQSGTGGKVRLGPMSKRGDPYLRTLLIHGARSVMYHAKVPTPWQKDIQARRPANVAAVALASKIARTAWAILARGQEYQPNYVSMRPA

SEQ ID NO: 57675 - protein, 454 aa, unidentified
MESLVGSLRLSKSASTGATFVTAVENHGGEQTLIDDFDFYVGIDLAVEKHQACVVDRTGKVVEELAFEHSGAGLIDFIHSLEKLSGSLATRVGIVLETPRGPVVECALERGYSVFSINPKQLDRFRDRHTVAGAKDDRRDAFVLADSLRTDLPLFRRLQQEGAQTIRLRELSRLEDDLAQDHNRLINQLREQLHRYFPQLLQISSAAEDAWVWDLIEIAPVPAVACKLTRGRIERVLKRHRVRRLTSEEVMAALRLPALKLAPGSAEAASEHALLLLPRLRLIRKQRLDIATRIETLLNQLSEVGSDTSDHGSERPTDVAVLRSLPGVGRIVAATLLAEASQAIADRDYQALRSYAGVAPVTRQSGNKKIVVMRRGCNNRLRNAVYHWSRVATMCDERSRSYYGQLRARGHSHGRALRTLADRWLTALVAMLRTHETFDSARWNACVITPQATL

SEQ ID NO: 57676 - protein, 358 aa, unidentified
MPALQISPEPDVIIGIDTHKTVHAAVAINSLGARLGETLIPVSSKGYAELEAWASAFGKVRAFGIEGTGSYGAGLTRSLLARGHRIIEVNRPNRQLRHQHGKSDTLDAEGAARAVLSGQATAVPKVGTGAVEMIRHLKIARDTAVKARTQAMVTLRTLIINAPAALRENLDGISGKIRLIRHIAALRPGPISSPTASAKSAMQALARRWLALNEEVKAHDEHLTKLTEACAPTLVQAHGIASGTAAEMLILVGDNPERIRSDAAFAKLCGVCPIPASSGKTNRHRLNRGGNRQANAAIYRVVIMRMRSHGPTLDYVRRRMAEGKTKKEVIRCLKRFVAREIFGHLCRGGAATVRLSAP

SEQ ID NO: 57677 - protein, 309 aa, unidentified
MDIIVGIDVSKDRLDVALAASGMAFFVENSHAGLDDLAQRLKDVHADIVALEATGGFETLAVAKLSAAGFAVIVVNPAQVRAYANAIGRRAKTDAVDAAVIAAFVSATKPQIRPLRDQQTQLLSALVDRRRQIVQMIVAEENRLRMALEKATHKSIQRLLAALRREVDSIDAEMDDHIRKSPVWRVREALLTSVPGVGPATARTLLAEMPELGNLDRRQIASLAGLAPWTRQSGKWKGKSFIGGGRGKVRAVLFMAALVAARYNPVLKAFRDRLVDAGKPKIVAIVATMRKLLTMLNAIIRDNKPWQNA

SEQ ID NO: 57678 - protein, 441 aa, unidentified
MDDVEDEPLFAERVAGIDIGKTAVMVTVRVPSDTRRSRRQQETREFRAVRKDLLALADWLRCWGVTKVGMEATSDYWKPVYFLLEREGFDCVLYHAAQVKALPGRPKTDKLDSAWLAKITGRGSLPGSFVPPEDIRRLRTHTRYRRHLVQARTAEKARCEKLLEDAHLKLSSVITNIHGVSGRDMLTAVIAGERNPKVLAQMAQTRMRGKIRQLEDALDCSFFTEQHAFILQMMLANIDHLTAQVSELDAKIEVLCEPYARQIAQLDAIPGFGVITAQDIIAETGVDMTVFPTAGHLASWARQAPQVSESAGKRKGKNATGRGNPYIAGALGEAAVNAGRTQTFPGAKYRRLCNQMPKKKAQGAISRTQLVICHALLSDPDAVYTDLGTDYYERRQDIRRRARSHVRGLERLGYKVTIQAINPDTGELLAAAGLWVTVTVI

SEQ ID NO: 57679 - protein, 410 aa, unidentified
MTESAYQIFVGIDWGSQTHQVVVLDAARRVVGDRVVAHDGLALHTLAQWVAGLAPPGAVAVAIEVPHGAVVDTLLEHGLHVYALNPRQMDRFRDRYTVAGAKDDRRDAQVLAAALLTDQPAFRRLQPDDPLIVQLREHTRMAAEVQEDIRRLANRLREQLLRFYPQALALCPAADEPWFWALLRLLPTPAAAARRRRDPVVTLLREHRIRRVTADEVLTALRRPPLTVAPGTIEAAGAHIALLLPRLELAAAQRRACAAQLDTLLATLAAAGEQRGHRDVTILRSFPGVGRTVAATMLAEAAQLLASRDYHRLRAYGGAAPVTHQSGTRRSVHMRYACNQQLRTGLYYWAFMAARHDPATRQHYAALRASGQSQGRALRGVVDRLLAVLIAMLRTQTLYDAGRRQTRAAA

SEQ ID NO: 57680 - protein, 321 aa, unidentified
MSKSVLGIDIAKHKFDVALLVEGKIKHKACQNNPQGFDALRIWLEKQKSPALHACMEATSTYGEELATYLHDLGHKVSIVNPARVKGFAHSELIRTKNDSVDSGLIARFCLAMDPEPWQPPSPEERRLQAQLRRIEALTNMRIQEENRLEVSHCSVKDSIKEHIAYLEKEIESVKKEVKEQINSNPDLKGKKDLLISITGLGDVTSANVIAELPDIKRFSHSREVVAFLGLAPRQNESGTFKGKARLCKVGNSRLRKALYMPALVAMRHNPVIKEFAARLRERGKHGKVIVCAVMRKLVHIIYGVLKSGKPFNPDFKPNLA

SEQ ID NO: 57681 - protein, 412 aa, unidentified
MPTLSPKAGEKGVAPQSLGLEAKGWATHYKRAPLSEYDLAVYRRQQICSRKEHPMSPKTNIKYVGLDVHQDTISVAVLDAEGKQLLYSVIPTVAKAVVEFIEGLSGTLHVVLEEGCLSAWLYGLLTKRVAKVIVCNSHKSAPLMPDSRNDEIDSRELADLLRMNRLSPVYHADHGLQSLKDLGRSYTALTRDTTRLKNRLKSLYRSQAIPHRGKTLYGNKRREAWLEHLTNPGLRQRAQLLFAAHDALQELRRQAAHDLVVASRKHAAASCLRSIPFLGPIRTALLIARVQTPLRFRTKRQFWAYCGFALETRSSGDYRFDQGKLKRRQKNVQIRGLNFDHNPELKQVFKGAAVTASACPGPFRDFYLALLEKKMDPAMARLTLARKIAAITLTLWKKGEPFDPKYLKPQAA

SEQ ID NO: 57682 - protein, 321 aa, unidentified
MDYFVGIDIAKRFFDAAVKVRGKNRHRQFPNTAAGFLKFLDWLESLEITTAQFCMEATSTYWERLAYFLSDRGDEVSVVNPACIRKFAQSALKRTKTDKVDAIVIGEFCKAMKPALWIPPAPEVKELQGLMRRMHSLAKMRQQEKNRLAMDKDEDDVTASVERTLKFLDAEIDRVQKKIEKVFAKSEQLQRKRELLVSIPGIGDETAKVVLSEVPALDMFTNARQLAAYAGLTPKEFRSGDMIRGKTRLSKTGSGRLRSALYLPAIVAKQVNPVVREFYERLLKQGKPPMLAVCAAMRKLMHIIFGVLKSDKPFTAALSTA

SEQ ID NO: 57683 - protein, 307 aa, unidentified
MNFYTQQHKHYCGIDLHARAMYVCILDQPGNKLVHKNLPTTPEAFLCLIAPYREDLVVGVECMFTWYWLADLCQKEGIAFVLGHALSMKAIHGGKAKNDKIDAHKLAVLLRGGMFPQAYVYPSEMRATRDLLRRRCHLARKRAELLAHIHNTNSQYNLPEIGKRLANQSNREDVADHFPDPSVRKTIEVDVSLIDHYDELLSEVELYLTRSAKAHDVQTFARLQSVPGIGQILALVLLYEIHDITRFPRVQDFVSYCRLVKCAKESSGKKLGTSGKKIGNVHLRWAFAEAAVLFIRQSQPGKEYFGK

SEQ ID NO: 57684 - protein, 367 aa, unidentified
MTVTIVDAARPVTGSGNAHPDLHAAPFLVTGGVDTHLDLNVAAALDPVGGLLAVAEFPTTSAGHRDLLGWLAGFGPVARVGVEGTGCYGAGLARFLRRAGVEIVEVDRPNRQARRRSGKSGPLDAVEAARAALSGRACGAARSRDGNVEAIRALVVARRSARSAKIQALNQIRHLGFTAPEQLRQRLAGVSRHHLAARAAGLRPGSPEGADPVVAAAKTALQILGRRVLALDEEKARIDALLSGLVTQTAPQLLAVFGVGVDTAAALLVTAGDNPGRLRSEAAWAHLCGTAPIPASSGKVTRYRLSRGGDRQANCALWGIVITRLRNDPRTRAYMARRLGEGRSKPEVIRVLNRYVAREVCHRLPRP

SEQ ID NO: 57685 - protein, 347 aa, unidentified
MLIIGCDYHPGFQQIAFVDTETGEFGERRLTHREEAEQFYGTLKERSVRVGMEASGHARWFERLLSDLRFELWIGDAAAIRTQRVRKQKTDRQDAQLLLMLLVENRFPRIWVADADNRDLRQLLWHRHRLVQMRTRVMNQLHVVALNEGLRRKKALWRPAGRNELESLILAPWASRRRQDLLDLLDQLTPKIQELTRALENEVEKRPVTRRLMTHPGVGPLTALAFELVIGTPERFHCGKQIASYVGLVPSEESSGDRRRLGHISKQGNSLLRYLLVEAAQVTVRSQPQWRSKFFHLAMRRGRKIAKVAMARKLAVHLYWMWRQGLNYGDFVKLGSHAGELGNRHGV

SEQ ID NO: 57686 - protein, 348 aa, unidentified
MLMLHVGLDLSRTRLDVHVMDETGAPVLVTTAAPDSGGLASLVSRVGEFNQPVVAAIESMTGARFVHDQLELRGWEVEIADAVKVKGLAPLAAKTDRIDAWVLAELSRRDLVPAIWLPDPSVRAERERARWRLHLVRHRTALKNRIHATLLAFGHPCPVADLFGAAGRQLLDGLALPEPWAGDVAAALRLIDSLDAEIDGCEAALRTAGADHPYVPLLTTVPGIGPVLGYTIAAEIGDIARFPTATKLVGYTGLCPIVRQSGRKDHRDALAKNGPKYLRWALIEAATHAARHPAYAARYQRTRTRLGRQRGPTIARVDLARRLAEAIWWMLTTSKPFAPAGAAKPLAA

SEQ ID NO: 57687 - protein, 453 aa, unidentified
MSRVAKLPNEFEQINTNAAGIDIGAQKHFVAVPPGRDPQGRDVRHFDTFTTDLYALADWLQHCGIETIAMESTGIYWVPIFEILEQKGFHVRLVNPRSIKHAPGRKSDVVDCQWIQQLHAYGLLTGAFRPEEDISVLRAYHRQRTMLVNHAATHIQHMQKALEQMNLKLTNVISDITGSTGMKIIRSILAGERDPQKLAQHRHARCKKSLQEIQKSLHGNWRDEHLFALRQAVELYDFYQGQIQACDKKIQAQLCRFENRSGTGKLPPPSGKRNRSTKKLSFEAREHLYRMAGVDLTQVVGLDTPSVLTLLSEVGLDMSRWPTAKHFASWLGLCPGSKISGGKSLSSKSKPSANRAAHAFRMAAYSLHRSQSAIGAFLRRKKAQLGAPKAITATAHKIARIFYTMIKTRTEYKDLGVDYYQNRYKERMLGNLKRKAKAFGFTLVDQNQLVIEN

SEQ ID NO: 57688 - protein, 413 aa, unidentified
MHTSPQEKLNTQTRTLYMALELSATTWKLAFVDRLCRRPRVRSIAAGDFDQLQEEIQRARRAYVLEPDAPVVSCYEAGRDGFWVHRCLVAQGVESHVVEPASIEVDRRKRRAKTDRLDAGRIVMALLRYRAGDRLACRMVRVPDAEDEDARQLNREMRTLKAEKTAHTNRIKGLLATQGIHVKQIDRNFLQLLQGLKGADGAPLLEGLTARLRREFDRVALVVDQIRELQLLQATMLRTAAQEVERGDTAGRAPRHAVIAQRLTELGGIGPVTGWTLATEVFAWRDIQNRRQLAALAGLTPTPFASGSEEKEQGISKSGRGELRMLMIEIAWGWLKHQPDSELTKWYRKRFGDGTKRNRKIGIVALARKLLVALGKFVRHGEIPAGARWRKEMKFTYLPSLRKREHPSVVTAA

SEQ ID NO: 57689 - protein, 360 aa, unidentified
MLYLGIDQHRKQLTVSIRNEAGDVVLRRQVSTEWNRVRAFFDELRRFAEPEGGFVAIVEVCGFNDWLLKMLAEYGCRETILIQVEKRSKKKTDRRDAHQLSGLLWINRTRLLAGQRIEGVRRVQPPTEQQAEDRQLTVLRQRLGQLRTRTINRIKHLLRKHNLEQEQPAKGLATKRTRKWLAALLLEPFDRLEMNLLLAQWTVWDEQIETLETEIKKRQAENATAALVATIPGCAAYGSLALAARIGSIERFPRPASLANYWGLTPGCRNSGEATDRLGSITKQGSAMARFILGQLVMHVLRRDPWMKAWYGRIKRRRGSKIARVAVMRRLATVIWHMVKYNEPYAIDGPPRRRLAVSAA

SEQ ID NO: 57690 - protein, 442 aa, unidentified
MAMRKREDDEVYPNAAGIDVGASSHWVAVPRTADDQPAREFGTMTGDLHAMADWLLACGVDTVALESTGVYWIPVYEVLEQRGLTVWLVDARQMKYVPGRKSDVQDCQWLQKLMSLGLLRAAWRPAGEVCVVRAVVRQRELLLTEQGSWVQRMQKALLQMNLQLTEVLTDVMGTTGQGIIRAIVAGERDPKVLAHFRHSLVKASTEDIIRALTGNWREEHLFVLAQALAMFDSLAERILECDAKTEALLVPLGRHDVQLAGPDKKRQKNAPRFDARTALARWAGVDLTRINGLSVATVMTILSEIGPDLSRFASVKHFCSWLRLCPATKISGGKTLSSGTRPSANRARQALKMAAMSLSRSDSALGAFYRRLCSRMDKPRANTAVAHKLARMVYFMLTRGEAFVDQGQQRYYEEQQRQRSIAALRRRASALGFQLQPNAPTP

SEQ ID NO: 57691 - protein, 409 aa, unidentified
MRYYVGVDWADQTHAVWIVDGSGTKITARTVPHTAAGFSEWGRELDEWRAQGIERWAAIERPDGRVVDFLLDHGVVVYPVNPKALDRARDRFRQSGAKSDPFDARVLADFLRTDHSHLQALQPSSDAAQELKLLTEDCQRHIRQQTRLVNQLTTTLKAYYPRALEVAELTTALAREFLHAYPTPEALTALTQRQWQRWARGRRLSEARIGALWAVLQPPQLPVPAHVVRAKARLMRSLVEQLTPVVVAVAQYRNAIDDFFARMPAAQWARTLPIGKHGITAPTLWARLGDAPGRWESFRHLQAQAGTVPVTKRSGKQRVVHFRFACDKALRHVVDQVAFLSLLSSAWARAYYDQQRARGHAHHQALRALGAKWLKIIFVMWHRQVPYDEQYHLATMTRQHLRQRQTQIA

SEQ ID NO: 57692 - protein, 401 aa, unidentified
MEPAAATVWAGIDVGKTHHWVEVVDACGATLLSRRVRNDQVEIDAILAAVVPLAETVLWAVDIVGSPSALLLALLADAGQQVRYASGRVVSVMSSAFTGEGKTDAKDAHVIAETARLRRDLPLIDQSTDLARNLAVLTAHRADMVADRVRGINRLRDLMTSVFPALEREFDYASCKGALVLVSGYATPDRLRRVGRARLAAWLRARHVRSYAQLADRAVTAAGAQHVVLPGQDISAGIVSELAASVLALDVRIKAVDTQIAATFELHPQAAVILSMPGFGPFLGASLLAAAGDLHAFPTAGHLAAAAGLVPVPNDSGRRSGNLHKPRRYSRPLRHVFYLSAQTATMRPGPNRDYYLKKREHGRTHTQAVIALARRRIDVLWALLRDNRTFTEQPPAAAIAA

SEQ ID NO: 57693 - protein, 345 aa, unidentified
MQNYTVLAIDLAKHVFQVVKTTGYGKAVFNKKMNRAELKELLRKEPKAMVVMEACGGSHYWCRLAESFGHQVKALPARQVKPFRQGQKTDANDAVAIATAARQPHLKPARVLSEEEQGLQCIEKMRELQIAHKTALSNQLRSLLFEFGIVMSKSDAALKKALPEILEDAENGLPGGFRTVLAQMWALYLTISSELEKLSQFQHQLTLQDEQSRALSALEGVGPVGALGLKLAIGNGVHFKNGRQAAACIGVTPVQHSSGGKENIGSISKLSGHKKLRSVLIQGAMAVLRHLAKREARNTKEQWLKALVQRRGTRIAAVALANKTVRTAWAMLSRQQEYQAPGLLA

SEQ ID NO: 57694 - protein, 413 aa, unidentified
MERIIERCAGLDVHKSSVTACVRISEASEGLHQETREFATTTRGLLLLRDWLASFDVRLVGMEATGVYWKPIYYMLEDDFELWLLNARHLKNVPGRKTDVKDAEWICQLVEHGLVRPSFVPPKQIRELRNLTRYRKAQIEERTREVQRLEKVLQDAGIKLSSVATRVLGASGRAMLDALVGGTTDPEVLAELARGRLRSKLPALRDALEGSFSSHHALMVGKILAHIDYLDESIEDLSVEIERVIAPFSEQVELLDTIPGVNRRTAETLIAEIGVDMSRFPTHRHLASWAGMCPGNEESAGKRRSGKTRKGSKWLRSALTESARAAARSKGTYLASHYARLRGRRGSKRAAVAVGHSILVICYHVLERQVPYEELSEDYFDRRRSSEAYAKRLVRKLERLGHKVALEPLPRSA

SEQ ID NO: 57695 - protein, 312 aa, unidentified
MTRIICGVDISSLSLEARIGPEGAFASFSNNPQGIAALAAFCQAHQVELVAMEATGGYEQQALALLSEQGLPVAILNPRAVRRFADSMGQMEKTDRLDAGMIAWYAQTRHSQPVCLSSASQQQLRALVTRLRQLTEVRTAQMNQSRLVTDPAVLALIEELLAVVARQIRELETSIAALIAQDPLWQHLDRVFRTIKGVADRTVARLMAEMPEIGTLSNKAISKLAGVAPLARDSGKHQGKRAVRGGRASVREILFIVASVVGRHEPDFIVFQQRLSAAGKPRKVIRIALAHKLLVRLNAKARQVRQQLEAAA

SEQ ID NO: 57696 - protein, 422 aa, unidentified
MRSIGLDIHRDFCEVAIAEGGEIRSPGRIEMTPAALELFAASLCHDDRVALEVSGNAWEVARIIRPHVGQVVVISPADTGIRSAPAKTDRLDARALARLLAAGSLDAVWVPDEGTQAMRRRLSRRSQLVRVKTKAKNEIHAALMRRLIAKPSFSDLFGLKGRRWLAEVELPACERETVDGCMRQLDFCESEIAAIERVIAAEALRSAEIRCLMTVPGVNVITAATFIAAIGEIGRFPDRKKLVGYLGLDPKVRQSGVSAASRGRISKQGSASARHALVEASWSAVRAPGPIHAFYERIRARRGHQVAIVAASRKLACLFWCLLTREEDYAFGQPSLTRKKLRRLELTAGAPKGKVKPGIWAANKAMREAERELARQAEVAYRRTVADWQAQKKGAGATPERASCGPSSGHAARQGSAPEPAL

SEQ ID NO: 57697 - protein, 315 aa, unidentified
METTNPVPTATYVGLDVAKDRLDYTVDDTRCDHVPNTESGHERLLATLRQVKGVRVICESTGGYERALVAKLLQAKIEVCVVNPGRVRAFAQAEGLLAKTDRLDAHLLRRFGQKVQPRLHAPMDQAAIVLRELLDYRRQVSDQLVAVRNRLDLAGKVLRARLDAQVLFLQKELTETDRLIQEHIDHDDTLRRKAARLRELKGAGPVLTATLLAYVPELGEIESPQLSALIGVAPFARDSGRRQGVRHVRGGRGVVRHVLYMAAVAATQHNPLLRAFYARLVAAGKPKPVALVAVMRKMLHVLNRLIADPNFVLVR

SEQ ID NO: 57698 - protein, 371 aa, unidentified
MNSIVYVGMDVHKESYTVCCYSFDKDEVLYKQKISADYKLILKYLEQLRKRFTDEIEFVCGYEAGCLGYSLYHQLTDHGVKCIILAPTTMAITNTNRVKTDKRDAGNIARCPAFHTYSEVHVPTDEDSSIKEYIRMRDDQKINLKKTKQQILALVLRLGKKFEGGKTYWTIAHMKWLKSLKLGGAYQETLDEYLITYEYFTEKIERLDQRIEELASGERYEEKVKKLGCLMGVKTHTALSVIVEVGDFERFAKAEKFTAFLGLVPSEETSDEKQKRYGITKAGNSHLRRLLVEAAQAYTRGNIGHKSVALKRRQQGNTAPVIAYADRAKERLRRRFYKMTLNKRLNRNVATTAIARELACFMWGLMTDHVA

SEQ ID NO: 57699 - protein, 390 aa, unidentified
MQPILKSCCGLDVHKSMVMACIAHGPLDKPPKFEIRKFSTMTDDLRTLKEWLKEYGVTAVAMESTGIYWKPIFNILEDDFEVVLANAQHIKNVPGRKTDVKDCQWIAHLFRNGLISGSFIPPREIRELRDLTRTRRKLVEAMTAEKNRVQKVLEDANIKISSVVSKVFGVSSLNMIGALLEKDTLSVDEIAEMAKGKLKRKVNQLVKALNGNVTDHHRFLLKQHLAHIDCIVERIREIDEEIQRKLRPYEKEFRAIQSVTGIKEVSAASVIAEIGVDMSRFPDEAHLSSWAAMCPGNNESAGKKKSGKTRRGNNYLKATLTEAAWAASRTKGTALSAMYHNIARRRGKNRALVAIGHQILIEIYRVLKTGELYQDVGAEAVNGRKSKIGN

SEQ ID NO: 57700 - protein, 353 aa, unidentified
MNNSRNKAEVILGVDTHLDTHVGVLLNAQGHQLGCLMVTTNISGYERLVTWANSFGCLKRAGVEGTGTYGAGLASVLRKHGIEVFEVNRPDRSKRRLQGKSDPTDAESAARSVLSGSANAIAKTQSGAAEMMRVVSVARRSAVKAKTQAMNQLRALLVSAPQDVRERLWKSKPADCAKGCARVRSLGTTELLHTLTTTLCLLAKRWLLLADEVEKLDAMLDALTHQHARRLREQFGVGPQTAAVLLSTAGDNPERLRNEASLAALCGVNPLPASSGKTVRHRLNRGGNRAANNALWTIAMVRMRGDPQTQSYVARRGAQGLSSKEIQRCLKRYIVRELYPLILADLADSARAC

SEQ ID NO: 57701 - protein, 337 aa, unidentified
MKYCGIDLHSNNSVIVVIDEEDRVVAQKRLPNELARIVAFIAQWRDELAGVVVESTYNWYWLVDGLQAAGLQVRLANTAAIKQYDGLKHSGDEADARHLAHLLRLGILPTGTILPRDERAVRDLARKRIQLVRGRTTHILAIENIMARQFGGRMTSNQIKRLSANDIDGMPIAADVGLAMNANLAVIGALDAQIEVLERRLRERVKPRPEYAFLTSVPGIGQTLSTTILLETGPIDRFASVGNYASYARCVDSVHTSNRKKKGEGNVKNGNKYLAWAFVEAANFARRYCPEAKRFYERKKAKTNNRVAIKALAHKLARACYHILREGRPFDVTRCFA

SEQ ID NO: 57702 - protein, 344 aa, unidentified
MQSMYYIGLDVHKRTISYCVKEVSGRIYAEGSVPATRLDLNRWMKTLPQPWTAAMEATVFSGWIYDHLRPHAVDLKVAHPLMLRAIAAAKKKNDRIDAGKICDCLRCDFLPECYMASTAIRERRRTLRYRNLLVRQMVQMKNKIAVLLMEAGVSYNKQRLHKAGYFRELVASNPDIDEGLCSLLRVCREMVVRLERTESALVRSLERDALLRDRVERLMTIPAVGPITALTWALEVGEVQRFSSIKKAVSYCGLCGEEKSSANSVQRTPLSKQRNKHLQTTLIEAAKMAPRYSAGLALLYDKERRKGNANQATLAVARKLVAYLIAVDRRQRQFEVVEASRTAA

SEQ ID NO: 57703 - protein, 326 aa, unidentified
MKIVYPICCGVDVHKKMIVATIATTDVKGITQYVVETFSTLNYDLHRFRKWLIDHDCYDVCMESTGKYWIPVFNILEQGGIRVLLTHPKFVRAIKGKKTDKKDSKWIADLFKHDLVSSSFIPPPEIRALRELSRYRYKLSCMRSSEDNRYQDCMTVSNIGLASVLSDPFGKTATDIMSHVLSSTVIEDQEIQKLIRERAKRNTDLILESVRDCHIESDQRFKMNEVRNHLDYLDQAIQRTEIELYTRILPHMHLVEHLSEQLPGITQLSATLILAEFGVDMSVFESDKHLASWAGLAPSNDQMGRVLKSPVEIFPCRSECQKRGGQ

SEQ ID NO: 57704 - protein, 366 aa, unidentified
MKKTSTVRVNGNMIFKGHKLTIGLDLGDRWSNYCVLDEAGEVLLEQKLATTPEAMKQTFGRMPRSLMALETGTHSPWLSRLLKELGHEVLVAHAQKVELITKSNRKDDRHDARTLARLARIDPELLGPVRHRSAKAQIHLTVIRARAELVSARTALVNAARGLTKSYGERLPKCGTEQVSRELAAKLSAELREVLGPLLNEIESLNERIKEYDARMEKIARESYPQVALLKQVKGVGTQIALTYVLTLDDPHRFAKSREVGCFLGLKPGRRDSGESQPQMQISKEGDRYLRTMLVQGAHYILGPFGADSDLRRWGLRLAERGGKNAKKRAVVAVARKLAVLLHRLWVSGEVYEPLRNNRKAMRAVA

SEQ ID NO: 57705 - protein, 361 aa, unidentified
MSGQSGAKLEVGLTIGVDVGDKFSQICVLDSDGEVMEEARIRTTSAAIGQWFRSAASSLVVLEAGTHSPWISRLISESSHETIVANPRRLRLIYQNDRKSDRVDAESLARLGRLDPRLLCPVKHRGASAQADLALLRSRDALIRARTLLINHARGASKSVGGRLPKCSARSFHRKVGGHIPLELAEALGPELETIARLTAQIQDLDKRVEEMAKTKYPEIGALRQVPGVGPVTATTYILTLEDPSRFPRSRAVGCYVGLRPRQADSGDQKPQLHITKAGDEALRSLLVCAAQYILGPHGPDSDLRRWGLALAERGGRAAKKRAVVAVARKLAVLLHRLWETGEIYDPLRKARLRGEIDPAT

SEQ ID NO: 57706 - protein, 346 aa, unidentified
MLHAGLDLSRKRLDICLLSDEGELVEQIQSPPDLDGLRSLAKRLDRHEEPIRGAIESMTGARFVHDTLEDLGWDVLIADAEKVKPFGSVACKTDKVDSQVLARLSQLALIPEIWLPGPTVREERELTRYRMHLVKHRSTLKHRIHATLMTFGRPCPVSDLFGKEGRALLDRLEIPEPWRTNVTASLELMDELDRKIADCNARLEAGHADHPYVALLRSVPGIGKVLAFTIASEIGDISRFPSAKHLTGYSGLCPRVNQSGDKDRRGPLTKSGPRYLRWALIEATMHASRHPAYSERYQRNKRRLGKQRGAKVAQIDIARKLTVAIWHMLTRNETFAPRGATFRLAT

SEQ ID NO: 57707 - protein, 332 aa, unidentified
MEQAIRIGLDTSKHVFQVYGVDQSERVVVCRQLQRSQVEKFFASLPPTVVGLEACGASHYWARVLRELGHEVRLLPPQYVKPYVKRGKNDRIDAEAICEAMSRPAMRFVPVKSADEQAAAMLLSVRDMLVKQRTMLVNAIRGHAAEFGVIGAKGVGRIADVLARARESVPKLAWDLMAVLAGQLEVLEIQLGKIEKQLRAWHQENERSRRLATMPGMGPVGAMTMVLRVPDPRVFRSGRHFASWIGLTPREHSTAGKQRLGKISREGDEALRRLLVVGATSVVKQAQRGKGPAWLLALLKRRPAKVVAVALANKMARIAWAMMVSGEAYRAR

SEQ ID NO: 57708 - protein, 400 aa, unidentified
MLSIGIDVSKGKSTVCGMKPGGEIVYTPFEVQHTREGMSELVSLLRGSGEEVRVVLESTGSYHCPVVAALLENGIFVSVVNSLRMKRFCSQSIRRVKTDQIDAMQIALYGLAYWQELQPTRLPEDTYREFQLLARQYYQMTSLLIKAKVDFNALCDQVLPGMQELMNDHAGRHKLSDFVLRYRHTAHILEMGETRFRKDYCKWAEKRGYRYRERMAALIFATAQNGIPVLPNAPSTQIVITEAIRVLHTVEASRDTILTQMQALAKTLPEYSLVREMPCIGDTLAPRLIAEIGDVRRFHSKRALIAYAGIDAPPYQSGKFSANNRHISKRGNRYLRKTGYEVMQSYVMHKPANDPIFTFIEKKRGEGKSGKLAMVAGLNKFLRVYYGKVTELYRSLPAVE

SEQ ID NO: 57709 - protein, 411 aa, unidentified
MRIVGFDVSRSVAEIAYLEHGALHAGGRTGLRYDQLERFAATLRTTDHVVLEATGNTAAIVNVLRRHVARVAIANPLQVRLIAEARVKTDKIDAAVLAQLYASGFLPEVWMPDEITLALRRQISRRSQLVRQRTRLKNEIHAVLAAHLIERCPASDLFGKKGRTWLSIQPLPLDERLGVEQRLRELDRLGEDLREVEQALAQATIDDARLRVMLTITGVNTTVAIGLLSAIGDITRFPNPEKLVSYFGLNPSVYQSGPTPARHGHITKRGRSYARAMLIEAAWGATQAPGPLRAFFLRVRDRRGQQIGIVATARKLAVIVWYVLTRGEPFAWDRPALTAHKLRALELQAELPAQHGSRKGSAAAYSLKSIRQQERAVAEQAERTYQRLFNRWKQSRPKSDSAPVRWPEART

SEQ ID NO: 57710 - protein, 316 aa, unidentified
MSSPEKTSLGIDTSKEWIDAHLLPHEKSWKVDNTFEELKKWIPTLPPGIELALVEATGGLHNQVAALLEEAGIPVCIINPKAIHHFAKAMGYKAKTDALDAKLIATFAQRLEPEPRRLPTPEQAQLKELMTRRRQLVGIQTSEKNRLGTVRNNRVQESITAHLTWIAAELDEIDRTLDSLLRCDESWWEKFTLLTSVPGVGKKTARALLCEIPELGSLTVKSSAALGGLAPHIQDSGKHKGKARIQGGRSVVRTTLYMAVLSAVRFNPVLRAFYQHLIGRGKLPKVALTACMRKLLTMLNAMLRDQKKWDFSPIPS

SEQ ID NO: 57711 - protein, 355 aa, unidentified
MREYFISFDVHCAFTEVAVVTARGERVARGRCATKIPDLTAMIQGVPRRRYLTFEEGPMAGWLYRHLREEVDELVVCEPRRNHLVAKDSDKDDAIDAEKLAHLFRGGYLKKVHQAEELDRALFKQHVGLYHDRVRRRVSEANVIMAQLRRHGVFVRESRFGDGDGRRGLLARLPESGALRANLELLWQGYDRLLEQEDQMRRRLVQLARKYEPLRRFVEVPGVAWVRAATFFAYVDTPARFSSKSALWRYTGIGLERSHSGQGPVRVQVAQYAHRLLRGVLLGAAATAIRLPENPFHDQYVRWTQEQGISARNARRNVARSLAATLWGMWKNGTAYRPEWVAIGGKTAEAFAAVG

SEQ ID NO: 57712 - protein, 396 aa, unidentified
MVTVGIDIGGRTHVVARCRDGQARADRETVRVSQSRAGFASLDAWLERQPEPVTLMTMESSGHYWMPLASHLRRREIPVAVVNPLAAKYFAKSRLGRTKSDPADARSLAEMAMRDSPPTRDPLAGAELRQAARFAMTLVTEQAKVCQRLIRLVDLGFPELGELFEDPTCRTAREVLRIAPTAQAATRRRTSTLADANAGPGHRRLGQTKAERLQAAAAESIAVPELAAEVTFEVGLLLDQYDLLERQIDAADRRVASLLDGETAHRLRTIPGVGPAIAATLLAEIGDIERFTDFDQLLAYAGVHPAERSSGKKGANPETAWHMSKAGNSHLRAAAYRMAVVGVQHNPVIAAHYARKRAAGKSKMNALGHCMRKALSLVWGVWRNGADFDPDYGVEA

SEQ ID NO: 57713 - protein, 433 aa, unidentified
MEEVTDEPLYRDRVCGIDIGKAQMVATIRVPSDKDPARRAQETRSFGTTKKEVLALADWLRCWQVPAVVMEATGDYWKGPFYRLEAEGFECVLADARQVKNLPGRPKRDPADSRWLAACFERGAVTSCFVATPEFRLIRLHTRYRRDLTGERTRDKQRAEKLLESAAIKLSSVVTDLHGVTGRDIMDHLIAGERDPKALAQLARARARRKIAELEEALEGAEFFTPEHAALLAAMLARIDRVNAEIDELTAVIERLLAPYEEQLQQAESMPGWARRSAQDAVAETGVDMTRFRTGGHLSSWAGKTPLDHQSGKRKGRARSKKGNRYLAGLLGETAAAAGKTQTREGARYRRLARRRGKAKACVAVGNTQLKVYHKLLSNPGMRYQDLGPDYYERQRDIRRQIAHHVGKLGDLGFEVTLCRTPGPEPDGTSQAA

SEQ ID NO: 57714 - protein, 448 aa, unidentified
MEKRKLKMEIINPNAAGIDIGSRSHFVAINQEHSDVREFGVYVQDTKELLKWLLDNDVKTVAMESTGSYWQNLYAELQDSTIDVILINGKFTKNIKGKKTDVLDCMWIQKLHTLGLLSGSFLPDLQTEYLRTLVRHRGNLIETTSQASNRMSQNMRLMNLRLDVVVKDIVGLTGLRIINEICNGETNGEQLAKLRHGNCKKSEEEIAKALQSNNRQDYLFVLKQELRKYQDVQQLIMECDVEIKRLLDEFINQDHVKKSLCIDKKVHKRINKNTPKNIDLNLIAYQYFDGIDLYAIEGFSHGTVLTLMSELGEKGILEFQNAQHFTSWLRLAPNNKISGGRILSSRTPKGSNRLKIALRQAANAIGNLKDTHLSNFFNRIAYRKGRAVAVSATARKLATILWSMLYKNQQYSPPTIYEYLDQKRKRKVIELQKQIANLDARMSKIQPA

SEQ ID NO: 57715 - protein, 354 aa, unidentified
MKTYYVGMDVHRASISIVVLNGAGKLVMQSVIETGAERVRGYLKQLRGKVYVTFEEGTQANWLHDIVRPLVTEVVVCDPRHNKLLNSGNKNDRVDAQKLAELLRNGALKAVYHGDNGMRTLKELVRNYDCLVGDTTRVMLRLKAIFRGRAIPCAGHDIYRSDRRAQWLEQLREPGARQRAGFLYAQLAALKPLRHDAKLVMVKEARRQAAYPWLMSVPQLGSVSVTQLMAVVGTPHRFRTKRQFWPYVGLAVVTRTSADHEVVNGVLRRSRRPIATRGLNRNHNHLLKKVFKSAATSACHSGPFKAGYDARVAQGMDPSLARLTIARQLAAITLAVWKRGEKFNKQMMKPQIAA

SEQ ID NO: 57716 - protein, 345 aa, unidentified
MMVIGIDAHKRSHTAVTVDEMGRQGFVKTVGTTTQDHLRLLKWAVGFAEERLWAIEDCRHLTRRLERDLIAAGESVVRVSPKLMAHVRDSARSYGKSDPIDALAVARAALREPDLPTARLDGIEREVRLLVDHREDLVAERTRIIARLRWHLHELDPGWTAPTKLERHSAFDKVKAHLSDHNDGAMVRRLALRLVEHLRLLTDEIDELTAEITVRVTKIAPSLLAIVGCGALSAAKIIGETAHAGRFRSKDAYARNNGTAPLQVWSSNNQRHRLSRTGNRQLNAALHRIALTQARCYPPARELLDRRKNGGDGGREGLRVLKRRLSDVVYRAMLTDETGPLPRTA

SEQ ID NO: 57717 - protein, 459 aa, unidentified
MNRKRRKKVGTEQQDWSVNLEVVHLNAAGIDIGNESHYVAVPPGRDPDPVRQFACFTEDLHRLAGWLKSCGIDTVAMQSTGVYWLPVYEILTEEGLQVFLVNARHTKNLPGRKTDVQECQWLLQLHTFGLLNNSFRPPEEICVLRAYWRQRAEHVSSASACIQRMQKVLTEMNVQLANVISDISGLTGLAIIQAILAGERDRYKLADLAHARIRATREEIARSLEGNWRKELVFILQQERNLYLIYQQQIAECDTALATHLQSLVNKSKPGCQPPATKASKRAGSNAPTNFDLRGELYRISGTDLTQIEGINIMNAQTIISEVGIDMSRFPSEAHFASFLGLCPDNQITGGKVLRRGTRHVENRAATALRMAATSLSRSRTYLGAKFRRLRARLGAPKAITAMAHMLARLVYRMLRYGEQYVDKGMKYYEEKYRAHEIRSIQKKAKELGLEVTLNPAAA

SEQ ID NO: 57718 - protein, 313 aa, unidentified
MLYVGIDVAKNKHDVTALNVRGKTVLKPLTFSNNKAGFELLDLSLRQLNQDCLIALENTGHYAFNLLNFLHEQGYKVYTYTPLLIKEFAKSLSLRKTKTDKKDAHGIALKLLSDPNREQFQHDNRQVELKILARHIHRLKKKQSDWKVQYTRCLDIIFPELDKIVGKHSEYTYQLLTRYPNPQKRIEAGFDKLIEIKRLTASKIQDILSVAPRSIGTTSPAREFEIIKHYKRLIDKAETCVNDLMAEFNSVITTVTGIENRLGAVILAEIRNIHAFDNPAQLQAFAGLDSSIYQSGQIDLAERMVKRGSPHLR

SEQ ID NO: 57719 - protein, 361 aa, unidentified
MFTERTSVGLDVHARSVAAAAIDGVTGELVQARLTPAHDQIRSWIRELPGPVAVVYEAGPTGFGLCRALMSAGVRCEVAAPSKLQRPSGDRVKTDAKDAIHLARLLRLDEITPVAVPTIGQETARDLVRAREDCRGDLMRARHRLSKLLLRHGIVYSGGAAWTGKHEAWLRRQRFDVAASRLTFDSYYDCVLATSSRRDRLDAAITAMAADSEFTAVVGRLGCLRGVATLTGFALAVEIGDWTRFTGNTIGSFVGLVPSEHSSGTSRAQGPITKTGNTHARRLLVEAAWHHRTRYRPGKTIRDRWALASPAARARGDAGNRWLHARWVRFGERNKKTTIADVAIARELAGWCWSLAVMDEE

SEQ ID NO: 57720 - protein, 333 aa, unidentified
MNNRNVIALDLAKNIIQVAKVSKHGEIVFNKAQSPSKVRQILANSPPSIVAMEGCGSFHYWGRIAQSYGHEVREHVKPYISKQKTDANDAIGIAIAAIQPNMPFSPVKNIEQQILQTFTVSRKFLDKQLTQLGNHIRALFYEYGITIPRSKKALKEVLTERNGLPEVLLPLVNVLKAQYQQIEQSLNKVTKNLELLVSQNEQCQRVIALEGVGVLGAAGLIASLSQTKHFKNGRCASVYLGVTPKQFSSGGKTVMLGIDKGAGDKQLKSCLFLGALSYISNLPEKPKTLKQQWLLRLVARSGVKRACIALVNKNIRTAWAMLKQGTNYQPVMI

SEQ ID NO: 57721 - protein, 336 aa, unidentified
MTIIRVGLDTSKHVCQIHGVDENEQPVLRRQIRRSEVAKFFAKLAPTRIGIEACGAAHYWARVLRGLGHEVVLVPPQYIKPYVKRGKNDKIDAEAICEAMSRPSMRFVPVKTAEQQAALTMLGVRDLLVKQRTMLINAIRGHAAEFGLTVAKGPKQVNELLQRLASEEGVPALAREMVSVLASQLEGLGVKLKTIEKQLMAWHRQDPTSQCLATIPGIGPIAGVSFALKVADPQAFRSGRHFASWIGITPRENSTAGRQKLGRISRAGDEDLRRLLVIGATAVIRAAKPGRTSLWLLALLARKSKKLAAVALANKMARIIRAMMVSGETYRQPAQA

SEQ ID NO: 57722 - protein, 400 aa, unidentified
MISVGIDVSKGKSTVCILKPYGEIVSKPFNITHTQKDLSELSSMLFRLNDEVKIVMEATGIYHLPVLTYLQEKGFFVSVINPYLMKSYRNESLRKAKTDKIDSRIIANYGIDHWFKMKDFQTSGEIYEELKLLGQQYRHYMKLHLLSLAELTHLLDLTMPGIKNLLASWNETNRKDKRSDFVERFWHYDVITSMSEQEFTEEYILWAKEKKYVPSQEKAKVIYTLAQESIPTLPSETSSIKMLVTEAVRVLKEVDATLGLILSRMQEIAKTLPEYSVVREMGGVGNTLAPKLIAEIGDVRRFRNGKALVAFAGIDPPPYESGQFVGCNRQISKRGSASLRKVGYETMRSLKMRSRPEDPVYRYVVKKESEGKSKKSAKIAGLNKFLRIYYARVTELYKNI

SEQ ID NO: 57723 - protein, 352 aa, unidentified
MNNGTRWVGIDLHRRRSHIAVIDEQGELAVSRRIVNDRDTFLELFGDPQDGDTHVALEATYGWEWLAELLEEAGYDLHLAHPLRTRAIAAARVKTDSIDAKTLAHLLRTGFLPEAYVAPRELRDLRELLRHRATLTRMRSAIKNRVHAILAKHGIANEHSDLFGKSGREFLASLQLRDAPRRRLDSLISLICDFDREIETTTREIEERAKADDRVDVLTQIRGVGRYTAMLIIAEVGDITRFQTARHLCSWAGLAPSVRSSDGKARLGHITRQGSPALRWALVEAAQKITTGSGPLREKFERIAKRRGRKIAKVAVAREILTLSFYGLRDGEIRCLARRSRASAKAKLADAA

SEQ ID NO: 57724 - protein, 343 aa, unidentified
MVNRSKPEVQVFAGIDVSARELSVAVRCGTEDRAVATFGNNAAGHKALLAYLLRGNGRSRVCLEASGNYSLDLALTLQAHRQVEVSVVNPRRARRFAESLGERSKTDPVDAGVLCEYAARMPWVAWQPPSSLALRLRAITRAIEALGVMHTQEKNREHALAASQALPVLVLRETQRHQHYLEHRMKRLQREALRLIARDRELDRRFRLMLTVPGIGQTSALQILGELVVLSDTLDARQWVAFSGIDPSQFTSGTSVQKRPRISRGGSRHLRRALYMPALVAVRHEPHLRAFYQRLLSRGKARLQAVVAVMRKLLHALFAMFRSNQSYDGSKLCQFELATKMAA

SEQ ID NO: 57725 - protein, 430 aa, unidentified
MKYNTQNAKIASITEETLVLGIDVGSATHYVRAFDWRNYEFSDKPLAFSNDEAGFLTFMAWVEDIKEKAGKTAVIPGMEPTGHYWFNLGKFLQDSGMRPVHVNPHHVKKSKEMDDNNPDKNDRKDPKTIAALVNEGRFSYPYIPTGVYAEIRSLSNLRFQTQEEITRIRNRIARWISIYFPEYKDVYGKLDAVSGMMVLKEAPLPAQIKELGAGGINQIWRDAKLRGAGMKRAKTLLSAAEHSVGSQEAPEAASMEIWNLLEDYEKYSSRMDDLMARIEEKIKEVPYVDKLLEIKGIGLKTVCGFIAEVGDLSRFDDPKQLQKLAGYAIVKNSSGKHAGESHISYRGRKRLRYVLYEAAISVIGKNGEFREIHRYYQTREKNPLKKMQSVVAIACKVLRVFYAILTKGVDYDGEKMLGDIRRPAMSVQAA

SEQ ID NO: 57726 - protein, 400 aa, unidentified
MLSIGIDVSKGKSTVCGMKPGGEIVYAPFEVQHTREGMSELVSLLRSSGEEVRAVLESTGSYHCPVVAALLENGIFVSVVNSLRMKRFCSQSIRKVKTDRIDAMQIALYGLAYWQELQPTKLPEDTYRELQLLARQYYQMTSMLIKAKVDFNAICDQVLPGMQELMSDHAGRHKLSDFVLRYRHTTHILEMGETRFQKDYCKWAEKKGYRNCERMAALIFATAQNGIPVLPNAPSTQIVITEAIRVLHTVEASRDAILTQMQALAKTLPEYSLVREMPCIGDTLAPRLIAEIGDVRRFHSKRALIAYAGIDAPPYQSGKFCANNRHISKRGNRYLRKTGYEVMQSYVMHKPANDPIFTFIEKKRGEGKSGKLAMVAGLNKFLRVYYGKVTELYRSLPAIE

SEQ ID NO: 57727 - protein, 358 aa, unidentified
MVDKVTEAAVVGGVDTHKDLHVAAVVDQNNKVLGTQYFSTTRQGYRQMLAWMTSFGTLKRIGVECTGTYGSGLLRYLQNAGLEVLEVTAPDRMERRKRGKSDTIDAECAAHAAFSGIRTVTPKTRDGMIESLRVLKTCRKTAISARRVALQIIHSNIISAPDELREQLRNMTRMQLIRTLGSWRPDASEYRNVTNVYRISLKSLARRYLELHDEIADLDVMIAAIVDELAPELIKRNAIGYESASQLLITAGDNPQRLRSESGFAALCGVSPVPVSSGKTNRYRLNRGGDRAANSALHIIAIGRLRTDAKTKEYVARRVAEGHTKMEAIRCLKRYISREVYTLLRNQNRRINSIPITA

SEQ ID NO: 57728 - protein, 479 aa, unidentified
MNCRRLVGIDLGIASAHTVRVLDGEGNTVAKRKAWPTTGSLGEVEMVALAGCPEDTRLEVVVEPTGPAWLPIAVFFIARGHVVHRVSSAKAHDLRRFLSRHTKTNGIDADTLARLPLFDPAGLSPLVLPGVERAALDRRVRATDRLTQQGALHKRRIKDLARQVLPMTPLTGELGVADLAVLERFADPNVLVKLGLKRLTAFIAKASKGHHGADRARQWLTAAEASIELYAGHPAVAFADLAAEIATEVRLLRAVQAELAAHATERENAYRWVDPAGLARSLPGVADISGPALVAAIGDPARFRTGKAFRSFTGLVPKASETGDTDRKGQPMSKAGSSLLRTTLVRAADNARKVDPQLARIYYVQMVERGKDHLGALCVVAANLAERFWAVMNRQMPYVICDTDGRPVDPHQAKAIIAEHWTVPAQVRARRRHKKMGKAPQQVLKAQVRSHTKGADKRGDLPHRASSTAPPDHVNRRTA

SEQ ID NO: 57729 - protein, 319 aa, unidentified
MNTTTAAHIDRSERNVGIDIGKSMLDVCIFEVDVYVQYPNTPEGIRELLKKLSRYNLTRILVEATGGYERSLVEACAEKEFPIIIVQPTQVRQFAKAQGIIAKTDKIDSRLIAQFGAVMKPETRPLNSKKVRYIKDLLSRKRQLNEMRTQELNRQHKAPATLAATHKRLIKVLDKEIECINKLLAKAVNEVTEWQRTYEILNSVPGVGDGVTFTLLGELPELGQLSPRKIAALCGLAPFNRDSGIMKGRRRIKGGRAPIRTVLYMAMLSAIQCNPVMKKFYKKLVEQGKHKKVALTACMRKMVTILNAMVRDNCEWQAN

SEQ ID NO: 57730 - protein, 373 aa, unidentified
MKTTTNKTRLTPSLVSTSPAAVGSGFTLGLDLGDRQHHVCVLDAAGQIVREGSLPNTRPALGQLLTEFPHATVALEAGTHSPWISRHLTALGATVWVANPRKLHAISRSERKCDQRDAQMLARLARVDPALLHPLQHGSAQAQHDLLGLKLRDALVRTRVNLINAVRFTLKSLGHAVRNRSSESFHKHVLQDIPADCLPVVQPLLTVLAHVTEQIKGMERDLIQRSKKDYPATQRLQQITGVGPLTALCFVLKIGDPQRFNRGRDVGAYLGLCPRRDQSGGTDKQLRISKCGDGLLRRLLVSAAHYVLGPFGPPCALREHGQRLTGAGSAREKKRAVVAVARKLAVLLLSLWKYGTDYEPRATVAPALVLTPA

SEQ ID NO: 57731 - protein, 353 aa, unidentified
MDKYIGFDIDSQQVSVCVIEQGKKDVYDTLGPDIGSMKQFLLSVRNNGDRLHLAYEVSGYSGFIHDHLCECVDTIAVCNPTKTTWIYRTKKKTDRIDARKLAILLSIGELPTVHVPNKEVRQWRQMILHRRNTVRDICRAKNRIRALLKSVGHFKAGFKGSWWKKVNILWMRQVSAGSEFWQMQLGQLMDEYEFLDTQLFKVTARLDVYLKTKPGAVLLMTIPGIGPRTTEAVLAYTDDVARFGGSREYCSYFGVVPNLDQSGNSRRVGHITKHGPSVVRWLLCEAAWKSVAKSPSLKSFYERVMHGDPKRKKIAIVAVSRKLLSIMRAMLTTGELFNEKLVLTHCTQLEKAA

SEQ ID NO: 57732 - protein, 350 aa, unidentified
MRTAICVLGVDIGKNVCSLVGLDVSGKVVLRRGVKRETLIALAAKLPPCIVAMEACCGAHHLGRVFAARGHEVRLMSPEYVRPYVKAQKNDDRDAEGIAEAATRPTMRFVELKAQAQLDLQTLHRARDRLVGERTALINQLRAILLERGIVVAKGKRNLEKFVAGLLEGPDDQGLSDRMRTLVADMRAQWTELDRRIRAFDAEFVAFLQQNTDARLLSTIPGVGPLIASALVAAIGAGETFEHGRDLAAWLGLTPRQATTGGKPKLLGISKRGNQYLRRMLIHGARAALPSVAEYDTSLGRWLKGLLARVHRNVAVVALANKLARIAWAVLRREEAFMAKEQPSKAVAAA

SEQ ID NO: 57733 - protein, 341 aa, unidentified
MRTTYVGMDIHKNFIQAAVLDEEGNIIKEQKFKSDGEAIKRFVKSLKVQKIQAAIEATCTWYHVYKTLDALGVETTLVNMRRTKTIAESKIKTDKLDAKTIAQCLRTGFIATAYIPPKTIMEQRNILRHRMSLRKEIARYKNKIHAILLRNGIPHHDYSDLFGAGGMKFLRRLTLSDSEQYSLTSYLTIVETLVYEKTQTAKKIETLCKNNPQAMLLTSIPGISYYSAMIILTEIGEIHRFPHPKKLCSYAGLVPRTIQSGSHVYHGRILKECNQNLKWILDQCAHIHIRHCPNSLITKLYYRVENKKGTSKAIVAASRKLLTCIWYMLMKNETFKYSSDD

SEQ ID NO: 57734 - protein, 387 aa, unidentified
MSAMESGVARAAIDVTLAAIFVSLELSRGRWVITSLSPGKGERMSKHSIDSGDVKGLLNHFKTLRAKAQARTGKSVPTAVIYEAGLDGFWIHRVLEQEGIESHVVDAASVLTSRRRRKAKTDRIDGEVLLRTLLAYERGEPRVCAMVRPPSPEEEDRRRLCRERKTLVAERIAHVNRIKGLLFAQGISDYEPRRRDRRERLEQPTTGDRRPLPAHLKAQISRELDRLELTLRQLKAVEAERDALLAPKGETAPAPVAALAGLRGIGPEFAAVLWLECFFRRFGNRRQVAAYAGLAPTPWQSGSVDHEQGVSQSGNPKLRSTMIQLAWPWLRYQPTSALSRWFKERVKRNGGRGKKTAIVALARKLLVALWKLASSGVVIEGAVMRAA

SEQ ID NO: 57735 - protein, 429 aa, unidentified
MNYTQNEKIEQVTDTTMVVGVDIGSQTHYARAFDNRSRELTKRVFSFQNDIEGFNSFNIWAETLKKENGKTDVLIGCEPTGHYWFAFAKYVKDHRKTLVMVNPFSVKKIKELDDNSPKKTDSKDPKTIAKLVVDGRYSIPYMPEGIYAEIRDLVYSRDRIMKQHNISANRIQRWLAIHFPEYLGLYTKFDTTSGLAVLERAPLPKDIIALGIDGIRKIWHDKKIRGRGVTEDRAKTLVEAAHNSVGLDGGIGSKSELYMLLEEHRLWSSQLEAINKVLEEVILKVRNVEKLLAIKGVGSITIAGFIAEVGDIRRFSSPKQIQKYAGLELVENSSGKHKGRSRISKRGRRKLRKILYQVMIPLLARNEEFRKIYDYYVTRVQNPLKRRQAMVAVSCKLIRVFYAVLTKGVDYDRIKMMSDIHHESDVIAA

SEQ ID NO: 57736 - protein, 398 aa, unidentified
MQPTRINHSMPAEDVLAVALELSSSTWKIALHDGKREKPAIQTVAAKAPACRLDEAMQAIEKIKTKWGIGPGVRTVVLYEAGQDGFWIERALSKLGYEVVICDPASIPVERHARRAKTDRLDAIKLVFCLRAWLRGEHDRMHVIRVPAVETEAQRHLVRDRGELQKEALQHRDRIRKLLRTVGCWQDVEGDIAKRLAKGEISCYDGAAIPAQLHARLTRECQRLALAQQQLAALEKDLVRQLPEPAQKRIADLQRLKAVGPVGATRLVLELFWRSFDNRRQVGACVGLAPQPYDSGQSRVDQGISKQGNRRVRSLLIEMAWLWLRYQPGSAMAQWYVQRTQGNSQNKRGKRIAIVAVARRLVIALWRYLTHGILPEGALLKNSKTTGLKRSTGEVAAV

SEQ ID NO: 57737 - protein, 354 aa, unidentified
MPQSSTLYVGMDVHKESIAVAYVAQEHGAEVVSLGPIGTRQCDIDKLIRQLQSKSKQLVFVYEAGPCGYWLYRYLTKKGYVCWVVAPSLIPKRAGDRVKTDRRDAIQLARLMRSGDLTPVYVPAVDDEAIRDLSRAREDTLRDLKAAKLRLKAFLLRHDIRYTGRANWSPAHLRWLSEVVCPTPAQQIVFQEYVQTVTEQTERLGRLELELHEQIKTWRFAPVVEALQALRGVQFTVAVTTVAELGDLTRFANPRQLMNYLGLTPSEYSSGARRQQGSITKTGNSHARRALVEGAWAYRYPAKVSRHLQLRLEKLPTAIQAISWKAQVRLCTRYRQLMAKGKNANQVVVAIARE

SEQ ID NO: 57738 - protein, 430 aa, unidentified
MKSNTQNAKIEAITEKTLVLGIDVGSETHYARAFDHRGIEYSKKPFKFSNTEAGFVTFKEWILDLKERHEKDKVVPGMEPTGHYWFNLGKFLQDNEMKPVLVNPHHVKKSKELDDNNPTKNDRKDPKVIAGLVREGRYMIPYLPDGVYADLRTASNIRFQLQAELTRIQNRISRWFNIYFPEYKTVYGKPDAKSGMLILKEAPLPEDILTLGVDGVNQIWRDAKMRTVGKARAKTLIEAAEHSVGSKEGAVSARIEIRMLLEDYESRNIRLLEVMTLIEELVKQIPMAEKLLEIKGVGIRTVSGFLAEVGDISRFNNPKELQKLAGLALVENSSGKHKGKTTISKRGRKRLRYLFFEVAMSLVSKNPEFRELHNYYTTRRVNPLKKMQSLMAIAAKLIRVFYAMLTKGVDYDPKKMVSDIKRPAVYLQAA

SEQ ID NO: 57739 - protein, 411 aa, unidentified
MEAAVITAVGIDVSKSKSTVAVRRPGGEIVLRPFEVHHTNSDLKKLTSTLKKLGGDIRIVMEHTSTYWRPIALTLKEAGFFVSVVNAMLIHDFSDNTIRKLKTDRADALKIANYALTFWDTLPPFNSEEETRLLLKMQSRANERITATATALRNGLIALADQTFPGVNIAFDPNTKNANGHEKWVDFFLRYWHKDCVCQYSMEAFTESYRGWCKRKNYKFRTDTAHKIYLLTQEGVATLPRCESTKMLITQACKSLNAVCEAKQSTQLEMQRLAAMLPEYEVVMQMEGAGPITGPALMAEIGDVRRFKNKKALVAFAGIDAPPFQSGAFESKSRHVSKRGSPHLRRTIFIISNIILTRSNPENAVYCFMDKKRSEGKHYYVYTVAGSAKFLRVYYARVTEFLRSQPPSDAC

SEQ ID NO: 57740 - protein, 373 aa, unidentified
MSMLADMVDVVVGGDTHRDSHTLEIATAQGVPISTITVTNDEAGYARALAFLTEHTTTAGGNAGGNAGNAGAGPRVVVGLEGTRSYGIGLARAFTAAGIPVVEVRPGPAGRGEAAAQGHRGKSDPIDAHRAVLTVLRMNPTRLPRPRSDGDREALRILLNARHDMTTTRTAQINQLRALLLTGDDTDRALARAALTQTRLATLARRRGRTGENTHHTVRRHETRRLALAITATGRDLATNKKHLTNLVQTLAPTLLTKTGIGPVSAAQAIVSWSHPGRCRNEAAFAALAGTAPIPASSGRTTRHRLNRGGDRQLNRALHNITLTRWRCCPRTHAYITRRRNQGLTDPEIRRCLKRYIAREIHRTLTNTWLDNT

SEQ ID NO: 57741 - protein, 322 aa, unidentified
MILSMGVDISKKKADITIYNDVVKKNYVITNSVSSIKRFLKKHSDVDRIVMEATGTYYLKFATIANELGFYVSVVNPYIIKKYGEYKFKRSKTDKIDAELIAKYGYENTPKKYKITDKLRSKLKSLLTTITGLKKQITQNTNRIEALSQFPNNETKYSIKELQKVIKAIKREKSNIEKEIQSIIKNNFKKTYELLDGIKGLGPGCNAAIIAYYGDFSDFDSAKKAVAFAGMDPIKHESGSSVRKKSKISKRGNKVLRALLYMGGMSAIQYNKQCIKLNKRLKDKGKIGKVRIMASAHKLLRLAYGVVTSGVKYDPDYLKKSA

SEQ ID NO: 57742 - protein, 343 aa, unidentified
MKHTLIAVDLAKDVFEIAVSKRPGTVAERHRLRRATFLRFFAQRQPATVLLEACGSAHHWGRQLQQQGHRVLLLPPHLVRPYVCRNKTDRADAKGLLEAFRNEDVRPVPVKSIEQQAIASLHRMRSAWIADRTARINTVRGILRELGLVIPQGARFVVPKLWEYLEDAETPIPDFLRPTLAAAAHEIREFEQNIQDVERQLREVARHSELVRRLRAVPGIGLLTSTALVAFVGDVQRFSSGRHFASYLGLTPREHSSGLRRRLGRISKRGDVYLRMLLTHGARAVVNAAKRTDHPDRLRSWVLRLEQRAGHNRATVALANKLARIVWAIWRHDREFISQLEAA

SEQ ID NO: 57743 - protein, 408 aa, unidentified
MEVIHERCAGLDVHKETVVGCLRVRERGQVRREVRRWATTTAELLELGDWLRQAGCTHVAMEATGIYWKPVWHVLEGEFELILANPAHIRNVPGRKSDVNDATWIADLLAHGLIRASLVPPSPIQELRDLTRTRKQLMREIVQHKQRIQKVLEDANVKLSSVVSDVFGESGRRMLKAISAGQTDARQLAALGDGRLSASRETLAAALQGKVTAHHRFLLSQHLRMIEYLEQTVAAFEARIEAAVEPFRAAIENLVTIPGVGATAAHVIIAEIGVDMSRFAKVGHLRSWAGLCPELHESAGKVMSRRLRHGAPWLKTVLVQCAWAATRNKNNYLHAQFVRIRARRGSKKAIIAVAASILTTAYYLLRNQVPYRDPGALYFARIDQERTAQRLARRIKDLGYEVQIRKAA

SEQ ID NO: 57744 - protein, 343 aa, unidentified
MDHFAGLDVSVKETSVCIVDDTGKIVREVKVASEPEALLKVLRSPSHQIKRVGLEAGPLSQWLYSALAEAGLSVICVETRHMRAVLKAQINKTDRNDARGMAQMMRVGLYRPVHVKTLRSQKLRMLLTHRKLLQSKAIAVDNDLRGTLRNFGLKVGMVGATRFEARVKELIENFSDLAVLVEPLLVVRRVLREQLGILHRRLLTVVRDDDVCRRLMTVPGVGPVVALTYRATIDVPARFRKSKAVGAVFGLTSAKYQSGEIDRSGAISRCGDEMMRTMLYEAAQSMLFHSIRWSWLKAWAMKIARHRGMKKAVVALARRLAVIMHRIWVDGTEFRWTKEAVTT

SEQ ID NO: 57745 - protein, 406 aa, unidentified
MKQIVSVGIDVSKGKSTVCAMIHPNTIIKESFEVLHTVEEMSMLADYIGSLDGEIRIVMESTGHYHLPVAQFLYQKGFFVCVENAYIIRQFSRIMLHGAKTDPLDAKKLAKYGLAYWSELKPYKFHPSCYTELSLLSKQYQTYIKLLIAAKQNVIHLMDEMLPGFKEALDTASSVQFSKVKYVDFAKEFYHVDMIKTMGKEIFRENYKQWCKEKGYRFQSEKADELFHLAEDGIPTLPTEFPSTRLCMEVATEQVSQLGYALEQILSQMQNLAKTLPEYQTIRQMGGMGEKLCVRFIADIGDVRRFHNGKALVAYAGIDAPPYQSGQYTGTKRRISKRGNSALRKTGYEVMKSLKSHPPKTDTRVYDFIIKKENEGKSKKQAKIAGLNKFLQIYYARVMEIYKNIA

SEQ ID NO: 57746 - protein, 307 aa, unidentified
MFVGIDVAKDRLDVHVRPTGEAFTVARDGEGIEELAKRLSAMTPTLVVLEASGGFETIVAAGLAAAGLPVAVVNPRQIRDFARATARLAKTDTLDAAVIAHFAEAVKPPPRPLADAQSRLLGELMARRRQLIEMIGAESNRRRMLTVRRTLKSVDRVLATLKAQLEEIDHDIDVAVRGTPAWREAEDLLISVPGIGPRIARTLIAELPELGRLDRREIASLTGVAPFNRDSGTLRGRRTIAGGRPVVRAALYRSVLVSIRRKLPLAHTYHRLRAAGKPAKVAIVACMRKLVTILNAILRDKKPWATA

SEQ ID NO: 57747 - protein, 321 aa, unidentified
MNKDSKIHGVDISKDVFDVMCPNGDHHQFINAPKGFKQYLKLLGEEDLVVMEATGYYHYLLAEFLYDSGIKVSVVNPLSVKRFRQMQLAKIKTDKSDARAIRDYGRVNEVPLYDGKGALQAESLQLLALMDIYLKQRTQIKNKLHGEKVLGIPSNAVHRSLQRTLKDLDRELGSLNQRLLSLVKAAQQEQLTNLKSIPGLGDKTVALLIVLTEGFTKFENAGQLCNYAGITPTIRRSGSSVRGKSRISKVGNRKLRNLLFLCAFSACKHNKGCRDIYERITAKGKSKKLALIAVSNKLLKQAFAIAKSGLPYDENYVSKLN

SEQ ID NO: 57748 - protein, 388 aa, unidentified
MPKPVDLSKSLAVLDPDSTLIVVIEMSQSSWLVAARAPGLARDPLKKLPPDPEQLFKLIDRWREESRRAGRVVRRVCVAFEAGRDGFWLARLLAQHEIEVRVIHPTSIPVKRDHRRAKTDRLDTELLMRAFLGWLRGEADHCSMAAIPTLAEEDAKRPTRERESRVNARSRLVNRMKGALARLGIRGFNPKLRKAAEKLEELRTGAGEPLPPNTLAELRRDMAQLRFVADQIKQIEKAREARLEKAPREGAHPMVLMLASIKGVGLETAEMLVAEVLSRKLRDRRAVARYGGLTGSPDESGSRSREKGLARSGNARVRRGMIQLAWRFLMFQKESALAKWFEARTANGPRGVRKTMIVALARKLLIDLWRFVEDGTMLVGVELFDSRA

SEQ ID NO: 57749 - protein, 344 aa, unidentified
MDIGKRNCKACIMNADGSIAEESEYDNKLTEAEIFAYSMVKKYGECVAVCESTANLWLKTYQAFEKYGIGVKLANPLKTKAIAEARIKTDTLDARTLAHLLRSDLVAECYIAPKGIREDRSLLRLRTNLVQDRTRVMRVHSLLDKYDVKCDYDNIFGVKGTRWLSSLKLSDNDQILLHEYIMQIEFLNTEIKNTESKISYQASKNESAKILMSMTGIDYFSAMLIALEIGDITRFSTPEKLVSWSGLCPSIHQSGNSLYMGKMKDGNKKVRWILIQAANTAARKDGRLRRFYLRIAKRHGHHIAITHVANKMITIIWHMLVNKKLYNERKQNLYETKLKRIQKT

SEQ ID NO: 57750 - protein, 347 aa, unidentified
METIVRIGLDTSKSVFQLHGVDGMEQPVLRRKLRRGQVLAFFGRLPPTLVAMEACGASHYWARELRSLGHEVAMIPPQYVKPYVQRGKSDAADAEAICEAASRPKLQKNFVPIKSPEQQGAQMLTRVRNQFIGRRTQLANSIRGYAAEFGFTAPKGLSRLPQLLIDIRADATVPDLAMELIEALAAEMARVDDQIVTLDKKLMQLHRSSEMSRRLATIPGIGPIGATLLSIKVVDARGFKSARNFAAWLGLTPKNHSTAGKNRLGVITRAGDGMLRTVLVAGATAVIADMRRRGSRPWSWLKDMIARKPPKLVAIALANKLARIAWKLMVSGERYRPASAVPMPTPT

SEQ ID NO: 57751 - protein, 347 aa, unidentified
MKHCAGLDVSVKETAICIVDEVGKVVRESKVATEPEAIIALLNSAGLEYERVGLEAGPLSQWLVNGLAEAGLPVICVETRHMKAVLKAQQVNKSDRNDARGIAQMMRVGLYKPVHVKTLRSQQERMLLTTRKLLRDKLQDMENELRGTLRNFGLKVGVVSPGRFEARIRELVTGQPRLEMIVAPLLAVRRALREQLAKLHKMVLDQVRGDKLCRRLMTAPGVGPVVALTFRATVDQAQRFARSKTVGAHFGLAPRRFQSGETDYDGRVSKCGDAMMRTALYEAAQVLLTRTQKWSWLKAWGMQVARRRGAKKAIVALARRLAVVLHRMWIDGTEFRWRKETDATATA

SEQ ID NO: 57752 - protein, 348 aa, unidentified
MLHVGLDLSRRRLDYCLLDGDEERIETGAVAPDADALAGLVRLIELRHGPRPVRAVIESMNGARFVHDTLERHGWDVEIADAQRVKGLAPLACKTDRIDAWVLAELSRRELVPAIWLPSFAVRQERERARWRLHLVKHRSSLKHRVHAQLMAFGHACPVADLFGHHGRELLDRLEFPEPWRGDVLAAVALIDELDRQITAIASELKALGAEHPYVPLLLTVPGVGWVLAYTIAAEIGDITRFASPRKLCGYSGLCPRVYQSGESDRRGPLAKHGPKYLRWALMEAATNAAKHPLYRDRYQQTKARVGRQRGAKVAQIDLARRLAEAIWHMLTRNQPFAPKGAAFPLAA

SEQ ID NO: 57753 - protein, 355 aa, unidentified
MSILAERLDYVIGVDTHLRSHTAAVLTATGGLVASARIDAEEAGYVQLVQLVGRKAPGRRVWAVEGTRSYGAGLTGHLLRLGEVVGEVDRPRRPARKHGKSDEIDAVRAAREALSMGELASPRSSGRREALRIAATTRQEVMGERTRAMNQLRDLVVSSPEHIAARFRDRSGRSHSLERLTKRCLALRVTATHDVEDRIRLDTMKRIARRIVELEREAAHYESEMTELIRQLAPGLLELPGVGPATAAMVITTYSHRGRFRSEAAFASMAGVAPIPASSGQQQRHRLNRGGDRRLNQALDLIVKNRIRYDPQTIAYMERNKGGQRTDRDLRRILKRYLARSLFRFLERTSPLDKG

SEQ ID NO: 57754 - protein, 404 aa, unidentified
MKQFTPELAEVKSNSALNLILNHRNLDDYCAYIGLDVHKESIAIAVATRGRGKVSYRNEIPNRPKSIKKMVDKLTKEFHGELLLFSYEAGPCSYDVYHQLIALGQDCEVVAPSLIPKKAGDRVKTDRRDAMGLARLSRSGELTAVWVPEPEQEAMRDLTRAREDSKAIELKTKQQLGAFLLRHGRVYETGKTRWTKGHFNWLETVKFDSAIQQIVLQEYINAVKDAAQRVAGIVTEMHKALQTWSLRPVVEGLIALRGIDIITAMTIMAELGDISRFDNPRQLMAFLGLVPSEYSSGGKRRLGSITKTGNGHVRRVLVESSWSYRFPARKTKHLRQKESKTSARVQSIAWEAQKRLCGRYQHLLESGKIKQQACTAVARELSGFIWAIVCELMNKPHASRCITI

SEQ ID NO: 57755 - protein, 366 aa, unidentified
MRYHGVDLHKKYATVSVRDESGAQIAFMGREFDIEGYVGRLTSEDVVVLEASSGALFWAERIGQRGARCLVIDAYRFRIIRDSWQKTDRHDATNLSEALWLAESTGRVKLPVVWQPNTTVRELRRLTGMYEILNKQIRQLKNQVHGVLLDNGMRDRTVGKKLVEAPQPDGELLKSLVLSPASRFCVQAALRQLLALAKEKDTLTRQLYWAGQPLDAEIRLLMGIRGVTPLMALVFLSEVGDIGRFSSARKLHAYLGVVPRIRSSGGTTHSGAINRASRHLARTLFTQAVPHLAESSPSMHKFYRELVGRRGYGRARIALLRKVFSVMRRMLLEGVQYRGFEEALYARKVHAYERELRKVEVKQEAA

SEQ ID NO: 57756 - protein, 337 aa, unidentified
MKNYTLQNISIGLDVSKESISVYIPINKLDYEIKNSQEGLNKLASKLKKLYKKEHDNLVFVYEPTGSYSELLKKFCAKKSIRTFAINPKRSHNFAKATGNRNKTDVDDAKVLSEAIILAKDEEISMPVISLVAEDIKEMMSYYKFIVKQRVMACNHLESITVKDGNNYVIASLEDEIKSLKKRENDIVVNIKTIIQSDEELSDGFENIRSIIGIGELGAIVLLHLFLKYPDANKKQIISLVGLDPTRFDSGSSVHKKSKISKAGAKIYRGVLFMGTMTATRCNPEMKIFYDRLKENGKQTTQSQIAVMRKMIIIAHSLYKNKQKYSSDVYQKACGML

SEQ ID NO: 57757 - protein, 364 aa, unidentified
MKKITIIGIDIAKNVFQLHAVGSDGTVVLRRQLRRGQVLGFFAKLDPCLIGLEACATSHYWARELQELGHDVRLIPPIYVKPYVKRQKNDAADAEAICEAVQRPTMRFVAVKSAEQQGVLMLHRARELLVGQRTALINALRGHFAEFGIVVAQGPQHVGALVQRVMEEQDASLPHPMRTAFASVVAALLNLGGEIGKLDKAILASHRRDQTSVNLATIPGIGPLIASCLSASVPDARRFACGREFAAYLGLVPKQNSTGGKPKLGRISKMGNRHLRTLLVVGAHAALYRMKSGKTQSRLADWARVLLAKKPFKLVAVALANKMARTAWAIMAKGTTQVLAAPLKQQHSARQTRELQGIQRLAVR

SEQ ID NO: 57758 - protein, 400 aa, unidentified
MIDAIRWDEKSRSPERDAISSQVIHALEAQENKETGMKKISTTTAKAFRKMEKLTIGLDLGDRSSCYCVLDERGELVLEQKVSTTPKAMGEVFGGMPRSRIALETGTHSPWVSRLLSELGHEVIVAHARNVRLIGESRRKDDRLDAKTLARLARIDPQLLCPVKHRSAKAQAHLTVIRARAGLVRSRTALINVARGLTKSYGERLRGCSPRNLNKRAEGLSVELRTALGPLLEEIESLSERIREYNQRIEGIAQEHYPETALLKQVKGVGTLVALTYMLTLEDPHRFSKSRDAGCYAGLQPGRRNSGQSQPQMRISKEGDAYLRGLLVQSAHHILGPFGADSDLRRWGLKLAERGGKNGKKRAIVATARKLAVLLHRLWVSGEVYEPFYSSSRRVLVAAA

SEQ ID NO: 57759 - protein, 350 aa, unidentified
MVVIGVDAHKRTHTFAVVDEMGREVATRTFRATLEGHRAALGWARTWRERMFGLEDCRNLTRRLEADLIRAGERVVRVPARLMATARRTGRAVGKSDPIDALAVARAALREPGLPVAQLDGEARRLRLLVDHREDMVGERTRMQSRLRWHVHELFPGLEIAPKSLGRLHVIAAVDRRLRPVEGTVAAIGRELLGRIRELTVRINELEREITQLVRPLAPNLMAMPGCGPLSAAKIIGEVAGAARFRSRAAFARWNGTAPIPVWSGNVSRHRLNRGGNRQVNAALHRIALTQWRGVGPGRAYVQHRLAAGSTKTEALRLLRRRLSDEVFRRLLVDETLIGITSVRRGVIAA

SEQ ID NO: 57760 - protein, 430 aa, unidentified
MKSNTQNAKIEAITEKTLVLGIDVGSETHYARAFDYRGIEYSKKPFKFSNTEAGFATFKEWILDLKERHEKDKVVPGMEPTGHYWFNLGKFLQDNEMKPVLVNPHHVKKSKELDDNNPTKNDRKDPKVIAGLVREGRYMIPYLPDGVYADLRTASNIRFQLQAELTRIQNRISRWFNIYFPEYKTVYGKPDAKSGILILKAAPLPEDILTLGIDGVNQIWRDAKLRAVGKARAKTLIEAAGHSVGSKEGAVSARMEIRMLLEDYESKNMRLQEVMVLIEELVKGIPMAEKLLEIKGVGIRTVSGFLAEVGDISRFNNPKELQKLAGLALVENSSGKHKGKTTISRRGRKRLRYLLFEVAMSLVAKNPEFRELHNYYTTRRLNPLKKMQSLMAIAAKLIRVFYAMLTKGVDYDPKKMVSDIKRPAVYLQAA

SEQ ID NO: 57761 - protein, 332 aa, unidentified
MDLAKKVMQIHFVSGDGEITDKQVKRAEFLDFFRNRSKCLIGMEACGASQDWARKLEAMGHEVHLMSPKAVKPFVSGQKNDYNDAIGIYKAMFNGVRRVPVKSTEIRDLQTLRRIRSQVTKDKVKEINHVRGLLAEYGIVMGKSLNAFNKDISSALGILTERGDVSPLVAEELRTTVEAIKAKIERQKKLDQEIEQLARGCKNYENFLKTPGVGPFTAAMLCVLLCDPSIFANGRQFAAYIGLAPRSRGSGGKNYVTGIPSKFNCDSESRAVLVECAQAIARCKNKSPWVEGILRRKPKKVALIAIANKLARQVWAMANKGESFKQMAILTA

SEQ ID NO: 57762 - protein, 341 aa, unidentified
MKPEMSVLGIDIAKRVFHAVGMDERGKIVLRKRLSRHDLMPFLAKLPPVLIGIEACGGAHYWARRFREHGHEVKLMAPQFVKPYVKSNKNDSRDAEAIAEAVTRPTMRFVPIKDVDQQDIQALHRVRERLMGERTALVNEVHGLLHEYGIVIPKGVSKFRQAVVGKLESEKDKLTPLSQEMFWKLVEEFAALEAQLAYYQEKLDTLAQSHPECQRLMTIPGIGPFTATALVAAVSDASAFKNGRQFAAWLGLVPRQYSTGGKERLLGISKRGDTYLRKLLVHGARATIRWVGLKTDRRSQWIRQLVERRGKNRTAVAVANKNARIVWALLTSHQDYQPATS

SEQ ID NO: 57763 - protein, 397 aa, unidentified
MYIVGIDIAKRKHEAAVIDGEGAVIIKPFSFTNNCSGYNRLLAMLTKAKLPLDEVSFAMEATGHYWLALFTRLQKEGFRVQVINPVQTNSIRSFYIRQAKTDPRDALLIAEVIRFGHFSESTLHPENIYELRELCRGRHAIVSMQADVKRKVVALLDQVFPEYETAFTNLFSDTSMAILQTCPTPKELSEMPLEELCHLIEVSSRKRFRMVKAQELQELARNSFGFAMAGDVFSTMIRLYAKHLVFLKQQVQEMDRKIAEIMDTLDTPITTITGIGPTLGAYILSEIGDISRFSSAAKLAAYAGIDPTMRQSGEYNGVRNRMSKRGSPYLRHAIWLAASSAVLHDPALKLYFQKKRDEGKPYMASVGHACRKMVSIIYAVMRDNKAYTPYIPNEISA

SEQ ID NO: 57764 - protein, 342 aa, unidentified
MKDRIVIAVDIAKNVFEFVKYKNDKAVGKNKRIKRAQFEKMILTMEHCKLVMESCSGAQHWARMAKVKGHMAVLIHPKLVQGYRQGQKTDANDALAIYEASRRDKLKECVQKTTDQQGLAMMESVRSHYQERKKRLSNAMRGHLAEFGIIMPKGYKHLRRQMPRILEDAENALPMSARIALNQYWTDWQSACENVLKFEKEIMAELRDIPAAKELLKIEGIGPVVTSGLICVLGDGSAFRRGKEAAAYIGTSPKQHSSGDKQTIVGISKTTGHKKLRSALIQGARAIIMHLKTKKKPLSEKERWLLQLMERQGENRAAVALANKNVRTAWALLAHQRQYIAA

SEQ ID NO: 57765 - protein, 501 aa, unidentified
MPNCKHNSMKTPASSSAAKRRLRNSNKLLRQNKKKVAPATEPRSLDELTPVHRRAAGIDVGSAENYAAIPLEGLAAGEAAVRVFGVFSVDQDALVEWLQTHQITTVAMEATGIYWMSLYDKLEAVGIEVYLVDPHAVRAVPGRKSDWLDCQWLQKLHTYGLLRRAFRPDAPIRRLRTLTRQRTELVLCGVDNQEHMGKELISMNLQLGLAVSDLVGDTGLRIIEAILAGQRDPKELVKLRDPRCRKSTVAEMEAALTGTYDEEQLFVLKQSLDGWKFYQKQMADCDPRIEKALQAIPTVSLVAPPAPPKPLPAAKSPKPKRKRVDRGNNAPTIDFTAALQRVCGVDLMKVCGLNLLSVLMLIGEIGVDMSRWRSARAFSSWLGLCPGTKISGGKVLSRRTRKVKNRASTILRIAAWTAGKTDTWIGRFYRRVKSRRGAPKAVTATARKLACVIYHLMKYKEEFVFLDTTKYEEQATNHRLSRLRKEAKSLGFQLTEYQRVA

SEQ ID NO: 57766 - protein, 307 aa, unidentified
MNGIGAGVDVSKAYLDVAVFQQNEVRRFDNGAAGWRALVTWLKPYGPGQVVLEATGGYEQRALGALHEAGLPMRRINPRQVRSFARATGQLAKTDRIDARILAHVASVIDLVPFQPLDADAAKLRQYKARRDHLVQNIATEKQRRRQLDDPILRADLDAHIAYMEQALHRIEQVIADLIKDTPQARIARTIKGVGPAMVATMICDLPELGHLNRKAIAKLVGVAPLNRDSGFFVGQRSTWGGRAGPRSALYMSALTAAHHDPQLKAFYAALIGRGKPKKLALVAVMRKLIVILNARMREAIAAAPTA

SEQ ID NO: 57767 - protein, 373 aa, unidentified
MNTTITHVAMDTHKKQHQVAWLHPDTGEIQEFTVANTAREIERMVKKIRKQAPGEIHVCYEAGVCGFVLQRLLEKLGCVCQVIAPSLVPTKPGDRVKTDRRDAKKLLGLFAAGQLTQVHPPEALQEADRELTRCRECVEMDRKRARQRLNSLLVRHGYIYSEGSLWTGKHGVWLGGLVFDQPRVRTVFEEYRSELEHCDQRLESLDKQLAQLAMSERYREAVAALRCFRGIDTLTAITLLTEIYSFGRFSSPRALMSYLGVTPSEHSSGESRRTGGITKTGNRRVRRLLTESGWHYRHPPRVSKTLKARRENQPGWAIDLADRAALRLYRRYKHLTERGKPLPQALMAVVRELAGFLWAMLHRLLSPAVSASS

SEQ ID NO: 57768 - protein, 364 aa, unidentified
MEQITRGECDRVVVRVGVDLAKRVIQVHAVDAAGRLVTGRALSRDRFIAWCAQLPGGCVVAMEASSSAHHWARKLCSLGLDARIVAAHLVTPYRKQGSGGKNDANDAAAICEAASRPGMHFVPIKSVEQQSILCVHRLREGVKEERTACINRIRGLLAEFGLVFPQSPKVLRLVLAEVIEDAGNELGGLARLTLQRAHAQWQELDAHLAWCDERIAQHARTNEQVKKATTLMGVGPITASAVVATVGDFKQFTNGAQFGAWIGLTPRQHSSGGKTRLGRITKRGDTYLRTLLIQAAKSAVLTAHQRSDRISSWLCKLRERSGWQIAAVALANKNARILWALMTKGQAFDPNHLGVKPDTSAQPV

SEQ ID NO: 57769 - protein, 421 aa, unidentified
MRKADTRKVKFVRDDTLIVAIDVGMEMNHGYCTTPDGKDIKPFKFDNTRDGMDKLWGMVMASKNRFQCEEIIVGYESTGPYGEPLVHYLMKKPVMLVQINPMHTKRVKEISDNSPLKTDDKDPRVIADIIKLGRTLSIVIPEGDAAYLRRLNNSRERHVKERTALVNQLQQLVFLLFPEFKKVLKNIKCRTPLYLLKKYPTPESISVLETPVLGEEMRKKSRGKFREHHADMLINLAKNTVGIREGVAGISMDIRHILVQLEMLKSLIAEIENEMEIALGRIPYSSKLLSIKGLGIVSVAGIIGEIGDFKKFQTQGEIMKLAGLDLYEISSGKMKGQRRISKRGRSLLRKILYYAAIQTIRKNGILYDYYTRLTDRGMKRMMALVAVSRKLLGIIYAIVRDDSEYLVNFESIKRQVIKKAA

SEQ ID NO: 57770 - protein, 358 aa, unidentified
MAVHVTYMRRFQMVTTIGIDPHKATHTAVAIDEAETVLGELTVPADRYQIARLVDWAVKVDGDGDRVWAVESAGGLGYLLSQQLVADGEHVVDVPAVLASRVRVLSSGKSDKNDPNDARSVAIAALRQPALAVVRRQDHATVLRMLAKRHLELTSLRTQAVCRLHAVLMLLKPGGMRRRLSAKAASRMLQGMRSLDTVGEQRRRVAKEHLVDIRRLDRDIKANKTLIQRAVVVSETTVTDVYGVGPIVAAFLIGYTGDPARFATSDRYAAYNGTAPIEVSSGGNKRHRLSLRGNRRLNHAIHMAAVTQIRFQTPGRVYYDKKLAEGKTKKEALRALKRHISDAVYRRLITDQQQATTS

SEQ ID NO: 57771 - protein, 465 aa, unidentified
MKTAPSSHSRKRQARNSKKLKRQETTPKVEAVSLDELKPVHRRAAGIDVGSAENYVAIPTEGLAAGESAVRIFGVFSQQQDALVEWLRAHQITTAAMEATGIYWLSLYDKLEAAGIEVYLVDPHGVKSVPGRKSDWIDCQWLQKLHTYGLLSRAFRPDPPIRRLRTLTRQRAELVLCGVVHQQHMHKALIAMNLHLHLVVSDLHGETGMRIIEAIVGGQRDPKELVKLRDRRCYKSTVREMEAGLKGNYDEEQLFVLEQALQGWKFYQQQIAQCDQRIEKLLPLLPEAKPAQQPVPPKPVATVEPPKKARKKRIQHGPNAATIDFSAALARICGVDLIKVCGLNLISVLMLIGEIGTDMSKWRSPAAFSSWLGLCPGAKISGGKVLSRRTRKVNSRASTILRLAAWAAGKTDSWLGRFYRRVKARRGAPKAITATARKLACIIYHMMKYGEEFVWADMLLGAVPS

SEQ ID NO: 57772 - protein, 313 aa, unidentified
MKKTICGVDVSKARLDVCIEPGHRFASFDSDTAGIAKLAAFCREHAVTLVVMEASGGYERRAFIALWENGISCALTNPRSVRRYAEAMGILEKTDRIDSSVIARFAHAKNLAPTPLPSQAQQRLKALVTRLRQVTGDLTVQKQRRAGLLDNPQMLASLDEVIALLKRQSRSLEREIASMIDDDPLWTKLAETWREMKGVAGRTVARLHAELPEIGTLSNKAIAKLAGLAPIANDSGKRKGKRSTRGGRAGVRSILFLVAATVARYDQSLAEFRARLVAAGKKKMVIRIALARKLLVRLNAKARDARAQYANAT

SEQ ID NO: 57773 - protein, 367 aa, unidentified
MGNDNIVWIGMDTDAKKNQVALYRGWETQPAAEWEAGMDEKGIKRLIERLKREEGEVRCVCEAGPCGYELYRKLRKAGIGCDVIAPSLTPKKASDRVKTNRRDARNLGRLYRAGELTVIGVPDEKQEALRDLTRAREDVREDLTRRQHRLNRFLARQGCHYQDGEKWTQKHWAWIRKIRLEDSNAETVREESIRAVEQSQEQLKTYDAKIEENAGKPEYAKKVERYQTLRGVKTVTAMTIVAEVWDMRRYWRAPQFMGSTGLVSSERSTGDHERRGKITKTGNAHLRRVLVEAAWHYRHRPIAGQAIKKRRQGQPEAVVSIAERADQRLNRKFRRMVDRYNKKPVIAAVAVARELAGFIWAIGQLQD

SEQ ID NO: 57774 - protein, 340 aa, unidentified
MPIVGAFDVHRSQLTFDYLDLETGELSRGRVAPADRPHLREWLSRFEDRDDVTFALEGCTGWRYVTEELRRVGVDVHLAEPADTAALRGKKRRAKTDRSDAAHLRTHLQAGDLPESWIPPEHVLEARVLVRLYKDLLDERGAWTQRVHATLFHEGVPVPGSLTIAANREKLEVAELSPASRLAVDAGLRQMDRLSGEMEPLRRSFEQLSRHQPGARALRTTHYGIGPVTSVAIWAEMGDCRRFANSDDAVRHTGLDITVFSSADKRTKGHLARQGPSVLRWALYESAMCASRPSSPDHSYYVALRERRDGQLAAITIARKLARRCFHTLVELGEEALSAA

SEQ ID NO: 57775 - protein, 340 aa, unidentified
MQQLLKHKDMKYKEVVGIDVSKLTIDAHHHQSNVHARFDNNSKGFRKLSTWMKKYSVGSVNELLVCFEVTGLYSLNLASFLSQKSIDYVMENAIQIKRSMGLTRGKADKVDAKRIAEYAYMRKDALKLTVLPTSEIIKLQNLLALRERMIKQKAGYQASLGEYKRVFIQKHEKDFFQMLNSLIVALKKQIQKAEKALLEIIESSSTLKKQYDLLTSITGIGIILASNILVTTVCFNKFDNSRKYACYCGTAPFEYSSGTSIRGRTKVSQMANKKMKALFNLAARSAIQHDPELKLYFRKRMDNGANGMSTINIIRNKIIHRVFAVIKRGTPYVTLTHNGI

SEQ ID NO: 57776 - protein, 333 aa, unidentified
MEETSEYVEQELNHNDGEAERFYRKLKEKGVSVRVGMEATGHARWFERLLAELGFEWWIGDPAEIKTKRVRKKKTDREDARLLLKLLRENRFPRIWVPSPENRDLRQLLWHRHRLVQLRTRIMNQRQAVAMNEGYRWKKKLFSEKGRGLLEKLSLALWASRRRKELLELLDQLDPKIEESTAALEHEANRRPEVVQLMTHPGVGPITGLAYVLVIGTPWRFPCGKQIGSYTGLIPCEDSRAGKQRLGHISKQGNKLLRYLLGKAAQAAARCNPDWRRRYMHLMMRREKRIAKVAMARKLAVRLYWMWRKNWQYSQLVEFGSNAGKLGIVHGVK

SEQ ID NO: 57777 - protein, 393 aa, unidentified
MVYVGIDVAKDKHDCFIVNSGGEVLYDVFTIQNDMDGFEDLLFKIKTASRDLSKVKVGLEATGHYSCNILGFFKSKGLYTIVINPLHTNAYRKSLSLRKTKTDKADARAIASMIMSDVSLKPYSDTVYHNEDLKSLSRYRFDKVSDRSKLKQSVSRLVNILFPELEKLVSTLHAKAVYALLSEFPGAHQVASANLKHLTALLSTASKGHFGREKANEIREAARRSISSYLPAKSLELRHTIKLIHELNAEIAEIETEIKKIMDSIDSPTLSVPGISYALGSVIVSEVGDFSRFDNPDKLLAFAGCSPSTYQSGQLYSTHAKMEKRGSKYLRWALLNAAKYVCKWEPTFAVYLRKKLAEGKHYNVAVSHAAKKLVRLLYHLETTGEKYIPQTLS

SEQ ID NO: 57778 - protein, 343 aa, unidentified
MQIHLVGIDLGKTTFHVVALGESGKVLFKKKFTQKQLIAFTANLQTSLIGMEACSGAHFLGRALREQGHDVKLIPAQFVKPFVKSNKNDFLDAEAIAEAVDRKNMRFVPIKTDDQLDLQALHRVRDRLMTRRTSVINQIRAFLLERGVVFAKSPTRLRERMPDVLENADENLTPPMRNVLSWLWDEWKDLEQQLDLLNLEVNQIGSDDAACRRLQQIPGIGPLIATAIVAAIGNGAAFHKGREFAAWMGLVPKQHSTGGKSKLLGISKRGNQYLRKILIHGARSVVLNSKRDHVQIGAWMTALEARAPHNVLVVAVANKLARIAWAVLSSGNDYHAIPVKMAA

SEQ ID NO: 57779 - protein, 367 aa, unidentified
MKEVYVGLDVHSKKIFYVIQDSDGNVTAEGTIPTHREGIHSLVDKYALEAGTQVCMESGVQAGFVCDALVEQGLKPLVIDAHEVRKKARRTGQKTDRRDAFEICDGLRRGIWYSAVYMPPSVIRKLRRILSRRRHFVRLSTQQINAGRFLFRRECLWGKAPACLSTAGGWKKALANDQAVPIREHLHLHAKTWELANTHINLLEQELLSALEPVKDVMDWLTSVPSVGLITAATFIAIVGDPTRFRDSNHLVSYLGLAPSMYDSGETERHGHITKAGPPQMRALLCEIAQQTAKRTHPLNPYFVRVAAKSGYKKAAIAIAQRLARIMYRIWLNKERFDVSKLNVERDGTARTRIYDWKIKKPTLKTA

SEQ ID NO: 57780 - protein, 389 aa, unidentified
MTKVFCGIDVAKYEHVASIYNPVTGEIILDSLHFDNNDKGFKSLLSNLSKLKKEYEVLVGFESTGHYHQTLFNCLTSNKYKCYLINPYMTSKFRSISLRDAKNDNIDSRAIARFLSLEYINLKDAEFLSNELKELSIQRDFLMTDSSKMKIKLKSYLDRTFPELENIVDIDRAAIRAILKEYPSAEAISSVRIDKLKNIAKEASGNKYSLSKIETVKEKAKESIGIRSTGIELNIIQCIETLELKEKQIDKIEKEIKKHPLVFNSPLHQLTGINDVEIAYIMSAIISIARFDSPKKLVAFAGLDPKVKQSGTWQASTTRMSKRGNKLLRYALIWTAFNMSKKDGPIKDYYDLKKSQGKSHYNALGHCAAKLCRYIFWILNNPTKEFKYQ

SEQ ID NO: 57781 - protein, 316 aa, unidentified
MIPPPLFVGIDVAKATLDVAVRPTAETWSAPNEAPGLDALVARLVPLAPTLIVLEATGGYQGPLVAALVAAALPVVVVNPRHIRAFAQAVGILAKTDRIDARVIAHFAEAVKPAPRPLPDAQTQELRALLVRRRQLVAMVSAERARLDTAPAGIQETIQAHIAWLATQIAGLDDALTQASQMHPAWQAKDDVLQSIPGVGPVLARTMLGHVPELGTLSPKPLAALIGVAPFNRDSGTLRGRRTVYGGRAEVRAVWYMGALVATRYNPVIKAFYERLLAAGKVKKVALTACMHKLLTIMNAMVRDLKPWQPQEAPIA

SEQ ID NO: 57782 - protein, 370 aa, unidentified
MLDTTTFVGLDVHARSIKAVSLDVMTGEVRCATFGYDAGAVAEWVRSVDPKARCVYESGVTGFDLQKRLSGLGVDCVVGAVSKMIKPSADRRRKNDRNDAEFLARMLSVGNVVEVWVPDDECEAARDLTRALEDARDDLSRSKQRLSKFLLRHGLAFDERTPTGRRKGNWTRAHWSWIESIRFAERADNDVLAYYVDAVRRAAEEKARLEGLVEAEARKPRWRKRVDSLRCLKGVDTASAADLVFEAGEFSRFRNARSFAAWVGLTPSEHSSGESDRRGAITKAGNKHLRKALVEAAWHYLTCSGRPKDLAKGQAPDRVARRHAAKGVRRLVERREALLARGVHNNKANVATARELACWVWAVGLMAEEA

SEQ ID NO: 57783 - protein, 426 aa, unidentified
MNTQNSESIPNAEFAAYVGLDWGDQKHALAWTADTAKTAPQTSTLVHSPEALHAWLQELGQRFAGRPVALAVETSRGPLIHLFGAYPWLRVYPIHPATSARYRTAFKPSGAKDDLPDALLLLELVRDLRHKLRPLQLPDAATRQLAALVELRRDLVDRRTQALLQLLALLKSYFPQAVELVGQDLTSGLALAFLRRWPDPLALKAARPGTLQSFYYQHSVRSEALVTQRLARVQQLRPLTTEEAVLMPARLHLAALLEQLRTLAKHIDVVEQNSHTLFREHSEAYLFRELPGAGQALQPRLLVAFGEDRSLYPDPGSLQKYGGLAPVVERSGRQAWVHWRWHAPRFLRQTFIEWAGQTVVYSAWAKAYYQHMKAKGKTHHVILRALAFKWIRILWKCWQTRTPYDEARYLKQLLARRSPHAIKPNP

SEQ ID NO: 57784 - protein, 358 aa, unidentified
MSKPTRMSRLDKVFDGGAGRRAFVGLDVHKKTIHAAVWAAERIAISWVMPADVTKVVAMLAPYRDAITQVVYEAGPTGYGLARALRQAGFVVEVVAPGRSPRPAVREQKADRLDAERLAEYAAKGLLVAVAVPSETEEADRQLMRLREQLIKKRRTVKQQIKSFLLQHGVAEPRGLTRWARSAVAALRALGLGPALRLCLHMLLDQLGELEAHVRRIERALSELAATARHAEAAGIARTHPGVGPVVAMSYLLEVHRGGRFDTPGQVAGYIGLAPRVRQSGQMRRDGPIVRTGRASVRALLVEAAWRWRMHDPAARRVFARLVANTGNAKKAIVALARRLAINLWAMLTRREPYRAAI

SEQ ID NO: 57785 - protein, 344 aa, unidentified
MDNHTQYSGFAGVDLAKKIMQIHFVTEDGEITDRQVKRAEFLDFFRNRSKCLIGMEACGASQDWARKLEAMGHEVHLMSPKAVKPFVSGQKNDYNDAIGIYKAMFNEVRRVPVKSTEIRDLQTLRRIRSQVTKDKVKEINHVRGLLAEYGIVMGKSITAFNKGISSALESLKERGDVSPLVAEELQTTVESIKTKIERQKRLDREIEQLARGCKNYENFLKTPGVGPFTAAMLCVLLCDPDIFANGRQFAAYIGLAPRSRGSGGKNFIIGIPSKFNCDSESRAVFVECAQALARYKNKSPWVDGILRRKPKKVAVIAIANKLARQVWAMANKGESFKQMTILTA

SEQ ID NO: 57786 - protein, 413 aa, unidentified
MEQLIQRCAGIDVGQAESVVCVRVPDAVTGAPAELIASYGTTTPDLLELVDWLRGLGVTHVAMESTGVFWKPIYYLLEDDFTVLLVNAAHIKHVPGRKTDTIDSAWIAQLLAHGLLTASFVPPPPVRELRDLTRYRKALVNEKTAQVNRIHKVLQDSGIKLTTYASDVMGVSGRAMMRALIAGQSDSTVLAELAKGRMRTKIPDLRKALTGRFREHHGFLLKRMLDHVEAQEAEIAALDERIEAAIAPFVAQVELLSTIPGVDRRSAQVILAEIGPDMSVFPTAGHLASWAGMCPGQRDSAGKHGSGKTRKGSKWLRAALVQSARGASRSKSTYLSERYRQIMRRRGDAKAIVAVGHEILLAAYRVLVTAQPYTDPGPTTLSRLTTQRLTRQAVRRLQDLGYQVTIAPRTDAA

SEQ ID NO: 57787 - protein, 387 aa, unidentified
MPEDAPRPAQAAIRTDLGAIFVSLERSRRAWLVTSLSPGGGEKMSKHSVQAGDIAGLLRRFAQLKEKARARTGRDFPVITIQEAGLDGFWIHRVLQSEGIESHVVDAASILTSRRRRRAKTDKIDGETLVRTLLAYKRGEPRVCSMVKSPTPEEEDRRRICRERRALVAERVQHTNRIKGLLFAQGAFDYEPLKRNRRAHLEDLKTGDGRPLPVNLKAQISRELDRLEVVLQQLQTVDAERDALLEPASEASPAPAAMLSQLKGIGPEFATILYTEGLFRGFDNRRQVAAYAGLAPTPWQSGSVDHEQGVSKAGNPRLRTTMIQLAWLWLRHQPDSALSRWFQDRVQRNGGRMRKTTIVALARKLLVALWKYATSGVVIEGAVLKAA

SEQ ID NO: 57788 - protein, 439 aa, unidentified
MPTPSLPVLDSTAAAIDVGSEQLHVSIAGGPPKVFGTTTGELHALRDYLVAQGVRSVAAEATGIYWLCPYEVLEKAGLQVVVVNGKYVKNLPGRKTDMSDCQWQATLHAHGLLKPGFVPPEHIRRLQDYLRLRSDHIVMAGSHEQHMQKALERMNLKIHDVISDLTGMSGLKMVQAIVKGERNPVALLALCDPQIQKNKAGRLRAALEGSWKTEHLFALRQAHELWEFYQKKIAECDQAIEEVLKVLAGPEDPKNPAPPATKRGGVNSPQIAGLHGLLWRICGCKDPTQLPGIADYALLQLLSETGTDLSKNWRTEKHFTGWTGLAPGSRNSGKRRASQRRSRNRAGRLFCVIARSVGRSVDKALGGFYRRIKGRKGGLVANLALARKLAELYWRLMVHGIRYVEHGLKKYEEKVAQTEMSLLQKLARKHNMVLQTKVC

SEQ ID NO: 57789 - protein, 390 aa, unidentified
MRKIGLDLGARHIAYCEVVDGKVVDRATVKSLEELASRLGPGTEPAVVAFEACREAWFVHDKLQEWGHDPRMLDTTRVRQMGVGQHRRKNDTIDAETIAMAVDAGRIAEAHVLSPERRALRAQLSVRGALVETRAQYVTTIRGLARAAGVLLPTCATEYFARKIDGLTMDGTTRSLIAPLVAMLGTLETQLVVVEHTLAGLAEKDPVLALLATVPGVGLIVAATFVSVIDEAKRFRNAHAVGAYLGLVPSESTTGGPDKRRLGSITKQGNRMARAMLIQAAWTISRLRDQNDPLKRWVDHVAETRHKRIAVVGLARKLAGVLWAMWRDGTFYDPKEHAEQAARGVQAAARQQMRRAQALQRSAIKLCRPPVLAPKDPAKLRHPSSLRRAM

SEQ ID NO: 57790 - protein, 341 aa, unidentified
MEQVTTIGLDIAKHVFQVHGADRVGHVLFRKRLSRARLLGFMSTQSACTVALEACAGAHFWAREIGKLGHRVRLIPPIYVKPFIKRQKNDAADAEGICEAAQRPSMRFVPVKSEEQQANAMLFRARDLLVRQRTQCINALRGHLLEYGCVFPQGVGHVAGLIAHVEDPASLLPQSARVALKTLIDTLTALEGQIAELDHEIDHRAKTDPTARRLMTIPGIGPIGATAITALVPAAQGFPAGRAFAAWLGLTPLQKSTGGKQRLGAVSKRGERTIRRLLILGASAVVKQASRRGAPKGSWLAQMLARKPKMLVIVALANKIARTVWALLVNGGTYRAPIAAA

SEQ ID NO: 57791 - protein, 423 aa, unidentified
MGSDSHQAYTAFVGIDWADAKHDICVQATGSLRREFSCIAHEPAQIESWACSLRERFGAPVAVALELSKGPIVYALQKYDFIVLFPVNPATLARYRQAFKPSGAKDDPSDAELALDLLVCHRDKFAPLQPQSAPMRTLIHLVEQRRQLVNDKLRFTNRIGNALKQYYPQALAWFEQRDTTLFCDFIERWPTLTQVKRAHRAGLERFFQNHNVRFANVIEERLRAIKAATALTTDEAVIGAYRLQVEVLIEQLRTTLRAIDRFDRQIAKLAPTLPDYALFSALPGAGPHLAPRLLVAFGEQRERFRSADELQRYSGIAPVTERSGKKSWVHWRWQCPTFLRQTFVEWAAQTINKSFWAGAFYRQHRDQGSTHQAAVRALAYKWIRILYRCWQTRSAYDEVTYLNALQRRGSPLFKHIAAASETG

SEQ ID NO: 57792 - protein, 347 aa, unidentified
MNYIGVDCHISSLDFAVVNEKGTTTKRQRVNTGVKELIGFVKSVPKPRKVIIEEGSLANWLLETCTGYGEKLIVTDPKKNRWIGRAGTKNDAVDAEKLAQLARGGYIKEIHHPIGGRRRFRELVLSYHDTVKSQTRIKNKVKAKFRENGIRCMGDTVYSARYRKEWKQRLPKDKVVHIIIDGLWRQLDQVEEVREEILGQIRKHGRGYSEIKRFKKIPGIGTVHAATVSAIVEDPHRFANKKKLWMYAGFGLAERESGGKVYSRKLTRNYNRHLKNALKQAAHAAIIAKDNQFRRQYLRLTMEKGIVSHRAKLSVARSMLATLYGIWKSGEAYDPEIDKRRLEAGKT

SEQ ID NO: 57793 - protein, 362 aa, unidentified
MNESTIIVAFDQHAASVVAAVLLPGQQTPSLQPLAADLPAIGRFVMRVARQGAVRCCYEAGPCGFELQRFLTGRQVSCDVIAPSLIPRRPGDRIKTDRRDARQLAILYRASALTAIHIPTEQEEAARDLLRCREDIRADLLRARHRLSKFLLRHGRRFTGTKKAWTQPHRAWLRGQTWPIAALDQTHHAYLRAVDEALARLQAAEQDLRTLLDLAPLRPRVQRLRCFRGIDDLTALTIAAELGDARRFASAPRTMACVGLVPSEHSSGTRQARGAITKTGNAHLRRVLVEAAWHYRHRPFIGAALRRRQQGAPAAVIAQAWTAQQRLYRRYHRLAARGKPTQHVITAVARELTGFVWAALTQ

SEQ ID NO: 57794 - protein, 409 aa, unidentified
MNTTTLFVGIDVSKTSNTVRLMDGGGDTLSLFDIPNNIDGASKLQDKLRYTLLHTDYSKVTVGMESTSIYADHLAAYLRNDEFLQKWECTVYVINAKNINHFKKSYPELPKTDSIDTLIIADYLRFGRIPKSVSHDEKYLALRNMTRARYQAAQNLSREKTRFLDTLFQKFSTLDSAKVFSNTFGATSLAAICDFLSVDEIIYTPISELTDFVNQKGKGKFADPEAVAAALQAAARSSYRVSKTVNDSLNQLLAIRLIGIRSIEDQVKSLDVAIESFMGAFQNVLISIPGIGPVYSAGLMAEIGDIRRFEGQAALAKYAGLVWSKYQSGGFEAANTKMILSGNKYLKYYLLEAANKVRMHDTEFAEYYRVKFREVPKHQHKRALALTARKLVRLVYSLLDTNRLYMPRM

SEQ ID NO: 57795 - protein, 343 aa, unidentified
MGEISMIGLDLAKNVFQVHGVDASGAVVVRRQLRRGQVEKFFAQLPACTVGLEACGSAHHWARVIGRYGHQVRLMPPAYVKPYVKRNKNDGRDAEAICEAVNRPTMRFVPVKSVEQQATLAVHTARALLVRQRTMLANSLRAALSELGIVAAQGIKGLRELMVKLEAPNQEIPEMMRGALLMLAQHWQALDVDERALEKQVAKAARGDGEARRLMEVPCVGPIIASVVLAKVPDARVFRSGRDFAAWIGLTGRDHGTGGKHRPGRISKQGDRMLRALLISGASAYLRHQRTRGVSDPWLRDLLGRRPYKVVMVALAAKTARILWAMLVKGEPYRDRASASAAA

SEQ ID NO: 57796 - protein, 408 aa, unidentified
MNAVGIDVSKGKSMVAALRPMGEVALLPQEFLHTEVGLEQMAYAIVALGEDTRVIMEATGRYHEPIAAALHEYGIYVCVLNPLFIKQSGGGSIRKVKTDKADAMKIAKYGLDNWVELREYTPMDTVRQQLKLCSRQYNLYMKTVVSLQNNLISLTDKTFPGVNELFSSPERADGHQKWVDFVMTFWHCDCICRVSEKAFTDRYQKWCKRKGYHFSTEKALDLYAGSCGHFTTLPKNDNTKLLITTAAQQLLAGKTTLAALRTEMTRLAKQLPEYDTVRAMYGVGETTAAQLMAEIGDVRRFPRRSSIVGFAGVDPAVDQSGKHSAKSVPTTKRGSPHLRKTLYQIVCTYLKRSPADEPVYQFLDKKRAEGKPYFVYMTAAQNKFLRIYYARVKECLEAFDERQDTVQN

SEQ ID NO: 57797 - protein, 343 aa, unidentified
MDYFAGLDVSVKDTSVCIVDEAGKIIREVKVASEPDALLAVLNNLAYHFKRIGLEAGPLSQWLFSALAEADLPVICVETRHMRAVLKAQINKTDRNDARGIAQMMRVGLYRPVHVKTLRSQKLRMLLTHRKLLQAKAIAVENDLRATLRNFGLKVGTVGAVKFEARVKELVDNFPDLVELVEPLLVVRRVLREQISILHRRVLAAVRNDEVCRRLMTVPGVGPLVALTYRATVDVPARFRKSKSVGAVFGLTPARDQSGESDRPGAISRCGDEMMRTTLYEAAQVMLLRSAKWSWLKAWAMKIARHRGMKKAIVALARRLAVIMHRIWTDGSEFRWTREAAAA

SEQ ID NO: 57798 - protein, 347 aa, unidentified
MSVSMIGLDTAKSVFQIHGVNNAGKAELKRKLRRSELIAFFEEQERCTVVMEACGAAHHWARILTGLGHTVKLVAAETVKPFVKKGKKNDAADAAAICEAAARPDVKFVAAKSVEQQGILALHAAQSLLVKQQTMLANAMRGLATEFGLTVPKGLRKLEELKTLVDADESIPKQARQAITGLHDRCQELAEGIETFEAEIVAHARHDETARRLATIPGIGPITASLIAATVGDISLFKTARQFAAWLGLVPGQNSTGGKTRLGRITKAANREIRRLLVLGATSMVQRADGWNSAVGTWLRNILERRPVRLVTVALANKMARIAWALMTRREVYRPKGGVTVVAQAAA

SEQ ID NO: 57799 - protein, 430 aa, unidentified
MNRKAYRATRVNDVNWDQLAQGKEGLGITLGIDVGKSTLWPVCRWTDGQFERPWRVRNPEEIPTLLALVKQMSVGRKLVVAMESSGTYGDGLRQALADAGIGLERVSGKAAHDYAEIFDGVPSQHDGKDAAIVAELASLGKSVAWGYQGADEWEQELAYGVDWLVAQRQMLGIWQGRLEGLLGRHWPEATRVLKLSSVTLLRALSHYGSPQALTADEEAAARLRKWGGKFLKESKIERLLAAARTSVGVRMGAWERRRMQAFAEEALAARRKGQQGEGQVRRLAEGHKVLAAQGKVVGVPTACVLWVHTGDPRQYYAAGAYRKALGLNLVERSSGAYESGLHISKRGSARSRQWLYLAALRQVQQAGVRGWYEAKKARDPEGAMRVVVALMRKLALALYQVGVHQQEFSVRRLFAQAVRSAPSEHHDIQS

SEQ ID NO: 57800 - protein, 344 aa, unidentified
MEHFAGLDVSVKETSVCIVDEAGRITREVKVASTPEALMQVLRAPAYHLKRVGLEAGPLSQWLFGALAEANVPVICVETRHMRAVLKAQINKTDRNDARGIAQMMRAGLYRPVHVKTLRSQKLRMLLTHRKLLQSKAIAIENDLRATLRNFGLKVGVVGTAKFEARIKELVGDDSDLVLMVEPMLIVRRVLREQLAILHRHLLALARDDGVCRRLMTVPGVGPVVALTFRATVDVPARFQNSRAVGAVFGLTPCKHQSGESDYTGGISKCGDEMMRMMLYEAAQILLIRATKWSWLKSWAMQIAKRRGVKKAIVALARRLAVIMHRIWIDGTEFCWIRQEAVAA

SEQ ID NO: 57801 - protein, 356 aa, unidentified
MARISQLERTRVTVGVDTHRDVHVAVALDQLGRRLDQIELATTGAGYERMLAWAESLGVVEAFGVEGTGCYGAALARHLRARDMLVIEVMRPNRQTRRRKGKSDPTDAEAAARAVLSAEAAGSPKAGDDLVEMIRVLRVARRTAIKARTQAINALRSLLVTAPPELRDQLRALSTTRLVGKAAQLRPGALGSPLAASKLALRHLARRCQTLEAEISSLDAQLARLTATASPQLLRAFGVGADTAGALLVAAGDNPDRLRSEAAFSMLCGSSPIKASSGKTNRHRLNRGGNRQANAALHRIVLVRLRYHQATKDYVERRTSEGKSKREIIRCLKRYVAREIYAALTQTGDQKLARAA

SEQ ID NO: 57802 - protein, 366 aa, unidentified
MGEITTVGIDIAKYVFQLHGVDAAGEVVLGRRLRRSQIAAFFAALPPCVVGMEACGTAHFWAREIAAVGHDVRLMPPSYVKPYVKRNKHDAADAEAVCEAVRRPSMRFVPVKTPEQQAALVAHSVRDLLDRQRTMLVNALRGHLAEFGIVAPRGIHKAEELIAVIGDVSDERIPSAARRVLPVLATELAALGLRITAIEAEIVARTRADPVARRLATIPGIGPIIASRITATVPDPSIFQSGRDFAAWIGLVPRQNSTGGKIRLGGISKRGNGTLRRLLVGGAMAAMFRTKVLQNDPWLCQLRARKPAKVAAVALANKIARTAWAVMQHGQDWRPATALSSRPQEPAAVLAAVKTMPPSAMAFGQS

SEQ ID NO: 57803 - protein, 373 aa, unidentified
MENTITYVAMDTHKKEHKIALHYPGQQEIVNLIMKNSSSEISKTVKRILKKSPGEVRFCYEAGVCGFNLKRRIESLGCKCAVIAPSLTPTKPGERIKTDRRDAVRLLEMFKAGLLTEVHAPDPQQEAARELTRLRQTARQNLMRIRHQLLKFLTRHGYIYTEGNHWTGRHLRWLRGLEFEEPLLREVFDSYLTEMQHCMQRLDSMDKQVGHLADSQAYKEMVGLLKCFHGIDTLTAISIITEVFDFGRFSSPRDLMSYLGLTPSESSSGEKQKKGPITKTGNKRVRRLLIEVSWHYRHPYHISKVLKQRRKDQPQWAIDIADRAGQRLRKRYWYLIHRGKMQCKATTAVARELAGFIWSVFREYQVRNMHKAA

SEQ ID NO: 57804 - protein, 352 aa, unidentified
MVSCLKLKKPKIMQREKKCFIGVDVSKLWFDVCMMITNQEGRRQIVRERFDNDVAGFKKLTQWLKSHKVPMDENTLVVIENTGIYHRLIWQYCNQNGLPISIVNAAQLKWSLGITRGKDDITDSERLCDYCYRHADKLKASAALDPAILPLKDLMTSRTRLLAQINSTRTYLRELKHSNSKEVQAMMEQIHKSALVGMKKSLELIEEQINKVVKQSAAIKKNYELLLSVPGIGHVTAIYIICCTANFASSITGKQLACYAGVVPFEHKSGSSIKGKARVHKMANKELKRLLYMGARSVVQHKKEFKQYYKRKEQEGKHHLAILNAVKNKIVLRAVAVIKNQRKYVDNYQKAA

SEQ ID NO: 57805 - protein, 354 aa, unidentified
MSEKHKSVIAVIGIDIGKNSFHVVGLDGRGAIALRQKWSRGQVEARLANMPACLIGMEACVGAHHLSRRLRLLGHDARLMPAKYVRAYSKGQKNDFRDAAAIAEAVQRPTMKFVATKTADQLDLQALHRVRAQLVSQRTGVINQIRVFLLERGVAVRQGRHFLRGGLPGILATGCEVLSERMVHLIEDLAGGWRRLDERIEGLSDEIGALARQDAGSERLMSVPGIGPIISSAMVAAIGAGDTFTKGRDFAAWLGLVPKQFSTGDRTVLGKISKRGNRYLRVLFVQAAWVVLIRSKNWERYGLKPWIEAAKRRLHRNVLAIALANKLARIAWRVLAHGRTFEAGKVAAAAIQPA

SEQ ID NO: 57806 - protein, 345 aa, unidentified
MKSASNTLPETPVNDVTAGIDWARDDHAVCIVDGRGRQVAHTMVEHTASGLRDLIGFLARHGVGEVAIERPDGPVIDTLLRHHLSVVVISPNQVKNLRGRYRSAGNKDDRFDAFVLADTLRTDRHRLRRLEPDTPATVALRRACRARKDLVSHRVAVANQLRARLHNVFPGAVGLFAEIDSPISLAFLTRFTTQDQADWLSPKRLGDWLAKVGYSGRTSPEQLHVRLVAAPSGITGPDATTQAHVTRALLTVLATLVEQIKALSAQISRQLDAHADQHIFTSLPRAGRVRAARLLAEIGDCRAKFPTPESLACLAGAAPSTRQSGKLRAVTFRWACDWGERGPLR

SEQ ID NO: 57807 - protein, 362 aa, unidentified
MKNNKLDFTGQTIYLGLDVHKKNWAVTICFQGIILKTLSMVAKPEQMVKYLHKNYPNATYLSVYEAGFCGYWIDRKLRSLGVKNIIVNPADIPTKQKERRHKTDKVDSKKLARELNNNNLEGIYIPSEENESIRALSRLRRQITKDQTRLKCRIKSLLHFVGIELPENSELRHWSGKFIKYLSELEFSERSFGKDKAMKLTLEGLLESLRQQRQILVNIIKNLRQVVTENDSVKKTVNLLQTVPGIGFITAVTLCAEIMDITRFRKFDHLSCYIGFLPATDSSGEKETVVGLSNQQNKYLRSMLIESAWTAIRKDPALTQVYGKLVMRMGKQKAIVRIAKKLLNRIMYVWKNEKEYVCAVVS

SEQ ID NO: 57808 - protein, 419 aa, unidentified
MKSARNTLTEEPAGGVTCGIDWAWEDHAVSVVDARGREIHRCSAGHSAAGLRELIAVLARHGAWEAAIERPDGPVVDALLGAGITVVVISPNQVKNLRGRYGSAGNKDDRFDAYVLADTLRTDRARLAPLTPDSPATVALRRACRARKDLVAHRVAVANQLRAHLQLAFPGAVGLFADIDSPISLKFLARFDTQDRAGWLSPRRLAAWLASVGYCGRADPGDMHARLAAAPRGATGDDGTAQACITRALLTVLTTLADQIKALSEQTGEQLALHADRHVFTSLPRSGTVRAARLLAEIGDCRARFPTPESLACLAGAAPSTRQSGKVRAVSFRWACDKQLRDAVTDFAGDSRRASPWASDLYNRARARGHDHPHAVRILARAWLFVIWHCWQDGAAYDPAQHHALQRILAAQAAAAQAG

SEQ ID NO: 57809 - protein, 409 aa, unidentified
MRGVVAFDVSKGHSYMVIYDRQKHCIFEEDIKHSLSAFEEIRIRIESQMAQDGVMPYIVFEATGVYSKALERFMRECGFEYALMNPLEAKMQSLAMRMHKTDRTDAHKLAQSCFTHPPQNKTFQESYYEEMRSLSRHYAELEKETTRLKTRIHALVQMTFPELEDIFSRTSGLYLSILQLFPHPEMLKELSRTKVKNLILNHTEKRQSRQRAEEKADSLLMAAADAYPALSVQDVRVEQLKNYAKRCQELLDLKQTLIKQMVSLSQDRAEYHILRSFPGIGDITAVRIIAEAGDIRRFNTSKQLNAFAGIDIRRYQSGTILYKDKINRRGNKHLRKILYFTIENMIRAQKSTDNHLVDYYQKLKKQPHDKHHKVACIACVNKFLKCLFHLVRTGQRYDYAMATNHRISS

SEQ ID NO: 57810 - protein, 328 aa, unidentified
MSTITVVGSIKPVLGVDLGDSNSVAALLSPMNGSIVQEMFPFSMDDAGYALFSSKVPKDARIAFEATGMAYPFSRRLRQMGYSDITVAHPKELAWIVKSKKKNDKADSLKIARLHMGGLIPESHLLEREEQIKRDLLIQRVQLGVEIGNVKRRIISYLKREDVYNCLPKTEDNFSVTRRRAIDSLNFGDDRDLVIRTMMRKLRFLEAECPPLEERIRQVAAESDDVKLLMSVQGIDFYSASLYSSFVGDARRFPDDDHLNSFFGIIPVSRDSGDKKRRGRMSKEGPSIARWMLGVMVDNVMRRNAEIRRYYDSVKERRLPINIVYAFD

SEQ ID NO: 57811 - protein, 434 aa, unidentified
MDLSQRLQVGIDFGRSKADVCLLDPGGEVLVMHKSFGNSPAGYQKAKELLQKVLDSRGLEGVDISGEATGFYWLPFYLQLANDPELRAWDRQLYVLNPSWVRWFKKSLPQDDKTDAKDPFYIADRTRTRRPKLAWSPQEDWMGLRFYTRVRFHLAQTLTREKNFFQAYLFLAHSGYHRVGPFSDTFSVTSRKLLLQPQKLAELVEMPQEQIAAELFRLSGHTLRDPLQHAQLLKKAVQESFSLPTGLAEPVQRILDLVMRHIEFLEDQIQQVEQWIAADAQANHPEVQLLSSIPGIGLVFASGIAAELGGLERFLSGLKWDRKRQAYRPKRLRDAEDAIAKFAGLWWPRFSSGDFEAEERSLAKTGNAYLRYYLIEAADSLRRHVPSFTAYYQKKYPEVNKHNHKRALVLTARMSLGLYVGLLHRHETYRPEVG

SEQ ID NO: 57812 - protein, 459 aa, unidentified
MTAQRASPHPEQHPEQHPEQHLASLEAGEPLRSPAGWSQHGTVDSKAEWAVQFPVHVGVDTGKVFHKMVARGPDGRRLGAQVVPVSREGFDAADAYLATTFPHVPRSRILVGLEFAGHYGFTFAHDLHRRGYQIVNVLASVTKRLKEVEDNSPRKSDDKDAAQIAKLLAQGYFVSYPFLSDTAAELRFLATERRRLAVEQTRHRNRLLAVLDLAWPEFMRHFSTIVKPTPLALLQAWPLPADLAAAPRRTVNKLARDVSQNHMPKPRLDALLTDARTSVALTAGSEARRAEILRLLDRLLLVREHAAEVEIRLRALVELTPAARALTTVPGIDVVCAATIIAEVGDPHDYVSPRQILKLAGMNLARKESGVSVRGRLRQTKRGRPALRRQLFLLAGRWCQQRGLARAEYEALQARNGGAKISAMCAVARKLVPMLLHLMQTGEEFRAEVWLERHRVHEK

SEQ ID NO: 57813 - protein, 421 aa, unidentified
MRGLRTKRVRMAKEGTLIATVDIGATTNTGYCTCADGRDMKVFKFGNTREGFEKFWHMVIAAQNRFTCTEVMVGYESTGPYAEPLVHYLMDKPVNIVQVNPLHTKRLKEVNDNSPGKTDDKDPRVIADILRLGRALSVVVPEGDAAYLRRLNNARERHVGERIALLNQMQQLVFLIFPEFKTVIARMAGKTVRLILKKYTTPEKIGSTDTHVLGEEMRKRSWGKLGMKDAELLISAAQNTVGIKEGVAGIVLDIQHIIAQLEVVERFIAEIESEMALTLERIPCTARLLSIKGLGVISIAGLIGEVGDFSKFRTQSEIMKLAGLDLYEVSSGKRKGEKRITKRGRSLMRKILYFAAIQMIGKHGIMREYYERLTGRGTLKMRALVAVMRKLLRIIHAILRDDRDYVGQYCAPKRRVIKRAA

SEQ ID NO: 57814 - protein, 360 aa, unidentified
MSNYITIGMDLGNKKHTVCALDQAENVLWRREVANTPEALKPFFEENAGATVAMETGLCCRWISALAKSCGCDVLVGNARKLAAIWRNKQKNDENDALAIAELARASRRLFHPVELRDDERHEMVQVIELREVVVSQRTQAVNSVRGLCKAHGVFIPKCDAACFHKVAGEAIPAGMAWKFRPMLRHLRELAATIRRYDAMLEEYAREHFGDEVELLRTVPGVGPITSCAFVAHVADPRRFGRARDAGAYFGLTPGQDKSGDRDVPKRITKTGNATMRRLLVTAANYILRASSADTALKRHGERICARGGKVARRKAKTAVARKLAVVMLAMLKSGRPYDDGLAAKRNGEGNASAAAELVA

SEQ ID NO: 57815 - protein, 410 aa, unidentified
MHLYCGIDWATEHHDVAVVDDGGRVVARCRVSNDAAGFAQLLTVLAEAGDSADDPIPVGIETDRGLWVAALRETGRVIYPINPLAASRYRTRYAVSGAKSDAADAVLLANIVRTDAAAHRPLPADTELAGAIRVLARAQQDAVWARQQIGNQIRDLLKDFYPAAIVAFDELPSGGLARPDARSILAAAPTPAQAAKLTPARLRRLLVKAGRRRELDRDIDRLRAVFADTYLHQPPMVENAMGIQLTALLRQFDAACAAADELAEAASAHFEQHPDAAIITSFPGLGNLTGARVLAEIGDDRARSADARGLKAFAGSAPITRASGKKTVVLHRHIKNRRLAAVGSMWALTSLRASPGARRHFDARRTAGDWNRQAQRHLFNKFLGQLHHCLHTGQLYDEHVAFPPPLQLAA

SEQ ID NO: 57816 - protein, 337 aa, unidentified
MKFSGIDLHSNNSVVVISEETDRIVYQKRLPNNLEQILAALAPHREELVGVVIESTFNWYWLVDGLMDAGYRVHLAHPSAIKKYEGLKYSGDFADAGYLAQLLRLGLLAEGYIYPREARGARDLSRKRMQLVRYRTAQILAIENMLARQTGARLSGEAVKRLTAEQVEGLGFVPDVALAVEANRAVSQTLGQQIEALEKRLKERVRLRGEFKLLKTTPGIGETLATTIMLEMGTPARFAKVGNFSSYCRCVDSLRESNDKKKGEGNTKNGNKYLAWAFVEAANFARRYCPQAKSFYERKKRKSNGVLATKALAHKLARACYYMLREQKPFDVSRCFG

SEQ ID NO: 57817 - protein, 347 aa, unidentified
MRFYTRQHRHYCGVDLHARSMYVCVLDREGNVLVSQNIPSAPEPFLELIAAYREDLAVGVECMFTWYWLADLCAREGLVFVLGHALYMRAIHGGKAKNDRIDAHKIAALLRGGMLPQAYVYPQAMRATRDLMRRRNYLMRQRAELLAHITNTNHQYNLPALGVRPARPAERAGLAEHFAEAPVKKSIEVDLSLIEHYDRQLLPLERYLESNAQAHDPVALAIVRTIHGMGKVLGLSILYEIHDVGRFSRVQQFLSYCRLVKPTKESGGKILGHSGRKIGNAHLKWAFSEAAVCFLRANKPAQALRARLMAKHGKGKSLGIIAAKIARAVYFMLRRGEPFDAERFFAH

SEQ ID NO: 57818 - protein, 410 aa, unidentified
MTAVYSVGIDVALRSHRVAVLGGDGEAVGKSFTIESTAGGFAALVETLHARGAGAAQSVIGLEATGHLWENLEAHLTRVGYRVVVLNPVQTRRYRDVLRRKAKTDDIDAYVIAGLLRSGAAAASYVPAETIQSLRELARLRARLMRDRQNYLRQLGAQLSVVFPEHAEALGDLLTARARGILRACPTAYHLAAATPRTIHHAAHSAGARGFTREDATRVRDLGRASIYSGKAATARGNVVRTLVTHLERLTAAIEELDTAMAEELPPPAAGGPPSDAELLHTLPGVGTHTVATLLGELGTLSRFTSSKALVAYVGFYPQLAQSGERAAAPHLVRLGSRLVRRTAYLMAVNAIRGSAEFRTLYLRKKAQGKKPKQALIVVAVKLLHTMYAMVRDRHAYTAGRVLVAPPAGA

SEQ ID NO: 57819 - protein, 351 aa, unidentified
MSQKANAVAIRTIGIDTGKNTFHLIGLDQQGTIVLREKLARGRVGRRLANVSPCLIGIEAGLATHYVARELLALGHDVRQIPPAYAKPFRQGHKNDFRDAYAIAEAVLRPSTRYVPVKTDDQLDLQALHRVRSRLVGQRTAVINQIRSFLLERGIAVRQGPRFLRQQLPEIQAKRIDLLSPRMIGLIEDLAGDWRRLDERIECVTEEIEQLAHGSESCRQLMTVPGIGPLIASAMVAAIANGAAFAKGRDFAAWLGIVPKQRSTGDRTILGHISKRGNRYLRTLFIQGARVILLRPANWARHSFGPWLTAAAKRLHHNVLATALANKLARIAWTVLAQRRNYETRVVTQAA

SEQ ID NO: 57820 - protein, 367 aa, unidentified
MKTIGVDLHKETAVVCVLNDDGSIHDKRILATKCRNQIREYFASYGLQCHVAVECVGFYQWFWELVSPLVGRLLLADPAGVKTFRGREPKTDWRDALLIANLLRDGRLPTAYIPQGPARALRDVVRLRHNLARSLASERKQLRWVGLKMNLPGPATLTSDRAQKWLLANEFKLPPTLRTAARLRLDHIISLERNVTDLDRVVVEHATRTPETARWFELLQTIPGVGNVVAATIIAETGDITRFSNTDQLGAYAGLAPRVSQSGETVHHGHITKQGPPLLRWVLQQAAWVAIRTSEEARRIFNRISRKAGAKKAATAIARKILCYAWSVCRKGRSFEWPHAVKTGRRTAGPEAAESDKKMEGAWCFQI

SEQ ID NO: 57821 - protein, 355 aa, unidentified
MKKGSVNRPVTGIDQGDRFSHLCVLDARGEVVERSRVGTTPAAYQKRFGGRRARGRVILEVGPHSPWSSRLLESLGHEVIVANARRVKLIAKADRKTDRVDAETLARLGRVDPNLLAPITHGGEAAQRDRALLRVREGLVRSRTRLIQQARGLAKALGERLPSAATAAFPRRVREAGQESLFPGLDVLLEMVENLSTRIRKLDHEVERACRERHPVTAQLRQVPGVGPITALAYVLKVEDPTRFAKSREVGPFLALVPRERSSGESRPELGIPPRGDAMLRRLLVQASHYILGPFGPDTDLRRFGLALAERGGKRAKKRAVIAVARKLAVLLHRLWVSGEEYEPLRAADLAAMAA

SEQ ID NO: 57822 - protein, 395 aa, unidentified
MFIVGIDVAKRNHEVTVITSAGQVVCKGFRISNTCTGYNRMMERLGKLTNLKSQFIFAMESTAHYWLALYTRLKKDGHQVIILNPIQTHTMREMFLRKSKTDAKDSLVIAEVIRFGRYAASDIPQEKLLALKELCRNRAYLMDMASDLKRKTVAILDRVFPEYETLFDSVFCKTSLAVLAKYPTPDKLSRAQLGKLTEVLQKSSNGRFGEWKAREIKELAHGSFGVADCEGVYSTLIQLFLEQIHTLLETCSSLEGQINELLLQFDTTLTTIPGVGTLLAATILSEIGDISRFSSADKLAAYIGVDPAVNQSGEFVGSHVHMSKRGSPYLRRAVWMASMIAVQRDPMFKAYYEKKASEGLRYMNIIGHVTKKMTAVIYAIMRDNKAYVPVMPVVA

SEQ ID NO: 57823 - protein, 405 aa, unidentified
MPYILALDVSMGHSYSVLYKDDTCLFEDEIEHTQRGFHALLEEIQHLPERPLIVFEATGIYSRPVEKFFQDHHFSYCLLNPLEAKKQMEESTLRSWKTDKSDAHRLAQTHLKNQRQPKEVQSNFYLEMRDLARFYQEIEKKITRLRMDLHNCLQLTFPELEQFFSNRLTPYALTLIRLFPHPDFVLASTRTKIKNKLINETRKKISANRAEQKADQIIHYAQCAYPAVEKDSIHCQKTIYYAELLQDLLEQKKALATQMIKKAEGSPCFLLYQTFPGIGALTAALLLGELGDITRFKTHKQLNAFVGIDIRRYHSGKYTGQDRINKRGNPKARKIIFFTIRNMIRQQRAAPNHIVDYYYKLKKQPIPKKDKVATVACMNKLLKCMHAIVRAHTEYDYAYAVSVDH

SEQ ID NO: 57824 - protein, 350 aa, unidentified
MYMSQQYVGVDWHKRTSTWVAINENREKVYCRSWGCTPDEVHAAISSLPATPADITLGVEPVCGWRWMTQVCTERGIERTYVANPKRLREIAQSAQKTDKNDALTITELLRMGYLPRAYRAPDTVHALRALVRQRGFFVRLGTATKCRIHGVCTALGAHTTTERPLHASGRIALTQGGHEELKDLYVTMDELETHRIGIEKKIRATIKETETYKILTSIPGVGLITAATVLAEVGDFARFNSPSALVSYTGIYPRERSSAGKQHFGGMSKVGSRILRYTIIEAAMRVRDTDKSHNLYTHYDAARNRRKKTPKQARVVLAHKMLTIMWHLVKRGVTYDDRAVKPAQREMTS

SEQ ID NO: 57825 - protein, 347 aa, unidentified
MSVYVGIDVHRKRSQVAIVTEDGRVQLNKNVVNGSEPMLRLIGDLPSGTPVAFEAAFGWGWLAQLLEDYGFEAHLVHPLRCKAIASARLKNDKVDAAILAQLLRADLLPEAWIAPADVRQLRALLRHRVSLVRLGTQQRNRIHAVAADHGYDRSASYWTGPGRGWLGELDLPPASREIVTDCLAVIDGLVPLIDRIDGELHARAKADPRVKVLRTLPGVGEFTALVMLAEIGDINRFGSARKLASWAGLTPTVRGSDLTVRHGHISKQGSAWLRWVMNQAAQTAKRSPEFAAAYAAISQRRGKKIATIAVSRKLLTRAWHLLASMQADGTATPPQRQEPAPAPRSII

SEQ ID NO: 57826 - protein, 335 aa, unidentified
MQIYGIDLAKEKFDVSFFDLTSKKVSNQPSHKVVKNNLKSIGRFLETLPSDAVLVAEHTGVYGDTLLKCCMDSNVKIAFVGGYVIHRYRATPDRAKTDVLDCALLREFGERYPDKLKYRKFPEEALYELRQLARHREMLVEQRKQLMTADKSEDCRPIRSLAVKRSMDRIKEMLDTEIAETEKEMLKVIDGHDSIHHNYEIVKSVKGVGLVTAVELLVKTDNFTKITTARQYAAYAGTAPYEKSSGKMDKGAHISKIGNRRSKTLLYICAESARLHNKEIKLYYERRTLIDKKPRHYVLNAIANKLLRIIFTLVEKGEFYDVNYIRQDPRLVKHN

SEQ ID NO: 57827 - protein, 364 aa, unidentified
MKRKVYVGMDVHKETIRIANLTNNTKEIVKEQQIKHNEVQIKKFVNKLKSEWNEIHSCYEAGVTGYPLYRYLKSLGVNCILVAPGKIPRQSSDKIKTDKRDAIKLAKLLRSGELESIHVPSEEDEAVRDYLRSRDSLRLDLGRNRQRLMKFLLRKGITYSKTKYWTVSHNKWLNNLQFNNEILQETFNDYYSRVRVQEENLKAMDKRIQEIAESEPYREKVGILRCFRGVDYLTAMFLLCEVCDFKRFKTAGSFMSFLGLVPGEYSSGSKRKQTGITKTGSPRLRRILTEAAWQHRFPGTGSKVVTARRSGQPALVVALAEKASLRLHKKFRNLQQRGKTPQVIITAVSRELSGFLWAAMNLTT

SEQ ID NO: 57828 - protein, 363 aa, unidentified
MTITSMPQPILPAQPEEPLAEDVILGVDTHKDVHVAAVVTMLGVLLAHQEFPVTAAGYRQLHAWASSFGALRRAGVECTGSYGAALTRFLTQENIQVIEVNQPDRAMHRKRRKTDAVDAEAAARAVLSGRADVTPKTGEGPAADMRVLRLAKESAVKARTQAKNQLKAVLLGIDPELREALSKLTNAALIATCADLPDADDAAVFTLRLLARRIQQLTAEVKELARRITKAVRRRHPQLLDIIGVGPDSAAALLIAAGDNPERLASEASFAALCGVSPVEQSSGKTQRRRLNRGGNRQANAALYRIVVTRLRRDTRTRLYLERRTKQGMSKREIIRCLKRYVAREIYGQIQPPPSPAASCSAA

SEQ ID NO: 57829 - protein, 315 aa, unidentified
MEQPASTPSFVGIDVAKDRLDVHVRPAGETFAVARDGKGLEALVAALQGRDVALVVLEATGGFELSVAAALAGARLPLAVVNPRQIRDFARATGRLAKTDALDAEAIARFAEAVRPEPRPLAGEDAQALSELVVRRRQLVEMIGMEKNRVRQARARRVQKSLAATLRVLEAQLAALDDDIDGAVRGSPAWRAADNLLTSVPGIGDVTARTLIAELPELGQLDRRRIAALVGVAPVNRDSGRWRGHRAIAGGRVGVRNVLFMATLAAIRWNPVIRDHYARLTEAGRPRKLAIIACLRHLLTILNAILRTRKPWQHT

SEQ ID NO: 57830 - protein, 418 aa, unidentified
MNNETLYVGCDVSTGDNYFCFLLGNGTQLTTTKLPNNNLGAENLVELICQYMQEHNLNKLVFGVEATSNYHFHLLNFIAYNELFADYEVKVYQLNAQLVRNFKKSYPKRSKTDKYDAFIIADKLRFGRLPEEYIPFNEYEPLKRLTRARFHMAQSLQREMNYFLSNLFLKFSEYKELPFSNTFGATSLALFTEFDVEDIIELSIEELVEFLIDKGKNRFSDPEGYAKEIKKIARNCYRVDRQINDTISLILETSLETIKSFKSSLKRIDKSIAREISKFQNTLDSIPGIGDVFTAGIIAEIGDISNFANDGKLAQYAGLTWNHQQSNEFENDETRMNKFGNKYLRYYLVQAANLVRQNCTEYSDYYWKKYNESSKHKHKRAQVLSARKLVRLIFVLLRDNTLYDPSKYLKTSGGDANN

SEQ ID NO: 57831 - protein, 325 aa, unidentified
MKTPSLGIDIAKLTFDAALRFDRQRCLKARFANNRSGFQQLYRWLKTHCAAGSALRVAVESTSTYAEALVEWLDAKRCCVFLLNPERVAHYGRCCGQRNHTDSADAALLAAFIAQHDDLTPWQPPPPEQKDLRSLTRARAQVVATTTSLQLQVQTATGPARPHLQALLQAARRTLALLGQAITAQLKAHAHLWAQARRLMTIKGLGLITAAVMVAELPPITAATDPRTICAWCGLTPRRSQSGPREWTTRLSRKGNAYLRQALYMPALVAKRYNPLLRAFAQRLAQNGKSNGAILGALSHKMLRIAVGLLRSQQDFDPNWHLPKI

SEQ ID NO: 57832 - protein, 430 aa, unidentified
MHNKNYISVGIDVGSAFSFMTILAPDETVILKPFKITHNNKDSLERAVSEIKKAEELYSLESRIFLESTGIYHFPLFCYLVDCGFNASIINPIITHSTKNGNIRKVKNDKIDSKGIAKLGLSKDIPVSQFPAKLVLELRSLTRKYYDLTDERSAHINKLKGDLHTVFPQYLDVFCDVTGKTSTMILRQYGTPDKILRGHKKTMIEKISKASRKGLAKASERYEKLCAAANAAKTFGCQIDSIYFNIFLTLDLVEKLDSALDSILNRIRQLITFNKNEKFIQQIKLLNTIPGVGFLTAVTIMCEIGDFSAFRNPKQLFAYFGLDPEVNESGKFVGTQLHMSKRGSRIACRAIFAVALASIRTKRNGEGINPYLRKYYELKSGQKPKMVAIGAVMHKVCNIVFAVLRDEKAFELRSPEEHCKQYQRPALAAA

SEQ ID NO: 57833 - protein, 344 aa, unidentified
MDNNQIEACGIEVSAKELVVALSGKKAEAVLRRFANTPIGHRQLLHTLTRGGRRVRACMEATGVYGLDVALLLSAHAGIELMVANPRAVRHFAQATMRRSKNDQLDAVMLREFATRMEFTAWTRPDENTLALWAIARRLEALTKQCAAEKNRQHAAAVSQAIPACVRASVARTLRLLQREIQKLRETARQYIAGDACLQRRYQLLRTMRGIGPISAIQILAELALLPTDRDVRQWVAYAGLDPREYSSGTSVNKRTRVSKVGNRHLRCALFMPALVASHCEPHLRGFYEHLVAAGKKKKQALIAVARKMLHAIFGMFRSDKPYDGNCVYSLPVPTTHLQAQKLA

SEQ ID NO: 57834 - protein, 335 aa, unidentified
MPLYCGIDLHAKNSYLAIIDEQRKRVFKRNVTNDRKLILALLDPYRSELQGVVVESTFNWYWLVDALMDDGYTVHLANVSGIQQYEGIKYVDDKHDAFWLAELLSLGILKEGYIYPKEQRPVRDLLRKRGHLMKLRTSLLISLTNTMANVCGVKVPSHRIKGKEDHVSVHLDHDASLALMGQVSKAAIDMLTRQIETIESHVEKQCAFDTPLLSLPGVGKILGLTILLETGPIGRFPAVGNYVSYCRKAESTWKSSEKVKGRGNRKNGNRYLSWAFAEAAEHARMFDAASRNFYNRKLNERNSPVAHAALANKLSRAAYYIMRDRVPYEEAKLFG

SEQ ID NO: 57835 - protein, 418 aa, unidentified
MIMTNVTFPQLIQRGCGIDVHLKVVVATIDGVGIQKETRSFNTFTSCLTEMKEWLLANGITHVAMESTGVYRKPVMRVLEEAIPNVWIVNDRHIKNVPGHKTDKMDSEWICKLLLAGLVKPSYIPPKEQRQLRDLTRYRNKLIQTIAAEKNRMMRVLEDCNIKLSSVVANTSGVTATALIDMLCEGRKLTMADIESVYHKKLSASPQELLEACSGFVEEHHVYMLQMIRKSIAQTQGLIDELSKRIKDILVKYDNVLELLKEIPGFNINVVEDLVSEIGLDMSAFPSEKHLASWAGICPGNNESAGKKSGRITHGNKQVKAVLTEAAWAATRTKNTFFSERYHRISARRGKKRALIAVAHSQLTAAYLILSTGAKYHELGAQYMQAKIEKKRKVYLTAELKKLGYKVSLEKNMEATES

SEQ ID NO: 57836 - protein, 340 aa, unidentified
MQITTIGLDIAKNVFQVHGIDAAEKVVVRKQLRRGQVMKFFAALPPCLVGMEACATAHHWARELTKLGHEVRLMPAKDVKAYVKRNKNDAADAEAICEAVRRPTMRFVHPKSAEQQGRLMQHRARDLLMRQQTQVINALRAHLAELGVVAAQGREGLKQLLAIIADKKDARLPIDARASLIVLAAQLQALHTMIGSIEKRLMVQHRANEASKRLQSIHGIGMIGASAIAATVTDPKVFRSGRDFAAWIGLVPRQASTGGKQKLGPISKQGDRYLRRILVVGAHSVLRRAKQNPEKYPWLTQLLARRPFKVVAIALANKLARIAWALLASGGHYRPRLAAA

SEQ ID NO: 57837 - protein, 438 aa, unidentified
MSNKVIFNLDELFISVGIDVGADFSWMSIALPNQQIVGTPYKILHNQISSLTTAVSKIKEAEELYSLESRIFLESTGIYHYPLFCYLRDKGFNCSVINPIITKNSTNMNIRKVHNDRFDSKKAALVGLKPDLKVSLMPSDLALNCRNLCREYYDLMDNRSAYVNKLQGELRMAFPQYLGIFSKVTINTSLTLLEKYTSPNAFIEADMQEMIDTIKSTARFGLTYAHNKYNAIIQAAHEANEFGYIIDSNIKRIRLYISFIRKYDEEINGILDAMHNLIDANEDTDFVKQIHLIETFKGAGFLSAVTLMGEIGDFSAFSKPKQLFAYFGLDPAVKQSGKFEGTKIQMSKRGSAIARRAIHTLTLQSIGISRTGKAKNPVLRDYYLKKCESKPKLVAMGAVSHKVCNMIFAILRDNKPFEIITPQEHNKQYNATKCDIAA

SEQ ID NO: 57838 - protein, 340 aa, unidentified
MDITTLGIDIAKSVFQLHGIDADGAVVVQKKLRRGAVLNFLGNVGPCLIGMEACATSHYWAREIAALGHEVRLIPPVYVKPYVKRQKNDAADAEAICEAVTRPNMRFVPIKTEEQQSVLVLHRARDLLMRQRTMILNAIRGHLAEFGIIAAQGPRQVMGMIARLRDDGDASLPEIARSALLALGAHLEALAGEIRALERQLMVWHRADPTSQRLETIPGVGLITATALAASVSDPSVFKSGREFAAFLGLVPRQNSSGGKDRLGRISKMGDRYLRKLLVVGATSVIRRAGSNSTKTGAWVRSLMERKPARVVTVAMANKTARIAWAVMTRGEAYRASPIA

SEQ ID NO: 57839 - protein, 394 aa, unidentified
MRKNINKEDVKEQESISRSGKVLLKKLAIARKKQEAASAVQRVEYYIGVDLGDRKSYYCILDAEANILVEGNLPTTAAGFDGHFKGLGRSRIALEVGTHSPWTSDLLEQHGHEVYVANPRKMGGKKNRRKNDRLDAELLARQVRSDPSQLYPIRHRGEKTRQGLVLLRARDAMVNARTKLVNGVRGLVKSSGHRLPKCDSCSLHKVSMAVFPKELQVALQPMLDQIGQLTEKIKEYDKEVKRVSLKEYPETDVLRQIKGVGFLVALAYVLTIENPEFFSKSRDTGPYLGLVPKQYDSGKSTPQLRITKTGDRMMRKLLVQSAHYILGPFGEDSDLRRYGEKIAERGGKNGKRRAVVAVARKLSVLLHRLWLTGEVYEPLYNSRSGDGNNLQNVA

SEQ ID NO: 57840 - protein, 343 aa, unidentified
MQTIITIGLDIAKSVFQVHGVDAEGNVILRRQLKRRYVLAFFQKLPSCLVGIEACASAHHWSRELQALGHTVRLMPPAYVKPYVKRHKNDATDAEAICEAVTRPNMRFVATKTPEQQSCLMLHRTRHLFIRQRTSVINAIRAHLAEFGIVAPVGRNGIEQLLGVVADVSDKRLPEVTRACVAALGTQLGMLKAQILEFDRMIGAWHRSSEASRRLDDIPGVGPVLATALVASVADPKMFRSGRDFSAWIGLVPKQNSSGGKDRLGNISKRGDRYLRSLFTSGALAVIRYAKIHGTRHRPWLTALLARRPTKVAAIALANKIARMAWAMMARSERYKEPVALAA

SEQ ID NO: 57841 - protein, 351 aa, unidentified
MPRSSAVHAVTTLGIDMGKNTLHMIGLDTRGGIVLREKVSRGRITSRLANLPPCLIGIEAGMATHYVARELAALGHDVKQVPPTYAKPFRQGHKNDFRDAHAVAEAVQRPTTRFVPAKTNEQLDLQALHRVRSRLVSERTAVINQIRGFLLERGIIVRQGLRFLRQALPDILAKRTDVLSPRMVRMVADLASDWRQLDERIEAVTDEIKTLAKSDDSCRRVMTVPGIGPIISSAMVAAIGSGAAFARGRDFSAWIGLVPKQMSTGDRTILGRISKRGNSYLRTLFMQAARVILLRRASWPKHGFGIWLARAAQRLHPNVLAAALANKLARIAWTVLAQERSYEARIMKAAA

SEQ ID NO: 57842 - protein, 407 aa, unidentified
MNAVGIDVSKGKSMVAALRPMGEVAFLPREFLHTEVGLEQMAYAILALGEDTRVIMEATGRYHEPVAAALHEYGIYVCVLNPLFIKQSGGGSIRKVKTDKADAIKIAKYGLDNWVDLREYTPMDTVRQQLKLCSRQYDLYMKTVISLQNNLISLTDKTFPGVNELFSSPERADGHQKWVDFVRTFWHCDCICRVSEKAFTERYQKWCKHKGYHFSVEKALEVYAGSCGHFTTLPKNDNTKLLIISAAQQLLAGKMTLAALRAEMTRLARQLPEYDTVRTMYGVGDKTAPALMAEIGDVRRFPRRSSIVGFAGIDPGVDESGKHSAKSVPTTKRGSAHLRKTLYQIVCTYLKKSPADEPVYQFLDKKRSEGKPYFVYMTAAQNKFLRIYYARVKECLEAFDAQTTEQK

SEQ ID NO: 57843 - protein, 423 aa, unidentified
MLEPTQDQQEVIERIAALDIGKATLVCCARVPGSGPGGRRSQEVTTYSTMTRSLQVMADRLLELGVTRVVMEATSDYWKPAFYLLEAHGFQVWLCNAKDVKHLPGRPKTDVLDAVWLCKIAERQMIRPSFVPPPPIRRLRDLTRYRVALVSDRTGEKNRVEKLLEDAQIKLSVVASDIFGVSGRAMLAALIAGERDPKVLAQLARSRMRVKIGDLEEAFVGHFTDHHAFLLTQMLTRIDALGADITGLDTRIEAEIAPFAEAVARLDEIPGVGATAAHVIIAEIGLDMSRFPTAAHLTSWARFAPGVKESAGRKKGNGATGHGDRYLARVLGEAAVAASKTNTFLGERYRRIARRRGKKKAIVAVGRSILVIVWHLLSDDQARFHDLGPDFHDNRLGPERTRRNHVRQLEALGYKVTLQPVAA

SEQ ID NO: 57844 - protein, 316 aa, unidentified
MSKRSMVCAGIDTGKRKLDAALHGRRGRLEVENSAEGHGKLSAWLREHGVKRVGIEASGGYEIDIVAKLRCDGFRVVVFQPAQVRAYAKFHLRLAKNDKIDAGLIAACTAAAVNIHAPPDPRLAPLAAHLTWLDQIGEDIRCHKTRLETCRDLRAREFWTQEIARLEKIEKAERAALEKAIRQHRDLAERLDLIASVDGIGPKTAALILVRIPEIGRLGREQVAALVGLAPYDDDSGDRHGPRHIAGGRKRVRCGVFAAALPASFHHNRQLVAMYQRLRAAGKDHKVALVACARKLVIFANAVVARGTLWQPQGAL

SEQ ID NO: 57845 - protein, 419 aa, unidentified
MDGSITWVGIDAHKKTLVVAVLHPREQLPEELTISNDERSIRKLVRRLERDARGREIRICYEAGTCGYALQRRLEAAGKVVCEVIAPSLIPRKPGERIKTDRRDARKLVELYRGGILTAVSPPTPEQESVRDLCRCREDVRADLGRCRHRLVKMLVRRGYVFNATSRLWSEAHRRWLAAVTFDNEVDRTVFAEYTLAVEQAERRLKAMDRELEKAAQLPLYRDHVAWLRCFRGIDTTIAMIFVAELHGVDRFESPRALSAYLGLVPTLHASGESAKRGGITKTGNVHIRRALVQAAWQYRHRAGVGPKLRTRREGQPEIIVTIADEAMRRLTARYRRLLERGKMPTKIVIAIARELVGFLWAALRKDREPARHGARTPALIEGAKATAAPRSGPRIRAAKISKTEVGQRRKARKEKRAG

SEQ ID NO: 57846 - protein, 444 aa, unidentified
MDLFHFFIALTIVGDSYHSSYLIMSISKLALDASSQDYINKNTVTYPVLKLFTGGVLMCFIGIDVSKYKHDCFIATEAKSIKAFQFDNNRLGFDLFLTTLKSLDQSQEIRIGLEATGHYGTNLKQFICASGYTYLEFNPYLTHQFSKAMSLRKTKTDKVDAKTISSMLGPVDYKTLHTSFYHINELKQCVRYRDLKMKLRSKIIVELTNILDRTFPEYKTFFNHRLPGSAMFILKRFKSRSRIARFKQTDYDSINSYSKGKVTNVKFQKLKLLAMNSIGYETDTDILLISESIQSYECLSSTIETIENKIIELMKNIPQTLTSIPGLSLISAANIIGEIGDFRNFSNPAQVISFAGLDSSVNQSGTMETRGHLVKRGSGLLRMTLWQVTFSALQFIPTLYEYYLKKKAEGKHHKVALTHCTRKLTRTIFNLGLNQQVFDQTQFR

SEQ ID NO: 57847 - protein, 364 aa, unidentified
METVFYVGMDVHKDSIQVAVLKDGCARCEVEQRLPYDFKKVRKLFSSLQRKGTVLAAYEAGSMGFDLARLLSEMTIQCIVAAPGKIARKPGDRVKTDRRDALMIARLLRSTELEAVHVPTREDEAVRDYLRARADLKLDNTRSKQRLSKFLLRHGYLYEGSFWTLRHMEWMKSIEFSLPMLADTFARYLETLLTQKERLRGMDTQIETLATGARYSEGVARLRCLKGIDYLTALSLICEVGDFRRFERAQQFMGFLGIVPGERSSGPKRRQGGITKAGNVHLRKLLVEASWHYRYHSCASKSLIERRAGQKPEVIAYAERARERLQNKFSRLVHGKFKKSQVAVTAVARELAGFVWGLMVGKVA

SEQ ID NO: 57848 - protein, 427 aa, unidentified
MISAAIERCAGIDVGKKFLAVCVMVGPLEGEPRVEIRKFGTFRAELEGLRDWLKQQAITHVVMESTGSYWKPVFNVLEDAVKVYLANPQEVKNRKGHKTDNKDGWWLAHLLRHAMIRPSFIPPRAIRELRDLTRRRKRLLGAGTSERNRVQKILEDANVKLGSVLTDLFGVSGQLMLEALLRGQAQAEEIAQFAKGRAKKKIPEMIAALEGHQMSDHHRRMIRYSVDHMRFLEEQIEQLDKDIAATIRESGLEPQWQLVQSVPGVQETSAAAILAETGADMTQFPSEKHISSWAGICPGNNRSAGKNRSSHTTGGNRWLRGTLTECAWAAAAKKNCFLKDKFWRITTTSGGKKAPAVVAIAHTLLILTYQVLTTGQAYQDKQTPALDQRQKQRMIRHHIRRLGKLGIAVCASRPGVPAIADSPPPGN

SEQ ID NO: 57849 - protein, 313 aa, unidentified
MTNKQEYVGIDVSKDTLDVACNESKAFRQFKNTSRGISKLIEWMETIQPKLIVLEATGGLELPCVTELSHADLPIAVVNPGRVRGFAKSIGQLAKTDKLDAMVIAHFGQATNPVPRKRPTEQEERLSALITRRRQLIEMLTAEKNRRHSARFNTRSLIEKHIDWLKAELSDLDGEISTYIHQCPAWKHKADLLMSVPGVGKVTVATLLALLPELGTINRQRIAALVGVAPVNKDSGKRSRKRRVFGGRANVRSVLYMAALSASIHNPRIKAFYDHLLENGKEKKVALTACMRKLLVMLNAIIRSDRYFEVLMS

SEQ ID NO: 57850 - protein, 340 aa, unidentified
MNSRTIGLDIAKTIFHQVCLDQHGKQISRKRLRRGQLLAHFANLSACTIAMEGCASSYYWQRELTKLGHRVKLLPAQHVKAHLRGNKNDYNDALAIAEASRVPELREVTPRTIEQQSMQALHRLRESTIGDRTALSNQLRGLLAEFGIIFNQGIATLRKSLPALLEDAENGLTPTFRDAIALKYRQLCELEQQEKDLSKLIGQASEPHKEIELLHSIPGYGPILSSSYYSVVGDGKAFAKGRDVCASLGVVPRQHSTGGKTVLLGISKRGDPYLRKMLINGARSVVNHAHKKDDALNVWVTRLVEKKGKNKATVALANKLARIAWAVTVSGKPYEENHAV

SEQ ID NO: 57851 - protein, 483 aa, unidentified
MRPIPVKKTNTPRYEDLRFGWLEPFKGIPVSHARLCTHGMVDTLYFHIKAVLLIMNNPYISVGIDVGADFSYVCIMMPSYELFCKPFKVVHTDLSSMNKAVSTIKKAEVEYQMKSQIFLESTGIFHFPLFCFLRESGFEVSVINPLIIHSTKNMDIRKVKNDKFDSKKIAKVGLDPTIRKSLIPDEFVLNLRFLCREYYSLSDDRTALINKLSGYVRLVFPAFIGIFSQLAGGASLAVLNYTQSLDHLLSASDDEIIGLIAKAARKGKKYAAEKYIAILDAATVSKTLSMQLPNVFTLIHSIINHISLIDQQMDDILKTINSILDDNHDHVFVRQIQLIDSIPGVGFLSAVTIMCEIGDFKAFKNPKQLFSYFGVDPSVNDSGKFKGSRNHMSKRGSRFARRVLYSIALASIRNKPNSQPMNAVLQAYYQGKVVSKFKKVALGAIMHKVCNIIFAVLRDDSSFVLRSPKEHICLHALSASNAA

SEQ ID NO: 57852 - protein, 362 aa, unidentified
MGKVIKAETGMTIGVDLGDKWSQLCVLDEHGEVCEEGRIATTAQAMRKRFSTEAPCRIVIEVGTHSPWVQRLLQELGHEVITAHTQSVRLIYGATNKNDRLDAERLARLARVDPKLLHPIQHREGSAQADRAVIRSRHVLVGCRTKLINHARGMVKSMGGRLPTCTADCFPKRVREALPKELKPALRPVLETIAALTTKIRRFDRLIEKLGSERYPETGVLRQVSGVGPVTSLSFVLTIEDPARFRRSRALGAYLGLSPRRSQSGDEDPELRITKAGDDDLRRLLVGSAQYILGPFGPDTDLRRWGLAIAARGRKNAKKRAVVAVARKLAVLLHRLWVTAEVYEPLRNPADKPDSIAQAVPA

SEQ ID NO: 57853 - protein, 340 aa, unidentified
MSEITTIGLDLAKHVFQVHGIDAEGRTVLRKRLRRGQVLAFFSRIPRCVVGLEACATAHYWARELGALGHEVRLMPAQYVKAYIKRNKHDAADAEAICEAVGRPTMRFVPVKTAEQQATQLLHRGREQLVRQRTMLVNALRAHLGEFGMVAAQGLRNVGELIAIVRDDGDRRLPDVARQVLRVLANQIEQIEAAVAALEKQLMAWHKTNPVSQRLASIPGIGPIIATAIATTVADPGVFRSGREFAAWLGLVPRQNSTGGKTRLGGITKRGNRYLRRLLINGASANLLRSKATKADPWVIGLRRRRPPLVVAVALANKTARIAWAVMLRQREYQPRAVAA

SEQ ID NO: 57854 - protein, 429 aa, unidentified
MNYTQNEKIAQVTENTLVVGIDVGSESHYARAFDWRGYEYSKKAFQFSNTEAGFAEFKAWMHHIKEKHGKERILPGMEPTGHYWFNLGKYLMDHEINPVLVNPHHVKKSKELDDNSQTKTDHKDPKTIAKLICEGRYSHPYLPEGIYADLRTASNLRFQLTSELTRIQNHIQRWFSIYFPEYKDVYGSFDGKGSMMILKQAALPEDIVALGEEKVNQIWRDAKLRAVGMKRAKILIEAAEHSIGSREGLTSARMEIAILLEDYEAKSAGLEKVMDLLEELCRQIPMVEKLLEIKGIGMKTVSGFLAEVGDIRRFDNPKQLQKLAGLALVENSSGKHKGQTGISRRGRKRLRYLLFEASMPLVAKNAEFRELHRYYTTREVNPLKKIQSLMAVACKLIRVFYAMLTKGVSYNAEKMLSDIRRPEGYAKAA

SEQ ID NO: 57855 - protein, 429 aa, unidentified
MNEEDRTRLEEFRQLRREIRGSAEYLLVGIDVGKDKHHAFFGTATGKTLFKRLVFENNLEGFRKLLAQAEAMKVQGGLKKVIFGMEPTANYHKPLGEHLIRCGRQVVLVSGVAAHENRKTLDGRWDSNDSRDAANVADLLSQGKCLFYDFPVGALQDLRNLLSLKRRFKRVEHGYRVRIRNHLVAKYFPELDRYYKQSESVSLAIVRWCLDPSEIAGLEYKRFVEMVAPGKGGGSRENRLQTIWKMAVESVGCEAGPAVEFEAQVMVEGLKQIQKAIEDIEEKIHEACAQVPEYEFLLTIPGFGPDISSKVLGAIGNPFRFQNGKQVLKMAGLDLNAERSGKTSASAIPVISKKGKADLRYALYQAAMIASIKNNVFIAYYTNKLRGREREPGIKTKMRVKLAAKLLLIAWALMKKKEPFNPGYLAVAS

SEQ ID NO: 57856 - protein, 418 aa, unidentified
MKKDSKFSQQSEATLKRTKAHGPVQRDAKEVLAEVLGKLTGKLDGRAVSTSAKENRRGNTVGPNRDRLTVGVDLGDRWSQYCILGLEGETLAEGQLRTTQEDVGEFFQALTPARVVIEVGTHSPWVQDVITELGHEVLVANPRLMEGSKRRKRKSDRIDANKLARLGRVDPQSWYPIRHRSREVRQDLVVLRARDALVSVRTELINTTRGLVKSMGTRLPRCSSPSFAEKVKDAIPVEAREALLPLVQLVETVNDCIEKYDQRIEELGRKKYGHTSLLRQVKGVGPITSLAYVLTLEDPQRFSSSREVGPYLGLVPKQEDSGDSQPQLGISKTGDRMLRRLLVGSSQYMLGAFGPDTDLRRYGLRLCERGGKNAKKRAVVAVARKLAVLLHHLWVSGDVYEPLRHTGAGSRTAEAVAA

SEQ ID NO: 57857 - protein, 418 aa, unidentified
MKKHSNSGKKSEPTTNRAKSRGSVQRDTKVVLAELVGKLKEKLHPKKVAATSAGEKHQRGELRPNLDRLTVGVDLGDQWSNYCILGLEGETLAEGQLRTTQEDIAEFFQALNAARVVIEVGTHSAWVQEVIGGYGHEVLVANPRLMDGSKRRKRKNDRIDANKLARLGRVDPESLYPIQHRSREVRQDLVMLRARDALVAARTEIINTTRGLVKSMGTRLPKCSSRSFAKKGEEAVAVEMRAALLPLVRLAATLSADIKEYDKKIEELGREKYGHTALLRQVKGVGPMTALAYVLTLENPERFVKSRDVGPYLGLVPRQEDSGESQPQLGISKAGDTMVRKLLVGSAQYILGPFGPDTDLRRYGLRLCERGGKNAKKRAAVAVARKLAVLLHCLWVSGEVYEPLRHGMAVTTAQAAAA

SEQ ID NO: 57858 - protein, 430 aa, unidentified
MNCVGIDVSKGKSMIAVMRPFGEVVVSPFEVRHTASELSKLAGLLKSLNGETRVVMESTGNYHAPVAWLLHDAGLYVSVVNAMLVHDYGNNSLRRGKTDKKDAVKLANYGLDHWLTLPRYVPEEDTRLMLKTCYRQYQQYSKVQTMLKNNLISLLDTTFPDANRLFTSPPRTDGSEKWVDFVAAFWHCECVCGLSEKAFAAKYQKWCRKHGYHFSEDKALDIYASACGHFGVMPKTDTAKLLVEQAIFQLRATSAALAALKQEMQSLAASLPEYPVVMEMFGVGPTLGPQLMAEIGDVRRFHSKKALVAFAGIDAPPYQSGQMDVRSRSISKRGSASLRRTLFLVMSVILQRAPMDEPVYQFMSKKHSEGKPYRVYMMASANKFLRIYYASSVSPHSAILRYPSTSGIPMDGEFSYCPTYARISFACSPI

SEQ ID NO: 57859 - protein, 412 aa, unidentified
MEGETVIAGVDTHKDVHVLCLLDGLGRKIWSGSFGADPEGYDRLAEAIGDPGSCMVVGVEGTASYGAGLTRRLVELGYNVVEVLRPKRDKVRPGEGKSDPLDAERAARKAASGKGCSVPKSQDGWVEAVRQLYVARRLAVATSTSCVACAKSMLTTAPSALRERFRGRERPKDLMPLLARGRKAASALEESVLASLRSVAAVWKEARSQVESLDERIRALLEANAPALLGVEGCGTTTAAALVVAAGDNPGRLKGEAAFSMMCGASPIPASSGKTDRHRLNRGGNRQANWALYEIAIKRMAYDERTRRYVARRTSEGKSRREAVRCLKRYIAREVYHVLMDPNPDGAAPEGPELAKMRKAMRVTQKKAAAELGLSAATLGHLERGKRRSTKLERRYYELLCELERTLPQTAS

SEQ ID NO: 57860 - protein, 391 aa, unidentified
MERPMPQRNDLSRSLLALDQNSTIIAVIEMSRSNWLVAGVIPGVDRQPLKKLEPDEEGLLHLLRRWQDEAARAGRTISRIAVAFEAGRDGFWLARWLRARGIEAYVIHPASIPVSREHRRAKTDRLDTELLKRAFLGWLRGEPNHCGMAAVPTLEQEDAKRPNREREVLVGERTRIVNRMKGTLARLGIRGFKPALPRAPERLETLRTPEGATLPPNTRAELQRDMARLRFVTDQIRELEAARAERLEHAPETGPNAMIRLLARVVGVGIETADMLVQEVLSRNLRDRRAVARYAGLTGAPDESGAKRREKGLAKAGNARVRRGMIQLAWRFLLFQKDSALSQWYRARTTDARGATRKTLIVALARKLLIALWRFGATGEVPQGVVLRPAA

SEQ ID NO: 57861 - protein, 408 aa, unidentified
MEVLHQRCAGLDVHKATVVGCLRVQERGRVRHEVRRWGTTTAELLALGDWLRQAGCTHVAMEATGVYWKPVWHILEGELDLLLANPAHIRNVPGRKSDVNDATWIADLLAHGLIRASLVPPGPIQALRDLTRTRKQLMREIGQHKQRIQKVLEDANVKLASVVSDVFGESGRRMLKALSAGETDPSQLAALRDGRLTASRETLAAALHGKVTAHHRFLLSQHLGTIAHLEQTVAAFERQIETVVAPFNTAVACLVTVPGISVTAAHVIIAEIGVDMSRFATAAHLRSWAGLCPQLNESAGKVMSRRLRHGAPWLKTVLVQCAWAATRNKNNYLHAQFVRLRARRGPQKAIIAVAASILTTAYYLLRDQVAYRDLGSLYFARMDKERTAQRLARRIKELGYEVEIRKAA

SEQ ID NO: 57862 - protein, 418 aa, unidentified
MEAIHARVAGLDVHKTSVVACVRLQCGGKVRRECRTFETTTAGLEALLAWLEEMACTNVAMEATGVYWRPVWNILSDSDFDLVLANAAHIKNVPGRKTDMNDAMWIADLLACGLIRASFVPDPQMQDLRTLLRTRKQFVREQTRHVQRIQKTLEQGNIKLDAVISDIMGSSGRRMLEAMVAGESNPHVLAALADRRLKAKPDALRAALHGRLTDTHRFLLRTHLRQWDELEAANAAIDRQADALIASMEQAGRFRMLIALLCKIPGVSKLAAVSILAEIGIDMSRFSTAAHLVAWAGMCPGHNQSAGKRKSSRLRKGAPWLKTMLVQCAWAAKRKKNSYYKAQFHRLCARRGPQKAICAVAASMLTTIYYIILRGTPYQDLGANYFDHRSTEAKANRLVAQLTKLGYAVQVQPLADAA

SEQ ID NO: 57863 - protein, 423 aa, unidentified
MAYRIAGVDVHKKKLAVVMADVEVEDEYLFERRWYGSNPEQLRLLAGWLIEQQVEEVVMESTAQYWKPVWGALERHWRPVCRNRNGAGQMSGTLHLAQALSNRGRRGRKKDFRDAERLVKRLVSQELTLSFVPDTEQRLWRTVTRTRYQLTRDKARLQNQLEALLEEAHIKLSSLVSDLLGVSARRMLQALADGETDAGALAALADQRLRATPAELRDALGACADMNPLYRRLVKMALEEFGSIERRISQLDQEMACLLREHQDAVKRLAEVPGLGVNSAQQIIAEVGVKAATFASAKKLSSWVGACPGEEESAEVNYSPHSPKGNRHMRRILNQAANAAVKHKGSIFEIVYRRLVPRLGHNKSIGAIAHRLCELIWIILYKGVRYEERGPAVCEKSKRFRTLRMIRTLRTLGYRVEPLGVPV

SEQ ID NO: 57864 - protein, 343 aa, unidentified
MQIRSVGIDLGKTTFHLVALGDSGKVLLKKKFSQRQLIAFTANMQTSLVGMEACSGSHFLGRALREQGHDVKLIPAQFVKPFVKSNKNDFIDAEAIAEAVDRQNMRFVPIKTDDQLDLQALHRVRDRLMARRTSLINQIRAFLLERGIVFAKTPIRLKEALPEVLENANENLTPRMRNLVAILWSEWKDLELQIVEMNDEVERIASSDAACRRLRQIPGIGPLVATAIVASIGNGAAFRKGREFSAWLGLLPKQHSTGGKARLYGISKRGNSYLRKILIHGARAVVLRSKRDRIAMGAWMTSLETRAPRNVLIVATANKLARIAWAVLSTGQDYRAVPEAVTV

SEQ ID NO: 57865 - protein, 333 aa, unidentified
MKNYTTYLGIDVAKLTLDYCVVTDDQELERGQILNTEKSLNSFLKNLKKTGHKLEEMLFVFENTGIYSSLLSLVLSENELDYAQVPALEIKRSLGITRGKSDKVDAKEIAFYAKRNTDKITLSVLPEVNLQQLKIVFAEREKTIAAIKVFERTMENEMFLSKEVFGSVKSINRQTVKYLKKQLSMLDDRIKKLIREDETLYKQQQLLKSIPGIGEITSVYLLMVTKGFTAFTNGRKFACYSGVAPFEHSSGTSIKGKTRVSHLADKKMKSLLHMVSLTAIKYDPELKEYYTRKKAEGKHTMLVLNNIKCKIVYRIFAVIQRESNFVNLHKFAA

SEQ ID NO: 57866 - protein, 458 aa, unidentified
MRRKREAGKDRQSLPVVHPHAAAIDVGATMHMAAVGPDCADEPVRSFGTFTADLHRLADWFEVCGVTSVVMESTGVYWIPVFEILQDRGLEVFLVNARDAKQVPGRKTDVKDAQWLQRLHAYGLLRASFQPKAEIAELRAYLRQRERLLEYAASHIQHMQKALTEMNLQLHHVVSDITGATGMRIIRAILAGERDPAVLANLRDVRCHSSSETIEKGLTGHYRAEHLFALEQALALYDTYQHKVAACDQRIEAVLKSLSPHKPDSASLPPPRRRMSRQPNEPSFDLRGALYAILGQDLTRIHGLGPSLALKLIAECGTDLTAWPSSKHFTSWLCLAPGNKISGGKVLSSRTRRSGSRAAALLRLAAVTIGKTETALGAFYRRLSTRIGKAKAVTATARKIAALFYNALRHGMDYVDPGASYYEERYRKRVIDNLHRRAKAFGFVLQEVGVVAPAGAVS

SEQ ID NO: 57867 - protein, 342 aa, unidentified
MTLYIGVDIHARQQTLSYLETEDGTTGQVVLDHEVDDVPGFYRQFQGEVIIGIEACGYTNWFEELVERLGHQLLVGDAAEIRRLARRRQKNDRRDADLLLDLLVHDEFPALYRYCQESREVLRQLRYRHKLVKLRTMVANTLHALALNAGLSLRAKLLTKGGRQQLSALPLSAISQQQRNELLSLADELTRRIQLVEQWLAVQAARDGRVQRLQTHPGVGLLTSLCVVHTLGEVQRFSSTRKVAAYVGFDPMEDSSAERKAYGGISKAGSRLLRYLLIEAGQTAAKDDEQLKQFYRRLLPRRGKARAKVAVGRKLLIRCFIMWRAEIDYAEFLRRGQKAETE

SEQ ID NO: 57868 - protein, 384 aa, unidentified
MFKKVEIASQLFYIIVSLPIIKQQEAIMEQNNKLDFTGQDIYTALDTHKRNWTVSIFTKDFEHKTFSQNPDPTILANYLKRNFPGANYHSVYEAGYCGFWIHDALQEHGINNIVVNPADVPTTDKERKHKRNRVDSRKLARALRNGDLKAIYVPKREALENRSLIRTRRNTGKQQTRYKNQIKGYLSFFGIQIPERFKEGRWSGAFIQWLESIHMAKEAGKISLQFYINELKHYRKHIAYLNRELKQLASHELYQEKVKLLITIPGIGIVTAMILLLELVDINRFKNLDYLASFIGFIPGEHSSGEDDDVNTTGITPRSHHYLRSMLIEAAWVAVRKDPALNMCYSKLIKRMKKQQAIIRIAKKLLNRVRFVLKNNKPYVTAVI

SEQ ID NO: 57869 - protein, 410 aa, unidentified
MSDPYELYVGIDWASTSHQICLVPPDGAQEVFAVAHSGAGLAALRERLQARGVSPERIAVAIEVPRGALVEALLAHGCHVYAINPKQLDRFRDRHTVAGAKDDRRDAFVAADALRTDRAAFRRLQPENPLVVQLRELSRLHGELVEEHGRLANRLREQLWRFYPQLLAVSPAADEEWLWEVLRVAPTPAAGRRLTVSALRALLARHRIRRLTAEAVSAALQEPALPVGPGTLAAASEHLALLLPRLRLVHEQRAQCERRLDRLMRELAAEPAGADPVEHRDVTILQSLPGAGKVVVATMLAEAAAALTERDYQTLRAQAGIAPVTRQSGKSRLVLMRRACNGRLRAAVFHWARNAIRFDAVARAHYERLRERHGYARALRGVADRLLHLALKLLVTGQLYDSHRRQRVAA

SEQ ID NO: 57870 - protein, 348 aa, unidentified
MLHAGLDLSRKKIDVCLLSEHAEVVEEFAAPPDADGLRALARRVAVHREPVRAVIESMTGARFVHDRLEELGWEVLIADAAKVKGLAPLACKTDRIDARVMAVLSHRDLVPEIWLPDPRVRREREQARFRMHLVKHKSSLKNRIHSTMITFGHPCPVTDLFGVAGRALLDRLEVPQPWRGTIDASILLIDDLERQIDRINRQLKSAGADHPYVPLLLTVPGIGWVLAFTIAAEIGDISRFPTATKLVGYTGLCPRVNQSGDRDRRGPLTKQGPKYLRWAMLEATMHACRHDAYRERYQRTKQRLGKQRGAKVAQIDIARRLTEAVWHMLTRNQPFTPSAGGSTFRLAA

SEQ ID NO: 57871 - protein, 354 aa, unidentified
MKRTTKHVALDVHQATTVASVREESGRVIARTVLPTDAGPIVEFFRGMRGSIHVAFEEGTQAQWLHELLAPVVQRVVVCDRRSEARRGNKSDHVDADALSELLRQGSLRPVYHGSAERATLKELTRAYTNLVEDATRVMLRLKALFRARGIPAPGKRVYHPAGRAAWLARLPNRGARCRAEALYAQLDPLRTLHPRVKATMVAEARQDPAWKILQTIPFYGPVRVALLLATMQTPWRFRTKRNLWAYAGLAVVTRTSAEYEVVAGRPVRRRRAPLTRGLNQNYNRVLKNVLKSAATAATAQPGPFLDFYQGLLARGMREELARVTLTRKLAAVTLRLWKKGERFDPTQLTVQAR

SEQ ID NO: 57872 - protein, 369 aa, unidentified
MLQVKKTERRPEGLLQNRTEEDLMNSMNYIGLDIHKKSISGCVRQADGTIIQESTIAATRRALDEWMLQLPQPWIAGMEATLFTGWIYDHLVSGGGMVKVAHPAMLQAIAAGKKKNDRVDARKIADLLRCDYFPECHMASREVRDRRRVLRYRNLLVRQAVQMKNKVSGLLMEAGIPYNQQKVHQKKYFAELLQKQKKEMPPSMPELLRLSRSTVEALTGMQRQLIQALESDALLAARVERLASIPGVGRVVALTWALEMGDISRFASVKKAVSYCGLCGAERSSGGKTERTPISKQRNKHLQTILVEAAKLAPRWNPDLALVYEREKQKGNRNRATLAVARKLVAYLMAVDREQRPFDTQLRVADNAA

SEQ ID NO: 57873 - protein, 347 aa, unidentified
MSFIGVDLHQNSFTVCRRKTDGAESFETLTLSAADLERFCLSLDADDELAVEATGNSAWFRDCVRPCVGRVVVVNPSQFKVIRKSVKKTDRNDAAALALFLAKDMLPETRARTQGENELASLTQTRDLLVKQRTRLLNKIHALHVRKGLKLRKESLGSKRALASIDLALFSACEVIEIEVLREQALSLTASLARLDREIEGVASTFKGYAGLTSIKGVGPRSAAVLLSTIGNVHDFESADKLAAYFGIVPRVSQSNETDNRGRITKRGNKLARTTLVQCSLIAMRYSSYLKTYYDRIRQRRGTGKAIIATARKLLAIIYETLKNGWVFDDFTQFSRRDPLIPAGQTS

SEQ ID NO: 57874 - protein, 413 aa, unidentified
MVQRVIGFDSHPDTFTAALVRGPTPAAALIEKMFNKVPMSQLVSWARKHSTAQDLFVLEASGNSFQVVRCLAALDRKALVLESCQLGKLKEAHANNDKISAVRIAKAYLAGTAKEVWVPDLKTQEWRDWLHAHRKCVKRTTQMCNRIISYLSDNGVRLPAGTLNPSPEAEARVLQAHSWSVRQQQVISVHFMEWRHAQEQRAHWRSLIAQEVVAQPMLLSIVRLCGVRDQVAFALGAIIGDIKRFTEPRKLVKYIGLNPAFDHSGAEEWSGGIGGHGRRDLRSLLIESAHAILRSNHPLAKWGKKLLAKKGSVKLAVAAIARKLVVAIWYLMMGRWTPLEEIDERLAAKVSKIISNVGPEALNKLGKMRRAFREEIYQSLKAGRTYELDPDKKFTPKPKIDRSLSLAEEYGLR

SEQ ID NO: 57875 - protein, 359 aa, unidentified
MKEMTVSLAGDADLIIGVDTHLDTHTAAICDGRGRAVARLRAPATAAGYAQLRAWARSAAAGSRVIWAMEGTRHYGLGLARHLASQGEQVTEIGNTKRVGKRRAGTSDAIDAVRAARELRARPHPAQMRADGDREALRLLMIDRDNAITSAKTARTALAAVWVTAPAPLRDRLRHLPRQRRARECAALTCPPGADRQTRVLHQTLIRLGQRIATLAGVAAELEAQIAQLVEEMAPGLVAAEPGFGALSAAQLLLSWSHAGRIRTEAAFAMLSGTAPVPVSSGRTDQHRLNRLGDRQLNRALHMVAVTRMRCHPATLAYVQRRRAEGKTDREIRRCIKRYPARHLYRALNKQLNQATQTT

SEQ ID NO: 57876 - protein, 344 aa, unidentified
MQITTIGLDLAKNVFQIHGVDATGQAVVRKSLRRSQMLPFFAKLPSCLVGMEACGTSHHWARELIKLGHEVRLMPPAYVKPYVKRGKTDAADAEAVCEAVTRPTMRFVPVKSPEQQAALSMHRTRDLLVKQRTQLINMIRGLLAEFGVDIPKGLERALLMARQIVDGKSPDVPIEAAKIVGTLSQQALDTHVRLREIDRDLAVWLRGNDVARRLMTIPGIGPVGATALAASVTDPHQFRSGRQFAAWLGLTPLQKSSGGKERLGRISKMGDKYLRKLLIVGMTSLVRRAKYNPGKIDPRLADLLARKPTRVATVAMANKTARVIWAIMARGETYRTGHQPALAA

SEQ ID NO: 57877 - protein, 339 aa, unidentified
MKKVFIGIDFSKLKFDAAIYSIDTKAIVSSEVFDNEQSGYVDFLQWVKENARCQKSGMLFCGEHTGYYSGNLSVFLYETGYDMWLVSGLEMKLTQGIKRNKTDRVDACKIAEHAYRYQDKVVLFQPVSKALEEIRELLSYRERLVETRKVLTTSAKEMKRVKENSSCDYIYQDSLEYIRSINTSVRECEKRIEVLLKQDISLKTNYKLVSSVVGIGLVNAALILIATANFTLFENPRKFGCYCGVVPFEHSSGSSVRGKTRVSKMANKHLKTKLTLAAQNAARFDPELKEYYQRKRSEGKNNWLVLNNVKNKLIHRIFAVVRDGQIYEKQYVHPLKQVA

SEQ ID NO: 57878 - protein, 456 aa, unidentified
MAWGPRVRRIVAIEHAGLCPFAEGPAGGTPTAPAGAAVGTSVEVNGVDVVVDRVAGLDIGKDSVTVCVRVPGTGARRVSETRTYSTMTRQIQRMAEWLDECGVELAAMESTATYWKPVFYCLEEHTETWLLNAAHIKAVPGRKSDVRDSEWIARLVEHGLVSPSFVPPPEIRRLRNLTRYRLQLTGDRTREATRVEKLLEDASIKLSAVVSNIAGVSARDMLDALVAGERDPAVLADLAQKRLRVKIPALTESLTGHFDDHHALLIGGMLERLRQAEASLAQADAQILAEIAPWQHEYELLQTMPGIGPKTAQIFIAETGADMSRFPSAAHLAAWVGVAPSVHESAGRSWSMGSRKGNKWLCSAMVEAAGSASRMKTNYLGAQFRHLAPRRGIKRAIMAVAHSMVVSAYYMLERDEPYRDLGSDYFTRPVDPQVQTRRLVAQLERLGHSVSLQPAS

SEQ ID NO: 57879 - protein, 333 aa, unidentified
MNEITILGIDLAKHVFQLHGEDAQGRVLVQRQLRRSQLLGFVARLPACTVAMEACGGSHHWGRKVRELGHSVRLIPPQYIKAFNRGQKNDRNDAQAIVAAARQPRMPQVPIKSVEQQAILALHRVRDRMVKERTALGNQLHGLLAEYGLVLPRGILRLRRAVTELLGEETLPALLQGPVADQLEHLAQIEQRIRALTQQLEQLARASEPCQRLMRHRGVGPLIATAFAAELADAGSFKNGRQAAAWLGLVPRQHSSAERLRLFGITKRGNCYLRRLLIHGARSALRCAPRYTDPISRWSLAVQERRGTNRATVALANKTARHLWATLRYPQAA

SEQ ID NO: 57880 - protein, 365 aa, unidentified
MKIIYWIGIDDHADKWTVAQYRGEEPQPSKEFELVPDEKGYRRLLGYLKGLEGEVRVVYEAGPCGYELYRRLTRAGYKCQVAAPALTPRKPGERVKTNRRDAAKLARYLRSNDLTFIVVPDQDRESLRDLVRSRQSVQKDVGRMRKQIIHLLLRYGHRYREGQAWTQRFWAWLKKVQLEGVHSRFVLTEMIGELEHRISQLERYDEQVELASQKPEYQHYLAAQRTLRGINTLSAMTILSELGDLRRFATAPKLMAAVGVVPSEYSTGDKTNRFSITKTGNAHLRHVVVEAAWQYQRRQLLGRTIKARRKDQPKAIVEIAEKCDKRLHARFYRLTSRNKKSSVAVVAVARELLGFIWAIGQIAHP

SEQ ID NO: 57881 - protein, 335 aa, unidentified
MIYVGLDVHKRTCYGTVTDDEGHIVKSGRFSSDSEGISEFMEGLEEAQIAMEAGYCWQPIYDRLVDAGHDVRLAHPQKVKAIAEAKVKTDKVDSETLAHLLRAGLLPESYVPPRDIRELRDLVRRRAFLVGMRTKLKNRIHAELAKRSIDLGSPLFTRGGRELLGNLGLESVDQLLPVMEALDAQISQVSGSLRKMSGEDSRAQLLTTIPGVGYYVAALLIAEIGDVNRFPSSEKLCSYAGLVPSVRRSGDTTRQGGITKEGSRWMRWSLIQAVHVHVRYDTDLSRFYRRLARRKTRQEAVVATARKMLKVVYWMLRSGEPYHPEPGGYDPTEHR

SEQ ID NO: 57882 - protein, 341 aa, unidentified
MVTTIGIDPHKATHTAVAINETETVLGELTIPADRDQTKTLIDWARNLDGDGRVWAVEAAGGLGYLLSQQLIADGEHVVDVPPVLASRVRLLGSGRSDKNDPNDARSVAIAALRQPGLAVVRGEDHTQVLRMLAKRHLELTALRTQAACRLHSVLTQLRPGGMPPRLSATKASRMLGGIRNLDVIGSQRRTMAKTHLGDIRRWDREIKANKTLIRSAVAASGTTVTDVYGVGPVVAAFLVGYTGDIGRFATAGHYAAYNGTAPIEMSSGGTKRHRLSTRGNRKLNHAIHMAAVTQIRHDTVGRIYYTKKQAEGKTRKEALRALKRRISNVVYQQLITDQQG

SEQ ID NO: 57883 - protein, 381 aa, unidentified
MLERNYYKRFVGIDIHKKTASFVIVNRAGEVSARGTILMVNLAGWATEKLNKEDQVIIEATGNSYDVYDKLSPLVGEVQVAHMLGMHDRTCSKKKTDKLDALKLARALASGYTHKVWVPSKEIRAKRELASHRHALATHVVSMRNQLRSQLYRHGLNYIGQDILDHKALEYIESSSLPEISKQQWCSNYRIGQSFLTEIHQFDQRLASEALKDEQCLKLMTLPGIKAQAALIIMSAVGDVRRFDSPKKLASYSGLVPSVIGLGEKIFYGRITKQGRSLLRWIMVEVANAATMTLGPIRDRYHRFRRKGKTHNVAIVAIARHLLEVIWNMLKNNQTFKHARPKYLIYKYRSLLNQAYGRCPINAAPKLAKTVMGWKDFPSTA

SEQ ID NO: 57884 - protein, 343 aa, unidentified
MQAITTIGLDIAKSVFQVHGVDAEGKAMLRRQLKRRYVLAFFQKLPSCLIGIEACASSHYWSRDLQALGHSVRLMPPAYVKPYVKRQKNDMADAEAICEAVTRANMRFVPIKTPEQQSGLMLHRTRHLFIRQQTSVINAIRAHLAEFGVTAPVGRKGIEELLRVIADPSDKRVPDVVRACLAALGSQLISLKKQILDFDRMIMAWHRCDQTSKRLNCIPGVGPLLATALVASVADPKVFRSGRNFSAWIGLVPKQHSSGGRARLGSISKKGDRYLRSLFVAGAFAVIRYAKLHGTKYRPWVAALLARRPTKVAAIALANKLARMAWAMMATGERYNYPASLRV

SEQ ID NO: 57885 - protein, 457 aa, unidentified
MEKSKRKKVRSPRRSLVPMNPDAAGIDVGATFHTVAVPPGRAGQTVRSFRSFTGDLYALADWLKSVGVKTVAMESTGVYWIPAFEILDERGFEVLLVNARHVKNVPGRKTDVNDAQWLQQLHEHGLLRGSFRPRDEVVRLRALLRHRERVIEYAAAHIQHMQKALMQMNVQLQHVVTNITGVTGMKIIKDIIKGIRDPKLLAQHRDPRCKQSPETIQDALTGNYRPEHVFALRQALELYEFHHVKVTECDAEIETTLRALNQNREAPGEPIPAMRHDPSRNEPDFDVRLALYTFLGADLTQIHGLGAYSVLRLIAECGDDMRKWPTAKHFTSWLTLAPGNKISGGRLLSSKTRRSSNRAAVLLRTAAVNVGRTQTALGAFYRRLAARVGKAKAVTAAARKLAVLFYNALRHGLSYVDPGASYYEQRYRQRVLHNLQRRARQLGYTLIAARATPNGVS

SEQ ID NO: 57886 - protein, 354 aa, unidentified
MAHAAAAQRITIGVDTHLDLHVAHANDQLGRGVDTIQIPTTPTGYQDLLAWARRLGEVDAWGVEGTGSYGAALARFLHAAGEVVLEVNRPDRAARRRRGKSDPLDAEAAARAVQAGEVTVAPKAGTGQVEMIRSLRVARASAMRARTQAINAMKALLVTAPAELREQLRDLPAATLVAAAATLAPGKITSPLAAALLALRTLAHRHQALSVEIKTLTAELDRLTATAAPTLVAMFGIGQDSAGALLVAAGDNPGRLRSDAAFSMLCGSSPIEASSGKTVRHRLNRGGDRQANAALYRIVLVRLRYHQPTKDYVTRRLAEGKSKQEIIRCLKRYIAREVFAALQPLRQDLLTPTT

SEQ ID NO: 57887 - protein, 343 aa, unidentified
MQTVTTIGLDIAKSVFQVHGVDAAGQVVIRRQLKRRTVLAFFQKLPPCLVGIEACASSHHWSRELQALGHSVRLMPPAYVKPYVKRQKNDMADAEAICEAVTRANMRFVPTKTAEQQSCLMLHRTRHLLIRQQTAVINSIRAQLAEYGIIAPVGRKGVTELLHVVADPNDKRVPGVARACLAALGTQLLSLKEQIMEFDRMILDWHRSNETSQRLHYIPGVGPVLATALVASVADPRTFRSGRNFSAWIGLVPKQHSSGGKDRLGSISKQGDRYLRSLFVAGALAVIRYAKIHGTKHRPWLTALLARRPTKVAAIALANKIARMAWAMMAKGERYKQPVALAA

SEQ ID NO: 57888 - protein, 342 aa, unidentified
MVTTIGIDPHKATHTAVAIDETEQVVGELTVPADRYQTNRLVEWASHLDGDGRLWAVEAAGGLGYLLSQQLITRGEQVVDVPAVLASRVRVLGSGRSDKNDPNDARSVAIAALRQPSLTRVRREDYAQVLRMLSKRHHELTSLRTQAVCRLHAVLMQLRPGGIPKRLSTIKATRMLQGIRTLDPVGEQRRLMARTHLGDIRRLDREIKANKTLIRQAVAASGSSVTDVYGVGPIVAAFLIGYTGDPTRFATPDHYAAYNGTAPIEVSSGGKTRHRLSMRGNRKLNHAIHMAAVTQIRFQTPGRVYYDRKITEGKTKKEALRALKRRISDAIYQRLQADQQTR

SEQ ID NO: 57889 - protein, 296 aa, unidentified
MTSMATTAVLVTGGVDTHGHTHHAAVLDYMGRQLGDREFPTSPAGYRALLQWMSGHGVLDRVGVEGTGTYGVGLARHLREAGVHVVEVDRPDRRARRAQGKSDPLDAYSAARAALSGRASVVPKVRDGKVEAIRAIRVARSSAVKARTQATNQLKAMIVTGSPRLRQQLRHLSTPLIIAHCARLRPSPDLSEPEQATKTALRRLAHRHQQLSEEITEADRELHQLIRDVAPALLDLPGVGSEVAGQVLISIGDNADRLKSEAAFAHLCRAAPIPASGRTHRHRLNRGDDRSANAST

SEQ ID NO: 57890 - protein, 327 aa, unidentified
MNQSRVDLPILGIDISKEKFDVALLRVGKYKHKKFSNNQEGFEQLGKWLAGHNLEQLHACMESTSVYGEALAEYLYGSGFRVSIVNPARIKGFGQSELIRSKTDKIDASLIARFCAAMKPGLWTPEPKEIRELRSLMRRVDALVEMRQQESNRLEVSDKVVKKDIEDHIEYLTNQIDSIKSQISQHIDNHPELRDKKKLLESIPGVGEATINLALAHFGDTEKFHNAKRLSSFLGIAPREYSSGNSVRGRRRMSKVGKTSLRKALFMPALVALRCNPIIIDMRRRLSEAGKPKMLIVGAAMRKMVHLIYGVLKSKMPFDPNYSLKHY

SEQ ID NO: 57891 - protein, 316 aa, unidentified
MQSILDLGADVDSRTVMVACSAGSFKPHRIANERNALQAWLRTVPRGSRLAMESTGSYHELLADLAHQAGLQVFIVNARDLRRYGQGIGRRGKTDRIDAEVIARYIAREHQELHAYVPPTDAQRLLARLIGRRAKLVRAKDSIRQSLGGLPALQSEARRLIGHIDRVIARLDLLMQRTVQQTPAVREAAGHIVTIPGIGVLTSTCLGHRFTRLPYTTSDAVVAATGLDPRPEDSGQKEGRRRLSKRGPAEERRLLFNCARSAAQRKPWRSYYDAQLAKGLSKTAATVVLARKMLRVAFAVYQHRQPFNPLLVGGGT

SEQ ID NO: 57892 - protein, 379 aa, unidentified
MIATTRPEMSVSEPTLYVALELGKKEWKLAMPSGFGVAPSLRSVVSGDWRGVDRALAQGRARFGLAAAVPVVSCYEAGRDGFWIHRALQQRGIRNRVVDSASIEVNRRARRAKTDRLDALKLVTMLVRVCWGERRVWSEVHVPSVAAEAARQVSRERTALTQEQTRLTNQLKGWLATWGATLPRRRPSGWWTTVSDWAGAPLPVEVQARVARAEARRAVLEGQIAELDAQQRAAVTTAAPGSAVRQLVQLKGVATRSASDLLDEGLVWRAFQNRRQIGGLLGFAPTPYESGESAREQGISRAGNNRLQSISIQLAWNWVRWQPHSALTVWYREQFGKGKRSRRIGIVAVARKLVIALWRYVTTGVVPAGAILKGARPVA

SEQ ID NO: 57893 - protein, 345 aa, unidentified
MEPMYYIGLDVHKRKISYCVKDSGGKLYAEGSLPATRSDLDLWMKTLPQPWSAAMEATMFTGWIYDHLKPHAAALKVAHPLMLRAIAAAKKKNDRIDASKICDCLRCDFLPECYMAPTAIRERRRTLRYRNLLVRQMVQMKNKIAMLLMEAGVSYNKQRLHKAGYFRELLATNPDIDEGLRSLLRLCRETVVRLQKTESAMVRSLEHDSLLMDRVERLMTIPAVGPITALTWALEVGDVQRFSSIKKAISYCGLCGAEKSSGNTVQRTPLSKQRNKHLQTTLIEAAKMAPRNSPELAMLYDKEKQKGNANRATLAVARKLVAYLMAVDRGQRNFQIAETSSNIAA

SEQ ID NO: 57894 - protein, 358 aa, unidentified
MLHKRGEPAMGNVTIGMDLGDKNHAVCVFDHNEIVHQGSIRNTKDALIQFFTQYQKATVAMEAGTHSPWISRLLKEHGFEVLVGNPRRLRVIWDSDRKNDKRDAEMLAQIARFDPHLLYPISHRGEQAQIDLELLQARDMLVKARTSLINHVRGSVKVFGERLPKCSAHCFHYKVVEDVPDILKAALLPMFKMIEQLTDQIKSYDKIINDLCNISYPETELLMGIKGVGTLTALAFILVLEDPSRFDKSRQVGSFLGLTPRRDQSGETDKQLRITKAGNKFLRRLLVSAAQYILGSFGEDCNLRDFGNRISERGGKNAKKRGVVAVARKLGVLMHHLWATGEVYDPRYKPSRCLAKAA

SEQ ID NO: 57895 - protein, 357 aa, unidentified
MVIIAFDSHKRYTFSSVENEKGKIIDERRIDHKAGALMEYLSRFPKGSEVAVETIGNWYWIVDEIEKAGMKPLLVHARKAKLLSGSANKTDRLDARAMNKLNRANILPTVWIPPREVRDKRDVLRTRMRFVNQRTQLKNRMHGILSQYALNKFEASDIYGKRNRAELELRLDMLPQETRVDAFSSLHMIDTFSEELLVLEKRIMELFDSSEDAQLIETIPGIGFLLSTVIIHEIGDIGRFPSAEHFASYSGTTPRVHSSGGKTRYGRLRKDVNHYLKWAFSEAGNSVCVNHTRKPELHVSKLYSRVRSRKGHSIAIGAVARHIAESCFWVLSKGEAYKEPQKRSHQGKRRRVPVVNR

SEQ ID NO: 57896 - protein, 368 aa, unidentified
MKDVTTYVGIDAHKKDLFIAMLVGTQATPLTWTVANEPNAIRRLVRKLEREAPGPVRSCYEAGPCGYALQRRMTTTRVVCQVIAPALIPRKPGERIKTNPRDARKLAELLRAGLLTEVQPPTPEEEAVRDLCRARDDAREDLQRSHHRLGKLLLRRGLHYSGRNWTRAHRQWIDSLEWARAAERVVVDDYLLAIEHLEARLIELDARLTAIAATEPYREPVAWLRCFRGIDTLTAILILAELHDFRRFQSPRALMAYVGLVPGEDSSGEKHRRGRITRTGNALVRRLLVETAWHYQHRPSVGVALTRRRKGQPTRVIAIADKAQQRLCRRFRRLAEHHKPAPKIAVAIARELAGFLWAVLQPASVSAS

SEQ ID NO: 57897 - protein, 339 aa, unidentified
MMMCYAGIDLHATNSVLVVIDDADRVLYQKRLRNDLPLILAALEPYRVAVQGVAVESTYNWYWLVDGLMDAGYRVHLAHAPALPQYSGLKHADDQHDARWLAHLLRLGLLPTGYIYPKAERAVRDLLRKRSQVVRHKTMVVLSLQSLLTRLTGTRLSLPRLRQLTPEGVRALVPFPEQVQAVMSSMTVLQCLEQEIRTIEGTVREAGRTQPGYALLQTVPGSGPILAGTILLEAGDLQRFATVGHFASYCRCVGSEHVSNGKRKGAGNTKNGNKYLSWAFIEAAHFAIRYEAVIRNFYQRKQARTHPLVALKAVAHKLARACYHMLREQVPFDVSRAFG

SEQ ID NO: 57898 - protein, 339 aa, unidentified
MELYSGIDLHSNNNQVGIMDLQLNRVMSRKLANDPKVIVETFAPYKDQLKGIVIESTLNWYWLADLLIEKGYAVHLANPCAIQKYSGLKHSDDKHDAFWLAQMLALKILPEGYIYPKESRPLRDLLRKRSHLVRIRTSLILSLQNIVMRNHGIKIRSNDLKKLTQDPVAELLKHQEELALSGSASKETIDFLTRQIQRIETAVRKKALCKESFSKLLTLPGVGDILGMTILLETGPMERFQAVGHYVSYCRKVPSRWTSNEKVKGKGNTKNGNRYLSWAFSEAADHARQTHGPSRDFYNRKLNQANASVAHNALAHKLARAAYYIMRDHVEFEEAKMFR

SEQ ID NO: 57899 - protein, 324 aa, unidentified
MDKDTEPHRYVGIDVGKDQIEVYIRPDGIAFSCGTDPGDLAALVTRVTPFRSTLKVIVLEATGGYEAVIAGALSAAALPVAIVNPRQTRQFAAALGQLAKTDKIDAPVIAHFAEAVKLEPQPPADAQITELRALLSRRSQLIEMRTAEKQRVAKAVNKLARRSCEKILRQLEAEILLIEKAIGELIDASPVFQGNAALLKTIPGIGDIVARMFIAELPELGQVDRHSIAALVGVAPINRDSGRSRGHRYIKGGRPQIRAVLFMPCLAIVKHNQPLREFYNRLIKAGKPKKLALIAVMRKLVVIANAMIKSGKPWSGASIDAAPV

SEQ ID NO: 57900 - protein, 356 aa, unidentified
MIPAVIERCAGIDVHKKFVMVCVLIGPADSNPTPQIRRFSTFNAELERLRKWLLELQCNRVAMESTGPYWKPVFNVLEEAGIEMVLANPQQVKNLRGHKTDPKDAHWLAHLFRHGMIRPSYIPPKPIRELRDLTRRRKQLVRNGAMERNRVQKLLEEANVKLGSVLSDVFGASGQDMVEALMKGEATAEQIAQLAQRRARKKIPEIQKSIEGHRLNQTHRDLMQQCMTHLAFLEEQIEEIDQQIQNKIRSYGLSEAYELLQTVPGMQAEAAATVLAEVGADVQAFPSAAKLSSWAGVCPGNNESAGNARAAIPPKAILICGRCCWNAPGPVRGRRTRRCSTATAACWDVAERSVRQ

SEQ ID NO: 57901 - protein, 376 aa, unidentified
MREKLRFLGMDVHAETIAVAIAEPDGEVRSLGTIANREDSIRKFIRKLGTPEQLRACYEAGPTGFVLYWQLTQLGVDCAVIAPTLVPKKPGDRVKTDRRDALKLARSHRSGDLTAVWVPDEDSEALRDLVRQREAAKQDQLRARHRLTKFLLRTGQRPPLGLKAWTERYMRWLAQVRYTQPAQEVTRLDGMNEVEHMSARVKRLEEAILEVVKLAPQPMQDVIRGLQALRGVAHISAVTIASELGNISSRFQSARKLMGYCGVFPSEDSSGNRVRRGGITKAGNAHLRRIVVESAWCYRHLPRVGEKLRKRHEGVPPAIIEIAWKAQNRLHKRYMKLSMAGKDQRKIMTAVARELLGFIWAIAIKAEASCRQPIAA

SEQ ID NO: 57902 - protein, 343 aa, unidentified
MQTVTTIGLDIAKSVFQAHGVDAAGQGVIRRQLKRRHVLAFFRKLPPCLVGIEACASSHHWSRELQALGHTVRLMPPAYVRPYVKRQKNDATDAEAICEAVARANMRFVPTKTPEQQSGLVLHRTRHLFMRQQTSVINAIRAHLAEFGIVAPVGRRGVEELLNVVADPTDQRVPAIAHACLSALGAQLRKIKEQILEFDRMITAWHRSSEMSRRLDDCPGVGPTLATALVATVADPKIFRSGRNFSAWIGLVPKQHSSGGKDRLGSISKQGDRYLRSLFVIGALAVIRYAKIHGTRHRPWLTALLARRPAKVAAIALANKIARMVWAMMAECERYKEPVALAA

SEQ ID NO: 57903 - protein, 522 aa, unidentified
MAKSKSNKRRQHIQKVKGRRFTDEIRNLNLEKVLIVPIDAGKNSHKALVANYFGDILYDTFEFANSITGVKMCDSIIQDVSSSINAQKIVIGIESTGHYYENLYRNLMTLGYDVAIINPSSVYSQRTGQLNWCKTDDIDLCAIGQVLIDNQATETKLSNGLYYNLKHLARLRRDEINKRARLKIQIKVLCDHIFPGLQKSRVFSNFWGKASVLLLENYPTPTSIIRLGVKRLAQFFKKHNTKLGLTTAQRLINLAKNSLTTDATNLYAHLFNLKFKIQDLKMADEKIRKLNVELAQYLVKTPGILLLSIRKVNVPSAAEFLGEVGPLPQAGNAKKIISRAGLNPSRFQTAEYERTDNPITKHGSNPLRNASLTIAHNLVGDDPHLLNEPANPYFRSFFDHLVNEEGKDKRLAKVACANKLIRIAWAMMAQKMLFSPPTWNQDKIADDPLAKLEKFLIENNAKGIFEDVVHIAKEQLPVNYSAYVKPKENDVNSLISSLTNKQERDPVNFLGPISPDLVEIKG

SEQ ID NO: 57904 - protein, 466 aa, unidentified
MENNYILYVGMDVSKGKADAAILKVNDRRSVKPKFLRKKLSFKFVKSEVASFLETVRSYSDVNCTSICFALEVTGIYSTNVYDYIKANLYENESIKFLNTDFVNQWRIAHNIAKSDPLDAQTISTIIGTDLDVQYVNDNVFENKNGYQDLKALVHRHYQIKKIYSQEINRLIAQCDCLFPELQYVFEPKSAAFIAVLSSYPTTHDIINASRVEVFDVVYEATKHRCSMDKVDKLFELCQDTLVPDDISSYGKSIILDLVENIKNIKGQLKSIERYIKDIASLNPAYKLLLTITGCGPITAATVIAETGNIRRFKNADCFVSYSGTSPRNKRSGTSVETMGKISKKGSRYLRHAIYMIAEFARRHNPVLKHQFERIKNGNKKRHKLANIAIANKIARYIYSIMKNKSSFVILHDHIMRLPEETRDTFFNSISLDFPKNTRKQIYQYSDINGELHRFVYIKTDEMIPA

SEQ ID NO: 57905 - protein, 429 aa, unidentified
MNYTQNKKIMQVKVSTLVVGVDIAKNKHAARAFNFRGIEYDKAIFFENNEAGFKKLLHWVKKVSEKENKDNVIVGMEPTGHYWLPLEEYLRRKTDFLRVVVNPAHVKKSKSLDDNSPTKTDRKDAKVIAKLVIDGRYSIPHMPEKEYADLRAAMTHRERLVKDIVNLSNKIQQLIDKYFPEYQTVFKKWSGKASVAILKELFLPELILEKTAEEIVEIFKKGANRAVGIKRARKLKKAALNSIGIKEGGEFTQYELRNLLEQYELLNNQKELLEEKVEKLFNSMEEAKYMESVKGVGIITVAGFIAEVGNINDYDHPRQIQKLAGLNLKEHSSGKHLGQTRITKRGRPRLRALLYRVMLPILAKNEEFKQLHEYYTTRRKNPLKPKQSMIALACKLIRIFFALGQKHVNYDGQKLMNDIERNLDLQEVA

SEQ ID NO: 57906 - protein, 315 aa, unidentified
MRSTVAQSVGVDISKDALDVAIHPAGESFRITNNPEGHRAVIKRLKGFDIARIVFEATGAYHRLFQQALVEAGLPWVKVNPCQARRFAQATGKLAKTDRCDALMLARMGAALELETRAPASKTVEALRELVNARDALIKDRVAALNRQAIAVSPLIKRQLAQRLRQINGQIEAVDRRLKTLRDADADLCQRFDILTSIPGVGEVTANVLVVETPELGRLEHAQAASLVGLAPVPRDSGQTHGKRSIRGGRSRARQALYMPALNAIRLNPEFKAKYQAMVKAGKPAKVAIVAIMRKLLILANALIRDQRKWTPANP

SEQ ID NO: 57907 - protein, 355 aa, unidentified
MTIISHLYAFVVGVDTHAKNHVYSVLTHTGEHVDTSTFPTTKAGIKRALTWVGRRTRGDLNTLWVIEGIGTYGAILADHVADAGYTVAEAASMNARDRHATGKDDRIDARRIAGTVLPLDESRLRFPRQADGPRQGLRILVKARESMTGEKTRTINALTALLRTHDLGMDARRKLSVVTIQTVAKWRLRNESVALTEARREAIRLAKRVVDLDVEISDYAMRIEALVKDSPGAVLLAEPGIGPISAAVFYLAWSHHGRVRSEAAFAKLAGVCPIPASSGNVVRFRLNRSGDRRLNSALYMVAITRLSHHQRSQEYMAKRLGEGETKKETIRCMKRHVARSVYRILEATKPIGQAA

SEQ ID NO: 57908 - protein, 423 aa, unidentified
MICAAVERCAGIDVGKKWLSVCIMIGPLNGEPRVEKRRYGVTVPELKRLREWLMSEGITHVAMESTGSYWKPVFNVLEESVNVCLANPQEVKNRKGHKTDDKDGWWLAHLLRHAMIHASFIPPRTIRELRDLTRRRARLNGAGTSEKNRVQKVLEDANVKLGNVLSDVFGASGQLMLDGLLEGKATPEELAQFAIGRAKRKIPAIIEALKEHQMSEHHRKMIRYSLEHMKFLEEQIVEIDKEIKTKIHEAGMDREWELVQTIPGVKERSAASILAETGPDMKQFPSQRQLSSWAGVCPGNNRSAGKSRSSHTTGGNPWLRTALSECAWAASRKNGCFLKEKFWRITTKSKGKRNIALVAVSHSILQLVYEVLSNGKPYQDRQAPALTQAQKDRLIRHHTRRLGKLGVRIHSIRPEPEKPPAAK

SEQ ID NO: 57909 - protein, 346 aa, unidentified
MEYIALDVHKKYTWARVENRQGDRLYESRLQHAHGTIKNFVNRWTVGSAVAVETVGNWYWVVDEIEAGGGKPQLVNARLAKLMMGMVNKSDKLDAKGMNRLQRTGTLPTVWIPPSLVRDARELPRTRMVLSRQRTQLKNRVHATLGKYGYTVEGASDAFGKKGRQIVAELMAKLPPHTEQALERVLDQLDHVCENLKLIEEKMMEVFAPCPQATWLKTLPGVGDILAVVIWTEIGTIERFSRAEQLASYCGLVARENSSGGKIRFGAVRRDVNVYLKWAFVEAANSAVLNRERCGYDHIRRLYERIKARRGHGKAKVAVARHLSEASFWMLKKGESYREPMSFTQR

SEQ ID NO: 57910 - protein, 343 aa, unidentified
MDHFAGLDVSVKETSVCIVDDTGKIVREVKVASEPDALLAVLTNPAYRFKRIGLEAGPLSQWLFSVLAEAGLPVICVETRHMRAALKAQINKTDRNDARGIAQMMRVGLYRPVHVKTLRSQKLRMLLTHRKLLQSKAIAIENDLRATLRNFGLKVGVVGTVKFEARIKELVENVPDLAMLVEPLLIVRRTLREQIGILHRRLLAIVRDDDVCRRLMTVPGIGPVVALTYRATVDVPARFKNSKAVGAVFGLTPSKYQSGESDRTGGISRCGDEMMRAMLYEAAHIMLVRSTKWSWLKAWAMQIARRRGLKKAIVALARRLAVIMHRIWVDGTEFHWSRETAAA

SEQ ID NO: 57911 - protein, 404 aa, unidentified
MSVHVAPVTSSTIVVAVDVGKTSAMLSVTDGARKRVLGPVEFSMTRSGLVATVHRVEAVVVASAQVKVGVEAAGHYHRPVLDYGWPTGWEVLELNPAHVAEQRRVVGRRRIKTDAIDLEAITDLLLAGRGQLITEREVLIGELSAWAGQRSRRVATRSATKNQLLAQLDRAFPGLTLALPDVLGTKIGRLITAEFADPARLCALGVSRLIRFAAARDIQLRRALAERLVTAAREALPTRDGVVARRVLAADLGLLADLDTQIETAERELAALLPASPYATLTSVPGWGVVRVSNYAAALGDPDRWPGPRQIYRASGLSPMQYESAGKRRDGTISREGSVALRRALIDLGLGLWLTEPAAKAYAAELKSRGKPGGIIGCALAHRATRIAFAMVRDHTSYDPSRWA

SEQ ID NO: 57912 - protein, 462 aa, unidentified
MPERNDRESGESNRRQLQGLPVIRRNVAGVDLGSERHWVCAPTQDGNGREIASFRATTPELLRLAEWLKARQVESVAMESTGVYWIAPHEVLEAQGLQVLLVDTRQLARVPGRDKKTDPSDCEWIQRLHSCGLLRGSFRPEEAVCMLRTLVRDKANLVAESGDWLRRMQKSLDQMNVRVHRAVSDIDGVTGMAILRAIAAGERDAQKLAQLRDRRCNKTEQQIAEQLTGHWREDHLFSLQQALKMYDAVQERIAAYEQEILRQLEEMEEPGQRGQTAPQLNNANKTQAIKKRGQEAKRQALYRMSAVDITQIDAIGVETVEVVLSEYGPDLSRFPTEKEFVSHVTLAPRVPRSGGKPLKKKKRNSASTRVAAALRMAALSLRHSQTALGAYYRKLAQRLGGDVAVFATARKLATLIYRLLRWGQPYMDEGIEAYEKRYRQQRVKSLTAKAKDLGYELTAVNA

SEQ ID NO: 57913 - protein, 365 aa, unidentified
MSRMTGKTGVVVGGVDTHSQTHHAAVIDDLGREVSDCEFPATAAGYEALAGWLRSFGELTLAGVEGTSSYGAGLARYLCQAGVSVVEVDRPDRRARRAHGKSDPIDAYAAARAALSATCTTVPKTGEGIVEAIRVLRVTRRSAVKARTQTTNQLKSLLVTAPSEVRERLAGLKTLALVQACARLRTSGSASDPLQALKVALRRLARRHQHLTTEIKDADAELHSLVATAAPGTTDLLGVGVEVAGQLLTTVGDNPQRMRSQAAFAHLCGVAPIPASSGKTRRHRLNRGGDRAANNALYTVVPTRLRLDERTHRYVARRTTEGLSQREIIRCLQRHVARELYQALVRQPPSSSSKPPQRLERVGQP

SEQ ID NO: 57914 - protein, 314 aa, unidentified
MDKSIIVGVDVSKGWLDLAAAGGGQVERLDNTSEAITPWLRRVRPALVAFEPTGGYERALQDALREQGIPFVRVHPNEVLAFRKSRGIKAKTDKIDAQLIAAFAAGELVRRGSGGTILGDDELRDLVARRRQLVDALQAEHCRLASARSGAVEDSLVAVISALRTSLDAIQDELLEKIKAKPELDRLFHLLQSLHGVGPVTAMVLIADLPELGQLSGKQIAALVGLAPQTQESGKRKRGSNPTGHGRANVRRCLFNAARSAIRHPSPIRDIYDRLVNTNRRPGKVALVAVMRKMLVILNAIARDNKPWKLAPAP

SEQ ID NO: 57915 - protein, 400 aa, unidentified
MKKTAGLDVHKDTVFCGIYDGQHQQEVKEFTTTSASIHSLGEYLQEQGVIKVALESTGIYWIPVWNILEAMGFDLMLVNPYLIKQMPGRKSDVKDAQWIATLLHKQLLRGSLIPDQNIRELRSYSRRYIHLQRKQTSSLQELERVLEMTGIRITSLVSNISAKSVRHIIEQVIQGNDNPDDLIKYIHGRILKRHGVQKTKEALKGFVLRQHQFLLEQALEEFDLLEKQSKQCLAKMMELCKKHYAKELALLQTIPGISQISALIIIAETGADMKAFENSGKFTGWIGLRPRNDQSAGKFKSTATTKGNKYLRTILVQVAWAASRTKGSYFKEKFDRLCIRKPRKKALIAISRKISVLIYNALSKNEPYNPNFLNLFKKETVQKQIQYHKRQLEKLEKTLA

SEQ ID NO: 57916 - protein, 353 aa, unidentified
MKSDKYIGMDVHQETTVVAVVDCDGKVILETIVATEGSAIVRLLNGLSGPLHVTLEETTQAAWLYEVLRACAGDVIVCDPRRNGLLTEGSKGDKPDARKLAELRRAGLVRAVYHGHDGTRKLKELVRGYETLSIDTERTMVRIKAVFRGRGIRTPGTAVYQAKQREQWLGLLNEEGVRQRTTWLYDQLDHLRALRKEAKRTMLAESQKHRATTLLKTIPQLGPIRSALIVATVDTPHRFRTKRQLWSYSGLGIVTHTSAEYEIQAERVVRRRKAVSTRGLNRNFNRRLKNVFVAAAIGGSHCEPYRKYLEGLTQKGMRAEMARLTLARKIAAVALSIWKKGETFDPKKLNWTT

SEQ ID NO: 57917 - protein, 348 aa, unidentified
MRFYTKTHKHYCGIDLHARKKYVCILDSEATVLVHREINCNPESFLRIVAPFREGLVVGVECMFAWYWLADLCRNEKIEFVLGHALYMKAVHGGKSKSDKIDAHKIALLLRGGMFPLAYVYPPEMRATRDLLRRRNFFVRKRAELMAHIQNTVIQYNLAPLGCDLGVEENRHGVAQLFPDPEVRKIIQIDVAMIDAFDDVLKVLEPDIEKTARQHNQQALKLLRSINGVGKILGLVMLYEIHDINRFPTVQDFSSYCRLVKCAHESAGKKKGTGGSKIGNVHLKWAFSEAAVFFMRHNPPAKTLVENLAKIHGKGKALSILAHKLARAIFYMLKNNVPFDREKFLATA

SEQ ID NO: 57918 - protein, 449 aa, unidentified
MMEPQEVEDEGHEQILGRVAAVDVAKASGMVCTRVPHQLRPGKRRTRVWQVDATTNAILELADHLAREGIEKVTLESTSDYWRIWFYLLEAAGLDVQLVRAQDVKQAPGRPKTDKLDAVWLAKLTERGMLRPSFVPPVEIRQLRDYTRLRTDLTRERTRHYSRLEKLLEDALIKVSAVASKLDTLSVRDMLEALIAGERDPGVLARLARGKMRAKHDRLVEALTGKFDAHHAELARMLLDQIDALTAQIGKLTARIEQLIAAIPAAQGVDTDGTTGPGAGRGENAPVLPAVDRLDEVCGIGRDSAQALIAEVGLNMAQFPTPAHLVSWTKLCPQTIQSGAKHRAGKTGKGNPYLKGVLGEAAAAAAKTDTFLGERYRRLVKRRGKLKALVAIARSILVIVWHLLADPTARYRDLGPDYHASRIDTARKARNHIRQLEALGYRVTLVPAA

SEQ ID NO: 57919 - protein, 412 aa, unidentified
MDIVHERAAGLDISKRDAKVCVRIPGTRAGTYISRVTTWGATTQAILELREFLEHERVTAVVMEATSDYWKPFFYLFEETLPVMLVNAKAARNIPGRKTDVSDAAWLAQLAAYGLLRGSFVPPEPIRELRDLTRARAIAGRDRTREIQRLEKFLESSGIKLSSVVSDLVGISSREMLEALISGERDPEVLAAMARGTLRSRIPALVDALTGRFKPHHAFMARLYLDQIDAHTRTIEALTARIEEAMEPFREAREALATIPGVSLKVAEVIIAETGADMRVFETPARLASWVGVCPSANESAGHIKSAHILPGNKYLKAALGTSALSAIRTKDTYLAARYHRIAARRGPMRAVVAIEHSILTAAWHMLANGECYTDPGADHFTRINPSRAKNNAIKQLNNLGYNVTITPLTAA

SEQ ID NO: 57920 - protein, 341 aa, unidentified
MTKFIRAAIDLGKNYFQVHGLESEGGRSISRKVKRSKLHEVFSQIDLCRVGMEACGSAHYWARQLVAMGHEVVLIPPTYIKPYVKRGKNDAVDAAAICEAMSRPDMRFVPIKSAEQQAILMLHKTRELLIKQRTMAVNALRGHLAEFGIVAAKGIGRVDELLAQAKADAALPPIAAAAVTCIAQHLEGLNASITTVEEELARAHKQNPISRVLDEIPGVGTLVASVVAASVPDPGVFKSGRDFAAWLGLTPRQNSSGGKEKLGAITKQGNRYIRKMLVTGATSVLRVVGKRTGALADWINALRARKPERLVAVALANKLARICWAIMTTGEGFRTDTYVKA

SEQ ID NO: 57921 - protein, 321 aa, unidentified
MSLFHLGIDVAKSKLDCALRLPNGKFRTKVIANSDDGFTQLVDWLASHQATPVHACMEATGIYWETLAQFLSTAGITASVVNPAQIKAYGASRLTRSKTDAIDARLIADFCAERQPTPWQPPSPEEIDLRALVLRLEALQTMRTQERHRLDVARDAVNNDIQQHLDWLDNAIQQLVKTINVHIDKHPDLKQKRELLDSIPGIGERTSAIILAFYADTGRFANSRQAAAFAGLDPRQYESGSSVKGKPRLSKIGHAFLRKALYMPAMVTLYKTVWGQRFKDRQAGAGKPPKLIIGAMMHKLVHVAFGVLKSGKAFDSALHSA

SEQ ID NO: 57922 - protein, 409 aa, unidentified
MNPLYVGIDVSSRNNVVYLMKPDGSKIKNFSVPNSKDGSQKLVKEILSALTSFALTDVIIGLEATSVYGDNLVCFLREDGSLVPYNRKIHVLNPKQVNKFKESYNDLPKNDYVDSFVIADCLRFGRINKEVYLDDYRYKALQNLTRARFFAVQNLTREKQRFMNVLFKKYSSLAQEKVFSNTFSTTALAVYEEFDSADALAYMDLHELTAFLQEKGKSHFSNPEEVAKAIQKAARSSYRLPKTVNDSVNQVLSISISSIKALEAQIKEFDKAIAAQMELIPNTLTSIKGIGPVYSAGIIAEIGDINRFPNQAKLAKYAGLAWRQHQSGDFEAQNTRLIRTGNRFLKYYLGEAAMSLVRCDAEYSRFYHLKYKEVNKYQHKRALALTARKLVRLVYRLLKDNRLYIAPEA

SEQ ID NO: 57923 - protein, 312 aa, unidentified
MATSSYVGVDVSKDRLDVAVLGEERVWQVANAPEGINQFVKWMVELDPELIVVEATGGYQRAVVEALFVAGLAVAVVNPARVRQFARACGLLAKTDKLDAHVLAVFGQKVQPRPYTGKSEAEKQLSALLVRRRQLDEILKAEQNRLRTISSSLKSSVQRMIACLKEEKKILDVQIQQFVAQQEGWQQQTEILKSAPGVGQVTTATLLAELPELGKMDRKKIAALVGVAPMNYDSGKKRGYRKTKGGRGDVRSVLYMSTLVATRYNPLIRAQYQQLLKRGKLKKVALMACMRKFLTILNAMLRDKPPFRCLTA

SEQ ID NO: 57924 - protein, 360 aa, unidentified
MMKYMIKTQTPCLTAFKTIVSVNFETPIAIGIDVAKDSLMICYRYADNHILTKNIGNNDSDIKKLIKELKLLNFSGKIVSESTGRFHMLSAVMLSEKNFLMYVINPLMSKKYNSASIRKVKSDKRDAEILAEIAIKEEKLPDVFTADRKKLMIKKKISLVATMDKQIQAMQATVKEYQETAKTLKIKLTKAEKGILGVVKNLKEEKEKLEKEIENIFNEQSSVDAINIRRQEIFSSIPGVSNYAATLATVFFLEDHCQNPKQWIAYSGLDISVKQSGQWIGKGKLTKRGNGYLRKRLFSAARGTIMHDAKFKEYYNYLREKKHSYVESLLMIARKIIRIMFYLSKNNCMYNPNKIVFTTN

SEQ ID NO: 57925 - protein, 366 aa, unidentified
MNTIYIGVDFHARQQTICYLTTDNGELRLHELKHQNKQEVRAFYSQFEGHVIVGLEASGYSPWFERLLEELGCEVWLGHATEIRRRARWRQKNDRRDAELILDLMLHDEFPRLYLPPLQSREVLRMLRYRQKLVKIRTMEKNSLQALALQSGLAKGSHLFTKAGQQELRAAVMSPAMQWQREQWLQLLEPLNQRLTETQLWLKQQSLADQRIARLRTHPGIGLLTSLCLVHSLEPVTRFRNQRKVVAYAGLEPLERSSAERIRFLGISKAGSRILRYLLVEAAHVAVRKDEELKRFYQRLAERRGRAKAMTAAARKLLIRAYIMLRDEIDYAEFRRRAVAARLARKSQRPEVPEFVIGQPASAEPE

SEQ ID NO: 57926 - protein, 412 aa, unidentified
MKVIVERCAFLDVHRDTVMACARTPDGGGGRREEVVEFATTTSQLLLLADWLVERQVTLVGMEATGVYWKPVHWILEDSVDQVWVINARHMRNVPGRKTDVADSQWGAQLMEHGLVRPSFVPPRLTREQRDLTRYRKSVIEERGRETQRLHKVLEDAGVKLSSVASKVLTKSGREMIDALIAGQRDPAVLAEMAKGRMRSKIPALRDALAGRFNEHHALLCRAMLARVDQADITIDELTAQIVKLQDPHEAAVSLLVGIPGVSYRTAQVILAEIGTDMSRFPTAGHLASWAGMCPGNNESAGKHRSGRTRHGDKWLRIALVEAGQAAGRSKNTYLGAHYHRIRGQRGPGRAAVAVGHSILVIAWHLLSTGEIYTDLGSDYFDKRRNSPAHQRRLVAQLEAMGLRVTLEPQAA

SEQ ID NO: 57927 - protein, 386 aa, unidentified
MVFIPLSDFISAPCSILNLRSNGRSIAENRIRTIFDRFRNTHDGVRSVKRGGRSCHFMSALVCGLDVHKDSIYATILNDEGKVINQTRMSNERVLSYLAHYKVNKVAMESSTAVAPLYRQLESKGFEVVVSHPKKTRYIAEAKIKSDRVDSKTIAELARLDALPLAYVPDTEISRLREKVRRRAFLVRQRAKLKVKIKSILLYEGIKTPFGHGLFTLSGVEWLRSLNFESIDSYLRIMDIFNREIKLLSGQLEGLAEEDEDVKLLITVPGIGYYSALLMKSEIGDISRFPFPERLCSYAGLVPSTHASGGRVKHGGVTKEGSRWLRWVMVQAAQTHVRSFDSNVTRMYHRVAEKKGSKVGLTAAAHKLLLVCYSVLRNKRPYYDQA

SEQ ID NO: 57928 - protein, 363 aa, unidentified
MEKYILKLAVNDHLPAPGQIVYIGIDQGLNKWVYAIRWGGELRQVLAGPSELGHLQALVKRFTGHEVRIVHEACGFGYGISRWAQDYKDQVVRVTVVPPSTIEQRPGRRVKTDRIDARKLVLKLEQGDLKSVWVPSIEQEVARQISRTQQQVAKERRRTQTQVRSLLRAHGYKAPAEAKSWSGYERWLQQLPLPEALQHCVGHLLAVRRQAAHSEQKMLCRLREMSAAEPYAKVVKAWTTLSGVGWLSAMRIRLELGEVRRFARRGSLPHYLGLTPSEYSTGDEINRGPVLRCGPARVRSQLIENAWIAVRRDPAVRARFTRLAGARPTAQQRKIAIVAVAHRRAMQLRALWKEAEAAAQPTT

SEQ ID NO: 57929 - protein, 369 aa, unidentified
MGEYSEAFVAFDVAKIKHAVAVAEGGRTGEVRFLGEIENREGPIERTVKKLAGRYGRLHFCFEAGPTGYGLYRQLQGLGHDCMVVAPALIPKRPGERVKTNRRDAVTLARLHRAGELTGVWVPDAVHEAVRDLVRARQAAADDLRRKRQQLLSFLLRHGRIYSGSGHWTLAHRRWLANQAFEHAAQQIVFQDGIDAIEDAIARLRRLEEQLVTIVPSWSMAPVVEAYQAMRGASFLVAVTFAAEIGDVRRFDNPRQLMSFLGLVPAESSTGDTVRRKGLTLAGNRRARRALVEAAWTYRYPARVSETLRARLEGLPKAVRDIAWKAQVRLCARYRRLSATGKKLPVVVAAIAREMAAFLWAIGREVAPG

SEQ ID NO: 57930 - protein, 345 aa, unidentified
MTKYCGIDLGNKRTSICIVDNRRQVVREVEVKTDTEGLKEALKGYRKLTCLVEAAPLAEWLSKEVEALGHKITVVCPRKAKVALESQGKRKKTDRRDARLLAELCRSGWYEAVHRKSEEARSMRSYMTARKQLVECSTAIASSIRGLLRAHGIKLQERSDDGTFSAKVRAAIKGLPEQVRQAMEVLLQSFELLHIQQRAMYKKLQKELKVDPLAERLMTIPAVGPATAAAFIATIDDPNRFSDGGKVASYIGLVPSIYQSGETEYRGRITKSGDKLLRWLLVEAAHCLLTRSGTPCELKTWGLELEAKKGIGKARVAVARRLSLLMWKLWKDGEVFHAESVKEAA

SEQ ID NO: 57931 - protein, 385 aa, unidentified
MAPIRMPEAVIGLDVGKSSHWACVATRDGEVLLSTPVANREDDLDSLFGRFPDALVVVDQSRNIGALALARARAAGMSAAYLPGLAAHGAARLFAGDAKTDERDAMVIAKTALGIPDALLPVGDPGPTVAAARALAAQRNFLTCENTRSKNRLRSILLESCPAFEALVDLSDGPQLRLMASLGGAWSVADAGPRRAAALTRGAARGKIEALVRSTASSTRPDAAAIAAEDRAVRLPARRISEYSAEIDVITAEISALLEGDDTYRCLLTVPGIGPKTASELAISIDIEDFPSHDRLASYCGLTPRNRQSGTSISSVTASRQGNKRLKNLLIFSCNCLTRTEGRWGDYYARCRERGMPHGKALKALARKRLKVIYAIMRDRVPYAA

SEQ ID NO: 57932 - protein, 460 aa, unidentified
MTVPKEMRKNEAPLPASLPAIRPMVAGIDVGSSQHAVCGPARDDGQPNVRVFGTTTGQLNELADWLVKQGVESVAMESTYVYWIPIYEILESRGIEVLLVNARQLHNVPGRKTDISDCQWLQLLHSCGLLRGSFRPSEAITRLRALQRQLGNLVAERTRCVQWMQKALDQMNVQVHRAVTDLTGQTGMAIVRAIVAGERDPAKLAAHRDRRCGKSAEEIARYLTGNWREEHLFNLASALRLFDALETEITSYDARLLSELEALQPPERREMPVPPHPNPAKEKAIKARGEQQARTALWRFAGVDLTRLDGISAGAAQIVLTEVGPDLVVFPSEGNFVSWVRLCPWTPISGGKPLKNRRNGLGANRIAGVLRMAALSLQRSKTALGAYFRRIARHKGAAVAVFATARKLAQLIYRMLRYGQDYVDIGEKAYEHQFQLRRLAAIKETAKSLGYTLVPSIIAV

SEQ ID NO: 57933 - protein, 345 aa, unidentified
MVMIGIDPHKRTHTAVAIDTAERVLDERLVRATSKQVPELLEWVKRLDGGDRIWAVESAGGLGYLLAQQLLAAGEHVVDIPATLASRVRLLGTGRSDKNDPNDARSVAIAVLRAAELVSVRVEDHASVLRLMSRRHTQLGWSYNKTACRLHALVADLVPGGISKQVVVCQARSLLADHPSIGAVAMERHALALDLVDELERLNTQRKALRKRIAVAVDASGTTLTEIFGVGDVGAAIIIGQVGDVGRFRTADRFAAYNGTAPIEWSSGNPARPIHRLSRRGNRTLNHVIHIAAVTQLRHRHSPGRAYYDAKRTQGLTGRAALRSLKRRISDAIYRRLVADAARRS

SEQ ID NO: 57934 - protein, 354 aa, unidentified
MLKYSIGIDISKSDFHACLSSIDSTQHVKVLRSGKFQNKRAGFESLIKWVKLTCKDPAIPIHFIMEATGVYYENCALYMFTAGNKVSVVLPNRAKKYIAALGVKTKNDKADSKALSRMGAEQALDPWEPMGMFFYELRSLTRFYQSLQESLTVYNNQLEAVQCGMHPNKEIIRRLKKMMDQLDKQVEEIRKCISEHIASDELVARKVKDLAAIRGVGELSVAVVVAETNGFLLFKTASQLVSYAGYDVVENQSGKRVGKTKISKKGNARIRRALHMPSLCVVKYNEDVFKKFYERTVERHGIKMKSYVAVQKKLLTLFYTLWKKNERFNPEYHLNNTTGEKEAEYSSQVSFAKA

SEQ ID NO: 57935 - protein, 418 aa, unidentified
MSSSLAKKLAKIKPGTLYVGVDLALEHNVAMVLDERAKRLGRFRFPNDRDGYDYFHRRLEMLCESHQAAGVLVGMEPTNYYWKLLATDLEQHQVEYRLVNPFTVKKHREGDQLDRSKDDDRDAFTIGDLLRTGKFTETRLLHGQYAELRQYVTLHQRLERDVRRQKNLIRHTAGQLFPELSRVFKDFTGETALTMLSYCAAASVIRDMSMPTFIAGVRAHFQGSRLQIAKLRRAHALAARSVGLEDGVEALQLALRLHIQTLELLKRQRDEARTAMTETFMALPESRYLLSMHGLGVITAAIILAEIGDPAHYSNGRQLVKLAGIQPVPNTSGRKTRSRTPMSHKGRPRLRTALFFAVMRLVQLDQTFALEYQRLQQREKNPLTKMQALGALMNKLLRILWALIRHQSFYQPTSGSAA

SEQ ID NO: 57936 - protein, 353 aa, unidentified
MITIGVDAHKRMHVALALDEAGQELGHWRGLNSAAGWQSLARWAGELGCPRQWAIEGAWNYGRGLAQQLVVVGETVYEVNARWTALGRRSARRPGKTDRLDAHAVALLARRDASTLPRVSPEDDTAILALLTTEREATLGEATRLGNQIHALLMQLNPEYHDRLPSLRSRAGLDTLETYPSPGGSLIQNERAAAVRRLATRLRLTLTQTEELARQIAAYAEAGFSPLTRLCGVNLLTAGMLAGIIGPGRRFSTDAELAAYAGAAPLEASSAGSTRHRLNRGGNRRLNAILYRIALTQAHYSPEARAYLDRRVSEGKSRREAIRALKRFIVRAIWRLWQECETRPVSSPVENVA

SEQ ID NO: 57937 - protein, 389 aa, unidentified
MLPNGDKHSNFSVANSHEGSTQLVKRILSALTSHSLDTVLIGLEATSVYGDNLVYFLREDATLAPFNRKIHVLNPKQVKKFHDAYNDLPKNDYVDSFVIADCLRFGRINKEVYLGDYRYKALQNLTRARFFAVQNLIKEKQRFMNVLFKKYSTMTQEKVFSDTFSTTALAVYDEFDSAEALANMDLHELTDFIIEKGKNRFPDPDAVAKAIQKAARSSYRLPKTVNDSVNQVLSISITSMKALESQIKEFDKAIKAQMELLPNVLISIPGIGPVYSAGIMAEIGDINRFDNQAALAKYAGLAWKQHQSGSFEAEVTRLIPSGNRFLKYYLYEAAFSLVRCDKEYSDFYHLKYKEVNRCQHKRALALTARKFVRLVFRLLKDNRLYVPAK

SEQ ID NO: 57938 - protein, 318 aa, unidentified
MKPKTNQNINVGVDTGKFQLDIYIRPLDIFFTVKNDEAGIKYAVKTIKKHKPERIVIEATGRLEMAFIIACAKAGLPFTIANPIHVKRFAGAIGQRAKTDKLDAQLIAHYSEAIKPALSKLKPDTMQDMSDLVSRRNQLLGMQTMEKNRLQNLPKSLAMTIKPVLTIFKTQIKKIEDKIVKLIESNPEYQAKNMILQSMTGIGKIAAASLISNLPELGHINSKQASALIGVAPMNRESGRFKGKRKIQGGRSQVRTVLYMAMMSAMQSNPVFKGTYQRLCAAGKPKKVAIIACIRKMIVILNSMLRDGVMWDATTVKN

SEQ ID NO: 57939 - protein, 314 aa, unidentified
MYYYIGIDVSKKVLNIFDGQKDLIFDNKENLSSFKKYLRKRHSDFSSLVILFEATGIYSYHLKAFCADYHIKACIINPQVSHNFAKSLGARSKTDIRDARIIWAYHKLLKDKDIRIPKVDPVLITLASYLTSYRLTLKQRLALTNHLEGIKDKALYRLLKKEQERLCKLEQELLVRMDAYIKEYPELYEDYQRLLSISGIGQKTAINLLVLFHTYPATNRKQITALIGLDPVQRQSGTSVHGRSRISKHGNQMMRKCLYMPTLVSIRYNQKIKVFYDRLVSKHKPKKVAVIACMRKLLLIAHAIYKNKTVYVPG

SEQ ID NO: 57940 - protein, 346 aa, unidentified
MAMLADLVELVIGVDTHKQTHTAAVVAAATGAVLAQATVTATPAGYQQLLKLADQHDGRRVWAIESTGGYGAGLTRFLQSHAEQVVELDRPKRAARRHGAKSDPLDATRAAREALGRDQLAQPRAPGRRAALSVRLAARRSAVQAASDAQRQLHALVVAAPAVLRGRLRDLTTPRLVSTCARLRQRSDGDVQTAATVASLRALAAPAPGGRDRRAHPGHHRPRAGLATELLARTGVGPIVAASVLCAWSHPGRCPSDAAFAMLGGAAPIPASSGQTVRVRLNRFGDRQLNQALHVIVLTRLRYDPATRAYAQRRRAQGKTNREIKRCLVRYIARQLYRLLEATPAL

SEQ ID NO: 57941 - protein, 387 aa, unidentified
MIYVGIDVAKGTHVAAAMNTDGVVLLEPFAFQNDHDGFQQLKAKLETLDRNEMLIGLESTAHYAENLIFFLHAQEYRLAVINPVQTAAVRKTGIRKAKTDKIDSLLICKTLALNSFRLYTENDVKTLQLKSLCRFRQKLKKSKARLKIQLVSYVDMIFPELQFFFKSGLHIKTCYELLKSYSSPDDIAALHLTKLSNLLSKASRGRFGKEDARSLKSLAASSVGVKNTYISIQITQTIAQIELIESQLTELEKIIGQAMDELDSVIMTVPGIGKLNGAMILGEIGDIHRFAHPSKLLAYAGLDPVVNQSGKFTAKRTRMSKRGSKALRYALINAAWNVSLNNDTFKRYFDSKIAQGHSHYDALAHTAHKLVRVLFKLLTDNVAFALV

SEQ ID NO: 57942 - protein, 499 aa, unidentified
MEWDWRASEVGARRKTKQKPAMVEPVEIPDAEHELVVDRGAAIDVAKAAGKVCVRLPGKSGRRFSRVWDVPARTGAITELAEQLVELGIEKVTVESTSDYWRIWYYLLEDAGLDVQLVNSRDVKNVPGRPKTDKLDAVWLAKLTEKGLLRPSFVPPAPIRVLRDYTRLREDLIRERTRYWQRLEKLLEDAAIKVSAVASKLDTLSTRDMVEALIGGERDSRRLADLARGRMKTKRSELITALDGRFDDHHAELARLLLGQIDALTAQIGALSARIERLIDAMDESDHPTGDRGRSGGGGPQVTGAPSTGGQATAPARRTTTAIGVDSDTATVVEPQRLTAVERLDEITGVGQCAAQTIIAEIGLDMARFPTPEHLVSWAKLCPRTIQSGPVIRGGKTGKGNPYLKGALGEAAAAAARTDTFLGERYRRLVKRRGRLKALVAVARSILVIVWQLLSDPTARFHDLGPDYHTSRVVTERKIRNHIAHLTAMGFHVTLQPAA

SEQ ID NO: 57943 - protein, 376 aa, unidentified
MKKYSKFIGLDVHKADISVGIANAGRGEAGYYGTIENKAHSYIKVAKKLSKNGEEILFCYEAGPCGYEVYRQLIKAGYDCVVIAPSLIPKKAGDRVKTDRRDAVSLARLLRAGELTPIWVPDEEQEAMRDLTRAREDMKAMERQSRQRLGGFLLRHGKVYPGRSKWTKTYFRWLESLRFETAAQQIVFQEYIDIVKDAQRRVAAMEEEMRKALTVWTLKPVVEGLMALRGVDLIAAMTIIAEIGDITRFESPRQLMAHLGLVPSEHSSGERQKRGGITKTGNGHARRVLVETSWSYRLPARKTAHLRRKAEKASKTVQEIAWKAQKRLCSRYWYLIHKGKLPVESCTAVARELVGFIWAIACEVTGKGAATAAMNS

SEQ ID NO: 57944 - protein, 455 aa, unidentified
MQVTYPRCAGLDVHQKTVVACRICTLADGRTQMQTRTFQTTTNGLLQLRDWLQEQGCTHVAMESTGEYWKPVYNVLEGGFELLLVNARHIKAVPGRKTDVKDAEWIADLLRHGLLRPSFVPPLPQRDLRDLTRQRANLVGERADVINRLQKVLEGANIKLASVVTDVTGVSARAMLSAMLSGQTDPQSLAELAYGRMRQKRAALEQALTGFVREHHRFLLRTHLTHMDFLEEQIEQFNQQIAQQIQQMSSSSGPPPAEPTTDPLPSEGVAKLPEVAASEGDSALAPASYTRALQLLNPVPGLGERVLQAILAEIGTDMRRFPSEAHLSSWAGVSPGNNESAGKRYSGKTTGGNMALRVALTQAAYGAVRTKESSFRAVYERLVRRRGKKRAIIAVARKLLVVIYQVLLHQQPYKELGADYLDARSREAIKKRSIQRLNKLGFTVTLDPIPAVALA

SEQ ID NO: 57945 - protein, 366 aa, unidentified
MKKTSIVRVKGNMIFKGHKLTLGLDLGDHSSCYCVLDEAGKIILEQKVAMTPEAMKQAFAKIPRSLIAMETGTHSPWVSRLLTELGYKVIVAHAQKVQLITKSNRKDDRHDARTLARLARIDPELLGPVRHRSAQAQIHLTVIRARAELVRARTALVNAARGLVKSYGQRLPKCGTQQVNRELAAGLHAELREVLEPLLQEIESLNERIQEYDERMEKIAKESYPHVEQLKQVKGVGTQIALTYVLTLDDPHRFPKSREVGCFLGLCPGRRDSGESQPQMNISKEGDRYLRTMLVQGAHYILGPFGEDSDLRRWGLKLAARGGKSAKKRAVVAVARKLAVLLHRLWVSGEVYEPLRNSQKAMRAVA

SEQ ID NO: 57946 - protein, 337 aa, unidentified
MNNYIGIDVAKVTLQIYIPKNDLDIEITNSERGLKTLYSKLKKQYKKEIDDIVFVYESTGSYSTYLEQFSESNGIKCFKVGAYQSASFSKVVKNRNKTDTVDARMLSKMHIIANDEDIKIPSRDVKAHQIRSYIKYYQSLIKEEIRSKNYLEAATFNLEDKFVLNQVKKKIKNIQTEQVDIISKTMKIINSNEKYKKAYENITSIKGVGEKSGIILLYLFLRYPNASRQHITALCGLDPIQRSSGTSVQHKERISKQGLSLVRAILFMPTMTAILYNREMKLIYDRLVDRGKPKSLAQIAVMRKIILLAHSLYKNDKRYDEKRYLNFTQIKVDENME

SEQ ID NO: 57947 - protein, 402 aa, unidentified
MVSDFMKGRYNLMIYVGIDIAKLNHFASAISSDGEILMEPFKFTNDGDGFSLLESTLASICDDKDNIIIGLESTAHYGDNLVRYLVASFYKVCVLNPIKTSTMRKNNIRKTKTDKVDTYIIAKTLMFQESLRFVTFYDLDLMDLKQLGRFRQKTIKQRTRLKIQLTSYVDQVFPELQYFFKSGLHQKSVYALLKEAPTPKAIASMHMTHLANLLKVNSHGHFTKEQAKELRVLAQKSVGASDSALSIQITHTISQIELLDSQLEQVEAEMADIMKFNDSVIMTIPGIGYINGGMILGEIGDVHRFSNPNKLLAFAGLDPSVYQSGNFQAKRTRMSKRGSRVLRYALINAAHNVVKNNATFKTYYDKKMAEGRSHYNALGHCAGKLVRIIWKMMTDNVEFNLD

SEQ ID NO: 57948 - protein, 368 aa, unidentified
MSTKLKYVGLDVHKDTTVVAIADGGRDGEVRVYGSISSDLHAVEKMMAKLRSDGSTLRVVYEAGPTGYVLYRRLLQLKIECIVVAPSRTPHPKGTRQKTDRRDAIMLARLHRAGELEGIHVPDTADESIRDLTRARADAVHDLTRAKQRLKSFLLRQGYRYTGKANWSAAHQRYLRELVLPLPALKAVLEEYLLAIDQSVQRVSRLEELITTHVPAWSRYPMVEALMCMRGFQLTAAAVLVAELGDLRRFEHPRNLMAFLGLIPREHTTGQSRKLGEITKNGNTHARWILVEAAQHALLPPKVSTQLSLRQQGQPTAYREIAWKAQVRLHKRAWLLLQRGIIKPKVMIALARELSGFIWYLLRQVPQT

SEQ ID NO: 57949 - protein, 424 aa, unidentified
MKMNHLAKIDQEESIYERCAGIDVHKRMIMVCLRIGRKTQVKEFGTLTCELREMAAWLKENDVQMVAMESTGSYWKPLYNVFEQEGIPAMVVNAGHMKSVPGRKTDVKDAEWIAKLLSQGLLKASFIPDREQRELRELTRFRKSQIEERSRTLNRLQKMLEGANIKLSSWVSDINGKSATQLLELITDKEEFSAQEVDNRRHRNMKASSDELFKSLQGIMTPIQRELFTHIMNVVNEQTAQIEKTESLILSYMTQPYQDAADAINAIPGIGQISAQQIIAEIGIDMSRFPDAPHLCNWAGICPGNNESAGKRKSGKTNYANKTLKSTLTQCAQAAKKNKDSFFYAQYQRLVVRRGKNRATLAVAHSLLIAIYHVLRGKSFCDLGADYYNRFNKEKKINSYVKQLSKLGVSVPDDAIRVALEQTA

SEQ ID NO: 57950 - protein, 449 aa, unidentified
MNNGNGVSRGDRNRNARLGRLRELVPVSNAIVGIDLADTKQMVVVCDHDSRVLARRTFKLKAWNLGSALDWAADRAAAQGYAKVTVSCEPTGHRWRILGQLAADRGMPFVCVQPAQTSRARHNEDLTFDKTDEKDAVLIARLTAQLICYVPEPVDETWGRLRHLGARREELLGANVAQIQQVRDLLECVWPAVLTTAAQPFRSHTWTAGMTVVLDRDAGDLNRTRRLGIARFEHQVRREITRRGGQKPCLRIVRKMYTALADTAGVVAHRVGGLERAGWVLADWEADKHRLTQTEDRMVAVLDELQLTGLVTTIPGISAVGAAAILAESGDPRRFTTARALVKHAGLAPRQRQSGTYTGQTKLTGKGRPRLRVAAWRATWGALQTNTVYANRYRHLTTRDTNRLKPTQAQTVIAAAILRQLHAVVTTGHTWNPHIAAGGTNHPDVTLAA

SEQ ID NO: 57951 - protein, 421 aa, unidentified
MRSIGLDVHRDFCEVAILDSCGGRARGRIATRPQDLELFAQSLGPDDRVALEVTGNAWEIARILEPHVARVIVVSPSDTGIRQARAKTDRLDALALARLLAAGSLDAVWMPDEPVRVMRRRLARRAQLVAARTRAKNEIHAVLVRRLKGRPPASDLFGARGRQWLAGLQLPVEERESVDAGLRHIEFLDGELTQVERLIAQQALGWPDVRRLMSVPGVNVIVAATFLAAVGDIRRFPTPGKLVGYLGLDPKVRQSGEGPARHGRISKQGSGPARHALVEACWSTVRQPGPPRAFYQRVKARRGHQIAIVASARKLACLFWYLLTRGEDYAFAQPSLTRKKLRRLELQAGAPRHQGARGIWSTNAAIRPAERELALQAQRAYERTVKDWQQNTGASATAGRASDGSSREHVARQTPRPKSAL

SEQ ID NO: 57952 - protein, 413 aa, unidentified
MQISVGIDIAIDIAKEIHWATAIDADGTVRIDRKLLNTPSDIAALADELTALHAKVRIGLDVIGGIAGLAEAILAQAGFALVHVPGIAVNRARQGTVGGENKSDPRDARTIADQVRTRSDLRPIEPAAELDLEIRLLVSRRGDIVQAQTQRLSRMHDLLVGIFPGLEACLDLKTKGPLHLLTRYVTHSELRAAGKKRLVRHLQAGGGLPNVDALADRALAAAAEQTIVAPAERMTARLIRELATEALVSRARLVELDRELEALLERHHRLLAIRLRSSRWRSHRRDAALILSLPGMGVVLTAELIAEAGNLSRFRSADALASAAGMAPVLRQSGRTRFLRRPNGGNKGLKRVFYQSAFCSLNHDDSRTFYDRKRREGKRHHQAVIALARRRVGVLWAVLHSRTPFQSGFKTAA

SEQ ID NO: 57953 - protein, 320 aa, unidentified
MNVNIDPVYVGVDVAKATLQVHLRGSQIELTNAPAGRAKLCKKLQAIPGAHVICEATGGYEQALVQSLQKAKLTVSVVNPAQVRASAQAKGQRAKTDAIDALMLTDYGQRYRPAPTPPASKIQRQLAALTQWLKQLIDAQAIAKTQAEHHSDRFVRKQHRALIEHYQSQIETTEAKLKLLMDQDQVLKQRVECLDAIEGVGLRTAMVVLTHVPELGQLNRQQVAALAGLAPWTRESGTMKGKRCIGGGRPKVRVALYMSSLSVIRCNPTLREFYQRLVGKGKLPKVALTAVMRKLLVYMNHKLKSLATQAASTGEEKIPT

SEQ ID NO: 57954 - protein, 364 aa, unidentified
MMPWTALRPRRKVACGYERRSTMGQVTTIGLDIAKSVFQVHGVDATGEVILRRRLTRARMVPFFAKLAPCLVGIEACATSHHWGRELRKLGHEVRLMPPSYVKAYVKRQKNDTADAEAICEAVTRPTMRFVEVKSPEQQSIMVVHGTRTMLMRQRIQLSNAIRGHMAEFGVVAPVGREGLLTLTDTLHDEADDRVPAEARLCLQMLAAQLRLVNAQILENDRRIRVSARATDVGRRLMGIPGVGPVLASAFVATVPDPYAFRSGRNLAAWIGLVPRQNSSGGKERLGGITKQGNRYLRQLLFVGAMAVIRYAERHGTRRPWLVRLLARRTTKVAAAALANKTARMVWAIMTSGQSYREPELRTA

SEQ ID NO: 57955 - protein, 411 aa, unidentified
MQVIYERCCGLDVHKRTITACRLRWLGSEWQKEIRQFGTMTKDLLALSDWLVKEGCTQVAMESTGVYWKPVYNILEGQVELLVVNAQHLKAVPGRKTDVRDAEWIAELLAHGLLRGSFVPPPSVRELRELTRYRSSVVRDRARTVNRLQKVLEAANIKLASVVSDIDGVSARLMLEGLVAGQRDTEQLASLAKGRLKEKHGQLVEALSCRLQPHQSFLIAEHLAQIDYLEGAIERLSGQIEEKLRPFEPQIGWLDTIPGINRLTAEVLWAETGGDMGRFASARHLASWAGMCPGNNESAGKRRSGRTRKGSPWLRHCLVEAAHGAAHTKNKYLRSQYHRIAARRGKKKALLAVGHSILVIAYHLLTRKQAYADLGANYFDERDRQAVTKRCVNRLQKLGYEISLEKLQMAA

SEQ ID NO: 57956 - protein, 342 aa, unidentified
MNNVKVLGVDLAKNVFQIHGNDGSGHKIFSKRVKRKNLLRALAKLPPCLVGLEACGGAHYWAREISALGHDARLMSPKYVKPYVTANKNDANDADAIAEAVTRPRTKFVPAKSIEQQELQAIHRIREQQIKQRTALVNQIRGLLAEIGIVIPQGIGHIRKGFYSIIEDGSNNLTCVFRELFLDLYNQFKDIDKRIDIYDKKIETVAKEHDKCRQLLSIRGIGPITATALVAAVGDAHEFSSGRQLAAFLGLVPKQCSSGDKIILRGISKQGNRHLRTLLIHGARAVMRHADKRTDRLSVWIQEKKNRSSFNATSVALANKIARYAWVVLFKDEEFNHAHGQA

SEQ ID NO: 57957 - protein, 328 aa, unidentified
MIQLGIDVGKSKIDLCLRPDGPEGRKKTKILTNGPDVAISVLEWLAKQKVGPSDVQVVMESTGTYHEYLAYGLYERAVRVIIANPARIRAFAQGMGILTKNDTVDADVLARYGAMRQPDVWQPPSPAIRELKALISRRDALVHDVGREQSRLEKLLSTRRSLLVEASVRKILQVLNNELQVVQALIDNHIDKHPELKRDMEYLTSIKGIGSAVGSTMLVVLRGNHFISAEQAASWVGVVPKEKRSGSSVRGRTRLSKNGPPEVRAKLFMAAIVAVKHNPLLKQFYDRLLAAGKAKMSALGGVMRKLVHICYGVVMKQQKYDENYATAA

SEQ ID NO: 57958 - protein, 355 aa, unidentified
MKYYTSTTEFNCGIDLHARQMYVCVMDRQGKKLVHTYIKNNDFNFFLKLIEPYKHDLTVCCECMFGWYWLADACQAAGLKFVLAHALYVHLIHGGKNKNDRIDSEKLTHLLRSNLIPQAFVYPADMRPVRALLRQRIFFVWQRSELLARIHSHQLAHNRTPPKQTRRVRDTWEEQVLAAEEHPLRLLALKNDLAMIRHFDQQIPQIETALLRQTKQIASKEFALLQTVPGIGEILALTILYEMGTIERFPTVKDFLSYCRLVKGTVASAGKIKGLRGAKLGNPYLRWAFGEAAVIAKRDHFRIGPLAQRLEAKMNGNKFKANTVVAIKLARAVYFMLKNKTVFDPDRLVAALAKN

SEQ ID NO: 57959 - protein, 360 aa, unidentified
MDTHKKTIAVSVAEGGRRGEVRYIGEISSEPAAVAKMVAKLAARHEHLSFCYEAGPCGYGLHRQIRQLGHECVVVAPSLVPTRPGDKVKTDRRDATTMAALFRSGELTAVWVPDEAHEAMRDLCRARQMAMQGLRRARQQVLGFLLRQGRMYSAGNHWTGKHRKWLAAQGFDHPARQIAFEEMVQVVDEAEARRDRLARQMEELVPSWSLAPVVTAIQALRGIASIAAITIVAEIGDFHRFANPRQLMAYLGLVPCEHSSGAKTARGNITKAGNTHARRMLVESAWTYRLPARLGEAILKRNQAVTQKVRDIAWKAQLRLCARHRRMTRSGKPANIVNVAIARELAAFVWAIATSAAQPA

SEQ ID NO: 57960 - protein, 339 aa, unidentified
MKKLYGGIDLHGHNSVVVVLDEADQVQYQKRLPNELAKILPQLAPFRTQLQGLVVESTYNWYWLVDGLQEAGYVVHLANPAAMQQYAGLKYTNDDSDARWLAHLLRLGVLPTGYIYPKEDRAIRDLLRKRSQLVRQKTANLLSLQNLLTRNTGQAMRGNQIKQLTPATIGQLVSLPEHALALQVTVAVMQHLTEQITQVERAVHARVKLRPAFQALLTVPGIGQTLALTIMLETGEIHRFPTVGQFASYCRCVGSIKLSNGKRKGQGNTKNGNKYLAWAFVEAAHFAIRYEPQIAQFYQRKRAKTKVVVARKAVAHKLARACYYLMRDTVPFDVTRAFA

SEQ ID NO: 57961 - protein, 424 aa, unidentified
MRAVGLDVHLEFCEVAISEGVEVRSAGRIETKPEQIELFAQSLGAEDRVALEVTGNAWEIARLIEPHVARVVVVSPSDTGIRQARAKTDRLDARTLAKLLASGELDAVWMPDRATWVMRRRLARRGQLVWGRSRAKNQIHAVLMRCLVGRAPFSDLFGVKGRRWLRDLELPEEERETVDSALRQIEFLDQEIAAVERLIAQAALGSAEVRRLMTVPGVNVIVAASFLAAIGAVRRFESPRKLVGYLGLDPRVKQSGTSPAAHGRISKQGSLRARHALVEASWSTVRQPGPMRGFYERIRARRGHQVAVVAAARKLACLFWCLLTREQDYAYAQPSLTRKKLRRLELTAGAPSQRGTKTGLWAANAAMRKAERELARQGEVAYKRTVADWKAQAKKGAGATPGRASRGPSSGQAARQETAPDPAL

SEQ ID NO: 57962 - protein, 314 aa, unidentified
MSENPEIFVGIDISKDTLDMGFQPSGQTVRLPHDAQGITEATRRLGEAALCLVVLEATGGLETPLAATLMAAGVPVAVVNPRQVRDYAKATGQLAKTDRVDALVLAAFARAIRPELRPMKDALTRELDALVTRRRQLVEMRVQESLRLGRASKVQEKSLKRHIAWLDKRIEEIETDLRQRLRASPAWRAKDDLLRSIPGVGDTTSATLLAKLPELGTLDRKGIAALAGLAPLANDSGKQRGRRVIWGGRADVRCVLYMSTVAAIRCNPVLRAFADRLKAAGKPAKVVIVACMRKLLSIMNAMLKSNLPWNPKIA

SEQ ID NO: 57963 - protein, 306 aa, unidentified
MEQVTTIGLDLAKAVFQVHGVDAAGGVMVRRSLRRKQVLAFFAKLPRCLVGMEACATAHYWARELAKLGHDVRLIPPAYAKAYVRRNKNEAADAAAICEAVSRPSMRFVAIKTEAQQASAGIHKVREMLVKQRTMLINILRGLMAEFGIVVVEGPCYVGELVAILADPADARIPAPLHDGLMAIVESLRGLEQRIARVEKQIVGGGRDNATCRHLITIPGYGPILSSAMAAMIVNPAAFTSARHFAASLGLVPRQDGTGGKSLPLRRRGSSSVRSANAAMATCVGCWSMARCRCWAVNAPKTIPGW

SEQ ID NO: 57964 - protein, 356 aa, unidentified
MNKIVHYIGLDVHKDSIAVAIAPQNSTEVRRYGIIGGTLDAMDKLLKRLSQPNIELRLVYEAGPCGFVLCRHLRSKGIHCDLVCPSLIPKKASDRVKTDRRDADQLARLYRAGELSPIHVPDQEDEAIRDLIRARTAAVGDQRQARNRLKGFLLRLGFRYTGKTSWNDAHKRYLSGLLMPRPAQQIVFQECIHAIDDASERVARLTQAAEDALAGWKWEPVVRALMSLRGLQALSAMTVIAEAGDLSRFENPRSLMHFFGLTPSEHTSGDKRVLGGITKCGNAHCRRVLTESAWHYRLKPLVSEAMQKRQEHQNKEVRLIAWKAQQRLHKRFRQLAVRKKSAVVVTAIARELVGFV

SEQ ID NO: 57965 - protein, 426 aa, unidentified
MNCNTQNAKIAAITEKTLVVGIDIGSETHYARAFDWRGYEYSKKPFMFNNDDEGFEAFQIWIEELKEKYGKDKVVPGMEPTGHYWFNLGSFLQKKGMRPVHVNPHHVKKSKELDDNNPSKNDRKDPKVIAGLVNEGRYSYPYIPEGVYADIRNLSNLRLQAQGELTRIKNRIARWFSIYFPNYKDVYGKPDALSGLMILKKAPLPEDIIKLGVDGVNKIWRDAKLRGAGMKRAKTLVAAAEHSVGCKEAQESARYEIQILLSDFDLYAEREAELVKMIDNKLKEIPYVDRLLEIKGVGIKTVVGFVAEVGDIGRFDDPKQIQKLAGLAIVENESGKHKGEHHISYRGRKRLRYVLYEAAVSVVAHNADFKEIYQQYIAREKNPLKKMQSMIAVACKLLRVFYMLATTENHFDGRKMLTDIRRPEVA

SEQ ID NO: 57966 - protein, 417 aa, unidentified
MESPYNLVAGLDIHKKTVVVVVLQNAQPEQDYASSTFGTTQFGLKELAAFLRQHGVTHVAMESTAQYWRPVWMTLEEEFTLTLAQARSTRARRGRKWDKADARRIAKRLLSGDLTVSYVPPPEQRNWRLLSRTQVAMRESLVRLRNQVEVLLEQAQIKLSSVVSDLFGKSGRRMLEALLQGMEDPAELASLGDRRLHASKEQLADALTGQLTEAHRIVLRLLLQQIDQIEQHVIDLDRALAQALAAHQEAVERLCEIPGISVRTAQYLIAETGPGAEPFESPGKLASWVAICPGQQESAGVTVSNRSAKGNWMMRRTLSQTAWAAVASKGSEARRRFLAWRPRLGTQKAIWAVAHYQLRVVWKVLHDRVRYRSPDTEALSHRALMARATRVFNQLRNLGYDVSITPPSKPVYINSKG

SEQ ID NO: 57967 - protein, 347 aa, unidentified
MSITMIGLDTAKSVFQVHAVNEAGKMEIRRKLRRDELVSFFTKQDACTVVMEACSAAHHWARLLTGLGHTVKLIAPETVRPFVKQGKKNDAADVAAICEAASRPDVRFVPAKSLEQQGILALHSARSPLIKQQTMLANAMRGLAAEFGLIVSKDISKLGELVAQVEADEAVPEPARQAIGGLLSHCDALAGSIKALEAGIVVHARHDDTARRLATIPCIGPITASMVAATVADLGMFKSARHFAAWLGLVPRQHSTGGRTRLGRITKTGNREIRRLLVLGATSMIYRAETWNSAAGAWVRKILERRPARLATVALANKMARIAWAVMTRNEVYRPKGGVATVVQAAA

SEQ ID NO: 57968 - protein, 354 aa, unidentified
MNYVGVDIHKRYSVLVAVDERGRELARGRISGNSVHAFAQFFEALQGPGKVVLEACWNWGRIYDVLSEIEQVEEVVLAHPLKTRLIAEAQIKTDGLDALALATLLRGNLIARAHVPSKATRARKELLRQRLYWARLRTRVRNRVHAVLDRQRELEMPQCSDLFGRKGLNALSKLRLAEPDATLLSEELDLLKLIDSQIKAQEGRIVAFNANEQATQYLQSLPGMGKILAAVAAAEIDAIERFDGAAKLCAYAGLVPTTYGSGGKVHQGHLLKSRNQWLQWAFIEAAWVAVGCSSYFGGIYRYHRARGKKANIAITIVARRMCRIAFTLLKERRNFQEQHRTFPGRSAVRLTAAA

SEQ ID NO: 57969 - protein, 353 aa, unidentified
MVYSPNEYDIFIGIDVDQKSFSFTVKNHDTMSNSYKIPASPENLYQHIRNRYNNQRVICAYEVGVTGYYLHDYLTSQNIRCLMVPPQSVPKASNDRTKNNRLDSDRISQHLKNGDMEPIRIPDYDYRELRQLLRSREEYVDLRKVSKQRIKSLLLFAHLHTLLKDTTQYWSYAHIKRIKELPCSPATRKRLDLLLNDLDYSRNQTVIIIKELKSFSDQNASLKCNIHYLRSIPGIGFITAITILASIGDPQRLRNPRELSAFVGLVPSEYSTGERISRGRITHLGSSVLRSLLIEAAWANIAKDARLRQFYDRIRSKHHPQVGARKAIVAVARKLTLIIYRVLKEQREYITNI

SEQ ID NO: 57970 - protein, 366 aa, unidentified
MKKVSTAALKQSRNFSQPQLSIGLDLGDRSSCYCVLDETGRIVMEQKVATTPKALQAALGAMPRSRIARETGMHSPWVSRLLAELGHEGIVAHARNVRLIGESRKKDDRLDAQTLARLARIDPGLVSPVKHRSAQAQADLTVIRARAGLVRARTARVNTARGLAKSYGERLRGCNVRHRNPEKAEGLSPELRSALEPLLAGIESLSERIHECTERIENLAREKYPQAARLQPIKGVGTLIALTYMLTLQDPHRFRKSRDVGGYLGLQPGRRNSGQSEPQMHISKAGDPYLRTLLVQGAQHILGPFGVDCDLRRWGLKLAERGGKSGKKRAIIAVARKLAVLLHRLWVSGEAYEPLHNGRTPMPVAA

SEQ ID NO: 57971 - protein, 348 aa, unidentified
MVYAGLDLHKEFSVITIVDAQGREMLKQKKFPNNGEIVELFQGFDQPVVAMEATRAWYWLYDLLEDSGIEVKLSHPLKTKAIASARIKNDKIDSKVLAHLLRTDLLPLSYVPKRDVRMQRQLLRYHASLVRIQTGIKNRIHTILAKNNITHSFSDLFGKQGKEFLRSLPLPEIYQMALDGYLSVLYELEQQTKAANKRIMGSVRGDEDAKLLMTIPGVGYYSALLIKSEIGDINRFPSAKQLCSYAGLIPSTYSSGNTTFHGHITKQGSRWLRWILAEAVGHCVSRPGHLYQFYRKLATRKGEKIAKVATERKLLEWIYHMLKERRTFQDTEEIADAWGKPVWVTGLR

SEQ ID NO: 57972 - protein, 519 aa, unidentified
MNLIQEQGSVVGCSVAAFSFGAFWYSELPAGETGSVRRHAYYLVTPLVRCSRWGGLSFLMASGHPAADTFGPFLTIMKALPILDPKAAAIDVGSEKLYVSIAGDTPKVFGTFTGDLESLCAWLKLAEVHSVAMEATGVYWMYLYEVLEGAGLEVVVVNGRHVQNVPGRKTDMADCQWLATLHAHGLLRGGFVPTAEIRQLQDYQRLRGDHLIGAASQVQKMQQALERMNIKVHDVISDLVGVSGLKVVRAILRGERRPGELLGLCDVQIQKKKAAAVKESLRGCWKKEQLFTLQQALELWETYQQKIAACDREIEALLQQLAGPQTPGGGVGVGPIQLAPAKKPGKNAPVMERFQELLARVCGGRDATQIPGMSTYLVLQLISEVGTDMLRWPSEKHFVSWLGLAGGRKQSGKRKGSVKAHRNRAGRLICAAARALAQSVDKALGGFYRRLRGRIGGLAANVALARKLALLFYRLLRHGMEYVEKGLKNYEAKVLETETRLLRKLAKKQGFTLLPTAPN

SEQ ID NO: 57973 - protein, 441 aa, unidentified
MSDPELQEHRIVVGIDTHADTHHVAVVTEYGKPLGDQAFPTTAAGYRDVLAFITGFGEVLQVGMEGTGTYGAALTKVLQRMGVLVIEVNRPDRQQRRLKGKTDSLDAYRAAQSVITGRSTAVPKAKDGPVECLRVLRASRVSAVKSRSAAINQIKSLLISAPEGLRSKYQGMTTATMIGVMARSRPSGHLADPTYMTARVLRSLAVRYQHLSTEIEDATVQLHDILQSYAPMLQELTGVGPDVASQLLVTFGDNRERVGNEAQFAALTGVAPIPASSGKTSRHRLSRGGDRQANCALHHIVLVRMNIDPRTKDYVVKRTEEGKSKREIMRCLKRYIAREVYRQITNPTPAPPFGDLRPLRHDLGLTLQDAATYLDEWPSTLSRLERGRTRNDHLLLRYRAWLHNQRTMVGPLPTVRDSSDGLSTATTAGELPKWLPELSRG

SEQ ID NO: 57974 - protein, 371 aa, unidentified
MTSITYIGIDVHSTNYTLCAFSLEGQKVFGRTTINPDIDELLKYLATLQGRLGGADCKLICGYEAGCLGYTLYRQLTYHMFECVILAPTTMPSTPKEIKTDKRDALKIAKCLAYGTYNPVYVPSDEDNAIKEFIRMRDDAQALLKQTKQQINALCLRHGHIYEGNSRWTLKHLAWLRSLKLDNSVLQETLAEYLVTYDQLSDKVERFDRRIEELAQRDAYREKVNRLVCFKGIRTHTALSLIVEVGDFQRFPTAGQFASFLGLVPGEHSSGDSQHRGAITKAGNSHLRRLLVESGNCYNRVQVGRKSAALKQRQEGNPPDVIAYADKANDRLRRKYVRITTRSKANIAKTAVARELACFIWGMMNGKLTQD

SEQ ID NO: 57975 - protein, 355 aa, unidentified
MNSVKYIGLDVHRDTISAAVLDGEGKLLMQSVLATRAAAVLDFLHGIQGTLHVTFEEGTHSAWLYDLLARRVAKLVVCNPRKNALLKSGSKGDAIDARKLAELLRGGLLSPVYHGEHSGVEVQHLARSYTMLTEDTTRVMARLKAVFRSQAVSCAGKKLYGKRHREYYLAQMGTGSLRRRAECLYQELDALQPLRRQAKHELMVECRKHAATKWLQTVPFLGPIRAALLIGRVQTPHRFRGKRQFWAYCGLALETRDSGEYRVVNGQVERSRKPVLISGLNWNHNHELKNLFKGAATTASACQGVFREFYLGLLAKGMRPEMARLTLARKIAAIALKIWKKGEAFDDEYLKPQAA

SEQ ID NO: 57976 - protein, 341 aa, unidentified
MGEVSTIGLDIAKSVFQVHGVDGTGVVVMRKRVSRGVGVLWRLIAVPSRDRSLSLSSYWSRELQALGHTVKLMPPSYVKAYLKRGKNDANDAAAICEAVTRPSMRFVAIKTQEQQTGLMLHRTRQLLVRQRTMLSNAIRGHMAELGIISAKGRNGTADLLQIIANVADDRIPPVARFCLDLLARQYLVLLAEVSSIDKRIHAWHRSCEESRRLEEIPGIGPIVATAMVAEIGDWKAFRSGRSLSAWIGLVPKQHSTGGKERLGSITKQGNRYLRWLLVAGAMAVIRYARQYGTKRPWLTRIMDRRPAKVAAVALANKIARMAWAIMVRGERYTEPKLLLAA

SEQ ID NO: 57977 - protein, 380 aa, unidentified
MTQPAQVPSFIPYEYDLFGGLDVDKKSMAVTFKDHGNLQRSLKLPYSAPHLLSYTRKHFPDKRVAFVYEAGPTGFGLHDELTAANHFCLVVSPAMVPTAPGQRVKTNRLDSKKLAEGLRGGQLQAIHVPAEKYRELRHLVQLRDTHVQQLTASKYRIKSLLLYEGIPFPDAHERWSAPALQQLQELPCNSTVRFKLDRLLDALQFHFHTAAKVQKEVRRFCHQDLELRQCIAYLASVPGIGTITATHALARLGDWRQISNGRQIAGFLGLVSSERSTGDKENRGSITRKGDSRLRNKLIQCAWVAIKQDPELYAFYRRIYQRQPAKVAARKAIVAVARKLTWRMYVVLKEQRPYIKRPLTLDTAGPRGSLDTAQNEQREL

SEQ ID NO: 57978 - protein, 401 aa, unidentified
MRSIGMDVHRSFAQIAVLEGGVCRDDGRIGVKPEDLRAWAATLEPDDEVALEATTNSDAIAMLLRPLVGKVVVSNPRKTRAIAEAKVKTDKVDARILAQLLAADFLPGTWVPDDRTRMLRRLVVRRMHLVKQRTRVKNQVHAILARNLVPTCPHADLFSGVGRRWLEQQDLPADEWRSVDALIRQLDFHGDELAEVDRDIAIEAIDDPVVARLMTVPGIDVTVAIAVVAAVGDFSRFESPDRLVSYLGLNPRVRQSGNGPAVHGRITKAGPAQARGMLVEAAFAASRAPGPLRAFYRRIKDRRGFQVATVAVARKMTVLCWHLITKDEDYAFGRPSLTAHKRRSLELAAGAESRRGPVAGASRDYHIKRLRDEEKALVEHAERAYELSVAHWQPQGPKQTG

SEQ ID NO: 57979 - protein, 424 aa, unidentified
MQPQKSTACGIDIHKDFFVAAIMSRDGSTKIEKFDHTQEGLLLLKSWVLAEDCSTVAMESTGNYWRPLYLTLEGYVELILSNAYVIKRIPGRKTDIIDAQWIAELALNGLLTPSRVFPKDVREIRELTRARERLVDQRTGCKAIVHDVFDAACIKLSSVITDIFGKSGRYLIHGLLQGKTIDELIEGIPSKRVQHKEKLLKNAIKSALSSSQVIVIEQNLRLIDQITEQVTQLDDEIIGRMKNREDDVQIAMSLPGIGMTAAVTILAELGDYHDFKSPDSLASWAGMVPSVYQSANKLRTGSITKHGSKHLRRILTEAAQAAARTKDTRFSAYFRRLKNRIGYQKAIIALARKILCILWHLLINREFYIDTQKTRPRNQSVRPKTVNPKSIERSIEILVKAGYCIQKSDIPMNMRRFQGAADPS

SEQ ID NO: 57980 - protein, 411 aa, unidentified
MSKVFCGIDWAERHHDVALVDEHGELVAKRRIHETVEGWQQLLDMMAAAGDTAEDPIPVAIETPRGLLVAALRASSRPVYAINPMAVSRYRDRHSVSRSKSDHADAMVLANILRTDAHVHRALPADTELARAIAVLARAQQDATWRRTKASNELRSLLREYYPAFLDAFINRKDYLTSSDARAILAVAPTPAAGAKLSKARIAAALRRGGRQRGIDALAAEIQQALRVPHLRQPSMIEDAMGTTALALLATLNTECANVAQLGEACAQAFTQHPDYQIITSFPGLGDLTGARVLAELGDDRARFTDARAVKAYAGSAPVTRASGRSISITHRRVKNDRLAAAGWVWAFVAATNSPHAREHYKRRREVHADRHAAALRHLFNRLIGCLHQCLTTRQLYDETKAFPTRNPTLA

SEQ ID NO: 57981 - protein, 331 aa, unidentified
MVSAQGEVIREGKVILSRLGIERVFSARQPCRIALEVGTHSPWVSRVLAELGYEVLVANARQVGLIARGQKKTDRVDAETLARAARFDPALLKPIRHRGEQAQADLAMLRARKALLESRTRLIISARGMVKAVGGRLPKCSADYFATKVKDHLPQMLKPALEPMLTAIAQLTEQVRGMTRDLKKLAEERYSETALLSQVHGVGLICSLTYVLTLEEPSRFKRSRDVGAYLGLTARQHESGEQKPQLHITKAGDIYLRSVLVQSAQHILGPFGSDSDLRRWGLRLAGTGSKMRKNKAIIAVARKLCVLLHRLWLTGEVYEPLRQERLLTAAA

SEQ ID NO: 57982 - protein, 316 aa, unidentified
MTSSIAPIAGVDISKDTLDAALHPSGQARSFANDRTGHTALLRWLASHDVRQIVFEATGPYHRAMERRLAQIDFAYVKANPRQVRRFAEATGTIAKTDRVDAIVLARFGALLQPSVTPPRSDVVDQLAELVAARRNLVRDRTATTNRAKTLTIDLLKRQATQRLRQITQQLDALDAQARAVIAAEPVLVRRLAVLTSIPGLGEITAIALIADMPELGQMDSKQAASLAGLAPVARQSGTWRGKSFIRGGRAHLRQALYMPALVAARFNPDLKATFSALVSAGKPAKVAITAVMRRLLVLANALLRDDRIWTVRRAA

SEQ ID NO: 57983 - protein, 448 aa, unidentified
MKTLPIINPNAAAIDVGSEQLHVSIAGDEPVVFGTFTKEVYRLRDYFKAQGVTTVAMEATGVYWLYAYTVLEAAGLELVVVNGRHVRNLPGRKTDMADCQWLATLHAHGLLRGGFVPPAAIRRLQDYQRLRADHIVGAASQVQKMQQAMERMNIKFHDVISDLVSVSGLKVIRAILAGQRDPEALLGLCDAQIQKKKRDRVVESLQGTWAAEHLFGLGQALAAWEFYQKLLAECDQQIEAVLIKLAGPPPPQGPVRAAAGGGKKLGKNTPQIDQLHQLLVRLCGGRDVTAIAGIGDNLLLQLLAETGPDLKAWRTEKHFTAWLGLAPASRQSGKRKGSVKRQRNRAGRMFCAGARSLVQSVDKALGGFYRRLAARKGGLVALKATARKLAELYYRVLVYGLDYAEQGLRVYQEKYAQSQQRLLAKLAEKQGFRLVSVHLDALQPKINT

SEQ ID NO: 57984 - protein, 411 aa, unidentified
MPKIVYQTCCGMDVHKSFVVACIASSDVQGVTTYKSHRFSTFTRGLNELLQWLLRNDCRDVCMESTGKYWIPVYNILEKDCHVVLAHPKYLKAIKGKKTDKKDAKWIADIFKHDLIQGSFIPPYDIRQLRDLVRYHFKLTSYTTGEKNRAQNCLTVSNIKLDDVFSDVFGKSASAITQQLIEHPGEEFDVAPFLHRGCKTPVEDIQAAVDGVICPEQSGKLKIIRAHMNSLETAKANLESEILTLAEKFLPQVNLVSTVPGIQTFSAIAILGEIGVDMSVFETAKQLCSWAGLTPSNDQSAGKKKTTRISRAGAYIKPLLVQCALAAIKNNKHPEIKNRYNAIKKRRGHKKAIIAIARMLLVAIFNILKKSVPYNPELYSKADMPPQHREISVDEAIFMIQRQGYIIKSTA

SEQ ID NO: 57985 - protein, 379 aa, unidentified
MSDHSEAFVAFDASKLRNAVAIAQAGRSGEVRFLGEIDNAPAATAKLVRKLAGKYDRLAFCYEAGPTGYGLYRQITGLGQECVVVAASLIPKKAGDRVKTNRRDALGLVKQFRAGELTAVWVPDPRHEAMRDLTRARGAAVEDLRAKRQQVSSFLLRLGLHYAGKKSWTKTHMNWLASQKLEHAEQRIAFEEMLLAMRQAQERIARLEEAIRVAVPDWSLAEVVEALIAMRGIDMVSATAFLAEIGDLSRFRTPRELMAYLGLVPSEHSTGDTVRRGPITKTGNRRARQTLVECAWSYRHPPRVGREKQHKVAAAPPAVREIAWKAQHRLYARYRALTRRGKLKTIAVTALARELSGFIWAINREIATTHAAARPQGIQ

SEQ ID NO: 57986 - protein, 420 aa, unidentified
MSFKIFRKNCCGLDVHKTWIYACIGITDTNGRTDYKQTRFSSFSKGLKELSDWLAKYHCTEVCMESTGKYWIPVFNVLEKAYVSVILSHPKYTKPQKGNKTDRKDAKWICDLFMCDMVKPSFIPPADIRHLRDLVRYRFKLICMITGEKNRAQNCLTVSNLKLDDVFSDVFGKSSRSITEYILEHPGDLFDVTPFVDRRCKTPIEEIQAAVDGAISPEQAVKLRQCLNHIDELEKHLEEIEQEILRLSDKYQAALDLIRTVPGFDKNPMTAIQVLSEIGGDMSVFPSAKHLVSWAGCCPRNDQSNKKIKSTRISRAGSYFKPVLVQVANGLLRSKKHPEITDRYKRIKARRGHKKAILAICRMLLTAIWHILSDLKPYTAEGFRESRPVNESKVLTTSQALNLLKQRGYIIKDDLTPAMN

SEQ ID NO: 57987 - protein, 371 aa, unidentified
MEQSSKTLYVGLDVHKDSIAVAYAPDDRGAEVVSLGAIGPRQCDIDKLIRRLESKGAALVFVYEAGPCGYGLYRYLTGKGFACHVVAPSLIPRTAGDRVKTDRRDAMTLARLMRSGDLRAIYVPGVEDEALRDLSRGRDDALQDLKRSKRRLKSFLLRQDIRYEGRATWNPAHLRGLSEVVCPTPPQQIVFQEYLRAVSEQHERRQRMEHELHEAVQGWRLYPMVQAIQALRGLELTSAVIVMTELGDLTRFDNPRQLMSYLGLTPSEYSSGARRHQGGITKAGNSHARRALVEGAWAYRYPAKVSRHLQLRLETLPAEVQAISWKAQVRLCKRYRQLTARGKHVNQVVVAIAREMAAFAWAIARLVPLAS

SEQ ID NO: 57988 - protein, 368 aa, unidentified
MGKYIMVGCDLHDASMLLKVAVDRQEPEKLYFDNDPEGRRRMIAELKKRKKAAQATQIYFAYEASGLGFTLYDELTEAGIRCFVLAPSRMERSVKQRRNKTDEKDADRILKELRGHLLGGNELPAIWVPDAQTRDDRLVVRARLDVGHKRTGVKTQIRSLLKLHDVPRASRTPGGRTKAYRVWLQDLSDSEKALPWGARVALKTLLAQLAALDQELARLQEAVRQMSEFPRYAEPARALMQLKGVGILMAMVFLTEMGDLSRFPNREAVGAYLGLVPSSDESGEQDDHKGHITGHGSGRVRYMLCQVTWVRKRLEAEVKKRYDRIAARNPKHKKIAVVAMMRQLAVLLWHVGLEAQRRAGVFPARAAA

SEQ ID NO: 57989 - protein, 359 aa, unidentified
MGKRSTEQMDRVVGLDLGDRWASECVLSKDKGEVVRRGRVAMTRKALRRRYPSGERLRIVVEVGAQSPWVSRVLEALGHEVIVANAREVQLIWGSGRKGDTTDAEALARLGRVDPALLRPIEHRSEATQCDLAVLRSRDALVRSRTLLINAARGISKALGHRLPSCSAECFAQRMVEQIPQELSAALAPMLETIARLTEQIRSYERWMGGRIEQVYPEAECLQQVKGVGPVTSLAFVLTLERPERFAKSREVGPFLGLVPRRSQSGRSDPQLRITKRGDAYVRRLLVGSAQYILGPFGPDSDLRRYGLRIAERGGKNAKKRAVVAVARKLAVLLHHLWITGEVYELLYQTDRAAVRAAA

SEQ ID NO: 57990 - protein, 414 aa, unidentified
MALMRWVGRAIGLDVHRDFCVVAICEGGEVGAAGRVPSTPEGLSMLADSLVRSDRVALEVTGSCWEVARILEPHVDRVVVVSPDDTGITRARAKTDRLDARTLARLLWSGELESVWMPDERCRVLRRRLARREQLVRSRSRAKNEIHAVLQRRLQGKPPCSDLFGVKGRRWLAGLELPLEERESVDAGIRHVEFLDTEIAAAERLIAQQALAWPEIRRLMTVPGVNLICAATFIAAVGDPRRFLTSRKLVAYLGLDPRVRQSGEAPARSGRISKRGSASARWALVEAAWSVVLQPGPLHAFYDRTRARRGHGKAIVATARKLAILFWCMLTRGQDYAHQQPSLTAQKLRRLEIAAGAPPRKGKPSGVWVTHQKMRAAEKQLAAQAQASYEQTVRDWKAASPKKNVGASVTAKRA

SEQ ID NO: 57991 - protein, 337 aa, unidentified
MAVATIGLDIAKNVFQVYGADEAGEQLFNRKIARTAILDYFRKLPPCVVAMESCATAHHWGRSIAALGHEVRLIHPTYVKPFVNRDKTDANDAEAIHAASSRKSMRFVPVKSAGHQASTMLFKTRALLVRQRVQAVNALRAHLAEFGIVSRPGAANVPTLVAAVRNRTNTILPPQARAALRIIAKQIDRLSQDIAGLEKALKAHAKADDEMRRLMTIPGVGPMTATAVKAFVPDAKIFKSARHFASWTGLTPRTLSSGERTWSGGITKKGNCELRSLIVAGAMSVVRNTKEDARSWVASSKRRRPFKVAAVALANKIARTIWALLVNGGIYNPELLA

SEQ ID NO: 57992 - protein, 461 aa, unidentified
MARIKREPEEILDQEYEQVFERVCAIDVAKEFGQVCVRIPRSDGRRTSKVFTVDATTGEILKLGEHLMEQRIEMVTMESTSDYWRIFYYLLEACGLRVQLVNARDVKNVPGRPKSDIHDCVWSAKLTERGMLRPSFVPPQQVRVLRDYTRTRIDLTRERTRHWQRLEKLLEDALIKVTTVASKITTVSVRDMVDALIRGERNPEKLADLARGVMRGKRRDLVRALDGRFDEHHAELATILLGQIDSLTTQIDRLTARIEHLVGQLPSPEQPVDPAGGQTTEREAPDPGTTTDTEPASARPPLQRLADIPGINLDAAEVILAEIGLDMSRFPTPQHLVAWARLTPQLRQSGNKRHGGKTSKGNPYLKGVLGTAAASAARTETFLGERYRRIVKRRGKGKALVAVARSILVVVWHLLANPDATYHDLGANYYDTRIDKEKRKRHLVQQLEALGVRVTLTPAAA

SEQ ID NO: 57993 - protein, 429 aa, unidentified
MKIIYPRVCGIDVHKKFIVAVICISESVEPIYLKKRFSTFHNDLIRFRDWLIQNDCQNVCMESTGKYYIPVYNILESHISNIVVANPKWVRAVKGEKDDDKDAKWIADLFKLGIVKSSFIPQKDFRILRELTRYKYKLVNMRSSEKNRYQNALTSGNCKLDMVFTDVFGKSASNIIDLILSDNPYTDEDILSKVHKNCKASPDMILNSINGTDLTPVQKSRIELVNDHIKQLSSNIQKLDKLIDLMIEPYEDYISFLCQIPGVSRNSAITILSEIGVDMNQFTSTRRLTSWAGLTPSSNQSAGKKKSVRISRAGVYLKPCLVEVAHAAVKDTNHPYYANKFNKISKRRGKKRAYIAIARKILVAAYHMLLTGEIWNPADLAEVETPVEQRIKYVKNNLKSDIKQLLDIGLTVEELTLMIQQNANNIATQ

SEQ ID NO: 57994 - protein, 308 aa, unidentified
MHYLYYVGLDVSKETFDASLVAFEDANEMAHRKFANSRKGICSCLHWVEKRHGIRLDDVIFCAEDMGSYISEMAVCASDRTLNFNFSLISPLVIKYSMGIARGKTDRVDARRIAEYAITHYRKIALYLPAEKELCQLRTWLILRAHLAKQRVAKLVLLEKLDYKEKFADVSIQRSMLQEEIAYAETHMKTIEREMKELITADSNICRNYKLLTSIKGVGPITAIVMLCSTLNFTKITDHRKFACYCGLAPFEHSSGTSVRGGCHTSSMANRDIKVQLNRSALIAIRCDPQLKAFTNAKWLKVNINSAS

SEQ ID NO: 57995 - protein, 461 aa, unidentified
MRNNRKSGDRPGSTRPIEGLPIVRGKVAGVDLGSERHWVCAPGLEGSGREVADFGATTPELVRMAEWLKVRKVESVAMESTGVYWIAPHEVLEKDFDVLLVDTRQLARVPGRNKKTDPRDCEWIQRLHSCGLLNGSFRPQEQVCMLRTLVRDKANLVCESADWLRRMQKSLDQMNVRVHRAVSDLNGVTGMAIVRAIAAGERDARKLAQLRDRRCRQSKEEIAEQLSGHWREDHLFSLRQSLQMYDAIEERITAYEQEILKKLATMEVEEHPGGVVPPVKNLEKGKAIKKRGQEPMRQALYRMSGVDVTQIDAIGVETVEVVLSEYGPDLSRFPTEKQFVSHATLAPRVPKSGGKPVKHKKRNSASTRVAAALRMAALSLRHSATALGAYYRRLARRIGGDVAVFATARKLATLIYRLLRWGQPYVDEGVEAFEKRYQQQHIKGLAARAKELGYQLMPTTT

SEQ ID NO: 57996 - protein, 433 aa, unidentified
MPTEFAAFVAIDWADKKHDWALQKAGSSQRETGTIDHTPEAVEVWAAELRLRFGGQPVAVALEQSRGPLVFTLTKYEHLVIFPVLPTTLVNYRKSFRPSGAKDDPSDAGLLLDILTLHQDKLRRLNPDTPETRTLQFLVEERRKLVHEKTRYSNRITAHLKMYFPQALHWFDVGSMMSADFLERWPSLAQLQRAKPATIERFFIDHHSRDRERIAQRLEQIRRAVPATLDAAVLTSCSTAITAWATLLKQVLAAIARYDEKVDELARAHPDYALMNSFPGAGPALAPRLIAAMGSQRERYQTAQEIQCYSGIAPVVARSGQQRWVHWRWACPKFLRQTFHEWALHSLAHSPWAREYYEQQRAKGKRHNTAIRALAFKWIRILLRCWKERKPYDEARYQRALDARRPKKQLEAQAVDLQWQNLAGFLKIGIKEA

SEQ ID NO: 57997 - protein, 335 aa, unidentified
MKFTHFLGADISKGKLDFCLFDGESILISTDCSNDHKPMKIFFQQLIKHQLISKDNLVICAEHTGRYGFHLMHVATELGLNLWLENPATVKWSSGVQRGKNDKIDAERLAVYAYRFIDRVKLYNPDNEVIGELKQLNAERELLVADRAKYTGQLRDQARFTPKHIFKQKRNRLERLINVLSISIQEIERQIEKLISNNLVYKQQFDQITSIQGIGTQLAVCVITTTHGFTKFKDPRAYCCHAGVAPFAYTSGSSIRSGWKVSHRANKRIKSLLHMAALSAVRYNLDMKAFYERKVKEGKSKMSVLNAVRAKLVHRIFAIIRDNRKYEDFYVNSLG

SEQ ID NO: 57998 - protein, 420 aa, unidentified
MRNAGIHADSLLEVRRMYNAVGIDVSKGKSTIAVLQPGGTVIRKPFDVSHTSQNLIELAHYLGSLEGSTKIVMECTGRYHEPMLKALYEAGLFVSVVNPHLIKNFGNNSLRRVKSDPADARRIARYTLDNWAELRQYSGMDNTRTQLKTLNSQFSFFMKQKVAAKANLIALLDNTYPGVNKLFDSPPREDGSEKWVDYAYSFWHVDCVRRIGLKTFTERYRAFCRKHHYIFQPDKPEKLFHASKELVAVFPKEKTYKLLIQQSIQQLNLASGHVERLRQEMNALASTLPEYSTVMGIYGVGKTYGPQLIAEIGDVSRFTHREALTAFAGVDPGVDESGQHKSKSNRASKVGSARLRKTLFQIMTTLLQNAPEDDPVYRFLDKKRAQGKPYYVYMTAGANKFLRIYYGKVKECLRNLEQAE

SEQ ID NO: 57999 - protein, 459 aa, unidentified
MNNHEELIGIFKSVGHEKTIFIGFDIGKYYHVCQICNGYKEPLMSAFKFNSTESGYKEFKLAFDDILKINMPDYMIFGCEPSGTYYLNLMNQLSIDYPNADFRLVNPLATSAQRKMEMEHNKSDPIDVNAILELMLQGLSYPLPIQDQVYDEIKEYVRYYDKLSSQLVGLRNRILLCIDELYPGFRIPNSTYFNSQAGKQFLRVLPDPRLLKDMNLVDVLKYFEEAGEHLSAQMAMRFSIAAKDILIPDKPVIKAKINTLKGVIKQYELTEELKIQTKLEIEQIASQFTFSKEILKLVGLGPLTLGRIIAYLNNPYRFSNGDQVAKYAGLVPRHSSSGVYSGKESLTHMGHPQLRSVTVQLTQHLISSTGYFTAFYNHLVIDKGKDINLAIVATAHKVLRVIYHMMIFNDKFNPPSARNSELSSSKIERVTKQKLKQRNRKGTVIPLTQINSEEYHTRV

SEQ ID NO: 58000 - protein, 346 aa, unidentified
MRMIGCDYHPAWQQICWLETSTGETGERRLEHASGEAEKFYRQLVEPAVIGMESTGNCQWFVDLLTTLGHDVWIGDAAKIRASDVRQQKHDRRDAALLLKLLLEGRFPRIWVASSAEKDLRQLLIHRCKLVRIRVQVKNELQHLAMNQGVTRKGTLWSKAGEKMLRALPLRPWAGRRREDLLQVREMLTGQIAQLDRAVMEAAQQNEQARLLMTQPGVGPITSLAFVLTMGDVSRFPRGKQVASYLGLIPREYSSGGHQRLGSISKQGNRFMRMLLVEAAQSAVRYDPQMRSEYLHRCHRKAKGVAKVAAARKLAIRLYWMLRTGIGYPEVVRAESSPRVPLVSAR

SEQ ID NO: 58001 - protein, 318 aa, unidentified
MAEAVFVGIDVSKAELAVALRPSGESFTVAHTGAGIKQLVARLEKLHPTLVVVEATGGWQRQVVAGLWSARIPVAAVNPGWVRSYARGRGLLAKTDRIDARLLALFAEREQPEPRAPLDAETQALQELATRRDQLVEMRVAEVQRLHRASPALHKELRKHIAYLAGRIKQLEDEIDKSVRRSEAWRRKREVLRSFPGVGKVFSLTVLSKLPELGTLSGKAAAALVGTAPVPADSGRRRGVRVIRGGRYQVRRKLYMCALSAVRWNPVLKRFYEQLLARGKLEKVALVAVMRKIIVMLNAMLKRDTLWSEPCAGLSAKD

SEQ ID NO: 58002 - protein, 345 aa, unidentified
MNITTVGIDLAKNVFQMHGVDAWGKVALRRQLRREQVTRFFVNLPPCLIGMEACASAHHWGRTLERFGHTVRLMAPQFVKPYVKANKNDVADAEAICEAVGRPNMRFVPIKSIEQQAILSVHRVRRGFVKARTAQANQIRGLLGEFGLVIPKGICHVARCVPALLEDASNELPLAFRQLIDRLSGHLKDLDQQVREFERQIIAWHRGSELSRKLEKIPGIGPLAATALVTSIADARSFDNGRQVSAWLGLVPRQNSSGGKSTLLGISKRGDVYLRTLLIHGARSAILAAKRHSGNKNVWLANLLNRRHPNIAAVALANKNVRTVWALLAHGRDFNPDYVPIRAAA

SEQ ID NO: 58003 - protein, 372 aa, unidentified
MGDHSEAFIGIDTSKSRNAIAIADGGRGGEVRYLGEFPATDLAIRKLVAKLAAKYSKLTLCYEAGPTGYGLYRLLKSLGHECIVVAPSLIPKRPGDRVKTNRRDAVSLAKLSRAGELTAVWVPDERHEAMRDLSRVRQATKKDLQGKRQQILSLMLRLGRIYPGKKTWGATHKKWLMTQKLEHREQRMALEELLDGMRQEEERIERLEQAIRDAVPDWSLAEVVTALQAMRGIDLIAAVAVVAEIGDLSRFQNPRELMGHLGLVPSESSTGDKVNRGGITKAGNGRARRILVEAAWAYRHPARVGRDKQAKVAAAPRRVRGIAWKAQTRLCGRFRSLLRKGKKPTVVATAIARELAAFVWAINREVGPSRTA

SEQ ID NO: 58004 - protein, 366 aa, unidentified
MCVGLDTHKARIAVAVAEPGRSGDVRFQGEIANRPEAVRRLIERLADKHGRLRVCHEAGPCGYGLHRQITALGHDCAVVAPSLVPRKPGDRVKTNRRDALTLARLHRAGELTAVWIPDPVHEAMRDLVRARTAAMEAVRRARQQLQGFLLRHGRVFTGRGAWSPAHRRWLAGLRFEHPAQQVVLQEQVDAIDEAERRRDRLGEQIRELVPGWSLAPVVAALQAMRGVALLSAVVLVAEIGDFRRFATPRQLTAWLGLVPSEHSSGAKVERGGITKAGNGRARRVLVEGAWSYRFPARVTGELQARLEGVPEKVRAIAWKAQLRLCARYRRLVAAGKNANLVTAAIAREMAAFAWAIAREAQPAGAA

SEQ ID NO: 58005 - protein, 339 aa, unidentified
MKNKKYFIGLDVHKKKTTHVVKDRIGNIILEGETATLYSELYERLEPYLKSSAIGLESCTSYYTLYQNFLKDNYNIKVANTIQLRQLIAKNDTLDAKRLAEMLRLGTFPCSYIPGEKIQRLRSLLQVRHGLVEEKTRCNNRIQAFLDRNGIVMPSQDAFGKKWREKLLQYIGSGEVSLELRYEYDHFVYLEKKSEHLGQEISGYTMKHWKKEYILLQSITGFGPVLSCYVIANILPISRFSSNRKLRRYAGVVPAFHESGGKKSKGHIPKTSSRKLLRWALIQAANSAGRTNTKLGYYYRKKKKQKDNAGIAHVAVASSMIDIIYKVLTTNKPYNPKIC

SEQ ID NO: 58006 - protein, 385 aa, unidentified
MIHVGADVHIRNSVLNVKDEDGQVLARGRCGNTLLELSGFLAPMERRSKATGEPIRVVMESTGNSRAIQRLLTHYGREAGIDLTAEVLHARKLRVIAESVNKCDRVDADILTELSRSNLKLPTCYMPDDEEFALREHLRARNDLVKIRTMLKNRAHAILHRRGILTPKVDLFGRAGGVFLDQLNLDQAGQITLERFRELIGRLDESINDSTTSVRSLMREPRWAKAAALLQTMPGIGLITSMTILAELGDLTRFRSRAAVANYAGLVPRHRDSDGKRWSGRITCRGSAHLRGVLIEAAWMAEPRVPVYRALFERVERKKNRRTAIVAVARRMLEDAWMLLIKDQAFRYVPVSVGDTHEERTRSSADPEHREPRSRAQEAASSVAG

SEQ ID NO: 58007 - protein, 376 aa, unidentified
MNRIVYIGMDVHKDTYSLCSFDSHENYMFSETTIKSETTAVLAYIKTIENRFKDDDVMVVCGYEAGPTGFSLCRELQKKNISCVVMAPSSLPKSTDDKKRKTDKIDARQLALHLAHNTYKSVNVLTPEMETIKELTRTRATALKAQKRAKQILLSFLLRKGMVYPYGNRSKYWTQKFYAWLKTLEFTNDIERYSFEEYLSEVNHQMSRVSRLDDKIAEIAETPLIKDDVKKLCCFSGISILTAVTLISEVEDFNRFEKATYFASYLGLCPGIHASGLSSQNRGITKAGNKHLRCLLIEAAQSMSHSQLCGKKSLRLLARQKDMNPLIVFYADKATERIKRKRNSMIFRGVNPNKATTAAAREMACFIWGMMTNNIA

SEQ ID NO: 58008 - protein, 429 aa, unidentified
MNYNTQNAKIASITEKTLIVGIDVGSETHYARAFSWRNYEYSKKPFAFSNDEDGFASFKAWMDDIAEKHEMEKVIPGMEPTGHYWLNLGAYLQGQGMRPVHVNPHHVKKSKELDDNNPNKNDRKDPKTIAGLVNEGRFSYPYIPTGIYAEIRNLSNLRIQTQEEITRIKNRIARWFSIYFPEIKDVYRNPDAVSGLMVIKQAPLPCDIKGLGVDGVNKIWRDARLKGAGIKRAKTLVTAAEHSIGNTEAPRSARKEIRNLLNDYEIYKSRMDELMEEIEELLSEIPYIDKLMGICGIGIKTVSCFIAEVGDIERFDNPKQVQKLAGYAIVADSSGKHNGESRISHRGRKRLRYALYEAAISVIGKNKEFKEIHHYYRTREKNPLKKMQSVIAVACKLIRIFYTILTKGIDYDGQKMLRDIVRPGMQSAA

SEQ ID NO: 58009 - protein, 435 aa, unidentified
MTKYYDVAVAGIDVASDFSVVTILSPTGDIYRKNVKFTHDLRGMTKLIKLLHKAEEEFGSSPKLFCECTGIYHLTLLHFLRSHQRDISAINPLISHSNKNSDIRVVKNDNRDSLTIAKIGKFQEPKTAMDHPEDFLHLKFLITEYYKRVDDLSNLKKSFTNLLYVYYPGLQKAFKNTYCKSGLAFIEHYPTPDSLMAANDQDVVQLLNATAKKGLKWAQGKVALLYKTAGEALELGLNHRVFGGKVKRFVRSHRFLNEQIEEIREEVYAYIDEMECGPKFREDLKLLSSFKGLGTMTAITILSAIGSHDRFSNAQQLVAFFGVDPSVNQSGKFKGDRAHMSKRGTSVGRRVLYSFALQCVKKNQDGKPLNATIHDYYNQQLKHKKKKVRLVAVMHKLLKYIFAVLRDRKPYVVRNAKVHKRMFLEHTAKTKNVAA

SEQ ID NO: 58010 - protein, 366 aa, unidentified
MEGRRFIGIDLGKRHYEACVLHAGEKILRWSGSTSAEGREELAKKLEAGDVVGLEAGALSLVVARRLLQVERVRVLVLNAAKLAVIYSSMRKTDKEDALKIARVLQNTTEECLPVVRLPREKEEEARRLSNHQIFLNRQRTQVINQIHALCVENGLSEITKKDLKTESGRAEVLEQMTRIYREMAENHCCVLATIEARLSLVKERVLQALLERNDEAEILMSIPGVGPMAALAYLGFVGTEARFDNPAQVSYYVGMVPKVEMSGTSVHRMGHITKQGSPALRRALVQAAWAAVRSPLGTNFRTVYNRIAERRGKRIAIVAVARHMLELMYTLSVKHELYRFCTQEERLKKLRFYKLGSLGTVGFLT

SEQ ID NO: 58011 - protein, 435 aa, unidentified
MAQSYSTRPVEAVNAADLANGRDGQALAIGVDVSKSDLRLVPRWVDGTFLRPIRVRQPSQIGQGIELLRSLGAGRDMIVALEPTGRYGDVFRQACHRAGITVHRVSAKVSHDYAEVFDGVPSQHDGKDAALIAELAAIGKSRPWPWPAADDWEQRLALAADLGDAYQRQMIAWFNRLEAWLAAHWPEIQKDLWLTTQTLPRILLHYGGPKGLAADPDAAEQLKRWGRNMLPSDRIERILALAQDTVGVDVSEPEALRVRHYAAEAVRAKRVMRRYKAELAELAMRHPVVKRMATAVGAATAGVLWLEGGDPGQYSCGRAYLKALGLNLTERSSGAVQGPQRISKRGSSRARRWLHFAAMRLTMEEPVNRWYAAKIERDGGIKKKGLTAIMRKLGLALHRIAKDGVDFEPQRLFAGRRQRRRSQRSAGQEDHSLEA

SEQ ID NO: 58012 - protein, 384 aa, unidentified
MNYSSILFIALDTHKTFSEVAYCEDRQRAEIKHFGRVNSTKAALSKLARQFTSKYPNHTLHFVYEAGPCGYWIYRLLTSLGHCCYVVAPSLIPKKPGDRVKTDRRDAIKLASCIRNGDLTPIYVPEPEDEAIRDLSRAREACMKDLKAAKYQLKALLLRNHIQCTVKDNWSPKHLRWLTELVLPHPAQQIVLQEYIQTVSERMRRLERLDNELLHHVKRWRYYPVVKAIQAMRGVRLLVAVGVIAELGDLTRFDHPRKLMSYLGLVPSEHTSSDKRKLGAITKSGNHRARRLLVEGAHSYRYAANISTEMQKRQESLGQEIIDIAWQAQLRLCRRYQRLMKRGKHYNVAIAAIAREMIAYIWAIAREVVLSHVVPANRLARVPA

SEQ ID NO: 58013 - protein, 317 aa, unidentified
MNTISPTRHIGVDVGKDQLDFFCHESAEHFTVPNTASGIRQALKRLPLAEIACLVVEATGRYEQALVQAAQGKGVPVFIAQPIAVRRFAGALGILAKTDRLDSRVIAQYAASIRPQARPLPDRNTRKLKDLTVRRKQVIGMLTMEKNRLQVMPAFLGADIRRSIRSLKQQLSKLDEAIQTLSQEVSAWRERRLILESVPGVGTTLSTTLLSDLQELGSLNAKQIAALVGVAPMNRDSGKMRGKRSIRGGRAHVRTVLFMATLSAIQHNPVIRRFYRMLVAKGKVKKVAVVACMRKMIVMLNAMVRDGTSWEETKTMA

SEQ ID NO: 58014 - protein, 360 aa, unidentified
MAQVRTWVGLDVHAAKVVAAIADSQSGELAVRRMGGQTEHVAEFCAALPVPVRVAYEAGPTGFGLARALAARGIGCTVAAPGKIERPAQDRVKTDRRDAERLVRLLMIGGLHPVRVPTPAEEAMRDLVRAREDVRGDLMRARHRVAKLLLRHDLRFEGNNWTQRHLDWLGRVELPEPVAQSVLLDGIGAIEALLVRREGLEAQMASLVEGSPWERQVARLRCLRGIDTLSALGLCAEVGDFERFARPAQLMSYLGLVPSESSSGEKRRQGSITKSGSRHARRLLVEAAWHYRRAPRKGRELRRRQAGQPQAVCAISWKAQQRLHRSWVRLDAERGKRRTLCAVAVARELAGFCWAVSTAD

SEQ ID NO: 58015 - protein, 340 aa, unidentified
MNIVFLGIDLAKNVFQLCGLNQAGKPVYSKRTGRKELLQTVANISACLIGIEASTGAFYWQREFEKLGHNVKVISPQYVKPFVRGQKNDGNDAQAIAVALMQPTMQFVPPKSPEQQDIQALHRARQRIVNHRTATVCQIRGLLLDRGITIDAAVSRVRRAVPLILEDAENGLSVRMRRTIAELYDLFNDLGRRINFFDKEIDAVFRQSEACQRIAKVKGIGPKTATAVVAAIGKGTEFKNGRHFAAWLGLVPRQHSSGDKQVLMNMTKKGDKHLRTLFIHGARAVVRVATNNNDGGLHQWVNQLKERRGFNKTTVAVANKNARIIWSMLRNDTEYQAVGR

SEQ ID NO: 58016 - protein, 381 aa, unidentified
MKKDSIAKLQVTKSQIRRMAAKQRLTVGLDLGDRSSRYCILNEAGGKASEDQLPTTKAGLDSLFGKMAVCRIALEVGTHSPWVSRHLAAMGHEVIVANPRKVRLITQSVKKNDRMDAEQLARLARVDPQLLGPIRHRGAEAQGDLAVIRARGELVDCRTALINTARGLAKPMGERLKSCDADYVKESLAEGLSEATQNAIRPLLKSVEEMTRQIGAYDKKIQEIEKRYPETKVLKQVHGVGTLIALTFILTLEDAERFAHSRDVGPYLGLTRKLRDSGESQPELGISKAGDVLLRRLLVQAAHCILRDGAPDSDLKLWGLTKVQAGAGKKGSKRRKKRATVAVARKLAVLLHRLWVTGEVYDPQYNRKAVEAAKGRGKAAA

SEQ ID NO: 58017 - protein, 461 aa, unidentified
MAKKAKKVKTAKGAELRIVNPDAAGIDIADGIMQVCIPADRSKDNNRAFGAYTSDLHAISAWLRECGIKTVAMESTGVYWIPLFCRLQEDGLDVVLTNARDVKNITERKTDESDAEWLMLLHQYGLLKASFQPHNDAKRMRTLTRHRDTLSREASSMVLRMQKAMQQMNIKLTLVLSDITGKSGIRIIEAILAGERDPKKLAELADIQCKTPKEEIAKALEGNWEEDLMFVLRQNYDTFKHYCTQLGECDAELEKLMENYRAEVAKVEDTSYSPAKKRRDYKKTRHTVGFDVERKAYEMWGVNVFEIPGISHLTALELMSELGHDFTRKFPSSKQFCCWCNISPNTKISGGKRISSHVPHRRNNVGLIFRSIASSLANAKNQLGNFYRRIRSRAGGKAAVIATAHKVAEIFFAMVANQTTYNPERVGIDEKVLLEKRITRYKRELERITGTHIEIGNACVP

SEQ ID NO: 58018 - protein, 341 aa, unidentified
MQITTIGLDIAKNVFQVHGIDAAEKVVVRKQLRRGQVMKFFAALPPCLIGMEACATAHHWARELTKLGHEVRLMPAKDVKAYVKRNKNDAADAEAICEAVRRPTMRFVGAKSAEQQGRLMQHRTRDLLMRQRTQVINALRGHLAELGIVAAQGREGLKQLLTIIADEKDARLPIDARASLIVLAAQLQALHTMIGSIEKRLTVQHRANESSKRLESVPGIGIIGASAIAATVTDPNAFRSGRDFAAWIGLVPRQDSTGGKQKLGPISKQGDRYLRRILVVGAHSVLRRARQAPEKYPWLTQLLARRPFKVVAIALANKMARVAWALLARGGTYRVPALAAA

SEQ ID NO: 58019 - protein, 392 aa, unidentified
MYIVGIDIGKNHHEASIVSPEGKQIGRSLRFATTHKGADSLMRFIFKNIGNSPCVFGMEATGHYWYPIYSFLKAKGYTIYVINPIQSDSLRKMYIRQTKNDSIDSFLIAEVIRFGQFGTTSMADENILAMRQLCRYRDSVISSRTEIKLRIGTIMEQIFPEYEKQFSSLWVSTSMGILEKYLTPENIENAPIDELFEIIKDKSHNRLTRAKAISIKEAAADTFGIKIAQDAFSFQLKQLIDRMNFLDKQIEALDCQILEYYEKFDCYLHTIPGIGIIGAATILAEIGDISRFKNSSALVAFAGIDPTVRQSGEFNSTHNHMSKRGSPYLRHAIFLAATTCSFHNSPLNAYYKKKRDQGKHHLTATGAVARKLTTIIYAVLRDSKPYEPKKFC

SEQ ID NO: 58020 - protein, 351 aa, unidentified
MSQTPRTSIAAVGIDIGKNSFHIVGQDDRGAIVLRQKWSRSQVEARFANMPPCLIGMEACVGAHHLSRKLKVLGHDARLMPAKYVRPYSKGQKNDFRDAEAIAEAVQRPTMKFVATKTADQLDLQALHRVRERLVSQRTGTINQIRAFLLERGIAVRQGQRSLRAELPRILATPPDVLSPGMVRVIEGLAADWRWLDERIEGLSREIEELAKRDAGCERLMSIPGIGPIISSAMVAAIGTGDGFAKGRDFAAWLGLVPRQISTGDRTILGKISRRGNRYLRVLFVQAAWVVLVKVKPTRWEGHGLKHWIEAASKRLHHNVLAVALANKLARIAWSVLSRGRAFEASKLQAA

SEQ ID NO: 58021 - protein, 309 aa, unidentified
MIRENASNAPEGFAGFISALEGQQITPKNSGIVMEATGVYSEQLCYFLHAKGFKVAVEPPNEVKKAFKSKRKNDTVDSQQIAEYGYRFLDKLHCWEPKADLLEQIRTLLTTREQFTKQRTANLNTLRALKRKVVQTPLATQMVQKNIERLGADIKAIDKAIKDLMDQDPTLKEKGHLGDKVPGVGLLLTANLMVITSGFSDHVNPKSLAAYLGICPYEHESGTSVKRRPTSDRHGPGRLRKLLYLASLSVRAHHEQFKKDFYRKVAEGKSERLVLNNIANRLLRIICATVKSGIPFNENYRSVSPALLK

SEQ ID NO: 58022 - protein, 421 aa, unidentified
MSNVTEFGKKANNQVHELMENVSWVVGIDIGKEKLSCALMDIKKALICRFDVEGSLAGYNELLNRVKKETKGSGKIIFALEPTGHYWMVLGQFFEDHNQSYVLIHPLVAARSREVHRLNKGKTDSLDARLIGELACDRSITRTQIPEDYWATIRFFAREYMDREKEIAREKNRIVSYLETTLPGFVEIFPKPLCMSGRACLRFLANFREASKGDMEHFEMQIRKHFPGKRLMTSRVRRLYDMLQRGDVLGLRAGRQAMFFRIIHSLNRLEMYEGQEEAAKQAMLDMYKKSEYKEYLDSIWGTAPSVNALILGFMGDPALYDSPASLVKLAGCDPVPNESGKFKGRASISHRGRSLLRKAGDRVSFLLEKRNSVFRAFFNHLMSRQKNKFTKRQARVACINKYFRIVWVLCHYRVPFNPALA

SEQ ID NO: 58023 - protein, 430 aa, unidentified
MQKNYNMQNEKIKRIREKTLVIGVDIAKDNHYARVLNWRKIEVAKGINFGNTKEGFEKFLKWLSKVKKQEDSPDVLVAMEPTGTYYFVFEEYLERIGIEVVIVNGRDVRRTSEVMGNDSSKNDPRDALIISRLAIDGRYSESMRPKTGNYAGLRELVSLRELLEEDQIRNINRLHTLFSQIFPEYRKFKKRGISSGILSLYKELGSLNKIVQAGEEGIYSVWRQTGTTNYGRGKAHLVYEQARKSIGIRQRSQATEHKIKTLIRIYEMTQKELEDTEEKIRQQLEQMPQSKLLMEIKGIGTIITAGILSEIGDIKNYKSYKQIQKLAGYAIVSKSSGKYHGKEKSSKMGRKLLKSILFRAAIVLISTNQAFRSIYDYFTKNRNNPLIKMKAVIAIACKLIRVIYTILKTGTKYDEKKMLKDIHRPKYLTA

SEQ ID NO: 58024 - protein, 350 aa, unidentified
MLIIGCDYHPSFQQIAFMDTGTGEYGERRLEHMEGAGQFYRDLRARGVEARIGMEASGYTQWFEQLLAELSFELWIGDAAAISRKRVRKQKTDKQDAELLLQLLIEDRFPRIWVPSREERDLRQLLWHRHRLVQMQTRLRNQLHAVALNEGVRLKKRLWRRKGRAQLESLALMPWANRRRHDLLELLDQVDATIAELSASIEQEAEKRPQVVRLMTHPGVGALTALAFVLILGTPERFARSKQVSSYLGLVPTEESSGERRHLGHISKQGSTLLRFLLVAAAQITVRSDPDWRRYYLHLAMRRERAIAKVAMARKLAVRLYWMWRNGWEYAQLPKLGSHAGQPGNRLGRQ

SEQ ID NO: 58025 - protein, 340 aa, unidentified
MPLYGGIDLHANNSVVVLLNEQDQVVYQKRLPNDLPTILEVLAPHHAEIKGLVVESTYNWYWLVDGFMEAGYRVHLANPAAMQQYSGLKYSDDHSDARWLAHMLRLGVLPEGYIYPKAARAVRDLLRKRAHWVRQHTANVLSVQNIMVRNTGVRLSVKRIRELPKKELEGLLPEADQVLAITSSLAILDCLSQQIKALEKIVHQRLHHTPSYEQLLTVNGIGTILAQTITLETGDINRFPTVGNYASYCRCVDSNKISNGKRKGQGNVKNGNPYLGWAYMEAAQFALRFNPSAQRFYQRKLAKSNNNTTLARKAVAHKLSRACYYVMRDLVPFEATKAFG

SEQ ID NO: 58026 - protein, 352 aa, unidentified
MQEYIALDVHKHYTFAGREEVGTRRAAYDRLEHTKGIFKRYLAEVEPGTTVALEATGNWYWVVDEIEASGMKPALVHPYKAKVMLGCINKTDKLDVTGMNRLQRTGTLPTVWIPPVETRDQRELPRTRMFLTQLRAKLKNRIQATLTKYALNVTGYSDAFGQEARKVMAKRIEELPPQAKKAIQQLLELLDPLEEQIQDQEKRIQEMVKVTPEMDLLLTLPCIGKILAVVIASEVGDIRRFPKAENYTSYAGTAPRIKASGDKYRIGRLRADVNHYLKWAYIEAANCVCMHQRHYPDRHVTLLYKRIVRRKGHPKAIGAVARHLAEATFYVLTRNQPYRDPALSKRVVTTGT

SEQ ID NO: 58027 - protein, 385 aa, unidentified
MSQLNDLSRSLTSLEQDSTIIAVIEMSQSSWLVAGIVPGIERHPLKKLEPSEEELIRLLMRWRAEATEHGRTITRIAVAFEAGRDGFWLARWLRARDIETYVIHPTSVAVSREHRRAKTDRLDTGLLKRVFIGWLRGEPDHCHMAAIPTLVEEDAKRPNREREGLVRERTRIVNRMKSCLVRFGVRNFKPTLRKAPERLETLQTTEGVPLPPNTLLELRRDMARLRFVIDQIKQVEEARAQRLEQAPQEKSHAMVRLLARVIGVGIETADMLVHEVLARNLRDRRAVARYAGLTGAPDESGSKRREKGLAKAGNARVRRGMIQLAWRFLIFQKDSALAQWYRTRTESAGKKRKTMIVALARKLLIALWRLVTTGEVPAGVILRAA

SEQ ID NO: 58028 - protein, 411 aa, unidentified
MHVIHERCAALDVHKKTVVTTIMITQADGNVQEQTRTFLTMTADLLALDDWLSSYGIEVIAMESTGVFWRPVFNLLEEGRQVILVNAQHMKAVPGRKTDVKDSQWLADLLRHGLLKASFIPPKPVRELRDLMRYRKTIVQERADEVNRLQKVLETANIKLASVATDVLGKSGRSMLDALTGGQEDPEMLAELARGRLRAKLPELRKALDGRVRPHHQVLLTRVLAHIDFLEESLVALQKEMEQYLDPFEEAMELVQSVVGIKETAAASIIAEIGTDMTRFASDKHIASWAGLCPGNKQSGGKRLSGKTTKGNPYLRAILFEVAWAISHTKDNYLSAFYHRMARRRGKQKAITALAHKVLVILYHILRTKKPYTDLGADYFNQQDRERIEYHHIHRLEQLGYTVTLIPKEAA

SEQ ID NO: 58029 - protein, 409 aa, unidentified
MDQLIERCCGLDVHRDTVVACVRGPGPNGRRQHEVRTFGTTAVELLALRDWLEAPAVTDVAMESTGVYWKPVFYVLEEAFTCLLVNAAHIKQVPGRKTDVKDCMWIAQCLEHGLLRGSFVPPAPIRELRDLTRHRKVLIQERTRAANRLHKLLEDAGIKLASVATNILGVSGRAMLEALVHGTTDPAVLADLARGKLRKKLPALRQALAGRFRPHHAFLVSQLLAHVDYLDEAITTMSEEVEGRLAPFAAQLTQLDTIPGINTRTAEVIIAELGVDMSCFPSDRHLASWAGICPGNNESAGKHQSGKTRKGNRWLRMTLIEAAGAAIRTKDSALGARYRRVMRHRGHKKAVVAVAHAMLRAVYHLLAEGTTYREPGADYYDRHHTHRVTRRAIQLLERQGYRVVLEPAA

SEQ ID NO: 58030 - protein, 397 aa, unidentified
MSQLIKYVSGIDIAKDKFDVCLMSVDDALCHKIKGTRHFPNTPAGFKDFLAWSGKHCREPGPMNTVMEASGVYHERLALFLTEKKLTVSIILPTKARRYMQALGLKSKNDTIDAKGIALMGIQLKLDPWTPAQKFYWELRLLTRHYQSTQETRTCYLNQLHALDYSAYASKEVKKQLEKTVALFDKQLEEAKGHIAQKIESHTEAARKVAHITKINGINVLTIATLLAETGGFALFSSAAQLVSYAGYDVVENQSGLKAGKTRISKKGNSHIRRALHMPALTAIRCDEPAFVNLYQRVYDRTKIKMKAYVAVQKKLLTTIYALWKNDTEYQSGYSVKNKIKKVVDSGNEELRPSLPLVSKRNISAGKKKIVPPEGSTTQDKLQYNESPEAFFPLTQT

SEQ ID NO: 58031 - protein, 386 aa, unidentified
MINCIAKNQIIFVGLEDSKRTWKLCVRSGGIVIQETSMPAQYAVLLAYFRNGFPGCKIKVLYEAGFKGFTLHDRLAADGIECVVTPPHTVTQEKDSRMKCDKIDARRLAINLENGDFKTCYVPDKELREDRQASRMLIQVQKDITRQKNRIRKFLDFHGYEEEFPAGAWYDRDYQKLEELSIAEPLQYCLTLFLNTLRHLEETKKKLVCRLKELSKKPRYAPTFQLFESAPGVGWYTAIRLVLEWGTDIAKRFSSEKKIAAFTGLTSSEYSTGETVRRGRITGQGNRAVRAWLVKSAWTAYKKDPALLHKFQDIYSRTSSKKKAIVAVARKLTVRLRTLVVTNTPYQLGRCPLKIALKTKTMKRQPRQVSEGSVQRSASCAIAARH

SEQ ID NO: 58032 - protein, 403 aa, unidentified
MAAVERDVAFDVHKHSLMVAAIAAAQQVVLAPRRMSLERFAQWAPDQLTQRDQVVLEATTNAWTLYDQLAPLVLEVKIAHPLLIKLISSARVKTDTRDTLHLARLLAAGLIPEVWVPPPPVRELRILVAHRQRLVRQRTQVRNRLHSVLHAHQLPPPEGRLGSPQQQAWWDTLDLPPLERLRVRQDLVIQQTVDRLITEVDAELGRLSAQGPWKPVMPFLLPLPGCAVVTSMPLLAAIGDSSRFPSAKKLVGYRGLGASVHDAGQTHRSGPLTKQGRRELRTVLVEAAWSAVLHHPHWHTEFDRLVPALGKGKAIVAIARKLLVVVWHVLTKQLADRHADLPLVTRKLQRWGKHQRLAHQHGLSSSAFARQQLRRLGLDPLLEGLAESAPGGETRPALALSGT

SEQ ID NO: 58033 - protein, 349 aa, unidentified
MEYVHVNKKHYCGIDLHADVMYVCVLDKDGAVRFHHELPTDFERLLKHLKPFLSSVAVCAESTFNWYWLADGCAEHGIPFYLGHALYMKLIHGGKAKNDRIDSKSLADLLRTGFFPPAYPYPVKMRATRDLLRRRHKFSQMRAGFLRHIKILLYQQGHMALPSFHNGGVEQIREGLKPFKVPLDVQQSIEYDFGMMEHIDAAMPKMEWTILKSAKHHDAHALALLRTVKGLGPILSLTILYEINTIKRFPTVQKFSSYARVVKVERSSHGKMCGAKNNKIGNPYLRWAFAQLAISAQRFYPSTKGYTQRLIKKLGMRKAYSLLAHKFAVAVYYMLKNKTAFDVKRFVAA

SEQ ID NO: 58034 - protein, 349 aa, unidentified
MGIIGGLDVHRSQITYDWIDTDSGQRQRGQLAPAHREHLRVWLGQFAGQQAAFAVEGCTGWRYVVEELKRAGVEAHLAEPADTSAARGPKRRAKTDQLDARHLRELLATGRLPESWIPPAQVLEVRTLVRCYKALTDEHTAWLQRLHATLFHHGVPAERNLLAPDRRARLERGSGLSPAARQLVTVALGTLDHLDVELDRLRAELVGFARRQPGCQALDALYGIGPLTAVAIWAELGDVGRFTSSRQAVRHTGLDVTVYSSDGKRTPGHLARQGPPVLRWALFEAAKCAARAASPDHAYYLQVKQRLGGNRAALSVARKLARRCYHTLAALGEQAYAPPSDSPDLGQVA

SEQ ID NO: 58035 - protein, 400 aa, unidentified
MIFIGLDIGRESHRYCIVDEAKKVLDKGILPNASWSFEAWCRHVETVDGEVVVGVETQSGLSSPLDQFLEQQGWQVRQVTPEAVKTYRETVLRIHNKTDETDALTIATVLVERADTQRRVKQPRRPLRHATRWLERLVRMHTRLCNGLRKSTAAYWPEVTQPSSPFYRMDLKYVMLLFEKCPDPAVMAARGAKGMLRFFRDHGSNVPEKTVETIVQLARQNTVCPEEKQILLRETQMLARSLRQLEDDKAEVESLILKLAKGDLQVQQLAAVRGVSVVLAATFLGETQDIDNFRTDSHVASYGGIGLRRIQTGKSKDTQGVQWRANRHLKRCLYVVADCMRANDLRSREHYNKKVAAGKTHQQALRCVARQVVRMFFAMLKRGRVYDPVRAITLRTKEVA

SEQ ID NO: 58036 - protein, 389 aa, unidentified
MAARTVNNLPPARTHNGAVRCVLAIELSKKSWIVAVNTPLSDKISRHTLKPCDGKGLLDLCERIRTRVAGETRKRVEIVSCYEAGYDGFWLHRLLEAHGIRNYVIDPASLQVDRRARRAKTDRVDVERLLRSLLAYLRGEPKVWSVVRVPSLAEEDDRRLHRERGRLINERIQHVNRIKGLLAIHGIYDYQPLRRDRMQQLERLRTADGQTLPPRLKTEILRELQRLELVLGMIQTIEAERDAIASAKMETEHRSAKKIQDLVRITSIGPELATTLVGEVFYRSFDNRKQLASYVGLTPAHFQSGSMSRDQGISKSGNAKARTVMVELAWLWLRYQPTSNLSVWFHERVGKLKGRIRRITIVAVARRLLIALWRYLETGLVPEGAAQKA

SEQ ID NO: 58037 - protein, 355 aa, unidentified
MSQEKYIGMDVHQATVSAAVRDRNGNLLMECILETKADTILEFVQGLHGTLSLAFEEGTLAAWLNDLLKPHVTRLVVCDSRKAALLRDGNQNDRIDARNLAELLRTNQLKPVYHGEHGLRRLKELGRSYLTVSKEMTRTMNRIKSLYRSWAIPCPGTTVYAPRRRRECLAKIAQPGARVRAEHLYEQLDHLQAIRVRARRELLRESHKHAAVKRLRQIPSIGPIRAALLVGLLQTPHRFRSKRQIWAYSGFAVETHDSGEYRYVRGKLQRNRERITVRGLNRNHNPDLKNIFKGAALWASTRPGPLHDFYAARVAQGMRPTMARLTVARKIAAITLTLWKKGANFDPHQLSRQEA

SEQ ID NO: 58038 - protein, 402 aa, unidentified
MNCVGIDVSKGKSMIAVMRPFGEVVVSPFEVRHTANELSELAGLLKSLDGETRVVMESTGNYHAPVAWLLHDAGLYVSVVNAMLVHDYGNNSLRRAKTDKKDAVKLANYGLDHWLTLPRYIPEEDTRLMLKICYRQYQQYSKVQTMLKNNLISLLDTTFPDANRLFTSPPRADGSEKWVDFVATFWHCECVCGRSEKAFTTQYQKWCRKHGYNFSEDKALDIYASACRHFGVIPKTDTAKLLVEQAISQLQTTSSALAALKQEMQSLAASLPEYPVVMGMFGVGPTLGPQLLAEIGDVRRFHSKKALVAFAGIDAPPYQSGQIDVRSRSISKRGSASLRRTLFLVMSVILQCAPIDEPVYQFMDKKRSEGKPYRVYMMASANKFLRIYYASVKAYLDSLEPD

SEQ ID NO: 58039 - protein, 416 aa, unidentified
MLRIVHPICCGLDVHKSFVFACIATTDENGVTTYQSQKFSTFTCELVKLAQWLAVNNCKDVCMESTGKYWYPVWNILEPTCNLVIAHPKYVKAIRGKKTDKKDAKWIADLFKHDLISGSFIPPADIRQLRDLTRYYRKLVGFNTGEKNRAQNCLTISNIKLDDVFSDVFGKSATAITDRLLEHPRENFDVAPFVHGRCKTPIAEIQAAIDGSICTEQAEKLKIIRSHMGNLELCKAELESVILGLAQKYLPQLELILTVPGIRDPFTAASIIAEIGVDMSVFPTVGQLCSWAGLVPQNNESAGKKKTTRITHAGTYIKPLLVQCAVAVSKSEKHPEIRNRYLALRKRRGHKKAVIAIARMMLTAIYSMLKKNEPYNAELYRKADNPPEHRQVSMQEAICILQRQGYLITESQAVAE

SEQ ID NO: 58040 - protein, 343 aa, unidentified
MAEMTTVGLDLAKSWFQVHGADAQGRPVLRKKLARGKVLEFFAGLPACLVGMESCGSAHHWARELIKLGHEVRLIPPQYVRPYVKGNKHDAADAEAICEAVTRPTMRFVPVKTIEQQSLCQLHRIRQLLVKQKTMHVNALRGHLAELGIVRGQGQGKVSELLRLIEDASDDALSAKIRGQLRHLVELLRDLHRRLAEIDRELGELAREHPAARRLATIPGVGPVTATALAAAIGDVGRFRSGRHLAAYLGLVPKQHSSGGKERLGAISRRGDTYLRTLLMHGARTVVKIMKARPSSADDWIGRLLRRRPVNVAVVAQANRTARIAWAVLAKAEDYRRPATAAV

SEQ ID NO: 58041 - protein, 337 aa, unidentified
MSKVTVFVGIDYHQDVVQVCVMNCQGKVLVNQALGNSVEGVAAVVAPHGSVVHAAIEACGGAAAMADALVTQLGWVVDMAHPGYVARIKQSPDKTDFSDARLLADLVRVGYLPRVWLAPFAIRELRHVVRYRQQLVAQVRSNKLRIRGLLRENRAKLDGITPWTKKWILWLRSTEDVSPESRWVIEQLLRQIEQFQDAIVTVEERLSRLTAGDPVVAGLLDQKGVGLITAVTLRAEIGRFDRFRSGKQLSRFCGLSPRNASSGNRQADAGLIKAGNPQLRTVMIELAHRLKRWDQRWAKLAFTMRMRGKKGSVIAAAVANRWVRWLFHQMQSINQTV

SEQ ID NO: 58042 - protein, 344 aa, unidentified
MSEVSMIGLDISKHVFHAHGVDGRGRAVFSKRIRRGRLLDFFAAQPSCTVALEACGGAHHWARQLAQLGHEVRLIPPAYVKPFVKRQKNDAIDAEAICEAAQRPSMRFVAVKSEEQQAAGLVFRTRDLLVRQRTQLINAIRGHLTEYGWVAPKGPSHVAMLADLIDEGEMADSLPGAARAMFRVMLDLLTGLSSKIADLDKEIARRAREDEVSRRLMTVPGIGPISATAIAALAPPAESFAKGRDFAAWLGLTPLQRSTGGKQKLGAISKMGERTLRRLLIIGSSAVVKQASKRGAPRGSWLEQMLARKPRMLVTVALANKMARIVWALLVKQETYRAPVAAGA

SEQ ID NO: 58043 - protein, 337 aa, unidentified
MKVTLIGIDLAKSIFQICGVNQAGKRVFNRQVRRARLMEFLIQHPDATMAMEACSGSNYWGRTLQQLGFQVMLIPPQHVKPFVKGNKNDRNDAFAITEAARRPNLTCVEPRTLAQTDMIQVHRVLDRMTRQRTALINQVRGFLNEYGIVIAQGKERLLAAMPDLLEDAENGLTPSSRALFQQLLEQWRQANEAIKQLEKGLKGTALTDDDAQRLMKMKGVAVKISTATIAHAGNGHGYKSGRHFSANLGLVPKEHSSGGQQKLGGITKRGNQYLRRLLIQGAWSVVRNVDKNDDRMSRWARELVERRGKHKAVVAVANKMARIMWSMLYHQTEYRAN

SEQ ID NO: 58044 - protein, 426 aa, unidentified
MKPNNPPEFTALIGLDWGDKSHAIALEPAGGSTETSTLEHSAETLHQWLDQLEQRFGARQVAIAIETDQGAVVYALLERPWITLYPIHPATSTRHRTMFRPSGAADDLPDALVLLSLLQHHRPRLRPLQLDDETTRTLARLVEARRKAVDRRTLLLNQLVSTLKNYFPQALELVGEDLCTDMALDFLSKWPRLIDVQAAKPATLKSFYHRHNVRRPQLIQKRLDRVRSARLLTRDSAVIEVSVRVVRLLVAELRVLVEHITAFESAIAQDFARHPEKAFFSELPGAGPTLAPRLLAAFGTIREQYPEAASMQRYFGVAPVTEKSGSRAWIHWRWNAPTFTRQTLVEWPGQTIVFCPWAKAYYERQRAKGSAHHAILRALAFKWLRVLWRCWQKRQPYNEEQFLRQLEKRRSPIAARARQLALEMAA

SEQ ID NO: 58045 - protein, 350 aa, unidentified
MLIIGCDLHTRFQVIAYVDLTTGEIVTRRLEHENCEARKFYAGLGEQARVGIEATGCTQWFERLLGELGHELWIGHPGEIRARAVRRQKTDTRDAEHILDLLLSNRFPRIWVPSVEERDVRQMLRHRDKLVQMRTSVKNQLHYLAMSQGVCRQRKLWSECGRQELEGLSLGPWASRRRQELLELLDRLEPRIEELDKAVQEEAQRRPEAVRLMQQKGVGPVTALAFVLTLGPVERFANSRKVVSYLGLNPREDSTGGRQRLGHISKQGNLMLRWLLVEAGQSASQHDPELRRRYQRLKFRRGANVAKVAMARRLAVLLYWKLRQAPKVPLPVRTPDSPVRTLVDEGSSTL

SEQ ID NO: 58046 - protein, 393 aa, unidentified
MRKPKQQYKPLNDLSRSLTPFEPNHSLITVIELSNESWLVAGIIPGVERQPLKKLPADEDQVLKLLERWRTEAEKAGHKINRIAVAFETGRDGFWLARWLRARNIEAHVIHAASVAVSREHRRAKTDRLDTEGLKRAFLGWLRGEREHCKMVAIPTLAEEDAKRPHREREMLVGEQTTIINRIKATMARLGIRNFNPKLKKAPERLEHLRTPEGEPIPPNTLAELIRDLERKRLIHEQIHNIEKARLEQLKLAPKVGPNLMVLLLVRVIGIGIETADMLVQEILSRNLRDRRAVARYAGLTGSPDESGKRRREKGLARSGNARVRRGMVQLAWRFLNFQKDSALAKWFRARTENTPRLRKKMIVALARKLLIALWHLVRDGVVPEGVVLRPAH

SEQ ID NO: 58047 - protein, 449 aa, unidentified
MRKPQVVLDEEHERVYERVAAVDVAKASGVVCVRTPGPPGGPRQNRIFDDVAATMGAITELGRFLVAEKVQMVTMEATSDYWRIWYCVLEMAGLAVQLVSPRQARNTPGRPKTGKLDAIWLARLTEWGLLRPCFVPPGPVRKLRDFTRARADLVRDRTRCWQRLEKLLEGALIKVSSVASKLTTRSAQDMIAALIAGERDPQVLAALARGRMKAKHDALVQALTGMFDDRHGMLARLLLDQIAYLDRAISQVEAGTETAIAEIPQAWGVDAGGATGPRAGTGPDPAQLPAASRLAEIAGLSRELAVAIIAEIGLDMTRFRTAAHLVSWAGLCGTANQSGPRRRKDKKGHGNSYLRGYLCQAANGAARTTTFLGERYHRIARRRGAARALVAVARSILVIIWHLLADPSARYTDLGPSYHATRTDQDKKIRNHLRQLQALGLTVAITQAA

SEQ ID NO: 58048 - protein, 405 aa, unidentified
MAIVFVGHDWAEAHHDVFVEDEQGRRLAGGRLPEGIEGVARFHAMVGEHVDDPTEVIVATETDRGLLVGSLVAAGYKVLAVNPLSVSRYRERHSTSGAKSDPGDARVLAELARTDHHNHRPIAGDSEHVESIKVLARAHQNLIWTRQRQLNQLRSTLREFYPGALETFAELGSSDALAVLAAAPTPTLGRQLSISKIASALRRGGRQRRIDERAKEIQTALRTEQLTAPELVSESMGAVVKALVAIITELSTQIASLEVELTDRFDAHPAAKVIRSLPGLGMILGARVLAEFGDDPNRYADAKSRKNYAGTSPITRASGKSHVVLARYARNKRLADACYLWAFAALSTSPGARAFYDARRASGDTHNRALRALANRLVGILHGCLRHDTPYDEHTAWAHRTQLAA

SEQ ID NO: 58049 - protein, 365 aa, unidentified
MNFIGADLHKKSITLCVMDEKLKILARKTVSCDQPDQIVESFRQFLPFKVVVEATASYLWFVELLEPLAEEIVLANPKKLRVIAESTKKTDRLDAQVLAEFLARDMIPRAYMPTPRQRQHRALVRHRQYLRGRMTSVRCKIHHVLADYNADRKDLFSARCGKSYFKQVALSDADGFVLKQLWSEWEDHQARLLATTRKIKAFIAKAPAREKEARAILKSAPGVGFVTAEVVLSEIGDVSRFGNAKKICAYAGLVPAVRQTGGKRSKDLHIAKQGSGLLRWALVESAWRLVKTSPKWSALFSRLRKRCGSKRAIVAVARKLLCVLYAMLKTSTPYKIIPAATPAEPPEPTRKRLVRVSTAAQAVTP

SEQ ID NO: 58050 - protein, 333 aa, unidentified
MVDTETGEITEKTLSHEGNGLREFYAGLEPPVVVGIEATGAMQWFLELLEELGVECRVGHPAKIRAAETRKQKHDRRDARLLLDLLRMKDRFPEIGMPSTEQRDLRTLLRDRHQWVRMRAGLQHTLQAMALNHALRRGPALWSVAGQNALQGLPLPPYSSQRRTELLRLYVQLQKRIQALDQEVDVQARQRPQARRRLTHPGVGAVTALATEVFLGDPNRFDTGNQVASYIGMIPCEPSSGKRQRLGKLSKEGNSLLRYLWTEATMHAVGKDPERKRFYRRKLIQKGMGKARIAAARKLGIRLWIMMRDQIDYAEFCRRGRLRQEGESPCGDA

SEQ ID NO: 58051 - protein, 437 aa, unidentified
MSQNKNQAKKSVSLQSLPLIHPHAAGIDVGAKEHVVAVPADRDPKPVRSFKAFTPDLHELAEWLKGCGVETVALESTGIYWITLYEILEERGFQVRVVNARHVKNVPGRTKTDVLDCQWIQKLHSFGLLSGSFRPDQQIRTLRSLMRLRDNLVVQSTQSVHHMQKALFEMNVQLSNVISDIVGESGMRILEAILAGEHDPAMLATLCSPRIKASRETVAKSLHGNWREELLFSLRVALDSYRFAQGKIAECDARITEHLTQFEDRAVLETQPSGLKSELHRVCGVDLTKIPGIKEQAAQIIISEVGLDMTRWNTEKQFSSFLGLCPNNSISGGKVLRRSTRKVYNRAADALRLCSQSLTNSKTALGAKYRRLKGRLGAPKAIVAMAHHLARLVYRMLRYGRQYVEKGIAEYEIKFRLQRLKWLKREAKSLDMQLLPA

SEQ ID NO: 58052 - protein, 358 aa, unidentified
MKYIGCDFHPSFQQMAMLDLETGEMIERRLVHESGEAKAFYESLTGPVVVGIEASGNTQWFESLLARCGHELWMGDATAIRQQDSRKQKHDRRDARLILKLMEENRFPKVWVPTVEERDLRQLLMHRHHLVRMRTRVKNQLQHIALNQGLQKKYKLWTKAGMKLLRELELEPWTRLRRDTLLEMLEELEEKIRPLEQAVEREAGARPAARLLATHPGVGPVIALATVLTMGEVERFDDSRSWVSYLGLNPSERSSGEKRRLGAISKQGSPFLRFLLVQGAASAARGDTNFNRMYARLKAKKHHGVAKVAVARKLAVRLYWMARTQRAYPEVVRMQGSQSHPVAEVMAVSLNRPPASRQ

SEQ ID NO: 58053 - protein, 389 aa, unidentified
MRSVKKRGPGPSSSLMTPDHAGNVVGIDPHKRTLSATVADARGGILGSAHFRVSGERHRELEAWARQFGQIARWGVEGAASWGRHTAMFLAGRGHDVRDVCANRTPRSDRARQRGKSDTLDSERIARETLAHPLLPKAFKRAGQEQGPDEQHQLLSLWNNRRRSILTGRQHLVGEAEYLLCELPLELRERLPDTKAVRPRLAALAQRNRRRRYDAPTRLRLQLLDDYRAQIKSLDRQERQVTAQLEALVDQSGSTLGELCGLSTRSVAELLVEVGDPRRFTEGGFARFNGSAPLPASTAEGPGEPIRHRYNPGGNRRINAILYRMAITQLRCEPRAQRIYEGARANGHTKKEARRILKRHLSDVIYRRMIRDLAAADHASLPAQPLLAA

SEQ ID NO: 58054 - protein, 402 aa, unidentified
MNAVGIDVSKGKSMVAIMRPFGEIVSAPFEIKHTASDINSLVELINSVKGESRIVMEHTGHYYEVLAHQLSEANLFVSAINPKLIKDFDNDSLRKVKSDKADAVKIARYALDKWQNLKQYSVMDELRNQLKTMNRQFGFYMKHKTAMKNNLIGILDQTYPGVNTYFDSPARSDGSQKWVDFASTYWHVDCVRKLSLNAFIDHYQNWCKRKKYNFSQSKAEEIYGKAKELVPVLPKDAITKLIIKQAVDQLNSVSTTVESLRTLMNETASKLPEYPVVMAMKGVGTSLGPQLMAEIGDVSRFTHKSAITAFSGVDPGVNESGTYEQKSVPTSKRGSADLRKTLFQVMDVLIKTHPQEDPVYQFLDKKRTQGKPYYVYMTAGANKFLRIYYGRVKEYLSSLPES

SEQ ID NO: 58055 - protein, 427 aa, unidentified
MNYTQNHKISQITASTLIIGIDVAKDKHVARAQDDRGIEFGKRLIFENRFHGFQTLLDWMERQRKQNHKDHVIFGVEPTGHFWLSLAYFLTAKGYDFVLVNPMHVKKSKELDDNSPTKNDTKDAKVIAQLIKDGRYSVPNLLDGIYAELREGAKLRDQLVKQLMITDGRIQNVIQRYFPEFFDVFKDWEGKAALCTLKSFPFPSQIKEMTPEEVLEKWKTQVKRGVGIKKATKLVKAAGKSIGIQVGMKFAKREIDCLLEQYELYNQQIKQLDQELESLVEDLPGARQMMAIPGLGKTTVALFFAEVGDITKYNHPQQLVNLAGLSLKEHSLGKFKGQTTITKRGRKRLRRALYLAIRPLVVHNPAFKALHQYYTKRPKHPLKKQQSLIALCCKLLRVLFAIGNKQCDFDGAKLLQGLPQIETLQVA

SEQ ID NO: 58056 - protein, 341 aa, unidentified
MMKLYCGIDLHSNNSVVVILDEADKVVYQKKLNNDLASILGQLSIYKDKITAIAIESTFNWYWLVDGLMEAGYTVKLVNTAEVQTYSGLKHTDDKDDARWLAHLLRLKILPTGYIYPKEERAVRDLLRKRSQLVRQSTTNILSLQNILARNTAQSLSSYKIKKLDDVQAEKLLDDPNTTLALKCNLNVIRCLQSTIAEIETTVLQQARIRAEFKQLLTVSGIGEILGLTIMLESGDMSRFPKVGNFSSYCRCVKSERLSNGKKKGEGNRKTGNKYLAWAFIEAANFAIRYNDKIKAFYQKKKAKTNGIIATKAVANKLARACYHVLKDQVPFDVNKSFSRW

SEQ ID NO: 58057 - protein, 314 aa, unidentified
MDSMVLYVGIDVAQDQLDIATTADQTWSVKHHPRAMAALARRLQKLSPARIIVESSGKLEQELVVVLAEAKLPVVVVNPRQVRDFAKATGVLAKTDRIDARILARFGEAVKPEVRELPDAQARDLMAHVARRRQLHQMLRAERHRRLRVARPLKKSLERHIAYLEKQLAKLDEDLHDAIRQTPIWQESFDLLQSVPGIGPTTAATMIAELPELGRLSRHEIAALVGVAPFNRDSGKWKGKRSTWGGRSSVRSALYMATLVATQYNAYIRAYYQRLLTRGKAKKTALVACMRKLIVILNSMLKNHQPWNPKIQTA

SEQ ID NO: 58058 - protein, 435 aa, unidentified
MSNILFENLFISVGIDVGADFSWMSIALPNQTFVGKPFKLLHSDLNSLSLAVSKIKEAEELYSLESRIFLESTGIYHYPLFCYLRDKGFNISVINPIITKNSTNINIRKVHNDRFDSRKAALVGLKPDLKVSIMPSDLALNLRNLSREYYDLMDNRSAYINKLQGELRMVFPQYLKIFSKITTNTSLTLLEKYTSPESFLNASKDEIISCIRSTARFGLTYALNKYNAIIQAANDANTFGYSVSSNFKRVRLYIRLIRNYDMEVSSILSDMHELVDANETTDFVKQIHLVESYKGAGFLSAVSLMGEIGDFSAFRSPKQLFAYFGLDPAVKQSGKFEGTKITMSKRGSRIARRVLHTMALISISKNRNGSAKNPVLHDYYLKKCKSKPKMVALGAVMHKVCNIVFAILRDEKEFTIITPEEHQTNYLKAKCDKAA

SEQ ID NO: 58059 - protein, 340 aa, unidentified
MEIAVLGIDLGKNSCSIVGLDDDGAVVLRRRMRREGVIKFAGKLRPCAVAMEACCGAHHLGRVLRAQGHDVRLMSPEYVRPYVKSQKNDDRDAEAIAEAATRPTMRFVELKSEEQLDMQTLHRARDRLVGERTALINQLRAVLLERGITVAQGRRRLERHLAGLDAQGGLSQRMRVLIEDMRLQWRELDRRIAEFDKELAEWARNEEAARRLMSIPGIGVLNATALIAAIGQGGSFARGRDLAAWLGLVPRQVTTGGKPRLVGISKRGNKYLRKLLIHGARAALPTLLASPTLLGAWLRGLMARMHKNAAVVALANKLARMAWAVLRHGETFRFAGSATA

SEQ ID NO: 58060 - protein, 345 aa, unidentified
MEIVRIGLDLAKNVFQVHGIGPNDNVVLRKTLRREAVASFFADLSPCLVGMEACSGCHYWARVLSELGHEVRLISPQFVTPYVKSNKNDRNDAEAICEAVGRPSMRFVPLKSPRQLEIQALHRIRQRLISDRTRLVNQIRGLLAEHGVVIAPDISRLRRALSQIAEEAHADDGLTDMIRELAREIHEELAGLDRRIASCNCRIRAVFRTVEACQRIGQVEGIGPVTATALVAAVGDRSCFKNGRQFAAWLGLVPKQRSSGGKSRLFGISKRGDRYLRTLMIHGARAVLGKAHGKTDPRSQWIGHMRERRHPNIVAVALANKNARIVWSLLAGDENYRPAQAVAAG

SEQ ID NO: 58061 - protein, 405 aa, unidentified
MDVIIERACGLDVHKDNITACIMTTEGKEIQTFSTKTVFLLKLLDWIKENNCTHVAMESTSVYWKPIVNLLESEGIEFLVVNAQHMKALPGRKTDVKDAEWIAKLLRHGLLKASFIPDRNQRELRELVRYRRSIIEERARQHNRIQKVLEGANIKLGSVVSDIMGVSSKDMLRAIADGEDDPEKLANFARRTMKKKKEELELALQGYVNPHQRLMLKTILTHIDFLSEQIEMLDQEIAQRVSSYQEDIERLDSIPGIATRMAEQILAEIGTDVRNQFPTATHLCSWAALVPGHNESAGKRKSSRSKKGNKYLRSALTEAAQSVRGSKNYLGALYRRTAGRKGKKKAAIVVAHAMLRIAYYLLTRKEMYVDLGEDYFDKQRQVSIVRHSVRRLENLGYTVTITEAS

SEQ ID NO: 58062 - protein, 471 aa, unidentified
MGKGSGNGTTRGDRRRNARRERLRALLPRDGAVIGIDLAEDKQALAVIDHDGRVLARKTVKVKAFRLGEALDWAVGQARAKGFAQVTVACEPTGPRWLQVQRLCAERGLPLVCIQPLMSHIAREQQDYTTHKTDESDCVLIARLAVELHCYVPEELDEAWAHLRHLGRRRQQLITMATASGQRILDFLSVAWPTVTETCVDPLKSVTWLAALQVVTARCGADPGRLAAMGTEAFTAAAGGAVAGWGGKKAWGPISRRVFAALTDTEGVVVCSRRGLLRRIADELGDLQRTRAQLRAVEADMVAVLGELGLSKLADIPALSAVGAAAILAETGDPRRYDSSSSLVKHAGMSPSDNASGTFLGDAHISRRGRPGLRLTVWRAVWPMLRFNPVMAAKYAAMTQAADDAAAAADTGSRQASAAAAAARARRAKARVACAASLLRWIYCLVVHGTSWDPDAASGPARRPAVPAEAA

SEQ ID NO: 58063 - protein, 395 aa, unidentified
MQVMHPVCCGIDVHQKSIVCCILDGPLTSNEPKKYQTSFGTTTKELKAALDWILEHQVTHVFFESTGQYWIPLFNIFSDSDLELVLANPQHIKNVPGRKTDVKDAEWIAQLGRCGLINQSYIPSQEVLQLRYLTRYRLSVKQRLTQIKNHIHVILQRANIKITSYLSDIFSKTGQALLTLFIDGEVINEDNVESCIHGRIKASTKQLIEAMEGKLSTVDRFLIKECMEEYKLQKKISDELNKEINEYILEHFPEEYQLLLTIPGISDNCCATILAEIGPNVDAFKTDKKLASWSGMYPGSNESADVKRSSHTTQGNKYLKQALVMSVLSVQRAKEETFSLFYQRISSRGSKMKAIIACGHKMLRIIYKILQSHQPYNSQKALGLRQQTNALSLTI

SEQ ID NO: 58064 - protein, 484 aa, unidentified
MRPGYNKSGRTAPGPSRSFAVCHTKATQSLPADLEAPVKKSERTIAHEAPSIRSTPNRATVRSQPEKTMNTWNEIKHYAGLDWAKDHHDVVVVNRDGQIVADFRFAHSLEGWTQFQKAIAPFTPLAVVLETSQGLAVDKLMESGCLVFALHAKSAQRYRDRKIPSGNKTDRTDAWALAEALRTDGQQWKPLQTGDPLAEQIRLLCRDEMSLIQQRTLLVNQLQQALYEYYPVVLEAFEDWTLESTWDLVIEFPTPQVLQKAGRSRWEKFLHAHRLWRQKTAEERLAIFARATEFCGSPATLAAKSLLAVSLAKLLRTLQAQLDQYRHQITQLFEQHPHHDLFDSLPGAGVTLAPRLLGSLGAQPDRFTDPQTLQCLAGTAPVSYQSGQIHKVHIRYQCDKFLRQTVHLWSDCSRKTCAWAQVYYQKKRSEGKSHACALRCLGQRWLKILSKMWKTKTIYNSELHAINQQKHGSWVLTLIAKKPA

SEQ ID NO: 58065 - protein, 414 aa, unidentified
MEVLYPVCCGLDVHKQTVVACLISPLPDGQRHKQLKLFATITVELENLADWLEAARCTHVAMESTGVYWKPVYNILAGKFELLVVNAAHIKAVPGRKTDVKDAEWIAELLQHGLLKASFIPDQAQRELRDLTRTRTILIDERTASVNRLQKILEDANIKIAGGKMVSDIMGVSGRAMIEAILEGQSDPATLADLAKGKLRKKRAQLEQALTGRVSDHHRLLLSMHLEHIDFLDESINRLSQELAERLRPFEEELARLDTIPGVGRLTAEVFAAEVGFDLSHWPSAGHLASWAGMCPGNDQSAGKRLSGKTRKGNKWLRRALVGAACAAGLKNGSYLQAQYRRLKYRRGQGKAAVAVGHSILVIAYCLLSRKDVYHDLDPTYLDDRRRARTQRRAVDQLRALGYEVTLVPKQPAA

SEQ ID NO: 58066 - protein, 353 aa, unidentified
MRHERTHKLKQGRYALMIHVGVDLHQRFCYCTAMKASGEVVAQRSVANEAESLQAFLRTLPAPRQVVVEACGFWPAFQRALGKEAERVVMVHPQRVKAIAHAKLKNDKVDSATLAQLSRCDLLPTAWMADEATQQARQRVRLRVSLGRQRTRCKNRLHAVLHQEGVRVPVTDLFGKRGRAWLQTVALSAAAAESVASYLEVIAVLDRIIGERQQQLEGTAATDARVRWLQTIPGVGGYLAALIVAELGDAQRFATAKAVASSAGLVPVVGESAGKRRYGHITRCGSPLLRWAMVQASHGATRGSPVVAAWYARLQKRKRPAVARTALARKLLICAWALLRHGVAFEESVFATV

SEQ ID NO: 58067 - protein, 441 aa, unidentified
MRVMMKCGAGIDVHKKNVVVNCRRVEGKEVETETRTFGTTTPELLQMTDWLASWGVTDVAMESTGVYWHPVYNLLEGSYQVMVVNAKHIKHVPGRKTDVKDAEWIAELLSYGLLKASFVPEKSQRDVRDLTRYRSKLVQERAREVNRVQKLLEGANIKLASVATDVLGVSGRLMLEAMIEGNVDEKEMAEMAKGRMRSKIPELEKALTGIVSDHHRFMLGEQLAHIDFLDGQIANISQEISVRLEKMSQKQPPTPPGETGKKASEADSEQPLRWQTAVELLDSVPGIDQRAAEAILAEIGIDMSQFPEDKHLTAWAGLAPGNNESGGKRYSGRTRKGNQTLKTTMIQVAHAARRKKGSYASALYNRLVGRRGKKRAIVAVARSLLVSIYHMLTRQEAYKDLGSEYFQERRKESKVDYLTRQLSKLGYDVQLTPQLDPAGAG

SEQ ID NO: 58068 - protein, 351 aa, unidentified
MKGMAVAIVESRVTGGVDTHLDVHVAAALDGIGGLLGVESFPTTAAGYQDLLEWVGGFGPIAVIGVEGTGSYGAGLGRYLQAAGVAVVEVDRSDRQDRRRQGKSDPLDAISAARAAQSGRARGEPKGRDGRVEAIRTLMVAKRSARGDRTATLNQMRALISTAPDDVRARFAHHSVARLVAVTAAMRPRPGDIVGYATRVTLRELGQRAAYLGDQIDRLNELIAPLVTARAPGLVALYGVGPDTAAILLIAAGDHPERLRNEAAWAHMCATAPIPASSGKVVRHRLNPAGDRQANHALWRIVITRMSSEPRTRAYVQRRTAEGLSKMEIIRCLKRYVARETYRHLQPPVAD

SEQ ID NO: 58069 - protein, 368 aa, unidentified
MNTVKFIGMDVHKKTITIAIINKGRNQQPRIYGTIENQLQALDKFCRKMVSTSSRLHFVYEAGPCGYGIYRHLTEKGFDCMVAAPSMIPKKSADRIKNDRRDAAMLARLHRSGELTAVYVPDAQDEAMRDLTRAREDAVIAARKAKQRLNAFLLRNGLTYAGRSKWSNAFFNWLSDISMPHAAQQVALQEYIDTVHENLKRVERLTDQIRQLVPAWRLAPVVSALQAARGVSLIVAATVLAELGDLSRFDRASQLMAHLGLVPSEYSSGESIKKGSITKTGNGHVRKALVEAAWAYRMPARVSRALLKRQQAVPERVCQIAWKAQLRLCTRFRRLRARGKTKQKVVTAIARELSAFLWAMAKQLQPVV

SEQ ID NO: 58070 - protein, 429 aa, unidentified
MNNVDNIRLEQYRQIRKEIRGSSEYLIVGIDVAKDKHYAFFGTATGKTIVKRLIFENSMRGFETLLTHEEILKVQHSFNKVIFGLEATGNYHKPLGEHLIKCCRNVVLVSGVAVKNNRTMMDCRWDKNDTKDAAVIADLISQGKFLFYEYTAMPIRDLRNLLSLKRRLKKQEHVYKVRIRNSLLAQYFPELDKYYRVCGKEGLAIVRWCLDPSVISGLEYDEFVRRVAPNGRGGIPQQERLRAVWKKSIESIGCAVGESLDVETKLMVEGLKYTRETIRYVEKKIEEICLDIPEYQYILSIPGFGPDISSKVVGAIGYPFRFDNGRQILKMAGMDLSANRSGKKSDTVIPKLSKSGKAGLRYALYQAALIASCKNSHFMRYYTEKLRGREKEKGIKTKMRVKLAAKMLIIAWTLMKKQEYFDPEYLNIG

SEQ ID NO: 58071 - protein, 366 aa, unidentified
MDEYDGRQFVGIDLHRQRSVIVRQTEAGEQLSAVRIANDPVALGLQIEDAGPDPEVVLEATYGWYWAVDVLQAAGARVHLAHPLGVKGFRYRRVKNDVRDAGDLADLLRMDRLPEAWIAPPITRELRELVRYRAKLVAIRSGLKAQVHAVLAKAGVLIAVSDLFGVGGRQRLVKVPLGPAYAERVRSLLELIDILDNHEARFAGLIAQRLDTHRGYQALQQLPGIGPVLAAVFVAEIGDVHRFAGPAQLCSWAGLTPRHRESDTVVHRGHITKQGSKLVRWAAIEAVQRHQSTAKISADKDRIEARRGKNIAKVAAARKLLTLVYYGLRDGHIRALDRPKGSVSTPDATRARPLFCLTPLSAWSPA

SEQ ID NO: 58072 - protein, 355 aa, unidentified
MTSVKYIGLDVHKESISICVRNSVGKVVMESVIETKATTILQFIDGLRGDLRVTFEEGTWAAWLYDLLKPYVSGVEVCNPRKNALLKDGSKSDRIDANKLSEQLYMNNIKSVYHGEQGLRTLKELARSYLTINKDLTRVMNRLKALYRSWAIPCAGKEVYAPRYRAEWLSKINELGVRRRAEFYYQQLDALCPLRQAVRRDLLLEVKKHKAWKLLRQIPGIGPIRAAVLMAVMQTPHRFRTKRQLWNYCGLGLETHDSGEWRAVQGQLRRAKKQATVRGLNEDHNHDLKDIFKSAAMRASTAAGPLHNFYENLLAKGRKPTMARLTLARKIAAITLIVWKKEVRFDANYLKQQAA

SEQ ID NO: 58073 - protein, 360 aa, unidentified
MTTINPSQSTASYEAIKLGIDAHAQYYWVSRQVDGATPQPVQKMTYDELMLFVVKQQKLTRNVVTCYEAGAFGFHLHRRLEELGIKNYVVQPQDWDERGKGVKNDRLDAAALCQRLDRYERGNKKAFSVVRIPTVDEERERAITRQRQQLVRERQRLAAMGRSLLAMHNIHVTGKWWKGKAWIALKILAPAWVIERLEGFIVILGPLEEQEAKLTNAIQEAAQEQKIPRGVGPLTFEILRREVGDWSRFNNRRQVSSYTGLCPREHSSGGKRRAGSVSKSGNPRVRAMLVEMVWRMIRWQPGYTALQKWARVLNSPTPNPAAKKKAVVAIARQLAVDLWRVFTGQVEAEKFGLVYLPEAA

SEQ ID NO: 58074 - protein, 383 aa, unidentified
MNQIQATLRSEDSTVEKSLYMAFELSERKWKLAFSDGGRVKHQVIDAGATLELHDAIEAVRRRFGLPSTSAVVSCYEAGRDGFWLHRYLDSCGIVNVVVDSSSIEVSRRKRRAKTDRLDAGSLVRMLMRFCAGERRLWSVVRVPSVEQEDARHLHRELESLGDERTMHRNRMRSLLKHHGIELGNPSRKDFVTYIERVRLWDGTLVPGELKARLIREHERLRCVEEQIRTVEKERRERVRRADTDSDRRVAQLMSLCGIGITSGWIFEKEFFGWRSFGNRREVGACAGLTPTPYNSGGSRREQGISKAGNKRIRKLIVEISWCWLRYQPNSELSRWFNERFAHGGKRMRRIGIVAVARKLLIALWRFRTHGLIPEGARLKAIA

SEQ ID NO: 58075 - protein, 312 aa, unidentified
MTTFDETYVGIDVGKTWLDVAVWGNEETRRVRNDEAGVAEIIQHIAEGAPRLIAVEATGGYEQLVVQAMLRKGLPVAVVNPTRVRALAKAAGKLAKTDVIDAHLIAEYAIKIQPPAQAPKEENEVRLRALVTRREQLVEMRTAEQNRMGTTHDALKADLRAHIDWLSRQICELEIQIQELIDLLPDWKAQVELLDTIPGVGLIVAVSVVADMPELGQLDRQKVAALAGLAPFNRDSGKKRGKRRIFGGRKGVRRVLYMACLSAIKCNPVIRALYLRLIHKGKIFKVAITACMRKMLTIMNAMVRHKASWAAP

SEQ ID NO: 58076 - protein, 482 aa, unidentified
MKKRNIYQNQSQELLSLFESAGSSAKVMCVPMDYAKRDHLVMLCNGHGDILRKPFSVKNSPEGIEYLIEQVTRSCRRRGIKKEHVFLGGEDANSFAENFVSNLRFKGWLVAGVNARDAKKQRMNLQASTDRIDLMGIATMLLNCRANCCPAASGIYRNLRTLVRHRRKLVVMLTEVKNRVHGIVDRLFPGFLNENKSGIVAFTQSSLYLMEDRFSPKQISRRRRQKLIEILKQYGTSKAEETAFKLQQYADQVLHTPVEYVDTLQLSLAQHVKHIKCLQESIAQLEKEIAVNLAQTQGAFLTSLRGIGIVLAAGVSAEIGDPYEQKTLSHVVSYSGIIPRVKQTGGVDGKTYTGPVAKRCNRILKDYVVKSGFHLGLHGPEDLMIDYKRRDASGQHADFGIGRRYLRMAMSLMRTSQVYLPSRLRKADSTLEERAGYYLTTWPFLKDKWKKTGAIEVAFAKDRPLGIWRQIVQELCDIKLKL

SEQ ID NO: 58077 - protein, 417 aa, unidentified
MLTGDLVRLFVGDDWAEDHHDVEVMSEAGKVLARRRLPEGVAGIAQLHALIGARAGDDPDEAEVIVGIETDRGPWVAALVAAGYRVFPVNPLQASRYRDRHGVSGAKSDAGDAHVLADMVRTDSHQLRPAAGDTPEAGAVKVLARTHKTLIWERTRQVQRLRHQLLGYFPAALEAFEDLDAPDALELLGKAPEPARAARLTRAQVSAALKRARRRNIPGKATAILTALRGGHLGQPEAVTAAYAATVRALIAVITALNEQVDNLQGQVEEHFGRHPDAEIYRSQPGLGAILGARVLAEFGDDPARYADGRARRNYAATSPITRASGKRKVIAARFVHNDRLVDALNAQAFAALTASPGARAFYDQQRANGVGHNDALRRLANRLVGILHGCLKTRTLYDEATAWGHRENLPQSPTAA

SEQ ID NO: 58078 - protein, 482 aa, unidentified
MKAKPPEKIQKATNPSTRGHWNEMNRKQRREMMRKIQSEDISLEVVHPDAAGIDIGNESHYVAVAPSRDKQPVRSFGCTTGELKAMADWLKQCGIRTVAMQSTGVYWIAVYDILEQAGLEVYLVNARETKNLPGRKSDVQESQWLMKLHTYGLLRNSFRPSQEIRTMRTYWRQRNDLVQSAGRHVQRMQKALTQMNIQLANVLSDVSGVTGQAIIKAILGGQRDPHKLAEFRNPRVRASEEEIARSLEGHWQEDLLFVLQQEQDGYEFCQKQMAECDRQLNHYLEQREDRSQGAPLPEEKRKGRRKKKSGNKPQFDLRTGLFRMSGTDLTRIDSVDVMTATTILSEVGWDMSKWETEDHFVSWLRLCPDNRISGNRVIGKGRLPTNNRVTIALKMAASSLRLSDTYLGAQFRRFRTRLGAPVAIKAMAAKLARLVYRMLRYGMKYVDKGAATYQEQHRQLQIKQLKWKAATLGYQLIGVPAT

SEQ ID NO: 58079 - protein, 320 aa, unidentified
MTGYAVGKTELVASIRDSDGNSAMPALFPNSSVGLKKFLVYLKTNNISSDDPILFESTGPYHWRACRTLADEGYFIKVANPLHTKQIARLSIRKRKTDKVDSQNLAFLASQNYGYRFVETEAMAKRKAMVRHYWKLRQSATDHLRHDRYMKEYRGINDESVSKFMIKRCEALKKIIVKKWDKGNDIKYLDSIPGITPFLAATILAELLPLERFKTIDQIVAFSGLDPSVKQTGGKAGHHGHISKRGSPTLREALFLAAFGSFQREPMKSIYVRYKARGLHHNTILCILGRKILRIAVSLLKKRRIFDATKLSTVDDLTGT

SEQ ID NO: 58080 - protein, 307 aa, unidentified
MLIHVPPEVRVLAMDVHKNTISTGLLEPGSTSPVLDKISADDESVRRLIARFDDPAQVWACYEAGPTGYELARTLRRAGMRCAVIAPSLIPTRQGDRVKTDKRDARRLAVLFRASQLTSVRVPTVAEEAVRDLCRARADMVIDRTRARHRLGKFVLRHGRVWRGGDNWTLKHEAWIRAQRFDERALNETFAHYQATLTAREAAVDAVEADLVPWRDREPFADAVHRLAAYRGITELGGLTLASEVCDWRRFPTAGLFMGFTGLVPSESSSGDRTSRGGITHAGNTHLRTQLVEAPGPTSPVPRSAPC

SEQ ID NO: 58081 - protein, 409 aa, unidentified
MDVMVQRCAGIDVHKDTVVTCVRTPGADGQREVVTKTFGTVTAELLALREWLVAMGVTLVGMESTGVYWRPVFYMLEDVTECWLLNARHMRNVPGRKTDDSAWICQLVEHGLVRPSFVPPKPIRELRNLTRYRKAQIDERSRESQRLDKVLQDAGVKLSSVASDIQGKSARAMLEALVEGERDPEVLAEMALGRMRKKVPQLQEALVGRFGAHHALLVQTILAKVDFLNGAIDDLSTEIDRVIAPFGAEVELLDTITGVDRRTAEGLIAEIGVDMSRFPTSGHLASWAGMCPGNHESAGKRKSGRARKGPKWLGVHLAEAASAAGRSKGTYLGAQHHRLTGRIGYPKANKAVGHSILVAAWHILGNGVPYEDLGEDWFVKRRPEAHARRLAKQIEALGFNVEITPAEAA

SEQ ID NO: 58082 - protein, 329 aa, unidentified
MTLTIVEETRAITGGVDTHADTHVAAALDPIGGLLGVREFAATPVGYAGLLGWLGGFGTVCLVGIEGTGSYGAGLARHITAAGVRVVEVDRSDRQDRRRQGKSDPLDAVSAARAAQSGRARGAPKGRDGQVEAIRALMVAKRSAAGERTRTINQARALIVTGPDDLRGRFARHSADHLVTGLASLRPRPGDVVGYATRIALRELGRRAQFLDGQLERLDELIIPLVTARAPGLLSVYGVGPNTAALLLIAAGDHPGRLRSEAAWAHLCAAAPIPASSGKTVRHRLNPGGDRQANHALYAPRGALSYSRCSREKLGGRFLGLMANLASKD

SEQ ID NO: 58083 - protein, 323 aa, unidentified
MEFLPAGIDVSKLWFDVVVLVAGKPYHSRFDNDGNGFEAFGTWLKSFPQPARICLEATGVYHRELVSWLWEAGIEVQVLNAYRAKQLSKGMGFQGKDDRTDAQALAQIAGLGGFKRSEPVRNEQMEALREVSRRIQQLKFEIGKQRTRLKEPHLSSLTVESLRRHVQFLLGEVDRLEREWLQALKLVSTAYGRYQLALSVPQIGPICARVLVCELPDEIGSIDKGIGLAGLAPKPNRSGSSLNGRDRLPFHCNKRIKAVLYMPAVQALYRSPELRDFYMRLVGNGKAPKVALTAIMRKLLRRTLEVIVRGTPWEHRHKGLDNP

SEQ ID NO: 58084 - protein, 404 aa, unidentified
MQRQGFLGIDVSKDTFTVAFLIVAPLSGEILHEHIETLPYDRTGWHRFLTAWAAFHADHWWVGLEASGPYSALLEAHLTRLDRPDVSLHRLSPSQVRDFAKSRSRRRTKTDRLDARTIALFLRQQLTVQALPAPLQDHTPLRTLAHLDQHLAQELTRTQNQVRQLLHFLFPELERAYARFPKALRTLLRHFPSAQAIAQAAPEALAQVLPPRHRLDLAALQALAQTSFGLHDPTRTQALQLLLDRWTLLDHLRAQCFALLRQAVRRRYPQAWDILTAIPGIGPRLAALFLALVGDLHRFPNPKALVAYAGLDVTLYQSGRFQGRRRLSKRGDPLLRHVLYLMAVTLTRHTRRFAHAFTHHRQKGRAVRETFVILSRKALVMCYHLLRRVIHFQDIPEPVPAQSL

SEQ ID NO: 58085 - protein, 376 aa, unidentified
MMLIGVDPHKSTHTATVVEPDTNRQVASIRIDATLPEYRRMLSWAARWPQRRWAVENAEGLGRHLASWLLARGEQVVDVPSTATARVRQLSRGGGRKNDRLDAAAAACVAAFQGDARPLAAETAADALAVLDEQRVNLAQARVRAVNQLHALLRALLAGGAPKDLSAATAAALLRSVRPSGDAERARKAVAGDLVAEIRSLDTRLKASAKAISALVDESGSTLTKTVGVGPIIAGRLIGRTGRPSRFPNSAAYANYVGAAPVEVASAGKARHRLSRAGDRQLNSALHTVAVTQIRTLRSPGNLYYQTKIAEGKTPREARRCLKRRLADHLWRVMIADERRAAASPGGHPGTTLQSSAAGSTPTTSSSDKSLPRPAS

SEQ ID NO: 58086 - protein, 340 aa, unidentified
MNATTYGLDVAKRVFQMYWVDAQSGEIVNRRFGRDELIGFLAQRPAGRVALEACGSGHWWARKIKTLGHEVVLLHAKFIRPFVQTNKTDAADARAIWTAMQQPQMRTVAAKTEDQQAMLSVHRMRALLVKFRTMQVNQLRGLLYEFGVTFRAGRLAGLAEIRVRMAELEDTLPGVMICSLQDQLKRIDGLEQDIDRLEKRIGTWQKQEGACRAIAQVPGIGKLTATALVAMMGDAKTFKSGREFAAFLGLVPRQSGTGGKIRLGSISKRGDPYLRTLLIHGARSVMCHAKVPTRWQTQIQARRPANVAAVALANKMARTAWAILAHGQAYQKDYVSVKPA

SEQ ID NO: 58087 - protein, 345 aa, unidentified
MKVTTVGIDLAKSVLQIHGVDGRGKAVLRKQLKRADVLKFFANFPPCLIGMEACGSAHHWARKLAEFGHTVKLMAPQFVKPYVKTNKNDAADAEAICEAVGRPNMRFVAVKSAQSQAVLAIHRARAGLVKARTAQANQIRGLLAEFGIVMPQGIVHIAKRVPEILEDGENGLPGLMRGLIARLTEQLKLLDTQVEELEAQIRGWHRENEASRNLAEIPGIGPLTASAIVASVGDAKSFASGRQFAAWLGLVPRQHSSGGKARLLGISKRGDVYLRTLLIHGARTVVRHAEHKADQADGWLRRLMARRHKNVATVALASKNARMVWALLAHGRKFQTDYTSVIEAV

SEQ ID NO: 58088 - protein, 323 aa, unidentified
MSPVVGIDVAKRSFDLAIDLANGKYRTKAKLPNDPKGFQILQTWLQTHAQADSWIVMEATGTYHEALAEFVYGLGYRVCVLNPAQMALYARSQLTRVKTDRSDAKLIASYGQRHAAQLRPWQPDPPALKRLKALVRRRDDLLQMLQMERNRLDVAALVVRDSLLENIGQLQARIAQIERAIDDQIDQDPTLRGQRELLVSIDGIAGTSAALMLAELGNVERFAHASAVTAFAGLNPRLQESGKRQGQVCISRTGSPRLRAGLFLPALVAMTHNPVVRALKLRMRERGKANKQIICAAMRKLLHIAYGVLKSRTPFDPQKTLAC

SEQ ID NO: 58089 - protein, 424 aa, unidentified
MASHEFAAFVGIDWGDQKHAVCLRTEGVEVEHELSQKADEIDAWATELRTRFGGRPVAVCLEQSRGPLIYALLKYEFLVLFPLNPLQATRYREALYPSGSKDDPLDARLLCLFVETHHGQLRAWKPDDEATRLLRLLAEDRRRFVDQRTAHKNQLRQRLKEFFPLALELLRSGDLEDEWFLQLLIKFPSHAELRRAPPRTLERMLPKHHRLPDDESLDPRVAQIRAAVPLVTDGAVVKAARLQVMELARLLLRLNTTIAEYDHELSAELARHPEAELFRSFPGAGAALLPRLAAAFGTDRERYADAQDLQQLSGIAPVQIRSGKSCSVRRRRACPKFLRQTFHEYADHSRKRSLWAKAYYRMLRGRGLRHNAAVRALAFKWLRILFRCWQTRTPYDEHRHLKQLRLKQSPLLQYLDLPDPVEQT

SEQ ID NO: 58090 - protein, 493 aa, unidentified
MKTAPSSLPAKRRVRNTRKLKQQAKTAMIATPVGSLDELTPVHRRAAGIDVGSAENYAAIPAEGLAAGESAVRVFGVFSPEQDALVEWLRAHQITTVAMEATGIYWLTLYDKLEAAGIEVYLVDPHGVKAVPGRKSDWLDCQWLQKLHTYGLLQRAFRPDPPIRRLRTLTRQRAELVICGGVHLQHMGKVLIAMNLHLHLVVSDLHGETALRIIEAILAGERDPKALVKLRDPRCHKSTLAEMEAGLKGTYDDENLFVLEQSYQGWKFYQQQLTHCDERIEKVLAVLPTAKAVTREAPPKPVATQTAPKRGRKKQINRGPNAAAVDFSQALKRICGVDLIQVCGLNLLTVLMLLGEIGTDMSRWRNARAFASWLGLCPGARISGGKVLSRRTRKVNNRASTLLRLAAWAAGKTDTWLGRFYRRIRARRGAPKAVTATARKLACVIYHMMKYGEEFVFLDTTQYEARARDHRLHRLRKEAKMLGFELTELQQVA

SEQ ID NO: 58091 - protein, 457 aa, unidentified
MPARRKKPRPGAASPAHTIDPNSAGIDIGATEIYIAVPADRDPHPVRRFSTFTEDLLAASDWLKQCGIKTVAMESTGVYWIPLFQILEAGGMKVCLVNARHVKNVPGRKSDVCDCQWLQHLHSAGLLRASFRPEQQICAVRSLVRYRDSLVQLSAMHLQHMQKALDQMNLQLHHVISDLGGKTGMAIVEAILAGERDPHQLATLRDPRTRASKETIAKSLVGDYRREHLFTLRQSLTGFRQNGQLIADCDVEIESLLKEFSSGDGPGAEAVPEPQAELKRKPRRNEMNFDLRTQLHRIFAVDLTEIPGIDTLTAHTLFTEVGRDLSKFANVAAFTSWMGLCPDNRVSGGKILHAQTRRVNNRVAKALRMAAQALSRSHGWMGQYYRRMRAKLGGPKAITATAHKLARIIYHLLTTGQAYDETVFAQQEAQNNQRNESRLRHQARKLGFELTLIPTEV

SEQ ID NO: 58092 - protein, 419 aa, unidentified
MKDIEAKKVRVINKETLIVTVDISKVTNVGYCRCPNGIDIKPFSFMNNFHGFNTFWDRIMKTRNTHDLKEIVVGFEPTGPYGEPLTNFMKKKKVKLIQINPMHTKRVKELEGNSPNKTDQKDPKVIADIIELGHALTVVQPEGPAAELRRLTHARERAMQRRTAIFNQLQDLVFVIFPEFSQVFKDVKVRSAIFILENCPTPEDIIKYKLKNLITTLRKVSRGQLGEERAKELYAAAKTSVGIKEGRQSILFEIKEILSIIKTTEDFVAEIEAEMSLHLEHIPYSRFILSIKGVGDITVAGLIGEVGDFREYKTISEILKFSGLDLFEISSGRHKGQRRISKRGRSLVRKLLFFAAINVVRKGGIMHGYYQGCLARGMLKMKALIAVSRKLLGLILALVRDHSEYIENYTVEQDLKKAA

SEQ ID NO: 58093 - protein, 366 aa, unidentified
MKKISTVHAFESEIFKEQKLTIGVDLGDHWSCYCVLDEAGKIILEQKVAMTPEAMKQTFAKIPQSLIALETGTHSPWVSRLLTELGYKVIVAHAQKVQLITKSSRKDDRHDARTLARLARIDPELLGPVRHRSAQAQIHLTVIRARAELVRARTALVNSARGLVKSYGQRLPKCGTQQVSRELGAGLPAELREVLEPLLKEVESLNERIQEYEVRVEKIAKESYPHVELLKQVKGVGTQIGLTYVLTLDDPHRFPKSREVGCFLGLCPGRRDSGESQPQMNISKEGDRYLRTMLVQGAHYILGPFGADSDLRRWGLKLAARGGKSAKKRAVVAVARKLAVLLHRLWVSGEVYEPLRNSQKAMRAAA

SEQ ID NO: 58094 - protein, 381 aa, unidentified
MTTPATRNVQERPTEGTLFVAFELSEKTWKLGCTTGHGQKPRERTVPARQQERVLDEIAHAKRRMGLPDTAPVVSCYEAGREGFWLHRFLQGHGITNHVVDSSSIEVNRRRRRAKSDGLDVRKLLSMLLRYAHGERQVWQVVKVPSVEAEDQRHLHRDLETLKQERASTMTRIEGLLSSQGLRVTSLTKLPEQLEALRLWDGSPMPPGLRRRVMRVYAHYTFLSEQIAAVEVERRAQLQTSADASLDKIRQLMQLKGIGINGAWLLVMEFFGWRAFKNRREVGGLAGFTPTPYQSGESAREQGITKSGNRHVRWMTTELAWSWLRFQPDSALSVWFRERFGSGGKRLRRIGIVAVARKLLIALWRFLETGVLPAGAVLKEA

SEQ ID NO: 58095 - protein, 338 aa, unidentified
MQEARIGEYPVCIGLDVHKKYSYAAVVDDLGEIVEEVRIENTKQSLEQFASKYKGAKAVIEATGNYRFIYDVLENYMEVKLAHPYKTRIIAEAKIKNDSLDAKMLAHLLRANLIAESYVPPRDVRELRDLTRLRKALIEDRNRLKNRVHAILAKNGIIDYPNPFTKKGKEFLGNLDLSEIDRELLEINLSIIDKINEKIKRIDEIIQEKAKEDNDAILLTTIPGISYYSALLIKAEIGDINRFPNKFKLVSYAGLCPSIKQSGNKEIKGHITKQGSRMLRWILIQCANVAIRHDEYLRSFYLRIKRRRGHNIAIVATARKMLVCIYFMLKRKEVYNPR

SEQ ID NO: 58096 - protein, 452 aa, unidentified
MAKQKRRKHRKLDRSLPEMRPNAGGIDIGATEIFVAVPADRDTDSVRSFPTFTQDLHELADWLQRCRVDTVAMESTGVYWIPLFQILEARGIEVHLVNAQHVHHVPGRKSDVVDCQWLQYLHSVGLLKASFRPEHAVCEIRSLMRHRQSLVEMSCVHVQHVHKSLDQMNLQIHHVISDITGVTGLAIVDAIVAGKTNPRELAKLRDHRIKAPIETVTKSLVGDYRPEHIFTLKQSLTAYRHHQQLIADCDREIQQRVETFDTKGGDPPAAAVVDSSTSISTTEPTFDLRRHLERIFGVDLTAIPGFDTLRVQTIFSELGADLSKFPEDDQFCSWLNLCPKDGFSAGRRIRGPKVKTKNRVTQAFRLAAQSLHRNQSYLGDYYRSQRARHGAVKAIKNTAHKLARIFYHLVTTRQPYDESIFATLEAHNRNRRLHKLQSLAKQFGYSLVEANA

SEQ ID NO: 58097 - protein, 352 aa, unidentified
MNEITTVGVDLAKEVIVVCAADGAGRVVYFKQFSFQGFAIWAANLPPCSFGMEACSSAHYWARWLTAHGHSARLMAAEFVKPFRKSQAAKNDRNDAQAIRIAMCQPEMRFVTVKSVEQQAMLAWHRMRSGYSDERTALINRTRGLLAEFGVWLGRSAAALLRALPRLAEEEQLPARFRPLLRQAHEQLLVLEERITACDREIHAHARQSEAAQRVSALTGIGPLTASAVIATVANARDFRNGRQLAAWAGLVPKQASSGGKQRLGAISKRGDTYLRGLLTQGARSTLQAALTRTADKRSRLEHWMVALHARVGYHKTLVAIANKHARIIWAILAKGEHYDPDAWQRYAHARH

SEQ ID NO: 58098 - protein, 411 aa, unidentified
MTKEDFIYVGIDLHKETHTAVMIDCYNNKLGEITFPNRPADFPKLVTKVKKCNTDAKEVVYGLENAYGYGRALAMWLIDKGYFVKDVNTAISHRQAKHRGAMYRKSDSDDAEAIALATLNMLDKLPDACPNDAYWSLGQLVHRRDNIMKQRTRLVNQLHEQLCIAYPSYKQFFNDISRPTALYFWEHYPSRKYLKGKSVEDLRAELVPVSHNKCSTRTCEKILDAIAGDKVKNNAYQDARDMVTLSIVSDLQHYDKQLAEVDKMLEQMYKMLGCTLTTIPGVNVITAVKILAEIGDIKRLSNANKLAQFAGIAPLHLSSSGKGKDLATKQGNRRLQATIYFLAIQMVHISSKGTPRNPVVRAYYEKRKAEGKTSQQALICISRRLISIIYGMLKSGTEYRMPVVENAGENR

SEQ ID NO: 58099 - protein, 341 aa, unidentified
MDIAVLGIDLGKNSCSMVGLDGSGKVILRRRMQRKTIVAVAAKLSPCIIAMEACCGAHHLGRVLAAQGHTIRLMSPEYVRPYVKAQKNDDRDAEAIAEAATRPTMRFVALKSEEQLDMQILHRVRDRAVGERTSLMNQLRAVLLERGVIVPQGRAKLRLRVTELLQQGAGELSSRIQLLIEDMLTRWLTLDERIAAFDAEFAAEAKRDEAARRLTSIPGIGALNATALVAAVGDAETFARGRNLAAWLGLVPWQATTGGKPRLLGITKRGSKYLRKMLIQGARAALPTLSRSNTRLGQWLRGLLARAHSNTVVVALAAKMARIVWALLRYGTTFEPRAIAI

SEQ ID NO: 58100 - protein, 343 aa, unidentified
MQEITTIGLDIAKSVFQVHGIDASGAVIVRRQLRRSQVLPFFRKLPACVIGIEACATSHHWARELEKVGHEVRLMPARYVKPYVKRNKNDAADAEAICEAVTRPTMRFVAVKTCEQQSVLMLHRTRQLFVRQRTMLINAIRAHLAEFGIVAGIGRNGVETLLGVIAEGEDERIPPAAHECLMALAAQLAMVKRQILEADRRVLAWHRTSKTSKRLEAIPGVGPLIATALVASIPDPNVFRSGRDLSAWIGLAPKQNSTGGKERLGSISKAGNRYLRSLLVVGALSVIRRAKQLGYTRHPWLVRLMERRSVKIAAIALANKIARIAWAMMARNESYRTPLSASA

SEQ ID NO: 58101 - protein, 325 aa, unidentified
MTYIGIDISKATFIAAFPQVKGYRTQIFPNDAKGIRRFISQLDHSIHHCVMEATGNYCFLLLYLLDKAGIRASLINPKKIKNYARVMMSVTKTDSKDACLIADFGERFKPEPYKFPSEQIMLLKQKKTVLRQLQKQLTATKNLLSSLEPLPVKDKKCLNSLKQTITFLEKQIKYMQQEMETLVTDVFDKQLKLLTSIKGIGVTLATALIIATGGFTYFDNAKQLSRFIGICPTIEQSGTSINIRGHINRNGDETLRSMLYVAAWSASRHNKACKECYQRLRGKGKSGKVAMIAVANKLVRQAFAVVTTNKSYIDGFVSTKPDTAV

SEQ ID NO: 58102 - protein, 338 aa, unidentified
MKSHIGVDLHQRFCYLTAVDASGKRYGQARVANDAGALQAWLGQMPRPRQVVMEASGFWPAFERAVRPEAERVVMVHPQRVKAIASARLKNDRVDSEILARLSQADLLPEAWMADPQTQRLRKLARLRIALGQQRTTAKNQLQAVLHQEGFAKPVTDVFGKRGRAWLGKLELSAAGRMVVDTWLQMVDHLDGLIAQQKRELERMAGEDMRARWLQTVPGIGAYSAMVILAEIGDIARFHSKRALASYAGLTPSVRESDGKRKRGGIGHHGSGTLRWIMLQVAQVAARHSPAAKAWIARLRKKKPAQVAKIALARKLLTAVWALLRQGVCFEESVFGQP

SEQ ID NO: 58103 - protein, 411 aa, unidentified
MELLYDRVAGLDVHRDSVAACVRLAGPRGGAVTDKERFKTTTAGLGRLAGWLAERQVALVAMEATGVYWKGVYYALERDFAVWLCNAHHVKNVPGRKTDMSDAEWLADVAAHGMVRPSFVPPLPIRELRELTRYRKTQIDARVAEIGRLEKILQDAGIKLTSVASKVLTQSGRAMVEALIAGERDPARLAALAKGKLRPKIAELTEALAGHFGSHHAVAARRILDHLDFLEVSITSLTEQIDARTRPYAAVFELLLPVPGLDRLTIDVVIAETGADMGRFPSPAQLASWAGLCPGNHESAGKRRRVGTPPGNQWLRRALVEAARAAARTKGTYFAAQYRQIARRRGPNKAAVAVAHSLLDLIWHLLSTGECFQDLGDDFFDRRRDPERETRRLVHQLEQLGYSVTLATAAS

SEQ ID NO: 58104 - protein, 393 aa, unidentified
MRFAGIDIASETHVIAIVNADSAVALKATPFTEDATGYQKALALLGAPGEVLIAMEATGHYWKNLFAVLAAAGHTIALLNPLRTHRFAGEELERTKTDAIDALGIARFAAQKRPPATPLPDALTEELRELVRLRERLLQDFGDRVRQLHRLVDLGFPEFTRYVRTLDSELAVAILRDYPTAAAFRGVWVRRLAALRYDGRHQVGIDLARTLIDAARRSVGQHHSATYRLQIRYACDDLDVLRRRLRELDRDIEGKLREHEVGRLLTTIDGIGSNTAACVIAEVGDPARFRSPGALAACVGTIPGLKQSGKCNTRRAGLHPLGNAKLRAALWMPTLTAVRFNPWLRAHYQRLRARGKLPKVALMACMHKLLLAIYSVAKHRRPFVATLGAAAST

SEQ ID NO: 58105 - protein, 418 aa, unidentified
MEELHPRCAGIDIGKEYAKVCVRVPGLRPGGRTKADRVSEVVTTWGSMTNQILALRDYLVEQRVTCVVMEATSDYWKPFFHLLEDIEGCEVMLVNARHVKNVPGRKSDVNDATWLAQLGAHGLVRASFVPPPQIRVLRDLTRSRAAVVRERAREVTRLEKLLEGAGIKLSVVASDLTGVSCRAMLMALVRGERDPATLAGLANWRMHGKTRQLVEALTGRFADHHGFLVSLHFRLIDAHDAAINDITVQIEAAIEPFRAFRELISTIPGISDRVADVIIAETGGDMNQFPTAAHLASWAGVCPGNNESAGVIKSTKTRRGNCHLKGALGIAAFAATRTKNTYLAAKYRRLAARRGKLRAVVALEHDMLTTIWHMAQTGELYNDPGSDYFTRLRPDRVKTRAIGDLERLGYTVTLQQAS

SEQ ID NO: 58106 - protein, 359 aa, unidentified
MGHERTFVGLDVHARSVVACGIDGDTGEVVRARLTPDHEEIWSWLAGLEGPVAVAYEAGPTGFGLARFLGQRGVRCVVAAPSKISRAPGDRVKTDVRDAMLLARLLKLDDLTAVSVPSVEAEAARDLVRAREDCRGDLMSARHRLSKLLLRQGIVWSGGHAWTGAHDAWLRRQRFDQSARQLAFESAYESVAMTLARRDRLDDAIAAMAADSAFTPVVVRLGCLRGISTLTGFGLAVEIGDWHRFTGSTIGSYVGLVPSESSSGQSRSQGSITKTGNTHVRRLLVEAAWHHRRRNYAGAEMHRRWNLAPVEARQRGQEGNARLHARWQRFDARGKRVTVANVAVARELAGWCWSLAVMD

SEQ ID NO: 58107 - protein, 391 aa, unidentified
MPDVSSNASAATTRTFVALDVHKNAITAGVLAREGSQPELVQLENSEKAIRRFIKRLGGARGLAVCYEAGPCGYEPSRLLAGMGVACDIVAPSLTPVRPGDRVKTDRRDAKKLVRLYRAGELSLVAPPTPEQEGLRDLVRCRDDLRRARTAARHRVGKQLLRYGRVYREGKKACTLRHRAWVRRQRLDDPLAQAALEHMLCHLDAIDAQIAALDRQLEQVAASPPWCDPVRWLCCFRGISTLTALALLAEIGDFRRFASARELMSFLGLTVSEYSSGERRQRGSITKTGNRHARRLLVEAAWHYQHPPRLSARLRSSGQLVPSEALARAWQAQIRLHERHRHLTANGKLPTVATVAVARQLCGFLWATMTRQPLRDDHSAHPRPRTEVLAA

SEQ ID NO: 58108 - protein, 382 aa, unidentified
MKCLYSNVACSGMDVHYKFSNVTFRDSAGNVVRRERLEHPQRDQLRARIGRWPKGMPVVLEASFGWGWLSDLMAQAGLDVHLSNCYKVEQMRKARGLVKTNKKDADLTSLLPLEATNWWEVWRAPQDVRNRREQMRFRGDLIALQTTVKNRIHAIFHRHGIFHEFSDLFNGKGRLFLADICINGSNCLSQEAMQAFRGQLLLLDHLRKQLASVERILKGQLDTTPLIRRLKTVDGFGLILSHVIMAEIGEIKRFKNHKTLASYSLLAPRSNDTGEADPEHTPFGRHLGTRGNKTLKWAFIEAAHSAVRHGGKWRAMFDRVTCGGKKDRNRGYVKVARELVKAVYVVWKKDVDYTDNPLQRPGQGSKKSRSGTGQLCRTMVHA

SEQ ID NO: 58109 - protein, 422 aa, unidentified
MSYCPVAGIDVSKRFSDMCILSPDNKIFAQEKIYHDETSINRANALLQKAERLFFSKPVIVMESTSHYHLILFQFFSEHGYDVIVVNPLQSNSMKDFSIRKRKTDRVDAFKLAMMYRTKTLRPSQIPQTATRALRQLCRHRAELLNNVSSYKNRLTALLDQTFPGYDKVFSDVGGVTSCAVLVRFPTPTILLVEEESELVEVIAAASKSGYSFAKKKAGLLISAAQKAQTLGIHSCADATLIVCTIQMLRTLSESVLQIEAAIDHLLAQIKEMRSNVSLLQSIPGIGSHSAALLLGEIGDISLFKKPKQLAAYFGLDPTERQSGSFRGTKNKLSKRGSPYARAALHMGVVNAICKHGKDSAANPVLLSYYEKKCKNKPAKVAQAASMHKLVFIIFAVLRDQKSFELKTPEQHAVEQGFVKAA

SEQ ID NO: 58110 - protein, 438 aa, unidentified
MSNKVIFNLDELFISVGIDVGADFSWMSIALPNQQFVGKPYKILHNSIDSLATAVSKIKEAEESYSLESRIFLESTGIYHYPLFCYLRDKGFNCSVINPIITKNSTNINIRKVHNDRFDSKKAALVGLKPNLKVSLMPSDLALNCRNLSREYYDLMDNRSAYVNKLQGELRMAFPQYLGIFSKVTINTSLTLLETYTSPSAFLEADKQEIIDIIKSTARFGLTYAQNKYNAIIQAATDANQFGYIIDSNIKRIRLYISFIRKYDEAINSILESLHELVDANEDTDFVKQIHLIETFKGAGFLSAVSIMGEIGDFSAFSKPKQLFAYFGLDPAVKQSGKFEGTKVQMSKRGSAIARRVIHTLTLQSISISRNGEAKNPVLREYYIKKCDSKPKLVAMGAVSHKVCNMIFAILRDNKPFKIIAPQEHIKQYNSAKCDIAA

SEQ ID NO: 58111 - protein, 316 aa, unidentified
MNNKRVIGVDIGKSCLDAAIEGSHRVQRYDNNAAGIAALIECFDPAEALVVFERTGGWERNLEVALADRAITWSVVHSQGVKAFRQAQGIKAKTDRIDARLLRDYGRDRLNAGKLRPGHREDVTLDCLMARQRQLKAMRHAESCRLATAALGVVRSSIERMIADLDAGLAAIAAELARHENEHMDLAFKEEVLCGQIGVAEQTARGLLAELPELGRLDGKAITALGGLAPRVHESGSIRKRRGLAPGRTSIKVILFNPARTAMRFDPQIKEFCSRLRARGKPGKVIMVAVMRKMLVRLNAQMRDAMARAPTAAAVH

SEQ ID NO: 58112 - protein, 355 aa, unidentified
MSSEKYIGLDVHQATISVAVMDSQGKVVMESILETKASTMLEFLAGLRGSLFVTFEEGTWAAWLYDLLKPDVTEVLVCNPRKIPLLKQGNKSDKIDARKLAERLRLHDLKPVYHGETGVRMLRELARSYLTVVKDLSRVMNRLKALYRSWAIPCAGRDVYYTRHRSQWLEKIPEPGTRRRAEQLYQQLDMLQHLRQQARRELLAEGRKHTITAKLRQIPALGPIRSVLAVALIQTPHRFRSKRQLWTYSGLGLETRDSGEYHYVRGQVRRRKKQATIRGLNKDYNHDLKGLFKGAATRASVQPGPFQEFYHRSLAKGIKPTMVRLTLARKIAAITLTLWKKGEDFDLDKLNSQAA

SEQ ID NO: 58113 - protein, 357 aa, unidentified
MDGSKQQPQVTAGLDLGDKYSHLCLIDSQSGEMIEEGRLRTNPEAFLRRFSSEQPMRIAIEAGTHSPWASRVLEECGHELLVANARKLRLIYANKQKTDEIDAENLARLARLDPKLLYPLKHRGEDSQAHMAIIRSREALVSARTQLVNHVRGAVKSFGGRVPKCPARSFHNRAPEHIPEALLPALGSILETIGSLTQRIRDYERQLEAISKERYPETELLRQVEGVGPLTALTFVLTLEDPYRFEKSRSVGAYLGLVPAQDQSGDRDPQKRISKEGDEMLRKLLVGNAHYILGPFGSDSDLRRHGEKIASRGAKNSKKRAVVAVARKLAVLLHHLWVSGEVYDPLYNAHRCGDVAA

SEQ ID NO: 58114 - protein, 323 aa, unidentified
MMGLPNSICVGIDVSKMSLDIASNQTISPFATSNDVDGFDVIIAELKQYSIALVLMEATGGLEAAVACSLQAQGFDVAVINPRQARDFARSMGYLAKTDRIDATMLAQMAEVINRHPERARFIRNLPDAEREVLNAMVVRRRQLITMLTAERNRLHPSHPQSRKSISTIIGVLQDELKRINKSMEVHISTHFKTLAEILGGVKGIGAATIATLLAEVPELGHLSRREISALIGLAPFNRDSGNMRGRRTIFGGRANVRSALYMATVVATGHNPVIKQFYNRLVELGKAKKVALVACMRKLLTILNAMIKKNEPWDSSHHYLSQ

SEQ ID NO: 58115 - protein, 325 aa, unidentified
MGQPPIAAQRAVFVGIDVAKASVSVAVHPTGETWTAETTTRALRTLAQRLARLTPTLVVLEATGGYEVPVVGALSEAEVPVSLVQPGRVRHYAQAAGLLAKTDRLDAALLARYAAHLEPALYVLPDEVQRGLMLLVARRRQLEEMLVAERQRLEQQSFFPHSPVRAEIAETVAYLEGARGETDRQLHAYLAQHPRWDEAHALLRSVPGVGFITAVTLLAYVPELGHLSRHEIAALVGVAPMACESGQWRGGRHIRGGRPAVRHVLYMAALTAARMNPVLRPHYQHLRARGKAPKVALTACMRRLLVILNAMLRTRTTWSVPLPQP

SEQ ID NO: 58116 - protein, 413 aa, unidentified
MDIVHSHCAGLDVHKKTVVASIIVPKEGGGVYRETRTFETMTGELLKLSDWLLEKRVTHAAMESTGEYWKPIFNILEHGFEILLVNAQHIKTVPGRKTDVKDAEWIAELLRFGLLKASFVPPEGQRELRELTRFRSTFIQERATLVNRLQKVLESANIKLTSVVSDINGVSGKAILKALVEGTSQPEDMAELAKGRLKEKREFLVRSLEGRVKPHHRFLLSELLCQLESLDESIHRFDQQIEEYCHPFEESVILLDTIPGVARKVAEVIVSEIGTDMSCFPTADHLASWAGVAPGNNESAGKRLSGRTTKGNRALVSALTQAAHAAARTKHNYLSSQFHRLAGRRGKKRAIMAVAHSILVIAYHLIKSKEPYHDLGPDFLDKRNSQATAKRLIYRLHEMGYNIRFDFPAGVVA

SEQ ID NO: 58117 - protein, 422 aa, unidentified
MSKRRYHSVECKHVDWKALSERIAGEAAVVFAVDVAKHDFVGLLCCPGGEVLARVRWRHPEETRELLAGIARLGAVTRVEAVMESSGTYGDALRWQLGRLGVALYRVAAKRVHDAAEVYDGVPSLHDAKAVELIGELHGRGCSEPWPVADAPRRALQAELRMLQQCKQRAQALRNRQEALLSRHWPEVLTLLEPGSLTLHHLIATFGGPEQVTLLAPQAEALMRRIGRQGLGEETIAAVLASAADTLGLPCVLEERELLRWQAKALIETHAEMGRLERRIAETLGKDAALATLPTCLGRVTAAVLLASVGSPANYPNAGSYCKALGLNLKERSSGTHQGRLAITKRGPPLARFYLYFAALRLIAREPVVARWFTRKTARPGALKGKQVVELMRRLAKGLWHHVHGQPFQIEKLVNPHGALAP

SEQ ID NO: 58118 - protein, 304 aa, unidentified
MFGIGIDVSGENLDVAVHEQAFRQFKNSKRGWNSLIRWLQQWPAKQVVLEASGGYEQKALDALHEAGLPMVRINPGRGRSFASATGKQAKTDRIDAMVLAHMADALKLTRYVPPAAWQRRLGELCQRRRHLVQMRVSEHQRMRAFSEPGLISMLNQHLREIQKSIKQLDATIAALLAEQEGWRDFAKLKGAGPVLMATLACELPELGKLSGKAISALVGVAPMNRESGTWKGRRSISGGRAVVREALYMAALTAKRYEPRLKEFFESLVKQGKPGKVALVAVMRKMLVILNARKRDAEAQMASA

SEQ ID NO: 58119 - protein, 411 aa, unidentified
MSESHNPTALTYAVFCGVDVGKAEHHACALDPSGVKLHNKALPNDEAALTAVLSELMAHGRVLVIIDQPASIGALTIAVARNLSIDVAYLPGLAMRRIADLHPGEGKTDARDAYIIADAARTMAHTLRRVGTDDETLAGLRVLAGYDDDLAAQSTRLSNRLRDALLHVHPALERLLGKHIERGGVIDLLVDAPTPAALRALGEDGIRTVMATRSPRLAKTLPAMIGGTLHTQTLVVPGTTEFGRVIAGVATQLRQVRTERTALAADIEARLATHPLAQVLTSMPGLGVRTASKILTIVGDGAAFPSAAHLAAYAGLAPVTRRSGSSIRCETRSQRGNHALKSALFLSAFASLADPTSRSYYDKKRAEGKRHNAALICLARRRVDVLFAMLRDHKPYQPPITTSPVPDTLAA

SEQ ID NO: 58120 - protein, 347 aa, unidentified
MRFYTQQHDYYCGIDLHARTMYVCIISHDGSVVVERNVPARPGPFLELIAPYRDDLVVAVECIFTWYWLADLCHEEGVHFVLGHALYMKAIHGGKAKNDRIDAGKIAMLLRGGMIPRAYVYPRPMRSTRDLLRRRLHLVRHRARLLAHIQNTNHQCNHEDFRKKLTYKANREGVAEQFDDPSTRKSVEVDLALIAHYDGIIRDLELFIVRMAKQHDTDMFHRLRSITGVGKILALTILYEVHDIARFETVQQFASYSRLVKCSRESAGKRMGTGGAKIGNVHLKWAFSEAAVLYLRKNPKGQKYLARLTRKHGKGKALSILAHKIGRATYFVMTRSRNFDEKKFLAA

SEQ ID NO: 58121 - protein, 357 aa, unidentified
MRKNKQRELTIGVDLGDKTSRYCVLDREGNVLFERSTATTKKGLAQAFASMGASRIAMEVGTHSPWVKRLLESWNHEVIVANAHRVRLITESTRKDDRLDARKLARLARVDPELLSPIRHRSEGAQAHLVMIRARAALVEARTKLVNSARGVTKSFGERLASCDPDQMRVKCLVGLPSSLESALQPLVTAVESLTRQIHEYDNKIAQIARSEYPETARLRQVTGVGELIALTYVLTLEDPQRFGRSRDVGGYLGLRPKRRDSGASRPQLRITKEGDVYLRMLLVQGAQYILGWHGVDTDLRRWGLKLAARGGKNAKKRAVIAVARKLAVLLHRLWITGERYEPLRQSQAASSLQVAV

SEQ ID NO: 58122 - protein, 450 aa, unidentified
MAKPKRRNHRKLDRSLPEMRPNAGGIDVGATEIFVAVPADRDKDSVRSFPTFTQDLHELTDWLKQCRVDTVAMESTGVYWIPLFQILEARGIEVHLVNAQHVHHVPGRKSDVLDCQWLQYLHSVGLLKASFRPEQAVCEIRSLMRHRENLVEMSCVHVQHMHKSLDQMNLQIHHVISDITGVTGLAIADAIVAGNTDPKELAKLRDHRIKASVETVTKSLVGDYRAEHIFTLKQSLTAYRHYQQLIADCDQEVQQRIQAFDSKNAGPSAPADASPSAAADPPRFDLHSHLARIFGVDLTLIPGFECLRIQTLLSELGADLSKFPTPDTFCSWLNLCSKDGSSAGRRIRAPKVKTKNRATQAFRFAAQSLHNNQSYLGDYYRSQRARHGAPKAIKNTAHKLARIFYHLVTTRQPYDETVFAKLEMRKQQQRFRKLQSLANRMGYSLVEVHA

SEQ ID NO: 58123 - protein, 343 aa, unidentified
MAHYVGLDVSVRHTSICIVDETGRIVRETRVSSDPEAIIPILRAPTIDCRRVGLEAGPLSQWLFSGMAEAGLPVICVETRHMKAALAAQVNKTDRNDARGIAQMMRVGLYRPVHVKSEASQEKRTLLAARKLLQRQNRAIENDVRGLLRSFGLKVGSTSAGAFDARVRQLVDGLPKLTAIMRPLLEARAVLGSQFATLHRMLLDLVRDDPVCRRFMTVPGVGAVVAITFQATVDIPQRFASSKAVGAHFGLTPRAFSSGETEYVGCISRCGDALMRATLYEAAFTLLTHTQRWSSLKAWGIRVAQRRGLLKATVAVARKLAVILHRMWVDKTEFRWSAGSATA

SEQ ID NO: 58124 - protein, 338 aa, unidentified
MTILMGLDQHRAQITTEWVDTSTGEISRARVGPADRAGVRRFLARFGGRQLEVALEATTGWRFVVEELHQIGAVVHLAEPADTAALKGNKKHAKNDRADARHLRELLMAGRLPESWIPPAHILDLRARVRLRHTLSEDRGEWQQRIQSVLYHHGCPQRGDLINQAGLAWLAALPLPACAREQVATALQMIDALDRQLAPLDQELRRYARRQAGCKALRRQYGIGPVTAVTILAELGDPGRFSSSREAVRFAGLDITVHASDQRRAPGHLSRQGPPALRWALFEAAQCARRPNSPDHAYYQETAKRLGGNRACLSVARKLLKRSYHMLRELGEEALQPA

SEQ ID NO: 58125 - protein, 362 aa, unidentified
MTRYIGLDVHQASCTLAVVGTSGKRLGSHVVETNGQALVELVRAIPKPRLLCMEEGTQSAWLYELLLPHVDELVVAGVSESRGAKSDLRDAFALAEALRLGTIKIRVFKAPAQFARLRELSHTYTMISRDVVRTQMRIKALFRARGLSTSTSNVYSKKSRELWLSKLTASSLTAGELLFAEFDALRELKKQAQQQLVSESHQHSITQILETCPGLGEIRVAQMVPVVVAPGRFRTARQFWSYSGLGIVMRSSSDWVLDKKQDRWVRADTLKTRGLNPRHNSTLKGIFKGAATTVITKLTTDPLHEHYERMLKQGTKPNLAKLTIARKIAAMALSMWKAREVYDPARQHKQQLTLASRQQPLQ

SEQ ID NO: 58126 - protein, 404 aa, unidentified
MIFVGIDWAEAHHDVCVLDEQGRVLAKGRVTDDVEGLGRLHAIVAEHAEDPGEVVVGIEIDGGLLVGALIAAGYRVYAINPFAASRYRDRHATSGAKSDPGDAKVLADLVRTDRQNHRQVAGDSDLAEAIKVLARAHQSLVWARQRQVNQLRNTLREFYPGALQALRGDLASHEACSILGMAPTPEWGRRLTRARIRRSLAASGRTRNLDRRTEQIYRALHVPQLEAPPVVAEAYGQVVGSLVLVIDGLTHQIGQQERQLAERFEGHPDAEILRSLPGLGLILGARVLAEFGDDPTRYEDARARRCYAGSAPITRASGTRLVVLARVARNRRLADACYLWAFSALGASPGARRYYDARRARGATHHQALRALSNRLVGILHGCLTHRCRYREDVAWPGSLEAVA

SEQ ID NO: 58127 - protein, 420 aa, unidentified
MMTNDYTVAAGLDVHKKFIQATILWKNGTKIQQQFDRTVQGILALRDWILEYKCDVVACESTSDYWVKIYDEVSEHVPMVVGNAHDIKVLAHKKTDKIDSEMIALLALNKMIQPSRVMPRYHRNFRKIVRLRHFLVRKRTDIKNRIHSILDGELFHLSRILTDIFGVSGQRIMQGILAGASADDILAMIHSRIRAKNEEKLREVLSHDLSPSALMQLGHCLQTIKVLDEQIAALTKAARSYVMKKHPREFQILCSVPGIGDIGAITLIAEIGDFKDFSSGEKLASWLGLVPKVYQSANHIMKRSITKRGSRLARWIMTQIAHAATRSRENVLRDWYETKKPIIGAGKAIIGLSRKMITIIWHLIVNDEVYVDTYSKEEETEPKKVHTIHIPASPEYTLEQIVALISDAITTLRKRDPDPT

SEQ ID NO: 58128 - protein, 341 aa, unidentified
MKNLFIGVDFSKEKVDVAIIFADGLTETAARVFNEFKTTVSDYKQLVKWVEQNSYGIDSSLWLFCGENTGDYSKGLCNFLYGKGYDMWLENAKSIKDASGLRRLKSDRADASMIAEYAMRNYDKAIMYEPLSESLAQLRELFLYRQMVVRHRCSFQVRRGEKRLTMEKSPIKTMISQSGRHIVSELNKEVEKIDKRIAELIKSDEELTEVFTIVTSVPGIGTQNAVCLMVYTDNFRRFNYDSRKISCYYGIAPFGKDSGTSVHSDPRVHYMANRQIKAMLTQAALAAVNFNPVMARYYMRLVERGKKKQVALNNVKNKLVHLVTAMVRNRQLFSPEYKISA

SEQ ID NO: 58129 - protein, 343 aa, unidentified
MEYGAIDLHMRRSQIRIVDADGTAVLERRIDTSRAAFDAGFGARPPMRILIESSTESEWVAQHLEQQGHDVIVADPNYVAMYGTRSRKVKTDKRDVAALAEACRTGVYRRAHRVSAPARHLRQQMRVRQHLVDLRRRTINLVRALVRQDGRRVASGSAERVVARLDQLALAGPLAAAIAPLRTSLLQVTALLAAVEQAVEARAADAPTQRLMTAPGVGPVVALTFQAVLDDPQRFGGSAARASAFVGLVPSEDSSAERQHKGHITKTGPRDLRALLVQASWVIWQGRSQAGAALRTWAQTLAARRGRRIAIVALARRLTRILYAMWRDHRPYQPPAHATTMAA

SEQ ID NO: 58130 - protein, 403 aa, unidentified
MFNLPLFVGIDYHKETIQVCVMDQTRKILANQTVKNDPEAVFRVVAPYGSNIHAAIEASTGVADFAEILISQHHWNVELAHPGYVNRMKQTPDKSDWTDAKLLADLTRAGYIPRVWLAPKYIRDLRDLVRHRHGLCEQRKQVKLRLRALLRHHRIVPPHRPWTIKGKQWLLDSKNIESPHVLFLLQDHYDTIEYFDKKISTVENKMWQDVADDAVVKRLRCQVGIGPITAVTMRAIIGHFDRFRTGKQLAHFCAVCPRNDSSAGKATTGGLIKAGDDLLRQVLMEAAHRLIRYDEHWRTMATRLRANGKKTCEIVAAVANRWIRKLFHQMCEPTSSGDATIGFSRHDQKSNLESAVESKSSDAEAQSPQTPEVRCDRHFSGTAIPSPVAPQQSRRPFRGAKKV

SEQ ID NO: 58131 - protein, 410 aa, unidentified
MKVAGIDVHKKVLMVVVVDASTPEEKPARRRFVTMPSELHRLLMWLREQGVEEAVMESTAQYWRSVWLELEPHMRLHLAQAFSNRAPRGRKHDFKDAERLVRRLMANELILSFVPNSEQRIWRSMTRMKLQLTRDRVRLQNQIECLLEEMRIKLSIVVSNLLGASGLRILHALAEGETDPKKLAQLGDERLQCTEEQLVDALTGRVQPVHGEMLALQLQRLQLIDQQMAELNRLIAQAMKSHQDAVIRLAEVPGLGVDSAQQIIAEVGAQASTFPSAAELTSWVGTCPGKEESAEQNHSSRSAKGNKYLRRVLNQAAHAAVAKKGSHFQTVFRRLLPRLGYQSAIWAVAHRLCRVVWKILHEGLRFIEQGHDVGPREKKKRAQMLARALRKLGYEVTITPINQVAVSTAV

SEQ ID NO: 58132 - protein, 356 aa, unidentified
MSHDVKYIGMDVHKEAIVIAVLNESGKLVIESVIETKASSILQFLHGLRGELHVTWEEGTWAAWLYDLLQPQVQHIVVCNPRRNALLKEGSKSDKVDAHKLANWLRTGMLRPVYHGENGLRTLRELGRSYQTISKDLTRVMNRLKALYRGWGIPCAGTQVYAARAREQWLSKIPHTGVRRRAELLYQQLDGLQALRRNVRPELLAESRKHKAAKLLRQIPCIGPIRAARLIGLMQTPHRFRSKRQLWTYSGLGIETHDSAQYCFVRGQVQRSKKPQQVRGLNRNHNHEMKEIFKSAATRASCGRGPFHDFYTGLLAKGMKPEMARLTLARKIAAITLTLWKKEERFDVEQLKTQAA

SEQ ID NO: 58133 - protein, 338 aa, unidentified
MNDLIRIGIDTSKSVFVLHGVDRSEQPVLRKKLRRRQVVEFFAALPPTRIGMEACGAAHHWGRELTALGHDVCLLPPQDVKPYVRRNKNDAADAEAICEAMSRPRMRFVAVKSAEQQAALMLAGVRDQLVRRRTQVSNSIRGYAAEFGLVAAKGHDKIEPLLARIAADETLPELAGELFAELGEDYGRLTLQLRKIDARLMAWHRQNELSRRLAEIPAIGPVGASLLAMKVPNPAAFRSGRDFAAWIGLTPKDHSTAGKTRLGAITRAGDEHLRSLLIVGATAVLQQVRRGRGYSSPWVSALIKRKPPKLAAVALANKTARIAWKLMVSGQHYNHPRA

SEQ ID NO: 58134 - protein, 457 aa, unidentified
MSQKKKSRTARHWSPVHPSAAAIDIGATMDVAAVGPDCDEQPVRTFRTFTDDLERLADWFAGCGIKTIAMESTGVYWIPVFEILQQRGFEVIVVNARDAKHVPGRKTDVSDARWLQRLHEYGLLRASFRPQAEIAGLRAYLRQRERLLDYAASHIQHMQKALMQMNLQLHHVVTDITGVTGMAIIRAIVAGERDPAVLASHRDRRCHATVETVCQALVGNYRGEHIFALTQALELYDVYQTKVAACDKQIEDILMRLRQTAAPPATKLLPARQRTRQPNAPAFDARGALHAILGMDLTQIDGLGPSLALKLVGECGTSLAAWPTAKHFTSWLALAPHNKISGGRVLSSRTRRTSNRAASLLRLAAGTVGRTDTALGAFYRRLSARIGKAKAITATARKIAVLFYNTLRHGMAYTDPGATYYEDRYRQRVLHNLQRRAKSLGFVLEPLDPEAVQAGVS

SEQ ID NO: 58135 - protein, 411 aa, unidentified
MKNNIKATKMQSAKKQPVKVQITRVVTKKGSREIEHLSERMKHPMRDRGSQARAAKEVSFYVGIDLGDKKSNYCFLDAKGNIFAEGTLGTTQAELSELYSSIPKCRIAIEVGTHSPWICALLKSHGHEVFVANPRKVEAIHKNRRKNDKVDARTLARLVRADPELLYPIQHRGDQARQDLVLLRAREGLVAARTKLINCVRGQVKSVGGRLPSCSAESFHYTVAEKLPDSVKKALLPLVLQIGEMSKGIRAYDAEVVRMSNQKYPETERLQQVRGVGPITSLTYILTLEKPERFEKSRDVGSYLGLVPRQDESGETSKQLRITKTGDKMLRQLLVSSGQYILGPFGEDCDLQRFGLKLAERGGKNAKKRAVVAVARKLAVLLHRLWLTGEKYEPLHNAHLQAKTLAIAVNA

SEQ ID NO: 58136 - protein, 420 aa, unidentified
MAPLSDQQFTAYVGIDWADTKHDICLQAAGDIRREFDCIPHQVARIDEWAKSLQRRFGGPIAVALELAKGPIVAALQKYDFFTLFPINPSTLAKYREAFKPSRAKDDPTDAELALDLLLRHPERFAPLRPQGVAMRSLLSLVERRRDLVGDQNRLTNRLCDTLKQYYPQALEWFDDRGTVLFCDFLTRWPTLLAARRARRTTLEAFFHAHNGRRANLIEARLESIRGATPLTEDPGIVAPCRLYVLALVEQLRTVLTAINGFDREIAMVAGTLPDYALFQGLPGAGPQLAPRLLAAFGEQRERFHGADELQKYSGIAPVTERSGKKSWVHWRWQCPKFLRQTFVEWAAQTINKSFWAGAYYRQQRAKGSSHQAAVRALAFKWIRILYRCWQTRTSYDETTYLNALRKRGSPLLRNLGLAG

SEQ ID NO: 58137 - protein, 398 aa, unidentified
MKMPRPLRERIIEMQVMMEGQSHFQPFGVPYWGRQDLNKGVGSMTASYEYHIGVDYHKSYSHLVVQDSVGKTLRSGRVKNDRQSLGGFLERYRENSHAVVEATRNWMVIYDWLDDICDDVVLAHPLKVKAIADAKIKTDKIDATVLAHLLRADLVPEAWAPSDKARELRVALRERMFYVRLRTMVKNRIVTVFDRYPEQTAQLKKLGDLFGKAGRVQLAQVKVSEIDRIQIDRGLDFIGDIDVRIKQSEATIRAMTRANGNVKLLKTIPGIGEFFARLIDAEIDDIKRFRNPKKLAAYAGLVPSTYSSGGKTFHGKIIRQGNKWLRWAFVEAVTPAIVTDPQLRAQYEHLKLRGVNKARVAIARKLLTIAFQILRDQRAYEPRGESTTEGASTISRLS

SEQ ID NO: 58138 - protein, 378 aa, unidentified
MNRIIKIGMDVHTSNYTLCIFEPSFEHDGTVHCITQVKPEVKNIIHVIETFKKKHENEELNIVCGYEAGCLGYSLYHELKEKGIECVILAPTTMKTEKGGRKLKNDYRDAKMIAECLAYGGYSAVHVPTELDNSVKEFIRMRDDIKDNLKSIKQQIIAFLTRNGKQFEGKSYWTRKHIDWINTVSFSEPLLQDTLKEYMIEYNHLCNRIETLDRQIEEISLKEEYVEKVQQLQCLIGIKTHTALSLIVETSDFNRFKKGNMYSAYLGLIPGDDSSGGHENKLGITKAGNSHLRRLLVEAAQGYTRGRVGFKSKDLKSRQEKCSSEVVAYADRANERLRRKYYRMTLRGKKFNVAKTAIARELACFVWGIMTDHIDLCN

SEQ ID NO: 58139 - protein, 347 aa, unidentified
MEHIGMDLGKRESQIAILTEGGELIEKRIRTERPRLGEVFGDRPRARILLEAATESEWVARCLEALGHEVIVADPNYAPMYAQRSRRIKTDRRDARALLSACKSGTYKFAHRTSDARRHLRALLAVREGLVRTRARWISLSRTLLRRDGFRIRSGAPESFLARVAELAVPAPLRAEIAPLLTLVAPVTDQIKALDAQLAALVHTDEVLQRLTTVPGVGPVTATSFVATVDDVQRFRGAHQVQSYLGVVPQEWSSSETQRKGRITKAGNSRTRWLLVEAAWTILRGRKQSDTAPLREWAERIRQRRGGPIAAVALARRLAGILYAMWRDQTEYDPAKLRRGGAVQRAA

SEQ ID NO: 58140 - protein, 358 aa, unidentified
MRKSSEAKGHRTVGLDLGDRQSRVCELDTASGEVVAAYSVAMNAAALTQRFADRPAMRIALEIGTHSPWVSRLLSELGHEVLVANAYRLQLIYASQQKSDAVDAESLARVARLDPDLLRPIRHRGVKAQADLSVLRARQAAVRCRTRLINHLRGAVKSFGGRLPAAGPEVFANKVAPAVPEPLRAALEPLLGVIAELGGTIHGYDQAVEALATKQYPETQRLRQVTGVGALTSLAYVLTLEEPDRFAKSRTVGAYLGLTPGSRSSGQSQPQRPITKHGDRLVRTLLVQSAHYILGPFGKDCDLRRKGEQLAQRGGKNAKKRAVVAVARKLAVLLHRLWASGQPYAPLRPGPLVPVATG

SEQ ID NO: 58141 - protein, 326 aa, unidentified
MRMFIGLDVHKNYLQAAVLDAEGHLVKQQRIANSRDELVNFFQPFDKAKVVIESSTAWYPIYELLSDKYEATLSNPARTKAIAQAKVKTDKIDALTLARLLRGGFIAESYVPPRRIMDLRELVRYRASLVRLRTMVKNKIHAQLLKRGIRIDAYPFTKAYNATLTAIGDYKIDGYLKILESLNLQITETSNRIKQTAEDDEASRLLMTIPGVGYYSALLIACEIGDVNRFPDSAHLCSYAGLTPSTHSSGGVTYHGHITKTGSRHLRWILTECARTHIRLNPDSNVTRFYLKLAKRKGDAKATVAASTKLLKIAYWLLKEKRPYHG

SEQ ID NO: 58142 - protein, 375 aa, unidentified
MKEKLRFLGLDVHAETIAVAIAESDGEVRSLGTIPNRLESIRKLIKKLGPTEKLRACYEAGPTGYVVYWQLAGLGVKCDVVAPTLVPVKAGDRVKTDRRDAEKLARSHRSGDLTAVWVPDEGSEALRDLVRTREAAKQDQLRARHRLSKFLLRSGQRPPTGIRPWTRPYLIWVAQLRFTQMAQEATRLDYLHEVEHMRERVERLERAITEAVKLASPALQQVINDLQALRGIADISAVTIAAELGQVSRFDGARQLMGYCGAVPSEDSSGKRTRRGSITKTGNAHLRRIVVEAAWSYHRPPCIWYGLRKRQESISEEVKEIAWKAQHRLHKRYMRLAAAGKDKRKITTAVARELLGFIWAIGTRAETTVRQRITA

SEQ ID NO: 58143 - protein, 368 aa, unidentified
MSNHPHYKVGCDAHKHYSLFSVLDDHGHLIQRTRVNHEPGAIRAFLSQFPPGTPVALETVGNWYWIVDEIEDAGCLPLLAHAARAKSMMGHVHKSDKLDAAGLATLLHLGTLPAVWIPPGDLRDERELPRTRMAFSKVRTMLKNRIHSTLAKYALSLDTDSDIFSPKWRPQLLQVLEHLPAETHRCVAQELELLDLLQTHIQRLEERILQRVEITPAIQLLMSIPGPAEILSIVIDRELGSIQRFPAPKHLASYSGLVPRLKASGGKVHYGRMIKQANNYLKWAFIEAANVIVRQRHHRNWRDKSVVGLYERIRQRKGHAVAVGATARYLAEAAFWVLKKGEPYREPLPRHPAGLKSPASPRQGQARA

SEQ ID NO: 58144 - protein, 347 aa, unidentified
MQLLKHVIGIDIAKDSFTAASGSIDIEQTKTVSSAGSYKNTPGGFASLEKFIRQEHQRFVAVNGGTALPLWIVMEATGVYYERLAVWLHERDYAVVIVLPNNITHFARSDNRKSKTDAIDANTITCYGLEKSLKPWQPASTLMLELKSLTREHDSTTRELTEVRNRLHAIEHAAHTPKPTIRRLRQQRDLLKKQIKQIETEIKDLIETDPELKESLACMSSIKGVAMMTVTKVLAETDNFTLVERSSQLISFSGLDPVLRESGSSKGKVMISHKGNRMIRSSLYMPALAAIRYNPQMRAFYNRLLERGTVKKKAIVAVMCKLLRLMYTLWKKRERFDPTFGSTALAA

SEQ ID NO: 58145 - protein, 344 aa, unidentified
MQITTIGLDLAKNVFQVHGINSAGEVVVKKTLRRVQMRRFFEQLDPCLVGIEACGTSHYWAREITKLGHEVRLMPPAYVKPYVKRGKTDAGDAEAICEAVTRPTMRFVAIKAPEQQAALALHRTRDLFVKQRTQLVNMIRSLLAEFGIEIRRGIEQALTLAKRIAAGEVPDIPPLAAKVIAGLAGQVLDLQARLGEIERELLAWHRSNDIAKRLSTIPGIGTVCATALAASVTDPHQFRSGRQFAAWLGLTPLQHSSGGKERLGRISKMGDKYLRRLLVVGMTSLIRRAKYKPEAVDPWLADLLSRKPARLVTVALANKAARVVWAIMVRGGVYRRPAGVMTPV

SEQ ID NO: 58146 - protein, 323 aa, unidentified
MAEETKEVFVGIDVSKEQLDVAVGEDGAFWSISNDGDGLQKLVERLKAQSPTLVVVESTGGLETPAVAEMAAAGVPVAIVNPGRVREFAKSVGLLAKTDKLDARLLARFAAAVKPPASRLPSEEEQYLTGLVRRRRQLIDMRTAEKNRLGTTRLAFRERIDNHIAWLNEEVEAINEEIDDFIQQSPLWAKKEAILQSTPGVGPVTARTLLAELPELGQLDRKKIAALVGVAPMNRDSGPRRGKRRIRGGRASVRCVLYMAALSASCSNPTIRHFYHRLLNNGKDKKVALTACMRKLLVMQNAMLRDLEPWHPNPFLGSFALDS

SEQ ID NO: 58147 - protein, 358 aa, unidentified
MKIIGCDYHPSFQQIAMLDLSTGEYSELRLLHAGGEAQRFYESLRGPVRVGVECTGNMLWFERLLQKLGHELWLGDAGVIRAKAPRKQKTDVRDARHLLQLMQENHFPRIWVPSVAERDLRQRLKHRHTLVQMRTRVKNQLQHIALNQGMQKKGKLWTQAGQELLRGLELDRWTGRRRDDLLHLLAYLEKQIRELDQAVKAEAEQRPQVRLLMTHPGVGPVVGLATVLTLGEVGRFPRGREVASYVGLIPSEDSSGQRRRLGAITKQGSSFLRFLLVQAAASAVKGDAEWARAYKRLARKKHHGVAKVAIARKLVVRLYWMLRTQTRYPEVVRMSGSPSHPVARSQAERLSGHPASRE

SEQ ID NO: 58148 - protein, 422 aa, unidentified
MQVLYERCAGIDVGKDVVAVAVRRPGSGPGGRVTEKRTYKTFYGVLAEAARWLVSQDVTHVAMEATGIYSMPVYHALLEHGDFEQVLVCNAGHVKNVPGRKTDLADAEWLAQLLECGLLRGSFIPPADVKAVRDVIRYRAKIAQQRVSEIARLGNVLQDAGIKIDSVASSIATKSGRLMIESLIDGERRGQVLADLAIGKMRAKIPDLSMALEGRFGEHHAMLCRLHLDHLDHLDGMLAALDAQVEKMMRPFHAARDLLITIPGLGPLSAAAVISETGADVREFFPDAAHLASWAGLCPGNHESAGKRHSGKRRPGNQHLQPVLVEAAWSAVRHDGYLKALYHRHVMKWGGYRSPVAKNKAIIVVAHALLVITWHVLATGKPYADLGADYFTRRQDPDRETRRLIARLEALGHHVTIEAPAA

SEQ ID NO: 58149 - protein, 356 aa, unidentified
MVAVVIGVDPAKRSNTIEVVDPGEAVLVAARFENTNVDYRKMLALARRWPERRWAVEGATGVGLHLAQRLVSDGERVVDVPSKLSIRARAIDTGHGRKNDPSDAHAVAVVGLRTRGLPEVVVDDQTVAMRLLSERRRDLVRSRTQAVNRLHQVLAELVPSGAQRHLTVARARELLGTVRPRDAAGRARRQLAVDLVDDTVVAERKIKAVDARIAEAVAASGTHLTDIVGVGVVTAATILAEVGDVARFATADHFASYTGTAPLEASSGEVVRHRLSRAGNRRLNSALHVVALSNKRYDPRGKAYYERKLAAGKGTKGSLRCLKRRLSDVVFRVLVEDRAAADPGGADGGDTHSQRG

SEQ ID NO: 58150 - protein, 343 aa, unidentified
MKRNTIGLDLAKNIFHAVGFDHRGKQIFRKQLRRNQVTNWFAQQPVSLVGIEACGGSHYWARTLMALGHEVKLIAPQHIKAFVRAQKNDYNEAAAIGEAVACPRMRFVPIKNAAQLDLQALQRLRTRLIRERTGLSNQLRGLLAEHGIVIPRSLAILRRRLPELLEDADNGLSVFFRRLLHTGWQHLLQIEDQVKTLDRELNGAVAEDEDCQRLMTIPGFGPVVASGFSVTVGDGHCYRRGRDVSAVLGLVPRQHTTGGKPKLLGISKRGDNLLRANLIQGARSVLMHAKGKEDPLCRWALKVSAERGFNKATVAVANKLARIGWAVLKNQTTYQPDHRLQTA

SEQ ID NO: 58151 - protein, 441 aa, unidentified
MEIIIRLTRFYKKLQELLIRNFLLFCIRFIKHPVRQYVVSPDFAKTWILLQNGDKAITQTEALPKCKRRHNMESIIYVGMDVHKDTYSICCYDPKTDRYLYEHKMKSTTANVLKYLDNVRKQLVDVSFICGYEAGPTGFGLCRDLLKKDIACVVMAPTSLRRSSCHKVKNDKVDARLLAKDLFTHDYSPVHISSQKEESIKEFCRMRRSLMTEVKTAKQILTAFLLRQGKHYEGKTHWTEAHRKWLKELAFDQPYLQEAFEEYIIGLNSLETRLKRVEKRLDEIADDEEVGAKVKKLICFCGIDTLTAVSIVSEVGDFMRFGRAWDFSNFVGLTVGEDSSGQREKKLGITKSGNCYLRRLFIESAKSIKRTNVKFSKSKRLLARQEGNDPKVIAYADKCRYRLKHKMLNLENRGKAANVASTAAARELACFVWGMMTDNIA

SEQ ID NO: 58152 - protein, 335 aa, unidentified
MDSTKYVGMDVHKDTMSIAVMNSAGKVVMESVLETKAVTILQFIQGLRGNLLVTLEEGTWAAWLYDLLKPHVTKVTVCNPRKNALLKSGNKSDRIDAQKLAELLRNGSLSAVYHGENGLRTLKELSRSYLTISKDLTRVMNRLKALYHSWGIAGAGTQVYAPCHRLEWLSKITEVGVRGRAEFTYQQLDGLQALRQGVRRDLLAESRKHQATKLLRQIPGIGPIRAALLVALLQTPDRFRTKRQLWAYSGLAIETHGSGEYRYLEGQVRRSKKPVALRGLLYRYSPIQVQGCDASRMVISPLLGEERWSYHVPSSFVHGCTAHDVVRDVLLGFVG

SEQ ID NO: 58153 - protein, 353 aa, unidentified
MKGKTETTTASLAVVGVDIGKEVFHLVGLGTDGTIAFRRKIRRSNLKDVFEQLPPCVVGMEAWLSAHFVSRTLRTLGHEPRIIPAIYTKPFVKGQKNDYNDAEAAAEAALRPNLRVVQEKSQNQLDLQACHRVRSRLVSRRTATSNQIRAFLTEQGIAVRAGARALRKSLFAILENRKDEISPRMAKLIHGLYEDWCCLDEGIETVTREIEELSRVEPKCQRLMSVPGIGPLVSTALVAAIGTGETFDRGRDLGARLGLVPRQYSTGGRSILGRISTRGSRYLRMLLAQAARVLLMRPHTWSRFSFGAWLSTASERLHRHKLAIALANKLARIAWSVLRHDKAFDTHLEIAAI

SEQ ID NO: 58154 - protein, 405 aa, unidentified
MQVYTGIDWSENKHDVIFMNEEGAVITYLVIPHTPDGFRKFDDTRKKYGIAPADCLVGLETAHNLVIDFLWSRNYSQVYVIPPNVVKSCQGRYRQSGAYTDESAALLLADLLRTDRHRLQPWHPDLPVTQQMRAKISFLLYLTRLAVRLSNRLRAILLRYYPAAVNLFSSLDGVVTLEFIHAYPTPQAAAALSKEEFVAFARQHGYIQTKYLPACFARLQTPQPEASPAVIESYRMEAVSLATLLLNTVRTKKATYRELESLFVQHPDHDIFASLPGVGKLLGPALLVKFGDDRDRFPSPASVQALAGTCPVTKQSGKYKYVQFRKACDRDFRYITQQWALHSLDVSVWANTYFQGVRSRGHSKSHALRCLANRWLAVIWKLWQTRRAYDEGYHLRQQAKRRKPK

SEQ ID NO: 58155 - protein, 411 aa, unidentified
MQQIYGRVAGLDVHRDNVVACFRRLGPRGGVVFEKERFGATTARLRELEAWLAERQVELVAMEATGVYWKPVYYALEAKFAVWLCNARHVKKVPGRKTDLTDAEWLADVAAHGMIRPSFVPPPPIRELRELTRYRKTQSAARAAEIQRLEKVLQDAGIKLTSVASRVLTQSGRAMIEALIAGERDGARLAELAMGKMRPKVPALTEALTGHFGSHHAVACGRILGHLDFLNASIQALSEQIDARTAAFASVYTSLLPVPGFDRLSIDVIIAETGADMSRFPTPGDLASWVGVCPGSHESAGKRRRVGTTKGNPWLRQALIESARAAARTKGSYFGAQYRQIARRRGPNKAAMAIAHSLIELVWHLLSTGEVYKDLGDDYFTSRQDPERRARRLVAQLEELGFKVTLVAAAA

SEQ ID NO: 58156 - protein, 402 aa, unidentified
MNCVGIDVSKGKSTIAVMRPFGEVVVSPFEVCHTASELSELARLLKSLDGETRVVMESTGNYHAPVAWLLHGAGFYVSVVNAMLVHDYGNNSLRRGKTDKKDAVKLANYGLDHWLTLPRYVPEEDTRLMLKTCYRQYQQYSKVQTMLKNNLISLLDTTFPDANRLFTSPPRADGSEKWVDFVAAFWHCECVCGLSEKAFTAKYQKWCRKHGYNFSQDKALDIYASACGRFGVMPKTNTAKLLVEQAISQLQTTSSALAALKQEMQSLAASLPEYPVVMGMFGVGPTLGPQLLAEIGDVRRFHSKKALVAFAGIDAPPYQSGQIDVRSRSISKRGSASLRRTLFLVMSVILQCAPIDEPVYQFMDKKRSEGKPYRVYMMASANKFLRIYYASVKAYLESLEHD

SEQ ID NO: 58157 - protein, 419 aa, unidentified
MTQSAPHTFAAFVGIDWADAKHDVCLQAAGSAKRECCQLDHTPEAIDAWVITLRTRFNGQPVAVCLELNKGPLVFALCKYDFLILFPLNPLTLARYREAFTPSRAKDDPTDAELQVELLLTHRDKLTALSPQSPTMRALAQLVEHRRRLVGDKVRLTNRLTSALKNYFPQVLQWFQEKDTAIFCDFLSRWPTLKAAQLARRSTLEGFFRAHHVRAADVIDTRLQAITSALALTTDDGVITPHVLLVQALIAPLRVTLQAIADFDNAIAQRAQDHPDFPLVDALPGAGAVCAPRLLVAFGAQRERFASAEELQQSAGIAPVTERRGKKSWVHWRLQCPTFLRHTCVEWAAESTRHAFWAQVYSQQQRDTGKAHQAAVRAFAFTWIRILFRCWQDRTPYDESVYLQALKRRSAPLLHNLAN

SEQ ID NO: 58158 - protein, 349 aa, unidentified
MDATTVAVDLAKNVFELAVADSGGRIRAHRRLSRARLLPFFSNLPQCRVVMEACGSAHHFARRFSELGHNVTLLPAQYVRAYVRRNKTDRADAAALIEAARCADIHPVPIKTVDQQAIQQLHRLRTQWMRTRTARINLLRGTLREFGIAIALGAVRAIEQVRRQLAAPDGTVPAALLPSLHELLDEIAALEQRCTHIERQLRSLTQQNVVVQQLLGIPGVGPLTATALRAALVDVHRFPSGRHLASWLGLTVREHSSGERRRLGRISKQGDPYLRTLLIHGARAVLNAAQAARRRGQSLDRLRSWALSTHERCGHNKAAVALANKLARIIWATWKYERSFNANWALTAA

SEQ ID NO: 58159 - protein, 345 aa, unidentified
MTQYKRIGLDTSKAVFTLHGVDQQDRPLLRVSLRRPQLLAFFKRLPPTEIAMEACGSAHYWARELTSLGHEVRLIPPQYVKPYVKRGKNDRNDAEAICEAAGRPGMHFVPVKSVTQQAQGMVLKVRETLVGQRTQLVNTLRGHAAEFGVIVGKGIRQVAPLLAAIDAETTIPPEAKDMAALLGQEIEHLDTRIKEIEARLIAAHKANEVSQRLTTIPGVGPVTALTLATEIDPAAFESGRHLAAWVGLTPKEHSTAGRQRMGGISRAGNERLRVLLVIGATSVIKAAVRPGSKQMTDWLRALLQRKPRKVAAVALANKMARVAWALMMRGNVYRRPTAAAGAAAA

SEQ ID NO: 58160 - protein, 428 aa, unidentified
MNTPSDPSAFQDQFALFVGFDWASDHHDLVGVNRQGQILLDLAIDDDAEGWSQLRRCLLELVPAGAGQVAVAVETCNGPSFERLLEMGCAVFPLNPYEAKQYRGRKSPSGAKCDRLDAWSFADALRSDGHGWRQLLPDDPLTQELRLLCRDEVRLIEQRTALVLQLKATLHEYYPAVLEAFEDWVSPNAWAFVRQFPTPEQLVRAGKRRWEKFLHTHRLSRPEHYARRLEIFAQAQHFSGGGAVTRAKSRLALALVAQLEVLDKQVKAYRLAIEERFGQHPDRDIFGSLPGIGSKIAPRLLGEIGTIRQRFSDAQALQAYAGTAPLTKQSGKSRHVLFRQACNKHLRVAVHFLADLSRAKCVWAAVYYDRKKDLGMSHQAALRCLGQRWLKILWKMWQTHAPYDEALHTRNQTQHGSWIVSLKQEVAC

SEQ ID NO: 58161 - protein, 366 aa, unidentified
MRKISTVQTFGKEILNEQKLTIGVDLGDRWSFYCVLDEAGKIILEQKVATTPEAMKQTFGKIPRSLVALETGTHSPWVSRLLTELGHQVIVAHAQKVELITKSNRKDDRHDARTLARLARIDPELLGPVRHRSAKAQIHLTVIRVRAELVSARTALVNAARGLTKSYGERLPKCGTEQVSRELAAKLSAELREVLEPLLNEIESLNERIKEYDARMEKIARESYPQVALLKQVKGVGTQIALTYVLTLDDPHRFAKSREVGCFLGLKPGRRNSGESEPQKKISKEGDRYLRTMMVQGAHYILGPFGEDSDLRRWGMKLAERGGKNAKKRAVVAVARKLAVLLHRLWVSGEVYEPLRNSQKAMRAVA

SEQ ID NO: 58162 - protein, 348 aa, unidentified
MNATTKPVVGVDTAKSVFQLYTVDMETGEVICKQLKRAQFLSWFSNRAPCLVGMEACGGSQHWARQLQALGHEVKLMSGKMVKAFVSGNKNDAADARAVWLAALQPGVKAVAVKTEAQQAVLAMHRVRQQLVKMRTAQRNELRGLLAEYGEVFGLGKAAFNAGMKGVLARLAERLPAALIDTLREQWDELAKLDERITAIEARLLGWLRQDRASQAIAAIPGVGLLTATAAVETMGQASTFRSGREFAAWVGLVPAHTGTGGRVRLLGISKRGDTYLRTLLIHGARAVLMHAKTPNKWLQDIGQRRPPNVVTVALANKMARTIWAVLAHERAYDKEHVSKRPQTAMPA

SEQ ID NO: 58163 - protein, 416 aa, unidentified
MHVVYSSCCGLDVHKRSITACLLLSGSGGKGHHEIRRFGTMTRDLLELADWLQCHHVTHVAMESTGVYWKPVWNILEGQFEVVLVNAQHIKAVPGRKTDIKDCQWIAELLQHGLLRGSFVPPTPIRQLRDLTRMRTSLRQDHTAIANRMQKILEDANIKLAAVASDWLGVSGRAILSQLLAGEEDAEKLAELSRGRLRSKLPAMQLALEGRMTEHHRWMLRVLHEQLLFLEVQIAKLEAKIQDQLSDYQEAIALCTTIPGIEEVAAANLIAEIGVNMAQFPSAQHLASWAGICPGNHESAGKRLSGKPRKGSAWLRRSLCQAAWAASHTKDTYLAARFRRLAARKGKKRAIVAVAHTIVVSMYHMLKNKQPYRELGADFLDRRNAENVKRYLLKRLERLGLHVTVRSAEDTAPLPA

SEQ ID NO: 58164 - protein, 344 aa, unidentified
MLNSTIFGIDLAKNIIQVCEISKHGELVSNKAVTRQKLKELLAKAKPAVVAIEGCGSSHYWGRYAQSFDHDVRIISPKKVKGFLQGHKTDANDALAIANASLQIGLKSSKPKTEQQQTIQTLETSRFHLSRSITSLSNHLRAMLYEYGIVSARGVKALTTVIQDTLNDANSIPECLRSTVNQLWLTYLHLRKELAQLIKTKNALIRQLQPCKKLMDLEGVAEVCAGLLYSSIGDGKQFKNGREASAFVGLTPKQHSSGGKVFMTGIDRAGGIKELRSALYQGALSYICNLPDEPKTAKQAWLIKLVQRAGIKRSCIALANKTVRTAWAMLRHENKYEQRPLLAI

SEQ ID NO: 58165 - protein, 332 aa, unidentified
MEKPMQPQVSPFILGVDVSKDSLDVCLTRKNDGALQHQKFNNNREGFQRMKAWMKHQGCEAGTDTLCCMEHTGMYTRQLVHYLLARGVHVWLESALQIKRSIGMVRGKDDKVDAQRIARYALLHQQQARCLSLCGVTLERLKDLQASRNRLIKALKSIKGTIQELLPIDPVSAKTLEQVNRKAIKGLEKSKEQVEEKMQEFIAKDGELKRKYDLMTSVKGVGKVLAISLLVYTQGFCRMDDGRKLACYCGVAPFEYRSGTSVMGKTGVSKFANKELKQVLHMAALSSIRNNGEVRTYFERKVGEGKSKMSVLNAVRNKLLHQVVAVVKRGTP

SEQ ID NO: 58166 - protein, 350 aa, unidentified
MVVVGADVHKRTHTFVAVDEVGRKLGEKVVAATSCGHAEAVMWVRERFGPDVVWAIEDCRHLSARLERDLLTAGQQVVRVPPKLMAQTRASARTRGKSDPIDALAVARAFQREPDLPVACHDETSRELKLLVDRREVLVAQRTATINRLRWRIHELDPERAPKAASLDLAKHRAALAAWLNTVPGLVAELARDELADITRLTEAIDALAKRIGDRARQVAPELLALPGCGELTAAKLVGEAAGVRRFKSEAAFARHSGVAPIPVWSGNTAGRVRMTRSGNRQLNAALHRIAVTQIRLDGLGQAYYRKRLNAGASKPEALRSLKRRLARIVFHHLHTDHQNQTQACQPVAA

SEQ ID NO: 58167 - protein, 426 aa, unidentified
MNEVDIIRLEQFRQLKKEIRGSKEHLIVGIDVAKDKHNAFFGTATGKTLFKRLVFENTSEGFNRLLIQAEALKVQYGLKKTVFGLEPTGNYHKPLGEFLIKSDHMVVLMSGVAVKRNRELLDGRWDKHDTKDSANVSDLISQGKCLFYEYPSMALRDLRNLLSLKRRLKKQEHGLKVRIRNHLLAAYFPEFDRYYRQSDSQGLAIVRWCLDPSVIAGLKYDEFVRLVAPRTRTIGQRDRLKAIWKKASDSIGCDASESLEFEAKVMVEGLKHVQEAISEVNDKIEDTCCEFPEYSYLLTIPGFGPDVSSKVFGAIGDPFRFKTGKQVLKMAGLDLSAERSGKRSDTATPVISKKGKADLRYALYQAAMIASTRNKHFITYYTNKLRGREKEKGIKTKMRVKLAAKMLIIAWTLMKKKEVFYTPQAY

SEQ ID NO: 58168 - protein, 316 aa, unidentified
MKTDPVFVGIDISKASIDVELYPASDTKRFANDEVGRKQARTWLKQRAPTLIVMEATGGFEMPLAALLATAGLPVVVVNPRQVRDFAKAIGVLAKTDAVDALVLARFAQAVRPPLRALKSEESQALEAVLTRRRQIVAMLTAERNRLSKAATPIATQIEDHIVWLHLRLDEANDNLDRLVRNSPLWRPKADLLGSVPGIGRVVVSTLLAELPELGQLNRRQISALVGVCPFSRDSGARRGKRMIWGGRASGRAALYMAAICAARFNPVIKQFYQRLLAAGKPKKVAIVACMRKLLTILNVMLRTNASWRCELVQRG

SEQ ID NO: 58169 - protein, 329 aa, unidentified
MDPQLPLPVVGIDISKATLAVCYQVNQQVKHLEVSNDKAGFQQLLEACGAQCLFVLEATGAYYLALAYHLHEQGGQVAVLNPLVIRRFIQMHLSKGKSDRKDAQWLLRYGQQQTVKVWQPDEQVLVECRQLEQVNEQLLKQKTMVSNSLEALQQQPVISQLAHQHLQHTLQLLTQQVQAVEAELLGLLEQRFQAEMTLLCSIPGIGRKTAGMLLLFAGGFRQFDNYRQLIALAGLSPREHTSGTSVRGKVRITKMGGGLIRGKLFMCSFTAKKCNAACKALYDRLVAKGKNGKVALIAVCNKLLKQAFAIVKSGQPYQADFTSKLARNA

SEQ ID NO: 58170 - protein, 397 aa, unidentified
MTQAYAVFCGIDVGKGEHHAVGLDPSGQRLFDKALPNDESRLRAVFDQLAGRGRLLIVVDQPNTIGALPVTVARACGHDIAYLPGLSMRRIADLYPGQSKTDARDAHIIADAARTMPHTLRRVDTGDETLTELGVLVGFDDDLAGEATRTSNSIRGMLTSIHPALERVLGPRVAHPAVLEILSRCGGPEGIRAAGRRKLTTIATKHAPRMGTRLVEEILAALPAQTVVVPGSRSAESVLPKLADSLKTILLQRQQVAADIAEMLADHPLAQVLTSMPGIGVRTGARILLEVGDGTAFASAGHLASYAGIAPITHRSGSSIRGEFPSRSGNHKLKRAMFLSAFAALHDPTSRAYYDRKRAEGKKHNAALICLARRRCDVLYAMLKTKQRYRVPESPAA

SEQ ID NO: 58171 - protein, 302 aa, unidentified
MEHYAGIDVSLESASLCVVDATGRIIREAKVASEPDVLIAWFRGLEFAVTRIGLQAGPLSQWLYASMREAGLTVELLATRHVRAAFKAMPVKTDRKDARGIAQLMRLGWFRPVRCKSLLAQEVRALLTARKLLQTKNHDVEMSLRGVLHGFGLKVGPTTPRTFATRIRELVAGHPTLSTAAEALLAARSTLFEQWQQLEKRLRSLAREDHRVRLLTTVPGVGAIVGLTYVSAIDDPGRFRSSKAVGAHFGLTPKKYQSGETDVTGRISKIGDGGVCTALYEAANVILTRPVKGSTLKSWGCV

SEQ ID NO: 58172 - protein, 334 aa, unidentified
MHRKRSQVAVIDQAGQVLANRNVPNGAEPILTVIGGLPPGTAAAFEACYGTSWLVELLEDYGFDPHLVHPSRCKAIASARLKNDKVDAAILAQLLRADLLPEAWIAPPPIRQLRALLRHRVALVRLRTRLRNRIHAIVADYGYDRPAGGYWTAPGRAWLAALDLSAVSRELVEDYLGLIDAVQGRIDRLDGEIRQRARSDPRAGVLTQLPGIGLFTALVILAEVGDISRFGSARQLASWAGLTPTVRGSDRVAHYGHISKEGSVWLRWVLCEAAQTAKRHPQFAASFQRIAQRRGKKIATTAIARKLLTRAWHLLTEADQAAAPQPAAPPTAAR

SEQ ID NO: 58173 - protein, 340 aa, unidentified
MNHYAGIDVSLEASSVCVIDGSGKIVREAKVASEPEALVAWFGLLGLELTRIGLEAGPLSQWLYAAMRQAGLAVELLETRHVRNAFKIMPVKTDRKDAHGIAELMRLGWFRPVHCKSIEAQETRALLTARKLVQKELLQVAASLRGLLRGFGLKVGKVTPTQFEARVKELVAGHPSLEVIAHALLAVRAVLWRELNGFERRLRTLARSDTRARLLMSTPGVGTIVALTYAAAIDDPSRFKSSKTVGAHFGLTPTKYQSGETDRTGRISKIGDGAVRAALYESAHIILTKPIKGCTDLKSWAMRIAKRAGMNKAKVALARKLAVIMHRMLANGTTFTTQSA

SEQ ID NO: 58174 - protein, 427 aa, unidentified
MKTEDIRLEEFRQLRKEIRGSKEHLIVGIDIGKEKHNAFFGTATGKTLFKRLIFENSGQGFVKLLTQTDAVKTQNNLSRVVFGMEPTANYHKPLGEHLITLEHDVVLVSANAVKNNRELLDGRWDKHDMKDSANITDLISQGKCLYYEYPCIKVMELRGLLSLKRKLKKQEQGLMLRIRNNLLALYFPEMDRYYGSYEQENLAVVKNFLSPWNITVVDYNEFFKSVITRQKGLGQHKHLYKIWQLARESICCKPGDAAICEAEILVNQLKQTRQAIAQVKKEIQKQCYKFPEYEFVISIPGFGPDVTSKVLAYIGDQYRFDRRSQVLKMAGFDLCASRSGKSSNKAVPVISKKGKADLRYGLYQAAMVASTKNIHFIKYFTAKLRGREKEKGIKTKMRVKLAAKMLVIAWTLMKNKEPFNPDYLKIE

SEQ ID NO: 58175 - protein, 427 aa, unidentified
MYRIAGIDVHKKKLAVVVTDVEVHGEYQFERSWFAANPEQLRLLSQWLAEQQVEEVVMESTALYWKPVWGALERYWQPICQKREGAGPTSGILHLAQAQSNRGPRGRKKDFRDAERLVKRLVADELKLSFVPDTEQRLWRTLTRRRYQLTRARVQLQNQLEALLEEAHLKLSSLVSDLLGVSARRMLQAIAQGETNPDALAGLADRRLRATLAQLCDALGACTELHPVYRRLIKMMLEELKVIEEHTAELNQELATLLRPHQDAVERLAEVPGLGVDSAQQILAEVGAKAATFASDKNLCSWVGVCPGDEESAGESSSHRSPQGNRQMRRLLNQAANAAVKTKGSIFEIAYRRLVPRLGHNQTIGAVGHRLCRLIWLILHKGVRYEERGPAVSQRSRQNRTGKMIRELRMLGYRVEFLNAVPSVSRP

SEQ ID NO: 58176 - protein, 419 aa, unidentified
MLKENVEIVAFVGLDWADQQHVISVQDASTGQRQRLKLDHTPEALQDWIRGLRDQFKGSPVAVAVEQKRGALIYALMHVDFLRLYPVNPQTLAQFRKAFYSSGAKDDPVDADLLLEILMTHRQHLRVWVPDDELTRCIQLLTEDRRGLVDERTALTNQVTAALKTYFPQAVEWFGDLHTPRACAFLHRWPSLQQFKQATPSSIRKFYRAQGYRGEDKLELLMTHIGKAQPLTRDGAVVLAGSMKVQALVMQISLLTESIECYDRRIAALFDQHDDSTLFGSFPGAGASLAPRLLAAFGSDRSRFECAAEMQQLSGIAPVTEKSGNSSWIHWRLACSKFLRQTFHEFAGQSILKSQWARAYYDQQRHRGKSHHAALRALAFKWIRIMFRCWKDHKPYDEAVYCKSLQLRQARSGGQPATT

SEQ ID NO: 58177 - protein, 342 aa, unidentified
MTEVMIGVDLAKSVIQIHGASMSGRLLFRKKLSRGQFLRFMESQSGAVVVMEACSSAHYWARELATLGHEVKLIAPQYVRPFVKRQKNDAADAEAIVVAAQRPEMRFVEPKSEDQQAKAVLFRARERIVRQRTELVNALRAVLYEYGHVVPLGLGHIKRMEALVDDADSALPKLVREECSDLLAQISEKTARIEDKTKKIAGLAQQSNVARRLKTMPGVGPMVALAVEAFAPAMDSFKCGRDFAAWLGLVPRQFSSGGKERLGRVSKAGQADIRRLLIIGAMARVSWASRRSPVQGSWLARMLARKPRMLVAIALANKMARRMWAMLTKQEDFCDPTLAVAA

SEQ ID NO: 58178 - protein, 405 aa, unidentified
MNAVGIDVSKGKSTVTIRKPGDVVLMSPCDIPHTQSAINDLIKQIKSLEGETKVCMEHTGRYYEPVATWLSDAGIFVSAVNPILIRDFGDDSLRTPKTDKADSKKIARYTLDRWAKLKQYGIMDKTRNQLKTMNRQFGFYMAQKTAMKNNLIALIDQTYPGANDFFDSPARNDGSQKWVDFIHTYWHVDCVRSKSLNAFTEHYQNWCKRKNYNFSAEKAAKIYQISSDLIAVFPKNDITKMLIWQAVALLNTASKTVESLRSKMNELASTLPEYPVVMDMNGAGATLGPQLIAEIGDVSRFTHREALTAFAGVDPGKNDSGKHIQNSVRTSKKGSPYLRKTLFQIMDSLIKRSPVDDPVYAFMDKKRSEGKPYYVYMTAGANKFLRIYYGRVREYLSNLSNNETI

SEQ ID NO: 58179 - protein, 402 aa, unidentified
MNCVGIDVSKGKSMIAVMRPFGEVVVSPFEVRHTANELSELAGLLKNLDGETRVVMESTGNYHAPVAWLLHDAGLYVSVVNAMLVHDYGNNSLRRAKTDKKDAVKLANYGLDHWLTLPRYIPEEDTRLMLKTCYRQYQQYSKVQTMLKNNLISLLDTAFPDANRLFTSPPRADGSEKWVDFVATFWHCECVCGLSKKAFTAKYQKWCRKHGYNFSQDKALDIYASACGRFGVMPKTNTAKLLVEQAISQLQTTSAALAALKQEMQSLAASLPEYPVVMGMFGVGPTLGPQLIAEIGDVRRFHSKKALVAFAGIDAPPYQSGQIDVRSRSISKRGSASLRRTLFLVMGVLLQCAPMDEPVYQFMNKKRSEGKPYRVYMMASANKFLRIYYASVKAYLDSLEHD

SEQ ID NO: 58180 - protein, 419 aa, unidentified
MSFKIIKNNCCGLDVHKTWIYACIGITDSHNRTEYKQARFSSFTRGLNELCDWLAKYDCNDICMESTGKYWIPVFNILEKHDLWVTLSHPKYTKPMKGNKTDRKDAKWICDLYMCGMVKPSFIPPADIRQLRDLVRYRFKLTCMITGEKNRAHNCLTVSNLKLDDVFSDIFGKSSRSITEQILQHPGETFDVAPFVDGRCKTPIEEIQAAVDGAISEEQAVKLRQCLNHIDELEKHKTEIEREIFRLSDKYEATLNLIRTVPGFDKNPLTAIQVLSEIGGDMSVFPTAKHLVSWAGCCPRNDQSNQKIKSTRISRAGSYFKPVLVQVANALVKSKKHPEFTNRYRRIKARRGHKKAIIAICRMILTAIWHILSDLKPYNPNGFLESRPVKESKTLTTSQALNLLKQRGYIIKDDPCMAS

SEQ ID NO: 58181 - protein, 371 aa, unidentified
MKSDSTIKFIGLDVHSKTISVAIADEGRKGEVRHYGTIENTFEAIDKVIKSLTATGIELRFIYEAGPCGFALYRYLSGNGFTCFVTSPAMIPRPKNVRIKNDRRDALTLARLYRAGELTGIYVPEPEDEAIRDLGRARDDARMAERKAKQRLNSFLIRNNLIYPGKTKWNRTYFNWLGSVGMKYPAQKVALQEYIEAVNECTGRVARLREQIGLAVEEWRMAPMVKALQALRGVSLICATITVAELGDLSRFQNPKELMAYLGLVPSEHSSGESIRRGSITKTGNGHARRVLVEGAWTYKHHARITYPLIKRQRELPKSICQISWKAQLRLCARYRKMVARKKPNNVVVIAIARELAAFMWAIAQEVRVAA

SEQ ID NO: 58182 - protein, 482 aa, unidentified
MKKKTIYSNQSQELLRLFEGAGNNSKMMCVPIDYAKKDHIVMLCNGYGDILRKPFSVKNSPEGVKYLTEQVRRSCRHRGINSKHVFFGGEDVGSYAENFVNTLRSKGWLVAGVNAHDAKKQRANIQASTDRLDLMGIASMLLNRRANCSPAQSGIYRNLRTLVRHRRNLVVMSTEIRNQIHTVMDRLFPGFLDERKTGIVAFTNSSLYLMENRFSARQIHRRKRDRLIEILRRYGTSKPERSAAKLQEYARQVLITPKEYMSTLQLSLAQHVKHFRCLNENIKQVEREIALWLSQTQGAFLTTVRGIGIVLAAGVTAEIGDPSVQKPVNNLVSYAGIIPRVKQSGGVEGKTFTGKVAKRCNRILKDYVVKSGLHLGLHGPEDLMADYRRRDAAGQHADFGMGRRYLRMAMCLMRTSQIYLPSRLRKKGVDVQERRSYYLTIWPYIREKWYKLGALEAAFEKDRPLGKWRHMVQELYEMKLKL

SEQ ID NO: 58183 - protein, 371 aa, unidentified
MQRIYIGVDFHARQQTICYLTTETGELVTCELKHQDKEAVRAFYAAFRGHVIVGLEASGYSPWFERLLEGLGCEVWLGHATEIRRRARWRQKNDRRDAELILDLMLHNEFPRLHQPAMQSREVLRMLRYRQKLIKIRTMSKNSLQALALQAGVAKRSALFTRKGKQELDAALMSPAMQWQREHWLQLLQPLDQQVLEAMVWLKAQSKDDVCSARLRTHPGIGLLTSLCLVHTLQPVARFRNTRKVAAYAGFDPVERSSAERKCFLGISKAGSRLLRHLMVEAANVAVRKDEDLKRFYQRLADRRGRAKAKVAVARKLLIRAYIMLRDEIDYAEFRRRAVAARLARLGHRPNVPVVVIGQPASTERQKQSRE

SEQ ID NO: 58184 - protein, 423 aa, unidentified
MMKLKYSICCGLDVHKNVIVATIVTTNKDGISEYLQKSFSTINSDIQRFHNWLIENNCYHVCMESTGKYWIPIFNYLEKDIEVCLTHPKYVKAIKGKKTDKKDSKWIADLYKFDLVRCSFIPPKDFRQLRELARYRFKLVCMKSSEKNRIQNCMTVSNVGIASVLSDPFGKTATEIMSYLLEHTADSIDEKAVRKLIKKGAKAKSDEIIEAIRGCNIETDQAKKLELALGHLEYLDGMITQTEVELYVRIKPYYEFVEFVSTMPGMTELSSTIVLAETGVDMNIFDDAKHLCSWCGLSPSNNESAGKKKSVRIAKAGAYLKPMMVQCALAAIKNKKQPYFAIKYGRIKKRRGHKKAIIAIARMMMVCIYHMVSEKKPFTPADYEELMKPQNHVERVVLNENNVFAYLESLGYDSSKLVKRNDN

SEQ ID NO: 58185 - protein, 406 aa, unidentified
MKTMDRTAANIGLDVHRRFSKVTARNAEGKIAWRQRLEHGDRKELRKQLEDWPRGTPVILESSFGWEWLCEELEQAGLEAHLASSRKVAAWREARGMAKSNRTDADLLSELWSQADRWWKVWLPPREVRDRREWMRYRMSLVRMQTGLKNRIHAILHRHGILHDFADLFGVQGRRMLTRLTNNPKEERLGESGRATLKGYLQLLDHLRRQIASVTRTVYRQLGETPEGKRLRTLPGIGAVLAYTILAEIGAFSRFRSAKRLASYSLLAPRAWDSGEETDEPPKGRHVGHVGRRTLKWAWIEAAHGAVRRGGRFREGFDRYTDGGKRNCNRGYILVGHELCRLAYAISKKETEYRDDPPQRPGSSKKQGRLSPRRDPHGGKTTRNSRPGTGQPDSGLVAVGEPTSDL

SEQ ID NO: 58186 - protein, 351 aa, unidentified
MKEYIAFDSHKHYTLMEREDRQTARTVQLRVAHQPGAIRACLRNCESGTDVAVEATGNWYWIVSEIEQAGLKPQLVHPRKAKLMMGLINKTDKLDVHGLNRLQRNGTLPTVWIPPAELRDQRELTRTRLVLVAQRTRLKNRLQSTLAKYGLAIRDCSDAFGMVARSQWPELLARLPEQTQWVSQQLLKQLDLLEEQIGQCEKRLNPLLKITPQIERLKSLPGVGLILGASIALEIGEVSRFASAEHLASYAGTTPRVHSSGDKLRFGRLRPDINRYLRWAFVEAANVVALHHQQRPERHVSHLYWRLKQRKGHAKAIGAVARHLAEATFHILSRQEDYVDPALRKGRSKPV

SEQ ID NO: 58187 - protein, 450 aa, unidentified
MTKRVSMDIVNPDAAGIDVGSKSHFAAVGQSLEDVKEFGVYAEDLTKLCDWLKSFGIKTVAMESTGDYWQNLYAELIKFGFEVVLANGKFTKHAKGKKTDVKDCRWIQKLHTLGLLTGSFLPDETTEKLRTYCRQRSNLIEMAAGSSRKMQKYLKLLNLRLDVVVKDVCGLTGLTIIEDICKGNLDPKELAKHRHYNCRKSEDEIARALHGNNREDYLFGLKQEYECYQFLQKQITACDKQIDKFVRTEIKKSPEKSSLKTSEKPFKRINKNSVQMKDLNQVAYQYFEGVDLLSIEGLSHGTVLSLMSEIGPEGFKKFDTAKQFASWLRLAPNNKISGGKVLSSRIPKGSNRLKIALRQAANAIGNLKDTHLSDFFKRVSFRRGRQAAVSATARKLAVIIWSMVTKKVPYNPPTQYLFLDEKRKLGLVKRIKKNISKFGLSPEDLGLTTM

SEQ ID NO: 58188 - protein, 349 aa, unidentified
MNRTTYGLDIAKSVMQLHWIDGETGEIGRKKLARVKLVDYFARLQPVRVVMEACGSAHHWARALGALGHQIELLPACQVRPFVRSNKDDAADARAIWVAAQQSDIRRVPQKTVEQQAVMALHRTRSHWVSVRTATVNALRGTLYEFGVILPGGKNAGLKALGAHRAEIDTQVPATVQRLIDGQLATLKDIERCIDEFEAEIAAQQKQLPKANTLRQVPGIGVLGATALAATLGDGRAWKSGREFSASLGIVPAHSGTGGKARVGHLSKRGDPYLRTLLIHGARSVITHAKNKPKWLEQLLARRPLNVAVVALANKMARTAWALVAHGRDYEREWKSTPPKGCAAQAAAA

SEQ ID NO: 58189 - protein, 457 aa, unidentified
MSSIFNNIQGKKGCQFSQSLRGVNLEQVLVVAIDAAKFLPKALICNYFGDVIEPAFFFSVDKVGLNYCLSKVAEAITISNAQKIFIGVEATGHYYEDIVRFFGAHGHNVAILNAATTHEERASALNWCKTDDRDLVAIAYSLKNNKATESQLPTDHYRQLLALTRARRQEVRKRSLIRMEMRNLMDKIFRSYQGIITFKNNSPKKVTIFSDFFGKSSRWILKNAPHPSDIIQLGEFGLRHISKEHNLKLRQTTIQKLLQAAENTYTLSKEELKPELLLLQLKLQDLERMDDNIVQIEKEMEILLLKTDGYLLLTITGIGVVTAAELFSEIGDISNFDSASQLIKKAGTNPMVKQSGGQKGYYGRITKQGNKHLRYVLYQAGRSICRHNDDLRPFFDRLKQKGKHSKMIFIAMGNKLLKIAFAMLTKKQPFHSKTDKSIKDQLAKKLKQQTSLELLPA

SEQ ID NO: 58190 - protein, 317 aa, unidentified
MMNTKSHIEINVGVDVGKSKLDIVLHPLDLHFSIPNDDEHIHKIVQVLKTHQVKRIVTEATGRYEHAFVFACDKVDLPVVVVNPTNIRRYAQAIGVLAKTDKIDATEIAQFAATIQPDIKPIPDRQSRIIKDLLIRRTQLLEMQTMEKNRLQIMPKELHSSIKALLKSLQTQIEKLTLKLDQLVAEVKHWRIKTEILTSVPGVGKVLAYTLLSELPELGKLNRKEIAALVGVAPMNRDSGSYNGKRRIRGGRHRIRTVMFMAMLSSIQCNPVFKRYYEHLKAVGKLPKVALIACMRKLIVILNTMLKNEERWNEKSA

SEQ ID NO: 58191 - protein, 414 aa, unidentified
MDLLHPRCAGLDVSKRDAKVCVRVASGSRTAARSTVTTWGSVTNQILALREHLIVEQVTLVVMEATGDYWKPFYYLLEDSPFEVLLVNARHVKNPPGRKTDVSDAAWLAQLGAHGLVRGSFVPPEPIRQLRDLTRTRTTLVRARAKEIQRLEKLLEDAGIKLSSVATDISGVSGRLMLDALIGGQRDPAALAELAKRRLRCKIPELTEALTGRFSDHHGFLAQLHLDLIDQHSHAVEELTARIEVVIEPFRGARDLIVSIPGISVLVADVIIAETGADMSRFPTAGHLASWAGTCPGSNESAGRIKSTKTRPGNPYLKGALGVAALSAARSHDTYLAAKYRRIASRRGPVKAIVAVEHAMLIAIWNMLTNGVFYNDLGGDYFTRLNPDKTKQRALNQLRQMGYDVTLKPLTAAG

SEQ ID NO: 58192 - protein, 341 aa, unidentified
MQRVTTIGLDIAKSVFQVHGVDAIGNVVIRRQLKRRYVLAFFQKLAPCLVGIEACASSHHWSRELKALGHTVRLMPPAYVKPYVKRQKNDAADAEAICEAVTRPNMRFVATKTPEQQSCLMLHRTRHLFIRQQTAVINAIRAHLAEFGVVASVGRRGVDELLDVVASDERVPEVARACVAALGAQLRMLKAQILEFDRQIMAWHRSNETTKRLDEIPGVGPALATALVASVADPKAFRSGRNFSAWIGLVPKQHSSGGKDRLGSISKQGDRYLRSLFTAGALAVIRYAKIHGTRHRPWLTALLARRPTKVAAIALANKIARMAWAMMVKGERYKEPAALAA

SEQ ID NO: 58193 - protein, 372 aa, unidentified
MPKYSTAFGMDVHLRSTTVCALDADTGEAVTRRFPGNPWGEIAGWMDGFPGPSLAAYESGYLGFAPQRELAGLGVECVVAAVSKIPRSAADSASKNDRNDAARMAKAILAHDISPVWVPSPEVEGIRDLAGAYDGATARLATAKQRLLAFLAKRGFVYGTTPAGNPRKYWTYDFLRWLDKVRPEDDGGVRTLAALRNEVEAAAEARADLLSEYRAAVDASPIAAEVAALQSIKGCAFALAAAFSAEVGDFTRFRSGRQVTAYFGLAPSQRSSGDSVRLGGISGAGNALVRKLAVEGSWCYAAARHQPKLMPRDTGVPLEIRMHGRKGSERLLRRREEMLARGMPAAKANAATAAELVRWLWALGMMCREGAE

SEQ ID NO: 58194 - protein, 363 aa, unidentified
MSYLGIDLHSNRFTVEKMILGKTVETERNTYGFDETSFGRFKESLSKDDCVLVENTFNAFWFRDQIAERVDTCLVYNTNVARTGGNKTDKIDAKHLVKKLAYYLMWGRREEDLPTVYVPDAEIRELRGLFTTYQLHRKTKVQMTNRIHSILKQNGICFERKAIDKKDFEARIEEIDIAEVWKFQIRSALRALKKAEEEQQEIKDMIYLWGYKLFKEEIELLLSIRGFSALTAIALMSDVVNVNRFPSARKFCSYLRATPKVKSSNQTVHVGHVNRQSRPLTCTLLTQSIIHLSQASDHFSEFYRRVKVGKSAGKSRIALIRKTLVSAYYLLKRRQKFHGSNDELYSKKLKNFQKEVEKIRLSA

SEQ ID NO: 58195 - protein, 316 aa, unidentified
MLYVGIDIAKNKHDVTALNVPGKTVLKPLTFSNNKAGFELLDLSIRQLNQDCLIALEDTGHYAFNLLNFLHEQGYKVYTYNPLLIKEFAKSLSLRKTKTDKKNAHGIALKLLSDPNREQFQHDNRQVDLKILARHIHRLKKKQSDWKVQYTRCLDIIFPELDKIVGKHSEYTYQLLTCYPNPQKRLEAGFDNLIEIKRLTASKIQDILSVAPRSIGTTSPAREFEIIENIKHYKRLIDKAEKCVNDLMAELNSVITTVTGIGNRLGAVILAEIQNIHAFDNPAQLQAFAGLDSSIYQSGQIDLAGRMIKRGSPHLR

SEQ ID NO: 58196 - protein, 349 aa, unidentified
MEFVHVNKKYYCGIDLHADVMYVCVLDKDGVVKFHHEMPTDFGRLLKHLKPFLSSIAVCAESTFNWYWLSDGCAEHGIPFYLGHALYMKLIHGGKAKNDRIDSHSLAHLLRIGSFPPAYPYPEKMRATRDLLRRRHKFSQLRSGLLRHIKILLYQQGHAGLPSFHNGSVEQIREGLKPFKVPLNVQQSMDYDFGMIEHIDAAMPKMEWTILKSAKHHDSHALALLRTVKGLGPILSLTILYEIHTIKRFPTVQKFSSYARVVKVERSSHGKMCGSKNNKIGNPYLRWAFAQLAISAQRFYPSTKEYTQRLIKKFGMRKAYSLLAHKFAVAVYYMLKNKTVFDIKQFTAA

SEQ ID NO: 58197 - protein, 428 aa, unidentified
MERLNCSRIQDFRQFKKEIRGSQEYLIVGIDIAKENHNAFMGSAAGKSLLRRLVFENSAEGFKKLKIQAESIRVQNGLTKVVFGLEPTACYHKPLAEYLINDQQRLVYVSGEVTKKNRTSLDGRWDKHDAKDSANVADLISQGKCLFYDHPPLPLRELRSLLSLKIRLKKQEHGLRVRIRNHLLAQFFPELDPFFANGGPYLLSIVKWCLAPRDIAIMDFKEFLKIVAPGLMRGNTLERLKKIWEIASGSIGCEAGPALQFEGKMMVELLMEIRKKIKALDEKIEEICLLFPAYPLLLSIPGFGPDVSAKVLAAIGDPFRFDNRSQVIRIAGYDLNAERSGNTSDRAVPVISKKGKASLRYALYQAALIASTRNIGFIAYFTEKLRGREKERGIKTKMRVKLAVKMLVIAWTLMKKKELFDPKYLNIA

SEQ ID NO: 58198 - protein, 339 aa, unidentified
MKLYAGIDLHSNNSVIDLLDEKDKVIYDKRLPNKLPTILSALSPYQAQIESIAIESTFNWYWLVDGLIDAGYCVHLVNTAAVQTYSGLKYTDDNHDARWLAHLLRLNILPTGYIYPKKERAIRDLLRKRFQMVRLQTLNILSIQNLFARNTGGSLNSNIIKKMTVKDIASYLPNEDHALAMRCNLSVLQQCHKQIKQLESEILQRVNLRNEFKMLLTVPGIGKILALTIMLETGEIRRFDKAGNFASYARCVQSKRVSNGKKKGENNRKNGNKYLSWAFVEAAHFSIRYSETIKRFYQRKSSKTKKVIAIKAVAHKLARACFYIMRDNVEFDINKAFTS

SEQ ID NO: 58199 - protein, 408 aa, unidentified
MKTLHKRCAGIDVHKTEVVACLRVITHRKVEREVRRFPTTTHGLLELAEWLESARCTHVAMEATGVYWKPIWHILDGRFALILANAAHVKTVPGRKSDVNDATWLADLLAHGLIRPSFVPPAAIQELRDLTRSRKQLTREVAQHSQRIQAVLEEANVKLCSVITDILGASGRRMLKAMIAGEADAHKLAAMGSERLGCAPETLVEALTGRMREHHRFLLAQHLQTTEQLEKTIAAFDARIEEKLVPFRDTVERLKEVPGLGSTVIEFVIAEIGLDMSLFPSAGHLLSWAGFVPRLDESAGKSRSTRIRKGAPWLKPVLVQAAWGAARKKNSYFQAQFLRLKARHGAKKAAIAVAASILTTVYHMLRDGTCYQDLGPEYFTRRNPAKAAARLANRIRNLGYYVEIRPAA

SEQ ID NO: 58200 - protein, 488 aa, unidentified
MSRARCPAGQARPPATQAPSRPAPPPARPAPLPVLNPNAAGIDVHSDMHMVCVPADRVAPAPAGAAGAPANVRRFGANSCDLTAIADWLAECGVTTVAMESTGVYWVPLFELLASRGFEVWLVEPGQLSRCGARPKTDVLDVQWIQRLHSYGLLRASFRPPDSIMALRGYHRQRQMQIRYAASHTQHMQKALEQMNVKLTEVVSDITGLTGQRIIAAILAGERDPAQLAGLRDPKCKNDRETIARALEGTWRPEHLFALRQAYELYQFHHRQITECDTIIQAELAKLPSRAGDKPFTAKPRRCGRKPNDLSFDACAPLFRALGLDLTRIEGIEVGTALIILAEIGVDVSRFPTEKHFASWLGVCPRQHESNKTKKKRSPRKGKNRVAIALRMAAQSLGRTQSPLGLFYRRIKSRIGGKGAVTATAHKLACLVYRMLKYGTEYVQQSMEEYERKVRSQMERALRRKAAALGYQLIRNEAPPVEPVPAPT

SEQ ID NO: 58201 - protein, 328 aa, unidentified
MNFKETLGVDISKNEIDAALHQGKEHKVFENNKKGFDNMLKWLDKHISVELNELLICFEHTGVYTRLLVEYLSSKGLHYVLEPSLKIKRSMGLVRGKNDKIDAQRIAEYAYMRRGSIQTTPIEDEVVSKLKDLLTLRDRLVRQKAGHQSTLKEQKKIIKKKDNPILFKAQEQVINYLTKQISKVEKEIKSTIKENQELERIFDLITSVIGVGWIVATNMIVTTNCFKRFEDPRKYACYCGVAPFSHSSGTSIKGRTKVSHLANKRMKALLDLAARSAIVYDPELKKYYTRKVENGKNKRGTINAVRNKIIHRVFSVVRRGTPYVSLQR

SEQ ID NO: 58202 - protein, 345 aa, unidentified
MKISTVGLDLAKNVFQVHGVDVGGGVVVRRALRRRQVMPFFRKLDPCLIGMEACGTSHHWARELIGLGHEVKLMPPAYVKPYVKRGKTDAADAEAICEAVTRPTMRFVAVKSTEQQAILALHRTRDLLIRQRTQLVNMIRAQLAEFGIVMARGIGHVLELVGRLLDGEVPDIPPLAVKVVIALARQLRDLQARIGSLEKDLVKWSRGNPMAKRLETIPGIGVITASALAATVTDPRQFTSGRQFAAWLGLTPRANCSGGKERLGHISKMGDRYLRRLLVSGMMSRLRWLRLRPDSQPWAAGLLRRKPAKLVAVAMANKTARIAWAVMTRDQTYRPQHPSTREVAA

SEQ ID NO: 58203 - protein, 402 aa, unidentified
MEVGIVGHDNVDVFIGVDVGKGEHHAVALDRAGKRMFDKALPNDEHRLRELIRSLKDHGPVLFVVDQPATIGALPLAVAQDEGAMIGYLPGLAMRRIADLHAGEAKTDARDAAIIAEAARTLPHALRSIQLADEQVAELSMLCGFDDDLAGQITATSNRVRGLLTQIHPALERVLGPHLDHPAVLDLLRRYPSPAALASAGEKRLGNRLSVLAPRIGRRIAAQIVQALSEQSVTVVGTNAASLVLPKLATQLASLRQQRAEIAVEVERLVEAHPLHPVLTSMPGVGVRTEARLLTEVAGKQFASAGHLASYAGLAPVTRRSGSSIRGEHASRRGNKVLKRALFLSAFAALRDPVSRVYYDRKVAAGKRHNQALIALARRRCDVLYAMLRDGTLYQPPVPLAA

SEQ ID NO: 58204 - protein, 401 aa, unidentified
MDITTMVYVGIDVSKDKSDICIKDEKGNDLIHRFEITNKKADLEMLYETVENIKRNIPGNSDVVFGMEATGIYSLPLYSALKRDGYKVKLYNPIQTNGYRKINIRKTKTDPIDSAIIAEMLRHSEAPQVSDIQDMHLFQLRELVRVRHRLIEKQALCKVQIVRNIDTIWPDYGGVMKRVFGAASLAILKKYSVPSKLRGESFEHFYELVKKKSRSKISRSKAEEIYVNAGNVLTIPELDSVIAIEIKTLITQLELYDEQIQSVEGNIDRMMKQTDTKIMSIPGIADILGPTILGEIGGIERFSNVKKLVAFAGLDPVVSQSGRFENKSGKISKRGSPLLRHALFLAANTAIQNDDNLKRFYAKKRSEGKHHFSALNAVAAKLLRIVYWVLKNNKEYQIQLN

SEQ ID NO: 58205 - protein, 350 aa, unidentified
MNVNHYIGFDVHKKSVSYCVKLADGKIVEEGKLRATHDALRQWAGKRPEPWHGAMEATLFSGWIYDTLKPFAAELQMGHPALMKAIGASKKKNDKLDARKIADLVRCNLLPACYVAPAEIRELRRMLRYRNLVVAQATRMKNKVSGLLMEVGAEYHKQQLHGKQYFTELLDTLEEVPESVKDLLRLSRGALETFETTQEQLVVRLQKEPLLAQRVMLLKSIRGVWPVTSLTWILEVGDPQRFSSVAKAVSYCGLSSALDSSADKQQRGPISKQRNAHLQTVLIEAAKLAPRWNPQLAAVHAREVELGNRNRATLAVARKLVAYLLAVDKSGKPFQISTPATVEQEVETAV

SEQ ID NO: 58206 - protein, 360 aa, unidentified
MKKISTESVTVISGKRVFIGIDVHKESWHVTARTEGEEVFNGRMPATYHSLEKLLERFKDCRLKVAYEAGPSGFCLYDMLTEDHIDVIVVPPSLIPIESGNKVKTDKRDSRKLAKLLESDMLKKVHVLTEEERMHRELVRTRRQLVTHRGSVARQIKSKLLFYGISSPFPAKYGWGRPYIQWLKGLPCPSPYLRGSLDILIHLYEYLTEEIRKVTKRVVELSRTDKYAHRVKLLKGIPGIGILTGMEILVELQDFSRFKTAEEIASYIGLTPSEYSTGQYVRQGRITRCGNSRVRTALVESSWILVGRDPLMRAKYLKLKTTKGAKRAIVAIARNLIIRIRAMLLHDAPYRIGGSVLNAA

SEQ ID NO: 58207 - protein, 369 aa, unidentified
MNKTLYVGLDVHKDTIAVAVAEDGRGGEIRFHGTIINSADAVLRLTKTLAKNGWTPSFCYEAGPCGYGLHRHLMKLGFECAVVSPAMIPRKVGDRIKTDRRDAEMLARLWRAGELTPIWTPDEEQEAMRDLIRTRKQAMDAVKVAKQHLLSFLLRHGLKYETGSYWTQRHRRWLAELRRFRFSHQQLVFEELKRAVDQAEERVATLDQAIETVIPDWHFAPVVDALRALRGVNTTIAATVVAEIGDITRFENPRQLMSWLGLVPSEHSSGSTVRRGRLTKAGNALARTMLVEAGWSYRHPPKEGHPYLKRSAHLPQEIKDIGWKAQTRLCKRYRALSRTGKPQPRVLGAIARELAGFIWDIARRTPLTA

SEQ ID NO: 58208 - protein, 377 aa, unidentified
MEKDSRFVGLDVHADTIAVAVAEPQGEVRSVGTIPNTPDAVRRLMKKLGPPETLRVCYEAGPTGYVLYRQLRELGVPCAVIAPTLVPVKAGDRVKTDRRDAEKLARSYRSGDLTAVWVPDADHEALRDLVRAREAAKKDQLRARHRLGKFLLRHGRRPPAGIKAWGVKHRAWLQAVPFAHPAQEATLLDYRTEIDHAGDRIVRLERAIDAAVESAPVAVRAVIAALQALRGIAKLSAVSIVTEVGALSRFGKPRQLMGYSGAVASEHSSGTHTRRGGITKTGNAHLRRIVIEAGWAYRHRPAIGGTLRTRQAGLSEEVKALAWKAQHRLHTRYVRLIAKGKAPTQVVTAIGRELLGFIWAIGLHVERQMEGSPRAAA

SEQ ID NO: 58209 - protein, 328 aa, unidentified
MQPVTTIGLDIAKSVFQVHGFDAAGQVVIRRQLKRRYVLMFFQKVPACLVGIEACASAHHWSRELQALGHTVRLMPPAYVKPYVKRHKNDATDAEAICEAVGRPNMRFVATKTPEQQSCLTLHRTRHLFIRQQTTVINALRAHLAEFGIVAPVGRNGVEQLLGVAADSTDKRLPEVARACVAALGAQLRMLKAQILQFDRMIMLWHRSNEASRRLDDIPGVGPALATALVASIADPKVFRSGRDFSAWIGLVPKQKSSGGKDRLGSISKQGDRYLRSLFTAGALAVIRYAKIHGTGHRPWLTALLARRSTKVAAVALANKIATGWRGP

SEQ ID NO: 58210 - protein, 349 aa, unidentified
MGEVSTIGVDIAKSVFQIHGVDADGMVVIRRRVGRAKVLEFFAGLPPCLVGMEACATAHQWARELKKYGHDTRLMPPTYVKAYVKRGKNDAADAAAICEAVTRPSMRFVPIKSVEQQSALMLHRTRDLLIRQRTQLINALRAHLAELGLVAAKGHEGLHQLVTAVAESGDERLPSNARFACQSIVAQLHAVQTQINGLDKRITQAHRANADSKRLDAIPGFGVILSMAVVATMTDPKAFKTGREFAAWIGLVPRQNSSGGKERLGSISKQGDRYLRRLLVLGAISIVGTARTRPEKYPWVTELLGRRPAKVVAVALANKMARTAWAVLARGETYRAPTRSSSAAIAAAV

SEQ ID NO: 58211 - protein, 356 aa, unidentified
MTSTIKYIGMDVHKESISVAVRNAAGKIVMECVIETKANTILQFFDGLRGEVQVTFEEGTWAAWLHDLLKPHVGKLVVCDPRRNALLLDGNQNDRVDARKLSDLLYMNKLNAVYHGDHGLRTLKELVRSYLTITRDLGRVMTRVKAIYRSWAIPCSGKQVYGSRHRAEWLGKINEPGVRRRAEFYYQQLDTLRSLRQTVRRELLEESKKHKAWKQLCQIPSIGPIRAAVLLGILQTPHRFRTKRQLWTYSGLGIEVHSSADHETVKGELQRKKKHVEIRGLNENCNHDLKNLFKGAAVVASTKPGPFESFYAALVAKGIRPEMARLTLARKIATIVLIVWKKGVCFDANHLKPQTA

SEQ ID NO: 58212 - protein, 343 aa, unidentified
MQTITTIGLDIAKSVFQIHGVGADGQVVIRRQVKRRYVLAFFSKLPPCLVGIEACASSHHWSRELKALGHTVRLMPPAYVKPYVKSQKNDAADAEAICEAVTRANMRFVATKTPEQQSCLTLHRTRHLFIRQQTAVINVIRAHFAEFGIVAPVGRKGVEELLDVVADPSDKRIPVIVRACLTALGAQLRRLKEQILEFDRVIMAWHRSNEASRRLDAIPGVGPILATALVASVADPKVFRSGRTFSAWIGLVPKQHSSGGKDRLGSISKQGDRYLRSLLMAGALAVIRYARIHSTKHRPWLTALLARRPTKIAAIALANKIARMAWAMMTRGERYKEPVAHAA

SEQ ID NO: 58213 - protein, 319 aa, unidentified
MAAELFIGIDVARDNLDVAVRPAVEQWRVANDTAGIAELLVRVRALRPTLIVLEATGGLELPLLGVLGSAGLPVVAVNPRQVRDFAKAMGKLAKTDALDAQVLAHFADAVRPAVRPLPDAATQALSALVARRRQLVEMLTAEENRRASASATIRPDIQEHIGWLRKRLKGIDKELSQALRTSPLWREQEDLLRSVPGIGPVVTVTLLADLPELGVLGRKQLGALVGVAPLNRDSGTLRGKRTVWGGRSTVRAALYMAALVGTRHNPVLRALYTRLLAAGKTKKVALTACMHKLLTILNALLKHSTRWTTPTSLGASSIG

SEQ ID NO: 58214 - protein, 392 aa, unidentified
MVAGKPAALSASEKPQASRSPADRLCPGAQHTVTERDRRSSFGPSPNSRRNRAAVSTATSSHLQDRNNTIVISDVATPVWVGVDIAKDKFDVHVRPLSQRFTFANDVQGFAHLVNELRLHPALQMVVIEASGGYERSLVSHLIEANIPVSVVNPRQVRDFAKCLGLRAKTDAIDAAVLAHFAELIKTRPATKTPEDQQQLQDLVTRRRQIIQLRTMEQNRQGTAHGKLPCKTIVQTIKLFNKQLAEIELAIAKLFTSNDDWKAKTHILSSVPGVGNMTAQQLLAEIPELGETNRAEAAALAGLAPYNHDSGKLKGRRCISGGRLEVRSALYMATLTARRCNPVFVAFAKRLKAAGKPYMIIQVACMRKLLVILNSLLQTGQLWNPNLVQQTS

SEQ ID NO: 58215 - protein, 393 aa, unidentified
MRFAGIDIASETHVLAMVTADGGVELKATPFAEDDLGYQKALTLLGTPGGVLIAMEATGHYWKNLFAVLAAAGHRVALLNPLRTHRFAGVDLERTKTDAIDALGIARFAAQKHPAVTPLPDALTEELRELVHLRQRLLQDFGDRVRQLHRLVDLGFPEFTRYVRTLDSELASAILRDYPTAAAFRGVSVRRLAALRYDSRHRVGLDLARQLIEAARRSVGQHHSATYRLQIRYACDDLDTLRRRLHDLDRDLDGKLREHEVGRLLTTIDGIGSQTAARVIATVGDPAYFRSGSALAAYVGTIPALKQSGKRQSVRGAVTPIGNAELRAALWMPTLCAVRSNPWLRAHYQRLLARGKLPKVALVACMHKLLLAIYSVAKHRRPFVPNLTAAVTP

SEQ ID NO: 58216 - protein, 418 aa, unidentified
MRKHNLAYVAFDSAKAKHAVAIADEGREGEVRYLGEIANSPDAIKKLVTKLTQQYGQLHFCYEAGPTGYGLHRQLTELGHRCDVVAPSMIPKRPGDRVKTNRRDAVMLAKLLRAGELSQIWVPDTVHEAVRDLTRARETAMLDLRQKRQQLLSFLLRHGRDYPAQKNWTKMHARWLAAQKFAHPAQQIVFQDQIEVINTAQIRLTNLEQKLHEILPSWTMAPVVAAYQALRGVSLLVATIFVAEVGDVRRFATPQQLMAFLGLVPSERTTGDDVRRGSITKTGNRRARRALIEGAWTYRHPARVSERLQKRIEDLPAAVRTIAWKAQVRLCARYRRLTSNGKNTAVAATAVARELAAFMWAIGHQVELEKRSPGAGCVVTSDGAAGHTGSARQGPPAAGSSRRQRPAGPSTFGAAQAR

SEQ ID NO: 58217 - protein, 355 aa, unidentified
MKYYTSTTQFNCGIDLHSRQMYVCVMDREGKKLVHTNVKHNDFDYFLKLVAPYRHDLTVCCECMGGWYWLADACQAAGLTFVLAHALYVRAIHGGKNKNDRIDSEKLTHLLRSNLIPPAYVYPADKRPLRALLRQRTFFVWCRADLLARVQSHQMAYNRPPLRQTRPNRDPWESALLAAEPEPVRQLALKNELAMIRHFDTQITAIEAQLQPLTKAIAGRDYALLQTVRGIGEHLAATILYEIGDIQRFPSVKHFLSYCRLVKGTVASAGQIKGLRGAKLGNPYLRWAFGEAAVIAKRDPVLIGPLAQRLEARMGGNKFKANTVVAIKLARAVYFMLRDHTVFDPQRLVAALTHQ

SEQ ID NO: 58218 - protein, 417 aa, unidentified
MDTLYPCCAGLDVHKQVVVACVRKLSTGGRVRSEVRTFRTETNALLEMADWLTDEQVTHVAMESTGVYWKPIWNLLEGAVELVLVNAEHIKAVPGRKTDVKDSEWIAQLLQHGLLKPSFVPEKPVRQLRDLTRQRTQLTRQKVQVANRIQKTLEDANVKLGSVASDVLGASGRDMLRAMIAGETDPVVLADLARQRLREKIPQLREALCGQVEDHHRFLLGMLMDQVEFLEAQIARLSARIAEVMPAPFAEAIQRLDTIPGIDLRAAENVIVEVGSDMSQFPSAAHLASWVGVCPGNNESAGKRKSGRTTKGNKWLRVVLVQCAWAASKAVGSHLRQLYGRLVGRRGKKRALVAVAHRLLLIIYNVLKKNQAYQEPVQAAPDRHKDRERLKQQAAQAPGEVRSEGSTDPGRGVNGLG

SEQ ID NO: 58219 - protein, 351 aa, unidentified
MKTKNTACPKLFIGIDIHKTSWSIRMATDLFQGKRMTMPSDPENLKRYIEKYYPDHEIQCAYEAGCCGYSAHRAFESFGWQSIVFNPSDIARTGKSQFQKTDGIDADLICRELRDNRLVSITVPDVEREHLRCLFRRRNDLVKDIRQIKSQIKGQLLFMGIRIPQEHDNSYWSHSFRKWIESLSMENETAKSAIRSRLLQFEFLDKSVREVSNELRKYCRTHYKKDYTLLRSIPGIGGIVACGILSELGDLRRFGNFKQLAAYVGLMPALHQSGDNTRSSGINPRGNSIMRSYFVEAAWQALRFDPVMQKYYRTHAGRDSKSILIKVARKLLSRVHSVIKTETPYQIGVIA

SEQ ID NO: 58220 - protein, 404 aa, unidentified
MKSNTQNAKIEAITEKTLVLGIDVGSETHYARAFDYRGVEYSKKPFKFSNTEAGFVTFKAWVLDIKEKHGKDKVIPGMEPTGHYWFNLGKFLQDNEMKPVLVNPHHVKKSKELDDNHPTKNDRKDPKVIAGLVREGRYMIPYLPDGVYADLRTASNIRFQLQAELTRIQNRINRWFNIYFPEYKTVYGKPDAKSGILILKEAPLPEDILTLGIDGVNQIWRDAKLRAVGKARAKTLIEAAEHSVGSKEGAVSARMEIRMLLEDYESRNIRLQEVMGLIEGLVNQIPMAEKLLEIKGVGIKTVSGFLAEVGDIRRFNDPKELQKLAGLALVENSSGKHKGKTTISRRGRKRLRYLLFEVAMSLVAKNPEFRELHNYYTTRRLNPLKKMQSLMAIAAKLLRVFMPY

SEQ ID NO: 58221 - protein, 282 aa, unidentified
MKNKSFIGIDISKNVIDASIFCKGAPIKDFPHAVFNNSHKGFGEMCTWLKKNHVVLLNSLFGMEFTGSYSMELEKFLNAKKYQFCMLSTHVVKHYPMGPKDKSDKIDSAKIADFLYRYDGTECVKPYKMPDKTMQRLKALTKERKFLVEQRTCFMNRRQLCTTKEAAQLYDGYIKEFSHDIENIELKMQNLLEADDSLSTTYKNLLTIPGIGFVNAMNVIVITRNFTAFETARQYASYIGVAPHFHTSGTSVRWRPRPSARCDGQAKAQDDVRSPWQAIRQR

SEQ ID NO: 58222 - protein, 462 aa, unidentified
MTKPRSPKSSGRRRRSRSQRPERRILHPNAAGIDIGSRSHYVAIPPDRDAEPVRSFGCLTPDLQEMARWLKVERMDTVARESTGVYWIPVMQVLEEHGLEVYLVDARQSKNVSGRKTDVKDCQWLQELHTYGLLSRAFRPPDAICVLRSFWRHRKGLVEMASMQIQQMQKSLEQMNLQLHKVLSDISGVTGMRILRAVLAGERDPVVLAQMKHPSVQSSEETIAKALTGDWRVEHLFTLRQAVELYDTYHEKIAACDQEIATCMKTLERRGDPKALPPTRTGRRRKNQVHFDLRQQLYEWTGVDLTTLPAIDAMTAQTVLSESGIDMTRFATEKHYSSWLGLCPNHEVTGGKVRKRRTRKVHNRAAHALRLAAQSLHRSKTALGAYYRRMRGRLGPAKAITATAHKLAILIYRMLKYGMTYVEQGQQAYEQQYQERTRKMFIKRARKMGYAMVDLRSGEVVS

SEQ ID NO: 58223 - protein, 366 aa, unidentified
MASVAHLAPIHLGLDVHKDTISVGILDPDQQVPDVERITHDEPSVRRLVGRLGDPRRLRACYEAGPTGFELARLLQGMGVSCQVIAPSLIPRAPGDKVKTDRRDCRRLARLHRAGELVAVRVPTVAEEAVRDLCRTRADMVQDLTRARNRLGKFLLRHGRPWRGGSTRTHAYQAWLGSQRFDQPAMTQTFGHYLAVVEVRNTQLDAVEADLVGWCQQPPFDWQVARLAAYRGITRLGALTLAAEVADWRRFATANAFMGFCGLVPSEYSSGSSVHRGRLTKAGNAHLRAQLVESAWSYQHRPSVGVELARRQQGLDPAVTARAWAAQQRLAARFRRLAARKHTKSIVAAAIARELAGFLWAEMTAA

SEQ ID NO: 58224 - protein, 343 aa, unidentified
MTKDMMIGVDLAKNVFQLHAASLTGHLLFRKKLSREAFRRFMAEHPPAIVVIEACGSAHYWAREMAKHGHEVKLIAPRYVKPFVKRQKNDAADAEAIVIAAQRPEMRFVEPKSAEQQGKAILFRARERLVHQRTELINALRAYLYEYGHVVPQGTRQLGRIEDILNAPNCDLPDLVREECRTLLEQIAEKTIRIEAQTGKIKKLAAEADTARRLQTIPGVGPMTALAVEAFAPPMEIFRCGRDFAAWLGLVPRQFSSGGKERLGRISKAGQTDIRKLLIVGAMSRLNWLGRQSIVKGSWLAQMLMRKPRMLVAIALANKMARTIWAMIIRKEDYRVPAEAAVI

SEQ ID NO: 58225 - protein, 336 aa, unidentified
MEHIAIDLGGRESQICVRSEAGEIIEERKHATRSLRRYLKTRGVSRVVIETCAEAFSVADIAMELGHEVRVVPASLVGSLGIGSRNLKTDKRDARILSEVSCRVDLPSVHIPKQDSRNRKTMCGMREQLIGARTQLINCVRGWLRGQAIRVRTGATASFPTRVRQAANDMPPYVERLLRSVEQLTEEIRLADQELKELVKDDALLQRLCTVPGVGPVTAVRFAAAIDDVDRFKNAHQLESYLGLVPGEKQSSAKQHRLGITKAGSSAVRRVLIQAAWAVRRVRSPQPMMQWALGIEHRRGKFVATVALARKLAGILFALWRDGTTYDARLGAKTLA

SEQ ID NO: 58226 - protein, 355 aa, unidentified
MDSEKYIGLDVHQATIVVAVTDSAGKLVMESILETKAATILQFFAGLRGTLWVTFEEGTWSAWLYDLLNPHVDKLVVCNPRKNALLKDGNKSDRIDARKLAELLRGNQLKPVYHGETGVRMLRELSRSYLTIVKDLSRVMNRLKAVYRSWAIPCAGRDVYYTRNRAQWLAKIRDAGVRRRSERLYEQLDMLQYLRQQARRELLAESRKHAITAKLRQIPYLGPIRSALAVALIQTPHRFRTKRQLWAYSGLALETRISAEYRLVEGQVRRSKKLLCIRGLNKDHNHDLKGLFKGAATMASVRPGPFQDFYQAALAKGIKPTMARLTLARKIAAITLTLWKKGENFDVEKLKSQAA

SEQ ID NO: 58227 - protein, 352 aa, unidentified
MRPSQKTPETITTIGIDLGKNTFHLVGLDKRGAIVLQQKVSRAQLERRLANVPRCLIGMEACSGSHHIGRQLSAQGHEVRLIPAQYVKPFLKGHKNDYRDAEAIAEAVQRPTMNFVAIKTPEQMDLLALHRVRSRLVGQRTGTINQIRGFLIERGITVRQGLVPLRRALPDILNSNTDVLSPRLVRLITELMQDWRRLDERITALSAEIEVLARQDDSSRRLMTVPGVGPIISSAVVAAIGNGAGFKQGRDFAAWLGLVPKQESTGDRTILGKISKRGNKYLRTLFVQAAHVVLVRRPTAAMRGLWPWIEQAAKRLHRNMLAIALANKLARIAWAVLARGRDYQPRIAANVA

SEQ ID NO: 58228 - protein, 333 aa, unidentified
MNEITTLAIDLAKNIFQRHGVDVRGVCVRRRQVRRAQLLGLSAQLPPCTVAMEACGGAHEWARRFQALGHRVRLMAPQFVKPFVKGNKTDRNDAEAIGEAAQRPGMRFVALKSVEQQQVLALHRLRSATLKARTALANQLRGVLAEFGCVMAPGLSHLRRQLPALLEDADNGLPPLLREELTVQAQRLREMDTQVQRLGECIAQQARADGRCRILMQRRGVGPLIASAFAAELGDPRAFKNARQVAAWLGLVPRQHSSGGKPILPGISKRGDAYLRTLLIHGARAVVRTASRYDDPLSRWVRELALRRGVHKATLALANKMARQLWAQLAYGR

SEQ ID NO: 58229 - protein, 385 aa, unidentified
MSELNDLSRSLTSLEQDKTIIAVIEMSQSSWLVAGIVPGIERHPLKKLEPSEEELVRLLMRWRTEATKNGHTITRIAVAFEAGRDGFWLARWLRARDIETYVIHPTSVAVSREHRRAKTDRLDTGLLKRVFIGWLRGEPDHCHMAAIPTLAEEDAKRPNREREGLVRERTRIVNRMKSCLVRFGIRNFKPTLRKAPERLATLGTPEGVPLPPNTLLELRRDMARLRFVMDQTKEVEEARAQRLEQAPQEKTHAMIRLIARVIGVGIETADMLVHEILSRQLRDRRAVARYAGLTGAPDESGNKRREKGLAKAGNARVRRGMIQLAWRFLVFQKDSALVQWYRTRTESAGKKRKTMIVALARKLLIALWRLVTTGEVPAGVVLRAA

SEQ ID NO: 58230 - protein, 347 aa, unidentified
MTTIEDARVITGGVDTRADMHVAAALDSIGGLLGVQEFPATAAGYASLLGWLRGFGTLAVAGVEGTGSYGAGLARHLAAAGVRVVEVDRPDRQDRARQGKSDPLDAVSAARAALSGRASGAPRGRDGAVEAIRALMVAKRSARQERIQAINQARALIMTGPEELRARFVRRSPAQLIEAIAALRPRPGDVPGFATRVALRELGRRAQFLDAQLDRLDELIGPLVTARAPGLLALHGVGPDTAAMLLVAAGDHPERLRSESSWAHLCGVAPIPASSGKTAGRYRLNRGGDRQANSALWRIVIVRMNSHPATRAYADRRSEEGLSKKEIIRCLKRYVAREVYRQLRNGA

SEQ ID NO: 58231 - protein, 424 aa, unidentified
MTYRIAGIDVHKRMLAVVIADVAAEGEYQFERRKVGTSPSELCRLADWLVAEHVEEVVMESTAQYWRPVWATLEQRWRPKRLQQGMGSGKLHLAQAQSNRGASGRKKDFPDAERLVKRLVAAELKLSLIPDGEQRLWRTVMRRKHQLTRNRVQFQNRLECLLEEAHIKLSCLVSDLLGKSARRMLQAVADGATSPEAIAARADHRLRATAPQLCDALGACRNLHPVYRHLLKMALEELKLMEEQIDKLEQEMASLLSAHQDVVQRLAEVPGLGVDSAQQILAEVGPTAAAFPSAKHLASWVGVCPGEEESAGINYSHRSPKGNRQMKGLLNQASHAAVKTKGSIFEFLYRRLVPRLGHAQAIGAIAHRLCRLIWMILHQAIRYEERGPAVSRAKTERRAAKMIRELRRLGYRVEPRAYQTGVAL

SEQ ID NO: 58232 - protein, 412 aa, unidentified
MDILYPVCCGVDVHKSFLIATIITTKDGSLLPQYTQKRFSTFNSSLKKFAAWLIEHDCFHVCMESTGKYWTPVFNILEQQSIHTIIANPKWVRSVQGNKDDKKDSKRIAELFRLGMVPASFIPDKDTRILREYTRYISKLIAARSSEKNRLQNAFTVCNVALDSVVSDMFGKSATAITDYLVSDDTFSPEHCISLLQGSLKKKADLVLESILGYDIEDVQKTRIILIRRHIDFINTLIDTLESNIDSMVVQYEEHIRRLCTVPGIKRTSAIKIISEIGVDMSQFASSRRLCSWAGLSPRRDESAGKKHSVHISRAGVYLKPALVQVALAAVKDKENPYYAKKYERISKRRGKKRAIIAIARMILTAVYAILSTGQVWHPTDLDRIKSLEQHQLEKQTQQAIRFLESQGFSVG

SEQ ID NO: 58233 - protein, 421 aa, unidentified
MRGLGLDVHRDFCEVAIAEHGRVRSAGRIQTRVPALELFAQSLGSDDVVAIEATTGTDRIVAVLQRHGIRVVVANTRKLKAITEAKAKTDRLDARTLAKLLMSGLLDPVWTPDERTRALRRLTNRRERIVRARTRSKNEAHGVLSRNLCERPPVTDAFGKAGREWLAGLELPVDERLTLDGCLRQVDFLDAEVAAIDREIAKQALAWPEVLRLMTVPGVNVQTAATFMASVGDISRFPSARKLVSYLGLDPRVRQSGNSPARHGRISKAGASEARHMLGEVAWKVTLTPGPLRAFFERVRARRGPQIAATATARKLVTLFWCLLTREQDYAFGRPAMTRNKIRKLELVAGAPPQKGRHGIAGGKSKPVFDAERELSRQAEAAYRRLVDDWQATGPKKAGASATPGRASQRPSKGKAARQAL

SEQ ID NO: 58234 - protein, 340 aa, unidentified
MQVSTVGLDIAKNVFQVHGVDNHGRTVLRRKVSRGQLVKLFAGLEPCLVGMEACATAHHWARQLGALGHEVRLMPPAYVKAYVKRNKNDAADAEAICEAVTRPSMRFVPIKSAEAQSLLMLHRARHLLVRQRTAQASAMRAHLAEYGIVAARGLSRLRDLLPVLDADAGIIPELARQTLLLIAQLIEALTLQIRKIDTELLRWHRNSPESQRLETIPGIGFITATAMAATVRDARAFRSGRQFAAWLGLVPRQNSSGGKDRLGGISKMGDRYLRHLLVVGATAVVRYTRRKTTAISLWANRLLERKPARLVTVAVANKMARIAWAVMAREENYRATPATA

SEQ ID NO: 58235 - protein, 335 aa, unidentified
MKKYLYFIGIDVSKLKLDVTICKENELHQSHHFIVTNDKKGLKELLDYLKKRTIISSDVLFSFEDTGVYSMPLCCFLSDVGLDYWMIPAIEIKRSKGLVRGKSDKADSKDIAIYSHTHFYKLRLGKIPEKDLLKLRILFTEREKLLKAIKGLDSTKEGLEYMPKEVYKEIERLNKSTINHLKKAVEKIEKRMQEIVKANEELHQQNKLIQSIPGLGPMTSIYLILVTKGFTTFKNSRQLSCYAGVAPFEYSSGSSIKGRIKVSHFADKKLKSLLNMCAMNAKKCDPELKLYYERKLEEGKSKMLVLNNIRCKLLGRVFAVINRGTAYVNIQKFAA

SEQ ID NO: 58236 - protein, 331 aa, unidentified
MQAGEGIIGIDISKDSFDLVLRGTGREQHRVFTNDLKGFKAMLAWVEKQPEQVLHICMEATGSYWEGVAEYLYQAGYTVSVVNPYQVKRYADFLLNRNKTDKADASLIAEFCEKERERLRVWEPHPPEIKALRSMERRLDQLRDMKQQEQNRLKSGVSDPVVIESLQENLKHLEDQIKALLKKIKEHVDQYPELREKLGLLTSIPGIGMLTAIKLIAEIGEIEDFASASQLAAYAGLAPKQFKSGSSVHKQTRISKQGRTELRRCLYMPAVVASEHNPIVMDLKRRMLASGHANMEVIVAAMKKLLHLAYGVLKSGKPFDPDYGNQFCFNP

SEQ ID NO: 58237 - protein, 448 aa, unidentified
MAHLRPTTVLSTINLNTAGIDLGASEIYVAVPTDRDTQSVRVFSSFTCDLYALTHWLKDCRITSVAMESTGVYWVPLYDILEHEGINVCLVNARFVKNVPGKKTDVLDCQWLQQLHSYGLLSNSFRPAEDIRRFRTITRHRDMLLKYRAAHVQHIQKALHQMNIQLDTVLSDITGVTGLMILRAIVAGEHNPEVLAQYRDGHCRRSQEDIVKALQGTYLDEYLFELAQALELFDFYSQQILDCDLRLEQLYNQAVPESSVSLPPPAKRYKRVSQPLPFDLRSCLFRLTGVDLTPIDGLSAISIPTILSEIGLDMNRWPSVKHFTAWLCLSPNNNITGGKIISTASRRTTNRAAQAFRLAARSLYHSKSALGAFFRRMQALHGPQHAIKTTAHTLARIVYAMLKHHSEYQDLGELHFEQLSKERTLKRLQKKAAEFGLQLAPLTPTVVT

SEQ ID NO: 58238 - protein, 484 aa, unidentified
MAKRKMSTFERLNAGRMNRSQRRELGRRVAASDPGLTVVHADAGGIDVGNESHFVAVPRDRDANPVREFGCWTESLNQMAEWLKSCRVGTVAMQATGVYWIALYDILEQHGIRVALVNAQHTKNVPGRKTDVQECQWLMKLHTYGLVRDSFRLQQDMEYARTIWRLRDRHVKDAGREIQHMQKALTKMNIQLANVISDISGTSGQAIIAAVLKGERDPYKLADLADYRVKASREEVARSLEGNWRAEVLFELQQAVDSYRFAHRQMQECDEKLALYLANLPTRTLDMPAPPNPAPETAVQRRKKARKPRDNEPRMDLKVELKRICGVDLTSIDGINVMTAFTVISEVGTDMSGFQNEDHFASWMGLAPSKDISGGKTVGRGKKKVKNRVAVALRTAATSLLESDTHLGARYRHLRRQLPTFKAAVKAMARYLAVLIFRLLTRGEAWVDRGAEQFERRRQERELANLNSKATARGYRLIPIAETL

SEQ ID NO: 58239 - protein, 413 aa, unidentified
MKIVRHNCCGMDVHKNIIVATIGITDSNGITNYIQEEFSTLNPDLIRLKDWLLSHGCTEVCMESTGKYWIPIFNILEDCIDVNLTHPKYVKAIKGKKTDKKDSKWICDLYKHDLIKFSFIPPKEIRALREICRYRYKLICMRSSERNRYQNCMTVSNIGLASVLSDPFGKTATAIMQEVLTSTVIDDSKIIKLVHGSCKNKDKIFDSLKDSKIETDQRFKMNHAMTHMEELTAHIQACELEMVKRSIPMMSQCRQITELKGFQLLAAIIIISEIGNDMTQFESDEQIVNWAGLAPSNNESAGKKKSVRISKAGQYLKPLLVQCALATIKDKESYFGIKYSRIKKRRGHKKAIIAIARMLLVSIYHMLLTGEEFNPSDIESFKNPKPKEPIKFTVDSALAFLEQSGINISSIKI

SEQ ID NO: 58240 - protein, 401 aa, unidentified
MKYGVGIDVSKGKSTIAILSIAGEVIETPFEINHDFEGLNLLEEKLKDIPREDLKIVMEETGTYHLPILSYLIDKEYFVVAENALKIKKYLDRGLRKAKTDKKDSLKLAEYCCDNWYKLNQVRENDEIYDNLRLLSRQYLSQISVQVKQKINLSNLCDLIFPGYYQLLDENNFILGLETFKKYYHPEIIKNKKQSQFVNEIDKLAKKLGHKGAGITLANKIYTLANKTVCPRPNNEYAQLSAISCADALILTIKTTTSIISEMDKLARELPEYNVISEIPGCGKKLTARIIAEVGDIRRFKNAGSIIAYAGLDAPPYQSGQFEATNRHISKRGNKYLRKTGYEVMKSIKSSCKTGNELYDYIVKKENEGKMKKVAKIAGLNKFLRMYYGKVKKKYKELEIW

SEQ ID NO: 58241 - protein, 316 aa, unidentified
MSKDQMDSFVGIDVSKNTLDLRLEPAGESLHVTYDDAGVASICQRLTAVSPTLIVMEATGGLETRLASELAACGLPVAVINPRQARDFAKATGQLAKTDRVDAGILCAFAQAIRPAVRPLKDADTRELDDLVTRRRQLVAMRVQETLRLGSAGSRALQKSLKIHIAWLDKRIDDLDDDLVTRLRTSAIWCAKDDLLSGIPGVGTVTRLTMLAKCPELGHLNRREIAKLTGVAPLANDSGTHRGKRFVWGGRAEVRAVLYMATISAIRCNPTIKLFADRLKKAGKPSKVVITACMRKLLTIMNSMLKNNEPWSPKTT

SEQ ID NO: 58242 - protein, 365 aa, unidentified
MRIDIGVDLHKTQFTVYAQRGETSGVNGQYPTTEEGYVTFLRKLGQWKRSGHDIRIGVESTGNTRYFKHRMEERGYSVVVINTMKFKVINESVKKTDKHDAATIAEFLSKDMLPESRLCSESSEQLRRLLKVRSTLVRTRVTVKNQIHGLLVSLGMEDTKASLQSKRGRQKILDTLAREGNGLVVQPLFETIDRLTENVKVIENEIEKLVAGDKVVELLETIPGCGPVTACTIRAYTDDIQRFSNHKKYASYAGLAPWVQCSNETEHYGRITKRGPEELRTAFVQLVVGIRRSRQSASWRLMERYEAMKTVKGSGKSIIATARKLSKIVWFMLTREEAFNVGLMTDDSLEAKIESMRRTLNKMSA

SEQ ID NO: 58243 - protein, 411 aa, unidentified
MQVLHSCCCGLDVHKRFVVACLIRSSEDGKQQKELRRFNTLTPDLLCLIDWLQEACCTHVALESTGVYWKPIFNLMEGLFEIVLVNAQHMKAVPGRKTDTKDAEWIADLLQHGLLKASFIPPQPQRDLRDLTRYRSSLKQERTQHVNRIHKLLEETNIKLSSIFADMMCKTGRAILDALARGESNPEALADLALLWAPHKRDALVPALTGCMRAHHRFLLRELLGMIETLERAIARLDREIEEQLRPQQATIERLDAITGVSHRVLETLFAEVGWELDAFPDAEHLASWVGICPGQHESGGKRMSGRTRKGNRYAKTILVQAAHAAGKTKNTYLGAQYRRLSKGRGIKRAAVAVGHSILVIYYHMLTTSQPYQEKGEDFFVHHDRNERERRLVKQLERLGYSVQLTQERTI

SEQ ID NO: 58244 - protein, 417 aa, unidentified
MSKIIERCTGIDIGKRFLVCCVVTGAAHEESRSQTLRFDTTVPALERMSEWLHRERVTHVVMESTGSYWVPVFNILEDRFTVVLANPEEVQNRKGHKTDRKDAKHLADLLRHDHIRPSYIPPRATRELRDLTRRRVQLMQDCTRERNRVQKLLEHANVKIAGVLSDVFGVSGQRMLVALLEGESTPDQIAELACGQAKRKIPQLTEALVGHRMTEHERFLIRSCLRHLACLEEELESLDVEIVRRMGMPPFQNAFALLQTLPGVGELSAAAILAETGTDVASFPTAEQMASWAGLCPGNRESAGIQKGSHTTHGNAYLRTALVQCSWCASRKQGSGFEARFKRLVKPLGPKRAIVAVAHHMLIIIYCMLRAGVSFRGAEGAPQQRRRQHRAHHHLRCLRRLGVAVRVLSDDLSGWAP

SEQ ID NO: 58245 - protein, 355 aa, unidentified
MISVGVDAHKRVHQGVALDDAGREVSQWRGANTPEGWQHFLQWVAGLGETRMVGIEGAWGYGRGLAQFLVLHGETVLEVNSRWTAMGRRVARKRDKTDRLDASAVAAYVRREGSNLPTVSAEDETAALDMLSNERDAAVGEATRVRNRLHALLLTIDPAYGTSYGRLKSRAVLVRLETMSPATESLLDVERSGMVHRLVQRLRRLEDEADELAERIRELAAPRFLPLTRLCGINLLTAGMLAGILGPGQRFATDAQLAAYAGVSPLEASSASRVRHRLNRGGNRRLNALFYRIALTQAHYSTEARAYLARRVSEGKTKREAIRALKRHLVRVVWKLWKECGDTSGAGGLLVQANA

SEQ ID NO: 58246 - protein, 342 aa, unidentified
MQVTTIGLDIAKNVFQVHGIDAAEKVVVRKQLRRRQVLEFFKALPACLVGMEACATAHYWARELTKLGHRVRLMPAKDVKAYVKRNKNDAADAEAICEAARRPTVRFVQIKSTEQQGRLMLHRARDLLMRQRTQVINAMRAHLAELGIVAAQGRDGIKELLKIIASEGDARLPVDAHTSLVVLAAELQAMQTLIGSIEKRIMVQYRSNEASQRLETIPGIGVIGATAIAATVPDPKVFGSGRDFAAWIGLVPREDSTGGKQKLGPISKRGDRYLRRILVVGACAVLRYARHKPEKYPWLTKLLARKPFKVVAVALANKMARIAWALLAKVDTYRVPALAAAA

SEQ ID NO: 58247 - protein, 424 aa, unidentified
MRFIGLDVHRDFCAVAIAEAGAVRSAGRVKTEPAALLLFAQSLGADDQVALEATGNALGIARIIEPHVRRVVLANPKAVKGITRAGAKTDRIDARTLAQLLAGGFLPAVWLPDEQTRVLRRRISARAQLVRQRTRAKNQVHATLVRNLKGRPPVSDLFGVRGRRWLADQELPADEQETVAACLRQIAFLDGEIGQVERALAEQVLASAEMRRLLTLPGVNFVTAAALLAAVGAIGRFPTARQLVSYLGLDPRVNQSGSEPARHGRISKQGPGETRHVLVEAAWHASRTPGPLRAFHQRVAGRRGRNVATVAVARKLAVVAWHMLSRGEDYAFARPSLTREKLRRLELMTGAERQKGKRISVWVTREQHQLDKELAAQAELAYRRLAQDWQPTISKGTGAAPGRASRRPSSGQAARQETAPLPAL

SEQ ID NO: 58248 - protein, 383 aa, unidentified
MYNAVGIDVSKGKSTVAVLQPGGTVIRKPFDVSHTSQNLIELAHYLGSLEGSTKIVMECTGRYHEPMLKALYEAGLFVSVVNPHLIKNFGNNSLRRVKSDPADARRIARYTLDNWAELRQYSGMDNTRTQLKTLNSQFSFFMKQKVAAKANLIALLDNTYPGVNKLFDSPPREDGSEKWVDYAYSFWHVDCVRRIGLKTFTERYRAFCRKHHYIFQPDKPEKLFHASKELVAVFPKEKTYKLLIQQSIQQLNLASGHVERLRQEMNALASTLPEYSTVMGIYGVGKTYGPQLIAEIGDVSRFTHREALTAFAGVDPGVDESGQHKSKSNRASKVGSARLRKTLFQIMTTLLQNAPEDDPVYRFLDKKRAQGKPYYVYMTAGAN

SEQ ID NO: 58249 - protein, 410 aa, unidentified
MSHRVAGIDVHKKVLMVVLIDSQDAGWSGQRKRFGTVSSQLRLLSEWLREQGVEEAVMESTAQYWKPVWYELERQMRLHLAQAFSNRAPKGRKHDFRDAERLVRRLLAGELTLSLVPSGEQRSWRTMTRMKTQLTEDQSRLHGQIESLLEEMRIKLSSVVSDLLGVSGLRILTALAAGQRDARKLAGLRDERLRASEETLVDALSGHFEPYQQQLLGFYLQRYQLIQQQIEQLHAMIGQAMEQHQQAVRRLAQVPGFGVNSAQQVIAEVGVQASTFATAAHLASWVGTCPGKEESAEKNRTSRSAKGNRYLRRILNQVAHAAVKKQGSRFQIVFRSLLPRLGYKGAIWAVAHRLCRLVWKILHDQVDYIETGSEPNPKAKQQRARKLLHALRKLGYDVTIPNLNPARAQS

SEQ ID NO: 58250 - protein, 343 aa, unidentified
MEYGAIDLHTKESQIRIVTSDGRVVLDQRIATRRDRFTWLFGDRPAMRILLETGTESEWVAQHLESLGHEVVVADPNYAPMYGERTRRIKTDKRDVAALAEANRREIYRLAHRVSTAQRDVRRRLRVRTHLVGMRRQVISVMRAHLRAEGLRLRRGAAESMLARYRHMNVPAALQEIFAPLLELLETLEPLIRQADQWAKQQARRDPVIARLTTAPGVGPIVALSFRATLDDVTRFSDAGHVTSYLGLVPRESSSGDRRCRGGITKAGPGHMRTLLLQAAWAVWRTPSGSAALHAWVRRLGERRGRKVAVVGLARRLARILFAMWRDGHLFQPTRLTRIIVAA

SEQ ID NO: 58251 - protein, 330 aa, unidentified
MTHYVGIDVSKVKLDVAWLKDIDKVKVKTKVFANEAADFNQLIDWLKANINPDLTDIHVTLEATGIYHENIAYYLHEQGLNVSIVNPAFVRSYADSLGSRHKTDKKDSILLARYAYTAKPDLWTPPPAEARHLKSLLSRLDALQEDLQRELNRQEKADATDTAPIVKASIEQMIDTLKIAIAKLNDDIDDHIDKHPNLKQDQQLLESIKGVGPVVSKQMVSLMHNKQFTKASQVAAFLGLVPKHVESGQFKGKSRLAKNGSSDIRAKLFMAAIVSKQWNPDIKAQYDRLLARGKCKMQAICAAMRKLVHICFGVIKHQMPYQPQVTQIAT

SEQ ID NO: 58252 - protein, 345 aa, unidentified
MDKISTVGLDIAKHVFQVHCETAAGQVVVRRQLRRAAVLTFFGKLPACVVGIEACSSAYYWAREIGALGHEVRLMPPVRVKAYVAWGRKNDAADAAAICEAVRRPSMRFVPVKTVEQQAVLMLHQARRLLVAQRTRLSNAVRGHLAELGITAAKGAAGFTALLRLVAAPADERLPAIARAALGTLAHQWHSAGEQIDGLDAQILAWHKSDADSLRVATIPQIGPIIASALVARTGDATRFRNGRQFAAWIGLVPRQNSSGGKERLGRITKTGDRYLRQLLVIGATGMIRRVRANPALSPWLAGLLRRMPAKKAAIALANKLARVAWAILAHGGVYQARQHEPAAG

SEQ ID NO: 58253 - protein, 431 aa, unidentified
MNYNQNKKIAQITPCTLIIGVDIAKFKHVARAQDFRGMEFGSPCYFENTKEGFEHFLYWISETKKTHSMEKVIVGMEPTGHYWFNLAHILKENEIKFVAVNPLHVKKSKGLDDNSPTKNDVKDAKVIAQLVKDGRYAEPTIPQGVYAELRVAKKIRDLLTEDLQTVQGQVHNWIDRYFPEFLKVFKKWEGKAALQFLRLYALPHEIANFTEDELLIHLRKTVKRSVGANKIRELKRAASQSIGLRQGSEMAKMELKTLLAKYDLIQTEFEELDAKIDSLLDEIPGVAQMLAVKGVGRDTVAGFFAEVGDLSDYTHPRQIIKLAGLSLKENTSGKHKGKTTISKRGRKKLRALLFRVCMILVAKNSAFKALHTYYTQRTENPLKKMQSLIALCNKLIRIFFSINKKQFEFSEEKMLKDIPHLSGLKKAELAA

SEQ ID NO: 58254 - protein, 316 aa, unidentified
MQMLLNIGVDVSKAKIDICVHESGARLCLANTRAGLSSWLAQLPDGSRIGMEASGEYHELLAELAHAKGMAVFVLNPRSIRHYAHSLGLRAKTDRVDARLIARYIAQEHTRLHRFTPLSDEQREMLQLIRRRAKVNSMRQAARASFKGMRGLQPQLQALLASLDQLTRAIDVRLGALISACPQRQQAARALRAIHGVGALVSAALLSSLERIDFACADAFVAYHGMDTRVDDSGTRIGRRRLSKRGPGEMRRLMFNAAMAAIKTTAWKPIYTHYLERGWPPTAALMIIGRRLLRTAWSIYKHNTTYDPARLTQGLT

SEQ ID NO: 58255 - protein, 430 aa, unidentified
MRDNYNMKSEKFGKINDKTLVGGIDVAKDIHEVKWVNWRGEQIGKGLRFNNNRQDFEKLIRQAKQVQEKIGAEKIIMAMEPTGVYGFALEEYLQQIGIDVLIVNGRDVKRTSEVLGNDSSKNDARDARIIGHLVSLGCYSESTRHKEGPYCELDILLRRRASEKEDLIRFTNRLHKELAMLFPEYGVFKNTGLSMGVLTLFKEFGNLEAIIQAGEEGIYACWRKHRTNGYGKGEAKQMHQMAKNSIGIRQTSQAVTYTMRAYIDDYLRSLKNLEAINQLIEQQLAEIPQAKRLMAIDGIGPIITAEILAGIGDIHNFTSPKQILKLAGLAPVTNESGKHKGKDKLSKMGRKRLKTAFYQVGLCLIANNDAFKQIYHHYTQERANPLIKMKGVIVIANKFIRVIYAMLKNGTAYDEQRMLADIQRDDQTAA

SEQ ID NO: 58256 - protein, 422 aa, unidentified
MKKHIYRTTDVKVADWSEIEKQTDNEHVVFSIDVAKEDMVGVLMKQDRSVIRTLKWQHPHESVGLVDRLAAKLGCATLEVVQEPSGTYGDALRRLFQQAGLPVFRVSPKRTNDAKEVYDGVPSLHDAKSAYIIGRLHLDGASGLWEELPEQRRELNALLGVLEMHQKHFERNRNRLEALLSRHWPEVSCLLKPDSVSLLAVLAEYGGPGQIVANQEEAAKRMRHIGRTGLSHKKLEQVLASARNTIGVPCTKAELYYLRELSQETRRGQIAVGKARKVIEAMVCSDPVIANMGQVVGKTTAAVLVAKQGSPLEYPSASSYLKSLGLNIKEKSSGKYQGQLRITKRGPSLPRKYLYFSTLRLFQRDPIANAWYQKKVRRDGGKKSRAVTALMRKLAKSIWYVARGEAFDATKLFNVQALQLDA

SEQ ID NO: 58257 - protein, 350 aa, unidentified
MTISHYIGLDVHKKSISYCVKTADGTITEEGKLRATRQVLRQWAGKRQQPWHGAMEATLFSSWIYDALQPFAAKLEMGNPSMMKAIGAAKKKSDRLDARKIADLVRCNLLPACYVASVEMRELRRLLRYRNTVVGHAVQMKNKMSGLLMEAGAEYSKQQLHGKKYFTELMGELEEVPESVKDMLRLSRSALEMFETTQRQLLNRLGKEPALVKRLELLRSIGGVGEVTSLTWALEVCDPQRFPSIGDALSYCGLTSALQSSADKQQRGPISKQRNPHLQTVLIEAAKLAPRWNPQLAEVHQRELQRGNRNRATLAVARKLVAYLLAVDKSGKRFEVRIPPAKEMEAEKVA

SEQ ID NO: 58258 - protein, 346 aa, unidentified
MIMIGCDFHPGLEELALLDTETGQRRQHCLSHAFGLEPVRQFYAGLPRPVRVGLEASGYSLWLEELLEELGCELWVGDPARIRKAAPRRQKTDRNDARLLLQLLEENRFPRIWVPDRATRDLRQLLMHRHKLVILRGAIGNQLQAIAMNRGMQKKGRLWSREGREQLKSLILPPWTTRRRDELLSLREQWDREIAELDQVVLREAERNPEARYLMHRQPGVGPITALAVVLTLGPVERFASARKVASYAGLVPAEYSSGARQRLGHLSKEGNPFLRWVLVESATVAVRHDPEMKRMYWRLVERRGKSIAKVAMARKLLTRLYWMLRRRNEGRGLRQRNRVAGELGA

SEQ ID NO: 58259 - protein, 334 aa, unidentified
MEKVTTVGIDLAKNVFSLHGVDAAGKTVLQRTVRRDQLLEVVAGSSPCLIGMEACSGAHEWGRRFQEHGHTVKLMAPKFVAPYRKSGKNDGNDAEAICDAVTRPNMRFVPVKSVEQQGLLVMHRVRQGFVVERTAIINRLRGLLAEFGVVLPLRSVTVRRQAAAAAETLPELAKRAIGDLLEQLRLLDERIGGYDREIEAQAKLCEPAQRLMKIRGIGPTTALAIVATVGNAREFKNGRQFAAWIGLTPSQHSTGGKTRLGHISKRGDSYLRNLLVQGARSVLNSAGMHQDRMSRWILELQPRRGYYRTLVAIANKNARIAWALLAKNETLRSA

SEQ ID NO: 58260 - protein, 411 aa, unidentified
MDYQDNLIYVGVDLHKEHHTAVMIDDRNRKLGEIQFLNKPAAFPKLLQEVKKHTKKGMKAVYGLEDIGGNGRALAVFLAENNCWVKEVNPVLSTARRKSHVTVQKSDSWDAECVARVLRDELEKLPDAKPMDLYWALSQLVTQRRSLVKNQTAQNQKLHQQLSYHYPSYKQFFSQVDGKTALSFWKKYPSPRHLAGVTEEELAQYLRKWSNYCLSDKKAAQILALIKEDGDTTRDFQEKRDFIVQSLVRNIRFNQIELARIEGEIKELMAGLGFQLETMTGIDLVTAAELVAEIGDIHRFSTPEKLARFAGIAPIFAGSGGKGRNYKSKQGNRVLHEIIKGIAIRQIAVTRGKKEPRNPYFYSYYEQKLEAGKTKQQAIVCIMRKLVNVIHYLMRTKAAYEMPTVSEKQAG

SEQ ID NO: 58261 - protein, 427 aa, unidentified
MNYTQNRKIAQVTETTLVVGVDIGSQWHYARAFDWRGIEITKKAFRFSNDLDGYTAFEKWVRETAKNSAKMEVLIGCEPTGHYWYTFARYVGLHGMKLAFVNPYHVKQSKEMDDNSPRKTDEKDPKTIAKLVTEGRYSFPYLPEGIYAELREAVSVRDQIVKAMNAAANRIQRWLTIYFPEYLKVYKVFDSVSGLTMLWQAPLPEDVVKLGADGIVALWHEKKLRAVGKKRAQTLIEAAKSSIGMPGGNCAKMDLHLLLEDYFTKKEQLERITAVLQEELLKVPNSEKLLAVKGIGIITVAGFLAEVGDLRRFTSPKQIQKLAGLEPKENSSGKHKGRTSISKRGRRKLRRLLFQAVLPLIRSNEDFREVYTYYSTRKDNPLKGTQAVIAVGCKLIRIFYVLVSHGADYSSTRFRADILRPGQAKAA

SEQ ID NO: 58262 - protein, 533 aa, unidentified
MATKRNSRKSRAISPAVLGKPKGVIHARVQAVGPERFGVVAVDCAKARSKWMLCDFYGKVLIPPTVVEHQRTALEAATLRLREAIERHGLRDHLVAVEMTGTYHRLVQRAFRKAGSETRLVHPFASRHYRLPAHADIKTDDHDLEGIFRAAVNGFGLVEPEWDERYRRLQLLARHRRDLVQKRAKLQSQIRQVLERCLPGYAALFLGDALWTRPVAMAVARRAVRPEVVLAAGVSGVWSWLKEDKLQVQSRTVERLVAWAGNAAGADPLCDHLARVWRTLYEDWQAKTRQIRRLEQEVAEILAKTPYVLLLSHPGIHVVTAGELAGEMGPIEHYAHAKAISGRAGLFPSRYQSDQVDRADGPLARFRNARLRAAWMRVADCLIKSNAHYRGKSELWKRRGVDPRDIHCRVANRVTRTVFQMVSGRRLYHHPSRLDRQYVLDKLLAFHQAHGTPPHEILGNLREAADQIPKDERAAEAQPLQKTCQLSRRSRRAGPRAIGEILVSLLAKLGLGQVQSEPEAPSPDANVSDTGTR

SEQ ID NO: 58263 - protein, 374 aa, unidentified
MSVYVGIDVHRKRSQVAVVAEDGKVQLNRNVVNGVEPVLKLLGGLPAGTPVAFEAAFGWGWLVQLLEDYGFEAHLVHPLRCKAIASARLKNDKVDAAILAQLLRADLLPEAWIAPPQVRQLRALLRHRASLVRVGTQARNRIHAVVADFGYDRAGTYWTGPGRGWLAELDLPPVSRQIVTGCLAVIDALEVTIGGLDGQLRARAKADPRVKTLTALPGVGQFTALVMLAEIGDITRFGSARKLASWAGLTPTVRGSDLSVRHGHISKQGSAWLRWVLNQAAQTAKRSPEFTATYAAIAKRRGKKIATIAISRKLLTRAYHLLAAEAARAPAAAAATSATGTAGGAPADGGGSPGPGHARSSGMSRPPGRARSSD

SEQ ID NO: 58264 - protein, 344 aa, unidentified
MSQVTTIGLDIAKNVFHAHGADERGAMVFSRKLTRGKLLEFFAGQPVCIVALEACGGAHHWARQLQTMGHDVRLIPPSYVKPFVKRNKNDAIDAEAIAEAAQRPGMRFVAVKSEEQQAAGLVFRTRDLAVRQRTQLINAIRGHLAEYGWVAPRGTAHMTMLADLLEDEEMTSSLPAAARPMFKLMVDMLADLDKQVAVLDREIARRAKEDEAARRLMTIPGIGPIAATAIIALAPPIETFRKGRDFAAWLGLAPRQHSTGGKQRLGSISKMGERTIRRLLIIGGSSMLRQACRFGAPAGSWLERMLARKPRMLVSVALANKMARMVWALLTKKENYRAPTAVAA

SEQ ID NO: 58265 - protein, 470 aa, unidentified
MAAVMIGVDPHKASHTAVAISAAEEPLGELRVRACVAQAERLLAWAAAWPQRTWAVEGAGGTGHLLAQQLVSAGERVLDVQPKLGARVRLLAAGDVNKNDPNDARSVAVAALRSAGVREVRADDHAAVLKIWSKRYRDLGRSRTQVVCRLHAVLGELIPGGVPKAITAARAARVLKAIRAEGAVQAARWELAAAFLEDLRRIDAGIRETRKKLAAAVAAAGTSLTGLFGVGPVIAAAVIGDVRDVSRFPGRDHFAAYNGTAPIEVSSGRRKVYRLSRRGNRRLNHAIHMAAITQIRHRRSQGRAYYDKKLAEGKTPKEALRALKRQVSNAIFACLQADARRAAARLGGPGGQQGNDSAASAAGSHPRHRLFGQATPGPGHHPTTVTGGPPPGPARSRGTAGHSSIAAKLPPATPQVQVERPQRSEDERPGGAARRRPHSAARKAAGQTAQVKTQRPKGTSQAAERTDGTS

SEQ ID NO: 58266 - protein, 370 aa, unidentified
MKKNSIREQSPKRQIANKAVPLTIGMDLGDRNSRYCVLDQDGEVVREGSVATTRKAMSQTLAGWGRCRIAIEVGTHSPWLSRLLSSLGHEVIVANARQVQLISASSRKNDRVDAQTLARLARVDPQLLRPIRHRSEKAQQDLMVIRIRAALVDARTSLVNAARGLAKAMGERLPACDADSMGVEKLKGLPEQLQEVMKPLLEQVESLTEKIKKSEQTIEQIARKDYPETGLLRQVSGVGPLIALTFVLTVEDKQRFAKSRDVGCYVGLRPKQSESGERQPQLRITKEGDLYLRKMLVQGAHLILSRKGPDTDLKRWGLKLAERGGKNAKKRAVVAVARKLSILLHRLWVNGEVYEPLRNTRARQRAQRAA

SEQ ID NO: 58267 - protein, 363 aa, unidentified
MPKSTPRQSVVCTTAPTSPLVWLGLDAHAQHCVLAQLDDDGTQRQWWRLPTRPDPLVAQVRAIPAADKRLALEETNLARWLWQLLRPHVQQLVVCDARHNKLISAHPNKRDERDAFALARLLRLNELKSVWQIPTDDRARFRTVAQDYEGAVFRQTQLKQEIKATFQHWGLFPTGTRLYAKDGRAAWLKQLPHPDLRAQVELLYTAMDHAVQTQRATRRLLVRLGQAFPEVELLSTSPGLGTVGAHLFAAYIADPKRFRDDSELIRYCRLGIRDRSSDGKPLGYEQLDRTGVGTLKAISYRAWLQAMKRRATSVHDFFCWSKTNTGSATHARLNTQRKLLRAWWTLWRNGKEWDDQKFFPAPK

SEQ ID NO: 58268 - protein, 342 aa, unidentified
MEHTTIAVDLAKSVFQVAVSHRAGRVDEERPLSRDRFLAFFAQRPPATVLLEACGSAHYWARQLQPLGHSVRLLPAHDVRPYVRRNKTDRTDAKGLLEANRNEEIHPVPVKSVGHQAIGSLHCLRSTWLATRTARLNTIRGLLREFGVFIPAGAHHVVPRVRALLDEPTTVPLLLHTTLAAACDEIAVLEANMRAVERQLAALAADLPDVMLLQTVPGVGLITATALVALVTDIRRFPSGRHFASFLGLTPKEDSSASRRRLGAISKQGDVYLRMLVTHGARSVLWHAKAAVHPTSLQCWAVQTEQRRGHNVAAVAVANKLARIVWAVWVQQRPFAANHRPA

SEQ ID NO: 58269 - protein, 414 aa, unidentified
MKQQEVAAWIGLDWADKKHSIHLQVRNGKREHQMLDQKPDVIHEWVAQLRQRFQGQTVAIAIEQRKGAVVHALMMYDFIMIYPINPKALARYREAFRTSGAKDDPSDSELLLDLVSKHGDKLRAWVPDTVEARKLQLLCEQRRKIVNHRVALTNRITSLLKQYFPQALDWVGDVASIQACDFLSNWPALSAVQRARKETLRKFYRQHNCRKASVIDERIAQISNAVPLTTDSAIIEPLSLSVQIYAAQLRSLIRAVQQFDKQIAETFAQHPDHDIFDSFPGAGQVCAPRLAAAFGTDRSRWQSAVEMQSHSGIAPVTERSGDSKWIHHRLACPKFMKQTFHEFSDQSIRFSKWARAHYDELRSRGKDHHAALRALAYKWIRILFRCWKDRKLYNEEKYSAALRRRGSPLAEKIA

SEQ ID NO: 58270 - protein, 331 aa, unidentified
MFPVGIDVSKNTLDLCMLYDGIKGRIKTRNIQNNRHSVENILRWLRLQHCGPEDVHVVMEATGVYHERLATELHDAGFYVSLANPHRSREFARGMGIMTKTDKVDAYMLACYAFLKKPHRWEPPAPEIRYLGALLRRRDVLLGDALREENRLEKYLSTDTPADIISSCRRMAQLLREEVSNIERQIKAHIKASPALRRDYTLLTSIKSVGPQLGMHMLVVLRSHNFVSAEQAAAFLGVVPIEKRSGTSVRSRPRMSKIGPPQLRAKLYMSALCGKIYNKRMRNIYDEMCLRGKPKMVAIGALMRKLVHWCYGVLKTGTVFNDEDLKPVLST

SEQ ID NO: 58271 - protein, 338 aa, unidentified
MEYGAIDLHKQRSVIRIVDAAGTVVLDRTVPTSRAGFASVFRGRARLRVLIETGTESEWAAQTIEADGHAVVVVDPNYALMYGVRQRVVKTDRRDVAALAEANRLGIFRAAHRVSAAQRERRRQLRVREQLVRVRTQAINLLRAQLRQEGYRLGSGSAETVVARYGRLQLPPTLQTSLQPVIALLTHLRPALAALDTTTAAQALADPITRQLMTAPGVGPVTALTYRAVLDDVGRFADAGRVTAFLGLVPKEDSSGARRRKGGITKAGPARVRALLVQAAWTIWRQRHAGDPLQRWVHAVADRRGRGIAIVGLARRLARVLFAMWRDGLPYRVMPLTA

SEQ ID NO: 58272 - protein, 316 aa, unidentified
MDEILRFVGIDVSKDHLDVHVRPDDREQRFTYDNDGLTALVKMQTEMKPSLIVIEATGGYEQAVVAILAAQQLPVVVVNARRVRDFARATGQLAKTDRLDAAVLSDFGEKLRPQLRTWPDESREELKALLVRRRQLVDMITAEKNRQATASKRIRRHIQTHIDWLQKRLSEIDQDLGGMIQKSPMWKAKDDILQSAPGIGPTTSMTMLAALPELGSLNRHTIAALVGVAPMNKDSGKFRGRRVIQAGRHSVRTILFMATLVATKHNPVIRAFYQRLLATGKPKMVAITACMRKLLTILNSMLKTGSHWNSEYAKTC

SEQ ID NO: 58273 - protein, 485 aa, unidentified
MKEATLIRSVGIDLSRTGSHQVRCLDEQAKPCDSFSFDSTLEGLEKFEKRVFSNSDTPTIIFEPTGLAWIPMAVYLRARHPECQMVKARLQKVAALRRYLRSYTKSDRVDGVTLAKMPFIDAEQLDEAYLPPAEYHSLQRLTRQRERLMKSITVRKNRIGSIVNGYLPGLRKAFSDEWSDRARLFYRQRLNPFTVVRDGKSALETFLVSVKAKGAQTESNRVYQACQKLAEFYEKSKAAGMINEDFFDDLQEEIACELRLMETEEAEVERVSVRIEELYGHLHPSDYLRSIPGIGVRTAQVFLAIIGDPHRFRSQSAFANWTGVVPGARQSAGTEGKGLRMTKAGPSMMKRALFQAGDIARRYDPQLAHLYYREMVHHGKTHLQAMGAVMSHLGARIMAVLREGRPYELRDSQGKLLTKKEAMELIRSAYKVPEETRQARRRRKPNEGRLTSRRTREAAKAPQSGPLIPPPKTVYCGEELQSIAN

SEQ ID NO: 58274 - protein, 419 aa, unidentified
MAFKILRKNCCGLDIHKTWIFACIGITDSNGRTEYKQARFSSFSNGLRDLADWLAKYSCSDVCMESTGKYWIPVFNILEKTCWVTLAHPKYTKPQKGNKTDRKDAKWICDLYMCGMVKPSFIPPPDIRQLRDLMRYRVKLTNMLTGEKNRAQNCLTVSNLKLDDVFSDVFGKSSRSIIQYILEHPGEQFDVTPFIHRRCKHPVEEIQAAVDGVVSREQAAKLKECLLHIDQLNAHRERIEAEILRLAEPYPYQLELIRTVPGFAAAPLTAVALISEIGVDMSVFPSAKHLASWAGCCPRNDQSNKKVKSTRISRAGCYLKPLLVQIANAVIKSDRHPECRERYRRIKARRGHKKAIIAVCRMLLTAIWNILSKLEPYSAKGYLADKLTEHSVVISKAEGLALLRKRGYIFKDELAVESG

SEQ ID NO: 58275 - protein, 446 aa, unidentified
MPDCCGRARGSVSLSPGGPSGRRWRGPFRLEGLVVAVEVLHERVAGLDIGKASVTVCVRAPGRRAGTRRSQTRTFRTMSRSLQVMADWLVGEGVTVAAMESTATYWKPVYYALEDRMECQLLNAAHMKAVPGRKTDVKDAQWIAELLEYGLLRPSFVPPPAVRKLRMLTRYRVQLLGDRTRDTTRLEQMLEDACIKLSVVASSLTTVSARAMLHAMIAGQADPAVLAQLAKGKMRSKIPDLTEALTGRFDAEHAQLAASLLARLERVGVDIAGLDEMIERACKPWKRQIELLTTIPGVGVRVAQTIVAETGGDMTRFPTAKHLAAWAGVAPAMYESAGRRSPAGHRMGNKWLCAMLVEAATAASRTKNTYLAGQYGRLSRRRGAGKAQLAVANSIIVSAYHILGKGQTYRDLGPEWGKRRSAEARTKHLVAELERLGHSVTLGPAA

SEQ ID NO: 58276 - protein, 444 aa, unidentified
MAGVMIGVDPHKASHTAVAISGAEEQLGQLRVRACAAQAGRLLAWAAAWPERTWAVEGAGGLGHLLAQQLLSAGERVLDVQPKLGARVRLLATGNVNKNDPNDARSVAVAALRSPAVREARADDHAAVLKVWSKRHRDLGSARTQVVCRLHAVLCELVPGGVPKKIIAPHAARLLDSVKPPDAVAAARWELAAALIEDLRRIGAQLRDTRKKPGTAVRASGTTLTGLFGIGPVTAAVIIGEVRDASRFKNRDHFAAYNGTAPIEVASGGRKVHRLSRRGNRRVNHAVHMAAVTQVRQPHSEGRAYYDKKLAEGKTRKEALRALKRQVSDAVFACLQADARRARARDPGGQQGNGSAASAAGSHPKNRLFGQATPGPSPHPTTPAASQVPGTTGHSSTAANLPPTAPQVQVERPQRSEDERPGGAAPPAAAPGREEGRGTPRPAS

SEQ ID NO: 58277 - protein, 357 aa, unidentified
MKFYNQQHEFYCGIDLHANSMHVCVVDQHGKKCLHKNFPTKKPERFLIALQPYEKHDLIIGCESTFNWYWLADLCTQQNLPFLLGHALYLKAIHGGKTKSDRIDSEKLAMLLRGGNFPTSYVYPKEMRGTRDLLRRRGSLIRKRSGTLVHVQIVNHQQNLPAFQKKISYKANRRNLAERYEEDSIQRTIMLDVELLDFYDKKIQELDLYLEQHAKIDDPDTFYRLMSIPGVGGILAMTMLYEIHDIKRFPAVGNFLSYCRLVKGTNESAGKQYKPTGAKIGNPHLKWAFSEAIKLLKRECPEAKAYAERIEKKHGKHEPTPCSRSNSDAPCIGCGSESVPSTRRESSTKQRSQVASA

SEQ ID NO: 58278 - protein, 342 aa, unidentified
MQIAVLGIDLGKNSCSVVGLDAAGRVVLRRRLSREGVIKFAAGLPRCVVGMEACCGAHHLGRILRDQGHQVRLMSPEYVRPYVKAQKNDDRDAEAIAEAATRPTMRFVELKSEAQLDLQSLHRARDRLVGERTALINQLRAFLLERGIAVPQGRRKLELRLEELLAAEQPSLSPRTRLLIEDMRAQWRELDRRILAFDDEFVAHARTDEAARLLMTIPGIGPLIATALMAAVGRAETFKRGRDLAAWPGLVPKQATTGGKPKLLGISKRGNGYLRKMLVHGARAALRMLSGTDTALGRWLRGLLQRAHKNTVVVALAAKLARVAGAVLRSGRGFEIGAAAAP

SEQ ID NO: 58279 - protein, 346 aa, unidentified
MLYAGLDLSRKRLDFHLLDGEGATLEVGAAPPDGDGLDGLTERLARYGAPIRAAIESMNGARFVHDRLELAGWQVEIADAQKVKGLAPLACKTDRIDAWVLAELARRDLVPAIWLPDPLVRAERERARWRLHLVRHRSSLKQRVHAVLLTHGKPCPVSDLFGVRGRRLLAQLGLPEPWQGTIEASLRLIDELDREIGECERELRRLGADHHYVPLLCTVPGISWVLAYTIAAELGDIGRFPTPRKLVGYSGLCPRVYQSGERDLRGPLAKQGPRYLRWALVEAATHACTHPAYRQRYTDTKARIGKQRGAKVAQVDLARRLAEAIWHMLTRGQPFAPKGATDPLAA

SEQ ID NO: 58280 - protein, 362 aa, unidentified
MAVTMTWIGLDVHARSVEASVVDSVSGELHCRRVSGSEVEPLVSWLASLPTPVHACYEAGPTGYGLARAARAAGIQMDVIAPSKTPRRPGDRIKTDRRDAEHLVRQLMAGGLTPIRVPSLAEEAARDVVRAREQIRRDLMRARHRVSKLLLRHGRVYPKTAGTWTQAHREWLSRQRFDESDLNLVYLDALAAVDGLIARRDALSERLSRIAQSDELWPTVQRLRAFRGIDTLTALGIHLELGDWTRFEHASDVGAYLGVVPSLSQSGESSTSGSITKTGSQYARRLLVEAAWHYTRKPAIGATLRNRQQDLPAHVLQIAWRAQHRLYRMHTSMHARRKHPNVANVARARQLACFLWAAATAP

SEQ ID NO: 58281 - protein, 339 aa, unidentified
MLIIGCDYHPSVQQIAWVDKETGECGERRLKHRAEAEQFYRELKWKQVRVGIEATGHSRWFERLLAELNFEIWIGDPAQIRAKRVRKQRNDRFDAQHILKLLLEDTFPRIWVPTPENRDLRQLVWHRHRLVGMRTRVMNQLQAVAMNEGIRRKKGLWSEKGRQQLESLSLMPWTTRRRQELLQLLDRFDPNIDELSQAIEQEAERMPEVKLLMTHPGVGPITALTFVLVIGRPERFACGKQVASYLGLIPCEESSAEHWRLGHISKQGNKLLRFLLGQSAQSVARCEEQWHRQYAHLSMRRNKLIAKVAMARKLAVRLFWMWRRGWDYQQLKKFGSYVG

SEQ ID NO: 58282 - protein, 408 aa, unidentified
MAIIGMDIHRAFAEVVALAGKSPRRLGRIDMRRDRLAAFAAGLTKDDIVVVEATGNAAAVAEVLAPHVGRVVIANPKQVRAIAHAKIKTDKIDAAVLAQLYASGFLPEVWIPDQNTQALRRQVTRRNQIVRQRTRLKNIVQSILHAHLIPAFPAVNMFGRQGRAWLSAQKLPEDERLAIERHIGEIDRLGEDLKVIQRDLAQYGLADLRVKRLMTIPGLDMIVATALVAAIGDINRFGAPQKLVSYLGLNPTVRQSGSGPSYYGRISKQGPGRARGLLVEAAWAAARAPGPLRAFFLRIRSRRGQHIAAVATARKLAVLVWHILTKQQDYLWARPALYATKLRRLELTAGHAPARGQRGSAYNYNIKATRDQERRRVQQAEKVYERFVAGWNRSGPKVRTSAAKEERQ

SEQ ID NO: 58283 - protein, 352 aa, unidentified
MMIIGCDFHPRFQQISFLLEETGECGQRRLMHTAEAEQYYRSLRGTRVRVGIEATGSYGWFRRLMGELGHELVVGDATQIRASNPRRQKTDKRDAEHILGLLVADRFPAIWQPPAENEQLRQLLLHRSRLVRLRTRVTNQLDGMAKNEGLTLPGGWSGKRRKEIEALPLPGWYGERRKDLLALLDRVEERIAPLNKAVGQAAANNAEACLLMTHPGVGPVVSLAYVLTIGNWQRFPRGKQVGSYLGLIPSEDSSSDKRRLGHISKQGNTLLRWLLVEAASTAQRYDPSWHRQYLRLSMNKHHGVAKVAIAHKLAVRLYWMLRSGEDYQHVRERGSHARQSECPVGRSKRPIE

SEQ ID NO: 58284 - protein, 418 aa, unidentified
MTTTNSNKVFDVMHPICCGLDVHKRTISACLLITHSDGHVESQIEEFETFTDELFRLRDWLLENNCHVVAMESTSVYWQPVYNVLEGSVEVELVNARHTKHVPGRKTDIEDCQWLANLLRNGLTKSSFIPSKETRQQRDLTRLRKKYSQCLADYKRRTQKLFESANIKISSVATDLFGTTGRALMRLLISKSKITYEDVEACAKGRLVHKVQELYRSIQGFFEQHHRFILEELLSTVEFLEAKIAKLDAKIEELLKENNDIIERLDEVPGINRVAACSLLSELGDTLETFPNSQALASWAGVCPGNNESAGKRYSGKTRVKKHPLKTLLVEIAWAAVKKKGSYYQAKYYRLKARRGAKRAIIAIAHRILKAIYHIIKHGDSYRELGDNYLDERTRSYKLRKLKAEAKTLGYRLVPINS

SEQ ID NO: 58285 - protein, 344 aa, unidentified
MKVTTVGIDLAKNVFQLHGVNEYGKTVIKKQIRRDQMAEFFVNLPACLIGMEACGSAHHWARKLQGLGHTVKLMAPQFVKPYVKTNKNDAADAEAICEAVARPNMRFVPIKNIEQQAVLALHRVRQGFVKARTAQANQIRGLLGEFGLIVPQGIGYIASRVPELIEDASNELPGSFRLLVQRLLDHLKELDRQVDELESQIVKWHRQSDASSKLAQVPGIGPITASALVASLGDAKNFDGGRQVAAWLGLVPKQHSSGGKQNLLSISKRGDTYLRTLLIHGARSVIYRAQQKPESCSWINGVVNRRNKNVAAVALANKNARIVWALLAHDREFRSDYAAAKAAP

SEQ ID NO: 58286 - protein, 413 aa, unidentified
MIFRWFVGIDWAAEKYDVCVLDASGKVIAKRVIKHSGSAIAELLDWLQEIAGGHPEAVAIAIETPRGAVVEGLVERGFGVFAINPKQLDRFRDRYTVAGAKDDSRDAFVLGDSLRTDQGCFHRVQLDSAQMLRLRELSRIQEELQVQENRLSNQLWEQLHRYYPQTLTLSPAANEAWLWDLIEMAPLPLQAGQLKLVAVKRLLRSHRIRRVSAEEVLDVLRAPALRLAPGAAEAASEHVLLLLPLLRSVHQQDEQVSKRIKHMLKELSDSLSGEGATPKHSDAAILLSLPGVGQSVGATMLAEASQPLAERDYHALRCYAGCAPVTRQSGKRKLVLMRRGCSERLRNALYYWSLGSLKEDWARQYYDRQRASGNTHGGALRSLGDRWLAVLIAMLKTGTLYEAARRGQRAKAS

SEQ ID NO: 58287 - protein, 346 aa, unidentified
MLYAGLDLSRKRLDFHLLDAEGATVEVGAAAPDAGGLHGLMRRLDRHGEPIRAAIESMNGARFVHDQLEPAGWQVEIADAQKVKGLAPLACKTDRIDAWVLAELARRDLVPAIWLPDPLVRAERERARWRLHLVRHRSSLKQRVHAVLLTHGKPCPVSDLFGVHGRQLLARLALPEPWQGTLEASLRLIDELDREIESCEGELRRLGADHRYVPLLCTVPGIGWVLAYTIAAEVGDIDRFPSPRKLAGYTGLCPRVYQSGESDRRGPLAKQGPKYLRWALIEATAHACKHPLYRDRYQRTKIRLGKQRGAKVAQVDLARRLTEAIWHMLTRDQPFAPKGATDPLAA

SEQ ID NO: 58288 - protein, 341 aa, unidentified
MPGPRARIRKEEPRPSRQPPTAKEERRPVEIFVGIDVSKAVLDVAVAPAGESWSVPNSVEGMQQLVERLRELSPTLVVLEATGGLERRAVAGLAAAAVPVAAVNPRQVRDFAKAMGRLAKTDAIDAAVLALFAERIRPQPRPVRAAEAQELEALVVRRRLVVDTMTAEKNRLSAAPPSKRVRTAIGKTIKWLQAQLEEIDSDLDKTVRGSPAWREKEDLLRSVPGVGKVLSRTLLSLAPELGTLGRKQIAALVGGAPLYRDSGTQRGRRCIWGGRAHVRAVLYMSALVAARCNPSIRAFHQRLVAAGKLPKVAIVACMHKLLSILNAMIRSKSPWAPEVTA

SEQ ID NO: 58289 - protein, 415 aa, unidentified
MNRLIERCAMLDVHKAQVTACVRVPDGDGGRRQEVREFRTTTAGLITLADWLRSYAVTVVGMESTGVYWRAIYYLLEDEFECQLFNARHLRHVPGRKSDVQDAEWGCQLIEHGLIRTSFVPPRPQRELRDLVRYRKAKIQERTREVQRVEKTLQDAGIKLSSVASRVLGVSTRKMLDALISGTHDPDVLADLAKGALRKKIPALREALQGRFTGHHALLIGQMLAQIDFLDETIQTLSARIEELTRPFSREIELLDSIPGVDKRAAEMLLAEIGPDMSRFPTDAHLASWGGMCPGQRESAGKKHSAATRKGSKWLRGTLTECAKAVVRTKGTYLSARYHRIKSRRGHAKATVATAHKILTAAYHVLNQGAAYHELGEEFFYRRDTENTERYRRRLIRQLERLGHQVTLEAAPQPA

SEQ ID NO: 58290 - protein, 342 aa, unidentified
MQITTIGLDIAKNVFQVHGIDAAEKVVVRKQLRRSQVLAFFKALPSCLIGMEACATAHYWARELTKLGHKVRLMPAKDVKAYVKRNKNDAADAEAICEAVRRPTMRFVQVKSAEQQGQLMQHRTRDLVMRQRTQVINALRAHLAELGIVAAKGDKGVKELLTILADEKDTRLPIDARASVIVLAAQLQALQTLIGSIEKRIKAQHRSNQASKRLETIPGIGVIGATAIAATVADPTVFRSGRDFAAWIGLVPRQDSTGGKHKLGPISKQGDRYVRRILVVGAHSVLRRAKENPEKYPWLTQLLARRPFKVVAVALANKMARMAWALLAYGGTYRAPELAAAA

SEQ ID NO: 58291 - protein, 338 aa, unidentified
MKLYGGIDLHSNNSVMALLDEQDQVVYRRRLPNDLATILGELAPYQGAIEGLVVESTYNWYWLVDGLMAAGYRVHLANTAAIVQYTGLKYTDDDSDARWLAKLLRLKLLPEGYIYPKAERAVRDLLRKRGQLVRQRTSNLLAVQNLLARNRGESLTGNAIKRLSPEAVDQLLPEPYLALAVNSNLGVIRALDEQIRVLEKTIQAHVKPSAELQFLLSVSGVGDILGLTILLETGEIKRFASVGQYASYCRCVGSERISNGKRKGRGNSKNGNRYLAWAYVEAAHFAVRYNAQIKRYYQRKCARSNTVVAIKTVAHKLARACYYILRDQVPFNVNKAFA

SEQ ID NO: 58292 - protein, 362 aa, unidentified
MTSNVAGIDPHQDSFTLGIVNQHGIEVCHETFDNNAVGYVEAIDRLTTHRVQLVGVEGSAKWGAHVSIALIAGGLDAREVPPSRSAAQRRSRRLEKTDAVDAIATARALQAEPTLGPVQTLEVYDAAVAKIEAVLEHRRALVATRTLMLHHIGDQIAKLPTEISDQLTTTGKIEARLRRLETINVEDLDTTVSGIYRIEWLQSYVEQDREARRQIRQLERLIDDLLDQHGTTLRDEPGIGPIAAATLVCEVGDPFRFARESKFAKWCGTGAVALSSGEGSGQPVRHRLDFGGNRRINSVLYIASITQQRDTPEASNYLDRKTAEGKTKREARRAHKRHLANRVIRRMWRDEQTRKSLESIAA

SEQ ID NO: 58293 - protein, 454 aa, unidentified
MSKKQGRTKGRGSPGSGLQADAAGVDVGATEIYIAVPEDRDAEPVRRFATFTEDLQSAADWLHGCGIKTVAMESTGVYWIPFFQMLESRGLQVWLVNARHVKNVPGRKTDVSDCQWLQYLHSVGLLRGSFRPEQQVCAVRSLARHRESLVEMAAVHLQHMQKALDQMNLQLHHVISDLSGTTGMAIVDAILAGERNPQRLAKLRDPHIKCDGRTIARSLVGDYRGEHLFTLRQSVTAYRHYQQLLAACDVEMERLLEEFSDRNAPATPALQEPAKRRKPRRNEMRFDLRGHLYRILGVDLTAVPGISALTAHVLLTEVGPDLSAFRNEAAFSSWMGLCPDNRVSGGKLLSSRTRKVNSRAAKALRMAANALHRSQSWLGNYFRTMRAKLGAPKAITATAHKLARIVFHLLTTREPYDESIFAKEELHHQRRIQRKLQKQAKLLGFQLVPIALAE

SEQ ID NO: 58294 - protein, 356 aa, unidentified
MQTENKEIDFRNKTIYAGIDVHKTKWVVTLRMEHLELKTFSMEPSVEGLVGHLKKRYPGASYSSGYEAGQSGFWIDRQLKRLGVANMIVNPADIPTTGREKDKKNDYRDSRKLARELENHTMRGIYVPCESQEALRSLCRIRSQFVGEKARLKNRIKCFLAYYGKPFPGKNTRQWSERLLTTVGEIRYPSSISNECMGLYLDQIVLLQQKVKAIEQMIKEKAEELGVLRTVERLQTIPGIGFVSAITIYTELSDITRFQKLDQLCSYIGLVPSTSSSGEKERVKGISLRQKKYLKSIIIEASWMALRKDPALTLSYSHLLSRMQSQKAIIKIAKKVLNRIRYVWIHDTDYQLSVVR

SEQ ID NO: 58295 - protein, 487 aa, unidentified
MAKRKKSTFERLSRGEMNRKQRRDLARRLTGLDPGLTIIHSNAGGIDVGNESHFVAVPPDRDANSVQEFGCWTADLKRMAAWLKACRIDTVAMQATGVYSIPLYDILTGYGIQVILVNAQHTKNVPGRKSDVQECQWLMKLHTYGLLRDSFRWEERMESVRTIWRLRDRHVKDASRAVQHMQKALTKMNLQLANVITDITGVSGQAIITAILKGERDPWKLADLKHEMVKASREEVARSLEGNWRDDLLFELRQAVESYHFAHLQMRECDRQLERFLASLPTRILERPHPPSDTTAATAPQTKKARKPKKTRRNEPTVDLATELKRICGVDLTSIDGIDVITAQTILSEIGTDMSGFKTEDHFASWLGLTPNKDITGGKIIGSGKRKVQNRVAMALRMAATTLLRSQTYLGGRYRHLRKQLPSHASAIKAMARYLAVLVYRILTHGEAWVDRGAARFEQRRTELEMASLNSRALAKGFKLVPITEAS

SEQ ID NO: 58296 - protein, 425 aa, unidentified
MTYRIAGIDVHKRMLAVVIADVAVEGEYQFERRKVGTSPSDLCRLADWLVAEQVEEVVMESTAQYWRPVWATLEQWWRPKLRESAGARSGQLHLAQAQSNRGAAGRKKDFPDAERLVKRLVAQELKLSFVPDVEQRLWRTVMRRKHQLTRNRVQFQNRLECLLEEAHIKLSSLVSDLLGKSARYMLQAVAEGETNPETIVALADHRLRATAPQLRDALGACRDLHPVYRQLLKMALEELKLMEEQIDKLEQEMASLLSAQQDVVQRLAEVPGLGVDSAQQIIAEVGPEATAFPSAKHLASWVGVCPGEEESAGVNYSHRSPKGNRQMKGLLNQASNAAVKTKGSIFEFIYRRLVPRLGHAQAIGAIAHRLCRLIWMILHQAIRYEERGPAVSRSTTERRAAKMIRELRRLGYRVEPEAYQTSVSL

SEQ ID NO: 58297 - protein, 351 aa, unidentified
MPRTSTVHAVTAIGIDMGKNTLHIVGLDSRGAIVLREKVSRGRITSRLANLPPCLIGIEAGLATHYVARELAALGHDVKQVPPTYAKPFRQGHKNDFRDAQAVAEAVQRPTTRFVPAKTDEQLDLQALHRVRSRLVSERTAVINQMRGFLLERGIIVRQGLRFLRQGLPDILAKRTDVLSPRMGRIVADLASDWRQLDERIEAVTDEIETLAKSDDSCRRVMTVPGIGPIISSAMVAAIGSGAAFARGRDFSAWMGLVPKQMSTGDRTILGRISKRGNGYLRTLFMQAARVILLRPASWPKHSFGVWLARAAQRLHPNVLAAALANKLARIAWTVLAQERSYEARVTKAAA

SEQ ID NO: 58298 - protein, 357 aa, unidentified
MLALGDSAPRKGADAMTFVGCDLHTRMQQVAVLDTETGEISERQLPHDGMAVEEFYAALPRPVTIGIESTGYATWFHTLIQRLGHTLLVGDAAKIRAMVVRKTKTDRRDALHLLDLLRHDRFPTVWVPDPATRDLRALLAHRMRLVRIRTMVKNGLHAIALNYRLARGSKLLRQAGLVQLHALALPPHTAQRRDQSLELLAGLTTQIRTLDDAITTAALAHPDGPRLITHPGVGALTALATIVVLGPVARFHDSKHVVSYVGLAPALNASADKHHLGHITKQGSPLLRFALGQAAAHAARMDADLKRTYFTLVHRRGRPKAKVAVARKLLVRLFIMLRDQIDYDEFCRRGRPAPVSA

SEQ ID NO: 58299 - protein, 394 aa, unidentified
MILVGIDIGKNKHTFSIIDKNSGEILLSPSDFSNNLKGFLFLIQKLSSYTKSELLIGMEDTGHYHFALLKYLLDRRYTVALINPTTTDLTRKLQGGITKNDPLDSLTICDVISSNHRNKPYRVTTLNRFDLYEQKQLTRHHHNLKEELNTYKNRLQKCIDIVFPEFNSLFHSKYGIVYMNILKAFSSAKAIANADIRSIRKCFEFKGQGKRISLFAEQLKLTAKSSIGIPSVAEEIQIRHLVSQIELLEKQLSEIDKRIEEFSLKNNSPILTIPGISHFSGTSIISELGDICNYTKASQIIKFAGVAPYHYESSQFTAQHTAITKKGSKYLRKTLYQIILPVISNNEVFYAYYTKKLNEGKGHRCAQGHCIRKLLRVIYHLLSTRQPFNPKLLL

SEQ ID NO: 58300 - protein, 346 aa, unidentified
MEHYAGIDVSLELSSVCIVDTQGKIVKEAKVASEPEALVDFFGSLHFAVNRIGLEAGPLSQWLHAGLKRAGFETVLLETRHVKAALSAMTVKTDRKDARGLAQLIRMGWFRPVHAKSMGSQEVRALLVARKQLLGRLIDVELSIRGILRGFGLKVGAVTRKGFEARVRELATGQATLERIAGAMLAARATLKAEYETLHKAVLAIVREDVICRRLMTVPGVGPLVAVTFKSALDDPARIAKSKAIGALFGLTPKKYQSGEKDITGGITRTGDEMVRTALYEAANVLLSRITRFSKLKRWGMDVAKRRGSKRAKVALARKIGVILHRMWVDGTTYRWTEAKPIATQA

SEQ ID NO: 58301 - protein, 378 aa, unidentified
MRVVGPTPDNMMLNNDTKSEELSSREGTRGQFNVRTGAIKLGIDVHQAFYVVVVQEGGSNPKPAQRMSPAAFLPWAAKLARSHPGAAVHAVYEACGFGFGLQRELSALGITCHVVCPQKLDERNQRVKTDGRDAKALCQKLDRYVEGNQDALAVVRVPTPEEEQRRAVHRQREQLVRTRKQLEAHGRSLMVNHGVEPISKWWKARTFSKLEVPAWLKELLSHTQPILLSLEAQIRALALQLEASAAPNQPRGLGALSSVVIDREVGDWHRFTNRRQPASYTGLCPGEYSSGNTRVQSCVTKHGNPRLRAALVETAWRLVRFQPTYKPVVKWRKILAKGALATGAARKKAIVAVARQLAVDLWRLRTGQLQPADLGLVC

SEQ ID NO: 58302 - protein, 359 aa, unidentified
MEKYIGCDMHKKYSVFVTMDEKGRLEPAVKVSNDLLELRAYLATLPSGAPVAVEATGSWYWFVDELEAAGLEARLVNPLEAKKRMPGTKKTDPGDARGLAMLLRNGTLPEVWIPSAQLRDLRGLLRTRLSLRRHTTTLKNRIHGAIRRYGQYEPGEPKDLFAGKGRVQLAVYIGALPQETRLSTRHEWQLVDEVETHIKALEARIRLGIGQLGWVRLLKTLPGVGNILSATIFLEIGDVGRFPSPAHLASYAGLTPTVQASGGKVRLGRTSPVANHYLKWALVEAANCIVMRKQCYAGSHVVALYERLRASKNHGKAAVAVARHLAEASWWMLTKKQAYREPAPASMPSSNTGSARNPF

SEQ ID NO: 58303 - protein, 344 aa, unidentified
MLYVGLDLSRKRLDFDARLAGGELVERGAVPPDQDGLFGLTRRLGDTGVLAVIESMNGARFVHDRLEVAGWDVRIADAVKVKGLAPLACKTDRIDAWVLAELARLDLVPEIWLPGPAVRAERERARFRLHLVRHRTALKNRIHSILIAHGVPSPSSDLFGLAGRRLLERLALPEPWRSTTAASLALIDSLDEQIGACERELCALGADHSYVPLLLTCPGIGWILASTIASEIGDISRFATPTKLVGYSGLTPQVHQSGEQDRRGPLRKNGPDHLRWALVEAAHTASRHPLYQPILERNRARHGRKRGSKIAALTIARKLTEAIWHMLTTNQPFTPAGATRPLAA

SEQ ID NO: 58304 - protein, 295 aa, unidentified
MDHIGIDVHKRESQIYVLAEGGEVIEQRIRTEPERFAAVLGGRPRARIVIEASTDSEWVARCLEALGHEVIVADPNFAPMYATRTRKVKTDRRDARALAEACLLGAYRPAHRLSDPQRHVRGRLGVRDALVHTRTRYISVIRALLRQQGYRLPSGRAEAFIQRVRALPLPGRLLSLIAPLLAVMRHLNRQLAYSDATIEHLAVQDPRVPRLRSVPSVGPVTAAAFLAAIDDAQRFRHAHQLEAYLGLVPREYRSGETQRRGPITKVGHVRARWLLIQAALSILRRRPPAAEALWT

SEQ ID NO: 58305 - protein, 450 aa, unidentified
MATRNRALNRKGLELTHPNAAGIDIGSASHYVAVPADRDDEPVREFASFTADLHRLADWLRDCGVDTVAMESTGVYWIPLFELLDARGFTVLLVNARHVKNVSGRKSDVLDCQWLQQLITYGLLRGAFRPSDQVCVLRALARQRATLLRTQARSVQHMQKALVQMNIQLANVIADVAGASGQAILRAIVAGERHPYALARLKNSRVHASNEEIARSLQGTWRAEHLFALRQALDAFDFCGGQLQQCDQEIEAQLQRLHITEVEPDKGKKRSKARNAPKFDLRTRLYQMCGVDLTRIDGIDVTTALVVVSETGTDMSKFPSDKHFASWLGLCPGTKITGSKVMSGKTKRCANRAAQALRLAAAALRASQSALGAYYRRICSRMDKAKAVTAAAHKLARLIYSMLTKGEEYTDQGQAYYEERYRQRVLHNLNRRAQQLGMTLVPTTPAAQAV

SEQ ID NO: 58306 - protein, 344 aa, unidentified
MSEVSIIGLDIAKHVFHIHGADERGRAVLSKRISRGKLLDFFAAQPSCKVALEACGGAHHWARQLTQLGHEVRLIPPAYVKPFVKRQKNDAIDAEAICEAAQRPSMRFVAVKSEEQQAAGLLFRTRDLLVRQRTQLINAIRGHLTEYGWIAPKGPSHVARLADLIEEEEMASSLPEAALAMFRLMLDLLAGLNGKIADLDKEIARRAREDEVSRRLMTVPGIGPISATAIAALAPPAETFAKGRDFAAWLGLTPLQRSTGGKQKLGATSKMGERTLRRLLIIGSSSVVQQARKRGAPKGSWLEQMLARKPRMLVTVALANKTARIVWALLIKQENYRAPVAARA

SEQ ID NO: 58307 - protein, 462 aa, unidentified
MSKTKRPATLENLAVVHPNAAGLDIGAREIWACVPPGRDVETVKRFNTFTPDLQALADWLVACGVDTGAMESTGVYWIPVFELLEARGLKVYLVNSWHLKHVPGRKSDYLDCQWIQKLHSLGLWNGSFRPDGEMVTLRGYLRHRAQLLEHRAPHVLHMQKALQQMNLQLHHVLSDITGETGLKILRAIVAGERNPVKLAQFRNPACKSSEETIAQALTGSWKAEHLFTLRQSLELYDFYTQQVTACDAEIEKQFAAMKPRWDGPEEPPDVPRVKPGSKSKNQPKLNVRREIIRLTGVDLVAVEGISASLAQTILSETGTDMSKWPSDKHFGSWLGLAPHNDISGGKVLRSRTLKTHNRAGQAFRQAAASVIRSGSAFGAYYRRKRGQLGPMQALVATAHKIARTVYYMLKNRVQYHDIGAEAYEQKQKEREVAYLKKKAAKLGFDLLPHDSTAAIARAVAMV

SEQ ID NO: 58308 - protein, 406 aa, unidentified
MKHVVAFDVSMGKSTMVIYDHYRQCEFEGEIVHDRRSFEKLNDTLVALTQQDGQAPEIVFEATGVYSKPLERFFCDKGYMYYRVNPLEANLQMASMRRHKTDKNDAHELAKTHFKVDREQTYQEEDYYQQMRAMTRYYDELSSEMTNLYSRLHAILQLSFPGLEKLFSKRSALFLNVVQLYPHPSNVLDCSKTVIRNRLKANTRKNLSLSRAEEKAIALIEAAKDTYPAISKDDIRCDQVRDYAKRIADLKEKREQLVLKMVELSKDKREYQILISFPGIGETTAVRLIGELGDIRRFKNHKQLNAYVGIDIMRYQSGNTFYKDKINKRGNNKLRKILFYMVQTMIQLRKNTKNHIVDYYDKLKTQPQRKPHKVASIACVNKFLKTAFHLITHNLKYDYEKATMHQ

SEQ ID NO: 58309 - protein, 414 aa, unidentified
MEVIHNRCAGMDVSKKDAKVCVRVAGAGRRKTVETVRTWGATTNQVLALRDHLVAEQVSLVVMEATSDYWKPFYYLLEDAGFELMLVNARHVKNMPGRKTDVTDAAWLAQLGAHGLVRASFVPPAPIRELRDLTRARVMLTRERGREIQRLEKLLEDARIKLSSVATDITGVSGRLMLQALIDGHRDPGALADLAKRRLRTKIPELTEALTGRFTEHHAFLAGIFLETIDQRTRQIDELNQRIDQAMTPFRAFCDLICTIPGVGRRTAEVVVAETGADMTVFPSPKHLASWAGVCPGSNESAGRVKSTQTRPGNPYLKAALGTAALSIAATHGTFLAAKYRRLAARRGGKKALVAIEHTLLTTIWSMGNTGAEYDDPGPDYYIRHNPERVLRNATRQLERLGYSVTPSPTTQTA

SEQ ID NO: 58310 - protein, 359 aa, unidentified
MREQRNEISFSGQKIYVGIDVHLKSWSVTVLSETSVLKKFSQNPNPEALHGFLTRSYPGAEYHSVYEAGFCGFWIHERLTALGIDNIVVNPADVPTKSSEKLRKTDAVDSGKLARSLRANELKGIYTPDSVSLEMRSLIRLKNSITKDTTRQKNRIKSQLRYLGIEIPQEFLEPFSNWSKRFFAWLKEVETLTPSGRQALDIQIRHLEELRRQKLEMTRAIRVLAKTDRFREPLRLIMTIPGFGQTTGMAFLSEICDITRFRNAERLAAYIGMIPMCHSSGEKDGTGNITVRKHAVMRCNLIEAAWVAVRQDPTMNLFFIEQCKRMPKSKAIVKVARKLVNRIYFVLKHQTEYGNRVVS

SEQ ID NO: 58311 - protein, 458 aa, unidentified
MDEQNKISMEIVNPYAAGIDIGSRSHWVAVGQGSLDIKEFGIYNEDLFAIVEWLKENKIKTVAMESTGTYWQSLYAVLIANGFHVILCNGKFTKNIKGRKTDVQDCQWIQKLHSIGLLTGSFLPDESTEQLRTYCRHRLNLLDTTASTSKKMQKYLRLLNLRLDVVVNDVCGLTGLSIIHAICDGESNPEKLASLRHGNCKKSEEEIAKALQSNGRKDYLFALQQELEMYQILQTKIAACDLEIEKMLNEQINGDDNKKQHYIDKKAHKKINKNTPKNIDLNLMSYQLLEGVDILAIEGVSHSTVLSLISEVGLDGIKKFGTAKQFASWLRLAPNNKISGGKVLSNRIPKGSNRLKIAFRNAANAIGNLKESTPLADFFKRINFRKGRVSAVSATARKLAVIIWNMITNKTPYKNPEEYLFLDQKRKLGLVKRIKKQIAKFTLTPEELGLITNSVSTG

SEQ ID NO: 58312 - protein, 408 aa, unidentified
MKRYYIGVDWGDRLHQVYVGDEEGEKVKEVKVQESPEGLAEIGRWLDERRAEGIELWAAIEKPAGRIVDFLLDHGVEVYPVNPKAVDRVRDRHRMSGSKSDAFDAYVLAEFLRSDHAHLRALRPSSEKAQELKLLSRDQRRVGRHKTRLLNQITTTLKEYYVRPLEVFEDLETEIALDFLQQYPTPAHLSALKRKQFNRFATTQHHLSKQRCEELWEKLQKPQLRVPEHVVRAKAQLLEVLIEQLRASIKAVKIYHHKVESFFASSPAAEFAKTLPGGKSGTLVAAIWAELGDAQGRWESSRHLQAEAGAVPVTKASGKSRVVHFRFACNKHLRYTMYWFSFVSLNQSEWAKLYYRGQRDKGHRHSQALRALGAKWLKIIFVMWRDHTPYDENYHLANITRQRMRQAA

SEQ ID NO: 58313 - protein, 320 aa, unidentified
MENMNQWVGIDVSKATLDVYIRPMGKAFQLANTEVEISHLVEQLKSYDLNLIVLEATGGLETELVIQLQAALLPVALINPRQGRDFAKATGRFAKTDAIDAQILAHFGEAMKPQVLAIESEGARQLSELISRRRQLVEMQTAEKNRRTRARGKALADIEAHIDYLAQRLKQLNQEIEELAQNNQQWIDKVNLLKTTPGIGQVISTTIVSDLPELGKLTAKQISRLVAVAPINHDSGQHKGKRMINGGRAHVRATLYMGAVVAIRHNPVIKAFYERLVERGKSKKLALTACVHKMLVILNAMLRDHLPWRICDNFQPIVNA

SEQ ID NO: 58314 - protein, 345 aa, unidentified
MVQQGLLFFFKYKNMKNVKETVGIDVSKLTLDVHLHKAGMHQQFGNDLSGFKKILAWVKSKELKSDDVLFCFEHTGWYCVLLGYFLHEKGIDYCCVNPTEIKRSMGLKRGKSDKADAKEIAYYAWLRREDLTPSQPPAANLIELQRMMSMREQFVKQAVALKNLRCGMEQLTGKTSHDFSILAITETIEHLESQARKVEKAMEALIKSDEAMQVNYKLSKSVKGVGMVLAVQMLLHTHNYTRFDSWRQFSSYCGLVPFPYQSGTSINGRSKIHPISDRKMKSLLSMSAISAIQHDKELKMYYTKRVAEGKPKMLVLNIIRNKLVSRIFATVNRGTPFVELNQFVA

SEQ ID NO: 58315 - protein, 415 aa, unidentified
MDVVVERCAGLDVHKDTVVACVRVPAPGGGRRSETRTFGAFTVDLLALRDWLLAHGVTLVGMESTGVYWRPVFYVLEDVVECWLLNAAHMRNVPGRKTDVADAAWITQLIEHGLVRPSFVPPPPIRELRALTRYRKTQIEERTRETQRLDKVLQDAGVKLSSVASDILGKSGRDMLDALVTGTRDPDVLAELARGRLRAKIPMLGQALTGRFGPTHALVVGEILAHIDYLEEAIGRVSARIEEVIAPFTAERDLLTTIPGVDQRLAEALIAEIGVDGSASRLASWAGMCPGQHESAGKSRSGRARHGDSWLQRHLAVAEMAAGRTKDTYLAAQYARLVGRRGKARARKAVGHSILVAAFHMLAGGVPYEDLGGDYYLKRNSPERRARKSLNDLKAIGWTVTENPDSVTCRPPRAA

SEQ ID NO: 58316 - protein, 351 aa, unidentified
MRTSQKITGIVTTIGIDIGKNTFHLVGFDQRGAIILQQKVSRSQLERRVANIPRCLIGMEACSGSHHIGRQLAEIGHDVRLIPAQYVKPFLKGHKNDYRDAEAIAEAVQRPTMHFVTIKTPEQMDLLALHRVRSRLVGRRTGVINQIRGFLIERGITVRQGPMPLRKALPEILSSDTGALSPRMVGLIADLAQDWRRLDERIAAVSAEIEALAEQDDSCQRLMTVPGVGPIISSAVVAAIGNGTGFKQGRDFGAWLGLVPKQESTGDRTILGKISKRGNKYLRTLFVQAAHVVLERRPSAAMRGLWPWVEQASKRLHRNMLAIALANKLARVAWAVLARGGTYQPRITHAA

SEQ ID NO: 58317 - protein, 435 aa, unidentified
MEIVYPRVAAIDVGKKIVAVAVRTPGQEPGQRQQQLRKFKTFYPVFYPVLQQMVGWLVDQGVTHVAMEATGVSWRPVFHALCEAEQLALVLVNARHVKHVPGRKTDANDANDAEWLAELCEVGLLRGSFIPLAEIAAIREVTRDRKQLTEARTSELQRLCKVLEDGGVKIDSVASSITTVSARAMVEALIAGERDPRVLPRPCPWVMRNKLPDLAMALAGRFGAHHALLARMHLDHIDHLSGMIGRLDTQIEQLISPFAEQLRQLPTIPGIAERTAQVLISEIGVDMSRFPTADHLASWPPGLLASWAGLCPGTGESAGKHRSGTTRSGTTRKGNREVREALVEAAWAAGRTATYLGARFRRLHRRFGKQGGSKTAVAIAHDLIVIVWHVLHDGSDYHDLGADYFTRHDNPDATKRRLIRELQALGYAVDLTPAA

SEQ ID NO: 58318 - protein, 366 aa, unidentified
MKKNSTVAKNRNEIFKQPKLTIGLDLGDRTSHYCILDEAGNVILEHNLPTTPKGMHQVFRKIPRSRIALETGTHSPWVSRQLTQLGHEVIVAHARNVRLIGESSRKDDQFDARTLARLARIDPGLLGPVRHRSAQAQIHLTVIRARAALVGTRTALVNAARGLTKSYGERLRKCGTEQMNREIAKGLSQELRDALDPLLGEIESLNERIAEYDRRIEQIATEVHPEVALLKQVKGVGTLIALTYVLTLDDPHRFRRSRDAGCFLGLRPGRRNSGNSEPQLHISKEGDRYLRTLLVQGAHYILGPFGQDSDLRRWGLKLAERGGKNAKKRAVVAVARKLAVLLHKLWVSGEVYEPLRNNHNVVSAVA

SEQ ID NO: 58319 - protein, 318 aa, unidentified
MSDSVFIGIDVSSQTLEIASSEQAKTWQLANDVAGIEQLVKQASALAPALVVLEATGGYEFEAACALQAAGLAVAVVNPRTARDFARAMGALAKTDALDARMLAAFARVLHQHPERERFVKPLADAELQQLQALVLRRRQLVQMLTSERQRLRLAHAAARPSIERVIEFLKQELGDSEAEVAAHVQRHHAQLAHALASVPGIGAASVAVLLAELPELGKLDRRRIAALVGVAPLNRDSGQMRGQRCIWGGRADVRRTLYMATLTAVRHNPALKACYERLLAAGKRKKVALVACMRKLLTMLNAIAKHGSTWDSTMHIA

SEQ ID NO: 58320 - protein, 374 aa, unidentified
MGDHSEAFIGFDTSKLRNAVAIADAGRGGEVRFFGEIENTPAATAKLVRKLSAKYQRLTFCYEAGPTGYGLQRQIKELGFECVVVAPSLIPKRPGDRVKTNRRDALSLAKLLRADELTAVWVPDGAHEAMRDLTRARETAMLDLRTKRQHISAFLLRLGRPYPEKKTWTKVHVRWIASQKLEHAQQRLVLEEMMLAMRQAQERQQRLEQAIAAAVGEWSLAEVVTALRAMRGIDLISAATLLAEIGDLSRFRTPTELMAYLGLVPSEDSTGDVIKRGPITKAGNRRARRMLVECAWSYQHPPRVGAAKQPKVDAAPEAVREIAWKAQCRLYRRYRALIRRNKLKTVAIVAVARELAGFIWAVARAVTTAPAALA

SEQ ID NO: 58321 - protein, 424 aa, unidentified
MKTYLLRHPNSVEPQKAQFIDLPPTPHTAAPHLPSPAQTPTSLADVSSQGSQPRALFIGLDVHNDSIAISLAPSDSTEVRRWGITGGTHEHVQRFIKQLHKAHPEAALKFCYEAGPRGYPLCRFIRGLGEECIIVCPSRVPRRPGDRVKTDRRDADQLARLLRAGELSGIHVPEPEDEAMRDLLRSREQVRSAQHRARQQLKMFLLRHNFRYAGTTSWTPAHLRYLAKIKMPFPTQQFALQEMMNAISEAGARLERYDAQLEREVAGWRWEPVVRALMSLRGVGLLNAATLVAELGDLSRFTRPAELMSYLGLCPSEHSTGAERQQGGITKMGNGHARRALVEAAHHYRASARLTPHLQKRQEGLPKGVTDAAWEAQRRLHHRYKQLSGPGRKKGPVVITALARELSGFVWAIARQVKPLEKKR

SEQ ID NO: 58322 - protein, 431 aa, unidentified
MLKINPLSTLYVGIDVSSKSNYICALDFFKNKYINSSFANNQPGAEELALKILECLNQHPDLTMVVAALESTSVYSIHIANYLSSCEELMRFKPYVFVLNPKCTANYKKSYIGLGKSDPIDAFVIADYARAGNIESEPWRGSQFLALKRLTRHRLHLVECMTREKTYLVSNLYLKFSELQMLEGDDQPFCDIYGATSSSVLMEYLSPEEILASSEENLIAFLAEKSCNRIKDISKTADLLKKAARDSYRLDKALYEPLNVSIASSFNCIETFKREIKVIDNAIEKEIKGLNPNAFIILQSIDGIGPVFAGGIIAEIGDITAFHSSDALAKYAGLTWKSNQSGDFYGEDTPMIKAGNRYLRYYLGEAANSMRKHNVEYGAYYRKKYNEVPKHQHKRALALTSRKFVRLVYGLLARNQLYSGVSLDTSIKDSN

SEQ ID NO: 58323 - protein, 410 aa, unidentified
MELVYKRCCGLDIHKKIIVACCVDEHGKKEIRSFGTMTDDLIKFCRWLKEKGSEIVAMESTASYWKPIYNLLEVEDIPAMLVNAQHIKNVPGRKTDVKDSEWIADLLRHGLLKPSLVPKRPARETKELVRYRTSLIEERAREYNRLDKVLQGANIKLSSVASRMDTKSGMEMIKAIARGECSEDVLASMAKGTMKTKKDDLIRALKGYIQPHQQEIIGHMLSHIEFLSKQIEKLDEEIDSRMSADEELVRLLDEIPGVGKQTAQVLVSEIGTDMSVFPSAKHLTSWAGVCPGNNESAGKKKRGKTRKGNKTLKKTLVQCGRSAARKKDSYFQSMYSRIAARRGANIAAMALARSILEIYYYMARDGVTYCDLGADHFVRNNREDIVRRSVRRIEALGYRVIVSEEEAIAS

SEQ ID NO: 58324 - protein, 376 aa, unidentified
MTQTDVQYPTIHLAIELSRSAWLVAARLPGVEKPSLHRIEGGDTAALLALAAALRARAAARLGTPVRVACCFEAGRDGFWLHRLLTAEGIAAYVLEPTSILVNRRARRAKTDRLDALGMLRVLAAYLGGDRQACSMVRVPTPEEEDAKRPHREREELVRERVRLENRIAALLATQGVRERPSLRSWERDLAALRTGDGRPLPPHLRAELDRLRRRLVLTLGLIREVEAERDAALAAGPRDAAGRKIAALCRLRGVGANFAAVLTREVFYRAFDNRRQLAGYVGLAPVPHQSGEADRDRRISRAGNARARTTLIQLAWLWLRYQPDSAPARWFRDRVGALRGRTRRIAIVAMARKLLVALWRYVETGLVPEGVEVAA

SEQ ID NO: 58325 - protein, 418 aa, unidentified
MSEEGNARPARRYVALDIHKHYCVVAGVNREGQVVLQPVRVEHADLEGWLKTNLQARDHVVIESTTNAWHVYDLLEPLAERVAVANPIKVKQIALARVKTDIRDTLILARLLAANLVPEVWVPPVHVRQMRQLLSQRRQWVETHTQILNRMHSVAHRHHLKHERGQRFNEKTIGWQKDERLSQMEQFQLSLEMENKVYIEKQIERISREVRKMCHQKPWRDAMTYLMQLPGFGVITAMTVLAAIGEIGRFETAKHLASYSGLTPGLEQSGTKSRGKGITKEGRRELRWALVEAAQMAVKSDPFLKLKFQALQKRMHRNQAIVAIAHHLLELVWYVLTRRQPYRRFSHERIAYKYLTWAWQMDETARDGLTRQQFARYYLMRLGVGHDLTRIAINPKYPRRLASEAEVLALHPELQQIE

SEQ ID NO: 58326 - protein, 418 aa, unidentified
MTEKLDTTFIQVVHPVCCGLDVHKKKISACLITINELGQEQYDIQEFGTFTNDLLEMKEWLTDNSCPIIAMESTGVYWRPVHNVLEGFMEVILVNARHIKNVPGRKTDIGDSKWLAGLLRHGLLRGSFIPPKEIRQWRELTRLRRTYTESMADYKRRVHKLFETANIKIDSVVSDLFGVTGRNLIFLLCEESELSLENIRENAKRGLKAKSKELHRSVHGFFEDHHRFQLFGMMEVIASFEKKITEITERLDNLTAEHQDLLDRLDEIPGINKKSAQSIVSEIGVTLDEFICMGALASWAGLCPGNNESAGKRKSGRTSVRSHPFKTILIEVAWAAVKKKGSYYRAKYYKLKARRGPKKAIVAIAHRISKAIFNIIKHGDTFKDLGENYLTAQTRQRTINNIKQRAKQLGYELVPCMN

SEQ ID NO: 58327 - protein, 450 aa, unidentified
MEQPQEVEDEEHERTWERVAAVDVAKASGVVCTRVPGDEPGGRRRVRVWTVKATVAAVTELGDHLRCEGIEVVTLESTGEYWRVWHVVLEAAGLKVQLVNARSVRNVPGRAKTDKKDAVWLAKLTERGLLQPSFVPPYDIRRLREYTRLRADLVRDRTRYWARLEKLLERALVKVSSVASTLDTQSVRAMLEALIAGQRNPKILADLAVGKLRAKRAELAEALDGRFEDHHGDLARILLDQIDALTAQVTALDAKISALIAQVPAAWGVDADGTTGPQAGRGPDAAVLPAVARLDEVTGCGAVAAAALIAELGLDMSVFGTPGRLVSWAKRCPQTRQSGKKNTAGKVPKGSPWLNGVLGEIAASAARTGTFLGERYRRIARKRGKRKALAAIARSILVIIFHLLADPAARYRDLGPDHYDNRVSRDRKISNHRRQLEALGLTVIIIDEAA

SEQ ID NO: 58328 - protein, 314 aa, unidentified
MDKITVGIDVSKDRLDVAERPSAEVFVVERNAAGLEELVERLRSLGPHLVALEATGGFETVVAAALAAAGLPVVIVNPAQVRAFAKAIGQRAKTDPIDARVIAHFAEATQPEPRPLPDEATRLLADLVARRRQIIDMIGAERQREKRAPARLKKSIVRLVKALEKELTSVDGDIDDAVRGSPAWRETEDLLASVPGVGPTIARTLIAELPELGTLDRKQIAALAGLAPHTRQSGQWKGRSFIGGGRASVRTALFMGAMVAKKHNPVLKAFFDRLVAAGKPKMLALIAVARKLLTILNAIIRDHRPWQGTVVAAS

SEQ ID NO: 58329 - protein, 341 aa, unidentified
MAIEVSVVGFDIAKNIFQVHGVDRRGAAVLRRRLRRAQVPEFFRQLTGCLIGMEATRGAHYWARVLRGFGHDVRLIAPQFVKPFLKSQKNDANDAEAICEAVSRPNMRFVPSKSIEQQDLQALHRVRSRLIGCRTQLGNQIRGLLAEYGIVLPLHLSQVRKALPQLIEEENSLLSGMGRQLLAGLYEELCALERRIVAMEEQIHRIHHSNALCQKIAAVEGVGPVIATAVVAAIADGRAFHNGRQFAAWVGLVPRQHSSGEKQRLMGITKRGDPYLRMLLIHGARSVVYRAASNRTAEAAGSARSNKDWEQRKPASLWQTRTHASSGPCWLAMNHISELRK

SEQ ID NO: 58330 - protein, 477 aa, unidentified
MNNKKELLAKKKQIKRKNAKAKRNRTLGIHNPDAGGADLGATEIYIAVPPQRAENAVRCFGTFTQDLYAILDWLKECKVNSVAMESTGVYWIPLYELLEQNGIEVCLVNARHVKNVPGRKSDVQDCQWLQYLHSVGLLRGSYRPAQDICAMRAIHRYRENLLVFAGQHLQHMQAALDQMNVRLHHVISDLSGSTGMAIVEAILAGQRDPVQLAKLRDRRIKASEDIIAKSLEGTWRVEHLFVLGQALQSWKQVQQQLSQCDQKLEELSRQLDGKIDLANSPLPPSDKYTGQEPRGKNQPEGSWREELYRHFGVDLTEVPGISTSVAQTLYVELGPDLRAFPTSDHFAGWLSLCPNNEITGGKVIRHRTRRNRQRIRVALRLAASSLHHNKTHLGECFRRLRARLGAPKAITAMAHKLARIIWHMVTYRVNYDESIFAEREEQLLRRKRRHLRNLAHELGFTLVPQTPPAATSNAEVS

SEQ ID NO: 58331 - protein, 334 aa, unidentified
MKTRYFLGIDIGKNSFHAALTVEGQNFYDQEVNNNTTAIKKYFQELKVKFGFKSDQLTVCMEHSGIYCYPLLDYLTKQRVKVCVEPALRIKQSQGMQRGKNDKIDSIRIAKYAYKNADELRFWQPKREVLQKLRALLVVRERLIRAKTQFEVPIKESREFIEESIRFLAIKNCKATISAIKKDIKKVDAEISKVIKEDNQLQAQAKIATSVIGIGTIIAANMILTTNEFKDISDHKKFACYSGIAPFDNTSGTSPRRSHVSHMANKRIKTLLHMGARSAIQYSPELKHYYHRKLAEGKKPFSVLNAVCNKLISRVFVCIKNQRMYQKNYQPALV

SEQ ID NO: 58332 - protein, 340 aa, unidentified
MPLYGGIDLHANNSVVVLLNEQDQVVYQKRLPNDLPTILEVLAPHHAEIKGLVVESTYNWYWLVDGLMEAGYRVHLANPAAMQQYSGLKYSDDHSDARWLAHMLRLGVLPEGYIYPKAARAVRDLLRKRAHWVRQHTANVLSVQNIMVRNTGARLSVKRIRELPKKELKRLLPEADQVLAITSSLAILDCLSQQIKALEKIVHQRLHHTPSYEQLLTVKGIGTILAQTIALETGDINRFPTVGNYASYCRCVDSTKLSNGKRKGQGNVKNGNPYLGWAYMEAAQYAIRFNPSAQRFYQRKLAKSNNNTTLARKAVAHKLSRACYYVMRDLVPFETTKAFG

SEQ ID NO: 58333 - protein, 340 aa, unidentified
MGEYIGLDVSLKETAISVRRDGKRVWRGKCASDPEVLARVIGERAPDVQRVVFETGPLSVWFYHALTEQGVPAICIDARHAKAALDMAPNKTDANDADGLAQLAEVGFYREVRVKGYDSMLTRTLGAARAQLIKAGVEFSNHIRGVMKTFGLVVAKGAGRVFEAHVRERLACNAELARIVLPLLEVWRGLRAQAADLDRQLVAAARTNASSRLLMSIPGVGAVTSTAFVAAIEEPGNFRNARAAGAWLGLTTRRYQSGEVDYDGHISRRGDKHLRALLYEAASVILTRSVADSALRRWGLALRERIGFKRAAVAVARKLAVIMLCMLKTGQPFDRSSAAA

SEQ ID NO: 58334 - protein, 420 aa, unidentified
MKKKPKQTQMPINKLDMQNNEIRFKGQNIYLGIDVHKKNWQVSVSADMPIKRDEFHMTSNNVEGLLSHLQAKYPGATYYSAYESGFCGFSSHRRLIEAGIRNIVVNAADVPTTQKASVTKTDAVDAKKLSEALKNGMLNGIHVPTEEEEGVKNLQRKRDDYVKKLGGTKSQIKHFLHRNGIDFESEFREGAHWTSSFIQWLKELDLSTHLKLTLEGYLEDYEYLKRQAAKFEGYLRTYMRENRMDDLEKIASVPGIGIITSMTFLSEIGDFSRFNNQRAFASYIGLSPTCHDSGEKKNTGEITFRSNRRLRTSLIESAWVAVKEDDSLRADFLAYKRRMDSCNAIVRIARKLANRILHVMKERDVYVIKEADGGERVKNTFPITRKKTDALSLPQQTANEQISGESNNREGAAPRQPKEI

SEQ ID NO: 58335 - protein, 350 aa, unidentified
MSSRKTGQIAVIGIDIGKNSFHIVGLDKRGAIILRQKWSRSQVEARFANMPPCMIGMEACVGAHHLSRKLNRLGHDARLMPAKYVRAYSKGQKNDFRDAEAIAEAVQRPTMKFVATKTSEQLDLQALHRVRERLVSQRTGIINQIRAFLLERGIAVRQGQHFLRAELPRILGAPSAHLSPRMAQTIEDLAGDWRRLDGRIDGLSDDIEALARRDAGCARLMSVPGIGPIISSAMVAAIGAGEVFTKGRDFAAWLGLVPKQISTGDRTILGKISKRGNRYLRVLFVQAAWVVLVKPKIWERHGLKPWIEAAKKRLHHNVLAIALANKLARIAWSVLARDRNFEARSIAVNA

SEQ ID NO: 58336 - protein, 472 aa, unidentified
MRESPMPPPRRHRTRKAVARGSGLPASLQAVHLNAAGIDIGSAEHYVAVPADRDPQPVRRFACFTADLERLAEWLEQCGIDTVAMESTGVYWIPLFQLLETRGFEVKLVNARHVKTVPGRKSDVQDCQWLQQLHTFGLLAGSFRPDDQTCVLRSYLRQRDTLIRDCAAHIQRMQKALTQMNIHLHQVISDITGATGMRILRAILAGERNPVQLAAMKDPRVRSSRAQIAKALHGDYRAEHLFALQQSLELHDTYRKMIAECDVHIEHCLAGFDARVDLAEHPLGPPKHGHRTPRGNAVGFDLRAHLYRIAGVDFTRIDGFDALTVQTILSEVGLDPSRFPSEKHFASWLALCPDNRVTGGVVKHTKSRKVVSRVATALRRAAQSAANSRSALGGFYRRLRARLGPAKAITATAHKLARIFYRMWKYREPYHPLSLDHYETQYRERTLASLRKRAAALGFELVQSPTVSGVVS

SEQ ID NO: 58337 - protein, 316 aa, unidentified
MAVQIWNAGIDVGKETLEVAVWRSPVLLFQTTRDADGLVRLIGWLREHDVVRIGLEASGGYEREVLDTLQDAGFMVACLNPRQVRRFAQAKGRLAKNDRADARVIAEFMAKMADHDPVRRDRSFDVLVEHLTVRRRIRDWISDCDNTLEHLRASFMRKTIVAKRKTFETALRHQDKAIATLIAAHPDWRETERRLRTVPGVGPVLACTLIALLPELGQLSRRAIAALAGVAPFDDDSGKRSAARAIEGGRDTVRRVLYMAALVGKTHNPVLAAFAKRLVGKKPKVIIVACMRKLLVILNAMMRDKRDWELCRQPVS

SEQ ID NO: 58338 - protein, 403 aa, unidentified
MNAVGIDVSKGKSMVTILRPFGEIVSSPFEIKHTSSDIHSLIKLIHSIEGEPRVVMEHTGRYYEALAHQLSAADLFVSAVNPKLVKDFNNDSLRKIKSDKADSVKIARYALDKWQSLEPYSITDELRAQLKVMNRQFHFYVKQKTAMKNNLIGLIDQTYPNANTYFNSPTRSDGSQKWVDFVSTYWHVDCIRKMSLNAFVEHYQNWCKRKKYAFNKSKAEEIYTKTKELVPVFPKNEITKHIIRQAVDQLNSTSVTVETIRTLMNETASKLPEYSIVMQFKGIGPSLGPQLMAEIGDVTRFTHKGALTAFAGVDPGVNESGSYAQKSVPTSKRGSSNLRKTLFQVMDVLIKTMPQDDPVYQFMDRKRTQGKPYYVYMTAGANKFLRIYYGRVKEYLSVLPDPS

SEQ ID NO: 58339 - protein, 330 aa, unidentified
MGEVVTVGLDIAKSVFQVHGVDGAGEVAVRRQLRRAQVLVFFAKLPACLIGIEACATAHYWARELAALGHQVRLMPPSYVKPYVKRQKNDAADAEAICEAVTRPTMRFVEVKSPEQQSVMVLHRVRLTLMRQRIQLSNTIRAHMAEFGLVAPIGREGLQGLIQLIEARDPRVPEEARVCLEFLVAQLRLVNVQVLETDRKIRASARSTEVGRRLMTIPGVGPVLASALVATVAEPKAFKSGRNLAAWIGLVPKQNSSGGKERLGGITKQGDRYLRQLMVVGALAVVRYAERHGTRRPWLVQLLAKRPTKVATVALANKIARIAWAIMTSG

SEQ ID NO: 58340 - protein, 397 aa, unidentified
MWAGADIGKEHHWVAVVDDKGAMVFSRKLVNDERQIRDLVTEVDQLAERVSWTVDLTTVYASLLLTVLADAGKSVRYLAGRAVWQASTIYRGGEAKTDAKDARVIADQSRMRGADLPVLHPDDELITELRMLTAHRADLVADRTRTINRLRHQLVAVCPALERAAAMTQDRGWVVLLARYQRPKAIRQSGITRLTRVLTDAGVRNAATIAAAAVAAAKSQTVRLPGEEVAAGLVAKLAQGVIDLDDRIKAADADIEDRFRRHPLAEVITSLPGMGFRLGVEFLAAVGDPALIGSADQLAAWAGLAPVPKDSGKRTGRLHTPKRYSRRLRRVMYMSALTAIRCDPHSRAYYQRKRDEGKRPIPATICLARRRTNVLYALIRDNRTWQPDSPPITKSAA

SEQ ID NO: 58341 - protein, 407 aa, unidentified
MPRRAQRRVILFFCPILASSWNQISIGLPGASRVAICATVAAKFYGMARLLLGARMAPPLTGWRRRNMTIVTLGLDLGKNWVHMVGLDADGRIVLRRRVRRDRLLVETVDMPPCLIGMEACCGAHHLGRALAAQGHTARLMPPQYVKPFVKSNKNDHRDAEAAAEAVQRPTMRFVPLKSEAQLDLQTIHRVRQRLVGRRTALINQLRAILLERGITVPRRRRVLELRLRAILADESARLSARVRHLIEDMRAEWRDLDARIDAFDAELTAKARQDDACRRLCEIPGIGALNATALVAAVGNGAVFDRGRDMAAWLGLVPREYSTGSKQRLLGISKRGNKYLRTLLIHGARAALPYLAARNDRLGSWLRSLLARAHRNVAVVALANKLARIVWAVLANDGCYAMPTTA

SEQ ID NO: 58342 - protein, 337 aa, unidentified
MQTQVTKKIDFKDKELFIGLDVHKKSWSVTIIVDSIEHRTFTQPPDPVSLRNYLQRMFPGASYNSAYEAGFCGYGIHRELNSLGIKNIVINAADIPTSQKDKLQKRDPVDSRKIARSLEKGSLHAIHIFDRELEELRTLNRTRFYLMRDLRRSKNRIKSFLQYYGEPIPVEFDNNQWTLKFVSWLKQVKMQTTSGQDSFSHLIESYEHHRRQLVDLSRLVRQRIREYDNELYSLLKSISGIGPLTSSALITELGDINRFKNIDQLGSYVGLIPRIRESGEITHTGGITFRCNSFLRTLLIESSWQAIRMDPALMQYYHKHLVNNTGQKVIIKVARNY

SEQ ID NO: 58343 - protein, 417 aa, unidentified
MQVVRPICCGADIHKDIIVATIATSNQNGIAEYIQRKFCTQNYDLINLKSWLKEHNCFEFAMESTGKYWIPIFNVLEDEIKVYVVHPKYTKSIKGKKTDKKDSKWIAELFRHGILTFSFIPPREIRELREISRYRIKLVAMRTSERNRYQNAMTVSNIGLASILSDPFGKSSKAIMEEVLKSSSLSEGKIRSLLNKSAKKKAKEVFASLEGSRIEPDQRLKMTVSSEHMNQIDSHIDTLELDLVQRCLPYANLINLLIDIPGISYISAIAVIAEIGIDMSVFKSSKQLTCWAGLAPANNESANKKKSVRISRAGTYLKPLLVQCALSAIKSTSNPYYRIKYNIIKKRRGHKKAIVAIARMILVNIYAILSTGEVYNPCDFKEVTSPKPAKKEMTIENALSFLQAQGIDTSALVLNVS

SEQ ID NO: 58344 - protein, 346 aa, unidentified
MDVYIGLDVSLASTAICAVSAQGTIVKETTGASEPEDLVATLKAMPGEVVAVGLEAGPLSQWLYRHLTDAGFATVLMETRQVKGALKAMPNKTDRRDAEGIARLLQMGWYRPVHCKSMSAQEMRALLSARKVVLQAAINLELSIRGVLRNFGLKMGRVAKGRFEARVQELAEGNPMLEAAANPILAARRALRQELAGLEKVLRNHAKEDPVCHTLMTMPGVGPVVALTVKAAIDDPERFRSSKDVGPWVGLTPRREQSGERDIVGQISRAGDIGLRTALYQAATVMLHRGSKTWLTAWALNVAKRRGKKRATVALARRIGVVLHRMWRDGTDFRFTREDAAVAATA

SEQ ID NO: 58345 - protein, 375 aa, unidentified
MHGGRTLGKHSEVFVAFNVAKKKHAVAVAEGGRSSEVRFLGDVENNPLPIERTIKRLADRYGRLHVCFEAGPTGYGLYRQVKALGHDCMVVAPALIPKRSGERIKTNRREAVTLARLHRAGELTGVWAPDAAHEAVRDLVRAREAAADDLRRKRQQLLSFLLRHSRIYRGGGHWTLAHRRWLAGQKFNHAAQQIVFQEGIDSIEDALQRLRRLEKQLAVIVPEWSMAPVVEAYQAMRGASFLVAVTFAAEIGDLRRFDTPRQLMSFLGLVPAESSTGDTIRRKGLTLAGNRRARRALIEAAWTYRYPARVSEALRARLEGLPKSVRDIAWKAQVRLCSRYRRLSATGKKLPIVVAAIAREMAAFLWAIGREVAPT

SEQ ID NO: 58346 - protein, 347 aa, unidentified
MRFYTKQHKYYCGIDLHTNKMYLCILNKHGETVFHRNLKTSPEHFLNAIKPFRDDLVVSAECMFTWYWLADLCEDEGIPFILGHALYMRAIHGGKSKNDKIDSLKIAALLRGGLIPQAYTYPRKMRATRDLMRRRNHFMRKRAELFAHIQNTASQYNHQEPLGRIARPNNREGTVERFALPCVQKSVEANLEMITTYDRVIGGLERYIVRTAKDHDPVSYALLKTIHGVGRIIALNLLYEIEDIARFPRVQDFVSYSRLVKCAKESNGKKYGTSGKKIGNAHLRWAFSEAAQLFLKGNEAGQKYLQKITNKHGKGKALSILAHKLGRAVYHMLKNQKAFDVNKFLTA

SEQ ID NO: 58347 - protein, 348 aa, unidentified
MTLVGCDLHSRKQQVAVLDTTTGELLEQELAHDGDAVEQFYRALRPPVTIGIETTGYTQWFHALMHRLGHTVLVGEAAKIRAMVVRKTKTDRRDARHLLDLLKHNRFPTVWMPDPETRDLRALIAHRVRLVRMRTMVKNSVQAIALNQRLALRSALWTQRGLSQLRALALPPHSRRRRDDSLELLAWITSRIDQLDEQIAGIVDADSRARRLLTHPGVGPLTALTTILVLGPVARFPDAKHVVSYVGLAPAINASADKQHLGKITKQGNALLRWVLGQAASLATRADDDLRRRYFAVLHRRGRPKAKVAVARKLLVRLYVMLRDEVDYAEVRRRGRAARAQSGGVVIT

SEQ ID NO: 58348 - protein, 344 aa, unidentified
MGEVSTIGLDIAKSVFQAHGIDVAGMMVMRKRISRAKVLEYFGGLPRCLVGIEACPSAHHWGRELQRLGHTVRLIPPSYVKAYLKRSKNDANDAAAICEAVTRPSMRFVPIKTTEQQTVLMLHRTRQLLVRQRTLLSNALRGHFAELGIVSAKGRNGAAELLKIIADGEDSRVSPLVRDILDVLARQYGAIGAEIASIDKSIMALHRVCEGSRRLAEIPGIGPLSATALVAEIGDWSTFSSGRSLAAWIGLVPKQHSTGGKDKLGSITKQGNRYLRWLLVVGAMAVIRYARKYGAKRRPWLARLMERRPTKVAAVALANKIARMAWAIMVRNERYKEPKLLLAA

SEQ ID NO: 58349 - protein, 479 aa, unidentified
MAGKTKAKSGSAQRLTRKQSKDLGRRIWSEHPGLDVVHRDAAGIDIGSREHYVAVGPDRDKEPVRVFGCFTTELRRLAAWLKQCGIRTVVMQSTGVYWIPPYDVLEEAGFDVWLVNAQQTRNLPGRKSDVQESQWLLKLHTYGLLGKSFRPAPEIRALRSCWRERNEYVQLAGACIQRMQKALTEMNRQLSTVVKDLGGVTGMKILRSIVAGERDGARLAEFRDPRIKASQQDIAKSLEGTWRPEQLAILKRQLEDWDHLQKQMDACDRDLQAMMKRLPTAEVKAGELPAAQEGPKRRKRRGGKPRNEPKFDLAGEWKRVAGVDLTRIDGIKVCTAQTVFSEAGLDMSKWPTEHHFASWIGLCPAHEISGGKVLKRKSRKVISRLATAFRLAAGTLRESDSYLGAPFRRLRTRLGSPKAITAMASKLARLVYRMLRYGQEYVDQGEAHYEEKSREQQLRLLKKKARQHGFQLIPASTST

SEQ ID NO: 58350 - protein, 321 aa, unidentified
MTETQKPSSRPFIGIDVAKYRFDGASSSGPIIGLHVRELPRLVDWVESQNPQLVTLESSGGYERDLVAALVEKDIPVAVVNPRQVRNFAKASGRLAKTDVVDAKVLAAFGEAIRPVVRDPKSPELMELRDLIARRRQLVEMRKVEKTRLEGARTPALVKAITRHIDWLSGEIKSADKDLDGAIKANSSFQEDDEILQSIPGVGPILSRTLIGDLSELAFMNQRQAAALVGVAPFNCDSGMMRGKRAIWGGRGEVRSALYMATITAIKKNPIVKTIYDRQRGQSKPFKVALVAAMHQLLKLAQALLKSRQKWNPHLANLTVA

SEQ ID NO: 58351 - protein, 408 aa, unidentified
MKTLHKRCAGLDVHKAEVVACLRVITNRKVGREVRRFPTTTQGLLALAEWLENAGCTHVAMEATGVYWKPVWHILEGHFVLILANAAHVKNVPGRKSDVNDATWLADLLAHGLIRSSFVPPPAIQELRDLTRTRRQLTREIVQHVQRIQAVLEEANIKLCSVITDIMGASGRRMLKAMIAGETDAEKLAALGHERLGCTRAELVEVLTGCVREHHRFLLGQHLRTIEQLEDSIAAFDARIEGALSPFHDIVERLKEVPGLAATATETVIAEIGTNMSPFPTAGHLLSWAGFVPRLDESAGKRRSTRIRKGAPWLKPVLVQAAWGAARKKNSYFQAQFLRLKARHGAKKAAIAVAASILTTVYHMLRDGTCYQDLGPEYFTRRNPAKAAARLANRIRNLGYHVEIRAAA

SEQ ID NO: 58352 - protein, 316 aa, unidentified
MLKQTQNNISIIGIDVSKDKLDVHCYDNKHKICIQNNKKSIVKLIKDVSKNLVNPLFIMESTGGYEKLAQNLINDANYNVHIAHPLRIHYFAKQKGLFAKTDRLDAAIIAQYGIQENVKPTPAPSKLSVELKELASRRTQLIDLVTKEKCRVKSHQSNEMNRSLKRVIKAIEAEIELLNQKISKKLSQSPEHNKKVELLQTVKGIGEITAHSLVCLLPELGTLSRAKIACLCGLAPKNKDSGIKTGKRHINGGRFNVRKALYMAAVCASTHNPKMREFYQKLKNKGKESKVALTAVMRKLIITINAMLRDEKEWAF

SEQ ID NO: 58353 - protein, 435 aa, unidentified
MKGNRAYRARSVKKVNWKEVVGGRGRQAVCVGVDIGKRAILGVVRWQNGRFERPWLVKNPEEIGEFIALLVEMGRGRGLRVAMEPTGTYGDALRQALCDAGMRVERVSPKVAHDYAEVFDGVPSQLDGKDAGVVAELSALGKSREWKYEEPSRVDQEMAYWVDWMDAQRRQAAMWQGRLEGLLARHWPEATRWLGLSSLTLMSILQHYGGPKGLADDRQGGVRVASWGRHYLSAEKIQGLLASARQTVGVRQGEIDLRRMRQYAAQALAARREVAQSKRRLAELARGNAVIQAQARVVGVATACVLWVYLGDPRDYFCATAYRKAMGLNLTEYSSGDYQGRLRISKRGASCVRRWLYFAALRWVQQGVARRWYLRKRARDGEGAKRAVIGVMRKLAKGLHRVGTTGEPFHPGRLFAGRLRQGRQAVRRSPARSKG

SEQ ID NO: 58354 - protein, 425 aa, unidentified
MKRTQNEKILQIKNETLVVGIDIGKKFQFARAFDNRGLELGKLLRFENSAQGFANLDAWLQGIMQKHEMTEVIVGFEPTGHYWFNLGDHLVACGHKLAIVNPFHVKCARELDDNSPSKSDRKDPKTIAMLVKDGRYRDVYIPVGAYQELRELVCERERLQERLSALKNQIVRWQDIYFPEFTTVFKDWSKQAAWLVLRHFSTPQKVIDAGAQEILRTWREEMKRPSLKRAERLCLVASQSVGRKEGTMAAISSLQFVMTEYELITMRLEQLKEEMAECLSQIPNAYRLLSIKGMGVVAAAIIISEIGDISRFTDPRQLIKYAGLNLRENSSGKHKGKTTISKRGRRRLRLGLFQAMIPILATNAEFRALHKRNTTRSQNPLTKMQSLIALCGKLLRVTFALLTKGIAYDPEKLALETTTDTVRAA

SEQ ID NO: 58355 - protein, 431 aa, unidentified
MEQKRHPYLSVGIDIGADFSLMAIALPTQEIIGKPYKILHSSNRSVQGAVERILSMEQAYELPVRVYMESTGIYHLPLYHRLKNAGLDVYVLNPLVTHANQNINIRNIHNDKLDARRIALLGLRPDLKTSIVPADDVAAVKALLREYHAMKKETSMYICRLKNQLRQIFPQYLPLFSKVNGKASLEVLSHYPSPSAVLSAGADALAKLIQEASGKGRAMAEKKAEAILSAARESLSFGHGNSGITFLIGHYVEMIRILDEKTAAILKQIKCCVQEQPDTLLARQTRLLESIPGAGFLTAVTIVCEIGDFRAFHRPKQLYSYFGLDPVVRQSGNSAGANLRISKRGSPYARRCFYILALQSVSLRKNGEPKNHVLRTYYLEKCKSKAKMTALGAIMHKLCNIVFAVLRDERPFVLISPQEHRQNYLSLPKAA

SEQ ID NO: 58356 - protein, 372 aa, unidentified
MNYNTVYVGMDVHKESFTLCSCKYEDEKASHYQRTPASYKNVLRYLAFLRTIYGEYTRFVCGYEAGCLGYSLYHQLENFNVEYVILAPTTMLEQRSKRRIKTDKRDAEIIARSLAQHNYSPVHIPTETDNQTKEFIRMRDDHKAELKKIKQQILSFCLRQGYQYDGSGNWTAKHVKWLRSLEPAGLYKEILDEYLLTYTILTDKLNRLDQRIEELASKEEYKESVSKLTCFLGIKIHTALSVIVEVGDFQRFVSARKFAGYLGLVPGQHSSGDDRNGLGITKAGNTHVRRLLVESAQSYTRGKIGYKSRVLRSRQAGNSPQVINYADRANERLRRRYYKMVLKDGKKYNIAKTAVARELACFIWGMMTDNIY

SEQ ID NO: 58357 - protein, 324 aa, unidentified
MQGKDTPEAKAEVQVYVGLDVSKAAIDVYLHPLGHVFRIANTNQGLRQLKSRLAGLKVVLVTIEATGKFHRQAHRTLHAAGYPVAVVNPLRSRLFAEAIGKLAKTDPIDARTLAIMGESLKLAANPPPAALIAELQELVLARRAAVTEKTALENRLGAAQSRFLIADIKKLLKAVERHVAHLDTEIDRLIAGDPALARRQEILISIPGIGRVVASTLIACLAELGMLSSKAIAMLVGLAPVACDSGESKGRRRIRGGREHVRSPLYLAAVSAVRCNPDLKAFYRRLRDEKAKPAKQALAAGARKLVTLANTLVHDDRLWVEKPA

SEQ ID NO: 58358 - protein, 410 aa, unidentified
MQTLVECGCGLDVHQATVVACLLTLRKGEKIHKQMRTFGTATRELLSLRTWLLGEGCTHVAMESTGVYWKPIYALLEGVVEVVVANAHHVKKVPGRKTDVKDAEWLADLLCHGLLRSSFVPPKPIRELRDLVRYRRKLVQSQAAERNRLLKVLEDSNIKLASVATDVFGLSGRLMLRALIEGRTTPQEMAALAKGRLRNKIPQLELALEGNVEEHHRFLLELQLQRLEAAENDLATLEQRIQERLEPYATQLQLLDEIPGVDWTVAAVIIAELGVDMTVFQTVSQLVSWAGICPGNNESAGKRKSGRISRGDVYLKSALVEAANAAARAKGTYLRDKFYRLKARRGYKRALVAVAHKILVAVYHILSQNVSYKELGDLYLDKLNKHHLTRNLVHRLERLGFQVTLQLKPI

SEQ ID NO: 58359 - protein, 366 aa, unidentified
MEQITRTDAAGQIVRVGADLAKRVIQVHAVDAAGRVVCRRALPRDKFIAWCARLPKGCIVAMEISSGAHHWARRLAELGLAPKLMSAQLVEPYRSQGATGKNDANDASAICEAASRPSMRFVPVKSVEQQSMLCVHRLREGLKAERTACINRIRGLLAEFGLAFAQGPEALRRVLADVLEDASHEMNTLGRLVIQRAAEQWRQLDEHLAWCDQRIAAHLRDNPAVRSAAQLMGVGAVGASAAVATVDDFKQFKNGAQFGAWCGIVPRQHSSGGKNQLGRITRRGDCYLRTLLIQGAKSAVLTAHRRHDPISRWVLALRERSGWQIAAVALANKNARILWAVMTKGERFDAHHVSVKPGDAPVAVAA

SEQ ID NO: 58360 - protein, 343 aa, unidentified
MIYIGMDVSSKEFVIHAIDQRQQKVFDGKIAPSRAGLRKLVKDLGIGPKLFIFEAGNQLKWIALTLMRQEGVRIHVVHPNEIKWINESSGKTDRIDARKLSQLGRGNLLPRPVHVVEGKTRELRELVSARGQLQSKRVALINTVRGYMKQEGVSLPEKFFQRCDWKSSLWGKSLGETQKLIVKSFMDGIEALEHSEAEITGKMIEIQDSRCELLETIPAIGKIASRVLVSALDDVGRFENKKCVANYGGLAPTIYQSGNTTNLGRINRDGRQEVRKVLLQCAHTIQRMVSRDAVPIRNFLERIEKRRGKKRAVVATARKLLTIAYGVLKSRAAYDPMRLRAFA

SEQ ID NO: 58361 - protein, 424 aa, unidentified
MKVTYPTCCGVDVHKSFLVATIIKTTGSIEPSYQKKRFSTFNNSILEFKSWLLENDCHDVCMESTGKYWVPVFNLLEDQINVTIANPKWVKAVKGNKDDTKDSKWIGDLFRLGLVKGSYIPCKSIRILREYTRYRYKLVSCRSSEKNRYQNALTVCNVALDSVVSDIFGKSSTSIIDYLLEQSGTTINHEEIASKLLRSLKSKEDTVIESIEGYQMTDSQKYRMRLVRAHMDYITAEINDVDKQIDSLISSNPDYDKAVQLLTTIPGVKRDSAITVISEIGIDMSQFCNSKRLCCWAGLTPGNNESAGKKKSVRITRAGVYLKPALVQCAHAAVKSDKFPYYKKKYESLVKRRGKKRAIIAIARMILTAIYQMLSTGEVWNPSDLYKIDMPTPLVEKQKAKAIKQAKKLLQKEGLLPPDETLAS

SEQ ID NO: 58362 - protein, 309 aa, unidentified
MDPIAVGIDVSKERLDVHVHPAGTVLSLSRNGAGIEELTGTLAAVAPQLVAVEATGGFETVVVAALAAAGLPVVVVDPARVRAFAAALGRRAKTDPIDAQVIAQFAAATKPPVRALPDAATQALADLVARRRQIIQMIVAEGQRAKRAAPRAKRSIGRLLEALRRELSEIDADIDETVRGSQVWCEKEELLASVKGVGPVTVRTMLAELPELGSLNRRQIAALAGLAPFTRQSGRWRGKSFIGGGRASVRTALFMAAMTAMRHNPVLRAFHQRLRAAGKPKMVALIAVARKLLTILNAILRDNKKWQTA

SEQ ID NO: 58363 - protein, 352 aa, unidentified
MNEITTVAADLAKDLIVVCAADASGRTLFFKQFGFRGFASWAANLPPCTVAMEACSSAHFWARTLMALGHHPKLLAPDFVKPFRKSQGAKNDRNDAQAILIAALQPDMRFVSVKSIEQQSILACHRMREGWKIERTALINRVRGLLAEFGIWLGRSPQNLARSLLRLIQDEDLPARIRALLSHAQEHLGQLEALMERCELDICQHARDSEPAQRLCTLNGIGPITASAIVASVGNARDFRNGRQMAAWVGLVPKQSSSGGKDRLGKITKRGDTYLRSLLTQGARATLNAALGKAPDKRSHLEHWIVALRQRVGYHKSLVAIANKHARICWAMLAREESYDSNGWQRHAPTAA

SEQ ID NO: 58364 - protein, 425 aa, unidentified
MASMTSAIPTAQPDRVVIGGIDTHKDIDVAALLDCAGMVLGTAEFPTTRAGYRQLLGWMGSAGHLGRVGVEGTGSYGAGICRQLSAAGVEVVEVNRPDRSQRRRRGKSDALDAAAAAEAACGGQRLAIPKSRDGQVEALRVLRLTRASAVKAGTKALQLLQQLIVTAPEQLPDQVGELPRMELIGCCAAWRPHSHDAADPSVATRIALKKLARRYLQLAEEISDSDTLLDGLVTDLAPQLIAVTGIGTDTAGQFLLTAGDNPERVHSEPAFAMLCGVAPLPASSGKTQRHRLNRGGDRQANRALHVIATTRKRCDHRTQAYLKKKIAEGHTRREATRSLKRLIAREVYYLLNPAPHTGRFLHPGQPAGAQTRSRWSPHARNDLDRAEAPAHHQKRRNRHLDKQGSIVGCTRSAQVAAHADRQKPR

SEQ ID NO: 58365 - protein, 323 aa, unidentified
MGAVVNQIPSAFASPLFVGIDVSGPFLDIAYHGSAETFRLPNAPEGFAELINRLLPLKPKLIVLEATGKLERAVLQALCQAGLPAVAVNSTWVREFARSAGQLAKTDRIDARVIARYGAVMKPKVRPLTDEQTQQLQALILRRTQLIEMLTAEQNRRKRAHKSALPSIDEFIQFITQRIKDADRDIDSFLHTNELWRKNEALLRSTPGVGKTTAATLIAFLPELGSLNNRQIASLVGLAPFNSDSGTHRGERHTKGGRHFVRRALYMACVAAQRANPYLKAFCDQLRARGKKTKVAFVAGMRKLLTQLNAMMRDGTAWNPPKP

SEQ ID NO: 58366 - protein, 479 aa, unidentified
MSIKTQQQEVRGRRGPVSAKGQRSKQPNRSGQPGGSMFEPNAAGIDIGAREIFVAVPPERDSDPVRRCGTFTGDLQQMADWLVICGITSAAMESTGVYWIPVYDVLEQHGIKPCLVNPRNMKNVPGKRTDFHECQWIQHLHSLGLLRSAFRPDGEVCAVRSLMRHRNDLVQMASQHVQHMQKSLTQMNVQFQHVINDITGLTGLAILDAILAGERDPAVLAKLRDPRVKANEETIRNSLEGNWRAEHILALKQRLSLYRSHRNLINECDQEIEKLVAAFEPRVDSEEKPMPADRKQKQRKRKNQSGSLDFNLRAEAYRLFGVDLTQIPGLMTLVFMLFSEVGRDMSRWPTAAHFASWLGLCPDNDIRGGRVLWRGARRTKNRAGTLFRLAAHSLHRDQTPMGHYLRPMKAKLGPAAATTATAHKIAIIFYTMVSKQVEYDASLWAQRDQLREKRLEATLRKQAAERGYKLVPIDANKAA

SEQ ID NO: 58367 - protein, 460 aa, unidentified
MKQFYLGIDVSKGYADFVILNARKQVVEKNFQLDDTFDGHTQLYQRLDQFLKENPGVQLYAAVESTGGYENNWYEGLVSFQATLNILTARLNPRGVYNNQKAAMNRITTDPISAKNVAEYLISHPEKVTYQAEDQMASLRKQFSFIQLLTKQRTQLLNQLESLLYACHPELLVFCKDGLRQWVLKLLVKYPTAKKLSKSKANCVAKIPYVSLDRAEELIKGAKESVASEGDMITENLVTHYAKQILQLTQTIDQQAKLMASHFENPEIAQLKTFSGISDYSAIGLLLEIQTVKRFSTSKKLASFFGLHPVFKISGDGVGGFRMSKQGRKNPRHLLFMVTLNAIQTNEVICEIYQYQLKKGMNKMSAIGLCMHKTIRIIYGMLKNKTSFDPEVDRENRQRSKSVKKRIKEDTNRRYQTFDAKAPISRRQLNKRRKKIMEQRQSQSEVIAENGIIAATPVIN

SEQ ID NO: 58368 - protein, 346 aa, unidentified
MKKIFIGIDFSKEKFDATLIKAEGLKECAPSMHEVFDNKTSGFRRLVRWVKAQSEGLPIDTWLFCGENTGAYSIGLSNYLYASGYDMCLECAYKIKHSAGILRVKNDKADSKAIAEYAMRNYDKVRLHKPQSSSLTCLREVFLYRHSLVRQKVALTVRRDEKRLTQEKSDARAFMSFTSKHLITEINKAIYKCDQKIKETIAADDELREIFDIITSMPGIGVQNATCLMVYTDNFQKFDMDSRKIACYYGIAPFGRQSGTSVNCKPKVSPFANRMIKSLLSQAALAAIKSDINIHNYYQRLIERGKHPLLIHNNIKNKMLHALVAMVRDRIKYNPDHVYQTNKSVA

SEQ ID NO: 58369 - protein, 354 aa, unidentified
MEATTQDDRATVIGVDLGDRWSWYCGVNAQGQVRGRGRVATTQRALARWAAAQPAARVVVEAGSHSPWVSRVLEAAGHEVVVANPRRVRLITWNASKRDPVDAEWLARLGRADPALLAPVHHRGPAAQAALSVLRARECLVRARTRVVNQVRGLVKAQGARLPRCSTASFPRRVSPHVPAALQPAVGPALVEIDHLTQQIRAYDQQVAHLATAVFPETARLRQVPGVGPLTALAFVLTLEDPARFPRSRTVGSYLGLRPRLHESGRRRPALRITKEGDAFVRQLLVQAAHYILGPFGPDTRLRDWGLGLVARGGKHAKQRAVIAVARKLAVLLHQLWRTGAVYEPHRAVAGRAA

SEQ ID NO: 58370 - protein, 351 aa, unidentified
MGVYIGVDLHVRTQTICWCDTGTGETAERTLDHTQDDVRRFYTQWAAPATVGVEASGYSLWFHQLIEEAGHRLLVGDALAIRRFTRRRQKNDRRDAQLLLDLLLHDEFPAVHVPPPASRDVLALLRYRHRLVRIRTMLRNGLQAVAINHQLRLGPRLFTVRGQQQFAALPLTGAFSPPNASIRSPCWLPWRSRSGPWRRSWTGERPDAASGRTHPGVGLLTALAVVHTLEPVTRFDRARRIAAYCGLDPREHSSGEVQRFGHISKQGNRLLRFLLIEAARTTIRDDDDLRRFDFHLQGRKNSAVAIVAVARKLVLRLYRMLREEIDYDEFRRRGRDARRAREVASLPKLAD

SEQ ID NO: 58371 - protein, 338 aa, unidentified
MKLYAGIDLHSNNIFLSILNEEEKEVFCKQISLNTDLIINTLLPFKSDLQGVVVESTFNWYWLADTLQTHGYQVYLAHPAANQQYDGYKHTNDKTDARWLARLLQLGILRTGYIYPKEQRGLRELLRKRMRLVQLQTTIVLGLQALIMRYEGNKISAHKIKTMKEEDVNKHIKDPNIVFLFKQKLIILKSFLTQIHVIEQETLKQLKQLSGFKELKQIPGIGDVISGLIILESGDIKRFKSAGNYCSYCRCVSSERKSNGKKKGENNRKNGNHYLCWAFIEGANFAIRYNEDIKKYYQRKMKRSNKIIAIKTIAAKLSKACFFVLRDGVEFDMKIFNR

SEQ ID NO: 58372 - protein, 318 aa, unidentified
MMQPILNVGVDVAKDAVVVACAEHSFPVKSVPNQRAPLRAWLKSLPQGSRIGLESTGAYHELLADLAQAQGFTVFLLNPLDTRHYAKAMGTRAKTDRVDAELIARLIAQEHMRLRAYTPPTANQRKLDRLIRRRATIVRLKGTLKLTMRHLGGFAPELKAVVGKLDALLAKIDATMAAIAACSPQHQEAQQRVETIVGVGPVVGISLTNTLERVPFRKADAFVAFTGLDPRANDSGHKAGRRRLSKRGPAELRRLLFNAAMSAIKTTVWKPIYEHYRTQGWSTTASLVIIARKIARAAWSIHHYRTTFNPERITKCLT

SEQ ID NO: 58373 - protein, 443 aa, unidentified
MSIPEAPGSHPGPTSEPDFAAFVGLDWADQKHCWKLVAAGSTDFTQGEVKNTPEDLQAWAAGLYARFEGRPVAVGLEQSRGAVVFQLSKFPHLVLYPVHPTTAAKYREAFFPSGSKNDPVDTSLLLELVLHHRDRLRRLDPDTAETRLLQMLTEHRRKLVDEKTRLSNQLTAWLKTYFPQVLAWIDDIDSPLGCAWLQRWPTLQELQRAHPGTLRQFFQQHNCRSAQRIQQRLDAIYQATPAVTDRALLQAGASITASLVALLKVLLETIAKADQEIEQVASQHPEAPLFAGLPGAGPALRPRLIGAFGTQRHRYTSASQLESYSGIAPVTEQSGRSQWVHFRRACPKFLRQTFHEFAAHSIAKSVWARAYYQAQIDKQKGHHAAVRALAFKWIRVLFRCWQNRTPYDEEIYLRALEKHNSPLATGCKWKTVGGFKKFSAEKA

SEQ ID NO: 58374 - protein, 357 aa, unidentified
MVHKHTILDWLGQHVFIGLDIHKRSWIVAIVTEYADFKTFTQPPDVKSLVNYLHRHFPGATYHCVYEAGYCGYWVCEQLRAHGIDCIVINPADVPTTDKEKKHKTNKVDAYKLARSLRNGELKPLYLPSRIALEDRTLVRSRQMVVSKQTRCKNQIKALLSFYGITLPEDIAERYWSRRYVAWLESLSMQSASGTTALKTLLAELAHLRTSILETSRAICTLARTQPYAANVIYLTSISGISTLVAMILLTEIMTLDRFGSLDHLASFVGLVPGEKSSGEERTMTGITERKNRYLRWILIECAWVAVRYDENLALAFNTLSRRMPKNQAIVRIARKILNRVRFVVKHQQPCIVLKAA

SEQ ID NO: 58375 - protein, 374 aa, unidentified
MANIIEAFVAFDTSKLRNAVAIAEAGRAGEVRFLGEIENTEAAVAKLVRKLAAKYGRLTFCYEAGPTGYGLYRQIKSLGHECMVVAPSLILKKPGERVKTNRRDAVNLVKQLRGGDLTAVWVPDPRHEAMRDLTRAREVAVEDLRRKRQQVSAFLLRQGLHYPGERAWTKAHRDWLASQKLEYAEHRIAFEEMLLAMRQAQERIERLEQAIRMAVPDWSLAEVVTALMALRGIDFISATAFLAEIGDLSRFRTPRELMAYLGLVPSEASTGDTVKRGPITKAGNRRARRVLVECSWSYQHPPRVGKEKQERVAAAPRAVREIAWKAQCRLSARYRALTRKGKLKTVAVTAVARELSAFIWAINRQIANPGAAAR

SEQ ID NO: 58376 - protein, 352 aa, unidentified
MIYIGIDAHKKYSYCTAIDEDGQILHEARIDGNDEHLFAEFIRIAGGQKGCRAVVETSSVWMIIYDIWEELPGVEEVVLAHAYKTRIIAEAQIKTDKIDARILAQLLRTDLICQAHIPCRETRHRKEVLRQRAFWVRDRTRLRNRIRRLLGQQRHLEMPQVKNLWTQKGQAALRTLELPAPFDRLLAQDLDALKLLDSQVKDLEKTSEATMTHDAMLLRTIPGFGVVLSSMVADEVDEILRFPSASRLVAYSGLCPSTQSSGDKTYHGRMLRQCNKWLKWAFIEAAWVAVGCDPYFGGIYRRHRARGKGANKAITIVARRMCSIAFAILKEQRAYQKRTSVVMKNVPGRSAC

SEQ ID NO: 58377 - protein, 426 aa, unidentified
MPFAALDLHKKIVEAVLLDEHGAPAWRGRFPATRPALEQFARAHLTPQHRIALEATTNTWAVVAILEPFVAEVVVSNPLRTRAIAEAKIKTDRVDALVLAQLLRSDFLPRVWTPDDATRRLRQSCTERANLVTDRTRLKNRIHSLLHQRLIEPPSGDLFQPSSRAWLAQLELDPLGRQALDRHLRQLVRLEEELTALTDSLAVQAHADARTRLLMTLPGVDFPVAQTLLAALGEIDRFPSADRAAAYLGLVPSTHQSAAHCYHGPITKQGSGHARWMLVQAAQTVAAHPGPLGVFFRRLQKKKNRNVAVVATARKLVTIAWHMLRRNEPYRYAQPSTLETKFSRLRIRATGQRRRTAPAKGTPRPAAYGTGKPTRAVPSLDQVCAAAQLAALPPAAPGELRMLDESGTAAFAQAIRKPKRVPRRSA

SEQ ID NO: 58378 - protein, 341 aa, unidentified
MAEVCTIGLDLAKHVFQAHGADASGAVLFRKKLRRAQVLSFFATQPPGTVAMEACGSAHHWAREIGKLGHAVRLIPPAYVKPFVKRQKNDAADAQAICEAAQRPTMRFVAPKSEQAQAAALVFRARDLLVRQRTQIINALRGHLAEFGIVVAQGPAHVSSLVRAVEDPAEPVPEIARAILSVLIEMLHTLDGRISLLDREMAQRAKEDVTARRLMTIPGVGPITATALTALAPPAETFKRGRDFAAWIGLTPLQHSTGGKQKLGATSKMGERTLRRLLIIGASAVLRWAARHGAPAGSWLSRMLARKPPMLVRVALANKMARMVWALMAKGGVYRAPAVSV

SEQ ID NO: 58379 - protein, 425 aa, unidentified
MRDIGLDVHRDFCEVAIQEAGEVRSAGRIETTPEKLELFARSLGSDDRVALEVTGNAWEVARIIAPHVAQVVVVSPTDTGIRQARAKTDRLDARTLAKLLATGSLTGLWMPDERTCALRRRLQRRSQLVRARTRAKNEVHAALIRRLVAKPKVSDLFGIAGRRWLAELELPAEERETVDACLRQIDFLEQEIAEVERVIANDALASAEVKRLMTVPGVNVITAATFVAAIGDVTRFATPRRVVGYLGLDPRVRQSGPGPAKHGRISKQGSAPARYALVEAAWSVIRQPGPLRAFYERIRVRRGHQVAIVATARKLACLFWCLLTREEDYAFAQPSLTKKKLRRLELTAGAERGKVKPGIWSTNKALGKAERELARQAEFAYRRLVADWQSQKKKGAGVPVGRDSSSHLLAEETAARQGSAPEPAL

SEQ ID NO: 58380 - protein, 345 aa, unidentified
MKNYFIGIDVSKEKLDATLIHYESQSDSEQQLAYTTVANNPKGFRSLVSWSKKNAGRGVKTDTMLFCCETTGGYDRALCDWLYGNGLDIWRESALQIKRSMGLRKGKDDKADSEMIAHYALRFRSQATLYEPMDENMRSLRNLFLYRQSLVAERQAKLVSSKEKQHISSKSKVDNFIYRDAQKAIDLLTKSIKECERRMLEIIKADEEMYRNYLHLISCKGVGLVTSVMLIVYTDNFKGWNAKKMASYCGIAPFYESSESSVFHKANTGGYSNRRLKGILTQAARSAITHNPTLRQYYLRMKAQGKPYGVILNNVNNKLLHILFSLVLHDCDFELDHETKRALRA

SEQ ID NO: 58381 - protein, 394 aa, unidentified
MRFVGIDVGAERHVVASVDAAQAVGLKPTGFTEDAAGYHQLLTLLGPATDTLVAMEATGHYWKNVFAVLVAQGFAVALLNPLRTRRFAAEDLQRTKTDAIDALGIARFAAQKRPAASRLPDPATEELRERLRYRDRLSQDFGDRERQLHRLLDLGFPEFPRQVRDVGSELATAILRAYPTAAAFQGVTVRRLGGLRYAGGQKVGAALAATLLEAAAASVGQHHGAAYRVQVQDICEDLDVLRRRLRTLDRDIEGLLARHEIGTLLTTIEGIGPQTAARLVATFGDFSGMRSGAALACYVGVIPGLRQSGKRTASRASLTPIGAARLRAKLYMPVLRAVRYNPWLRAYYEGLIARGKLPKVALIAAMRKLLHAVYSVATHRRPFVPHVVAQEARP

SEQ ID NO: 58382 - protein, 339 aa, unidentified
MKHTVVGVDSAKRVFQLYWVERETGEIVNIPLKREKFLEHFANRAPCLIGMEASGGSQHWARQLQALGHKVKLLPGRRVKPFVGGNKNDAADARAVWTAVQQPGMKSVAVKSEAQQAVLALHRMRQQLVKFRTAQINGLRGLLAEYGEVMPQGRTGVTKVISKALQRLADRLPAVLIDTLREQFERIGQLDEQVAKIERRLRQWHKEDKASQRIGAIPGVGLLTATAAVATMGDAKAFKSGREFAAWLGLVPRQSGTGGRVKLLGISKRGDTYLRTLLILGARSVLAHSKEPPQWVTNLAKRRPQNVVVVALANKMARTIWALLAHDRAYQKGFVSQPA

SEQ ID NO: 58383 - protein, 304 aa, unidentified
MFGIGIDVSKATLDVAVHGEQFRQFSNDKRGFVRLIRWLKKWPIKQVVLEASGGYERAALDVLHAAGLPMVRINPARARRFAQGTGRAAKTDRLDATVLAQMAHLLPLTRYVPPAPWQQRLSEFAQCRRHLVQMRVSEMQRLRRLVDPDLIAMKQRHIAQLSDDLKQLDKAIAEQLEGQPGWKNIGALKGVGPILISTLACELPELGSLGSKAIASLVGLAPMNRESGTWQGQRRISGGRAVVREALYMAALTAIRYEPRLRAFYAGLKAKGKASKVALVAVMRKMLVILNARKRDAEVTPGCP

SEQ ID NO: 58384 - protein, 350 aa, unidentified
MWIIGCDLHTRYQQVAALNTETGELVERRLSQEGNEVRQFYAALPQPSRVGIEATGHAQWFERLLAELGHELWVGDAAEIRASVVRQQKTDTRDAQHLVRLLAEGRFPRIWIPSAEQREVRQLLLHRSKLVEMRTSVRNQLQALAMNQGLRRRRALWSGPGRKQLEALALGCWGAERRKDLVGMVEHLDARIATLNQEVAAEAHRRPEATRLMQQPGVGPVTALAFVLTLGPVERFRRSKQVVSYLGLNPREYSSGGQQRLGRISKQGNTLVRWLLVEAAQTAARFDPQLHRVYLRLKHRRGARIAKVAVARKLAVRLYWMLRAFQRHAQPVSPQSCPCTVMVPQAGSNS

SEQ ID NO: 58385 - protein, 348 aa, unidentified
MNFYTQQHQHYCGIDLHARAMYVCILDSAGTVLVHRNLSTTPDAFLQAVAPYREDLVVAVECMFTWYWLADLCAREGIAFVLGHALYMKAIHGGKAKNDRIDAHKIAVLLRGGMLPQAYVYPAAMRATRDLLRRRCHLMRKRGELLAHIQNTTSQYNLPALGKKIAYKTNRAGVAARFADPSVRTSIEMDLALIDHYDALLTTVELQIVRTAKAHDAQAFQRLRSVPGIGKILALVVLYEIHDIARFPRVQDFASYCRLVKCAKESAGKRLGSSGNKIGNAHLKWAFSEAAVLFLRQSLPGQRYFAKLERRHGKGKALTVLAHKLARAVYYMLTRARAFELERFVSAH

SEQ ID NO: 58386 - protein, 355 aa, unidentified
MKILAVDLGKVKSVACDYASETGEHTFETCRTVPEALEELFVRRRPDRVVIEVCPSAGWITDLAARLQIKLQVANPSHEGWRWRSVKKKTDRVDALKLARLSAVNQLALVAVPSKVVREWRSLIQYRQSLVARRTAIKNTIHSILTRQSLGMPTGKKGWTNAQRRGLDRLAGAGDDLATFWASLEPEEWWRGQLAEELRQLREVECSISSVEKRLDAYAAKNQSAKRLRSAPGIGPRLSEIVVAMIDDPHRFKNGRQVAAYAGLVPRVFQSGSVDRKGRITGAGNRYLRSILIEVSWLGLRTNPWMKQVFDRVCRGCPSRRKIAIVAVARRLLIWCWAMMRDDRDWDPKTALAAA

SEQ ID NO: 58387 - protein, 356 aa, unidentified
MAQAFNSAIAVVGIDIGKNSFHVVGHDERGAIVLRQKWSRGQVETRFANMPPCLVGMEACVGAHHLSRKLKTLGHDARLMPAKYVRPYSKGQKNDFRDAEAIAEAVQRPTMKFVSTKTADQLDLQALHRVRERLVSQRTGIINQIRAFLLERGIAVRQGQRFLRAELPRILTTPPDVLSPRMVRVIEGLCGDWRRLDERIEGLSSEIEVIARQDAGCERLMSVPGIGPIISSAMVAAIGAGDAFTKGRDFAAWLGLVPRQMSTGDRTILGKISKRGNRYLRVLFVQAAWVVLIKPTVWQRHGLKPWIEAAKKRLHHNVLAIALANKLARIAWSVLARGRAFEVRKINKAATQPACS

SEQ ID NO: 58388 - protein, 359 aa, unidentified
MRIIGCDLHARQQTLAMLDTTTGEVVKTTLKHEGNNVREFYCNLPRPGRVGIEATGSMQWFVNLMEELGIECLVGHPAEIRAAEPRKQKHDRRDADLLLSLLVEERFPAIWLPTKELLDLRALLRHRHQWVCLRVKLQNALQAIALANGLRRGSSLWTQAGQHAIASLPLSPHAAYRRSELQAMYVHFETEIEKLNRRVEQQACERPGARLLMTHPGVGPITALATEVFLGDPARFADSKELASYVGMIPGEYSSGKRQRLGGLTKQGNPLLRFLWSEAAIHAVRRDPELKQFYRRKLIQKGLGKARAAVARKLGIRMWIMLRDGIEYNEFCRRGQMQQKSGDACAGMPEARYGAKVTG

SEQ ID NO: 58389 - protein, 447 aa, unidentified
MPELANSVEPEFVACIGIDWGDKKHAWALQIAGSTKIEQGEVLHTPEAIQEWAMGLRQRFPRGRLAVALEQSRGPLVFALSKYGHLVLHPVHPTSAADYRKIFRPSGAKSDGPDAAMLLDMLVRHRDKLRPLNPDTPETRALQLLVEDRRQLVNERTRLSNRLGADLKSYYPQVLQWFEDPYAPVALDFLERWPTLEQLQKAKPATLQKFLQKHQCRDEAKNRARMEAMRTAVAATTDFAVVTVGCAAARAAVRLLRDLSQSIREYDQQIEKLAKAHPDFAIFDSLPGAGPVLVPRLIAAFGTQRDRYQNAAELQQYSGIAPVTEASGQQHWVHWRWSCPKFLRQTIHEWAAQSIQHCEWAAAYYQAQREEKNKSHHAAVRSLGYKWIRIVFRCWQDRTLYNNSRYEAVLQSHYKKAAARPNQPSRFEAPIQWVSCGSFQKIAFKNA

SEQ ID NO: 58390 - protein, 342 aa, unidentified
MEYYVGLDVSLKQTSICVVDQAGLVVREGVVDSDPEAISVFVRSKAPGAVRIGLETGPTSTWLWTELKRLGLPVICIDARHAKAVLKMQINKNDRNDAIGIARIMQTGWFKEVHVKDIDSHSVRALLASRALLVKIKRDLENHVRGLLKNLGLVIGRATFNVFAVRAEELIEDRPDLVAAVRPLLEARNAVEQQVSELDRKVMKLARRDAQVQRFMTVPGVGPITALAFKATIDDPARFARSRSVGAYVGLTSRRHASGEIDWSGLISKCGDAMLRSYLFEAAGVLLTRVPKWSTVKAWGTRLAKRNGLRKAKVAVARKLAVILHRMWIDGTEFNWSKEVAA

SEQ ID NO: 58391 - protein, 345 aa, unidentified
MHVASIGIDLGKTTFHLVALGERSKVLVRRKFSRTQLLAHTANLPPSLIGLEACSGAHFLGTALREQGHEVHLIPAQFVKPYRKSNKNDFLDAEAIAEAVTKQNMRFVPIKTQEQLDVQAVHRVRDRLVQRRTALINEIRGFLLERGITFPAQPAHLRQNLPTVVEDGEQNLTPRLRWLLDRLWQEWKQTETDIETVTDEIERIATEDERCRRLRQIPGFGPLVSTAMVAAIGNGAAFRRGRDFAAWVGVVPRQYSTGGKQKLYGISKRGNVYLRRLLIHGARAVLFRIKYDTAGLGQWVHRLSQRAPRNKVVVAIANKLARIAWAVLSSGRDYRHQPRQQPAAA

SEQ ID NO: 58392 - protein, 343 aa, unidentified
MQTVTTIGLDIAKSVFQVHGIDAAGQVVIRRQLKRRYVLAFFQKLPPCLIGIEACASSHHWSRELQALGHTVRLMPPAYVKPYVKRQKNDATDAEAICEAVTRANMRFVVTKTPEQQSGLVLHRARHLFIRQQTAVINAIRAHLAEFGIIAPVGRHGVEELLNVVADPNDKRVPEIARACLLAFGAQLRRLKEQILEFDRMIRAWHRSSETSRRLDHCPGVGPVLATALVATVADAKSFRSGRNFSAWIGLVPKQHSSGGKNRLGSISKQGDRYLRGLFVAGALAVIRYAKIHGTKHRPWLTALLARRPTKVAAIALANKIARMAWAMMARGERYKEPVALAA

SEQ ID NO: 58393 - protein, 372 aa, unidentified
MNYNTVYVGMDVHKESFTLCSCKYEDEKASHYQRTPASYKNVLRYLAFLRTIYGEDTRFVCGYEAGCLGYSLYHQLENFNVECVILAPTTMLEQRSKRRIKTDKRDAEIIARSLAQHNYSPVHIPTKMDNQTKEFIRMRDDHKAELKKIKQQILAFCLRQGYQYDGSGNWTAKHVKWLRSLKTEGLYKEILDEYLLTYTILTDKLNRLDQRIEELASKEEYKESVSKLTCFLGIKIHTALSVIVEVGDFQRFVSARKFAGYLGLVPGQHSSGDDRNGLGITKAGNTHVRRLLVESAQSYTRGKIGYKSRVLRSRQAGNSPQVINYADRANERLRRRYYKMVLKDGKKYNIAKTAIARELACFIWGMMTDNIY

SEQ ID NO: 58394 - protein, 340 aa, unidentified
MEIATIGLDISKHVFHIHAVDGQGKVAGRQRLRRGEIVSFFSSLAPCLVGIEACATAHHWAREIRQFGHDVRLIPPAYVKPYVRRGAKNDAADAAAICEAVTRPDMRFVPIKSVESQGFLMLHRARGLLVRQRTMTACAIRAHFAEFGIIVGQGRQRVDGLVVLLDDEELTLPAHARIALAVLVNQLKELDRQVETIERELAQIQRVNPMAKLLSSIPGVGPITATALAATVPDPTMFRSGREFAAWLGLTPKQNSTGGKDRLGRITKQGDSYLRHLLVIGARNVVRYPKARSRVGGGWIEALLERRRPMVVAIAVANKLARIVWAMMTTGEFYRPKLAA

SEQ ID NO: 58395 - protein, 409 aa, unidentified
MLLFLGDDWAEESHDVELQDQTGRVLARAKLPEGMGGMARLHAMIGEHVGDDEDVTVVVGIETERGPWVQALIAASYQVHAINPLQVARYRERHGVSGAKSDSADAHVICSMVRTDHHRLRPVAGDSPQAEAVKVVTRAHKTLIWERTRHTLRLRQALLDFFPAALAAFDDLTAPDALELLAAAPDPAAAAGLSVEQITDALKRARRHNRAVRAEQIATVLRGDQLGQPPAVAAAYAATVRAQAAILTVLNTQIKAMEKQVEAHFGKHPDAKVYLSQPGLGVVLGARVLAEFGDDKQRYADAKARKNYAGTSPITRQSGKRKVVLARWVHNDRLLDALGLQAFCALSVSPGARAYYDQLRARGIGHRAALRQLSNRLVGILHGCLKTTTVYDEAKAWSHQHKKDLAIAA

SEQ ID NO: 58396 - protein, 360 aa, unidentified
MAKTKSVRPPFVVGGVDTHKDLHVAAVVDENNRVLGSDFFATTRQGYRQMLTWMASFGTVARIGVECTGSYGAGLLRHLQNAGITVLEVTAPDKMERRRRGKSDTIDAESAAHAAFSLIRTVTPKTRSGMIEALRVLKVCRKTAVAARRIALQMIQMNIVSSPDELRDQLRNLTRMQLIRTLAAWRPDVTAYRNVQDAYRIALKSLARRYLELHDEIADLDIMIASIVDELAPELIKRNAIGYESASQLLITAGDNPQRLQSEPGFAALCGVSPVPVSSGKTNRHRLNRGGDRAANSALHIIAIGRLRTDTKTQEYVAKRVAEGHSKMEALRCLRRYIAREVFTLLRNQNRQINSTQITT

SEQ ID NO: 58397 - protein, 362 aa, unidentified
MAKHIMVGCDLHDKSMLLKIGVDRDKPTVETWETDPRSVGLMVGRLARWARRVGGAKVLFAYEACGFGFRLYDELTAAGIECYVLAPSKMKKSVKHRKRKTDERDAQLILDELKSYVLAGVAMPSVWVPDAQTRDDRELVRRRLAVAQDGSAAMVRIRWLLKGHGIKLAPASAWTEAYWQWLEELAEGGLPAGAAVALGSLMRQVAWLGSERDVLDRHVLALSQSPRYASVVAALRRHKGIGTLTAMVFLTELGDLSRFSNRQQVGSFLGLVPSSFETGEADDRKGHITCQGPSRVRKVLCQAVWSRLRCEPGDRKAYDRIVARNPKHKKKAVVARMRTLAVNLWHTGLEAQTALREEVVMA

SEQ ID NO: 58398 - protein, 355 aa, unidentified
MTSNIKYIGMDVHTESTSIAVRNAAGKIVMECVIETKASTILQFFDGLRGDLQVTFEEGTWAAWLYDLLRPHVGSLVVCDPRRNALLKDDNRNDRIDARKLSDLLYMNKLNPVYHGEHGLRALKELVRSYLTITRDLARVMTRVKAIYRSWGIPCTGKQVYAPRHREEWLAKISELGVRRRAEFYYQQLDALRVLRQQVRQDVLAESKKHRAWKRLCQIPSIGPIRAAVLLGILQTPHRFRTKRPLWKYSGFAIETHSSADHRSVNGQLQRKQKTSVRGLNENCNHDLKNLFKSAAVVASSKPGPFQEFYAALVAKGMRPEMARLTLARKIATIVLIVWKKGVCFDAQYLKPQTA

SEQ ID NO: 58399 - protein, 458 aa, unidentified
MIMENKKISLEVVNPNAGGIDIGSKSHWVAVGQNAQDIKEFGVYSEDHLALCLWLQKHKVETIAMESTGTYWQNLFSSLVAFGFEVILVNGRQTKNIKGKKTDIKDCQWIQKLHTLGLLTSSFLPDSTTDIIRTYSRHRQGILKQSAKTVLKIQKHLRLMNMRLDVVVKDIVGLTGTKIIADFINGQTNGKELAKHRHYNCRKPEAEIAKALQYNGRDDYFFALKQEWATYLHLQKQITQVDIQIKKHLVEIIDNDDNKKQHIAFEKPYKRKNKNTIRGLDMNQISYQYFEGVDIMAIEGVNDSTVMTIISEIGLQGIKKFSSGKQFTSWLRLAPNNRISGGKILGHHLPKGSNRLKIAFRLAANAIGNLKEGHLADFFRRINYKKGRATAVSATARKLAVIIWNMLAKGIPYKPPTEYLFLDQKRKLKLVNRIKRNIAKFELKPEDVGFDKSLIINT

SEQ ID NO: 58400 - protein, 412 aa, unidentified
MQVTYERCCGIDVHKKTIVACAIVPGPDGQPQKETRTFDTMTGDLKALAAWLTGLGVTHVAMESTGVYWKPVFNLLEGQFEILVVNAEHLKKVAGRKTDVQDAEWIADLLRHGLLKGSFIPGAQQRALRDLTRYRTRLIDERTEEVNRLQKVLEGANIKLASVVSDVMGVSGRAILAALLEGRQTPAQMAELAKGPLRKKQAELSRALEGVVQPHQRFMAVELLAHIDYLDEALARLDAEVADQTRPFEAELVRLDSIPGVNRRVAEVLVAEIGWDMKPFRDAAHLASWAGMCPGNKTSAGKRYSGKTRPGSPWLKRVLTEAAHGAARKKNQYLKAQYQRLAGRRGTKRATIAVGHSILKIAYCLLTKQQTYQDLGENYFDERDREGVKRRAVRRLEQLGYAVDLSPARTTA

SEQ ID NO: 58401 - protein, 345 aa, unidentified
MHFIGVDHHKQTSTMTVLDSQGGEVRTAKLLNLRVDIEAFIREVAPEGFLAVVEAGRASYGMADLLRELGGQVKMANPLQVKAIAHARIKTDKRDSKMLAQLLRADLIPEVYQREAGNREAQRVLRLRAYWISLRVQARNKIRALLAQQPEEVRIAVEQPSEQLFSPKGQEFLGGLELRGRDREILGALLRGYQTFQAFQAESDQLVADLYRELPAAQLIDTAPGFATTFSVLVAVEIAEVRRFPRVEALHSYAGLIPSTHSSGERTYHGPIVKGNVWLRWALVEAVYPAIRKDAGLSILYHRLARRKGPNVAKVATARRLLTILYRMLTENRPYVPYRMNPTAA

SEQ ID NO: 58402 - protein, 341 aa, unidentified
MKHDLNVVGIDIAKRIFHLVGLDDRGKIILRKRLMRGEVMAFMAKLPRVTVGMEACGGSHYWARQLREQGHEVKVMAPQYVKPYVKTNKNALRDAEAIAEAVTRPSMRFVPIKEVEHQDIPALHRVRERLMGARTALVNEMRGLLGEYGIVLPQGVNAFRKGVLEKLEAEQAKLTSLSQEIFSKLFDELVKLESELAFYDDKLEAMSHSHPECQRLLTIPGIGPITATALIAAISDVDVFTNGRHFSAWLGLVPKQHSTGGQTRLLGISKRGDSYLRKLLIHGARATLRWARTKTDRRSQWIRGLLERRGWNRTAVAVANKNARIIWALLRRGGVYREGTS

SEQ ID NO: 58403 - protein, 408 aa, unidentified
MNRYYLGVDWADQFHKVWVSDPQGNEVAEMKVDETVEGRSDFGRWLNERKAEGIELWAAIEKPHGRIVDFLVDHGVVLYPINPKALDRARDRFRMSQSKSDPFDAYVLAEFLRTDHAHLRALQPNSEQAQELKLLTRDGLRLGRQKARLLNQITVTLKEYYPRPLEVFSDLETNIALDFLEQYPTPRALLDLNRRRWNRFAKRDHHLSEAHSNELWEKLRQPQMAMPEHVVRAKARLLLALVAQLKALLPAIKAYEEKIEDFFASLPAAKLTQSLPGGKGGTTLPMLWAELGDAKNRWQSWRHLQAEAGAVPVTQKSGKSRSVQFRYACNKVLRYAVYWFSFTSLKRCEWAKTYYRNQRARGHSHHQALRALGAKWLKILFVMWRDDKAYDENYHLANIARQKMRQAA

SEQ ID NO: 58404 - protein, 318 aa, unidentified
MLLDDSVQCSVGIDVSKTRLDVHVLPEGRSFQARNAPDQFQTLLDRLPEPGACRVVLEATGDLQRAVVAFLVDAGHYVSVVNPRQVRDYAKALNILAKTDAVDAKVIARFGKDVKPRNITEVPEKQAELDQLVGRRRQLIRARVAESNRLRDDMPKLIRESIQRQLKSIAKDVARLNRAILELVRSDDDWKQRFDLLKSVPGVGDATAAALVAELPELGRLNRQQISALVGVAPFADDSGSRQGRRSTRGGRRPLRSTLYMATVAALRSNPVLKAFAKNLRRNGKRGKVVIIACMRKLVVIMNTMVKENSHWKETTPA

SEQ ID NO: 58405 - protein, 346 aa, unidentified
MNKVYNQKRLFGAFDLHSNNNHLAIIDREDNRIYRKKLPNQPDVILAELEPYRVHLSGIVVESTFNWYWLVDLLMDEGYRMHLANPAGIQKYKGLKHADDNHDAFWLAHLLRLGILPEGFIYPKQERPVRDLLRKRSHLVRLRTSLINSLQDIIYRNCGCKMGVNSIKAVKENKVEPLFDGQDDLALSGAVSKETIDYLGRQIRQVENAVLDKVKLREEYAKLLSINGVGKILALTIMLETGTIKRFPKVGNYASYCRKVPSHWTSNVKKKGKGNDKNGNTYLAWAFSEAAEMTRRYDEHARRFFNKKAAKTNRMVAHKALAHKLSRATYYIIRDRVDYDPLKLFA

SEQ ID NO: 58406 - protein, 351 aa, unidentified
MDRYIGIDAHSESCTVAVMGPSGKRIRQQVVDTQAAVLINLLKGVAGDKYVCIEEGQLAEWLVEALGPHVKEIVVVQPPEHSGRKSDLDDAWALAERIRVRADGTYVFKPTTQYRALREAVRAHITAVKEQTRAKNRFRSLLRSRGIPKLDASIYEPESRLQWLAKLPPAYRRRAEWLAQQVDSTTAAQALTEKWLVEEGQKVSEVQRLKTVPGLGDVRAAQIVALIVTPHRFRTTRQFWSYCGLGIVTRASNEWKRASDGRWQHVQGSVQMRGLNLNRQPILKAVFKGAAISVLGKDNPFREHFQRLIANGTAPHLARLTIARRIAAATLTIWKNKEDYELSKHHSTKAA

SEQ ID NO: 58407 - protein, 445 aa, unidentified
MEVIYAHAAGVDVGSQSHWVAVDQDPRNVREFGVYTKDHIMLIEYLHAHQITTVAMESTGSYWQTLFNALQSAGFQVILANGSHTKNVSGRKTDLLDCMWIQKLHALGLLSASFILSDYLQTLRTYFNHREYLVDQTTRYINKMEKALRLMNIRLDIAFRDTMGKSGRAIIEAILSGQRDPLYLASIADRRVKKSKTEIADSLQGEWRDELLFELQSCLQFYDAYVAAIRTCDQQIENLLIKYIPKNDLSLQGNDQQEFPIDKKKRNKLSPAFNVRQLAFAHLKTDLFLIPGVSHNTVLAILCTMGNDIFRFKSAKQFASWLRLVPNNKISGGKIISSRTPKSKNTFAICLRQAANSIGNQKNHPLAPFFKRIAYRKGRGAAITATARKLAIIIWNMISKSQPYNVYDYDQTYQKRKNTQLKNIRSRLAKLNLSDDELRNLIQIT

SEQ ID NO: 58408 - protein, 345 aa, unidentified
MQTMYYIGLDVHKRTISYCVKDGSGVIHAEGTIPATRLNLDLWMKKLPQPWTAAMEATVFTGWIYDHLQPHAAALKVAHPLMLRAIAAAKKKNDRIDAKKICDCLRCDFLPECYMASTAIRERRRTLRYRHLLVRQMVQMKNKIGMLLMEAGVNYNKQRLHKAGYFRELLATNPDIPEGLRSLLRLCREMVVRLQKTESALVCSLEQDSLLMDRVERLMTIPAVGPITALTWALEVGDAKRFSSIKKAISYCGLCGAEKSSGNTMQRTPLSKQRNKHLQTTLIEAAKMAPRNSPALALLYDREKQKGNANRATLAVARKLVAYLMAVDRGQRNFQVVERSNSIAA

SEQ ID NO: 58409 - protein, 411 aa, unidentified
MRVHHNVCCGIDVHKKSVTACLIWGPANQEPEFEIRRFGTMTRDLQKLTEWLKQAGCEAATMESTGSYWKPVWNVLDGQIPKLILANAQHVRALPGEKTDRKDGKRLAELTRHGQVRPSYVPPRAILELRDLTRYRNKLLSAGSSERNRVQKVLEDANIKLGSVLSDVFGVSGQKMLQALVKEDRVDTAKVAQLAHWSLKRKVEAIEQSLEGKLTAHHRFLINASLEHMRFIEEQLIRLDQEIQRRLQPYQEEYALLQTIPGIKETGAARILSEIGADMSPFADGDHLSSWGGACPGNNESAGKKFQSKVRKGNVHLLAALTECAWAATKKKDCHFRNKYYRLKSRRGSQRAIVAIDHAMLKCIYVVLTQRKPYEEPKPTSLTEAQKERKASSLCRQLRALGYEVKIQKAA

SEQ ID NO: 58410 - protein, 406 aa, unidentified
MSQEKTSPDRFVGLDVHKHYLAAAAVDPDKNEILSPRRVMLARLDNWMRKTLTPRDAVVLEMTTNAFQIYDELRPYVHSVTIVHPPHVALITRAQVMTDKIAARIVARLHAVGLLPSVWVPPTEVRDHRALIAPRTKMVRLSTQAKNRLHAVLHRHHLLPPAGKPFASHNHEWWLELEISELERAHARFDLDTLVFAQTQVAHLEETMTALAAQDDRVVLLRQLPGVGLITALTLLAAIGDISRFPTAKHLVGYAGLGVRVHDSGLTQRSRRITKAGRRDIRSAMVEAAHTAARTHPHWREELARLEPRLGKNKAIVAIARKLLVAVWHVLSEGGPDCFADAEFVARKLLKHAYRLGRAHRSQGQTAPQYVRQQLDRLGLGQDLTAIRWGDRTFPLPPSRLGTESN

SEQ ID NO: 58411 - protein, 412 aa, unidentified
MKVVYEICCGIDVHAKMLVACLLSADGEKEIRTFSTMTDDLLRLRDWLVAAHCTHVAIESTGVYWKPVFNILEDALTVILINPEHAHALRGRKTDVKDAEWLADLLRHGLLKASFIPPPEIRELRELTRYRESLVREQSAVANRVQKVIESGNIKLGQVASDALGASGRAMLRALAHGETDPVKLASLAQRQLKEKVPQLRRALQGRLTVNQRFVLGELLQRWEELERADRRVSTEIDKYLQARPKLARAREILDSIPGIGPRVAEVITAEIGVQMEEVFASDAHLASWAGLCPGNKATGGKRLSGRTRKGNTYLRSALVQAAWGATMKKNCYLSSQYYRLVKRLGRKKALVAVAHSLLVIIYHVLQSDQTYTELGGDYFDRHHTEQQRDYYLRRLQMLGLKVTVEELSKAA

SEQ ID NO: 58412 - protein, 408 aa, unidentified
MSKQKIKANTIQVDHRNIVGIDIGKRKHAATAVTPKGAVIASLKSFENNKAGVDLLERQVLIPATSKSKPRIAMEATGQYWNALHDELQRRGYTCVVLNPIQTGSRGRKRIRKTKTDPADSELIARTILAGDAQATLVPDESVFELRLLVRHRWRMIRAHGNIVRYGVGLLDRVFPEYEGIFCKPFLTSIRTLIREVGLTPKTLCSKQAEVKKILEKASRRRLSAETIDELLKRAKISIGTQQGESVVNGQFRMVADYLDFVESQVQSINEQLQERMAALDSPLMSLGIGAEVAATILAESGDIARFPGPGEYSAFCGLDPSIRDSGDSIRGVSHISKRGSPLLRWALYISAQTVMKKHRDFEKIYERHVNRHKGHRFALIAVAHKLARVIWRLVKDGRPFTKRPPKR

SEQ ID NO: 58413 - protein, 334 aa, unidentified
MQTYVGIDVHRRRSQIAVMDSGGQVAVNRNVPNGREPLLEMIGDLPLGTPVAFEAALGWGWLIELLQEHGFEPHLAHPLQCKAIASARLKNDKVDAATLAHLLRADLLPEGWIAPPPVRQQRMVLRHRAQLVRLRTLLRNRIHAVLADQGCDRGGGTRNYWGASGRQWLDGLRLPAASRMVIVDLLEAIDALQLLIDRLDTALAETTKEDPRVKALTTLPGIGRLTALIILAEVGDVSRFDSAHKLASWAGLTPTVRGSDRVVHYGHISKQGDPWLRWITCEAAHVAKRSPDYIDFYARVAQRRGKKIAIIAVARKLLTRAYHVLREAEAANHV

SEQ ID NO: 58414 - protein, 342 aa, unidentified
MVDIDYIGFDLHKERIVYCAKAVDGTVREEASVVAERGRLQRWAAGRPRPWVGAMEATLFTGWVYDTLKPYALELEVAHPALLRAIVAAKKKNDALDAAMLSDLLRCNLLPRCYIAPPQIREMRRVLRYRNLLVRLAVQMKNKIAGLLLETGVRYERRRLHRKRYFQELLTELKEVPESVRDLLRLSRSQFEAFQMAQARLLRGLEWDPRLRERVERLQTIPAVGSVLSLTWALEVGEVSRFRSLRQAISYCGLCSGQRSSAGKEKRGPISKQRNAHLQTVLVEVAKMAPAWDPVLAEVHARELERGHRNRATLAVARKLVAYLLAVDRRQTGFVRSSPSGS

SEQ ID NO: 58415 - protein, 423 aa, unidentified
MQVSVPSDRCEESNRCFGTFTQDLQKIVEWLKTCGIKRVVMESTGVYWISIFLMLQEAGMEALLVNAKEAQNVAGRKSDVSDADWLRFLGSCNMVKPCYQVEAVSRRLRVYNRLRMTATRDMARDMQHMLKSMEQMNIKLGSVLSDISGESGMKIIHAILGGERDGQRLAALASSRCKKSKQEIAMALEGTWDPEHLFGLRAAMDSYEFHRRQADACEREMETFLNSYPMESVIDGKDKPLERSGKQVTRKSRVCFDVEAAAYLMYKVNLMLIPGVSHLTLLTFMSELGPNFVSKFATPEKFCRWLNLTPDDKVTGGAVKSSKVPKRKNPVGQALRQCALCVQRREVPLGQYYRRMKGRLGPAQAVVATAHKIAKIIYLMVQRGEEYREEYMAKSEKAVLEKKLAKLEKHRQYLEKQLTKVAG

SEQ ID NO: 58416 - protein, 338 aa, unidentified
MAMYCGIDLHSNNNYVAIQDGRHEDVVCRRLRNDLQTVLNFLEPYREELEAIAVESTFNWYWLVDGLKEAGYDMRLVNTTKASDYSGMKYTDDRHDARWIAHLLALGILPEGYIMPPEERGLRDLLRRRSFLVRQRTSLYLSVKTIFARSKCQKVTTQDIRTWDSEAVRGMFDDPHVAESVIATLPVVRVVTAQIKGLEKIALETGKLRDEFRLLLTAPGIGDILALTIMCETGDISRFQKVGNYGSYCRCVKSEKFSNNKKKGKGNRKNGNKYLSWAYSEAAHHATQYEPLAKRYFDRKKSRNHPMVASRALANKMARACYYVMRDQASFDVSRTFC

SEQ ID NO: 58417 - protein, 429 aa, unidentified
MRPRSAIGIDPEAKGIQCSLVGIGEEKPRMKGFLVTQEDMEGFIRWVKKAGDVIIAIEGSNGQSEPIEQALRAEGLVFYSFKPSDVARFRKAVLGQNKNNDKDAESVARYAMALEAQGKLNSHKRVWFPDAELQGLTRSYEQKTNQMTAEVNRLWKLLRTVSPDLYLALGGVNPDIEIDGNMLQNQGILALLAEKPDIVEWKTLSGMDFLEAMGGRLYNGRQKLIKELQKVAKTFRPIPSSLSLMIENSVTQILLLKKQRKRILNTLEQITQDNKAISILRAYRGIATLTASTLIAEIVNIRRFINNDNLAGYAGLGMIELSTGERSNMVHTSLFNHRLKDTLMTAAKNFVLYNPDSHLAGYHRNLVKGGMSATESRKRVARGLVRVIFRALHAIDEDEETGITGRDDEQEKKRESDMASGQVRSDKNH

SEQ ID NO: 58418 - protein, 456 aa, unidentified
MEHARQPTRVRRRLTIVNEDAAGLDVGATFHVVAIPADRDAEPVRTFQSFTADLHALAAWLQSVGIRTIAMESTGVYWIPVYEILEQRGFKVLLVNARDTRNVPGRKTDVNDAQWLQQLHQHGLLRGSFRPRPDVARLRAYLRHRERLLDYAASHIQHMQKALMQMNVQLHHVVTDITGVTGMNILRAIVAGNHDPAALAEFRDRRCQASQATIAAALTGNYREEHLFALRQSLELYDFHRRQIEACDAQIEATLAQLNIDREAPAQPLPTVRHQGGPNEPRFEVRSALYTLLGADLSQVHGFGPYTVLRLVAECGDDMTKWPTAKHFTSWLCLAPGNKISGGRVLSAKTRRSANRASALLRIAAVNVGRTHTALGAFYRRLASRIGKAKAVTATARKLAVLFYNSLRFGMRYVDPGQASYEERYQTRVLANLTRRAKQLGYALVKSPESEPVGVS

SEQ ID NO: 58419 - protein, 370 aa, unidentified
MEKSVLYVGLDVHKMSVDVAIAEPGTAGEIRYYGRIGGDLEALDKVTRKLNAKGAALRFAYEAGPCGYQVYRHLTAQGYSCLVAAPALIPRRPGDRLKNDRRDALTLARLFRAGELTAVKVPEADDEAMRDLTRAREDAISVERRAKQRTGALLLRHGRRYPGKTSWGRGHWRWLLQQVMEHPAQQIVLQEYLDAVRQASARVERLTGQIRELIPQWRRAPFVVAYQALRGVSLIVAATVVAEVGDLSRFNNPKELMAYLGLVPSEHSSGASVRRGHITKTGNGHARRVLVEAAWAYRLRARVTRPLLQRQEGLPESIRQLAWKAQLRLCARYRRLLARGKAKQTIVTAIARELAAFIWAIGRAVEPVTA

SEQ ID NO: 58420 - protein, 449 aa, unidentified
MTTSFVLGIDPGKSFFAATLVHSTGERVWKARQFDMSREGFESLKSVLPEEDLTIGIEASGRIDDNLIAWLGEWKLTCQDRNIRLIRVNPGQSARFGGPNPRRDQTDGSDSDHVAEFTRVYQRRLEAFDYDPKAQAMTRLISERQRLVQDLTATKNRIHEQVLVCFPEFTRVFADPFAKLARAVLSEIPTARRAARRQALSLARVKSGRRGRSLGVERAHQLILLAKGSIASAGEDDDAEALVFLLDQLELLEKRLAHIERTLVAFVQQAKAETATPEEGVSAARQVELLDSIPGIAIVSAATLVLGTRGLARFVSGEALSAQWASCPERTQTGTSLNKTHLTARGDHKQRAMLYLVTQTACNCDPAFAFHKWRMIQRGLCPQQAVCAEMNRMAHVIWALVARNQMYDVNRMIEQIRIHHAGLWKTFVRQHKENRALWKKVDPKLKKIA

SEQ ID NO: 58421 - protein, 350 aa, unidentified
MEFFVGLDVSLDETHICVIDEGGRIIKETRAASEPDAIAKAIRHQGRRIEHVGLEAGNLSQWLFEGLMKEGFSVSVMEARHVRAAFAAMRVKTDRHDARGIAQLVRLGWFKRVHVKSLDAQETRALLTARTFLVEKVTATENSMRAALRNFGLKMDAATRRTWEARARELADGHEVLEGIVEAMLRVRALLLIELAKIEGQLTALAKSDPVTRILMTMPGVGVVVALSFRSAVDDPDRFPRSRDVGAWLGLTPRRWQSGKTDIVGRITKAGDARVRTMLFEAAATILGRVRIMSPLKSWGLRIAKRTCMKKAIVAVSRKLATILLAMWKSGTAYWAKAHPPACAADVAVA

SEQ ID NO: 58422 - protein, 373 aa, unidentified
MQYSIVYVGMDVHKDSFSLCCYTNEKEKAEYSQRVLGHYSKVINYLEAMRFHYGKDVSFICGYEAGCLGYTLYHQLTEHNVQCVILAPTTMLVSRGKKKVKTDKRDAALIARCLAHHDYSAVHIPSAKDEEVKEFIRMRDDHKIAQKKVKQQILSFCLRHNYRYPGGTRYWTQGHMKWLRDLKPEGLYREILTEYLVTYNSLTDKLERLDKRIEELAAAEEYRDKVHKLSCFHGMRAHSALSIITETGDFNRFATAQQYASYLGLVPGENSSGEEQIRIGITKAGNRHLRMLLVEGAQCFGRGEIGYKSKALKARQQGNPAEIIAYADKANERLRRRYYRMILTQGKRTNVVKTAIARELACFIWGMMTDNIA

SEQ ID NO: 58423 - protein, 453 aa, unidentified
MCLEDRPVLEPNAAGVDVGAREMFVAVPPGRDENPVRVFATFTEDLERLTDWLEQCGVTTVALESTGVYWIPLFEILEQRGIRPCLVNARHMKNVPGRRTDWHECQWLQFLHSVGLLRAAFRPGQDVCAVRTILRHRNELVAAASQHVQHMHKALTQMNLQIHHVISDITGLTGRAIVDAILAGQRDGAELAKLRDPRIKADTETIRKSLEGNWRPEHLFTLGQSRDLYRIYQQQIVNCDLEIEKMLQEFAPRIDPGERPLPTDRKRNRAGSTRRRKNGHPHPEFDLRTEAYKLFGVDISQIPGIEENALPLFSEVGRDMSRWPTAGNFISWLALCPDNDISGGKLLWRGARRVKNRAGHLFRMAAYALHRSLTPLGNYLRRMKAKLGPQAATMATAHKIAVIFYTMVKNQVEYDETIWDARDAQREKRLEARLKRQAKQLGYELVPIEPKAA

SEQ ID NO: 58424 - protein, 364 aa, unidentified
MKKLPPRGFDVIMNPQEKKPKKEVAKMYYTGIDLHKKTSFITTIDESGKVVFRRNFQNREEHILNYFVNLNGSTKIVIESMCSWYWLYDLLRAHHFNVVLSNPLKTKAIASAKIKNDKVDSHMLAQLLRADLIATVHVCSLKTRKLKELLRHRRRLVADATRMKNRIHMLLMKNNISIAVSDLFGVKGMKYLKDIELPVYHQQQLKFYLTLYGHLTEQIEPLTKQIRDLANSNPMAQLLMTIPGIGPLTAMFIIAEIEDISRFPSYRNLSSYAGLVPSLDASADKSRTGRITKQGSPYLRSALVEAAQVIPRMKKTRLNVFFRKRIVRAGYQKAIVATAHKILQVVYYVLKNQTPYQEEYPAKA

SEQ ID NO: 58425 - protein, 338 aa, unidentified
MNIVFLGIDLAKNVFQLCGLNQAGKPVYTKRTGRKELLQTLANIPACLIGIEASTGAFYWQREFEKLGHKVKVISPQYVKPFVRGQKNDGNDAQAIAVALMQPTMQFVPPKSPEQQDIQALHRARQRIVNHRTATACQIRGLLLDRGIPIGSAVSRARRAIPLILEDAENGLSSRMRRTIAELYDLFNDLWRRIHFFDKEIETVFRQSEACQRIAKVKGIGPETATAVVAAIGKGTEFKNGRHFAAWPGLVPRQHSSGDRQVLMSMTKKGDKHLRTLFIHGARAVVRVATNNNDGHMNQWVNQLKERRGFNKTTVAVANKNARIIWSVLRNDTGYQVV

SEQ ID NO: 58426 - protein, 413 aa, unidentified
MSVTDPAEPARPTGGVDWAKDDHAVAIVDHEGEQIGRFPVAHDAAGLRTLVRKLLAAGVAEVGIERPDGPVVDALRQAGLTVFVIPPGQLRNLRSRYGSAGNKDDRFDAYVLADVVRTDRRRLRPLLVDAPATTALRQTVRARRDLVAHRVAAANQLRAHLQICFPGTVGLFADIDSDISLRFLERFATADRAAWLSVKRWAAWLTSVGYCGRTQPETLHARLRDAPAGTTGPAGDTAAAVTAAFVAVLRSITAQIEALAARIAEQLDLHPDAPIFTSLPRSGCVRAARLLAEIGDARGRFPTADSLACLAGVAPSTRQSGKVEVVSFRWGADRQLRDALCDFAGDSRHANPWAADLYRRARARGHDHPHAVRVLARAWVDIIWACWTTHTPYDPDKHGALQRILNQDQPAAA

SEQ ID NO: 58427 - protein, 349 aa, unidentified
MERFCIGVDVSAKTLDVAFRVEKGRVGCQEFANDPIGRRALVRYFKKRGKRIRVVMESTGVYGLDLALTLNKAGIEVMVANPRATSNFARATLQRSKTDRLDAEMLLLFAERMPFLQWKAPSPKQLELRSISRRVQAMLQTVRAEKNRMHAAMQVDGTTIVRKSITISLKGIVKQIAELRIAAVKIIESDPLLARRNELLLTIKGVGQISAISILAELSVLPEDMTDRQWVAHAGLDPREFESGTSIRALPRISKRGNSYLRAVLYLPARVASRFEPNAAAFGQRLKSNGKKPLQIHVAVMRKLLHGINAMFRNDEPFDGRLLFPVVDAVGTSGIAPFAISEVSIALHS

SEQ ID NO: 58428 - protein, 377 aa, unidentified
MSKLLFVGLDVHAETIAVAVAEQGGEVRSLGTIPNRLESIRKMVHKLGPVKSLKACYEAGPTGYVLYWQLTQLGVECQVIAPSLVPTKAGDRVKTDRRDAEKLARCHRAGDLTAVWVPDAAQEALRDLVRAREAAKKDQLKARHRLGKFLLRHGRQRPDGVKAWTKKHREWIKSHIRFEEAALEATLADYVDEVDHVAARIVKLDKAIDDAIQQAPAEIRAVIEALQALRGVAQTTAASIVSELGSLSRFPTAPQLMGYSGLVASEHTTGNRVQRGGLTKTGNSHLRRVVVEAAWAYQHRPNVIGHLLRRQKDLAISDEVKDIAWKAQQRLHKRYKAMTARGKNKNQIVAALGRELLGFVWAIGVNTERQQQLGKAA

SEQ ID NO: 58429 - protein, 412 aa, unidentified
MDVYCGIDWAEDHHDISVVDRDGQLLARRRISDDAAGLAALLGLLAEHGDNPGDLIPVAIETPRGLLTACLRATGRKVYPINPMSVARYRDRHSVAGRKSDHGDSFVLAGVLRTDMHAHRPLPADTELAQAIAVLARAQQDAVWDRTTAHNKLRSCLREYFPGFLAAFADARGGITRPEARIILAAAPTPADAATLTLTQLRGLLKKAGRIRGLDTEATRLRDAFRVPQMRQLPLVEDAMGRQALALLGQLDAACAAADGLEQAATQSFNLHPDAGIITSFPGLGALTGARVLAEIGDDRSRFADAKGLKAYAGAAPITRASGKTKSVTHRRVKNNRLNAAGYSWAFSALTASPGARAHYDRRRDDGDRHAAAQRNLFGRLLGCLHHCLTTGQRYGETIAFPAIGKELPQAA

SEQ ID NO: 58430 - protein, 352 aa, unidentified
MDRFHVGVDVSAKKLDVAYRDKQRRMERQTFDNHSAGHAALVRYLEKRSAGKVIRVVLESTGVYGLDLAMALDGAGFEVMVANPRASANFAKATMQRSKTDRLDCAMLLEFAEQMTFRRWTAPGAVPLQIRTISRRVYALMAIIREEKNRMHAANQVEGTEVVKRSIRATIKALEKQVVELRAMALKLIRSDAVLTRRYELLLSAKGIGQISAIAILSELAILPSDMSDRQWVAHAGLDPREFQSGTSMRMPPRISKRGNKYLRSALYLPARVACHFEPGVAGYAAQLRHRGKKPLQIHVAVMRKLLHSIHAMFCSDQDFDGRRFYPKAGAAVGTSGIASSAISEVSIALFP

SEQ ID NO: 58431 - protein, 343 aa, unidentified
MQVVRIGLDLAKYVFAVHGVDARGKVVLRKTLRRDSVSCFFANLPPCLVGMEASNGAHYWARVLTDLGHQVRLISPQFVTPYVKSNKNDRNDAEAICEAVGRPSMRFVPPKSAEQLAVQAIHRIRRRLVSDRVKLVNQVRGLLAEHGIVIPRDITQFRRGLAQIIASCAGGLSELVRSLMRELQEELVELDRRIASYDRRIREIFRNSEPCQRLGKIEGIGPITATALIAAVGDRTCFKNGRQFAAWLGLVPKQRSSGGRARLFGISKRGDRYIRTLMIHGARAVLGRARGKQDPRSLWLGKVRQRRHPNVAAVALANKNARIVWAMLSGDTAYEPALSVKAA

SEQ ID NO: 58432 - protein, 389 aa, unidentified
MIYVGIDVAKDKHDCCILGSEADKLFPVFTIPNNKAGFDELYEKMFSVTDDKTKIKVGLEATGHYSLNLLGSLIDKGLPTCVINPLHTNLYRKGLSLRKTKTDKVDARSIAMMLMTNKTLKPYSDISYHNEELKSLTRYRFDKVQERAKLKSSVARLVNILFPELEKLVPSLHMASVYSLLSKLPGASYITECHLTHLKNLLETASKGHYGRDMAITLRNTARDYIGSVIPAKSMELKHTIHLIKVMTEEIDEIEDSIKSIMDTCNSPIMTIPGISYRMGAMILAEIGDFTRFNYADQILAFAGLSPSTYQSGQLDSSYSHMEKRGSRYLRYALFNAAKFVCKWDENFGAYLSKKIGEGKHYNVAIGHATKKLVRTIYRMELTGEAYRR

SEQ ID NO: 58433 - protein, 323 aa, unidentified
MAEVVTFEQIVHRGCGLDVHKQTVVGTIDGVGLKKETRTFGTTTRSLTELKEWLEQAGITHVAMESTGVYWKPVYNVLEPSGMTVWVVNARHVKYVPGHKTDKRDSKWLCKLLLAGLLKPSFIPSREQRELRDLTRYRRKLIEQIASEKNRVIRLLEDCNIKLSSVLSDTHGVVGTKLIDKLCKTGKVSMEDIEEVYHGKLKASKDVIYAACEGVVTGHHVFMLQRIKDNILSCEANMLKINSQIKTVLSPYQNVLELLKEVPGLDTKSIEDLVAEIGLDMSVFPDDKHIASWCGVAPGNNESAGKKKRTHHPRQQASKGSAH

SEQ ID NO: 58434 - protein, 349 aa, unidentified
MSEAYDGRQVVGMDLHRRRSVLVRMTADGRKLETVRITNSPAELRRAIARAGKRPRVVLEATYGWYWAADTLAAAGAEVHLAHPLGVKAFSYRRVKNDEKDAADLADWLRMGRLPEGWIAPAEIRELREITRYRIKLVRLRTSCKDQVHAVLAKLGIEVTCSDIFGVAGSAWLDELVLPQPYAGKVASLRTLAGELTAEITLLEAAIAGLLAHHDGYHAIRALPGIGPVLAAVLVAEIGDITRFATPARLCSWAGLTPRHRESDTKVRRGHITKQGSPLVRWALVEAIQHVPAGHPLRQRKEDILARRGDQAKNIAKIAMARQLLTWVFYAMRDGQVRALATATGRKAA

SEQ ID NO: 58435 - protein, 336 aa, unidentified
MLYVGLDVHRRRTQVAILDEGGHELLNRNVVNDREKLADVLVGCEPGTPVVFEAAYGWSWLDELLSDLDFERHLAHPAACKAIAHARLKNDRVDARTLAQLLRTDFLPEAWIAPRPVKEVRLLLRHRAGLVRQRTTAKTRIRAILADRGVLAPAELWSGPGRCWLAELDLPAVERSVVEDLCWVIDSIERPIGRVEEQIRARAKPDERVKALQTLPGVGLYTAMTLVAEIGDVARFPTARKLAAWSGLTPRVRNSDQTVRHGSISKAGSPFVRWVLTEAAQVAKTKPMFEPTYESIRQRRGKHVATIAIARRLLTQSFHILKEVETKKIAADRCSG

SEQ ID NO: 58436 - protein, 413 aa, unidentified
MEIVHKACVGLDVHKKTVVAAIIVPGERGELRKEVRTFGTMTSDLLALSDWLMDCEVSHIAMESTGEYWKPVFNILENNFEVLLVNAQHIKAVPGRKTDIKDSEWIAELLRHGLLRASFVPPLGQRELRDLTRARSTFVRTRATLVNRVHKVLEGANIKLGSVASDMMGVSGRAMLAAIVEGQSSPVEMAELARGRMRDKRDLLAKALEGRVQAHHRFVLSELLTQIDSLDETIERFNEQIETYCRPFEEAVTLLDTIPGVGRETAEVIVSEIGTDMSRFPSANHLASWAGVAPGNNESAGKRRSGKTRKGNQVLCAALNQAAHAAARTKDTYLSAQYRRLAARRGKKKAIVALEHTILVMAYHLIQRNEPYRELGGNYFDNRRPEATARRLVKRLEQLGFSVALQQLTPVPA

SEQ ID NO: 58437 - protein, 318 aa, unidentified
MAQKTRFVGLDVAKSKVDACIRSEGLRLSAPSTPEGRAGLVAWVRANRVGRAVMEASGGYERGWAEALRAAGVEVRIVDPKRVRHFAKAAGRLAKNDPIDADTIAWFAEAFPDREAQPHDPARDEIDRLVAARTALKDAEDRIKQQGEHRPPAVVAKALAAIAKTIRAELRKVEGAIAAKIKANPGFARRAEIIASVPGLAAQTAAGVIAWLPELGHVTNQAAAALIGAAPYDDDSGGRKGQRHIKGGRRKLRNLLYMPVMGAATRHNPMLKAHYQRLRARGKEAKVALIACMRKLIVILNTMLARDQTWNPPVRAAR

SEQ ID NO: 58438 - protein, 308 aa, unidentified
MTTIGIDASKTELMLGEQTKTCRLRNVPARLEPWALSLSKDTRVGVEATGRYHRPVLQALHDAGICSYLLNPMHVARYIKALKPKVKTDRTDAILIARYLEREHDLLVPFKMPSAQIQELKDLLSFRETLIEKRVALRQSMAEQTFRLSSQPKLDEGFKQALAELETRIKAIAAKQPLYKRLLAIDGVGPLGAAALTWLFESHDFVSSDQAVAFVGLDVSVRQSGIYVGKSKLTKRGPAFVRTFLHNGANSLRRVEELQPLFEHHAKKNLPPTAVNNVISRKLVRIAYAFSKKPEAYFERKNLLPQLT

SEQ ID NO: 58439 - protein, 331 aa, unidentified
MSNIIGIDVSKASLDCAYLRDPDQDKAKRKSCPNNVHGFAALVTWATARSGLPIQALAFIIEPTHVYHEQLVHFLFNAGATVYLVNPGRVRKFAEGIGILSKNDLVDSDLLVRYGLMARNLIAYQPVAQEVNDLRSLLNRLDALEHNLRSELNRQEKVGKTMVFHRLEQQSIARSVKRLRAEIITFKRAIRECVKATPSLQQSFNLLCTIPGVGAKTAWIMIVILASRPFMSAPEVASFLGLNPIEKRSGNSQYRRPRLSKSGSGHYRQKLYFPAMVATRKNPDIKALYERLLAAGKTKMCALGAAMRKLVHICYGVIKNQTPYQVQTIPS

SEQ ID NO: 58440 - protein, 350 aa, unidentified
MIIIGCDYHPGFQQIAFVDTETGELQERRLQHREEAEKFYRELAAQGMKVRVGMEASGHARWFERLLAELNFELWIGDATEIARKRERKQKTDRQDAQHILRLLLKDDFPRIWVASWENRDLRQLLWHRHRLVQARTRIMNQLQAVALNEGLRCKKRLWRESGREQLEAFRLAPWASQRRRDLLELLDRLDPTIAQLTQAIEQEVEKWPDAQRLRTHPGVGSLTALAFVLIIGRADRFQCGKQIASYLGLVPLEKSSGNQRRLGHITKQGNALLRFLLVEAAQVTVRSLPEWRSKYFHLTMRRGRKIAKVAMARKLAVQMYWMMRKAWDYEQLKKFGSHAGQPGHRYGVQ

SEQ ID NO: 58441 - protein, 341 aa, unidentified
MRYIGLDVHKDNITACVLTSTGKPKFEKDFIKDSESWNLSELMEYGDKDGFCVMMESGTYAYQPFRFFSDQGVETHVVHAQALKVITQSDKKTDKKDAYTIARMLRLWKRGEIDIQMAFMPTREQCELKDVCRYREEISKKIGDETRRIKSHMSRNCEHLPEAYDNFQTQRARNYVRFNFSSDITLMSRMAELERLFEERDSVKSEVESRLPDSKEVELLTTIPGVARQTAVQIMSMIVDIDRFDDSEKLCAYFGMVPRVRDSGGKEHHGRMTKNGDGMMRAIMERVTESHVRNCDSSITRYYKRKCSEMGTKKALITASRKMLSVIFAMLKSGSDFRLAA

SEQ ID NO: 58442 - protein, 411 aa, unidentified
MEVVHARCAGIDISKKDAKVCVRIAGTGRRKAAETVSTWGSMTRQILALREHLTDQGVTCAVMEATGDYWKPFYYLLEGMPGVEVMLVNARHVKNLPGRKTDVADATWLAQLGAHGLVRASFVPPEPIRQLRDLTRARTAITRERSREVQRLEKLLEDAGIKLSAVASDICGVSGRAMLEALIAGDRDPARMAGLARRRLRSKIPELTEALAGRFSSHHAFLARVHLDLIDQHTAAISQITGRIEEAMEPFRGFRTLICSIPGISTLTADVVVAETGADMTRFPTAGHLASWAGTTPGSNESAGKVKSSRTRPGNRYLQGALGAAMACARNPRTYLGAKYRRIATRRGPQKANVAVQHAMLTAIWHMGTAGTFYDDPGAGYFTQLNPERARTRAIRQLQAMGYHVTLEKAS

SEQ ID NO: 58443 - protein, 405 aa, unidentified
MSDIIALDVSKGHSYCVYYNDGNCVTEFDFKHNKIGFARLMATAKCANNPTFYFEATGIYSRPIERFCRDNKIPYALLNPLEVHLKSENLRRIKTDDKDAHKIAISAYENSYRLTEFHDSTYLELRELCRYYEKTEDFRKRLNVTLKSLLQQTFPEIEKLFSSRTSKLALNVVNLFPHPDLVSGFSRTKLKNILMNETDKKISKAKAQNYAEKLLLFAKNSYPAAQVDSILVDEVKDYSRALINLTIKKEDLKKKLIKLGEKIPDFEIISSMPGIGDLSAAMMLGEIGDFARFDTANQLNAYVGIDLIRYQSGQYLRKDHINKRGNPKARAILFLAVGNMIRQKAAAPNHIVDYYYKLKKQPVPKKHKVAVVACMNKTLKCLFSMIRNRTKYIYPYADSKSKEIN

SEQ ID NO: 58444 - protein, 440 aa, unidentified
MICAAVESCAGIDVGKKWLSVCVMTGPLNGEARVEMQRFGVTVAELERLRDWFVKQAVTHVVMESTGSYWKPVFNVLEDSVKVYLANPLEVKTRKGHKTDDKDGWWLAHLLRHAMIHPSFIPPRAIRELRDLTRRRTKLHGAGTAEKNRVQKTLEDANVKLGNVLSDVFGTSGQLMLEALLKGEAQPEQIAELARGVARKKIPGIVAALEGHRMSEHHRKMIRYSIAHMQFLEDQIAEIDREIAAKIQAAGLEKQWEMLQTVPGVQERSAANILAETGADMTQFRSQRNLSSWAGVCPGNNRSAGKNRSSRTTGGNPWLRGALTECAWAAAAKKDCFIREKFWRLTTKAGGKKNSALVAVAHTMVQLVYEVLRTGQPYQDRHAPPLSEQHKERLIRHHVRRLGKLGVRVHSHRPPSSTTSTPPKKRGRPRKTPLPSEPSK

SEQ ID NO: 58445 - protein, 382 aa, unidentified
MATTTRFTDPALPEPPALYLALELSNRSWKLAFSTGHGQKPRFRNVPARDLDALTREIALARTRFLLPDAVPVISCFEAGRDGFWIHRFLQSQPHHHNLVVDSASIEVNRRHRRLKTDRIDARKLVTMLIRYHNGESRVWSVVYVPSPEAEDARNLHRELLTLKADRTRVTNRIKGLLAAQGLCVASLGRGFLEHLDDLRLWDASPLYPQLRQRLEREWIHRCDLSQRVRLIEKLQLQTLRSCDDPALELVRQFMTLKGIGLQSAWLFTFEFFAWRNIQNRRQLAALAGFTPTPYQSGDDSLDQGISKAGNSSIRAMTIQIAWGWLLFQPESQLTLWYLRRFASQGLRMRKIGIVALARRLLIDLWRFSQTGSLPEGAITSS

SEQ ID NO: 58446 - protein, 450 aa, unidentified
MARVRKTKVQKIQPVINPHAAGADIGAREIYVAVAMELSATPVRQFGTFTEDLRQLVAWLVELKVRTVALEATSVYWIPLAELLEEAKIEVCLVNPRHVQNVSGRKSDVIDCQWLQYLHSVGLLRAAFRPSAEVRGVRALWRHRDALVRQSGWHVQHMHKALDQMNLQVHHVLADLMGVTGTAIVEAILQGERRAEVLAGFRDPRVKASAQTLVAALTGDYRAEHVFCLQQAYAAYQFILGQIAAVDRQIETQLQPLLKPAAAADPAPAVRSRVSTKHPPAYPAQHYLETLCGVDLTSIPGIHVLTAHTIYAELGGDVSAFASVKHFCSWLSLCPDNRTSAGRCLSTHTRPSANRVAHALRLAAQSCHHAKHALGDYYRRMRAKLGAAEGLVATAHKIARILYAVLTTRRPYDPALHAVALADSARRRLVKLHSSAKKLGFQLIPLKQPA

SEQ ID NO: 58447 - protein, 350 aa, unidentified
MIIGCDFHTRYQVIAMLNSETGELVTRRLQHENGEAGAFYASLPAPAQVGIEATGYTQWFERLMAELNYELWVGDAAQIRARAVRRQKTDSRDAEHLLELLSTQRFPRLWIPSPEQRDLRQLLKHRHKLVTMVTTLKNQLHFLAMSQGLCRKSKLWSERGREELESLSLGPWARRRRQELLALLDQLQPQIAELDVAVAQAAAADPAAVDLMTQKGVGPVTALAFVLTLGPVERFQNSRQVVSYLGLNPREHSSGGRQRLGGISKQGNPMMRWLLVEAAQTAVRFDPELRRKYQRLKFRRGGSVAKVALARRLAVRLYWRLRQRKAETQPVRMPGSSGSAVVLPRAGSRH

SEQ ID NO: 58448 - protein, 388 aa, unidentified
MTQAPGALPTPTVLDYERTLILAIELSNTSWVLAAQIPGLPGVKAKRSIKPTPEALMAAIEDYRTRAVKAGRNVERVVAIYEAGWSGFWLARWLAQYGIETHVIQPSSVPVDRRARRAKSDGIDAELLLRTLLAWLRGEPRVCSMVPIPAEADEDARRRVRERAELVAERVGLVNRIGAVLATLGVGEYNPLRRDRRQRLDELRTALGGSLPTHARAKIVRMLDRLELLLIQITELEKSRDAVLEDENPDKAASMIQQLAKLRGVGVQSATVLVREGFVREFANGKALGSYAGLTSTPYSSGGTEREQGIGKAGNVRLRTLMVELAWLWQRYQPDSAQVSWFRERVSGTGRRMRKVMVVALARKLLIALWRFATQGVVPEGAVMKPAT

SEQ ID NO: 58449 - protein, 465 aa, unidentified
MTTGKKLWRNRKERKEWARRLQSEDPGLEVVHPHAAGIDVGNSAHYVAVRPDRDPEPVRRFECFTADLHHLADWLKSCGVKTVVMQSTGVYWIPLYEVLEDRGFEVYLVNARHTKNLPERNGDVQESQWLLKLHTYGLLSNSFQPPAEIRVLRTYWRQRGEHVAGAAICILRMQKVLTQMNVQLANVISDISGLTGQTIIRAILNGERDPLKLAALSDWRVHASQEEIAKSLEGNWRPELLFVLQQEVDMYDTYQRRVTECDQQLQKHLSTFAGTLAVQAPPKGKAKTKKAAAKNAPRFDLSSELQRITGVDLTRIDGIDVMVSQTILSEVGLDMSRWKTEAHFSSWLGLCPDNRISGDKVLGRGTRRVVNRAATALRQAANTLLRSRSYLGAQFRRLRTKLGAPKAITAMAHRLARLVYRMLKYGQAYVDKGTEYYEHRFREQPIQLLTRKAAKFGLQITPIQA

SEQ ID NO: 58450 - protein, 354 aa, unidentified
MNNVKYLGLDVHLSTISVAVLDEQGKLVMESVLATHSAAILDFIHGLRGTLYVTFEEGTQSAWLYDLLVRQAHKVVVCNPRQNALLKAGNKSDAVDARKLAELLRAGLLSPVYHGETSTVTVKHLGRSYESLTQDSTRVMSRLKALYRGQAIPSAAKRPYGGQRQEWLGKLGGAGLQSRAQRLYQQLDALQALRREARQELIRECRKHGAAPLLRTIPFLGPIRAALLIGRVQTPHRFRSKRQFWAYCGLALETRSSADYRFVNGQLERTRKPVWIRGLNLNHNHDLKNLFKSAATTASARPGPFGTFYQHLLAKGMLPAMARLTLARKMAAITLSVWKKGERFDAQQLKPPAA

SEQ ID NO: 58451 - protein, 341 aa, unidentified
MKDSMFIGLDVHKGTISVAVADGERGGEVRDWGKLPNRPDRVRKLAEQLGSKGHQLYFCYEAGPCGYGLYRQLVELGHDCLVVAPSLIPVKAGNRVKTDRRDARMLAKLHRANELTAVWVPDVEHEAMRDLVRARATAVRVANQARQHLQSFLLRHGRQYPGKKSWTKAYRRWFSTNRFEHSAQQIVFQDYIHAVTDAEARVVRLEAQIAELLPDWSLAPVVQAIQAMRGVAFIVAVTVVAEVGDVRRFPTPRQLMAYLGLTPTEHSSGNTVRRGGITKVGSSLACRVLIEGAWSYRMQPRVGRKQVDRMEALPQAVRDIAWKGQLRMCQRYKPPIPQVTR

SEQ ID NO: 58452 - protein, 343 aa, unidentified
MAIVILGIDLGKNVCSLVGVDEDGAVVLRRRMRRQTVLTFAAKLPSCVVAMEACCGAHHLGRLLTAQGHTVKLMSPEYVRPYVKAQKNDDRDAAGIAEAASRPTMRFVDLKSQEQLDLQSLHRVRSRLVGVRRTLLNQLRAILLERGHIFPQGRRKFEAAIDTLVADPAYEISSRIRQLVIDIRSEWQALDSRIEALNGEFVAIARHDETARRLVTIPGVGVLNATALVAAVGDGAAFRRGRDLGAWLGLVPKQHTTGGKPKLLGISKRGNKYLRMLFIHGARAAMPSLSASQSPLGEWLRGLLARTHRNVAIVALANKLARIAWVTLRRKTSFDLRHLAVAG

SEQ ID NO: 58453 - protein, 348 aa, unidentified
MTLTTIGLDVAKLVFQVHGVDENSRAVLKRKLHRHEVVTFFEELPRCTVFLEACGASHYWARLLTALGHEVKLIAPEAVKPFAKKGKKNDAVDAAALCVAGSRPEIQFVPIKSVAQQAVLALHTARSLLVKQQTMLANAIRGLASEFGLVVPQGLHRLEELMVQVTAEASVPAEGRQALIVLHAQLQAAAERIVMLEEQIVVHARQNASARRLATIPGIGPITASLIAATVGDNITAFTSARHFAAWLGLVPRQHSTGGKPRLGRITKAGNTEIRRLLVLGATSMVRRAETWNSAAGIWLRGVLARRPVRLTTVALANKMARIAWALLTRNDVYRAQGRSKVAAGAAA

SEQ ID NO: 58454 - protein, 324 aa, unidentified
MSKCKEFFGIDISKDVFDVMDSSENHHQLKNDLSGFKEFGKMLNEYSHCVMEATGSYYQGLATWLYSQSIDVSVVNPLSVKRFIQMRLKTSKTDKLDALMIRLYGESEQPDLWNPPSKLIIEATELHKLIEILVRHRAALKNRLHALKAKGISRSPVVTSVRRQIRNLSNEIAELELKLEVVIKEYQPDLLTRLCSIPGIGKRTAIYLIVLTHGFEKFETSRQLISYFGLNPIIRESGSSIRGKSRISKTGNNHIRNLLFMCAFTACEHNKSCREIYQRITAKGKSKKLALIAVANKLLKQSLAIAKSGLYYDENYRSVNVNLG

SEQ ID NO: 58455 - protein, 408 aa, unidentified
MTVVGIDVSKGKSMVAAMKPGGELVAAPYEVRHSDIELSHLALDVLCMEPDTRVVMEATGRYHEPVAALLHSEGIFVSILNPLLIKQSGAGSLRKVKSDPKDALKIAKYGLDNWSTLREYTPMEAIRQQLKLCARQCDLYNKNIVMLTNNLISLSDKTFPGVNELFSSPEKADGHLKWVDFYRSFWHCDCINRMSPDAFEERYKKWCKRKGYHFSTDAADALYAASCGSYTTLPRDNNAKLLVTVAADQLIALRENQSKLETEMLNLCKQLPEYETVMAMYGVGKSTGPHLMAELGDVRRFPHRSSIVAFAGVDPGVVGSGKMQLFSVTTSKRGSPQLRKALFQVVSTYVKCKPENEAVYQFYAKKRDEGKPFFVCTTAAANKFLRIYYARVKECLNAAESATQVEEG

SEQ ID NO: 58456 - protein, 358 aa, unidentified
MKHYIGCDAHKKYSVFVGISEAGEIIPSQRVEHDRESYRSFLKGLPPASKIAVESVGNWYWLIDEMEKAGHIPTLVNAGKAKLMMGNINKTDKLDARGLAVLSLNGTLPAVWIPPGELRDQRELARMRIFLVHIRTGLKNRIHATFAKYAITFQEVSDLFGVRGRNLVENRLVELPPETRHSMKEQLKLLDQLQKQITEVEKRIWQIVKVTPEMQLLMSLPGVGPILAILIAFEIGDVARFGDGAHLASYCGAVPRVKSSGGKTYYGKTRPDVNHYLKCAFTEAGNAIVANQHRMTGRHVVALYQRISRTKGHAKAIGALRRHLAEAAYAVLKSRQPYHEPKAPRKCSVTKEVCARLA

SEQ ID NO: 58457 - protein, 353 aa, unidentified
MLADHADHVLGVDTHRDSHSVAILAADTAIVQGQITIAANERGYRRLLRYAKEHAPKRRAWAIEGTGSYGAGLATFLHDQGEIVLEADRPRRPARRDRAKSDELDAIRAAREALTREHLARPRQRGEREALRVLLATRDSAVRSKRAAISLLKGLLVSAPGSLREGLRSLSTKDQLARAARLRVSPTLNSEQRATIIALRASARRVLALEEEAIELQREIEPIVNGIAPELLAEMGVGPIVAAQIICAYSHNGRIRSEAAFAALAGTAPLPASSGQTVRHRLNRSGDRELNRALHTIVLCRMRDDARTRAYTARRQAEGRTTREIKRCLKRYTARHLYRLLNTTLPNPANSET

SEQ ID NO: 58458 - protein, 408 aa, unidentified
MEVIRARCAGLDVHKDSVVACVRVQEGGQVRRTVRTFGTVTRELLALGDWLEAEKCTHAAMEATGVYWKPVWHMLEGRVELILANAAHIRNVPGRKSDVNDATWIADLVAHGLIRSSFVPPKPIAELRDLTRTRKQLTREIVQHTQRIQRVLEEANVKLDSVISDILGASGRRILRAMIDGEQDPEVLASLGSARLHCSPQALIEALRGRVTAHHRFLLSQHLGVIENLERTIEQFDQEIARAIQPFREVVQRLTGIPGVATVGAQAMLSEIGLDMGQFPQVGHLISWTALCPRLDESAGRARSTRVRKGGTWLKPLLVQCAWAAVRSKDTYLRSQYLRLKARRGPKKAIVAVAASILTAAYHIVKYGVEYRDLGGAYFQKRDSERFALRLASRIRELGYEVNISRVA

SEQ ID NO: 58459 - protein, 430 aa, unidentified
MKSNTQNAKIEAITEKTLVLGIDVGSETHYARAFDYRGIEYSKKPFKFSNTEAGFVTFKEWILDLKERHEKDKVVPGMEPTGHYWFNLGKFLQDNEMKPVLVNPHHVKKSKELDDNNPTKNDRKDPKVIAGLVREGRYMIPYLPDGVYADLRTASNIRFQLQAELTRIQNRISRWFNIYFPEYKTVYGKPDAKSGMLILKAAPLPEDILTLGIDGVNQIWRDAKLRAVGKARAKTLIEAAEHSVGSKEGAVSARMEIRMLLEDYESRNTRLQEVMVLIEELVRKIPMAEKLLEIKGVGIRTVSGFLAEVGDISRFNNPKELQKLAGLALVENSLGKHKGETTISRRGRKRLRYLLFEVAMSLVAKNPEFRELHNYYTTRRLNPLKKMQSLMAIAAKLIRVFYVMLTKGVDYDPKKMVSDIKRPAVYLQAA

SEQ ID NO: 58460 - protein, 481 aa, unidentified
MKPDPKKASLQEAKGRKRRDKASKTQHQINTQTHPDAGGIDIGAAEIVAAVPPDRCADPVRTFAGFTSGLRELCDWLQECGVTTVAMESTGNYWVNCYDMLEQAGVRVFLVNAKHVKGVPGKKTDVCDAQWLQQLHAAGLLSGSFRPEQEVLQLRYLIRHRDGMVAESSRLMLRIQKVLTEMNLKLQHVFSDIDGQSGRDIIRAILDGQRDPEVLAALRDRRCKASKEEVVAALDGDYRPEYLFVLRDLQEQLDEMRKRMARIDEEVARQVALIGKAAQASRPASEETDDGAAGGGKDKTKRLGKNAVMMDYKAESERFFGVDLTRIVGVNSSVIITLMSEIGTRESLLESFKSSDGFCAWLAVCPNNRISGGRVLSCRTRKSNNRIAAALRLAAYGLQNAKCQMGQYCRRIKGRLGKAEGITATAHKLARIIYSMIRSGRVYDEKEAFKSNPGVERKREKNLKILAKQMGFELVPITQAA

SEQ ID NO: 58461 - protein, 370 aa, unidentified
MSHGTRIQFVGVDAHQESLSVAILEEGAAQAQRARKIANEPAAIRRCFRRLLERGPVRAVYEAGCTGFVLWRQLTELGVDCVVAAPSRIPVLPGEHRKTDRLDAERLALFLRGGQLTAVSPPTPATEALRTLVRTRDQARKDVVAAKHHITKFLLNRGNIYRGSKTLWCRKHRAWLRAVVMDDADDQQLLEFKLMSLATREAEQRELDERIVERAQRDDIRMAVRNLEAFRGVGTLTAVNVVAEVGDPRRFANKAAVAAYVGLVPSEHSSGNKVRRGGITRAGSRHLRRLLVESSQHYRSRAQESKALTARRMKATAITREHARLAEKRLTKRYYKLSMTKHTNVAKTAIARELVGHLWAAMHPDIGLAR

SEQ ID NO: 58462 - protein, 430 aa, unidentified
MKSNTQNAKIEAITEKTLVLGIDVGSETHYARAFDHRGIEYSKKPFKFSNTEAGFVIFKEWILDLKEKHEKDKVVPGMEPTGHYWFNLGKFLQDNEMKPVLVNPHHVKKSKELDDNNPTKNDRKDPKVIAGLVREGRYMIPYLPDGVYADLRTASNIRFQLQAELTRIQNRISRWFNIYFPEYKTVYGKPDAKSGMLILKQAPLPEDILTLGIDGVNQIWRDAKMRAVGKARAKTLIEAAEHSVGSKEGAISARMEIRMLLEDYESRNIRLQEIMTLIEELVNQIPMAEKLLEIKGVGIKTVSGFLAEVGDISRFNNPKELQKLAGLALVENSSGKHKGRTTISRRGRKRLRYLLFEVAMSLVAKNPEFRELHTYYTTRRLNPLKKMQSLMAVAAKLIRVFYVMLTKGVDYDPKKMVGDIKRPAVYLQAA

SEQ ID NO: 58463 - protein, 343 aa, unidentified
MKYKTITIDLAKNVFQACGVNEYIKPQFNKKLKRNELIDFMRQQLPTTVVMEACYSSHYWGREIAKLGHDVKLIPAQHVTPFVRGNKNDHNDAFAIAEASQRAHIRFVSVKSEHQQEISCLHRIRERLVKNKTAMSNQARGLLSEFGVVFPCGHKALLNGSTGVIDNPQYSHRLQNMVIGMLSEYEMTLKRLKGIEKQLNEFVEQNESGKILRSIPGIGVINASALLASIDKGQAFNNPKEFAVWLGLTPKQHASGNMNKMGGITKRGDRYLRKQLIHGARALVSRAAKSTDPLSVWATKLRATKPFNVVAVAVAHRLARLIWILLTRQERYRVAPTSIEMSA

SEQ ID NO: 58464 - protein, 347 aa, unidentified
MRFYTNQHPFYCGIDLYARSMYVCILDQSGEVLVHRNMQTTPEAFLQAIAPYRQGIVVAVECMFTWYWLADLCADEGIPFVLGHALSMKAIHGGKAKNDKIDSQKIAALLRGGMLPQAYVYPAQMRATRDLLRRRMHLAHKRAELLAHVQNTNSQYNLPAIGKKIAYKTNREGVAERFADPAVQKSIEVDLALITYYDELLRDVELTIVKTARHHDANTLYLLQTVPGIGKILSLVLLYEIHELARFPRGQDFVSYCRLVKCAKESAGKRHGTSGSNIGNAHLKWAFSEAAVLFLSDHPAAQKYLTRLEKKHGKGKALTILAQKLARAVYYMLKSKVAFEKDTFFQQ

SEQ ID NO: 58465 - protein, 419 aa, unidentified
MSDDFLSTLFVGIDVSSKSNTVCALDFKGNKLLNLNVVNNRPGAESILVNILDCLEIHRLEFVIIALESTSFYSVHIANFLSSDNRLFPFHPFVYCLNPKTISNHRKSFVDMDKTDPLDAYVIADFARCGKISSSPWRGSQFLALKRLTRHRFHLVQLISREKVYMVSNVFLKFSELAVLNKKDLPFSNKYGATSKAILTDFFSPDDIVYSSVDDLVEFIKKKGKNRFSDPVSVANILKQAANNSYRLDEVLYEPLNIAISSSLNVVKALENEIKLVDKAIEKTIKGLNPNEYICLISIPGIGPVIAAGILAEIGSVSFFNSNNSLAKFAGLTWRQKQSGNYTSKITRLTKTGNCYLRYYLFEAANSVIRYIPEYKKYYWKKFKEPANYPHKRALVFTTRKLVRLIFGLLTKNQIYVNY

SEQ ID NO: 58466 - protein, 317 aa, unidentified
MLLYNNFIGLDIGKLNFVVAVNGEKETKEYNNSTRGIKEFIKDYKNIFGQSLCILENTGGYELELLYTLCGQKIAVHRADARKVKNFIRSYGNSAKTDKLDTKVLAKYGAERKDLLKLFTPLSKQALNLFELVRRRQDLKQILVAEKNRLQAPSAAIIKLSCKQIIKSITHQIEAITEKIKELIDSDPILKQKQEILKTIPGIGNIVAFELLILLPELGSIDRRKIASLSGLAPMSNDSGKHQGYRKTYYGRNGIKPVLFLAAMAARNSKSEFRNFYKNLIARGEIKMVAFAALMRKIIVIANARLRDFYAQIAIIK

SEQ ID NO: 58467 - protein, 347 aa, unidentified
MGYYVGCDAHKRYSKFVVLDDDVKLYKEARVEHSPGAIKGFLQTLPEPSPVAIEAMGNWYWIVDEIEASGSKPLLTHAAKAKLMMGQTNKTDKIDAKGLAVLLKAGTLPTVWIPPRELRDERELHRSRMTLAKMRTALKNRVHATLAKYAITVDEASDIFRGKGRRALGSGMVKLPTETRSCLEQSLEVLDDLQRQIEKIEGRIKQKVKMTQDMNLLKTLPGVGDILAIIIEREMGTVDRFPDNERFAGYCGTVPKVKSTGGRTSYGKLRPDVNRYLKWAFIEAANVVAMHQNTPSWQALHVVGLYKRIRSRKGHQKAIGAVARHLSEAAFWMLKKHEPYNESKAKA

SEQ ID NO: 58468 - protein, 392 aa, unidentified
MYIVGIDIGKNHHEASIVSPEGKQIGRSLRFATTHKGADSLMSFIFKNIGNSPCVFGMEATGHYWYPIYSFLKAKGYTICVINPIQSDSLRKMYIRQTKNDSIDSFFIAEVIRFGQFGTTSMADENILAMRQLCRYRDSVISSRTEIKLRIGTIMEQIFPEYEKQFSSLWVSTSMGILEKYLTPENIENAPIDELFEIIKDKSHNRLTKAKAISIKEAAADTFGIKIAQDAFSFQLKQLIDRMNFLDKQIEALDIEIMKYYEQFDCYLHTIPGIGIIGAATILAEIGDISRFKNSSALVAFAGIDPTVRQSGEFNSTHNHMSKRGSPYLRHAIFLAATTCSFHNSPLNAYYKKKRDQGKHHLTATGAVARKLTTVIYAVLRDSKPYEPKKFC

SEQ ID NO: 58469 - protein, 340 aa, unidentified
MEEISMYAVDTAKSVFQVHGEDAGRSVRVQKRLGRGQFLGFFSRQPPTVVVMEACGSSHHWARELIGLGHDVRLIPPQHVKPFLKRNKNDARDAEAIYEASLRPGIHFVPVKPVEQQCDRALHRGRDLLVRQRTQLGNAIRSMLSEIGIIAAQGAAGSAQIYAKIEAADAAIPPKLLSVLRPLLAQWRGLQAEVQHLESQICTAARTDPRARRLMKIDNVGPITAHAAIAAIGDGKQFRSARDFAAWVGLTPTHHASADRIRLGHISKAGDRSLRRLFVLGASSGLRQVRARPEKASPWLKGVLARRPIKVAVVAQAAKTARILWAVLTSGEEFRAPAKA

SEQ ID NO: 58470 - protein, 395 aa, unidentified
MAADKVWAGIDIGKENHWVTAVDETGKTLLSRKVANDENAIGSIVRDVSALATTTSWAVDLTNAYATLLLTVLASAGQRVRYLTGRSVWQASAIYRGGESKTDAKDARVIADQSRMRGDDLPVLEPNDDLIVALQLLTAHRSDLVSERTRALNRLEYQLMNVCPSLDRAAQPKADRGWVELLSRYQRPAAIRRCGVSRLTKVLVSAGVRNAEAIAERAVAAAQDQAVRLPGEEVAAALVAELARHVLHLDSRIKDIDDQIEERFRRHRLADVITSLPGMGFRLGAEFLAAIGNPGRLQSGDQLAAWAGLAPVSKDSGTQTGRLRSPQRYDRRLRRVFYMSTLTAIRCDPASREFYQRKRSEGKRAPGAIISLARRRVNVMYALLRDEREWTPTAA

SEQ ID NO: 58471 - protein, 359 aa, unidentified
MQTQNKTKVPDFSGQNIYVGIDTHFKTWMVSIYSDEFELKTFGQEPDVDRLENYLHKHYPNANLKLAYESGFCGFWIQRSFAKKGINCSVVHAADVPGSNKELIRKTDKVDSRKIAKGLKNNELNYIFIPDEQLESDRQLLRSRTTIVRDTTSVKNRIKAFLKFKGISIPDEYQSYKWSKKFIAWLQNIEHNSLSSKAAFGSHIDELVFLLQKQMQLNKSIETLAKSENYSYNVHLLTTVPAIGLLSAMTLLTELGDINRFQKQDHLYSYCGLTPDCHSSGDMERIGKVSRRGNIFIKTVLIECAWVAVRKDPALLLYYKQQIGRMDRNKVIIKVARKLLNRIRYVLKNKVAYQIGIVE

SEQ ID NO: 58472 - protein, 360 aa, unidentified
MSESMALVGLDVHQAQTVAAVLDPLTGELRVERLRGEPDRVVPVFLRELDRPVRAVYEAGPTGFTLARVANERGLDVRVVAPGSIPRAPGDRVKTDRRDAKRLARLFAAGELSFAFVPSETDERFRDLVRCVEDARKDLMRARHRLSKFLLRRGVRFPCRAWTQPHEQWLRSLSFDALSQATFIDYSSAVQGLTQRRRALICVLEEAVGKSSHAQAVSRLRCFRGIDTLTAAGLCAEVGDFRRFAKPPLLSGFLGVVPSEYTSDSKRVQGQITKAGPTHARRLLVEAAHHYRHRPALGIGLRRRQEGQDPRVVQIAWRAQLRLHERWVHLGQRRGKASGTVAIACARELAAFCWEAATLD

SEQ ID NO: 58473 - protein, 356 aa, unidentified
MELVKINSKYYCGVDLHDKNMYLCITNKEGEILLHQRIRNDFEEFKKITRKYLGEMAVGVESTHNYYWLYDACREEGIPFYLGHAYYLRAIRGKKKKDDKIDAETLSNLMRTNFFPVGYPYPQEKRATRDLLRRRCKLVQIRAGMYNHIHLIDSQQGKGGISLSELKNKGQRAMLVGRFDDEGISLAVESNLNIINHLDEQINRIEKWIKEKVEIDDKQSYQLLQSYPGIGEIIALTILYEIESIERFPTAQKFSSYCRVVKTQRESNRKRTDNKNQKIGNPHLKWAISQATIYAIKLSPEIKKYYNGLSSRKGKKKATAILRHRLTVAIYYTLKNKEPFNIEKFLMTSKDKEKAV

SEQ ID NO: 58474 - protein, 301 aa, unidentified
MKEASLGGTLRRVTEGASRKEAVFMLHAGLDLSRSRLDYCLLDRAGDRVEVGAAPPDRDGLRGLLARRIDEQHGPIVVRAAIESMNGARFVHDTLERCGWEVEVADAQKVKGLAPLACKTDRIDAWVLAELSRRDLVPAIWLPAFEQRQKRERARWRLFLVRKRSSLKHRVHAQLLAFGHSCPVSDLFGVKGRALLERLDFPEPWRGGVLAALELIDELERQIAESERELKRLGADHRYVPLLLTVPGIAWVLGYTIAAEIGDIGRFASPTKLSGYTGLCPRVYQSGSTDRRGPLTHAGPK

SEQ ID NO: 58475 - protein, 345 aa, unidentified
MKIVGCDLHTRYQQIAMLDDETGELIECRLEHANGEAKEFYTQLTGPVRVGIEATGHTRWFERLLAGLGHELWVGDAARIRASEVRKQKTDARDAALLLELLLSGRFPKLWRPSSEERDLRQLLWHRQKLVWMRNAIGNQLHALAMGEGLCRKQKLFTKKGRAELQALNLDPWASRRRQELLRMLDQTDASLKQFDEAVNEQAAQRAEAKLLMTHPGVGPVTSLAFVLMVGPVARFQRSKQLVSYLGLNPRENSSGGKQKLGSISKQGNPMLRGLLVEAGHTAARLDAELRQDYQRLRLRRGGSVAKVAIARKLAVQMYWMLRRQVNYTQLVRMQGSSRATLVQQ

SEQ ID NO: 58476 - protein, 358 aa, unidentified
MTKLYCGVDFHKRTSTYCIKDKEGKTLEVSRVDSDRLIAALETRKGLLIGVEASGGTNHLVELLKARGHEVKIINPTKFQAIGLGGKKTDERDAIALSEALRLSFIPEVYHKNLCARQRKSLIVGREMYVRSRVNMMNHVRGTLREYGFPMAVGKEAFLSEVDAALMEFPEPKLAFLLTDLVKRVREFMDQEKVIEAILIDIAKEDPMMKLLQTAPGIGIMTAFTFAAVIDDHTRFKNGKVLASYLGLVPRENSSGDKRRMGSITRSGSEILRRYFIHGARATLMHAKKAKVPPKDRNKIWAMKLEAKVGMNKATVALAHRMCRIAFAIVRDGKPYNEKLKHPLLRSEQENDSKKDVA

SEQ ID NO: 58477 - protein, 386 aa, unidentified
MQASTVSTPIIEHISTIFVAIELSQKTWLVTIHSPDKDKISRHKVEGGDHVSLLALIDRVRDRAARTLGVIPAVVSCYEAGYDGFWLHRLLMAAGITNYVFDPSSIAVDQRARSVKTDRVDGERMLRTLMAYLRGEPRVVRIVRVPTPEQEDARRGTRERDRLTKEQTAHTNRIKALLRLHGFAVGNPRRRDWLTWLAAQRDWQGQAVPPRILTEIEHEHARLMLVRKQLDALAQAPAAADPTPVAAEMTRRGELLFRLKSLGPAFSTTLTQEVFYKDFRNRREVGSYFGLAPSPWQSGGTDRDQGISKAGNPRARCAAVELSWLWLRHQPDSELSQWYRQRTLNASKRTKRIAIVALARKLIVALWRYLTTGLVPAGAVLKPAEA

SEQ ID NO: 58478 - protein, 369 aa, unidentified
MPHVTSIGLDVHARSVAAAAFNPFTGEVVHRDFGTDAAEIAEWALGFEEPRACYESGPTGFHMARELRALGLDCAVAAVSKMQRPAADARRKNDRRDAEFIARMLATHNIVEVPLPDAAVEAARDLDRALDDATAEYRRARQRLNMFLIRLGHVWDERNADGTRKGSWTRAHWRWISGIRLEGPQRDVLEYYVTAARCAESDRRQLEKKVLALARTDRWRPAVEALSCIKGIDTLTAFRLAAEAGSFTRFRTAPAFASWCGLVPSERSSGETERRGGITKTGNRLARTALVESAWHYLTCTPRPKAPAPGADVPAAIRARADDCTARLCRRREALAAAGKSSCKANAAVARELACWVWEIGRRAEGTLG

SEQ ID NO: 58479 - protein, 360 aa, unidentified
MNATTVAVDLAKSVFRIAVADSAWRVVEQHRLTRCQFERWFANRNVSLVVMEACGSAHHWARWLNGQGIEVRLLPAAYIRAYVRRNKTDAADACALLEAARCADIQPVKIKSVEQQALQGLHRTRSLWMARRTSRINALRGFCREFGIVLSTGSRVGIEQISRVLADPASAVPGLIRGTMKLLVEEIRLLEARISQLERELTEIARQSAACTLLMSIPGVGLLTATAMVAATSGHVEHFKDARHFASWFGLTPKEHSSGSTRKLGRISKQGDRYLRMLLTHGARAVLRSASMAKTAGRPLNVLRQWALDVQARTNHNKAACALANKLARICYATLRDCCGFEETVRLQRKLQRTAFEMPA

SEQ ID NO: 58480 - protein, 438 aa, unidentified
MINEIRPGYGAIDIGQEKIFIACSGTNEVRSFGTCSDDFELAVAYLREKEVVKVAMEATGVYWIPLHDLLQARGLEVTVFNGAHARNMPGRKSDVQDCQWHAMLHSHGLLVPCFIPGEDVRQLRCFYRLREDHLRAAGEHVQHLQRALDLMNVRLHVVISQIHGVSGLRVIRAILAGERNPERLAALCDVQILKHKQAQVIKSLRGHWQEHHLFALRQALAGYEFGLGQMKECDQQIQALLERINRDQPPQSPEAGRKIKLMRHNAPAIDNLHGQLITMTGGRDATKLPGISPLGFMKLLGETGADLSAWPTEKHFTSWAGLAPGSNQSGRRRKRVRRKKTAVGQIFREAVLSLAKSKHLALGAAYRKLRARKGAPIAVTAIARKLATFYYRLMTKGLDYVEEGIQRYEERYRKQTMRYLQKTAEAFGFSLTQNTQPT

SEQ ID NO: 58481 - protein, 425 aa, unidentified
MNYKQNEKINQVKESTLVVGIDIGSTTQYARAFDWRGIELGKVFTFSNSREGFEAFKAWMQHLQDKYRKSDVIVGIEPTGHYWFDLGAYLEDEGILLVMVNPYAVKQTKELDDNSQSKNDRKDPKVIAKLVTEGRYSAPYTPDGVYADLRIMVANRKRLIREMTQIKNRFARWFAIYFPEYTDVFGDYEAQSSMLLLKKVCTPEAIVELGAEKINQIWRDAKLRAVGMKRATTLCETAKRSIGLKKGSSAARYEMKLLLEDYEYKKAQLDAVMEEIEKLCRKIPESEQMLAIKGIGVITVAGFLAEVGDVRRFESPRQIQKLAGLSLRENSSGKHKGQTTISKRGRSNLRAVLFNAAIPLIATNPEFKSLHEYYTTRANNPLKKKQSVIAISCKLIRVFYAILAKGVTYDAQKLISDIHRQPQVA

SEQ ID NO: 58482 - protein, 342 aa, unidentified
MAAIGVDTHKATLAACAVDELGRPLDERTFPNDPDGHRAALGWADALDPAAVIGLEGSSMFGAGLARFLVAAGRVVREVPPQLSHRERRRTHRPGKTDPGDALAIARVTAREANLPPVRLADRTREIGLLVEARDDVVTEATRVRNRLHADLVVLLPGYQAKAANLVAVRYRRTIGRELCRVKGVQAELARGRLARLASLVAEADALEARIATMIAHHPLLALPGAGILSVAKVVAEVGDASRLRSADGFAMLAGVAPVPASSGQTSRMRLNRGGNRQLNRALHTIAIAQLWHHPPAKAFIARKRAEGKSWREALRALKRHLARVVFRILQAAAPEATVVAA

SEQ ID NO: 58483 - protein, 343 aa, unidentified
MKYVGLDLHKRNIFATVLDGDGNILSKANIGSKREDLSHYLKRQGSGNDLSVAMEASYNWLYYFRIIESLTDNITVAHPLKTRIIGEAKVKTDKIDSKVLAYMLRADMLPRVYIPAKISMENKLLLRSRISLVRVRTQIKNKIHAIIDRNKDSYSGLENLSDIFGKTGTGILKDTEIEQPDYMILINYLDLIKDINKKIAELEAEIDRRIITDKDIKLLKTIPGVGKFTAFILKSEIDDIDRFISKEKFASYAGLIPSVHQSGSKSYTGKITKQGNKFIRWALAEAAHSAIRYSEYFRYHYNKVRARRGANSAIVAVARRIAEIVYVMLKEKRGYIEKQVIYS

SEQ ID NO: 58484 - protein, 318 aa, unidentified
MLNESFVGIDVSKDWLDVGWEPAGQSERLAHDEVAMVGLCERLAQERPCLIVLEATGGLETHLASALAAAGLPVAVVNPRQVRDYARACGRLAKTDRIDALVLAAFARAIRPQVRAPRDDETLELGALLARRRQLIDMRVQEKLRLERASPVQRDSIKEHIAWLTERIARLDTDLTHRLRSSSLWRDQEDLLKAIPGVGTITRVTLIALLPELGKLNRREIAALVGLAPFNRDSGQHRGERVIWGGRAQVRRVLYMASVAAIRSNPVIRAFYQRLRAQGKPGKVALVACMRKLLTIMNAMLKHNTPWNPNALDLEHSC

SEQ ID NO: 58485 - protein, 315 aa, unidentified
METTTPTTEVTYVGLDIAKDRLDYTVDGIRCDHVPNTPSGHEKLLGVLAKLRGVRVICEATGGYERAVVAALLLAKHEVCVTNPGRVRAFAHAEGLLAKTDRLDALLLRRFGEKVQPRLHAPMDQAAITLRELLDYRRQVSEQLVAVRNRLELAGPVLRARLDGQVTFLEKELTATDQLIQDHIDHDDTLSRKAARLRELKGAGPVLAATMLAYLPELGEIESPQLSALVGVAPFARDSGRSHQARHVPGGRGLVRRVLYMAAVAATRHNHVLRAYYTRLVAAGKPKMVALVAVMRKMLHVLNRLLADPNFVLVQ

SEQ ID NO: 58486 - protein, 346 aa, unidentified
MKINRVGVDLAKNVFQLHGADCKGKAIWRRRLSRGKWLAVLCDSVEPGTEIGMEACAGAHHWARQLMQRGYPVKIIPPQFVKPFIKSNKNDANDAAAICEAMNRPDMYPVKVKTVEQQDLQAMHRIRDEIKSHRIAKANQIRGLVTEYGLVAPQELHALRRAIPDWLEDADNGLTFLFRQLLQGLWGDLYALDQRMAELDKQIAVVAQEDPTAKRLQQLRGVGPLIATALVATIGDGKQYRKGRDMAAALGLTPRQHSSGGKDRLLGISKRGDAYLRCLLVHGARSAMRTAKDKDDRLSHWIINLQARRHSNVVAVALANKMARMAWVIMTRDVDYDPDLAAASVS

SEQ ID NO: 58487 - protein, 362 aa, unidentified
MARLALHREDVIVGVDTHKDAHVAVALDGLGGWLGQQTVAASPDGYAALVAWATQLGAVSRFGVEGTGSYGSGLARFLRRHSHVVIEVSRPPRKGERRRSGKSDAIDAEHAAREVLAGTARAVPKLADGAIEAIRLLKIARDTAVKAHSQAMITLKATLVTASDALRAELEPLSAFRLIQACAALEADGPIADPAVAMRQVLRSLAQRWLVLHDEIKMHGAHLKTLTKAAAPELVAAFGIGPDIAAELLVTAGENTDRIRSEAALAKLCGVCPIPASSGKTSGRHRLNRGGNRQANAALDRAVVVRMRWHPATMAYVERRTTEGLSKKEIIRCLKRYVVREIYRLLPAPSSSTGFTSDGRTT

SEQ ID NO: 58488 - protein, 343 aa, unidentified
MEQVSTIGLDIAKSVFQVHGVDAAGEVIVSKQLRRRQVIPFFERLAACLIGMEACATSHHWARELGALGHEVRIMPAGYVKPYVKRNKNDAADAAAICEAVTRPTMRFVAVKSREQQSLLMLHRSRSLLVRQRTMLVNAIRAHLAELGIVAPVGLRGLKVLLAVICDPKDERLPSLARTCLESLAAALMTVEQEAASAEREILVWHRSNEASRRLESIPGIGPIIATALIASVADPSIFKSGREMAAWIGLVPKQNSTGGKQRLGRISKQGDHYLRWLLVAGAMAVIRHGRKTNFAARPWLADLVERKPPKVAAVALANRAARTAWVLMAKGGTYRQPGMATP

SEQ ID NO: 58489 - protein, 482 aa, unidentified
MKKKTIYTNQSQELLRLFEEAGNSSKIMCVPMDYAKKDHVVMFCNGYGHILRKPFSVKNSPVGVKYLTDQVSRSCSQRSINLKHVFFGGEDVNSYAENFVNTLRTKGLLVAGVNAHDAKKQRASIQASTDRLDLMGIASMLLNRRANCSPAQYGIYRNLRTLVRHRRKLVVMLTEVKNRVHGIVDRLFPGFLNEKNSGIVPFTQSSLYLMEDRFSPRQIRRRRRQKLIEILRRFGTSKAEETAFKLQQYAAQVLHIPVEYVDTLQLSLAQHVKHIRCLQEGIAQLKKEIAVNLAQTQGAFLTSLRGIGIVLAAGVSAEIGDPYEQRPLSNVVSYSGIIPRVKQSGGVDGKTYTGPVAKRCNRILKDYVVKSAHHLGLYGPQDLMADYKRRDVSGQHANFGIGRRYLRMALSLMRTSQVYLPPRLRKADVILQERAGYYLMSWPFLRDKWKKAGALEAAFAKDRPLGLWRQIIQELYDIKLKL

SEQ ID NO: 58490 - protein, 349 aa, unidentified
MFAGIDSHKDTLAVAVIDTAGRVVTVRQVANEPVGFSVLAALVAEHAVVRVGIEGSTNFGWAAAMHLVAAGAAVVEVPPLMTSRERQSRPGQGKTDPVDAVAVARITARETSLPPVRPMDGLPAELRVLMDYREQLIDERTALANRIHADLGWLRPGYQRKLPRLTQPAHLQAGLALLQNDRSIRASVTRRRLQRMVEINAELAGLRTQITELVQQSGTTLTGIYGIGVFVAARILAEVVDVRRYPTRHTFAAANGSAPIPASSGRTVRHRLNRGGNRQLNRALYTIAITEIRADTEGRAYYERKRAEGKTTREALRCLKRRLSDVVYRTLRADQAAAQPQPALLVSAA

SEQ ID NO: 58491 - protein, 368 aa, unidentified
MLYLAIDQHAKQITICVRNEDGDTVLRRQVSTRPEKIEAFFQQLTEMDDEFMAILEVCGFNDWMVETLREWKCREIVLIHPEKPPKKKTDRRDAQKLADLLWLNRQRLAAGQIVRGLRRVYMVNQQEREDRQLTSLRKNLGQRLIRTLNKIHRIVNRHNLIWQYPTKTFQTRAGRKWLANVELPIVDRFEMDVLLKEWEICDEQIARVDDEIAERASRPDADCPLGAAQILMTTPGVSHYSGLTLASRIGPIERFPRPRSLANYFGLTPGCRNSGNAQDRLGSITKQGSKTARFILGQLVVHLLKHDPTMRSWYRRIKLRRGSKIARVAVMRRITTVFWHMLTHQEAYSIGGPPPRWRQERQPGEVAA

SEQ ID NO: 58492 - protein, 361 aa, unidentified
MAAHNIIGVDPHRKTFTATVLDSRGGELGHAHFPNTREGHGSGLAWAAGFGPADRWGIEGASGLGRRLAEFLVEAGRDVRDVPPHKTSARQRGRHEGKSDRLDSRRVAAETQANARLARAFKHAVPAAPDSVRDRMALWHNARKSLTKVRVQLLGELDALVQDLPEELRDQLRPAKTVSARVNSLSRLDTSGVTDPTVGLRLRLIEHRVAMLRDVLEQDKAATAELAVLVDEANSTLTGLVGIAPRAAAEIIVEVGDIRRFTEAGFARFNGTAPIPASSGEGGDTPVRHRLSRGGNRRLNAAIYRVAMIQLRFEPRARRIHDQARAHGHTRREAMRILKRNISNAIYRTMLRDARRTAGLT

SEQ ID NO: 58493 - protein, 419 aa, unidentified
MSFKIFKFNCCGLDVHKTWIYACIGITDSNNRTEYKQARFSSFSKGLHQLCVWLAKYNCNDVCMESTGKYWIPVFNILEQHKIRVTLSHPKYTKPMKGNKTDRKDAKWIGDLYMCGMVKPSFIPPADIRELRDLVRYRFKLTCMITGEKNRAQNCLTVSNLKLDDVFSDVFGKSSRSITEQILQHPGEKFDVSPFVDSRCKTPIEEIQAAVDGNISKEQAVKLRQCLDHIDELQKHISEVEQEILRFSDKYEAALNLIRTVPGFDKNPMTAIQVLSEIGGDMSVFPTAKHLVSCAGCCSRNDKSDRKIKSTRISCAGSYFKPVLVQIANALIKSKKHFEFTTRYKRIKTRRGHKKAIIARCRMILTAIWHILTDLKPYTSDGFLESRPVKKEKVLTTSQALNLLRQRGYLIKDEPSPVS

SEQ ID NO: 58494 - protein, 338 aa, unidentified
MTLYAAIDLHSNNGVLSVIDEQDHVVFERRLPNSLEQVLQALAPFLAALEALAVESTYNWYWLVDGLMDAGVDVRLVNTAAIPQYAGLKHGNDHTDARHLAHLLRLGLLPEGYIYPREQRGVRDLLRRRFLLVRQSVTLICSLQSAWSRRTGHGIRTNDLRVLTADAVERTFVDAHERFAVQSELKLLQCLHAEIDQMERWVLKAIRCTPPLQALRSTPGIGVVLGSTIVLETGEITRFDSVGEYASYCRMVESTRLSNGKIKGRGNAKCGNRYLSWAWIEAANFAIRYSPEIRRWFDRKASKKPRPVAIKSVAHKLARAGYHLIKDGGHFDVKRAFG

SEQ ID NO: 58495 - protein, 345 aa, unidentified
MKNFFIGIDVSKEKLDATLIRYESQSDSEQQLAYTTVANNPKGFKSLVSWSKKNAGRGVKTDTMLFCCETTGGYDRALCDWLYGNGLDIWRESALQIKRSMGLRKGKDDKADSEMIAHYALRFRSQAALYEPMDENMRSLRNLFLYRQSLVAERQAKLVSAKEKQHISSKSKSDNFIYRDAQKAIDLLTKSIKECERRMLEIIKADEEMYRNYLHLISCKGVGLVTSVMLIVYTDNFKGWTAKKMASYCGIAPFYESSGSSVFHKANTSGYSNRRLKGILTQAARSAITHNPTLRQYYLRMKAQGKPYGVILNNVNNKLLHILFSLVLHDCDFELDHEAKRTLRA

SEQ ID NO: 58496 - protein, 369 aa, unidentified
MTQYYVGLDVHSRQSAFAIEDAEGRVIAQGEVPTTPAGFARLRGTYHLPPGTPVALETGTVAFFAARQLSTEGLTPVVVDAHEVRLKAHRPLQKSDRRDAFELCEGLRRGTYRAIVHVPPATVLRLRETLARRRHFVRLQSAQVGAVKALLRGAGVSRFSRSLGSEVGWAKVMAALGEHPALRAHVTQHGALWRCAGEQVAHLDRELAHQQQASFADAVRRLETIPGVGPVVAATAIAVFSDITRFPDAKHAASYAGIVPATYQSGDRDAHGRITKRGAAELRAMLCQAAHHASHPDHPFHPYFAQLCTRRGYKLAVIAVAHRLCRIMFAMLRDGRNFDVSQLAVEHGPFERKVVRLYRRKASPARGGR

SEQ ID NO: 58497 - protein, 332 aa, unidentified
MMAQNKLVVVGIDVAKDKVDACIRSLSQRQTFPSTAEGRRALIRWVRKHKVTKAAMEASGGYEREWAKALREAGIEALIVDPKRVRNFARSAGRLAKNDPIDAEIIARFAETFVEAKGQTYDAAREKLVDIVNARQALLDMQTGLQNRSEHSTPEVVQKMQARLLKNIALEVAKLEAAIAAMIKATPHFAELAGIIESVPGLAKGTAAGLIAAMPELGQASNNAAAALLGAAPYDNDSGKHRGDRHIQGGRRKVRNLFYMACLGAATRHNPVLKAFYTRLIAKGKPKKVALVACMRKLIVILNVMIARGEKWDASKYEQGEPARLPPSACAA

SEQ ID NO: 58498 - protein, 463 aa, unidentified
MAGSQKETRTAGVEAAVQGLPVLRPNVAGIDLASEIHWVCAPNMDGTGREVEKFGATTPELKRMAEWLKQRQVESVAMESTGVYWIAPYEVLERYQFEILLVDTRELARVPGRKKSDHVDCQWIQRLHSCGLLTGSFRPAEQVCRIRTLVRDRGNLVAAAADWLRRMQKSLDQMNVRVHRAVKDIEGATGMAIIRAIVKGERDARKLAELRDPHCQKSVEQIAEQLSGHWREDHLFSLQEALKMYDAVQSGIADYDQEILRQLAEMEREECRGQQAPKLKNVNKAQKIKSRGEETMRQALYRMSGVDATAIDAIGVGTVQVILSEYGPDLSRFATEKQFVQHATLAPHKPTSGGKVVRKKKRGSASTRVAAALRMAATSLEHSPTALGAYYRHTARRKGGSVAVFATARKLATLVYRLLRWGQPYIDEGAAAYEKRYQESRIKRLTATAKELGYQLMPKASQA

SEQ ID NO: 58499 - protein, 315 aa, unidentified
MTTKSETYVGIDVSKDRLDLAVLEEKRIEQHTNTGRGIKELVDEMKALKPALIVVEVTGGYERAVVNALFEAGLRVARVSGYRARQYARAKGLLAKTDPLDAMNLADYGKHVQPRVYEAKSEEGQCLAGKLARRRQLGEMVQAEKNRLRLAYGDIGVSIERVIEFLQGEMKQLDEEIRAYLDAHPEWLEQEQLLRSMKAVGPVTAAILLAELPELGKLDGKQIASLVGLAPINQDSGKRSRYRKTGKGRPSVRNVLYMAALTGLRYNPVIKKQYDGLVARGKVKKVALTACMRKLLTILNAMVRDQEPFRYASFS

SEQ ID NO: 58500 - protein, 354 aa, unidentified
MIIIGVDFHPEFQEIASVDTDTGEYQEKHLAHPEEAEQFYRALASVGQMVRVGMEASGHGRWFERLLEELRIELWRGDAEVIRAKRGRKQKTDREDARHIFKLLLKDDFPRIWVPSWENRDLRQLLWHRHRMVQARTRVMNQLQAVALNEGLRCKKKLWRTHGRQQLESFRLAPWASRRRRELLELLDRLNPTIAELSRAVDEEAEKCPEAKRLMTHPGVGALTALAFVLIIGNAERFRCGKQVASYLGLVPLEESSGNRRRLGHITKQGSSIVRFLLVEASQVTVRRLPDWRTKYVHLMMRRGRKTAKVAMARKLAVRLYWMWRKGWDYEQWKKFGSNVGQPGHRDGVQQNTE

SEQ ID NO: 58501 - protein, 363 aa, unidentified
MRRIGAERTDTKVEVILGVDTHLDFHVAVAVDHLGRRLGESSVPTTVKGYEGLLRWAKDFGPVSCAGVEGTSSYGAGLARHLRARSIEVLEVERPKHRQRSSRSNLEKSDPSDAERAARTVLAGEASGVPKSGDGRVEMIRALRAARRSAIKARTQAANQLQGLRVTAPEQLLNRLRGLSTKELVSVAARFRLGDGPTDVLTATKFALRSVARRYEALSREISELEAHLNRLVGQAAPEMVSLAGIGTDNAATLLIVAGDNPQRLGSEASFASLCGVSPIEASSGKVVRHRLNRGGNREANRALHMICLARMRRDPRTQEYVARRTAEGKSKREIIRCLKRYIAREAYRVLISCGARCSPTEP

SEQ ID NO: 58502 - protein, 411 aa, unidentified
MIKENYIYVGIDLHKETHTAVMIDCYNQKLGEITFPNRPADFPKLVAKVKKCNTDGKTIVFGLENAYGYGRALAVWLIDKGYLVKDVNTAISHRQAKHRGAMYRKSDSDDAKAIALATLNMLDKLPDACPNDAYWSLGQLVHRRDNIMKQRTRLVNQLHEQLCIAYPSYKQFFNDISRPTALYFWEHYPSRKYLKGKSVEDLRAELVPVSHNKCSTKTCEKILDAVASDKVKNNAYQDARDMVTLSIVSDLQHYDKQLAEVDKMLEQMYKMLGCTLTTIPGVNVITAVKILSEIGDIERFANANKLAQFAGIAPLHLSFSGKGKDVATKQGNRRLQATIYFLAIQMVQVSSKGTPRNPVVRAYYEKRKAEGKTSQQALICISRRLISIIYGMLKHGTEYRMPVVESAGENR

SEQ ID NO: 58503 - protein, 333 aa, unidentified
MEDKMCLGIDVSKKTLDCCLYDGNDYKHKIFNSNNASIVSKIIKNYKLTKACKVVMEATGVYHTSIFKSFYEKGFNVVVENPLKIKSYSKMKLCRVKTDKADAKLIAEYGYMQVTERTIPHEPYQDELAALLKLIDGYKCDVTRCKNRLEALNNYSINTSIHIASLNRQIISLNKEIQTLKVSIREIIASTCEEQYQLYLSVTGVGPVTASSIIANFGNFSRFEQSKQVANFIGICPSPFSSGTSVKSSGSISKKGNPLLRKTLYMAALTASRKNRACHDLYTRLVAKGKNKKLARIAAGHKLLRQLFAIAKSGEPYDPDYEIKMCENRKNVK

SEQ ID NO: 58504 - protein, 372 aa, unidentified
MKEETAGHPGIVGGVDTHKDLHMAAVVDEHDRVLGSECFATTRHGYRQMLIWMRSFGELLRVGVECTGTYGAGLLRYLQHAEVTVLEVTAPDRSDRRKRGKDDTLDAENAAHAAFAGIRTVTPRTRDGMIESLRVLKVCRKTAVAARRVALQLIHNTVVCAPDELRESLRTMTRMQLIRTLAAWRPDLSDYRNLTSAYRITLKSLGRRYLELHDEIADLDVMIAALVDELAPDLVSRNSIGYESAAQLLLTAGDNSDRLQSEAGFAALCGASPVPASSGKVTRHRLNRGGDRAANSALHIIAVGRLRTDPRTKAYVERRVSEGHSKLEAIRCLKRYIAREVYYVIRKHNRQIGQVQVPWKRPVPDDRQAFVI

SEQ ID NO: 58505 - protein, 348 aa, unidentified
MALTIVEDTRAVTGGVDTHADMHVAAALDPVGGLLGVGEFPATAAGYARLLGWLGGFGTVCLVGIEGTGSYGAGLARHVTAAGIRVVEVDRSDRQDRRRQGKSDPLDAVSAARAAQSGRARGAPKGRDGAVEAIRALMVAKRSARSERTQTINQARALIVTGPDDLRARFARHTAAGLVSELAALRPRPGATVGYATRIALRELGRRAEFLDGQLGRLDELIVPLVTARAPALLALHGVGPDTAALLLIAAGDHPHRLRSEAAWAHLCAVAPIPASSGKRTRHRLNPGGNREANHALWRIVITRMSSHAPTRAYVERRTKEGLSKKEIIRCLKRYAARQVYRHLRPAG

SEQ ID NO: 58506 - protein, 351 aa, unidentified
MVVVGADVHKRKHTFVAVDEVGRKLGEKTVNATTEGHGSAIMWAREQFGTELIWGIEDCRNMSARLERDLLGAGQQVVRVPTKLMAQVRKSGRTRGKSDPIDADAVARAVLREPGLPVASHDEVSRELKLLTDRRDVLVVQRTSAINRLRWYVHELDPERGPAPRSLKTAKHQQALQAWLKTMPGLVAELARAELADIIRLTTEINALQNRLSERVRAIAPTLLDIPGCGDLSAAKLVGEAAGVARFKSEAAFACHAGVAPIPVWSGNTQGQMRLSRSGNRQLNAAIHRIAVTQIRMLGSQGHAYYERLIASGKTKAAARRCIKRRISRRVFYALLTDHQTRNQALQPAAA

SEQ ID NO: 58507 - protein, 350 aa, unidentified
MIIIGADYHPSFQQIAFVDSETGELQEQRLEHPEAAEKFYRELAAQGMKVRVGMEASGHARWFERLLADLNFELWIGDAAEIARKRERKQKTDRQDAQHILRLLLKDDFPQIWVPSWENRDLRQLLWHRHRMVQARTRMMNQLQAVALNEGLRYKKRLWRDAGRKQLEAFRLAPWASRRRHDLLELLDRLNPMIAELSQAIEQEVEKCPEAQRLMTHPGVGPLTALAFVLIIERADRFQCGKQIASYLGLVPLEDSSGNRRRLGHITKQGNSLLRFLLVEAAQVTARSLPEWRSKYVHLTMRRGRKIAKVAMARKLAVRLYWMMRKEWNYEQVKKFGSHAGQPGHRYGVK

SEQ ID NO: 58508 - protein, 391 aa, unidentified
MIFVGIDVAKDKHDCFILNSEGTVLADVFTIANNRIGFETLLSRIQSCSQGESKIKVGLEATGHYSYNLLGFLLDSGLATYVINPLHTNLYRKSLSLRRTKTDRIDARTIAMMLMSDVDLKSYSNTAYHNEELKSLTRYRFDKVKERAKLKSSVARLVNILFPELEKLVSSLHIAVVYALLSNYPGASYIANANTEELAETLCTASKGRYTKSKTAEIQVAAGVSIGSKMPAKSMELKHTIALIREQDKEISEVESAIDKITSQMDSPIFTIPGIGRHMGAMILAEVGDFSNFASADKLLAYAGLSPSTYQSGQLQNCYAHMEKRGSRYLRYALFNAAKYVCLWCPTFSAYLEKKRSEGKHYNVAISHAAKKLVRLIFAMQRSGKAFLADY

SEQ ID NO: 58509 - protein, 343 aa, unidentified
MKHYAGLDISLKETSICITDETGEIRRELKVVSHPEDLLRALQNPEWNLVRIGLEAGPLSQWLFSRLAEAGLPVVCIETRHTKAFLKAQVNKTDRNDARGIAQMMRVNLFRAVHVKTLTSQKHRALLTARKLLQEKAIAIESDIRGLLRNFGLKVGQVGKVKFETRVQELVDDFPELAELMEALLDARAKLREQFAILHKKLLAIVRDDDVCHRLMTVPGVGPVVALGFRATIDIPARFKTSKAVGAVLGLTPVQHQSGESSRVGKISKCGDALMRTLLYEGAQTMLTRSVKWSWLRAWGMKIAKNRGMKKAIVALARRMAVIMHRIWTDGTEFHWKRETAPA

SEQ ID NO: 58510 - protein, 355 aa, unidentified
MNSEKYIGLDVHQATISVAVLDSTGKLVMESILETKAATILEFFAGLRGTVSVTFEEGTWAAWLYDVLKPHVAKLVVCNPRKNALLKDGNKSDRIDAHKLAELLYLNKLSSVYHGETGVRMLRELARSYLTIVKDLTRVMCRLKAVYRSWAIPCAGRDVYYTRHRDEWLGKINEAGVRRRAERLFQQLDMLQYLRQQARRELLAESRKHAITVKLRQIPSLGPIRSALAVALIQTPHRFRTKRQLWAYSGLALETRTSAEYCYVQGGLRRSKKQISIRGLNKDHNHDLKGLFKGAATRASVLPGPFQDFYQRSLAKGIKPTMARLTLARKIAAITLTLWKKGENFDADKLKSQAA

SEQ ID NO: 58511 - protein, 351 aa, unidentified
MSQTLNAAIAVVGIDIGKNSFHIVGHDERGAIVLRQKWSRGQVEARLANVPPCLIGMEACVGAHHLSRKLKALGHDARLMPAKYVRPYSKGQKNDFRDAETIAEAVQRPTMKFVATKSADQLDLQAMHRVRERLVSQRTGIINQIRAFLLERGIAVRQGQRFLREELPRLLAAPPEVLSPRMVLIIEGLASDWRGLDTRIEDLSAEIEDLASRDAGCERLMSIPGIGPIISTAMVAAIGTGDGFSKGRDFAAWLGLVPRQISTGDRTILGKISKRGNRYLRVLFVQAAWVVLVKVKPDRWEGHGLKPWIDAAKKRLHRNVLAIALANKLARIAWSVLARGRAFEASKLQVA

SEQ ID NO: 58512 - protein, 458 aa, unidentified
MSRGQRRRTARPSPPPVLNPHAAGIDIGATEIYVAVPLDRDPRPIRRFGTFTQDLFAVATWLQQCGVTTVAMESTGVYWIPLYQILDTRGVEVCLVNARHVKNVPGRKTDVQDCQWLQYLHAVGLLRGSFRPPETVCAVRALLRHRDRLVRLAAVHTQHIQKALNQMNLQVHHVLSDITGVTGLAILDAILAGERDPDALARHRDRRVKASRETIAKALVGDYRAEHLFTLRQSLDSYRHYRRLIDACDAEVQALLTAFASAIDPALHPLPRATTSHRKPQGNAPRFDLRTELYRVLGLDLTQIPGLNTTTVYTLFAELGPDLAKFPTSKHFASWLGLCPDNRISGGKVLFVQTRHVKHRVAQALRLAAQGLSHSASLLGAYFRRMRAKLGAPKAITATAHKLARIVYHLLTTRQPYAETRLAAAEEAHRHRTESRLRAQARALGYTLVPVPPDGAVS

SEQ ID NO: 58513 - protein, 343 aa, unidentified
MKIMTGIDLHSNNAVCGLMDEEGRRVLQKRLPCDLDMIVKTLAPYKDRITQVAVESTYNWYWLVDGLEDHGYPVVLANPAKMNQYDGLKQTNDTTDVFFICELMRLGILPVSYLYNRQTRPVRDLLRRRMLLVQLRTSLILSFKSLHERTLGRRVPLREVKSMTVEKAQASFTHAADRLLSGEQLGLIGQLNESVAKLEEHVMSTTKDWTTFQRLQEMPGIGKILGLTIALETGEPTRFADAGHFASYARCVKSQRESNHKKKGENNRKCGNRYLAWAFVEAAHFAIRYDEQCRQFYDRKKNKTNVAVATKALACKLAKAAWHVMHDVPYDPERVFGEKRDTP

SEQ ID NO: 58514 - protein, 405 aa, unidentified
MDLLYARCAGLDVHPRSVSACVRVVADGRVSQEVRTFGTSTRELTEMAEWLESAGCTHVAMESTGVYWKPVWHVLEGRFELVLANAMYVKNIPGRKSDVKDAVWISDLLAHGLLRGSFVPPERIQELRDLTRTRKQLVREITRHTQRIQKSLEDANVKLTEVISDIIGTSGRSILRALIAGETDLDRLVDLTGGRLKASRPTLKDALQGKVTEHHRFMLKMHLDQLEHLEAAVRDVEARADQQPFRAATELLKTIPGVSGVTARVIVAEIGDDMSRFPTAGNLVSWAGLCPRLDESAGKRRSNRVRQGAPWLKPVLVQAARAAANKRDSYPRAQYMRLKARRGPNKAVLAVAASLLTAAYHMLKHGVQYRDLGPNHFERDKDVQAHRLLRRLKALGVEVTIKPAA

SEQ ID NO: 58515 - protein, 341 aa, unidentified
MSWGPTAFFVNPNSCKGQAPAHKEGTGKVTEKEQDVGIDIAKRWLDVAIFQTGERLHVDNDKEGWAKLIKWLKGHRVRAIGMEPSGGYERGVAKALRKAGLPVRNVNPHKLRHYARALGRLAKNDRIDALLIARYTAELPTRPVRCDPIGDQLADLVIARRQLSDDKVSLANQLEQVREPTVRRMFMQRLRRIELDIALLSKRLADLVASHPALAAKDRLVQSFCGAGPVLSHTLLALAPEIGEASRREIAALVGLAPYDFDTGTFRGRRCIWGGRNDVRRVVYMAALTASRSNSVLKAFHQRLLADGKKPKVALIAVARKILTILSAMIRRNEEWNPAHH

SEQ ID NO: 58516 - protein, 412 aa, unidentified
MHIRQNYLYVGVDLHKEHHTAVIINCWQEKLGEIQFENKPSTFSEFLLEVETYVSNGLSVVFGLEDVGGYGRALAKYLVDHEQVVKEVNPALSFLERKSQVMIQKNDSWDAECVARILVNKFNQLPDAKPNDLFWSIQQLVSRRNALVKEQSALKNQLHIQLNHHYPSYKKFFSELDGKTALAFWQQYPSPSCLEGTNIKRLTAFLLDVSNNTCSVKKASEILKLVKEDGHTMKEYQETRDFLVRSIVRDIEFKKTEMKYIERELKQLVKLLDYQLETMPGIELVTASALIAEIGDVRRFPNANKLARFAGIAPVYFGSGGKGKVHKSKQGNRALHALFYNLAVQQVQVAKGSKLPRNPVFHAYYQKKLKEGKTKGQALVCIMRRLVNIVYGMMKYKAAYELPVVEEKEVVQ

SEQ ID NO: 58517 - protein, 405 aa, unidentified
MGKVYVGIDWADDHHDVYVTNDTATALDSFKIAHSREGMEKLISRVAKCCTTDRESVLVAVESHQGLLIYALLEAGYLVYPINPKAMDRYRDRYRMSSSKSDPKDAMVLANILRTDLHLYKLLPRETVDDARLRQLTRAHKSLVQQRVKLLNQLTSQFKSYYPVALRLFSRLDHKITLAFLERFPTPEKATAASLEELRGFFREQSYSHQGRVNSIYESLQQPSLRAPIELEEIHQAIVLSLVAVLRSLVVEIEKLAGKINEEFKHNQAYEVFSSLPTGELTAARINGELGSDGARYPSREYLQTAAGTAPVTRRSGKTLVVFFRWQCNKHLRAALQDLARDSVKRCPWAREYFAGQMKLGHKPSRAYRALANRWAAIIWKMLQTGQRFDQSRLDKHLDKALSTQ

SEQ ID NO: 58518 - protein, 415 aa, unidentified
MPDAFRVFAGVDWAQEVHVVCVTDATGRIIEERQVPHEGQALAEMADWLVALASGQADEVAVAIEVPHGAIVDTLLDRGCHVFAVNPKQLDRFRDRLFPAGAKDDSRDAFVLGDALRTDSRAFRRLAVGDPLMLQLREASRQDAELQEDFQRVVNRLHDLLVRVWPELLSLAPSVNEPWLWTLLRFAPTPSAGAALPVGRVRRILREHHIRRVTAEEVAAVLRAPSVHLAAGVREGTAPRIASLLEQLWLLHGQRHAMERRQRELLQALNDEAPAEKGREHQDVAILQSLPGIGVRIAATMLAEAAHALQARDYHGLRTLGGIAPITKKSGKSRQVQMRYACQRRVRTALYWWGMGAIRCDPLSHVHYQRLRAKGQTHGRALRGVIDRLLSVLVAMLKNDSLYDASRRHPAATAA

SEQ ID NO: 58519 - protein, 390 aa, unidentified
MIYVGIDVAKNKHDCFITNSDGDILSGYFIIENNRKGFEHLYNMICSVTETLDNVKIGLEATGHYSRNIHAFLVEKGLATYLLNPLMTNLYRKGLSLRKMKTDKVEARTIAKMLISSIDLESYLYSSYHNDELKSLTRYRYTKVQERAKLKVSIARLVVILFPELEGFFSDLHLTSVYALLDEFPSATMIANAHLTKLSNLLSSSSNGAFDKNTAIEIRNAARVSIGSVSPMASLELRQTIRLIREYDAVINDIEASIKHSMHVLNPPILSIKGMGFRMGSIILAEIGDFNRFASSAQVLAFAGLAPSTYQSGQLESSHSKMEKRGSKYLRWAIIQATKYVCRWEPIFADYLAKKLAEGKHYNVAISHAAKKLVRVMYKLQTSNQTYSVI

SEQ ID NO: 58520 - protein, 350 aa, unidentified
MLIGVDYHPSFQTIAFLMEETGEYGEQELNHSDGEAEKFYRELKQRGISVRVGMEATGYSRWFERLLAELGFEVWIGDAAEIKTKRVRKKKTDREDARLLLKLLLENRFPRVWVPSPENRDLRQLLWHRHRLVQMRTRIMNQLQAVAMNEGYRWKKKLFSARGRAKLEKLSLAPWASRRRKELLELLDQLDPKTAELTAAVEQEAKKRPDVVQLMTHPGVGPITGLAYVLIIGTPERFPCGKQIGSYVGLIPCEDSSAGRQRLGHISKQGNTLLRFLLVEAAQAAARCNPDWRRRYQHLMMRREKRIAKVAMARKLAVRLYWMWRNGWDYSQLVEFGSHAGKLGTGHGAK

SEQ ID NO: 58521 - protein, 369 aa, unidentified
MKKTNEEKWSNGSKQASVTDNGKRVLRLGLDVHYRQVTVAIQEDGGRIKAAGRMKHPVFVDWIQKKLDQGWEICSCYEAGASGYWLHRRLEQMGVQNLVVVPKAMGQGGKKQKTDKRDAGELCDSLDRYLRGHDKALSVVRVPTQDQEQKRALIRYHRQIMADRGRCEARGKGLLCAQGIEVQGRWWEGHGWLEVQSDPQLKDWMKEQLIGWRNKILSLDEEQSGLRARVAALAPALLPKGVGAYSAAVLYYEMRGFERFKNRRQVGSMTGLCPGVHLSDGRGKEGSINRCGIGIVRWTLVEMAWRLMIWQPQYPPVRRLAAGFVKGKRAKKRLIVQAARRLAIDLWRLSTGQTTPEKLGLIMHCVSEK

SEQ ID NO: 58522 - protein, 453 aa, unidentified
MAQRNRSIPLKPGKSRSALTITHPNAAGIDIGSASHFVAVPPDRDDEPVRECPSFTVDLHALADWFDACGVDTVAMESTGVYWIPLFELLESRGFTVLLVNARHVKNVSGRKSDVLDCQWLQQLLTYGLLSGAFRPTDAVCVLRSLWRQRGMLLRSQGRHVQHMQKALTQMNIQLTNVIADVVGETGQKILRAIVAGERDGHVLAKMKNTRIHASTDEIAKSLHGNWRAEHLFALKQALGMFDFIGTQLTECDREIEAQLQCLHVHDGEPAKGKKRGRARNAPKFDLRTQLFKMCGVDLTRIDGIDVTTALAVISETGTDMSRFPTVGHFASWLGLCPGTKITGGKVMSGKTKRVANRAAQALRLAAAALRSSKSALGAYFRRMCSRMDKPKAVTAAAHKLARLIYTMLTKGEEYTDQGQEYFEERYRERVMHHLAKRAEMMGMKLVPSEQPA

SEQ ID NO: 58523 - protein, 327 aa, unidentified
MNNATNFYIGLDVHSRCTQYAVRTWQGEVITEGKTSSIYKDVKAVLEPYFHSCIVGMEASTSIYPLHDGFSNDNVPVKVANVIRIRELIVKNDKLDARRLSDMLRLNTFPESFIPDKKLKQLRDIICVRHSFLQGLNAAQSRIWALLQMKGIKIPVRRMFSKKGLEHIKLVSESSPDLKYLYQHYKNIEQSLEQSTNEMIEYASRNFPSEWEKLHSLDGIADIISSYAIAYIHPISRFSSEKKLRRYVGVIPATQESGGKFIGCMLPKHSSRALLRWAFTQAAHCAIRKKDSKLRAYYNARKKNKKQKAIMAVAREICDMAYYKLKE

SEQ ID NO: 58524 - protein, 400 aa, unidentified
MNIIGIDVSQGESHATLITKEAEEIAFKFKHNKSGFQILNSYIKPGTIIIFETTGVYSAQLTTYLKNKKVKFYELNPLEAKLRMASLRRNKTDKNDSFKLALLGKTQLAEIKNHCNKQSNSLYESLQILSLRYKQLIKCRTRILNFLRSSLELTFPELNQIFKNAYAVLALQVFRMYCHPDFLVGLTLKEMTTRVYQSVSRRIHKDVIQSYCAQVWLAAKDSYPAVPANSLEIEIISEYCDEIESYNKEIAYIQNKLIKTAVGLDDFKVISSIPGAGQLNSALLLGFTGDIARFDNYKQLNAFLGLDLNRYQSGKYIKGDTINRRGSSQGRAVETDMIRSMLRNQGKIQNHLIDYYYKLKKPPFNKHDKVALIACANHLNRTIINLVHTHQLYNYSKAIN

SEQ ID NO: 58525 - protein, 393 aa, unidentified
MLYLLVLMLQVVDYMTMSAPTTRVDLVDVKPNQGSGRKEPNMLIIGCDYHPSMQQIAFVDTETGERGERRLMHRDGEAERFYRELKQRRVEVRVGMEATGYARWFERLLAELSFELWIGDPARIRARRVRKQKTDRQDAQLLLRLLLEEDGFPRIWVPSPENRDLRQLLWHRHRLVQMRTRIMNQLQAVAMNEGLRRKRALWSEAGRKQLESFLLAPWATRRRKDLLELMDRLNPTIRELTGAVEKEAENKPEVQLLMSHPGVGPLTALAFVLIIGTPQRFHCGKQMGSYLGLIPCEDSSADRQRLGHISKQGSSLLRFLLVEAAQVAARVDAEWRRRFLHLAMRRGRKIAKVAMARRVAVGLYWMWRKEWDYQQVVKFGSHVGQLELRHGVQ

SEQ ID NO: 58526 - protein, 337 aa, unidentified
MEQYVGLDVSQETTSISVRQDGRRVWRGKCPTDPKALSEVIRKHAPHAVRVVFETGALATWLYHVLQAENLPVVCIDARHAKAALDMAPNKTDANDADGLAQIAEIGFYREVRVKGYGPMLTRTLVGARSQLLRISVQLSNQIRGIMKTFGLIVPKGAGRIFERNARALLETNEAVARVVLPLLETWQVVRARAAELDRQLIAAARTGSSYRLLMTIPGVGAITAVSFVAAIGVPENFKRSRAVGAWLGLTTRRYQSGETDYDGHISRRGDRYLRALVYEAAVAVLTRTRTDCALRSWGLKLTAKVGFKRAAIAVARKLSVIMHTMLKTGAAFAAAA

SEQ ID NO: 58527 - protein, 340 aa, unidentified
MTIVMGLDQHRAQITAEWLDSATGEVSRARLAPAHREGVRRFLSRFSGQDLEVALEATTGWRFVVEELRRVGAGVHLAEPAQTSALRGNKKRPKNDRADARHLRELLMIGRLPESWIPPDHLLDLRSKVRLRHTLVDERGEWQQRIRAVLYHHGLPHRRELHLLSGEGRAWLQDVELADAAREQITVAIAMSESLDMQIAPLDRQLRLYARRQAGCKALQAHYGIGELTSVAILAELGDCRRFSSSRQAVRYAGMDITVYESDQRRSPGHLSRQGPPVLRWALYEAAQVARRAGSPDRGYYDQAAERLGSNRACLAVARKLLMRAYHTLRELGEEALQPA

SEQ ID NO: 58528 - protein, 376 aa, unidentified
MLSARPAGATTRPHRFERMAITTMAHPTPPRVTVGVDTHKDTHVAAARDQLGRRLGTTQVPTSSAGYAQLLSWAHALGEVVAWGVEGTGSYGAGLARFLAAQGQRVVEVNRPDRQARRRRGKSDAVDADAAARAVQAGEATGVPKAQDGVVEMLRALRAARQTAVKARTQAINALKGLLVTAPAELREQLGGLPTGRLVGAAAELEVGTLTTPTAATKLALRGLAQRYQHLDAEIALLTEQLDALTARHAPKLRDLHGVGPDGAAALLIAAGDNPRRLHSEAAFAALCGTSPVEASSGKTRRHRLNRGGDRQANAALHRVVVVRLRWHQPTRDYATRRTTQGKTSKEILRCLKRYVAREVFAVLRQIDDPGLAAAA

SEQ ID NO: 58529 - protein, 345 aa, unidentified
MDQVSRIGMDTSKHVFQLHGVNAAEEVVLRRKLRRKEMVTFFEKLAPTVIAIEACGASHHWARLLHSFGHTVKLIPPQLVKPYVKRGKNDAADAEALCEAMSRPTMRFVPVKTAEQQAALMLVGVRDQMIRHRTQLANAIRGYAAEFGLTAAKGMAHLAPLLERIQTDESLPASARELFAIQAKEYEQLQAQIAEIDAQLMARHRADECSRRLAKIPGVGPVGATLLRMKIPTPELFRSGRQFAAWIGLTPRDHSTAGKVRLGVITRAGDEGLRSVLVVGATAVIQQARRHGRASPWLAGLLKRKSPKLAAVALANKMARIAWKLMLTGKAYTATPAPAAAAGAA

SEQ ID NO: 58530 - protein, 341 aa, unidentified
MYRTKVGVDLAKNIIQVCTLHGKKVTSNVEMSTDEFSLWLAQSKPVTVAFEACSTSNYWYQQAIKAGHDARLISAKLVKAVRQNQKTDKNDALAIAQTLFLPEVSFINGKSIEQQQLQSIQRLRELAIKSQNASQKQIVSLLLELNIRLPNTQGGILRGLKGVLEDGENNLSDTFRATLSVAKVQLENMISAIREYDKYLEQSIQSLPDCKKLLKLEGVGPVNAVNLYIALGANQSQPFKSGKNASACIGLTPIQHSSGGKEVMGTIGKYCKNGSLRSQLITGAMSVVIKVIKYGAKTKKELWLQGLMQRRGNRCAAVALANKTVRTAYSMLQNNTEYYAA

SEQ ID NO: 58531 - protein, 314 aa, unidentified
MTLVGCDLHARDQQVAVLDTATGEIQERRLVHDGDSVEQFYTALPGPVTVGIESTGYALWFHALLHRLGHEVIVGDAAKIRAMVVRKTKTDRRDAAHLLDLLRHDRFPTVWLPDPAVRDQRTLLAHRMRLVRMRTMVKNGVHAIALNYRLALGPSLFTRAGLAQLQALSLPPHTSCRRSESLELLSWLNTRIKGLDDQIEEAAHAHPEAQRLMTHPGVGPLSALATVLVLGAVTRFPTSKHVVSYVGLAPAIESSAGKHRLGRITKQGNALLRYVLGQAGQAAIKRDPDLKRLYYAVLHRRGRSRAKIAVARKL

SEQ ID NO: 58532 - protein, 392 aa, unidentified
MYIVGIDIGKNHHEASIVSPEGKQIGRSLRFATTHKGADSLMSFIFKNIGNSPCVFGMEATGHYWYPIYSFLKAKGYTIYVINPIQSDSLRKMYIRQTKNDSIDSFLIAEVIRFGQFGTTSMADENILAMRQLCRYRDSVISSRTEIKLRIGTIMEQIFPEYEKQFSSLWVSTSMGILEKYLTPENIENTPIDELFEIIKDKSHNRLTKAKAISIKEAAADTFGIKIAQDAFSFQLKQLIDRMNFLDKQIEALDIEIMKYYEQFDCYLHTIPGIGIIGAATILAEIGDISRFKNSSALVAFAGIDPTVRQSGEFNSTHNHMSKRGSPYLRHAIFLAATTCSFHNSPLNAYYKKKRDQGKHHLTATGAVARKLTTVIYAVLRDSKPYEPKKFC

SEQ ID NO: 58533 - protein, 461 aa, unidentified
MRNNRKSGDRPGSTRPIAGLPIVRAKVAGIDIGSERHWVCAPGLEGSGREVAEFGATTPELVRMAEWLKERKVESVAMESTGVYWIAPHEVLEKDCEVLLVDTRQLARVPGRNKKTDPSDCEWIQRLHSCGLLNGSFRPQEQVCMLRTLVRDKANLVAESADWVRRMQKSLDQMNVRVHRAVSELSGVTGMAIVRAIAAGERDAQKLAQLRDRRCRQSEQEIAEQLSGHWREDHLFSLRQSLQMYDAIAERITAYEQEILRKLATMEIGEYPGGVVPPVKNLEKGKAIKKRGQEPKRQALYRMSGVDVTQIDAIGVETVEVVLSEYGPDLSRFPTEKQFVSHATLAPRVPKSGGKPLKHKKRNSASTRVAAALRMAALSLRHSATALGAYYRRLARRIGGDVAVFATARKLATLIYRLLRWGQPYVDEGAEAFEQRYRQQHIKGLALRAKELGYQLMPTTT

SEQ ID NO: 58534 - protein, 455 aa, unidentified
MMHGAHIGGQRAGAFLELVRGVDPKRVLLVGVDAAKATWFVVASNLLGEVVVDGVRLVADRAGLAELERVLGAARARTDAAVVVVGIEAAGHHHQTLTGHLLDRRDLVVRLLNPAQVAAVRKQQGNRRRKTDWLDAAAVCELLARGEGSPVQLDDSAASALRPLWSGRKDLVDTRSRLRQQAGALVDCLWPGCSAKDTAAGVTPVLCDLFATKAGRVLVGLLAEGWTPTRVAASSVAALRATFAARGCRLTGPLATRLIGRAASALPAHPVATAGKAATLAALLATIDTLDHQIAGVEGEMAPLLTRTQGAKLTQVRGVGVVAAAGFVAFVGRTERWADWSKVWRAAGLDPARSQSGPSDARLGISREGSAWGRRAILDLAAAICQQPGPWRERLRTRTSTQHKPTKVALAATANAIGRTLFALMATGANYDPDHQAKRAERRMAKQRKVGGRAA

SEQ ID NO: 58535 - protein, 449 aa, unidentified
MPNKRKKVVSLPIVEANAAGIDIGAMQIFVAVPADRDPEPIRCFQTFTVELEKLADWLEQCQIRTVAMESTGVYWIPLFQILEKRKFEVRLVNAHHVKNVPGRKTDVEDCQWIQHLHSVGLLRGSFRPDEEICALRSLWRHRDNLIQLATVHLQHMQKALDQMNVQIHHVISDLAGTTGLAIVDAILAGERDLHKLAELRDWRIRASKETIMKSLVGDYREEHLFALRQSLKSYRHYQDMIQEVDIQVKKMMQQLRSRTQTGEKPPKEKNPRKTPWRNEPPQLRDDLYRAFGVDLTQIPGINTLTAQMLLTEVGPDLSRFPTAAAFCSWLRLCPNPKISGGHVLSTKTQPTKNRAALALRMAAQGLHRSQSFLGDYFRRMKARMGTPKAMTAAAHKLARIVYHMITLRQEYDVTVFQDQERRTQDRKKTRLRAQAKELGFQLVPIESVP

SEQ ID NO: 58536 - protein, 355 aa, unidentified
MNGTKYVALDVHTATIAVAVLNLDGKLIMESVIEAKGTTVIQFIQGLRGELFLTLEEGTWSAWLYDLLQPYVTKIVVCDPRRNALLKEGSANDRIDARKLAELLRANLLRSVYHGENGLRTLKELVRAYLTLIQDLTRVMNRVKAIYRSWGIPCAGQSVYNLRHREEWLGKITQASVRRRAELFYEQLDALVLLRKQARQELLAESKKHQAWKLLRSIPALGPIRAAVLMAILQTPHRFRTKRMLWKYSGFGVVTQTSADQQYVNGQLQRSKKPVFVRGLDPAHNHRLKDLFKSAAIQASTTKGPFREFYEALVAKGMRPQMARLTLARKIATISWVVWRKGLAFDAKYLKPQTA

SEQ ID NO: 58537 - protein, 466 aa, unidentified
MKPFYMGIDVSKGYADFMIIDAQKKPVIQGFQLDDTFVGHQALYNIVGRFLSKHSDSMLFVGMESTGGYENNWYNSLVAFQGSLGIQTARLNPLGVKRNSQADLKKNTTDKISAQNIAEYLVAHPEKVTYQQQDQLVGLRKQWGFIQTLTKQRTQFLNQFKGLLYTSNPELLRYCQTETPAWILKLVVKYPSAAKLKRAKVKTVAKIPYLPKTKAQQVVADAKRSVASATDMATEQLVVATAQQIIHLNKTIDGQTRRMIEVCAVPEVELLKTFSGINDKSAIGLIIEIQTVERFENAKKLASFFGVHPVYKISGDGVGGIKMSKQGRKEPRHILYMVTLSALNCNPLIKKIYEKHQKNGKHNMAAMGICMHKILRIIYGMLKHNKPFDPRIDIANRRRGMQARKASPKRNPSRRFQAYDTKAPVSRRQKKKRLERDRSHSVPDTKSGITAPVPVGDTIANILPEL

SEQ ID NO: 58538 - protein, 417 aa, unidentified
MKSAPSVLPDDAPNGLTCGIDWARDDHAVAVVDARGREVHRCVVEHSAAGLRALLDMLRRRGVGEVAIERPDGPVVEALLEAGITVVVISPNQVKNLRGRYGSAGNKDDRFDSFVLAGTLRTDRARLRPLVPDQPATMALRRACRARKDLVSHRVGVANQLREHLKRVFPGAVGLFADLDSAISLAFLTRFDCQDRADWLSPKRMAAWLASTGYCGRVDPAVLHARLAAAPRGATGEHGTAEAHVTRALLAVLVTLTEQIKALAAQISEQLALHADQHVFTSLPRSGRVRAARLLAEIGDCRARFPTPESLACLAGVAPSTRQSGKVRAVGFRWACDKQLRDAVTDFAGDSRRASPWAARLYDDAIARGHDHPHAVRILARAWLYVIWHCWQDGVAYDPARHKALQRILAEQKPAAA

SEQ ID NO: 58539 - protein, 343 aa, unidentified
MYFIGLDVHKKTISYCVKDAAGRVHQEGKIGSSRRELDGWIRTMPQPRTIAMEATIFTGWIYDHLLPHAERLKVAHPLMLRAIAASKKKNDRIDAGKIADCVRCDFLPECHMASTEIRDRRRTLRYRNLVMKQMVQIKNRVSGLLMETGVSYNKQRLHKVGYFAELMTTNKEVHESIRPLLKLSRDMISRSQKLDYALVSSLQRDPVLKERLRRLRTVPGVGPITALTWALEIGDYTRFPSNRQAISYCGLCADEKSSAEKVMRMPISKQRNKHIQRVLIEAAKLAPSESPELALTHARELEKGNRNRATLAVARKMVCYMLAVERRQQDFVPAEEFRRTLAV

SEQ ID NO: 58540 - protein, 384 aa, unidentified
MDQTTSTLSANTLHCALELSKNSWLLAIQFRDREQPSLYPIEGGNTDKLMAKLAAARDCWAKVNGALPAITLCYEVGHDAFWLARFLKARGIECLVIDPGSLQVNRRARRVKTDRVDVKMLLRTLIAWCRGERHVWSLVRIPSVDEEDLRRSHRERSRLVRERTAHINRIKGLLFAQGVRGINIKSQYKTLAVDQLVTGDGHHLPPRLVCEVAREIQRLAMVQEQIAKIERERDTAPTPCEATERKRRLLLRLRSIGPAISALLSREVYYRQFANRRQVGSFLGLTPSPYSSGEEERCQGISRAGRGHVRAIMIEAAWLWIRHQPKSALTRWFLERTAGQSTRIRKTMIVAVARKLAIALWRYVEHGLVPQGAILNPSTTGNAR

SEQ ID NO: 58541 - protein, 346 aa, unidentified
MTYIGIDLHREFFVAHVENRDGEKLLSQKYPNSLESVGELTGRFPNSKVVVEATRNWMWFVRAVRAGGCNITMAHPFRTKAIAAAKIKTDAIDAATLCQLLRANLIPESYIASDSEVDDRELSRGRVNMVHDRTLLKNRIKAILGKENLTFPGSDLFGKKGRIWLNGQCLSQGKELMVENYLNLMGGVEERLKKVDGAIKQKGGNNPRANLLTTIPGIGVTTAFLLASEIGSIDRFANSKKFASYFGLTPRLSQSGNHAYYGRITKVGNPYVRWALVQTAQRWVRMHKNSRVWFDRLSYRAGKKKAIVALARKLAVVVYSVLKYKRPFSLNFEVQKVSPAILPESS

SEQ ID NO: 58542 - protein, 318 aa, unidentified
MNTNTKQSINVGVDTGKTQLDIYIRPIDHFFTVENNEKGIEKAIKVIQQYHPERVVIEATGRLEMPFVLACSEHSLPIVRANPIHVKRFAGAIGRRAKNDRLDAQLIAHYAEAIKPTILNIKPKKIRLMSDLVIRRNQLMGMQTMEKNRLQILPQSLHSTIKPLLTALKNQITKIEQKLEKLIEESPEYQSKNIILQSVPGVGPIAAASIISNVPELGYITNKQAASLIGVAPITKESGRYKGKRAIQGGRAQVRTVLYMAMMSAMQCNPVFKTTYERLLAAGKPKKVAIIACVRKMVVILNSMLRDGVMWDQNLVKN

SEQ ID NO: 58543 - protein, 328 aa, unidentified
MWSLLETRGDSASGELVNRQVKRASLLQLFANRERCLIGMEACGGAQHWARMLIGLGHDVRIMAGKAVKAFVNRNKSDFADAKAIWMAVQQPVKCVAVKTESQQAILALHRMRQQLIKFRTMQINGLRGLLAEYGEVMGVGRAGINRAIAPILAKLGDRLPAVFIESLQDQWGRIGKLDDEVAAIEQKLKAWMKEERACIVLAEIPGVGLLTATAAVATMSNPQAFKSGREFAAFLGLVPGHTGTGGKTKLLGISKRGDTYLRTLLIHGARSVMAHQKTPPSWLAELQLRRPHNVVAVALANKMARTMWALLAHDRPYKQDHISAVPA

SEQ ID NO: 58544 - protein, 345 aa, unidentified
MSKIIRIGMDTSKHIFVLHGVDAAERPVLCKRLSRKQVLEFFAKLPPTVIGMEACGASQHWARELGKLGHEVKLMAPQLVKPYVARNKNDWRDAEGLCEAMSRPSMRFVPVKTAEQQAALMLTGVRDGLIARRTQLGNTIRGHAAEFGLIAPKGVDKIEPLLARIAQDETLAALARELFAALGRDYARLKAELGEIEARLMAWHRCDALGRRLAQIPSVGPITATMLTMKTPDPRAFRSGRHFAAWLGLTPKDHSTAGKTRLGKITRAGDEDLRRLLVIGATSVIQQARRGRGHHSRWLLALIKRKPPKLAAVALANKVARIAWKLMTTGESYDAAHMSPIPAVA

SEQ ID NO: 58545 - protein, 384 aa, unidentified
MKKDSTVARVGKDLKFVGLDVHKDTIAVAVADSGIGESRMVGIIENDHDALRTLLKKLGEPAQLRVCYEAGPCGYVVYRFLQRLKIDCMVVAPSLIPRKAGDRIKTDRRDALTLARLLRSGELTPTWVPDHEHEALRDLVRAREDATEDHMRARHRLSKFLLRLGIMPPEGVRAWSLRHRQWLDQLTWEKAAQQLVFAEYRQSLAEIDQRITRLEREIAVQTQASAHAATIAALQAMRGVKLITAATIVSELGDISRFASPRELMAYAGMVPSEHSSGKRVRRGSITKTGNAHLRRVVVEAAWHYRHRPVVSGDLRQRQRDLPATACTIAWNAQQRLNKRYRHLLARGKTSHQTVVAVGRELLGFIWAIAISMKTVQHPIPTAA

SEQ ID NO: 58546 - protein, 435 aa, unidentified
MGELKKILANTAGIDIGSEKVFVALEGKVVKNFRTFTSSYKELCMYLKENGIEHVAMEATGIYWCTLYDILEQAGFDVCLVNPSDTKNFPGRKTDVQDCQWIQTLYSYGLLKKSFVPEDIVRKLRVFTRMREDKIQMGASHINHMQKALIQMNIRLPEVLSQTHGASGLKMIKAILDGEKNPKKLLNYCTTDLIKRKGNDILLALEGNYKSEYLFELQQAYDGYMFYLNQVKLCDVETEKILNEFHNKSNSNYTDGNKEKPIRHNKPEIKNLHNMLLGIHGANPTTLPGLTDYSLLRLTAELGNNIDQWPSVKSFVSWLGLAPGKNKSGKMDKRSKKRAVTRGGQIFKQAAQSLLASSKLGLGVFARKLKARRGAGIAIKATARKIAELYYNLNKHGLEYVESGIAFYEQKQKEQQLRYLTKKANELNLQLISYQ

SEQ ID NO: 58547 - protein, 427 aa, unidentified
MNDSPQWQQYQAFGALDWGSQTHSVIVIDAAGKVMEDFAIEHSALGWKQFRQKLQVYGSIPFAIETSQGAAVEQLLEAGMIVYPLNPNRAQAYRQRKAPSGVKDDRLDAWSFADALRVDGHGWKALQPEQPLTKELRLLCRDEVSLIEQRTALIQQLRQALAEYYPAALEAFEDGTSVSAWMFLQRFPTADSLAQAGRRQWQKFLHSRRLWGSDQGPRRMEIFAHATELAGSEPTVKAKSLLALSLVQMLFAVQKQLELYRQRIEELFARHPDHDLFGSLPGAGSKLAPRLLSEIGDDRQRFEADAQALQCFGGTAPVTIRSGKDRKYWPVHQRQACNKHLRHALHLFAEQSLSRCVWAHIYYQHHRQKNQSHANALRRLAHRWLKIIHKMWLDRSPYNAGAPSPQSTPTRFLDLSVPKILTTTFFH

SEQ ID NO: 58548 - protein, 347 aa, unidentified
MNDHRVYVIGIDLGKNWFHLVANDERGNELFRRKLNRGQLAEFAVTAPRCLIAMEACPGSQFWGRRFQQAGHELRIIPAQFVKPYLKSNKNDFNDAQAIAEAASRGSMRCVPLKTTDQIELQALHRVRQRFIVERTAVVNQMRALLLEHGIVIPVGRALFARRLPAVLADPQSGLSPRLSQLIARLRQRWLALDEEIDTASAEITQIARESELCRRVCTVPGVGPVVSTALIAAVGNAAAFKRARDMSAWLGLVPKQYSTGGKPNLGGISKRGNAYLRMMVIQGARALMIHMKRDQSRMGLWLREVEQRRHPHVALIALANKIVRICWKVLTSQQSYQPFVEVSAVT

SEQ ID NO: 58549 - protein, 413 aa, unidentified
MTNPYHLFVGIDLGSDFHQVCVVDQEGKILGQRKIEHAGGAIQQMLAWLAELAGGASPETVAVAVEAPRGAIIDALLEHKYAVFSINPKQMDRFRDRYSVAGAKDDPRDAYVGANSLRTDLSHFRRLCADHVQVVRLRELSRAHDALQEDWRRNANQLWSYLQRYFPAILKLSSAADELWVFDLLEQSQALSQCAAALSTEELAKLLRRNRIRRFSAEQLHHSLQDRLALAAGVEEALAEQVLLLLPRLRLLHQQRMEVDRRTESLLEEMAEEKFPEHRSVEILRSIPGLGRVFLATVLSEAGRPLLDRDYHGLRALAGAAPVTRRSGKTTIISMRRACSDRLRNAVLNSANTHVQKDPRAKLIYARLRGKGNTHARALRGVADRLLELICILLSSDQLYRIERRQAPKTDAA

SEQ ID NO: 58550 - protein, 429 aa, unidentified
MTCISAGVDVSKNRSTVCIMDQDGKFIMRPFLVWHSTEELDFLADTLKRLNGEVRVIMESTSVYQYPIALQIKERGLFISIVNAYEMRQFANIDFRGGKTGKKDSRTIASYGISYWDKLVEWQIPKDTYFNLDLLNRTYMNAKKHRQIILQELQHYIDCAMPGMDKELHSLNLSTKKDFMLDFVEKFWHRDEIVNMTEAEFTEVFTAWAKEKGYRPGKGKAAKIYAIAKSCIPYYPANPTVKTILQCIVDKLSGVNRTLVTIVTQMIEEAKKLPEYQIVREMPGVGDPLAARFFGSAGDIRRFKNSKALVAYAGIDSPPDESGDFSSTHRHITKKGSKVFRDTDYEIMMALRAQKRTWEKVRKNPEVYDYMLRKEAEGKPRKVAKIAALNKFLRIVYARIKELYDNMALAERAKTKTRSKTRAKTKVTA

SEQ ID NO: 58551 - protein, 350 aa, unidentified
MFMLAELIEVVIGVDTHKDTHTAAVVDARTGGVLTTRTVAADPDGYAELVALAGQHVGLRAWAMEGTGGYGAGLARHLAVGGELVVELDRPKRPARRAGAKSDPIDAERAARDALARGRLAQPKTGAERAALQMRLTARRAAVEAATAAQRQLLALVITGPEVVRARFRGQTTRAMISTAARLRPTATRGDIEVLTALTVLRDLARRIRLLEAEALGHEQAIRTIVRSWRPDLLELTGVGPIVAATVLTAWSHPGRCRDDAAFAMLAGAAPIPASSGKTVRYRLNRSGDRQLNRALHTVTLSRLQRDPRTRAYAERRRAEGKTDREIKRCLKRYIARELYRRLEAPPSAA

SEQ ID NO: 58552 - protein, 360 aa, unidentified
MKEYSGNSVGMTIGLDLGDKYGQYYTLDEAGVNIETGRVMLLPSALEKRFGKLERSRMVLESGTHSGWVSRLLESFGHEVVVANARKLRLISQNENKDDAVDAELLARLGRVDPRLLYPIRHRGPEVQSDLALLRARDALVKVRGQLINHMRGTVKCGGGRLPQCSTASFHRKAEVGIPAELKAALEPLLEMTEELSGQIRAYEREVERLCRERYRETELLQQVGGVGTLTSLCYVLTLEDPHRFAKSRAVGSFLGLRPGKDKSGEQDPELRITKAGNPQLRRLLVQSAQQMLGPFGADCDLRRWGLKLAGRGRKNAKKRAVAAVARKLAVLLHRLWVNGEVYDPLYQAQRHPVSQEVSA

SEQ ID NO: 58553 - protein, 416 aa, unidentified
MEHQQGWFAGIDWGSQDHQVHVSDAAGVKLGAHSFPHDGAGLAAMAEWILTVTGARPQEVGVAIETPHGPVVESLVERGFRLYAINPKQLDRFRDRFSPAGAKDDRRDAEVLASALRTDPQCLRRLDPLDPTVVELREWSRIADEIGRERVRLANRLREQLWRYYPQMIEVAEDLAADWVLELWKLAPTPARARRVREHTIAQFLKYHRIRRISAPELLARLRAPAITVAPGTTEAASAHIQTLIRRLTLINRERRAAHAKLDQLIERLAGPQGTEPGQQPEQRDVAILASSPGAGRITIATLLAEAWDALRRRDYHALRCLCGVAPVTKQSGKSKIVMRRLAVSRRLQNAAYHWALAALQRDPKSRAKYTSLRQRGHGHARALRSVADRLLAMLCAMLRTQTPYDPHRHAKPAAA

SEQ ID NO: 58554 - protein, 425 aa, unidentified
MNANSYTHQDFAAFVGIDWADQKHAFCLQAAGQSKTESGALEQKPETLAAWVTKLRERFGGRTVAVAIEQSRGALIHALLEYDFFVLFPIHPTTVARFREAFKFSGAKSDPLDTEQILAILTKHLDLLKPLNPDAEQTRLLARLVEDRRKTVELRTRHIQALQASLKEYFPQALAILSNNVTSRLACDFLKKWPDFPAFQQARPSTVKRFLSGHNVRSPQVIEAALQLAEKSSALTTDPAIVQSGARLSQMHAEAIQTFNRHIQEYDRRIDQLFHAHDDAKIFTGLPGAGAALAPRLLVAFGSDRLRYESAENVQRFSGVAPVTKTSGKMRAVYARVACPKFLRQTFHEFVRQSLPNCQWARNYVDYHTGRGKKYHTVIRALAFKWIRILFRCWKARTAYDDAKYMEALQKRGSIFATLHLSKPA

SEQ ID NO: 58555 - protein, 356 aa, unidentified
MNEGSCVGLDVHARSVVAGVIDVGSGEVRSQRGPPGSEATGAWLKTLPSPVRVVYEAGPTGYGLARACADAGISCVVAAPSKIRPAADRVKTDRRDAERLARLLRLGEITAVRVPGPDEEAARDLVRAREDARGDLMRARHRLSKLLLRHGAVYDATAWTRAHDAWLRKQRFQGGPLAIVFDECYSRMLDAKTRRDTLDKAITELAASEPYVDVVERLVCLRGVSTLTAFALTVELGDWNRFRPESLGPFLGLTPSENSSGERRRQGGITKTGNTHARRLLIEAAWHQRSAPRLSITLERRRTGKSLAVRAQADSSARRLHGRWNALEARGKPRLIVVVAVARELAGHCWALATME

SEQ ID NO: 58556 - protein, 410 aa, unidentified
MDVFHERCAGLDVHKEKIFVCVLIGRGSGFQKITFQYVTFHHQLVEMRQKLVELGVTHVLMESTGVYWMPVYDALEGFVEIVVGNAQHIMNVPGRKTDESDAEWLAKLLRFGLVKPSFVPAREFRELRQLTRYRRAVVQTRASEQNRVEKHLQIAGAKLSSVASHVFGVSGTDMLNHIAKGITDPGELAGLARGRLRKKMPQLRDAFAGSISEHTQHLIALQMEQMNRLESTIAQAELKIDEKVKPYEEILARLDAMPGLNLRSSIDVLAEIGTDMSPWATHRQIAAMAGLCPGNYISAGKRLKNRSRQGNPYLKSVLVLVQAACSAINVDGSYYQAKFKALKKRRGHKRALVAIAHAMLVAIYHMIKKGEPYLEIAANVVSDHEHGRKKEYLVKQLETLGFSVSLTQIA

SEQ ID NO: 58557 - protein, 324 aa, unidentified
MKIVFPTCCGVDVHKSFLVATIIKTPQDSLQPSYQKKRFSTFNSDLNRFADWLHENDCLDVCMESTGKYWVPVFNILEKRGIRVTIANPKWVKAVKGNKDDTKDSKWIGDLFRIGLVKSSFIPNKDIRILRELTRYRYKLTSMKSSEKNRFQNAFTVCNVALDSVVSDMFGKSATAITDYLTSDEDFDPQHCVSLLHRSLKKKAEDVLSSIEGYEITLEQKCRIGIVRDHLHYIEKLIERVDICINTMVEKYDGAISLLRTIPGIDRSSAITVISEIGVDMAQFGSSKRLCCWAGLTPGNNESAGKKKSVRISRAGVYLKPVLV

SEQ ID NO: 58558 - protein, 285 aa, unidentified
MSEALLPLGIDISKTDFHVALLKSAKRSKYEHFSNDTEGFRQLSQWLDQPGVGPVHACLEATSIYGHALALYLHQQGHQVSIVNPLRVKGYSKSQLSRTKSDRADAKLIAQFCRDLKPAPWQPSAVEVSQLQGYTRRLDALEHMLTEEKNRLQVTPQDFEADIVAHIQFLQGQVETVKKRLREHIQAHESLQSQQALLTSIVGVGESTAARVLAEIGSIEHFTSARQLAAFAGLTPQEHTSGTSVQGKTRLCKIGNRRLRKALYSSGADLVAAVSLSPRFLANGS

SEQ ID NO: 58559 - protein, 418 aa, unidentified
MEDSHSKKVKHINKKTLMVTLDIGKAVHYGYMRTPTGEDVKPFPFDNKRKGFNELWDKVCQFKQAQGLDNIVIGFESTGPYAEPLFHFLRTKPVRLVQVNPLHSKRLKELTGNSPCKTDQKDPRVIADIISLGHALTLVVPQGAAAHLRRLTQARERATQRRTALLNQLQHVIFIVFPEFLHEFKRVHSKSALYLLQHHPSPQDILALGYESLAGLLKRVSRGKIPAQRARQLFEAAQGSVGIREGRASIVVELQHLIKAIGHEDQLIDDLEQQMKDYVQQIPYSQSMLSIKGLGTVTVAGLIGEVGDFDAFATVAEVMKLAGLDLYEVSSGKHRGRHHISKRGRALMRKLLYFAALTMVRKQGIMHEYYHQMLGRGMPKVKALVAISRKLLRLICALVHNRTVYIAQYHQRSLGIAA

SEQ ID NO: 58560 - protein, 362 aa, unidentified
MFRPHTLYIRIRIVRKVSEPAFAMKDQDVTDVIRRKQQTAMKYIGIDVSKATFVVAYSSDKGGEIRTFNNTTTGIKQFIGALPKDGSIHCVMEATGNYSALLLYMLNVAGITVSMENPLKIKNFARAMLSTVKTDKIDARLIALYGEKMNPQPFKIQGEAILRLRQKRTVIRQLTKQITAMSNLRGSLAYLPVPDKGATHTVDETVKFLKKKRDRLQAELTDLVKVEFSRQLALLTTIKGIGITLATALIITTGGFTYFQNAKQVSRYLGICPTYEQSGTSVNIRGHINRNGDAYTRGLLYVAAWTASRFNAKCGETYTRLRQNGKPGKLAMIAVANKLIRQAFAVVAHDKEYVDGFVSNRP

SEQ ID NO: 58561 - protein, 427 aa, unidentified
MKRKKQYSQVNVNEISIDELAGDRAGQNVVAGVDVGKSELVLCLVWPDREFERPWRIKSPGQIGLAISKLLELNRQCPVTVAMESSGTYGDAFRQGLDDAGLAVHRVSGKAVRDDSEGFDGVPSSHDGKDAAIIGTLCVIGRSKLWPWHGAAKDESAQKDEAIRYWVRRLDTAQRIRQMWCGKLEGMLARHWPEVGRLTNQSGPTLTAALLHWGDPRAMAGDPGAAERLAGIGGHYLLVEKIDRLIESARTTVGVRMNAWAVREMRDIAGAIIEQRKKIQQCRRELKKLTKDHQPIQSQASAVGLVTACVLWMCLGDPQRYGSAGAYRKAMGLNLTERSSGMHKGKLKLSKRGQRLPRKWLYFSSLRWMREPSVKIWLENKKRRDGGKGGKAATGIMRRLAAAAWHAGQGEVFDPKRLFPGSRVVSC

SEQ ID NO: 58562 - protein, 320 aa, unidentified
MSDRLAVGIDADSKNLVVACHGTKGSTRIANSASAIDKWLSGLPTRSRIGVEATNRYHERVVQAAQMAGHAVFVLNPRDIKHYAKGVACRGKTDSGDAQVIARYIAKEADNLHEHVARSPAQERLHVLLQQRDSLVRSKAKLNLSLGAGASESPIFGRIFGGLKEAIAMLDQQIQQLCRSGEQRDLYRRIMTIPGIGPTVAAFVTHHITRWPLTSSDAWIACTGLDPRPNESGARIGKRRLSKRGNASLRQILYMAAMGLTRSKGGKPLYTAIRERGHSSTASFNILARKLAKIAWGVFKSGRDFDPAMLKVGQACFQQA

SEQ ID NO: 58563 - protein, 384 aa, unidentified
MDVHTSNYTLCSLDPGYGVEKDNYFAEVQFTNDFIKNVVNYVTNLKKKLKDCEFVCGYEAGCLGYSTYKDLTKVGIKCVLMAPSTMAVQKGGKKVKNDRRDARVIAQCLAYQTYKEVYVLSEHDEAVRGYLRMRDSHNKALKRIKQQIIAFCTGHGLFSPTKSNWTVAHLKWLKDLKFNDPVEQEILNEYLSSLIFLRDKIKAMDVRIEELASEKQYCENVKKLRCIKGIETNVALTLLAEIGDFNRFSKPTDFASYLGLIPGEQSSGDKVRGTGITKAGNSTLRRKLTESAKGYWRGRIGIKSATFKKLEKELPKEVTEYALKANTRLQRKFFNMTHVKGKNMNVAASACAREMACFVWGLITNHYDKAPAVPKTDEELLDLN

SEQ ID NO: 58564 - protein, 370 aa, unidentified
MEKKILYIGLDVHKKSIDVAITDERTNGKVRSYGKIDGTLQALDKLVGKLKSPGADLHFVYEAGPCGYPIYRHLTSKGHSCAVVAPSLIPRRSGDRIKTDRRDALNLVRLFRAGELTSIYVPTAEDEAIRDLLRCRVDIRHIERKTRQQLLAFLLRHGHYYPGKKNWTKGHMNWLAELKPAHRAQQIVLQEYIDAANECTRRIQRITEQIQGLVVQWSRAPFVRAYQALRGVSLIVATTVVSEIGDMNRFKNPKQLMAYLGLVPSEHSSGNRIRRGSITKTGNSHVRRVLIEAAWTYNLRARKTKLILKRQQGLDDRICEISWKAQLRLCGKYRRLFARGKSKQAITTAIARELSAFIWAIDKQVQQLTA

SEQ ID NO: 58565 - protein, 360 aa, unidentified
MTQVSRFVGLDVHAAETQAAILVQDTGELTYRKIRGRPAEVVAFLETVPQPFRAVYEAGPTGYCLARRAERAALDVLVCAPGHILKRPQDRIKTDKRDAAKLARLLLAGELRPVRVPTVEEEQLRDLVRAREDVRVDLMRSRHRLSKFLLRREIYYPNGKAWSKLHRRWLGGLRFDDRASEVVFADYLEAQDILCARRDRLERELAELVPDTPWARTIARLRCLRGIDTLSAAGLCAEIGDFGRFGPEQLASYLGLVPCEDSSGPERRLGQITKAGSKHARRLLVEAAWHYRHHPFVSESLRRRQSGCDPRAIEIGWRAQRRLHRRWRDLERRRGKLKTKVAIAVARELSGFCQEVALLD

SEQ ID NO: 58566 - protein, 296 aa, unidentified
MKTKFIIGADISKSKINFCLFIDSKNHMEREVENDKDSLKKFIKEVSSLKKSFEKSNKCCVDLVFACEFTGIYNYILTTLLHNMEIATYVIHALKIKQSMGMSREKNDKIDAIMIAEYTFRFHDKLSLWKPDDETISKLKHLETLRSRYVKIKKQITQSDDDNNKFMEATINEKIKEINNPVIDEIENAINKIETQMLGIIKKNEALKKNYEILNTVPGIGPVIARSLICITNNFTKFDSAKQFGCYCEVVPFNKQSGNYKGKKQSIKTCQPRHEKDNTSGSNVRYKLQESIWQIL

SEQ ID NO: 58567 - protein, 459 aa, unidentified
MNKVKTKTAKTKSIIEMPIVNPYSAGIDVGDKELVVALPEGLAEQRVRTFGTMTCDLEQIVDLLKVCEIDSVAMESTGVYWKPLFSMLVRNDLEVYLVNAGHVKNVTGRKTDENDAMWIQKLHSCGLLKSSFLPDDEQEALRTLVRYRKTLVQDSSRFVNRMQKSLELMNIKFHTVIKDITGKTGKAIVEAIIAGERKAANFLPLIGKGIKADLFTIEKSLQGNWREEHLFTLKESYTIYKQYREHIAVCDIEIEKQLQQYEAKRNEGIIEETAAAKKGEDHESVKKQRAKNHPRFDVRGYLQRIYGVDVLSIYGLNSVGGLEILAETGTDLSKWKNEKHFVSWLNLCPNNKISGGKLISSKLLSKKPSPASIAFRHAANGVQKSDHWLGDYFRRMKTKGGNKYAIIATANKIATIFYKMVRYKEEFKPMDLALYQQKYKQAKIAYLERKLMELKKQVA

SEQ ID NO: 58568 - protein, 353 aa, unidentified
MTDTTSIAWLGLDAHSRNCVLAQLDDQGTELNCWRFPTQPQQLLKHVQAIPATVKRLMLEESNLARWIGQLLKPQVQQLIVCDARRNRLISQDSHKHDRRDAFALARLLRLNEFKPVWQPADDQRVLFKRAAQAYENAVLRQTRLKLQIKSLFQHWGLFPAGASVFAKAGRATWLKQLPYDPLRSQALLLYELLDQALAGQAQARRLMCQAGRLFPEIQRLRTAPGVGLVGAHLFVAYVQDPHRFAKFSRLSKYCRLAIRDRTSDNKPLGFKQLDRQGNGVLKAISYRAFLQAAKRRSGPLWDFYQASLRLTGSTTHARLNTQRKILLVLWTLWLNGEEFDPNQFSRSQPMNV

SEQ ID NO: 58569 - protein, 427 aa, unidentified
MSYRVAAVDVHKKMLAVVVADVAGEGEYRFERRKFGATPGELHVLAQWLDQQEVEEVVMESTAQYWKPVWGTLEQCWKPKRQQREGAGKMCGTLHLCQAKSNHGPRGRKNDFADGERMVKRLVANELVLSFVPDPEQRLWRTVTRRKVQLTRIKVGFRNQLESLLEQAHIKLSSFVSDLLGVSARRMLKALADGETDPAVLAAMADCRLRATPEELRDALGACTQLNGVFRLLLKMALEELELVEAHIEKLEKEAMDLMQEHQDAIQLVAEVPGFGLDSAMQMIAEVGPKAAAFQAAKALSSWVGVCPGSDESAGESHSTRSPKGNRHMRRLLNQAAQSAVKAKGSLFELTFSRLLPRLGYKQAIWAIAHRLCRLLWLILHQGVRYEERGPAVSAKSKRTRAARMIRELRKLGYRIEGGPVPVAARA

SEQ ID NO: 58570 - protein, 343 aa, unidentified
MQITTIGLDLAKHWFQVHGVDAAGEIVVKRRLRRSEVIGFFKGLEPCLVGMEACATAHYWARELIALGHEVKLMPPAYVKAYLKRNKNDAADAAAICEAVTRPSMRFVPIKNVEQQAVLMLHRGRALLIRQRTMLVNALRAHMAEFGIIAPQGLRNVQQLIAAVSDERAPLPELARSILQLIIGQLNDTEVRIRMLEARLAKWHRANAVSRLLASVPGVGLMGASAIAATVTDPSLFHSGREFAAWLGMTPRQNSSGGKERLGGISKRGDKYIRSLLIAGAVAILRHARNRATKDAEWVQGMLARRPAKVVAVALANRTARIVWAVMRRGTPCRVTEALGQAA

SEQ ID NO: 58571 - protein, 345 aa, unidentified
MIIGCDFHPSWQQIAWLNTETGETGEQKLVHAAGNAKLFYQQLAAPVLIGMEATGNSQWFIELVQDLGHEIWIGDAAQIRASYVRKQKTDKRDAAHILKLVVESRFPRLWTPDREQRDLRQLVLHRHKLVEIRSRVKNELQHLSLNKGIQRKAKLWSQAGQKLLRELTLKPWAACRREDLLGLLALLNQQIGKLDQAVQQAADEHPQAQLLMTQPGVGPNTALAFVLTIGDVSRFPGGKQMASYLGLIPREESSGGRQKLGAITKQGNRLVRSLLVEAAQIAVRFDPGMKKQYLHRCHQKPKDVAKVAAARKLAVRLYWMLRTQKPYPEIVRIESSPRVPLVGAS

SEQ ID NO: 58572 - protein, 404 aa, unidentified
MKQPLYAGIDWATKTHAVGVVDDHGGIRARFQVPNTGKGFGGLIRRLTKLQVAGVAIERPDGPLVEAMLDAGLRVVVITPRQVKALRSRYRAGGTKSDATDALLLADVLRTDGHRLAPLCPDSDATQVLRALSRTRKDLQKARVALCNQLTAQLERCFPGAVGLFADLHSATAIAFLRRYPTSQAATGLTPATLAAFLRRIHYSGRTPIAVLWERIRTAPAADASPDQAAGRAVCVTALLDAIQACHGRERELEAEIIERLEVHADQAVFTSLPKAGRGIRAAALLSEIGDVRTRFPDEEALAALAGVAPVTRASGKLRSVGFRWACDKKLRNAVIDFADDSRHASPWAAKVYADALARTRRHPQAVRILARAWIRVIWRIWQDHTSYDPAKHGGAVRLLAAQA

SEQ ID NO: 58573 - protein, 443 aa, unidentified
MSELAVLDPRAAFVDVGSEKMHVSIAGGPPALFGTVTSQLHALRDYLAEHQVRSVAMEATGVYWLPLYGVLEAAGMEVVMVDGRQTRNLPGRKTDMKDCQWGATLHAHGLLRAGFVPPANIRRLQDYLRLRGDHIAAAAGHVQHMQKALERMNIKLHEVISSLTGASGLAVIRAILAGERDPQVLLGLCDIRIRNVKAERVVESLRGDWAEEHLFALAQAVQSWDHYQGLIAACDRQIAVVLRQMPDAKVPPSAASTKTGQPRTRPGVNAPDIADLREILAQICGAKDLTTLPAHSEYSVLQLIGEVGTDLTKWRTEKHFTSWLGLAPGSAQSGKRKASVKRRRNRAGQIFCVMARALARSKYVALGGFYRRMAARRGGLVANKALARKLATLFWRVMVKGLDFVETGVAQYEAKVLETKHRILHRLARQLGHQIVPNPAAGV

SEQ ID NO: 58574 - protein, 409 aa, unidentified
MERQIERCCGLDVHRDTVAACVRGPGVKGQREQHVRTFGTTAAELLALRDWLEAHQVTHVAMESTGVYWKPVFYVLEEGFTCLLVNAAHIKQVPGRKTDVLDCIWIAQLLEHGLLRGSFVPPAPIRELRDLTRHRKVLIQERQRAANRVHKLLQDAGIKLASVATDILGVSGRAMLEALVQGTTDPEVLADLARGKLRKKLPALRQALAGRFRPHHAFLVSQLLAHVDYLDEAITTVSTEVEARLVPFASELAQLDTVHGIATRTAEVIIAEIGVDMSRFPSDRHLASWAGICPGNHESAGKHKSGKTRKGNRWLRMALIEAAAAAVRTKDSALAARYRRVMRHRGHKKAVVAVAHAILRAVYHILADHAPYRDLGPDYYDRRHAQRVTRRAVELLERQGYRVVLEPAA

SEQ ID NO: 58575 - protein, 343 aa, unidentified
MNITILGIDIAKNVFQLHGANSHGKKLFSKRVGRATLLRTVQQIQPCLIGMEACGSSHYWARKFTELGHTVKLIGPQFVKPYVKTNKNDANDAEAICEAVSRASMRFVPIKNVQQQEIQLVHKVRGKLIKDKIALGNQIRGLLLEYGVAIPQGDAHLRKALASLSPLSEGSDLTNYAKIIFDDLYIEFIRLIDRVKEYTKRLTLIAKENDQCRRLMSIPGIKEITATALISAVGNFNSFRNGRDLSAWLGLVPKQSSSGQKKLLLGISKRGDAYLRKLLVHGARAVVSQVKDKFDSTSIWIKKCLERIGFNKTVVALANKNARTAWAIITKGLTYDIKHANSY

SEQ ID NO: 58576 - protein, 346 aa, unidentified
MSQSTTIIGIDLAKRNFHYVGLNEQGKKVTSIKLKRDEVLLHFENEVPKDVVIAMEACSGCHFWAGELQKLGFQNTRILKPSDVKVYAKSKQKNDMNDALAIAKASKDPELKAVHGKTQQEQEIHFIHKIRSQTIQERVRKSNALMAELLEFGYDANCGKSQFARQCASKVTQAYEEKYISLRMHTLFMKEAQHIQDLLQKEKELDQEIMALNKTSHKAKLLQTIPGIGPVNASILSIAPVESYPTAKDFAASLGIVPSQHTTGGKVHLRGITKKGSRYMRTMLIQGGRSLVMRARIDKNPTDKIVKWAQNLLKTKAFNQVCVAVANKLARISYACLTKNQSYQGA

SEQ ID NO: 58577 - protein, 425 aa, unidentified
MNYKQNEKINQVKESTLVVGIDIGSTTQYARAFDWRGIELGKVFPFSNSREGFESFKAWMQHLQDKYKKLDAIVGIEPTGHYWFDLGAYLEDEGILLVMVNPYAVKQTKELDDNSQSKNDRKDPKVIAKLVTEGRYSAPYTPDGVYADLRIMVANRKRLIREMTQIKNRFARWFAIYFPEYTDVFGDYEAQSSMLLLKKVCTPEAIVELGAEKINQIWRDAKLRAVGMKRATTLCETAKRSIGLKKGSSAARYEMKLLLEDYEYKKAQLDAVMEEIEKLCRKIPESEQMLAIKGIGVITVAGFLAEVGDVRRFESPRQIQKLAGLSLRENSSGKHKGQTTISKRGRSKLRAVLFNAAIPLIAKNPEFKSLHEYYTTRANNPLKKKQSVIAISCKLIRVFYAILANGVTYDPQKMLSDIHRQPQAA

SEQ ID NO: 58578 - protein, 363 aa, unidentified
MEKVRFVGLDVHKESIAIAVADGRGGEPSTLSTIPNDSRVLLKQLRKLGRVKCCYEAGPTGFGLQRELTENGIDCVVIAPSLVPQHASDRIKTDRRDALKLARFLRSGDLTEVHVPEPATEAMRDLERARDAAKRAERVSRHQMGKFLLRHGRRYPGKTTWTKKHLDWIRTQHFEHEAQNRVLVDHLKAVEDTTARVESLTKSIEELVEEWSLAPLVKALQALRGIRLVSAVIIAAELGELKRFAKPTQLMGFVGLVPSEHSSGESKRRGRITRTGNGHVRRILVEAAWAYRFRPSVSEQIRQRSKGVSPEVKQIAWKAQQRLCSRYRKLTARGKNKQRTITAIARELTGFVWAIGQKEVLTA

SEQ ID NO: 58579 - protein, 360 aa, unidentified
MKRVQSNTLDFSGQNIYVGIDVHLKSWSVAILSEYSVLKRFSQSPVPEALHHYLVSNYPGVNYYSVYEAGFCGFWIYERLTDLGINNIVVNPADVPTMSKEKLRKTDVKNCNKLVHELRSGSLERIYVPRADILEMRSLIRMRNLIVKDSTRAKNRIKSLLRFHEVEIAEEFTRCSIGCWSKRFLNWLHKLELSTEYGKKALKLHLEEFIRLRRMLLQETRVIREIFRKAPFDKSIRLLTSVLGIGVTTAAALMVEIDDIVRFSNADHLSSFIGLVPMCHSSGDNVGDITSRRHFTLRCLLVEAAWITIRKDPAMTMAYTEYRKGMNPQKAIVKIARRLVNRIYFVFKHEKEYVSCIVTN

SEQ ID NO: 58580 - protein, 434 aa, unidentified
MEEVTDEPLYRDRVCGTGIGKAGLVATIQVPSDRDPARQMQETRSFGTTKREVLALADWLRCWQVPAVVTEATGDYWKGPFYRLEAEGFECVLADAKQVKNLPGRPKRDPADSRWLAACFERGAITSCFVATPEFRIIRLHTRYRRDLTEERTRDKQRAEKLLESAAIKVSSVLTDLHGVTGRDIMDHLIAGERNPKVLAQLARAAARRKISQLEEAVEGAEFFTAEHAALLKIMLARIDRLTAGIDQLTADIEQLLAPYEEQLQQAESMPGWGRRAAQDTVAETGVDMTRFRTGPHLVSWAGRAPLDHQSGKRAGRAKAKKGNRYLGAITGETAVAAGRTQTREGARHRRLARRRGTAKACVATGNTQLKASPLLADPGMRYQDLGPDYYERQRDVRRQVAHHVGKLGSPGFEVTLCRIPEPDPDGTGPAQAG

SEQ ID NO: 58581 - protein, 421 aa, unidentified
MKGVRTKKVNTIKEGTLIVAVDIGMVSNHGCCVAADGRSTKTFRFDNTREGLDTLWNMVLASKTRFQCTEVIVGYESTGPYGEPLIHYLRQQPVTIVQVNPLHTKRMREINDNSPLKTDRKDPRVIADVIRIGHALSVVVPEGDAAYLRRLNNARERHVRERTALLNQLQQFVFLIFPEFTRVIKTIFCKTALHILKKYTTPAKVCSVKIEKLGEEMRRRSMGKFGAEHATALINFAKTTIGIQEGVDGLVMDIQHALVQLEMVDRLMAELEHEMETTLQRIPYSRKLLSIKGLGIVTVAGLIGEIGDFSKFTTQPEIAKLAGLDLYEVSSGKRRGQRRISKRGRSLLRKILYYAAMQTIRKNGIMHDYYQRLIGRGMKSMKALVAVSRKLLRIIFAIVRDDTEFILNHESQRKEEMRRAA

SEQ ID NO: 58582 - protein, 454 aa, unidentified
MAQKFSSMPVVNPHAAGIDVGSKTHFVATGQQPEDVKSFGCYTQDLQQISQWLRENDITTIAMESTGSYWRGLFKHLQDEGFEVILVNGKHTRNVKGRKTDVIDCQWIQRLHSLGLLSGSFLPDTFTETLRQYVRQREHLVEQSATYIKKMQQSLRQMNIRLDVAIRDIVGDSGRAIVQAILQGQRDPFLLASLVNYRVKKSKQEIALSLEGNWKEEYLFELRMSHDLYLVFQNKIVVCDREIEKILLQRVEHSSLQQGNKTIKKDQEIKSVKKKKNKNAPQINLQQICLQLTNGINLYAIEGVSDTTVLTLLSETGFNLNKFTTAKNFCSWMALTPNNKISGGKMISSHISHHNNRLAQALRRAANAIGNMKKGALSQFFRRIAFKYGRMAAITATARKLGMIIWNMLTKREAYRYEETTVYTERLRKLQIKQLQKKIISLNIQSHELEFVMC

SEQ ID NO: 58583 - protein, 367 aa, unidentified
MEKSSKVFVGMDVHKESIDVTLAEQGGEVRRLGQIGGDRGSLLKMARKLQSKAGERVFVYEAGPCGFWIYRELAALGERCMVVSPALVPKRAGDHVKTDRRDSERLASLARAGELEAIHVPDIRDEAIRDLVRGRDDAVIAQRRVRQQLKALLLRNDIRYVGRTSWTGAHRRWPSELKLPEPAQRIVFEEYVDAIVVATARIERLTRAIETEVAGWRFALVVGALQAMRGIQFVHAVTLIAELGDLTRFASARQLMGYLGLVPREDSSGEHRHQGSITKAGNSYARRALIEAAWAYRHPARVTRIIATRQTGIPKAVCDIAWRAQLRLSAKYRRMNARHVNHNKIVVALARELSGFVWAIGQSVKPQ

SEQ ID NO: 58584 - protein, 354 aa, unidentified
MRSKSIDFTGKNIYVGLDVHKKSWSVTILLDELEHRTFTCPPNLEVVNKYLRKHFPGGSYLSAYECGFSGYGHHRRLNELGIKNIVINPADVPSSNKEKTTKTDKVDSRKIAKGLRNGELRGIHVFDRIHEEFRSFVRQRTIFQKDLRRAKQRIKSSLMYHGIDIPDEFDLASWSNSFEDWLAGLEMSTTNGTQVLENLYQNYLFNKNQIRILAIDIKKYARRHYKEDYNLLRTIPGIGQLTAVAVISELGEITRFKNLNHLSSYVGLMPMSHNSGESEQSRGMTYRANNWVRTMLVEASWQAIRKDPAMMQYYLNHAGKINGKKAIIKVSRKLLNRVRFVLKNKQPYELSVQD

SEQ ID NO: 58585 - protein, 310 aa, unidentified
MEHFIGIDVSKATLDIASLPDGESWTVTNDDPGLAELAPRLVALAPVLIVLEATGGFELLAALALAKAGLPVAVVNPRQVRDFAKAMGQLAKTDALDAGMLAAFAQRIRPEPRPLPDEAARLLESLLTRRRQIVDMLTAEKNRLGFARGPVKRDIGQHIRWLEKRLRDVDDDLQDAVTASPLYHAKAALLRSVPGVGQVTTLTLLATLPELGQLSRHQIAALVGVAPMNRDSGTVRGKRMVWGGRAPVRAVLYMATLVGVKHNPVLRVFYERLRAAGKPFKVAATACMRKLLTILNAMLHQNRRWDPQHA

SEQ ID NO: 58586 - protein, 310 aa, unidentified
MDVIIDKGCGLDVHKETVVACVMGTGIKKEIRTFSAMTGDLLRLKSWLIDLGITHVAMESTGPYWKPVFNILEDGFEVILANARHIKNVPGRKTDVKDSEWICKLLRSGLLTASFVPPQGIRDLRDLTRYRRKLIQAISAEKNRIQKVLEDANVKLSSVASDTFGVSAGKMVRAIISGNADPVSLADLAVGRLKSKKDLLRDALQGHFRDHHGFMIQASLDHIEYMEKTIAKLDQQINEKLKDYHRERELLESIPAVKEQGSASILAEIGADMSVFPSADHISAWAGMSPGNNESAGKKKVAKQPTAIKI

SEQ ID NO: 58587 - protein, 342 aa, unidentified
MAALIKHVVGIDISMNTFDACFGSIDSEQSIKLSTGKSFKNEAKGFEELIKWALKLKDSSTPIWFVMEATGIYYENLAFYLNEHEHLVNVVLPTKTKHYKQTTEIKTKNDKIDAQSITRFGLERQLEEWNIPDAKMRIIKELCREYESLNDQASQIKNQIHSKMNSYKPNESTLKRLKQHLHILEEQQKDIVKELKGIIAKIPDVKQKIELIEISLKGVGFMSLVKIIAETNGFACITSAKQLASYAGLDIVENQSGTKSGKTRISSKGNSHLRRSLYMPSMCVVRFTDAFKIFYARLRKKNKNGKVALTAVMRKLLTLIYSLWKNNTAFDPEYYLKKAVLN

SEQ ID NO: 58588 - protein, 393 aa, unidentified
MICVGIDVAKDKHDCFILGSEGEVLAEVFTVPNNAEGFDKLLQTIRRCARPEDKIKVGLEATGHYSYNILGFLIDKGLPTYVINPLHTNLYRKSLSLRKTKTDRVDARTIAAMLMSDVDLKSYTDTAYHNEELKSLTRYRFDKVRERAKLKQSVSRLVTILFPELEKLVPTLHMASVYALLSEFPGAKQVAGAHLTHLKAVLYDASKGRYGRDMAAMLRETARCSVGSVMPAKSLELQHTIRLIRELDTEIEDIEAAIQSIMDEIQSPITTIPGIGVRMGAMILAEIGNFSRFDSPDKILAYAGMSPSTYQSGQLSLSGAYSHMEKRGSRYLRYALYNAAKYVCLWDPNFAAYLAKKRAEGKHYNVALSHAAKKLVRLIYALEKSRQPYNTVA

SEQ ID NO: 58589 - protein, 351 aa, unidentified
MLIVGCDYHPSFQQIAWVDTESGECGEQPLMHSNGEAERFYRKLKEQGVKVRVGIEATGHARWFERLLAELGHELWVGDAAEIKAKRVRKQKNDREDARLLRTLLVENRFPRVWLPDVGNRDLRQLLWHRHRLVQMRTRVMNQLQAVALNEGVRRKRGLWSKAGRAQLESFQLMPWATTRREDLLELLDGLTPRIAALTAAIEKQVEQHPEAQRLMTHPGVGPLAALAYVLIIGSPERFRCGKQIGSYLGLIPCEDSSASRQRLGHISKQGNSLLRFLLLEAAQAATRCNPAWRREFLHLTMRRGRQIATVALARKLAVRLYWMWRKGWDYEKSLQFGSHVGQPGTRYGVK

SEQ ID NO: 58590 - protein, 424 aa, unidentified
MKNCNKQNEKIELVDEKTLVIGVDVGSYDEYARAFTCRKQELSKKPLHFHNTAEGFKTFKYWAVNIMKTNGLEKIIVGMEPTSIYWEALATYCKDNGMILVHVNPAAVHKSKELDDNDPSKNDRKDPKVIAGLVADGRYQFPYIPEEEYAELRELSNLRIRTQESLTQCKNRLARWYSRYFPEFKEAYKNVVSKTAMIIMDMYPLPEDIVTLGVEGILQIWRSKKVRGAGERKARKLYEAARNSIGRKEAASIARIEFKSIKEDLDRYQERLDEIEKKADEILPKIKNVDKLFEIKGVGKATVLTFLSEVGEISRFDNPKEIQKLAGYAIVTNESCKHQGEKRISYRGRKRLRWVLYQTALSVIAKNAEFRQIHAYYTTRTNNPLKGIQSVVAVACKMIRIFYKILTDGVSYDGTKMTQDIVHA

SEQ ID NO: 58591 - protein, 312 aa, unidentified
MNRIICGVDVSKDWLDAHVWPGGACGRFARDAAGVAELQALCRQYDVELVVMEASGGYERLAFLLLWDGGQPCALVNARSVRRFAEGMDILEKTDRIDAAVIARYAVARGIAPMPPPSAAQQRLGSLVARLAQIAGDLSVNKQRCAATFCAETLASLDTVIACLKREERRLAGEIASLIDDDPLWSRLDRALRAVKGVADRTVARLLAQLPELGIVSNKAIAKLAGLAPIANDSGRRAGARSIRGGRAGPRSILFLIARIAAKYDPHLAAFHQRLLAAGKKKMVIRIALARKLIVILNAKARDARIQFANAT

SEQ ID NO: 58592 - protein, 313 aa, unidentified
MSQFSVFVGIDVSKDHLDVHVLPEGQAWRVANDATGCAELSERLSGLTGSVLVVMEATNVFWRLAATKLASAGLSAAVVNPRQVRDFAKATGQLAKTDAIDAQMLARFAEAIKPPVRALPSEQCQVAGELLARRAQLMGMLVAEKNRLSTARAAKVRKDISATIAFLEKRLAALDEEIDQWLKSTPIDQSRVNLLKSFVGIGERTAKSLLISLPELGSLTSKQIGALAGLAPFARDSGHKRGQRHIGGGRSIVRAALYMPAIRCNAVIRALYERLIDAGKHHYVAITACMRKMLIILNAMLKSNQPWKDPQKV

SEQ ID NO: 58593 - protein, 275 aa, unidentified
MQTTAYVGLDVHKATISVAVAEDGRGGAVRFIGTIPNTPTDVLKLVKRLAKSGQRLEFCYEAGGCGYGLYRQIVQLGHGCTVVAPSMIPRKPGDRIKTDRRDAAKLAVQHRSGDLTAVWVPDEVHKAMRDLVRARIDAVMQLMRARQQCLALSRFETPRQLMAYLGLVPSEQSSGARVRRSGITKTGNREARRMLVEAAWSYRYPARVAQQKSDILTRQPKRIRDIAWKAQTRLCQRYRRLSALGKRPTVVVAAIARELSGFIWAIGKEVTPAPV

SEQ ID NO: 58594 - protein, 310 aa, unidentified
MSKLYVGIDICKEYLDVFITNNNYKRFNNNKEGHKLLNKFLNKFIPELIVMEATGNLHKAVWRSLYNNGFKVFIVNPRRSRLFAGSTGCLAKTDKVDAKILAKFGEVLNPNATSIPSALEENLQEILTSRIQITNEITKVNNMISSHSNKQVISLFKKQICLFKKQIIDIDEKLLELIEDNEELNNKYKILLSIKGIGKLNAIMLISYLPELGNCSSKEISSLVGVVPFNKDSGNTNGKRTISGGRKCIRNMLYMGAVSAKSYNRDMKLFYERLIQKGKPSKVALTAVIRKMIIVANTLIKENRVWRENY

SEQ ID NO: 58595 - protein, 423 aa, unidentified
MDVVGIDWAWDFHICYSIEKNKIYRIKDNEAGYRELLNEVSKEAVFVIEESFNRISDFLLSEGREVYLLPPKRSKEARGYHSNGIKTDSLDARSIALTYSEHPEYCIRARNNEEGRSFREQLRVYRYYKDEASRLKNKLHNELHDHFPEFVEVMGNWKKNKGKILLLSITDELKSLSIEEIHNYFKENQIAFTNSLRKKAKELKKREWHITKYTLMMVANAARNLLEVERGKQEMKNEMERNLKESKYRVILSLPGVGVVTGVALVAAFLNHEFGNYRNFQKYCGTVPIIIQSGNFRKCVMRKHCDRNLKGTLHMMALSAVNKGSWMKGYYARKIKEGKSFGHALRALANTLVKIAFAMLKSLKSYDEELFLSSRGNKSPQSNYTTKTSTLETEKKTNEKSSLPASVAQTNCHLGTDSGRLSP

SEQ ID NO: 58596 - protein, 414 aa, unidentified
MQDILTCAMGLDVHRDIIVACLVKGAVDAEPEAETRTFSTLIPEMQKLRDWVIESECRNIAMESAGIYWQPIYEIEMLESCFDGEISILVVNARHMKNVPGRKTDMKDAQWIATLLRAGLLKGSFIPDKAFRELRHLTRYRKSVVHDITAQKNRIDKFLQSSGFRFTAFLSDTFGASGRNIVRHLIEHGSIDREALDKCLKTKTRNRIDEILVALNGSLSEHQRRFLNMVFRHLEDLEAHKHTVEDEITEEVLKHTDALNLLCSIPGIDVTAAAAIIAEIGTDMSSFPDSQHICSWVGLSPGNNESAGKRKSVHINKGNPYLKNMLCEVAWIMASHRKLYLSGWYWKVKQRKGAKRATIALARKILSIIYTMLKTGTPYNEECFEQRRLRCERKRANRLVNELQKLGYVVVAPD

SEQ ID NO: 58597 - protein, 347 aa, unidentified
MNFYNNMHPYYCGIDLHARLLYVCIIDNTGLILVHKKIKDDPEALLKLLKPYIGDIVVGVECMHCWYWVADFCKEHTIDFILGHALYMKAIHGGKAKNDKIDSYKIAKLIRGGNFPLAYVYDKDMRATRDLLRRRTKIVRHGADLKAHVANTASQYNLPAHNVNLKNVCDREKMRYYFPDPVVQRSINLNMAILDCYHNELKPLEHYIEQMAKQHNPVHLNILQTINGIGRILALTIIYEIGDINRFSSVQKFASYSRLVKCKAESAGKTYGSQGNKIGNAHLKWAFSEAAVLLLRHNHNANKYLEKLQKRMSKAKALSALAHKLGRCVYYMLKKETVFDEAKFLKS

SEQ ID NO: 58598 - protein, 427 aa, unidentified
MKYTQNEKIMQITENTLIIGVDIASDVHYARAFDYRGIELDKVIKFNNDIQGFKVFSDWITKIATNNHKQHVMVGMEPTGHYWFTFAQYLEENNIKIVLVNPYHVKTTKELDDNSPTKNDRKDPKTIAMLMKDGRYMEPYIPKGIYSELRNATNTRWQLVKKLNSIKNQVKRWIKIYFPEFNNVFADWEGKAALMILKHFPTPEKITKLDAPEIIATWRKEISRAVGIKRATKLIKAAKASVGIKEGLIAAENELHILLEEYELLMKQHQNTMNLIEKLTMQIPGVKEILKIKGVGLKTLSGFIAEVGDIERFDHPKKVQKLAGLNLKENSSGKHKGQTTITKRGRKRLRSILFSTIMPIVAKNKEFQQLHKYYTTRKENPLKKKQSLIVLCCKLIRVFFVILKTGVKYDPVKMMNDIKRPTLQEVA

SEQ ID NO: 58599 - protein, 459 aa, unidentified
MGKRGEKRERRSAILEPDAAGIDIGAEEIYVAVPPDRDEQATRRFSSFTCDLYALAEWLERCRIRTVAMESTGVYWIPLFQILEERGFKVYLVNAHSLKIVPGRKSDVSDCEWIQYLHSVGLLKASFRPSEDICAVRTLWRHRGSLLQMGAEHTHHIQKSLSLMNLQIHHVLSDITGASGLAILDAILAGNRDPLCLAHLCNIRVKSPRETVAQALVGDYRPEHLFTLKQSLDGYRYYQKLIAELDDEIARLMHTLPNATEHPAPIPKRTKRTAYQRMGNDPLFDLRSELYRIAGVDLTDIPGVSAIAAQVVLTEVGPDVSRSRNASAFASWLGLCPDKRISGGKVLSTKTRKVKNRVAIVLRLGAKSLSRAKDYFGAFFRRMRARLGTAQAITATAHKLARVVYHVLHSKEPYTETVFHRCDEQEQQRAEMRLRKHAAQLGFQLLPISTNPAASQISS

SEQ ID NO: 58600 - protein, 344 aa, unidentified
MVTLGTDAHKRSHTIVAVDTAGAEIGSVTVPATTDGHLRAVGWAAQYTKRRWAIEDCRALSRRLEADLLGLGERVVRVPPKMMARARSTARQAGKSDPIDALAVGRAALREPDLPVAQLDGPSREVRLLIDYRETLVHQRTGFQNQLRWRLHELEPGFDPPPGSLNRYCTLDAIDELITTHDSMVADLARRETARIRELTAEINQLERDITRRVTDLVPSLLAIPGCGALTAGKLIGEAADITRFKNRDAYAMWAGVAPIPVWSANPNRFRLNRGGNRQTNAALHRIAITQARIHPDAQAFIKRRIETGSTKREALRLLKRKLANVVYRTLLTDTQTTPHAQAA

SEQ ID NO: 58601 - protein, 278 aa, unidentified
MYSIGVDFHKAYSHMTVMDAQGQVVKVGKVSNTFEAVHAFVAPYRDDAQAVLEATRNWTVMYDMLERELRAVYLAHPLKVRAIAEARIKTDRIDSKILAHLLRCDLLPTAYVRPREQRVSQQILRQRMFLVRVRTMVKNRIHVLIDRQLDVREVAAQFSDLFGSAGLAWLRTVGLADIERQLLNAELALFEAVQERIAESDSLVRNLAAGDPRVRWVRTIPGFGRFFAVLVVHEIGTIRRFATPEKLSAYAGLVPSVHASGGKVFHGLCRSETSWANR

SEQ ID NO: 58602 - protein, 408 aa, unidentified
MKRYYMGVDWGDRLHQVYVGDQEGKKVKEIKVPETVEGLTEFGRWLDEKRAEGFELWAAIEKPAGRIVDFLLDHGVEVYPVNPKAVDRVRDRYRMSGSKSDAFDAYVLAEFLRTDQAHLRVLRPSSEKAQELKMLCRDQRRVGRHKTRLLHQLTTTLKEYYVRPLETFEDIETEVALDFLTRYPTPAHLQALKPKEFKRFATKQHHLSQQRCEELWEKLSQPQLKVPEHVVRAKAQLLEVLIDQLRAAIKAVNTYNHKVESFFASSPAAQIAKTLPGGKSGTLVAAIWAELGDAQGRWESFRHLQAEAGAVPVTKASGKSRVVQFRFACNKHLRYAMYWFSFVSLNHSEWAKLYYRQQRAQGHTHPEALRALGAKWLKIIFVMWRDHKPYDEKFHLANIALQKIRQAA

SEQ ID NO: 58603 - protein, 315 aa, unidentified
MDEPRCVTNCVGVDVSKDRLDVHLRPSGEAFAVARDGKGLEQLVERLAALDVSLVVVEATGGFETTVAAALAGAGLPLAVVNPRQVRDFARALGKLAKTDAIDAEVIALFAEKVRPEARPLASQEAQALGELVARRRQIVEMIGMEANRCRQAAAKRLVKKIDRHLAFLEKELADIDADIDAGVRASPAWREKEDLLTSVPGVGAVTARTLIAELPELGQLDRRKLAALVGVAPFNRDSGLWRGRRMIGGGRTSVRNALYMAALAATRWNPVIRAAYRRLVARGRPKKVALVACLRRLLTILNAILRDKIPWQPA

SEQ ID NO: 58604 - protein, 418 aa, unidentified
MKIIKTKKQQIVNGKALIVTVDIGKDKHFGYWRCPDGTDVKPFSFPNNGAGCLEFWERISRAKEIHRLDEIVFGFESTGPYGEALVHFMKARGVRLVQVNPMHTKRVKELQGNSPNKTDQKDPKIIADIIELGRVLTVVVPEGPAAELRRLTQARERSTERHTALVNQLQSLIAIIFPEFLQVVKNVKTATAQYLLEHCPTPQSLVAYGLDNLTKTMWDVSRGRLREDRAKALYEAAEGSIGVIEGQASILLETQAILAAMEASEKFTEGLEKEMSHHLKQIPYSTCLLSIKGIGEVTAAGLIGEVGDFRRYSTLGEIMKLSGLDLFEVSSGKHQGTRHISKRGRPLMRKLLYFAAMNMVRQGCVMEHQYQRYLDRGMLKTKALIAIARKLLRIIFAIVRNNSVFDYSRTSYQFKEAA

SEQ ID NO: 58605 - protein, 388 aa, unidentified
MIYVGIDIAKTNHYASIVDYSTGEVIEKPFLVTNNKQGFDLLYSKLRNFDKDNILIGLESTAHYGNNLIFYFHEKQFKLGIINPIQTSTLRKTRIRKVKNDKVDSMLICEALSLGYYNLLSDYDIKLLEIKSLCRFHKDLKEKASEAKIQLKTYVDQLFPELNSFFKDNLDLKTAHELLKCYQSPLDIINVNLTKLSNLLVCSSRGKYDKSRAIELKDLASNSVGINNHALSIQIKMTIELIELLESQIKDIEKQVSDFIKKSDNVITSIPGIGYMTAAIIISEIGDINRFHNPSQVLAFAGLDPSVKQSGNFNASSTRMSKRGSPLLRYALILAANNVQLNTKTFNDYYNMKRLQGKLHYNALGHCAGKLVRNIFYMLKHNVKFNLD

SEQ ID NO: 58606 - protein, 370 aa, unidentified
MHITSIGIDLGKTTFHLVTLGEQSKVLARKKFSRKQLLAYTANLAASLIGMEACSGAHFIAAAIRSQGHDVRLIPAQFVKPFLKSNKNDFLDAEAIAEAVARQNMRFVPIKTDEQLDLQALHRVRDRLVQRRTAVINQIRGFLLERGITFPKRPANLRNNMAALLEDAEANLSPRMRQLLEGVWQEWKQLEAHIDEADDEIERIASADANCQRLRQIPGVGPLASTATVAAIGNGAAFRKGRDFAAWLGLVPKQHSTGGKARLYGISKRGNEYLRRLFIHGARAVLYRVKYDTGGFGRWVHQLETRAPRNKVIVAIANKLARIAWAVLSSGEVYQHQAGRHGVKRAVEKTLRLESQQRFPLFHRRDGGDY

SEQ ID NO: 58607 - protein, 353 aa, unidentified
MKRTSKYVALDVHQATTVTSVRVQSGRVVARSILPTEPSALVEYFGGMRGSIRVVFEEGTQAQWLHDLLAPIVEEVVVCDRRGEPRGPKADQRDADQLSRRLLSGDLRTVYHGRGDRRSLQELTRTYLNLVEDSTRTMLRLKALFRARAIRAPGQRIYGKKERALWLARLPDRGARFRAETLYAELDVLRELRPKAKALMAIEARRDPAAAVLRSIPFVGPVRVALLLATMKTPWRFRTKRNLWAYAGLAVVTESSADHVFIAGHPVRRRRKPLTRGLNKNHNRVLKSVFKGLATASTGKPGPFQDLYRGMLDRGMREDMARVTLARKFAALTLRLWKTGESYDPTKLTMRVT

SEQ ID NO: 58608 - protein, 306 aa, unidentified
MTAVGIDVSKSVLDVAVDGQSAVRRFPNTSAGVARLVRQLSQYEAVRIVVEATGGYEEAVLGACAQAGMWIARVNPRQARDFARATGQLAKTDGIDARMLAEMATVFHARLRRYEPREAWQDELRAWLRRRHQVMDAIQRQRQHMDMALPAIRTLANKTTVTLRKELTAIDNAMQTLLNAHVTPALQSAKGLGPIFQATALALLPELGHLSRQQIAKLVGVAPLNRDSGQTQGKRHIYGGRSPMRIALYMATLSAVRWDPRMREHYQQLRQRGKVAKVALVACMRKLLTIVNARRRDELRLANPCT

SEQ ID NO: 58609 - protein, 398 aa, unidentified
MDIHKEVVVATVRGEGIQKETRSFDTFTSSLTELREWLVSLGITHVAMESTGVYWKPIYNVFEGHIPHVWIVNARHIKNVPGHKTDKNDSEWICQLLMAGLLKPSFIPPREQRELRDLTRYRRKVIQMVSANKNRIIRTLEDGNVKLSSVLSDTSGKTGTELIEMLCDGKELTLQDIEDVRHGRCRHTSEDMLEACTGYMNDHKRYMLQRIRECNRKLTVEITELDRRIKEIVAPCAEVMERLDEIPGLHDRTLEDLIAEIGLDMTVYPSAESLCKWAAMCPGNNESAGKRKSGKTNHGDKYVKATLVEAAWAASRTKGTFYKERFERLSKRKGGKKALIAVGHSILKAVHYVISTGGRYHELGEQYVPSKIEKKRKDYLKSELQKLGYEVSLIKKKD

SEQ ID NO: 58610 - protein, 342 aa, unidentified
MNKNWFIGIDVSKKTLDASIFVAGEVINRFPHTQVRNEKTGFKELLRWAKAQGVDTKDTLFGLEFTGYYSDALEQFLTGKKLCYTMLPTTVVKHYQRGTRDKNDKTDSAKIADYLFRFNGTECIKQRFLPSKAMQELKALKSERKFYVQQRVACENRQKVANSKQERKHLQKAIDLFNEQIEMIERQMAEVVTSDEEIYQTYTRLLTIPGIGPVNAINTIANTQNFTAFETARQYAKYVGVAPSEHSSGTSVRWRGRPSLHADLQAKADLSMAALRAVEFSFEMSQCYERKLGNRKDDKDVQRKALNAIKFKLIRQMFSVARQHKNFAVMQRGQAQAETHNT

SEQ ID NO: 58611 - protein, 359 aa, unidentified
MSLASWVVAGLIPGVNREPLKKIAADPEELLRLLYRWRDQAIKAGKDITRIAVAYETGRDSFWLARWLRDRGIDAHVIHATSVAISREHRRAKTDRIDTAMLRRGFLGWLRGERGHCSMAVVPTIAEEDAKRPHRERESLLKERTSTINRMKAILAQFGVRNFKPSLRKAAEKIDAVRTPEGVPLPPNAAAALRRQIERFRLINEQIKTVEKTRMQRLRQNPTGKYNTMVFLLVRIIGLGVETAEQLVHEMLSRNLRDRKAVARYAGVTGSPDESGASRREKGLSRSGNGRVRKILIQLSWRMLQFQPDSRLVRWFKNRTANSQRSRKPMIVALARKLIIALWRYVNTGVVPDGFKLAK

SEQ ID NO: 58612 - protein, 468 aa, unidentified
MVKQQPEEIPDADHELVIERVCAIDVAKASGAVCLRVPHEVRPGRRVSRVWQVPATTRAVTDLAAHLVAERVEKVTVESTSDYWRIWYYLLEAAGLDVQLVNARDVKNLPGRPKTDKLDSVWLAKLTEKGLLRPSFVPPAPIRQLRDYTRMRVDLTRERTRHWQRLEKLLEDALIKVSSVASTLDTLSVRDMIEALIAGERDPRRLAQFARGRMKAKGPALIEALTGRFDDHHAELARMLLDQIDALSVQIQRLTTRAEQLLAAMPEAQAPEQGHHDGDQPIDTDRPPPSAASSAHTGPDDHRQGGLTACQRLDEVTGIGLHSAQVIIAEVGLDMGRFATAGHLVSWAKLSPRTIQSGSKARGGATGKGNPYLKGVLGEAAAAAARTNTFLGDRYRRLVKRRGKLKALVAVARSILTIVWHLLSDPTARFHDLGPDYHTTRIDTTRKIRNHISQLTAMGYRVTLEPAA

SEQ ID NO: 58613 - protein, 337 aa, unidentified
MELYAGIDLHSNNCVIVVLDASDRVVYQKRLPNQREAIIGALSACGPIVSVAVESTFNWYWLVDALEDAGYAVKLVNTAAVKQYDGLKHSGDFSDARHLAHLMRLGILPTGYIYPREGRAVRDLLRKRSQMVRGRTTQILSMQNLLARNLGTQTSGNDLKRWQAIDIEELDLLPEQRLAIASNLAVMHCLDAQVKQLEAAILEQARLLPAFQGLLTVSGIGKVLALTIALETGDISRFEGAGNFASYARVVDSRRESNGKKKGEGNAKCGHKHLAWAFVEAAHFAVRYDEQIKRWYQKKAAKTLQVVAIKAVAHKLARACYHILKTGEVFDVTRAFS

SEQ ID NO: 58614 - protein, 340 aa, unidentified
MHNPKPGAVFVGIDVSAREIAVALQTDDQLEPVRTFANTASGHQQLGRYLRRDQQPVRVCVEASGNYSLDLCLALHAIEGIELSVINPRLARRFAESLGTRSKTDPVDARVLCLYAQRMPTVAWQPPSPASLHLRSITRAVEALTCMLVQERARHHAAAASTALPRLVTTELQRHQRYLEQRIQRLRREAVRIISTDADLARRFRLLQTTPGVAEMSALQLLGELAVLPSTLDARQWVAHSGLDPRHHRSGTSIEWRPRLSKLGNRRLRRALYMPALVAVRHDPHLRGFYQRLCGNGKAPLQALAAVMRKLLHAFHAMFKRDQAYNGAHLCPEVPLACHP

SEQ ID NO: 58615 - protein, 351 aa, unidentified
MPAPTQIAVSVIGIDIGKNSFHIVGLDQRGAIVLRQKWSRGQVDVRLTNMPPCLIGMEACVGAHHLSRKLRALGHDARLMPAKYVRPYCKGQKNDFRDAEAIAEAVQRPTMKFVATKTADQLDLQALHRVRERLVSQRTGIINQIRAFLLERGIAVRQGQRFLRVELPRILAMPPDVLSARMVRVIEDLASDWRRLDERIETLSSEIETLARQDAGCERLMSIPGIGPIISSAMVAAIGTGDGFSTGRDFAAWLGLVPRQISTGDRTILGKISKRGNRYLRVLFVQAAWVVLVKVKPNRWDGHGLKHWIEAAKKRLHHNVLAIALANKLARIAWSVLARGRAFEASKLQAA

SEQ ID NO: 58616 - protein, 320 aa, unidentified
MMSKIILGIDVSKKTLDAALIFDNRTFCKQFKNSADGFRLLAAWLESLQITRVHACLEATGAYSEVIALFLHERGHWVSIVNPLRIKGYAGANMQRNKTDRLDARLIADFCQTQEPDEWQPPSAAVKCLQSLVRRVEVLEEMRQSEENRLANAALEIKPSIERMITLIKEEILQLERQIKQHIERNPDLKEQSELLQTIPGIGERTANVLLSEIEFDRYSSARAIAAQAGVTPRRKQSGTSLKQTSLSKLGNARIRRALYFPAIVARQHNEIVKEFAKRLKKNGKTPMQIVCAAMRKLLHIAFGVLKHKRAFDASLAFSA

SEQ ID NO: 58617 - protein, 449 aa, unidentified
MGNGSGVSRGDRNRNVRLERLRALVPVTNAIAGIDLAGSKQMVVVTDHDSRVIARRTFRCRAWDLGTALDWAAGRAAAGGWAGVTVACEPTGHRWRVLSQLAADRGMPFVCVQPLVTSWSRRTEDLTSDKTDDKDAVLIARLTAQLRCYVPEPVDETWARLRHLGTRREQLLTEAGSQLQQMRDLLECAWPAVLDTARQPFRSVTWIAGLSVITGRDDGDLARTRRLGVQRFEHAVRREVTRRGRCKPCLRIVRAMFAALADPAGVIAHRRGVLERVQLLLEDWDLTGERISQAGQRMTAVLDELGLTGLVTSITGISAVGAAAILAETGDLRRFATARAVVKHAGLAPREKLSGAFAGRTRLTGQGRPGLRLAAWRAVWAAQHANTVYRNRYQHLTSREHNKLTPTQAQTVIAAAILRHLHAVITTGQAWDAVTAAHGTRSLNQAAAA

SEQ ID NO: 58618 - protein, 416 aa, unidentified
MRVVGLDIHRSFAEAAMIDEGRVQQLGRIELVRERVIAFAKRLGKNAEVVVEATGNTMAVVKLMAPYVKRVVIANPLQVRAIAHAKVKTDKIDAAVLAKLHAAGFLPEVWQPDEATERLRRQVARRATIVQSRTRVKNRIQSVLHANLILPYKGDLFSGKGRKWLAAQPLEDDERTTINGWLAELDRLAVDLAQVDTSLAQNGLRDDHVRRLMTITGINLTVAIGLTAAIGDITRFASSDKLVSYFGLNPRVRQSGDGRAHYGRITKQGRSMARGFLVEAAWAAAATPGPLHAFFIRIKARRGQQVAVVATARKIAVLAWHLLTKGEDYAFGRPALHQAKLRQMEIKAGMLSKRGGNTPGRARDYNIKSLRDAERAFVAQAEGAYARFVASWSERPKTKPPAAKPGARAPQNEERH

SEQ ID NO: 58619 - protein, 367 aa, unidentified
MKKVSTVAAQASRKISGQKLTIGFDLGDRNSWYCVLDERGEIVLEQKLSTTPKAIKEVFGAMPRCRIALETGMHSPWVSRLLSKLGHEVIVAHARSVRLIGESRKKDDRLDAQTLARLARIDPQLLRPVKHRSAKAQADLTVIRARAGLVRARTALVNTARGLAKSYGERLRGCNVRNMNPEKAEGLSPELQRALEPLLAALESLSGQIAEYNERIEQLAQQSYPQVALLKQIKGVGTLIALTFLLTLEDPHRFRKSRDVGCYLGLQPGRRNSGQSQPQMHISREGDPYLRTLLVQGAQHILGPFGVDCDLRRWGLKLAERGGKSGKKRAIIATARKLAVLLHHLWVSGEVYDPLHNSSPAALRTAA

SEQ ID NO: 58620 - protein, 344 aa, unidentified
MDHFAGLDVSVKETSVCIVDDTGKIVREVKVASEPEALLAVLKNPVYHFRRIGLEAGPLSQWLYSALAEAELPVVCVETRHMQALLKAQINKTDRNDARGMAQMMRVGLYRPVHVKTLRSQKLRMLLTHRKLLQSKAIAIENDLRGTLRNFGLKVGTAGMVKFETRIKELVGNSPELAALVEPLLVVRRVLREQLVILHRRLLAIVRDDEVCQRLMTTPGVGPVVALTYRATVDVPARFRKSKSVGAVFGLTCSKYQSGEIDWSGRISRCGDEMMRVMLYEAAQSMLYSKKWSWLKAWAMQIARRRGMKKAIVALARRLAVIMHRIWVDGTEFRWTRGQTAAAA

SEQ ID NO: 58621 - protein, 345 aa, unidentified
MKIVGCDLHTRYQQIAMLDKETGELVERRLEHESGEARAFYAALSGVVRVGIEATGHTRWFERMLAELGHELWIGDAAEIRASVVRKQKTDARDAAHVLELLRSERFPRIWRPTMAERDLRQLVWHRQKLVWMRIAVGNQLHALAMGEGVCRKKKLFTKKGRAELEGLGLGIWASRRRQELLTMLDQFDASLRELDHAVAEQAEQNPAAVLLMTHPGVGPVTSLAFVLTLGPVERFERSKQVVSYLGLNPREHSSGGRQRLGAISKQGNPMMRSLLVEAGHSAARWDSELRQDYQRLKLRRGSGVAKVAIARKLAVRMYWMLRGQASYAQLVRMQGSPGATLVKE

SEQ ID NO: 58622 - protein, 410 aa, unidentified
METMYHRCAGLDVHKKSVEVAVRILDNQGRLQTQTRHFGTYTRNLLEMADWLAEQGVTHVAMESTGVFWKPIYNILEGRFSVLLVNARHVKNVPGRKTDIKDCQWLAQLLQCGLLTGSFVPGRDLRQLRDLTRHRAQLVAEKNRVINRIHKVLEDANIKLGSVATDIVGVSGRAMICAIIQGENNPERLAGNARRRLKNKTEELKLALEGHVNDHHRFMLKLLWEQLLSVESLIQQLEDKIASQMGPFQQAVELIDEVPGIDRRVAHTIIAEMGIDMGQFPTDRHLASWAGMCPGNNESAGKRKSGKTTKGSRWLRQALVQAAWAASHVQDSYLAAQYSRVVKKRGKKRALVAVGHSILVIIYQLLKKNVPYQDLGSDYFDMRNHIHLTKYLVKRLEGLGHKVMLEPRAA

SEQ ID NO: 58623 - protein, 344 aa, unidentified
MNKASGIVATLGIDLAKRIFALHGVDASGKTVLRRMVHRAELLKTIANLPPCLIGLEACSGAHEWARRFQGFHHTVRLIAPTFVTPFRRSGKNDHNDAEAICEAVGRPNIRFVPVKSREQQAVLTLHRVRQGLVEERTALINRIRGLMTEFGFVFATRTGGLRAGIHDAIEQLPLLAAQGIRDLLDHLQSLTERVARYDSQFRELARQDERARRVMTVPGVGPITALGVTATLGDAREFKNGRQLAAWLGLTPKQHSSGGKTRLSGITKHGDDYLRTLLILGARATMQHATRRAHTRLDRWAVSVSERRGYHKAVVALAAKNARIIWALLVSQKEFEVGAAAAA

SEQ ID NO: 58624 - protein, 442 aa, unidentified
MKHKRHEKTKKAICGPTQGNWQQMNRKQRREMTRKIQSEDISLEVIHPDAAGIDIGNESHYVAVPPPRDSQPVQRFGCTTAELKDMAGWLKQCGIRTVAMQSTGVYWIAVYDILEEAGLEVYLVNARDTKNLPGHKSDVQESQWLMKLHTYGLLRNSFRPSQEIRTMRTYWRQRNDLVQSAGRHIQRMQKTLTQINLQLANVLSDISGVTGQALIKAILAGEHDPDKLAEFRDPRVKARKGQIARSLEGNWQEDLLFVLQQEQDGYEFCQKQMTECDQRLEHYLQQRDDRSAGASLPEEKRKERRKKRKGNKPRFDLRTGLFRMTGTDVTRIDGIDVMTATTILSEVGWDMSKWETEDHFVSWLRLCPDNRTSGDKIIGKGRLPTNNRVSTALKMAASTLRTSQTYLGAQFRRLRSRLDTPWRSRRWPLSWHVWSTACSATE

SEQ ID NO: 58625 - protein, 279 aa, unidentified
MKDSGKRYIGLDVHKHYLIALGVDEDLNVVLPARRVELSHLESWMKQTLTKRDEVVLEMTTNTWQLYDELCAYAGSVLVVHPPHVALITRSQVMNDKIAASILARLLAKGLLVGIWVPPQDIRELRGLVAQRKKMTGLATQAKNRLHAVLQRHHRLPPEGNPFHVSQHSWWLALPLGWLEKVNVESDLDTLQFAEQQLAYLTSLMNILASEDEHITRLLQLPGFGVVTAITAWAAIGNIQRFEDAQHLVGYAGFGTRVHNSGMTTRSGRITKAGGIENA

SEQ ID NO: 58626 - protein, 370 aa, unidentified
MKQDNVFYVGVDVSKAKHAIAIAEGSREGEVRYFGEIEATDAAVERFVRKLERKHARLHFCYEAGPTGYGLYRQLVELGHRCDVVAPSLIPKRPGERVKTNRRDAVSLARLLRAGELKGIWVPDAVHEAVRDMVRVRAAASEDLRKKRQMLLSFLLRHGRVFSGHKHWSRAHARWLAAQKFDHPAQQIVFQDQVDVITDAQARLERLDARLAELAPSWSMAPVVAAYQALRGVSFIVAVTFVSEVGDVRRFDSPRQLMAFLGLVPSERSTGETVKRGGLTLAGNQRARRVLVEGAWAYRHPARVSETIRVRLEGLPKAVREIAWKAQTRLCARYQRLTAAGKKAPIIVAAIAREMAAFLWAIGHQVEPVN

SEQ ID NO: 58627 - protein, 411 aa, unidentified
MQRVIGMDIHRTFAEVVFWEAGRLRPGGRVDMTRSGLEGFGRSLSKEDEVVVEATGNAMAVVRVLSPYVARVIVANPLQVKAIAHAHVKTDKIDAGVLASLRAAGFLPEVWLPDADTELRRRLVARRNQVVRHRTRIKNEVHSILQAHLIPPCPHADLFGRLGRSWLGRQELPVDERAAIERHLRELDRLGEDLELLDREIAERVIEDQSVKRLLTITGVNIIVAAGLVAAIGDIQRFSSPQKLVSYVGLNPRVRQSGLGLAQHGRISKRGRSHARAMLVEAAWAASKAPGPLRSFFLRIRARRGHQVAAVAVARKLAVLCWHLLTKDADYQWARPALVANKIRAMQLQAGQPARKGNKRGAAYAYNIKELRDREIDVARHAEHAYEQFVSRWQPRGPGKRRTGAGNEERR

SEQ ID NO: 58628 - protein, 428 aa, unidentified
MLKQNTEPDPAPDFAAFLAIDWADEEHAFHLQVVGQSKIETGTLEQKPHVLGPWVAKLRERFGGRPIAVGLEQSRGALIHGLMSYDFLVLYPIHPTTVAKYREAFKSSGAKSDPLDAGQILEILTQHQDRLHRLNPDTVETRLLGRLVEDRRKAVDLRTTHVQALGANLKEYYPQALELTNDNLSSRLAGDLLIKWPTFEDFQQAKPSTLKRFYYGHNVRSPEVIERVLTLAQKSQALTTDPAIVESGRRLTQMYARLIQALHPAIADYDQRIQQVFNAHPEAKLFRDLPGAGPALAPRLLAFFGTDRSRYAAAFNVQSFTGIAPVTKSSGKSKVVYARAACPKFDRQTFHEFSRLSVIRCQWARNYVQYYTDKGKKYHTIVRALAYKWIRILFKCWQERTPYNEDKYLETLKLRGSIFATWHLQKKT

SEQ ID NO: 58629 - protein, 331 aa, unidentified
MKNYLNSVGTDISKKYFDAVLFFSGEHAKFANEKKGFASFIKWLKKHDYGPGNVLICFENTGYYSLQLSFYLNEKGFDYVQEHALQIKRSIGFRRGKSDKADALDIAKYAWVNRENIKLSKPPSKSILKLQQIKTTRELLVRQMVAIKNQIQALAAIGDKNVSRVACRSLTFVLGTIEKQIQKLESEIELLIGQEEQLATTYHLCRSVKGVGLVLALELIIHTQNFTCFSDWRKFAAYCGTVPYPYQSGTSIKGKARIHKSCDQRMKSLLTMASISALRVDPELKIYYKRRVEEGKPKMSVINMIRNKMLARVFATVNRGTPFITLSKFAA

SEQ ID NO: 58630 - protein, 288 aa, unidentified
MMIIGCDYHPGFQQIAYLNSDTGELHECRLGHKEEAEQFYHDLRTRGLPVRVGMEASGHARWFERLLAELQFELWIGDAAAVRSKRVRKQKTDRQDAQLLLQLLMENRFPRIWVPDAENRDLRQLLWHRHRLVQMRTRVMNQLHVVALNEGLRRKKALWRPAGRAELEGLSLAPWASRRRQDLLDLLDQLTPKILELTRRLEEVVEKRAVAAHLRTHPGVGPLTALAFELVIGTPERFQCAKQIASYVGLVPAEESSGDRRRLGHISKQGNALLRFLLVEAAQVTVRS

SEQ ID NO: 58631 - protein, 342 aa, unidentified
MEYCGIDLHTEYSQICILDEDGEVMETSRIRTSRPGLTRFFGSREPMRVVLEAGGSSPWVSRLLESLDHEVVVCSPRRVRLIAESKLKNDRVDAEVLARLVRLDPEFLRPIQHRSEEAQLLRANLKVRSAMVEARTKWINTVRGLLRSFGYKVAGKAPHTFVDRVNRMKLPDELRAVIEPMLEQLDLLSGEIKRRNEHLEEMVEDLPEVDHLREIPGIGPVVATYFVLTIDDPHRFRNSRDVASFFGLRPSMRESASVSHFGRITKEGDPEMRRLLVQAAHACLLTKADSELKTWALALAERKGKGKAAVALARKLAVLMHRLWVTGEVYQAFPKEETSEAA

SEQ ID NO: 58632 - protein, 282 aa, unidentified
MRFYTKTHQHYCGIDLHAKTLYLCILDREGQILLHKNVRSRPDDFLAAVAPFRDDLVVAVECIFTGYWLADLCRNEGIEFVLGHALYMKAIHGGKAKNDKVDALKIATLLRGGTLPQAYVYPPEMRATRDLLRRRLHLVRRRANLLAHIQNTNHQYNLPPIGKKIAYKSNRDGVVERFSDPGVRAIVQLDLDLIGHYDQLLTDLELQIVKRAIQHDPQAFHRLRTIPCVGKILALVILYEIHDIRRFPTVQDFVSYARLVKPKKESAGKVSGSGGAKIGNPI

SEQ ID NO: 58633 - protein, 376 aa, unidentified
MREKLRFLGMDVHAETIAVAIAEANGEVRSLGTIANREDSIRKFIRKLGTAEQLRACYEAGPTGFVLYWQLTQLGVDCAVVAPTLVPKKPGDRVKTDRRDALKLARSHRSGDLTAVWVPDEDSEALRDLVRQREAAKQDQLRARHRLTKFLLRTGQRPPLGLKAWTERYMRWLAQVRYTQPAQEVTRLDCMNEVEHMSARVKRLEEAILEVVKLAPQPMQDVIRGLQALRGVAHISAVTIASELGNISSRFQSARKLMGYCGVFPSEDSSGNRVRRGGITKAGNAHLRRIVVESAWCYRHLPRVGEKLRKRHEGVPPAIIEIAWKAQNRLHKRYMRLSMAGKDQRKIMTAVARELLGFIWAIAIKAEASCRQPIAA

SEQ ID NO: 58634 - protein, 344 aa, unidentified
MIIIGCDFHPSLQQIAWVDTETGEIVEQKLMHASGEAERFYCGLQGQVRVGIESTGNCHWFVDMLLGMGHEVWMGDAAKIRAQQIRKQKTDRRDAAHILDLLLKNDFPRIWIPSKQERDHRQLLLHRHKLVTLRVRVKNELQHLALNQGLQKGRSLWSLAGQKQLLELPLAPWAGIRRQDLLELLKKLDQQILVLDHAVKKAAEENEKACLLMTQPGVGPITSLAFVLTIGDAARFPRGKQVASYLGLIPTEYSSGSKRRLGSISKQGNRFLRMLLVEAAQSVIRHDPKFLKEYQHRCHYKPKAVAKVAAARKLAVRLFWMLRTNKPYPEVVRIESSSQDALAG

SEQ ID NO: 58635 - protein, 401 aa, unidentified
MIGVDPHKGSHTAVAIGPGEEPLGELRVRACLAQAGQLMVWAQAWPERTWAVEGAAGLGHLLAQQLVAAGERVLDVPPKLAARVRLLEAGDTSKNDPNDALSVAVAALRTRARRPVRAEDHAAVLKVWAKRHRDLARARNQVTCRLHAVLCELVPGDVSKEITAGQAARVLDQLTPSGAVAQARCELAAAFLEDLRRLDAQLRDTKKKLAAAVRASATTLTQLFGVGPVVAGTVIGDVRHVSRFPSRDHFAAYNGTAPVEVSSGNRKIYRLSLRGNRRLNHAIHMAAITQIRHKHSDGRAYYDKKIAEGKTHKEALRCLKRRISDAIYARLLADARQGAAASTKDPGGQPGNDSDASVAGSHPEHRLFGQATPESSPILRPVTQSDPTAAKRNLKKSRKTP

SEQ ID NO: 58636 - protein, 370 aa, unidentified
MNDGSKYVGLDVHKETIAISIAEASGGEVRYFGEIKNTPEAIRKLCEKIKPETGGLFFCYESGPCGFGIHRQLIELGWDCLVAATSLIPRKAGDRVKTDRRDSVMLARLLRAGELTGSWVPDDEQEALRDLTRAREDLKGLQKKSKLMLLAFLLGHGRRFSGKSNWTRTHFNWLADQKFAHPNQQIVFQEYMNSAESMGTRIGALDKQIAEKAKSSVFKDVIAGLMALRGVQLITAMTIIAEIGDIKRFDGAPQLMAYLGLVPSEYSSGGSRYRGGITKTGNSHVRRVLIEAAWAYRHPARRTRKMEAKLSGAPESIHEIPWKAQVRLCGRYRSFEARGKNKLQACTAIARELSGFIWAVGQSCPSPIAS

SEQ ID NO: 58637 - protein, 342 aa, unidentified
MDHYAGIDVSLECSSVCVVDASGKIVREGKVASEPEAVIAYFGSLRLSVVRIGLEAGPLSQWLYAAMKEAGLAVELLETRHVRTALQTMPVKSDRNDARGIAQLIRLGWFRPVHCKSIGAQETRAVLTARKLVQSKLLDVENSVRGILRGFGLKVGKTTNRSFAGRVEDLVVNHASLHMIAAALLSVHAVLLRELKAFDKQVRSMARVDVKAKLLMSAPAVGPIVALTYASAIDDPGRFTSSRRVGAHFGLTPKKYQSGETDYTGRISKIGDATVRTALYEAAHIMLIKPIKGCAPLKSWAMRIARRSGMKKAKVALARKLAVILHRMLASATPFNAAMAAA

SEQ ID NO: 58638 - protein, 410 aa, unidentified
MRYYLGVDWADQTHAVWVVNESGTKTAARTVPHTAEGLSEWGRELDEWRTQGIELWAAIERREGRVVDFLLDHGVVVYPVNPKALDRARDRFRQSGAKSDPFDARVLADFLRTDHAHLQVLQPSSAAAQELKLLTEDYQQQIRQQTRLINQLTATLKAYYPRALEIAELSTPLAREFLQAYPTPEAVAALTERQWQRWARAHRLSEPRTQALWNLWQQPQLSVPAHVVRAKARLMRSLVAQLTLVVAAVAEYREAIEDFFARMPAAQWARTLPIGKHGITAPTLWARLGDAPGRWESFRHLQAHAGAVPVTKRSGKQQRTIQFRFACDKALRYVIDHVAFLSLHSSVWARAYYDQQRARGHAHRQALRALAAKWLKIIFVMWQHQAPYDEQYHLATMTRQQLRHGQKQIA

SEQ ID NO: 58639 - protein, 422 aa, unidentified
MISDRPVIGIDVAKDFCFYAAASPSGTPFLKPFKALNTKQGLLSALGQIKKVEETFSSKPVISLESTGHYSARIVHFFIKQGFEVYLINPLISHSIKNSVVRKVKTDSVDAFELAKLLFLQDFHTTYIPSDAFANLKILTRTRFQLANQRTTLLNQLVAAIEQIAPLFPKVLNPASLTALTLLTTFTAPSEWLKEVNQQAILSMLETLPRKGKNYGEKKYEALLDCARDAEVTGIDLMANVTTVQIYANGVLFMDHQLKALDNQIDEVAKQLPEFILLKSIPGIGAILASLILGEIGDINRFTNAKQLVAYCGMDPSVRQSGNYVGTKNRVTKRGSPFLRRSLYIVATTAIRKNAKGTLVNSVIYDYYQKKTQTKTRKQSLGAVMNKLLRIIFSVLKNKQAFHVITSDEQVLLYQNKRKNAA

SEQ ID NO: 58640 - protein, 424 aa, unidentified
MKVTYPTCCGVDVHKSFLVATIIKTTAGIEPSYQKKRFSTFNNSILDFKSWLLENECHDVCMESTGKYWVPVFNLLEDQINVTIANPKWVKAVKGNKDDTKDSKWIGDLFRLGLVKSSYIPCRLIRILREYTRYRYKLVSCRSSEKNRYQNALTVCNIALDSVVSDIFGKSSSSIIDYLLEQSGTTINHEEIASKLLKSLKSKEDAVIESIEGYQMTDAQKYRMRLIRAHMDYITAEINDIDKQIESLISSDPDYDKAIRFLTTIPGVKRDSAITIISEIGIDMSQFCNSKRLCCWAGLTPSNNESAGKKKSVRITRAGVYLKPALVQCAHAAVKSDKSPYYKTKYESLVKRRGKKRAVIAIARMILIAIYRMLSTGEVWNPSDLYKIDMPAPLAEKQKAKAIKQAKKLLQKEGLLPPDEPLAS

SEQ ID NO: 58641 - protein, 325 aa, unidentified
MTHASSPDFLYFVGIDVAKAKLDLARSDTGEFLSVGNDPAGIGRIVDSLRAKPPKTIVVESTGGLQYPLLDALLEANLPVALVNPRNVRHFATGLGILAKSDPIDARVLMEFARLASPRLAEKRSAEQVELDALLTCRRQLARQKSVQMNCRATTTSKTAIKTIDAVLKTLGREIGKLDKKIRDLIESDDDFDSIDKLLRSVPGVGPVVSATLVAELSELGNTNRRQISALVGVAPYNCDSGARQGTRSIFGGRASVRSMLYMATVTAIRCNPIIRAFAERLQKEGKAKKVQIVACMRKLLALLNAMIRDRLTWDQLNVVKALEI

SEQ ID NO: 58642 - protein, 344 aa, unidentified
MPASIPSPARYRLFVGVDIAAQTFTTVWMAPGATPGRPVTLDQTPQGFAALQARLLAAGHVAADILVVMEATGSYWVSLATTLAHAGFAVAVINPDQAHNVAKAVLQRAKTDAIDARMLARLAATLQPVPWTPPPAIYTELQQRLAERDTLIGLRQQVRNQRHALVQLPVVIPAVRTRMEELIATFDAQIAAIEREITQILPRDAGWAASAALLVSIAGVGVLTAAWLLVTTLNFTIGATPEAVTAYAGLAPVSKESGTSVRGRGAIGHGGNKRLRTALYMATLSATRYNPPIKAFYDRLRAAGKPAKVARCAAARKLLHLAWAVVRKGRVFDPLYAQQPQEAA

SEQ ID NO: 58643 - protein, 320 aa, unidentified
MAMQVGKLIVGADVAKAELVIHHDDRDEVIRLKNSKLEIKRWLKQQPLNTAIAVEATNVYHLDLVELAHSLGFEVYVIDGFQLSNYRKSVGGRVKTDPSDARLLSRFLKNEGEDLRPWTPPPAVYGKLQSLLRRRSALVTARTAMTQSWANEALLKAAFKTFVKSIDRLDLLIQKKIKEVLREAGLHEQVARCQAIEGIGFLTATALVMAFMRGEFKSSDSYIAFLGMDLRVSDSGQKSGRRRLTKRGCSEIRRLLHNAAMAASRSAAWKDVYEQYRKAGKATTQALVILARKLARVAFALMKNQDEYVTKGGKLACCKP

SEQ ID NO: 58644 - protein, 438 aa, unidentified
MADPNERCEPDFAAFIGIDWADQRHAWALQTTIKGAIEHGDLDHTPEAVDAWATELGRRFDGRPVAIALEQSRGALLFMLTKYAHFVLYPIHPTTLANYRLGFRPSGAKSDPSDAGLLLDLLVRHREKLRRLNPDTVETRTLQFLVEGRRKLVNDKTRYSNRLTACLKMYFPQVLDWFAEVSSKIAGDFLERWPTLPKLQKARLDTLRTFFIEHHSGRPESIQRRLEEIRRGVPATHDQAVIESCVAAVTALVPLLRELRRAIQSYDEQIETTARQHADFVIFDSLPGAGAALVPRLIAALGTQRDRYSSASELQCYSGIAPVLASSGKQSWVHWRWACPKFVRQTFHEWAAHSIGSSAWASAYYTQQRAKGKSRNTAVRALAFKWIRILFRCWKDHTPYQEELYGQALARRAARTNGAVNVQWKTGEGLSKISGFIS

SEQ ID NO: 58645 - protein, 384 aa, unidentified
MVNNSLIGKAGACEASKASRAGTNRRREFGRVQAFKAVTEREPRRHRGTSPNSRLSRRQTVSSYLQVRDKTMSEPIYVGIDISKDTFHVATCPDLIKNCFPNTPDGHRQLCKNLQNQTIALIVLEATGGYERPIAAELLNASLPVVVVNPRQVRDFAKGMGQWAKTDPIDATILAKFAQIVKPAPKTHATAQTNELSELVRRRRQLNDLRTQESNRLLMIHHPKVKKSIQKMIKTLDFQIDEIDQLVREYIDADDDFKRKDRILQSTPGVGPQTSAMLIANLPELGKLNRQEIAALAGLAPWDRSSGKYDGKAHIFGGRKDVRSVLYMAAFTACRFNPVIRTLAIRLKQKGKAYKVVITACMRKLLIILNTMIRNQTLWSPKIS

SEQ ID NO: 58646 - protein, 434 aa, unidentified
MSFKILKNNCCGLDVHKTWIFACIGIADSHRRTEYKHARFSSFTKGLQELCDWLAKYNCTDVCMESTGKYWIPVFNVLEKNNIWVTLSHPKYTKPQKGNKTDRKDAKWICDLYMCGMVKPSFIPPADIRQLRDLVRYRFKLTCMITSEKNRAHNCLTISNFKLDEVFSDIFGKSSRSITEQILQHPGETFDVAQFVDGRCKTPIEEIQAAVDGRCKTPIEEIQAAVDGAISTEQAVKLRQCLNHIDELEKHQAEIEREIFRLSDKYEEVLNLIRTVPGFDKNPMTAIQVLSEIGGDMSVFPTAKNLVSWAGCCPRNDQSNQKIKSTRISRAGSYFKPVLVQVANALIKSKKHPEFTTRYRRIKARRGHKKAIIAICRMILTAIWHILTDLKPYTTEGFLESRPVNDSKILTTSQALNLLKQRGYVIKDDIVSVP

SEQ ID NO: 58647 - protein, 328 aa, unidentified
MNAVIGIDVSKDKFDTCWLRDASTGKKKSKSLRNSSKGYQEIHQWLLKNVGCEAPDILIVVEPTNVYHEALIHFLYEKGFKVFLANSGKAKKFAESLCMTHKTDKSDAAMLAYYGHAQAAQATLWEPEPKEIRQLKAMMRRLDALEKDLQREKNRRETSEISDVSGRVLQSLDNMIKALEDEIEQLENDIDNHIDHHGHLKKNRELLKSIKGIGPVLSRELTYLFAAKRFKSAKQVSAYLGLIPKQHESGKLKGRTTISKVGPSRLRAKLYMAAVVASMCNPDIKAQKDRLMNAGKCKMEALGAAMRKLVQICFGVVKHQTKYQPQIA

SEQ ID NO: 58648 - protein, 442 aa, unidentified
MRENSYDVEPNWAAFAALDWGAEKHFYCIRAAGEQPCESGELENTPEAIEAWLRKLEKHFGHGPIAVAVEQSRGALVYMLSARPNLVIYTVPPSLSGRYRETFRPSGAKSDASDAEMLLEILALHRDQLRPRRPDTVATRLLQGLCVERRRLVDERTRQTHRLTACLGNYFPQALRWFADVDAPLMAAVLEKWGQLRAMQRSHPGTLRKFFQQHNCRRREVLEQRILEIYAAVPVSDDPAVLEIGMLTARAISCLLQTLNEQIRILEERIEEVTREHPEHKLFSSLPGAGKTLVPRLIAAMGTDRQRFRSAAEVQCYVGIAPVTSSSGKSRWVHLRRSCPKFLRQTFHEYAACSLRKSPWAKAYYRLLREKGYGHHAAVRALAFKWIRIVFRCWKDGQLYDEATYLQSLQRKNSPVVATLEVAALPARVPQWKQIAGFSKLT

SEQ ID NO: 58649 - protein, 342 aa, unidentified
MSEVTIIGIDLAKRVFQLHGAHRDGSVAFRKKLSRGQLLGFVAQYPKCVVAMEACATAHGWGRAFDKLGHDVRLIPPVYVKPFVKQQKNDIADAEAIVEAALRPTMRFVTVKTEDQQARAMLFRTRQMFVGQRTQMINALRGHLAEHGLVAARGPAHLKRLADALEDSSMALPSEVRELGRMYLEQIEGLNARVAELDAKMRCAAKKADLVRRAQTIPGVGPVTALAIETFAPDLATFRRGRDFAAWLGLVPKQHSTGGKARLGKTSKMGQRDIRTLLVSGAMAVLQAVERFDTPNNGWLKRLLTRKPRMVAAIALANKMARGLWAMMTKQEDYRNPVATMA

SEQ ID NO: 58650 - protein, 462 aa, unidentified
MAERREDESRSEEARQIEGLPVVRAQVGGIDLGSQRHWVCAPGLEGRGREIADFGATTPELQRMLEWLKVRQVESVAMESTGVYWIAPQEVLEAGGLEVLLVDTRQLARVPGRNKKTDPSDCEWIQRLHSCGLLTGAFRPPEQVGMLRTLVRDKANLVAEAGDWVRRMQKSLDQMNVRVHRAVSDLDGVTGLAIVRAIVAGERDARKLAQLRDRRCQKSEAEIAEQLSGHWREDHLFSLRQSLKMYEATQERIAAYEQEILRKLREMTPEERAGQTAPAVKNPHKANAIRKRGEEPRRQAWYRMSGVDATQIDAIGVGTIEVVLSEYGPDLSCFPTEKQFISHATLAPHVPRSGGKVVKKKKRYSASTRVAAALRMAALALRHSPTALGAYYRSLARRIGGDVAVFATARKLATLIYRLLRWGQPYIDEGAQTFEERYRQQRIRSLTAKAKELGYQLLPATT

SEQ ID NO: 58651 - protein, 424 aa, unidentified
MDVLYTCSAGLDVHKKSIAVCVRKMEKDGKTSEEVRKYGTMTSELLDLRDWLEESGVTHVAMESTGVYWKPICNLLEDRFQLVLCNARHVKQVPGRKTDVKDCQWLAQLLQHGLLRSSFVPPRPQRELRDLTRHRSQIVSERARITNRIHKVLEDANIKLHAVASDVMGVSGRSMLEAIIAGEDNPRELAEKARKRLRNKIPELTLALEGRITDHHRFMLKTLYRHWVYLGELVDEMTERIETLLHSLDTSDEEDDVLPFEQAVDLLITVPGIDVHTAHSILAEIGTDMSRFPSHGHLASWAGMCPGNNESAGKRRTGKTTKGSKWLKATLSQASWAASRTRKTYLSEQYRRIVRRRGKKRALVAVGHSILVIIYHMLKYHRIYEDLGQDYFDQLNTDRLVQYHIKRLEALRITVHQKDIDCAA

SEQ ID NO: 58652 - protein, 366 aa, unidentified
MKKIITVATAGIGKMQAQGLTVGVDLGDRSSCYCVLNEQGEIVQEEKVATTPKAMRERFAEVPRCRMALETGTHSPWVSRLLSELGHEVIVAHAQRVELIAKSRRKNDRMDARTLARLARIDPQLLSPIQHRSAEAQAHLTVIRARASLVRARTSLINTIRGVTKSTGERLRGCNPRKVGERAQELSPELQHALGPVLSEIDSLSDRIREYDERIRSIAESSYPKVELLKQVHGVGTLVALTFMLTLEDPHRFSKSRDAGCYAGLQPGKRDSGDSEPQLHISKEGNKYLRAMLVQSAQHILGPFGADSDLRRWGLRLSERGGKNAKKRAIVAVARKLAVLLHHLWVSGEVYEPLRNSLRMATAAAA

SEQ ID NO: 58653 - protein, 346 aa, unidentified
MEHYAGIDVSLELSSVCVVDGQGKIMKEAKVASEPEALVCFFEELGFPVKRIGLEAGPLSQWLHAGLAQAGFETVLLETRHVKAALSAMTVKTDRKDARGLAQLLRMGWFQQVHAKSIGSQEIRALLVARKQLLGRLLDVELSLRGILRGFGLKVGQVTRKTFEARIRELVTGQATLERIAEAMLSARATLKAEYEKLHKAVLAIVREDAVCRRLMTVPGVGPVVAVTFKSAVDDPSRIAKSKAVGALFGLTPKKYQSGEKDVTGGITRTGDEMVRTALYEAANVLLSRITRFSKLKRWGMDVAKRRGSKRAKVALARKIGVILHRMWIDGTTYRWAEAKPIAAQG

SEQ ID NO: 58654 - protein, 399 aa, unidentified
MEEPASQGWAGVDVGKGHHWVCLIDEAGETLWSSKVYNDETAILEAISAINTRADQVIWAVDVTGTMSGLLLALLAAHDQSVKYVPGRIVNRMSETYRGEAKTDARDAYVIAESVRQRGDLTAVEVSATLVAELRLLVTHRTDLVADRVRMVNRLRDVLSGYFPALERAFDYAHSRGALVLLSGYQTPAAIRRIGQSRLQAWLVKRKVRSAAQIAAGAVGAATAQHTVVPGQDVAATIVADLATQLLALDERLKDLDARVTDTFRAHPQAEIIESLPGMGPILGAELIAAAGDLNGYANAGCLASAAGLVPVPRDSGRRTGNMHRPMRYSRKLRRVFYLSANAAMMREGPNRDYYLKKRSEGDKHVQALICLARRRVDVLWALLRDNRVFTSNPPLRTA

SEQ ID NO: 58655 - protein, 338 aa, unidentified
MEQQQQYLGIDLQRRRSVIVRRNALGETLDIVRIDNDPVALAAEVSKAGPNPEVILEATYGWYWAADVLTECGATVHLSHPLGNNWGNRRVKNDERDATDLVDLLRLGRLAEAWIAPPPLRELREYIRYRAKLVQLRSNLKAQVHSVLAKEGVTVPMTDLFGVKGHQLLNDVHLGDAYRVRVESLRDLIELFDREIAMLEDKIDPYVADDLGYHAVQAIPGVGPVLASVFVAEIGDVSRFTSARHLCSWAGLTPTHHESDDKVRRGHITKQGSRLVRWAAVEAVARQRGDTIIRAHHQRVGERRGKQVGRVAAARKLLILVYYGLRDGEIRCLAADQG

SEQ ID NO: 58656 - protein, 480 aa, unidentified
MIKSVGIDLAGTGEHKARCLDEKAQPCDSFSFQTTPDGLAKLEERIFSGRSNPVIIFEPTGLAWLIVAIYLKARHPDCHLVRVQAQKVVALRKYLRRSSKSDKIDALTLAKMPFIDPEQLEEIYFPPAKIYAIQRLARQRKRLESEIGSHKKRIGSIVDGYIPGMRQAFSDPWSAHGRAFIRSRLNPLAVVHAGEKALHAFLTKARQHGKADVIESHLVYLACQEAATLYKLSESVGTIDENFFAALQDEMSRELRLMEMEEAESEAIAKRLEELYHELHPSDNLRTIPGVGEHTAPIFLATVGDPSRFQSQSAFANYTGVVPAAKQSADAEAKGLRMTKAGPAIMKWALYQSSQIGRRYDPQLAWVYYREMVHYGKNHKQAMGAVMSHVGARVLAVLREDRPYELRDIDGRAITSEEARRLILLNYQVPEDIKRERRRRKQGASKTVKSHRRKREMAAHRTNEAAKAPQPVVATATSQN

SEQ ID NO: 58657 - protein, 397 aa, unidentified
MYIVGIDIAKRKHEAAVIDGEGTVIIKPFSFTNNCSGYNRLLAMLTKAKLPLDEVSFAMKATGHYWLALFTRLQKEGFRVQVINPVQTNSIRSFYIRQAKTDPRDALLIAEVIRFGHFSESTLHPENIYELRELCRGRHAIVSMQADVKRKVVALLDQVFPEYETAFTNLFGDTSMAILQTCPTPKELSETPLEELCHLIEVSSHKRFRMAKAQELQALAHGSFGFAMAGDVFSTMIRLYAKHLVFLKQQVQEMDRKIAEIMDTLDTPITTITGIGPTLGAYILSEIGDINRFSSSAKLAAYAGIDPTMRQSGEYNGVRNRMSKRGSPYLRHAIWLAASSAVLHDPALKLYFQKKRDEGKPYMASVGHACRKIVSIIYAVMRDNKAYTPCIPNEISA

SEQ ID NO: 58658 - protein, 377 aa, unidentified
MKKVRFIGLDVHADTIAVAVAEPGGEVRSLGMVPNRPESIRKLVKKLGPVESLRVCYEAGPTGYVVYWQLTALGVPCEVVAPTLVPTKAGDRVKTDRRDAAKLARSYRAGDLTAVWVPDAAHEALRDLVRAREAAKKDQLRARHRLGKFLLRHGRRPSTAMTAWTQRHLTWIRQVQFEHPAQEATRLDYLHEVDHMVGRIDRLERAIDEAVKTAPPSMRAVIEALQALRGIALVSAVTIVAEVGALSRFTRAPQLMGYSGMGAREDSSGPRTRRGGITKTGNAHLRRIAIEAAWAYRHRPAVGGRLRKRQATLSEEVKAIGWKAQLRLHARYRKLLGRGKCQQHVVTAVGRELLGFIWAIGVTVEREQRKTSSSIAA

SEQ ID NO: 58659 - protein, 392 aa, unidentified
MRYVGIDVGSDSHVVAAVTADGTVAFKPTGIAEDAAGYAKLFALLGQAAVALVTMEATGHYWRNLFAALAAHGYAVALLNPLRTRRFAGEDLGRTKTDSIDALGIARFGAQKRPAATRLPDAATDELRELVRHRDRLVADFGDRVRQLHRLVDLGFPEFTRHVKSLDSMLACTLLAEYPNAQAFAGAMPRRLAKLVYDGVHKVGPDLAAALIAAAKVSVGRHHGPAYRIQVRHTCQDLDLLRRRIRELDGDIARQLEEHEVGALLTSIDGIGTNTAARLIAELGDLGRFRNAAALAAYVGVVPGLKQSGKRRGQRAGLCPIGHARLRAALWMPLLVAVRRNPWLEAFYDRLISRGKLPKVALVAALRKLLGAVFAVVRDRKPFVPRLGPAAA

SEQ ID NO: 58660 - protein, 367 aa, unidentified
MNGNEACQTAIEPAASVFVGIDVSKLKLDIARQRLSKVRNKVFSNDRTGFRALAAWLSEDNITPTQAHLCMEATGPYSEALAVWLSDEGWRVSVVNPARVKGFAQSELARNKTDKADAALLARFCAALTPERWVAPSPAVRQLRSLVERLQALKDMHQQEMNRLEAANASDDQLAKVYIAEHVSYLEAAIKRLQSDIDDHIGGQPELSVDAKLLTSIPGLGSVTVAKVLAYAGNVSRFDNAKALSAFAGVCPQQRQSGTSVKGRTLVSKRGHADLRKALYMPGMVAIKHNPLIKDMAHRLKAKGMVPKAIISAAMHKLVHLIYGVLKTRQPFDANWAKKVTEVIETAVSVVVPVKVNMLALDFQDGI

SEQ ID NO: 58661 - protein, 410 aa, unidentified
MERLIERGAGLDVHRDSVAVCVRVPGPGGDRVQHVRTFGTTTEALITLRDWLEAHGVTHVAMESTGVYWKAVYYMLEENCVCLLVNAAHIKQVPGRKTDVKDCVWIADLLEHGLLRGSFVPPPFIRDLRDLTRYRRGLIEERTRQANRLHKLLQEAGIKLASVASDILGVSGRAMLDALAQGTTDADVLADLARGKLRRKLPALRQALTGRFRPHHAFLASQLLAHLDYLDETLETVTARIGEVLAPFAVVIDRLDTIPGYSRQTAEEVIAEVGFDMSVFPTDRHLSSWAGLCPGNNESAGKHRSGRTRKGNRWLRQTLVRAAHAARYRKDTALAARYHRVARHRGEKKALVAVAHALLVTAYHVINEQTTYRELGFDYHDRRDAEQARRRALAVLARQGYRVTLERAAA

SEQ ID NO: 58662 - protein, 315 aa, unidentified
MHKQSSFIGIDVSKNSLNVHVLPEDASYSFPYEAQKIKALIRRLKQHKPVLIVMEATGGYELAAASKISEAKLPVAVVNPRQVRDYARAIGKLAKTDSIDAYVIARFAQDVRPEARENLTLKDHQLKELIMRRQQLVEMRTAEKNRLGTIYSKEVIKSIQRIIKTLDEQIHALDDQLDREIKGNPSWDHKIELITSVPGIGAHTAQTLLFCLPELGRLNRRQIAALVGVAPLNRDSGKLRGIRCIAGGRAAVRKALYMPVLSAATRWNKKLSLFYAQMVARGKKRKVALTACMRKMLILLNAMVKNDRIFDPEYC

SEQ ID NO: 58663 - protein, 361 aa, unidentified
MCQNEVVADLRQWRPPVEQISRIGMDTSKHFFQLHGVNAAEKVVLRKKLRRKEMVAFFKALAPTVIGIEACGAAHYLARLLGSFGHEVKLIAPQLVKPYVKRGKNDGADAEALCEAMSRPSMRFVPVKTAEQQAALMMVGLRDRLIRNCTQLSNAIRGYAAEFGFSAAKGKAHLVPLLERIQADESVPVLARELFTAQAEEYARLQAQIDAVDAKLLAWHKADESSRRLVKIPGVGPIGAVLLMLKTPAPELFRSGRQFAAWIGLTPKDHSTAGKVRLGGITRAGDEALRSVLVVGATSVIQHVRRGGRGSPWIVNLLKRKPPKLAAVALANKMARVAWKLMVTGERYAAKSVPAALANAT

SEQ ID NO: 58664 - protein, 309 aa, unidentified
MALNTLAIDIGKHSFHLFGIDDDGVIVSRKVSRLKLVATVDRLDPKIIAMEACGSAHHWGRMFQEAGRMVRLISPYFVRPFVRGSKNDATDAQAIFEAAGRPTMHFVPVKSLECQDLQSLHRIRDRLVHNRTSLINHTRGLLAEYGIVLPQGAKRFTLQVRQAVVEAELSDLARELFEELLDQLGDLDRRIAHIDKHLIAICRDKAACRRLVGIPGIGPVVATALLAAVDDGRQFGSGRDLAAWIGLVPRQYTTGGKPRLGGIGRRANHYLRRQIVHGARAVMSQAGRRSDPRAEWMKAWQLGVASTAR

SEQ ID NO: 58665 - protein, 317 aa, unidentified
MTTPGIYVGIDVAKDELVVATTTAVICRVANDPGGHAMLVKRLSGMTVAAAVLESTGCYGQAAVSALMAGGVAVAVVQPGRVRHFARSLGVLAKTDPIDARVIAQFGEATKPRVYTAPAQEVVHLRALVDRRDQIIELRKQEQNHLEARPAAFIAKDLRASIKRLTKAEKAYTKQIAEHIAKHDRLARLSEALQEEAGVGLQTAATLLAHLPELGDLNRQQVAALGGLAPYDSASGTHDGKRAIYGGRKRLRRALYLAAVTAGRCGTWLKDVYLKLLQRGKIKKVALIACARKLLIRLNTIAAKALSEPAPKQATTA

SEQ ID NO: 58666 - protein, 297 aa, unidentified
MLTESGYKERHPQQASAKTLFDFLKKHFPDGEYHAVYESGFSGFSTYYALKEYGINCVVTHAADVPTTQYEEVMKTDKVDAAKLARSLRAGDIRPIYIREKENIDDRSVIRIRKTIQKQLSGYKARVKHLLHCNGVEIPEQFARPGTHWSRAFIKWLKEDVVLLSSSRLSLDLLVKQVETIRQTLLDATKSIRRLAQTNRYRNNYELLMSIPGIGVSVAMCILTEIYDVKRFPNENQFASYLGLIPTCHNSGEKTASGEKTFRGNKHLGPMIIEAAWIAIYRDYGLGMAYAGIQSSP

SEQ ID NO: 58667 - protein, 343 aa, unidentified
MTKDTMIGVDLAKSVFHLHGASMTGQVKFRKKMSRMQFRKFMADQAPCVVAMEACGSASYWARELVKLGHEVKLLPPQYVKPFVKRQKNDAADAEAIVIAAQRPEMRFVEPKTAEQQARAALFRSRDRLVRQRTSQVNALRGLLYEFGYVVPERIEHLNRLAEIVEAPESELPALVREECRDILTQIGEQTARINTKGKTLKTLAKEADMARRLQTMPGVGPMTALAIEAFGPDMAGFKCGRDFAAWLGLVPKQHSTGGKSRLGKVSKAGQADIRRLLIIGAMSRLNWLGQRSILPGSWLARMLARKAKGLVAIALANKMARQIWAMLTKSEDYRDPAQTAAA

SEQ ID NO: 58668 - protein, 449 aa, unidentified
MSTLETQPIPAVAQPPAFAAHIGLDWADQKHFWTMLVDGHKTRGQLDNTPEAIEVWAAELAQRLGGRPVALALEQSRGAVIAVLSKYAHLVLFPIHPTSLANYRKSFSPSGAKSDPVDGDLILDYLVKHPEQLRCLRPDTVETRSLQFLTEERRKLVDAHTATLQTLIHWLKQVFPQIMRWFDDPGAPLVADLLLRWPTLQELQKAKPKTLLRFFHQHNCRSEERTQERLQQIRQAVAATDDPALLQAGILSIQNGARILAGMRQGIAEFDRQIAVTYQAHPDRFITESLPGAGPALEPRLIAAAGSLRDRFDSAYNMECCFGIAPVTEGSGNSLWIHWRWACSKFLRQTFHEWAACSIRTCDWARQFYDRQRANKKDHHAAVRALAFKWIRIFFRCWRDRVAYSDQRYEQALRTRAAQSKPVPTNSKLDFSVEWKSCGGFSKPAKLSS

SEQ ID NO: 58669 - protein, 393 aa, unidentified
MRLAIGVDVAKDMHWVTALTEHGDVVLDRRVVNTPDELAALAAELVALGGERTVGMDVVGGIASLATAVLLDAGERVVHVPGLAVNRARQGTTGGEAKSDPRDARVIAEQVRTRRELRPIAAESAPLVELRLLVGRRRDLVVEQTRRLARLHDLLVTIHPGLERRLDLTTKGALYLLTRYVTPAELRRAGRARLVSFLRTCPHLQRLEALAAAALEAAHEQRLALPGEAVAAVLCRELASDALRTRERLGTLDQQLTELLARHPDGTLILSLPGMGVILACEFFVEAGSLARFASPDALAAAAGLAPVLRQSGKMRFLRRPRGGNKNLKRILYQSAFCSLQHPVSRAFYDRKRREGKRHHQALIALARRRVNVLWAMLRDRHPYQVRPAGQAA

SEQ ID NO: 58670 - protein, 474 aa, unidentified
MSKSKQQPSKGGAPGPTIAKSKRASQQKQAEHPVFQPNAAGIDIGAREIYVAVPADRDDHPVRKCGTFTEDLNEMAAWLVSCGVTTVAMESTGVYWIPIYDAVERHGMQPCLVNPRNMKNVPGKRTDFHECQWIQHLHAMGLLHAAFRPDSEVCAVRSLMRHRNDLVEMASQHVQHMQKALTQMNVQFQHVISDLTGLTGLAILDAIVEGERDPAVLAKLRDPRIKASEETIRKSLEGNWRAEQILVLKQRLSLYRSYRLQIHDCDPEIEKLVAAFTPKIDPQEKPLPEDRKKRQRQRKKKSGHPDFNMRTEAYKLFGVDLTQIPGLMALVFMLFSEVGRDMSRWPTAAHFVSWLGLCPDNDISGGKVLWRGARRTKNRAGTLFRMAAHSLYRDQNPIGNYLRRMKAKLGPTAATTATAHKIAIIFYTMVKQQVEYDASLWEQRDALRDKRLEARLHKQAAQRGFKLVPLEPAA

SEQ ID NO: 58671 - protein, 317 aa, unidentified
MTELNSPLFIGADVAQDAIVVAHHGQNTSCSIANTPTALKAWLKTLPSGARIGLESTGRYHEPLALLAHRAGFIVYVLNPKDVRHYAQAVGKRAKTDHVDALVLARFIAHELTGLHPWQPPTRRERQIDSLLKRRAAVIKAQGMLRQTLAQLTSLKTDSQAALASLAKLIATIDRKLEQAVAADVVMQAKAECVQSVPGIGLLTGTALVNLFGRLPTARADALVAFTGLDPRPCDSGKKRGTRRLSKRGPSELRRLLFNAAMAAAKTRVWKPFYDRERAKGLPTTAALVCLARRLLRVAFALYRKNVHFNPDAINCA

SEQ ID NO: 58672 - protein, 394 aa, unidentified
MKLVGIDVGKNSHHFCVMDKETGEFNVTPSSFPNNKEGFDFLINSLKPYSKKSILIGMEDTGHYHVALLKFLLSNGYPVALINPKTTDLTRKMEGGITKNDKLDTITICDVLDTPERKKQYRITKVDRFDLYEQRQLTRHHHNLKEELNVYCNRLQKSIDLVFPEFNTLFSSKYSIVYMNLLKTFGSAEAIASTDIRTIRKCFEIKGKGNRISLTPEKLKECAKNSIGISSEVETIQIKHLVSQITLIKEQIAEIDKKIEEFSIPNNSPILSIPGISHFSGTSILAELGDIGNYSKPSQIIKFAGVAPYHYESSQYNAQHTAITKKGSKYLRKTLYQIILPVINNNPVFKKYYLLKISQGKGHRCAQGHCIRKLLRIIYHLLETGQSFDPALLR

SEQ ID NO: 58673 - protein, 427 aa, unidentified
MLGVGIDWAEEFHDVALGRPGDGVFDEIHVDHTPAALDALIARIVALEPDAAEVRVVIETRHGLLVERLVDAGFTVLPVNPDLIARRRGPAKKKDDAEDARIACLLALDRFTDLRALVPHGEQAGELRAIARDDVRAQRDARRLLNRLRADLIATFPAALAIAGDDMAAPTFLKLLQRWPTADALASAARDELEAFARSCRHGWPDRFTDKVTAALAADQLAAKPYLVRAKADTIRLAAAQLLLIHTQRHAWEKRMGALLLGAPRTGRANQPGDDRGPAVPGGEIYLSFPGLGDRLAARIAGEIGDITTFTAANALQCYAGKAPVTRRSGKSELTVATRLACNRFLADAVQQWAFTSLTKSGWAREFYDAKIAIGNNHHKALRALGNRWLEILWHCLTHGVAYDEATHVANRNRALGRLNEPAKRVA

SEQ ID NO: 58674 - protein, 343 aa, unidentified
MQIRSVGIDLGKTTFHLVALGDNGKVLLKKKFTQRQLITFTANLQSSLIGLEACSGAHFLGRALREQGHDVKLIPAQFVKPFVKSNKNDFLDAEAIAEAVDRQNMRFVPIKTDDQLDLQALHRVRDRLITRRTSVINQLRAFLLERGLVFAKSPAKLRERMPETLENAEEDLTPRMRNLLALLWNEWKDIEQQVVDLNLEVELIASSDAACLRLRQIPGIGPLVATAIVASIGNGAAFHKGREFAAWMGLVPKQYSTGGKAKLSGISKRGNRYLRKILIHGARAVVLRCKRERVSMGAWMTALEMRAPRNVLIVATANKLARIAWAVLSSGQDYRAGQDPVPA

SEQ ID NO: 58675 - protein, 380 aa, unidentified
MRNVRFIGLDVHAETIAVAVAEPGGEVRSLGTIPNRPEPVTRLIRKLGKPEQLRACYEAGPTGYVLYWQLSELGVKCEVIAPTLVPVKAGDRVKTDRRDAEKLARCYRAGDLTPVWVPDAAHEALRDLVRARLAAKRDQLRARNRLAKFLLRHGRRAPEGTTAWGTQHLKWVKGQSFEQAAQQATLVDYMHEVEHAAERIERLELSIDTAIETLPQKLRAVIEALQCLRGIAKISAVSIMAEVGELSRFESARQLMGYSGAVSREHSSGERIRRGSISKTGNAHLRRIVIEAAWAYRHRPGLGATLLARQREQSEDIKAIAWKAQHRLHSRYAKLLAKGKPKQQVITAVGRELLGFIWAIGVTAERSQANAPRRALKRAA

SEQ ID NO: 58676 - protein, 373 aa, unidentified
MTYRIAGIDVHKRMLAVVIADVAVEGEYQFERRKVGTSPSELCRLADWLVAQHVEEVVMESTAQYWRPVWATLEQRWRLQRLQESDGARSGQLHLAQAQSNRGAAGRKKDFPDAERLVKRLVAQELKLSFVPDVEQRLWRTIMRRKHQLTRNRVQFQNRLECLLEEAHIKLSSLVSDLLGKSARYMLQAVAEGETNPETIAALADHRLRATASQLRDALGACRDLHPVYRQLLKMALEELKLMEEQIDKLEQEMANLLSAQQDVVQRLAEVPGLGVDSAQQIIAEVGPEAAAFPSAKHLASWVGVCPGEEESAGINYSHRSPKGNRQMKAFLNQAADAAVKTKGSIFEFIYRRLVVGSAMLRRSELSRTVCVD

SEQ ID NO: 58677 - protein, 310 aa, unidentified
MDGCFVGIDVSKRRLDVHVLPQGEAFHVPRDEAGVAALCARLSGLGVSHVAVEATGGFETVAAAGLAGAGLPVVVVNPAQVRHFARALGARAKSDAIDAAVIARFVAATRPAIRPLADAAARLLADLVARRRQIVEMIAAERQRQTRATLDRVRKSLARLIAALEKELAEIDAEIDGHLRGSPAWRAAEDLLVSVPGVGPVTARTLIADLPELGRLDRHKIAALAGLAPHTRQSGQWSGKRFISGGRASVRTALFIAAQVAKRHNPVLKPFYQRLIAAGKPKMVATIAVARKLLTILNAILRSQTPWQNA

SEQ ID NO: 58678 - protein, 379 aa, unidentified
MEVFIERCAGLDVHSETIVACIITGKQNDELIKETETFPTLTKDLYRLLKWLENHGVSHIAMESTGVYWKPVFNILEGFFDITLANAQRIKNVPGRKTDVSDAEWIAKLLRHGLIEKSFVPPVDIRELRDLTRLRKKWIGHLTSEKNRIQKVLECSNVKLSTVISDVFGVSGRKLLERLVEQGYVDASDVEERIHGRMAPKKQMITDSLYGTLNDHQRFLIRQSWSHIEYLEKLIKEIEERVDTLLQNYQEELQILTTMPGIKKDTAAIIIAEIGVEMSQFPTSQHLASWAGVSPGNKESAGKRYSTKAVKGNPHIKSAMCEAAWAVSRCRNRWLATKYWSIAARRGKKKALVALSHRMLRIIYSMLINKEPFKEMQIS

SEQ ID NO: 58679 - protein, 365 aa, unidentified
MQKISTMRTSGKNIFEGQLTIGLDLGDRSSAYCVLNEAGEIIFERKLATTPEAMKQVFASLPRCRLAMETGTHSPWVSRLLTALGHEVIVGHAQKVRLITKSRRKDDRLDARTLARLARIDPELLSPVKHRSAQAQLHLTEIRGRAVLVSARTALVNAARGLVKSYGERLRKCGTQQFSRETTKGLSTGLREALDPLLQEIESLNDRIKEYDRRIEKMAKQTYPETALLKQVKGVGDIIATAYVLTIEDAHRFRKSRDAGCFVGLQPGRRNSGESEPQMRISKEGDEYLRTLLVQGAHYILGPFGEDSDLRRWGLKLSARGGKNAKKRAVVAVARKLAVLLHRLWVSGEVYEPLRNSQKPMSAAA

SEQ ID NO: 58680 - protein, 441 aa, unidentified
MTWDLIDKFLSSSKITEMGENMKAKKKAKLDLVGDDTLVVGIDVGKRNHYCRFINVRGYEIGKGFSFSNNRDGMEKIVSKIEEAKIQNNLGKAVIGMEPSGHYWKASAHYLSGSGYKLALVNPYHIKRIKEIEDNSQTKTDPKDSLLIAKLVRDGDFFDPNLAGGIYAELRRMYRLRLKVSKSLVQEKTKLKILLDEYFPEYEDLFYDILGTASKYIIDNYFLPESIASENILFLTGKIKMISRGKIGASKVLKLLEYARTSIGINTGIDAAVLEKTYILESISNLKLKLAQLNKKLKCYLEKIECSKYLLSIPGVGVVTAAGFLGEVGDISKYKSAKEIIKLAGLNLVEISSGIKKGKKKISKRGNNRLRCLLYQCAVVAISKNSQLKRYFSYQAETKNKMKMVVAVQCKLTRIMFALLKYKKYYDPEEVLKSMVAQEVA

SEQ ID NO: 58681 - protein, 346 aa, unidentified
MGIVGALDIHRRQITFDWVDHGSGESGRGRISPADRVGLRKWLEQFAGKPVELVVEGCTGWRFVAEECQSAGVTVHVADPAEAAGPRNRKMRAKTDKIDARKLRLQLEKGDIHDSWIPPWQVLEIREKVRLYLDLTEDRQRWQKRIHATFFHQGVPKPDGRLLRGDNVKLGLDDPDLSPAGAQAVDVAMRIITTIDADLVKLRAELTAFGRRHPGPRELAHEYGLGALLATAVWEELGDTRRFTASKQAVRHAGLDISIYDSDGKQRGGPKLTRQGPPALRWALYEGALHAHKKTSPDNKYYLHLAHHIGGGRARLAVARKLARRCHHRLRALGDQAWIELPTYNT

SEQ ID NO: 58682 - protein, 349 aa, unidentified
MTIVEDRPVITGGVDTHADLHVAAALDPLGGLLGVQEFPAAAAGYASLLGWLGGFGDIALVGVEGTGSYGAGLARHLAAAGVRVVEVDRADRQDRHRQGKSDPLDAVSAARAAQSGRASGAPKGRDGAVEAIRALMVAKRSARAERTQAINQARALIVTGPDELRARFAGHRPAQLVEAIAALRPRPGDVPGYATRVALRELGRRAQFLDAQLDRLDELIGPLVTARAPGLLSLHGVGPDTAALLLIAAGDHPGRLRSESSWAHLCGVAPIPASSGKVSRNRLNRGGDRQANHALWRIVITRLGSRPGHPATRAYVERRAKEGLPEKEIIRCLKRYVAREVYHQLRGSA

SEQ ID NO: 58683 - protein, 338 aa, unidentified
MAIVTIGIDLAKNVFAVHGVDATGKAVLVRPSVARAKLLELIASLPPCLIGMEACSGAHHWAREFAKFGHTVRLMAPKFVVPYRLSGKRGKNDAADAAAICEAVTRPQMRFVPVKTLDQQGQLAVHRARQGFVEQRTATLNRIRGLLAEFGVILPLKAAVVRREATRHLEDLPGWANTVVGDLLSEVTRLDERIAQYDRHIATMASESAEIKQLMQLPGIGPTTATALMSTIGNGRDFKCGRQLSAWLGLVPGQYSSGGKARLGHITKAGDPYLRSLLVLGARAVLQLAKSKTDPVSRWANALAERRGYWRAVVAIAAKNARMCWAVLNKGEAFRLPA

SEQ ID NO: 58684 - protein, 440 aa, unidentified
MSRERSERRTATEAAKERKEDRTTLSSGSETGSCRKVCPSSKGDDGGQLPPKTAGWRDGRQSRIREEPVLNQGITFVGLDAHKQSISVAMLLPDREAAIEWELVNEAAAVRRMVRKVEREAPGEVRFCYEAGPCGYALQRQITEAGEASCMVVAPSLIPVKPGDRIKTDRRDARKLAELFRAGLLTEVQPPSESDEAVRDLCRAREDATEDLLRCRHRLVKMLLRRGLVYTGGKRSWSGGHRRWLKQLRFDNPVDQAVLDDYLLAIEQVEERLKGLGEKLEQVSRQAPYAEAVGVLRCFRGIDTVTAMTIVAELHGFGRFTSPRGLMAFLGLVPSEHSSSTRTKRGSITKAGNSHVRRVLVEAAWNYRHRPGTASLKKRRQGQPAEVIALADRAMQRLHRRFSRMTNAGMPRPKVAVAVARELVGFIWAALYPLSERKAS

SEQ ID NO: 58685 - protein, 466 aa, unidentified
MQEHKHMNRKHRKKAVNEPQGWSLNLDVVHPNAAGIDIGNESHYVAVSPDRDPIPVRQFACFTEDLHRLANWLKSCGIVTVAMQSTGVYWLPVYEILTEEGLDVFLVNARHTKNLPGRKTDVQECQWLLQLHTFGLLNNSFRPPEEICVLRAYWRQRGEHVASASACIQRMQKVLTEMNVQLANVISDISGLTGMAIIQAILDGERDRYKLADLAHARIHATREEIARSLEGNWRKELLFILQQERNLYLIYQQQIAECDTALALHLQSLDNKSEPGSLPPATRASKRAGSNAPTGFDLRGELYRISGTDLTQIEGINIMNAQTIISEVGVDMSRFPSEAHFASFLGLCPDNQITGGKVLRRGTRHVENRASTALRMAASSLSRSKTYLGAKFRRLRARLGAPKAITAMAHMLARLVYRMLKYGEQYVDKGMTYYEEKYRDHEIRNIQKKAKELGLDVTLCPATAA

SEQ ID NO: 58686 - protein, 337 aa, unidentified
MIIIGCDFHPSFQQIAVFDTATGATTNHKLMHATGEAERFYRRLTSAALVGIEAVGNDQWFVQLLQKLDHEVWIGDAAQIRASYVRKQKTDRRDAKHILQLLVEGRFPRIWIPGAEMRDHRQLLIHRHKLVQIRTRVKNELQHLMLNQGMQKRQKLWSAEGRTALASLPLEPWTDRRRHDLLNLLSMLDGQLEDLNIAVTQVAKRYPEVSLLMSQPGVGAVTALAFALTIGDVRRFQRSKQVASYLGLIPREYSSGGKQRMGGISKQGNRLLRFLMVESANIAVRFDPVFRKEYLHRCHQKHFTVAKVAAARKLAIRMYWILRTQTPYPQVLSSRAA

SEQ ID NO: 58687 - protein, 345 aa, unidentified
MNIASVGIDLGKATFHLVALGERNKVLIRKKFSRAQLLAYTANLPASLIGLEACAGAHFLGAALQGQGHQVRLIPAQFVKPYRKSNKNDFLDAEAIAEAVTKQNMRFAQLKTQEQLDWQALHRVRDRLVQRRTALINEIRGFLLERGITFAAQPIHLRKNLPAVIEDAEQNLSPRLRWLLDRMWQEWKQIETDIEAITEEIERISNEDARCRQLRQIPGFGPLVSTATVAAIGNGSAFRRGRDFAAWVGVVPRQYSTGGKQKLYGISKRGNIYLRRMLIHGARSVLFRVKYDTGGFGQWVHRLAQRAPRNKVVVAIANKLARIAWAVLSSGQDYRHQPLLQPAAA

SEQ ID NO: 58688 - protein, 404 aa, unidentified
MNYTAAFDVGMGKSYMVLYDEQACILQKWISHSKESFMQLKRLFDVHFYNEFDSLDIVFEATGVYSKPLERFFLTEGYRYSKLNPLEASFQAKTLRRNKNDKADAHSLAKSYMVNKTNFYKSSDKRYDELKQLSRYYSEIDEELSIVRGRLHSCIQATFPELEQLFTTKSHLFLNIVQIYPHPQLILKDSKTIIKNKIIKHTQKNISSSRAQNKAKLLIEAAQNSYPAVDELHPVILQVQHYARRYQELMTQKDEITDLMYTLTKGLPEYAILLSFPGIGVNSAVRIVAELGDIRRFDNSKQINAFVGIDVRRYQSGKFQMRDKINKRGNKKLRKILYLVILNMIRNKSTEKNHIKEYYYKLKADPMNKCHKVAVIAAINKLLRTIFYLVKQDVLYDYEKAITH

SEQ ID NO: 58689 - protein, 410 aa, unidentified
MEPIVESCAGLDIHQASVVACVMSGPLDKKPNKQIRTFGTMHADLTELADWLASCGCTVVAMESTGVYWKPVHVILEDRFDVIVGNAHRIKAVPGRKTDVKDAEWICDLARHGLIARSFVPSKAIRALRDLTRYRRKLTETASTERNRLIRLLESAGIKLAGVVSDVLGVSGEAMIRALIEADRTPAEMAQLAQRRMRRKIPELERALRGDLGEHHRFILRMQLERIKAAETDLARLDQRIADHLAPYHGALSRLLGIPGVDRVTGSTIIAEIGVDMTLFHGAQQLASWAGLCPGSHESAGRRRGGKTSRGNIFLKAALVTAAVAAAKKRGSYLADKYRRLSARRGKLRAAVAIGHKILVEAYHILHDGTYHQDPGPGYLDIIDKRRNSKQLVRRLNQVGFEVTLAPKAP

SEQ ID NO: 58690 - protein, 345 aa, unidentified
MNNVPLFVGLDYHQDQIQVCVVDQAAVVRVNRACVNDAAVVAGLLRSCGGDVRAVAIEACCGSAAFGEALAALGDWRIELAHAGYVARLKQSPDKTDFSDGHLLADLTRVGYLPRVWLAPPHVRDLRQLVGHRQRLVDRRRALKLQVGAVLREQRVKIDAGPSRWSGGWVARVRDNDRLSEQARWIVNDLLEEIDHAAAKIAAVEQRLRQVTTGDAPIGPLVAKLRTIEGVGDVTAWMLAAWIGRFDRFKTGKQLSRYCGLSPRNVSSGNRVADAGLIKAANAQLRAVLIQAGHRLIRTDRRWGALASRLIARGKPKNVAVAAVANRWVRSMHHRMIEPVACVRA

SEQ ID NO: 58691 - protein, 317 aa, unidentified
MTTIITLTAGIDTSKARLDIAIHGRPERWQVANTLPGWRSLAAELAKAGVTRAGIEATGGYERGVVTHLRAAGLAVVLQQPIQVRAFARVHLRRAKNDALDAALIAACTAAIDHPKIEPDARLSGLTGHLTFVEQIEEDIARLKVRLEHVDEPRLRRVVMADIARLKARRAAELLRIVRTLRTHDDLSHRLDLVLSVPGIGERTALAIVVRMPEIGRVGREEAAALAGLAPFDADSGTHKGQRHIAGGRARLRRSLYAAALPAAFRWNKALIALYARLTARGKAHNAALVACARKLLIFANTVVQRGTPWTEQPTAT

SEQ ID NO: 58692 - protein, 341 aa, unidentified
MSEVSTIGLDLAKRVFQAHGADASGKVVFRKRLRREQVLAFFAGRPACVVAMEACSSAHYWAREIGELGHTVRLIPPAYVKPFVKRQKNDTTDAEAICEAAQRPTMRFVSVKSEAAQANAVVFRARDLLVRQRTQAINALRGHLGEYGVVVAKGPSHVAQLIAHVEDPDAGIPEAARTVLRVLTASLQFLSERIDLLDREIARRAREDKEVRRLTTIPGVGPVIATALAAMAPPADAFKRGRDFAAWVGLTPSQHSSGGKQKLGATSKMGERTLRRRLIIGASSVVQKAIKHGTPSGSWLGRMLARKPRMLVIVALANKMARTVWALRATGEIYRAPIVAV

SEQ ID NO: 58693 - protein, 410 aa, unidentified
MELLHRRCCGLDVHKETVVACLRLVSDGKVTTEVRTFQTTTVDLLRLSEWLAANDCTHVAMEATGVYWKPVWHILDDGEFELVLANAAHVKNVPGRKTDVNDAMWLAELLAHGLIRASFVPDTQTQEMRNLLRTRKQLVREQSSHVLRVQKTLEDANIKLDSVLSDLMGKSGRAMIEALIAGETNPAKLAALADRRVKASHEEFREALRGRVTKHHRFLLRLHLNQIDALDAAMATLDTQVEANLGPFRTAVELIMSIPGIKNLGAHVIVSEIGIDMSRFPSDAHLISWAGICPRNDESAGKRRSNRLRKGAPWLKTTLVQCAWAAVKKKNSYLQAQFYRIKARRGPKKAIMAVAASILTAIYHMLKDGTMYKDLGCNHFDRRSTDKQKQRLVKRLAELGYVVEIKPIAA

SEQ ID NO: 58694 - protein, 307 aa, unidentified
MTAAGIDVCKASLDLAVDGQLGVVGFANNRAGIAKLVKRLQALGATRIVVEATGGYEEPLLEACCDAGLWIARVNPRQARAFANATGELAKTDDMDARILALMARLFADRLRPYVAPPPWQRELRDWLRRRGQVVVLLQAQKQQAAMAPASVRKLVARTIAALVRELATIEKTMKALINEYATPALRSSKGLGPVFQATVLALLPELGHLDRRQIAKLTGVAPMNRDSGQGQGKRRIRGGRAPVRVALYMATLSAVRWDPVMKAHYQQLRARGKLGKVALVACMRKLLGIINARRRDELRDEALALA

SEQ ID NO: 58695 - protein, 345 aa, unidentified
MQIKSIGIDLGKTTFHLIALGMRSQVVIRKKFSRSQLLVYTANLPPSLIGMEAGVGSHFLGRALREQGHEVRLIPAQFVRPFVKSNKNDYRDAEAIAEAVERENMRFVPIKTEDQLDLQALHRVRDRLVARRTSVINQIRAFLLERGISFRKGPASLRQQMPGILENADEKLSTRMRRLLDFLWQEWKGLQVQIESLNRDLEQIASSDPSCVRLQQIPGVGPLVSTAVVSAIGNGAAFKKGREFAAWLGLVPRQWSTGGKAKLLGISKRGNPYLRKMFIHGARAAVLRVKREGSSLGQWMSGLETRTARNVVIVATANKLARISWAVLASGNDYHPRHPALGFSN

SEQ ID NO: 58696 - protein, 346 aa, unidentified
MLHVGLDLSRKRLDFHLLDAAGETVEVGAAPPDGDGLRGFAARLARHRQPVRGAIESMTGARFVHDQLELHGWEVEIADAVKVKGLAPLACKTDRIDAWVLAELSRRELVPAIWMPDPAVRAERERARFRLHLVRKRTSLKQRVHATLMTHGRPCPVSDLFGVRGRELLARLALPEPWAGDVEASLRLIDELEREITAIERELAALGANHRYVPLLTTIPGIAWVLAYTIAAEIGDIARFPSPRKLAGYTGLCPRVYQSGESDRRGPLAKTGPRYLRWALIEATTHASKHPLYRERYQRTKSRLGKQRGPKVAQVDLARRLAEAIWHMLTHNRPFAPAGATAPMTA

SEQ ID NO: 58697 - protein, 410 aa, unidentified
MEGAVVGPGPEPTRFVALDVHKQYVMVGAVDARQEVVVPPRRVALVEFPEWARDHLTPADAVVLEATANAWSLYDCLTSLVATVTVAHAGVIKLIAHARVKTDRRDTLHLARLLAARMIPAVWVPPVEVRELRGLITHRRRLVAQRVQAGNRLQAVLHRHRIVPPVGKLFSRQNRAWWADLPVSTSERLRVRQDLAVVETLDALVVEVEAELGRLSTTTPWADQVPYLVQLSGLGVLAAMTVLAAIGDITRFPTPKHVVGYAGLGAGVHDSGQTHQGGRITKQGRRELRGAMVEAAWVAVAHHPHWKEQFARLSARLGAQKAIVAIARKLLVVVWHLLTKREADRAGNPEAIARKLYTWVSRCGTTPGRQRPLGALVRRELDRLGIGAELTVTGYGRCPLPPPGVTAHAG

SEQ ID NO: 58698 - protein, 474 aa, unidentified
MIKSVGIDFHQGKHVVRCLDERAQLCDSFSFQTTPEGLDTFEEHIFRDGSNPVIVFEPAGLTWFMMAICIRARHPDCRLVRAKGQKVAALRRYLRGSSKSDRLDALTLAKMVFIDPEQLDEVYLPPAKIHALQRLARQRKRLESDIAARKTRIGAIVESYVPGVRKAFSDPWSAQARAFLRCQLNPLAVAHDGEKALHSFLVGARHRNKTDKAESHRVFLVCKSAADLYQLSSRAEAVDDEFFSVFQEEIERELRLMELEEAESEAIAKRMEELYRELHPSDNLRSIPGVGRVTAPTFLATVGDPARFHNQSAFVNWTGVVPKTRQSSEVEAKGLRMTKAGPAIMKWALFQAGDIGRRFDPQLASLYYREMVHHGKNHKQAMGAVMSHLAARVLKVLQDGRPYELRDNEGKAISPAEAKKLIIHNYQVPENIRRERRRRNPVKRSYLKSQGTLLPRTNEAAVAPQPVKATIPEN

SEQ ID NO: 58699 - protein, 336 aa, unidentified
MTTEPGAVIGGVDTHKHTHYAAVIDDYGRLLGHQRFPATDPGYRDLLAWMRAHGTIEAIGVESTGSFGATLARALTAAGERVIEVNRPNRLARHMDGKSDRLDAEQIARAVLVQTSTATPKAKSGTVEVIRTLRVTRSSAVKARTQAFNTLFAVMISAPSLLRDELVNLTKKTLVNRCLRLRPETDDLGTLTTEPERLLLAGIKTSLRDLARRWKSLDDEIKSLDRQIDVLVRAAAPQLVQLHGVGVEIAGQFLVTAGDNPERIRNEAAFAKLCGVAPQPASSGRTTGRHRLSRGGDRAANTALYIVTGLLQDWLTLHLWDEVLLEGCRCAQEVPA

SEQ ID NO: 58700 - protein, 415 aa, unidentified
MADQRQWYAGVDWASESHHVFVTDGDGRKIGERVFKHSGEGLAEMAAWLMAASGAADPSQILAAIEVPHGPVVETLLERGFKVHAINPKQMDRFRDRFTMAGAKDDSRDAEVMSSALRTDARCFRLLAVADPMVCELREWSRIAEELGVERNRLTNRMREQLWRYFPAFLEFDSDLRAGWLLDLWQAVPTPDKAAGVRETTIAKLLKRHRIRRFDAAHVLSVLRKPPVQVAAGTIEAASAHITTLIARIRLVNRQIEQAHQRLDSLIARLSPPEEAAPGQNKQHDAEILASLPGVGRIVLATLLAEAHDALQRRDYAALRSLTGAAPVTKRSGKSCTVIRRHACHARLAGAMYHWARVATQHDPTSRAKYAALRSRGHSHGRALRSVADRLLNVACAMLRAGTTFNPDRAVQKTS

SEQ ID NO: 58701 - protein, 373 aa, unidentified
MKKRSSPGKSQKRTAKTKGTQERVTIGIDLGDKTSRYCMLSNEGGILREGQVTTTKAGMVEAFGPLGRARIAIEVGTHSPWVSRLLQKLGHEMIVANPKQVKLITESSRKDDRLDAQTLARLARIDPQLLRPIQHRSENAQGALMVIRVRAALMAVRTSLVNTARGLAKSMGERLPKCDADQMGVLQAVSLPPKLRHVLEPLLKEVESLTEKIKDSDREIEQIARKDYPETALLQQVGGVGPLIALTFILTVEDKDRFEKSRDIGCYVGLRPRRSDSGQSQPQLRITKEGDPYLRTMLVQGAHYIISRRGPDTDLKRWGLHLAKHGGKRGKKRAVVAVARKLGILLHRLWVTGEVYEPLRNHNARQEQKKVAA

SEQ ID NO: 58702 - protein, 388 aa, unidentified
MTQTLTAASKSVALDYDKTLVVAIELSNVSWVLAAQVPGLPRRKAKRSVEPTAEALMAAINGYRNRAREAGRMVERVVAVYEASWSGFWLARWLERGGIEIHIIQPSSVPVDRRARRAKSDGIDAELLLRTLLAWLRGEPRVCSMVPIPDEADEDARRFIRERAELVAERVSLVNRIAAVLATLGVRDYNPLLRNRRGRLDELRTALGTALPPQARAKIVRMIDRLELVQAQVAELDQERDAVLEDTAPDKAAKMIQQLATLRGVGVQSATVLVREAFVREFPNGKALGSYAGLTATPYSSGGAEREQGISKAGNRRLRTVMVELAWLWHRYQPGSVQVTWFRERANAAGRRARKVMIVAMARKLLMALWRFATQGVIPEGAVLKPAA

SEQ ID NO: 58703 - protein, 380 aa, unidentified
MEKACGLDVHKDSVFACILDEQGKKIFEKRYGTLTPNLMELRDTLVAIGCGRVAMESTSIYWMPIWHVLDGDFSLTLANPYFIKQLPGRKSDVKDAQWIAECLQKDLIKSSFVVDGVLQQMRQYSRQHRRLTKNRVRLEQQLDNQLQRCNIRFSNYISNQGNNVSMRKIINALIVGTRDAVQLSRLVHGRTINKHSREVITDSLDGVIQQVDVEILKQCMEQINIIEQQQATCLNHLEELANTYYAEEISLLCTIPSVQTLSALFILAEIGNDMSAFSSASSLVGWAGLRPRNEESAGKIQSRKTLHGNKYLRQILVEISWSAARSNKSFLGKKHSVLAKRMKSQKALIAITRKMLVIIYNVLKTKKPFDPNRNMQALAA

SEQ ID NO: 58704 - protein, 414 aa, unidentified
MEEQQAVKRYYMGVDWGDRSHQVYVGDEEGKKVREMKVQESPEGLAEIGRWLDERRAEGIELWAAIEKPHGRIVDFLLDHGVEVYPVNPKALDRVRDRYRMSDSKSDAFDAYVLAEFLRTDQAHLRVLRPSSEKAQELKMLTRDQHRVVRHKTRLLNQLTNTLKEYYPRPLEVFEDLETEIALDFLQQYPTPAHLSALKRKQFNRFATQQHSLSKQRCEQLWEKLQKPQLVVPEHVVRAKAQLLEVLIEQLRASIKAVKIYNHKVESFFASSPDAPLAQTLPGGKSGTLVAAIWAELGDAQGRWQSSRHLQAEAGAVPVTKASGKSRVVEFRFACNKHLRYTMYWFSFGSLRHCEWAKLYYREQKAKGHTHSEALRALGAKWLKIIFVMWRDHKPYDENFHLANITRQKMRQAA

SEQ ID NO: 58705 - protein, 340 aa, unidentified
MPSMQIGVDLAKSVFEVAVSTTPGRVQERRRLSRAALTSFFAAHPPAEVLLEACGSAHYWGRELQRLGHTVRLLPASDVARYRDGNKTDRADAKALLEAARNERISRVPVKSVEQQAVVALHRLRQGYLQTRTARINAVRGHLREFGCVIPVGASQVLPRAYAALDQDAVPVLLRPALQTVLEEIAALEAQAEAVRTELTRLADQMPDAQLLLTVPGVGVLTATALVAFVGDIHRFRSGRDFAAYLGLTPREASSGYVRRLGAITKRGNTYVRMLLIHGARSALRAGTVTRHPDDLRVWARALAARKGHNVAAVALANKLARVCWRVWYDQRPFERREPQ

SEQ ID NO: 58706 - protein, 361 aa, unidentified
MATLRLMDASSQAPERPAAEARITLGVDLARNKWVHALHWGEAVRRQLVTPGGLEHVQALVREYHPAHPVRLVYEACGFGYELAWWAQAVGIEVVVVAPSRVERVPGTRVKTDRLDAHTLATKGAAGQLKGVAIPTRTQHEQRQVLRTYLQVTHDRARAQVRTRSLFQEHGRLGPPPRSGWRAYERWLAQQVLPAPVAAAVAELRALRTAASASAGRLKALLLGLAASAEHRAVVAALTTQAGVAEFTAMRLILEIGDLQRFHSGAAWVNSFGLTPSEYSTGDGPAHRGHIQKCGNASLRAALVQCAWVAIRTDATLRTVFDRLAPRLGKKRAIIAVTRHLALRLRARWLEALATPPAAAA

SEQ ID NO: 58707 - protein, 415 aa, unidentified
MKKVQNTRGYERYMALDIHREYLLVGAWNEEKDWVLTPRRVSTEKFPEWAKKNIRAGDIVVLETTTNVWATYDIVAPLASRVLVANAAEVEEIAKARVKTDKEDIKKLLKLLVGGIVPEVWVPPMHVRELRAFISYRGRLVKTSAMIRNRLQSLLHKHNLKISETGLLDQAWWEAQKDISPLEKMQIRQELALLQEVEKLKLAVDEELQSQSTSVLWGKPALQLMQLPGVGYIVAMTVLSAIGDISRFESAKKLVGYAGIGAGVHDSGKTHKDKKITKKGRRELRWAMVEAAWRAVRMSPFWKAEYEKYLNRLRKKNQAIVVIARKLLVAIWHVLSKEETDIHASEDDLAYKMLLLSWSLKEDTRKGLTYKQFAKYALMKLGVEKDITRFVRKDVPRRLAPRDEVLDRMKELGLA

SEQ ID NO: 58708 - protein, 404 aa, unidentified
MYNAVGIDVSKGKSTIAVLQPGGVIVRKPFDVFHTSQSLKELSNYLASLEGDTRIVMECTGRYHESMANSLSNAGFFVTVVNPHLIKNLGNNTLRKVKSDPADAKKIARYTLDNWAELRQYSCMDNTRNQLKTLNSQFSFFMKQKVAAKANLIALLDNTYPGVNKLFNSPAREDGSEKWVDYAYSFWHVDCVRKTGLKAFTVRYEAFCRKHHYIYQPSKPEELFNASKELVAVFPKETSYKLLIQQSIQQLNLASAHIEQLRREMNALASTLPEYEVVMGMYGVGKTYGPQLIAEIGDVSRFTHREAITAFAGVDPGVEQSGQHNSKSNKASKCGTGRLRKTLFQVMTTLLQNAPENEPVYQFLNRKRSEGKPYYVYMTAGANKFLRIYYGKVKAHLRSLEQNE

SEQ ID NO: 58709 - protein, 363 aa, unidentified
MREVRQTDRLLVTRRPWRSECRRTFLNEPEQLSGQLSPHLQERDKRGKGAQLAKLYVGVDVSKASLDMAIQGSKEFRSFPNDALGISRAVEVLHKTEPQMVVLEATGGIEMAFVGSLVAAGIPVVVVNPRQIRDFAKATGRLAKTDKLDAGILADFGAKVNPSVRPLPDVELQKLRTLIARRRQLQEMITAERNRLSSVAGVVRERVKAHIIWMQGELKQTDDDLSDSLKQSAIWKQKDELLRSVPGVGPVLSATLIADLPELGRLNRKEIAALVGVAPFNHDSGTLHHKRRVWGGRTSVRPSLYMAALVASRHNLVIEAFYKRLCAKGKPKKVALTACMRKLLTILNAMFKSNRPWEYEMAA

SEQ ID NO: 58710 - protein, 400 aa, unidentified
MISVGIDVSKGKSTVCILKPYGEIVSKPFNITHTHKDLSELSSMLFRLNDEVKIVMEATGIYHLPVLTYLQEKGFFVSVINPYLMKSYRNESLRKAKTDKIDSRIIANYGIDHWFKMKEFQTSGEIYEELKLLGQQYRHYMKLHLLSLAELTHLLDLTMPGIKNLLASWNETNRKDKRSDFVERFWHYDVITSMSEQEFTEEYILWAKEKKYVPSQEKAKVIYTLAQESIPTLPSETSSVKMLVTEAVRVLKEVDATLGLILSRMQEIAKTLPEYSVVREMGGVGNTLAPKLIAEIGDVRRFRNGKALVAFAGIDPPPYESGQFVGCNRKISKRGSASLRKVGYETMRSLKMRSRPEDPVYRYVVKKESEGKSKKSAKIAGLNKFLRIYYARVTELYKNI

SEQ ID NO: 58711 - protein, 397 aa, unidentified
MYIVGIDIAKRKHEAAVIDGDGAVIIKPFSFTNNCSGYNRLLAMLTKAKLPLDEVSFAMEATGHYWLALFTRLQKEGFRVQVINPVQTNSIRNFYIRQAKTDPRDALLIAEVIRFGHFSESTLHPENIYELRELCRGRHAIVSMQADVKRKVVALLDQVFPEYETAFTNMFGDTSMAILQTCPTPKELSEMCLEELCHLIEVSSHKRFRMAKAQELQALARNSFGFAMAGDVFSTMIRLYAKHLDFLKQQVREMDRKIAEIMETLDTPITTITGIGPTLGAYILSEIGDISRFSSAAKLAAYAGIDPTMRQSGEYNGVRNRMSKRGSPYLRHAIWLAASSAVLHDPALKLYFQKKRDEGKPYMASVGHACRKMVSIIYAVMRDNKAYTPCIPNEISA

SEQ ID NO: 58712 - protein, 344 aa, unidentified
MSVTTIGLDLATSVFQVHGVDAQGRTIVKRRIRRRDLLAFLEELPACLVGMEACSSAHHWARELVALGHDARLIPPQYAKSYVKRNKTDAADAEAICEAVGRPNMRFVPIKSKERQGLLTLHRVRALLVRQRTATVNSARGLLGEFGIVAAKGICRVAALRRDMEAADEEVLPREARAALDALFEQLDALTRKLEAVDQEIIAWHKASEASQRLATAPGVGPLTATALIAAVGDASQFPSGRHFAAWLGLTPRMSASGSRAHIGRISKGGDRYLRTLLIHGARAMVGTSFRRGVRPRPWLQALIARRPVNVASVAVAHKTARALWAMIRREEAYRPPTVFVAAA

SEQ ID NO: 58713 - protein, 346 aa, unidentified
MVYTGVDLHRKRSQLAAMDEAGELLFNRSIPSESRAFLRVFGELAPEPIEVAFEATIGWGWFADLLADAGVEAHMAHPLATRAIATARVKNDAVDARTLAHLLRTHLLPEAWIAPLEVREARRLVRMRAGLVRMRSRLKCQIHALVAEAGVAVSMTDLFGRGGRALLADLRLPTISHGRLEANLRLIDTLSTEVIAAQREIAKHFRGDPRMQRLLPIPGIGPLGAATVIAEVWDVGRFATPERLTSWAGLTPTERSSADHTRRGHISKQGSRWLRWILVEAATNAVRDPALGRFAARIARRRGVKIARVAVARRLLTLCYYALRDPQGCAAYPPGSGALVDTHGLT

SEQ ID NO: 58714 - protein, 343 aa, unidentified
MGEISTIGLDIAKSVFQVHGVDGTGAVVMRKRISRSKLLEFFGGLSPCLVGIEACPSAHYWSRELQVLGHTVKLMPPSYVKAYLKRNKNDANDAAAICEAVTRPSMRFVPIKSEQQQCGLMLHRTRQLLIRQRTMLSNAIRGHMAELGVIAAKGRNGTAELLQIIGDLTDDRIPPVARFCLDLLARQYLTLNAEVSSIDKRIHSWHRSCEESRRLEEIPGVGPIVATALVAEIGDWRAFRSGRSLAAWIGLVPKQHSSGGKERLGSITKQGNRYLRWLLVAGAMAVIRYARQHGTKRAWLTRIMDRRPVKVAAVAFANKIARMAWAIMVHGERYREPKLLLAA

SEQ ID NO: 58715 - protein, 406 aa, unidentified
MKQIVSVGIDVSKGKSTVCAMIHPNTIIKESFEVLHTVEEMSMLADYIGSLDGAIRIVMESTGHYHLPVAQFLYQKGFFVCVENAYIIRQFSRIMLHGAKTDPLDAKKLAKYGLAYWSELKPYKFHPSCYTELSLLSKQYQTYIKLLIAAKQNVIHLMDEMLPGFKEALDTASSVQFSKVKYVDFAKEFYHVDMIKSMGKEIFRENYKQWCKEKGYRFQSEKADELFHLAEDGIPTLPTEFPSTRLCMEVATEQVSQLGYALEQILSQMQNLAKTLPEYQTIRQMGGMGEKLCVRFIADIGDVRRFHNGKALVAYAGIDAPPYQSGQYTGTKRRISKRGNSALRKTGYEVMKSLKSHPPKTDTRVYDFIIKKENEGKSKKQAKIAGLNKFLQIYYARVMEIYKNIV

SEQ ID NO: 58716 - protein, 400 aa, unidentified
MAVMIGTGPHKGSHTAVAAGAAEEPLGKLRVRACPDQAGKLVAWAQAWPERTWAVEGARGLGRLLAQQLVAAGERVLDVQPKLAARVRLLEAGDTNKTDPNDARSVAVAALRSKSRQEVTADGHAVVLKVWAKRHRDLSRTRNQVVCRLHAVLCELIPGGVPDGITAGQAARILEQVAPAGAVAQARCELAAELLAGIRHLDAQRREVNKKLAAAVTASGTSLTEVSGVGPVIAATVIGDVITAARFPSRDHFAACNGTAPVEVSSGQRKIYRLSLRGSRRLNHAVHMAAINWIRHKHSDGRACYQRKLAEGKTRKEALRCLNRRISDAIYARLRADARKAGPGGQPGNDIGSSVTGSHPGHRLFGQATSGPEPSLRAPATFTQATPAPEPSAKKIQRAT

SEQ ID NO: 58717 - protein, 357 aa, unidentified
MKIVGCDLHARQQTIAMVDTETGEFTEKTIFHEGNAVREFYAALEGPVVVGIEATGSMQWLLELLEELEIECRVGHPAKIRAKETRKQKHDRQDARLMLDLLIEDRFPEIWMPSTTERDLRTLLRDRHQWVRMRTRLQHTLQAIALNHALRKGHALWSAAGQSALQALPLPAYTSQRRTELLSLYVQLQQRIQELDKEVEEQAQQRPQARRLLSHPGVGPVTALATEVFLGDPSRFTTGNQVASYIGMIPCEHSSGKRQRLGKLTKQGNSLLRYLWTEATMHAVGKDPELKRFYRRKLIQKGMGKARIAAARKLGIRLWIMMRDQIDYEEFCRRGKLRQSGEAHAGMPDFNSGPARQ

SEQ ID NO: 58718 - protein, 379 aa, unidentified
MNSEQQKKYFVGIDISKDSFDATLIDEFQKKLFYQKFSMDKNGFKLFLQKLENFDKASLQITVESTGVYFVSLYNYLIKTGFSISVVNPLLVHNFHKSMSLRKTKTDKKDSFIIALFTLKNLEILSKHSKQTSTMRRLCRERDKLSEEIAKVKTEIKSDLNVLFPELEKHIGIFTKSMLLFLEKYSSANSIRKLRTTQIDAVFNKTKGNKVRMKSVELKKLARDSIGNGDKYLEKVLSSKIQRLKLYQELSKEFDLEISSFIDQNWNTDFDILTSIKGIGKITAQKFLIEVDDIRNFNNHKQLTAFMGTDPSLKQSGTSIMYQGRISKRGNKYLRKTLFQMAVSCIREDITFNTYYHKKRDEKKNTNKLLLLQVTNYFV

SEQ ID NO: 58719 - protein, 335 aa, unidentified
MEFTFFLGIDVSKEKLDFALNCGETLLFHQVVENTPKALQAFFKELLKIEGFSFEKTLACLEHTGIYSNHILNILFKKKAKVWLENAVQIKKSIGLVRGKSDKIDSKRIAEYAYDRRAKARFWEPKRELVKKLAYFSTLRTNLVDAQKRLSTSLKESSSFIEKSLAKIAKNVTSQSLTALARDIEKVENEIQLIIKSDTELSRLFSQITSVKGVGPVIANHIIIYTNEFKDISNPKKFACYSGVAPFPDGSGKFKGKDKVSHFANKKMKALLSMGATVAIQHDTELRNYYQRKTQDEKKDKSKVINAVRNKLILRIFACVNQNRKYEKNYIRTLA

SEQ ID NO: 58720 - protein, 414 aa, unidentified
MNGMKSQFAAYIGLDWADKKHDLCMQVGDVDERNYYVIAHTPEAIEQYLFDLHKQVKGNIAIVLELNKGPVVYALQKYSFVTVYPIHGLTLARYRQAMFPSGAKDDPSDAELALDMMLHYPKKVKPLKPSSNDTRTLNHLVEQRRTLIDDKRRHVNRLINALKQYYPQPLSWFVHRDTELFCDFLIKWPSLQSVKRARATSIEKFFKSYGGNAVSNTAKRIEAIKTSLPLTEDEAVIIPHQMLVVALCKQIITQIENIRVFDKAINELFHKMPDAELFESLPGTGPCLAPRLMAAIGEVRSRFNSALEIQNYAGLSPVTERSGQSCWVHWRWQCSKFVRQSFIEWAAKSVHQSYWAGLYYANQRAKGKSHQQAVRALAYKWVRIVFRCWKTRTPYDESKYLKALKERNSPLLAA

SEQ ID NO: 58721 - protein, 338 aa, unidentified
MAILFVGIDLAKNVFAVHGVDATGRAALVRSRVRREGLLELIAALPPCTIGMEACSGAHHWARLFQPYGHTVRLMAPKFVIPYRLSGRRGKNDAADAAAICEAVQRPKMRFVPVKSVEQQSQLCVHRVRQGFIEQRTGTINRIRGLLSEFGIVLPLKAETVRRQATLVLEELPGRANLAIGDLLSELHHLDERIAEYDRHIKLMAKADARAARLMRLSGIGETTATALLAMIGNGRDFRCGRQLAAWLGLVPGQYGTGGKARLGYITKTGDPYLRSLLILGARAVLNSAQDKSDRLSRWAVALAERRGYWKAVVAIAAKNARMAWAVLVRGEAFVMPA

SEQ ID NO: 58722 - protein, 372 aa, unidentified
MKQTIRSFVGMDVHKATISISVAEDGRSGPVRFIGVIPNTPEAVHKMAKQLTRHGELDFCYEASGCGYGIHRQLTGLGHKCTVAAPSMIPRKPGERIKTDRRDSEKLAILHRSGDLTPVWVPDTTHEALRDLVRARVDASMHLMRARQQLLAFLLRHGRSYPTGKHWTQRHRSWLAGQTFQEHAHGIVFQDYLETVWTAQQRRDALIERISAMVASWSLGPLVEALRGLRGLDMISAATFIASTGDLSRFESPRLLMGYLGLVPSEHSSGGTIRRGGITRTGNREARRMLIEAAWSYQYPARVAKEKAEILVRLPKGVRDIAWKAQTRLCARYRSMIAKGKKPTVVVTAIARELAGFVWAVGQEMRLMLSTS

SEQ ID NO: 58723 - protein, 379 aa, unidentified
MYRILKIGMDVHTTNYTLCALESKFGEEDAVLANITVGPEYKNILDFVRRIKEKMDPKGKDKIDVECGYEAGCLGYSLHQVLTTCKLKCTILAPTTMHSEKGPRVKTDRRDAKLIAQCLSNGGYHAVHIPTAEDNAVKEYVRMRDDHKIALKRLKQQTNALCIRFGFIYDGTKWTGMHLKWLRALKLPEMIRETMNEYLATYDELTAKVTRFDQRIQEIANQEQYREKVRKLECFLGIKTHSALSLIVETGDFLRFRKGNVYAAYLGLAPGEHSSAESGGRLGITKAGNSHLRCLLIEAAGGICKGQIGKKSKDLSARQAGNPADVIAYADKANTRLRSKYYRLTRHGKKRNVAVAAVARELACFVWGMMTDNIHGNVA

SEQ ID NO: 58724 - protein, 370 aa, unidentified
MRTDYKTFVGLDVHKDSIAIAYADADFTQAPRFLGTTGYSVISLTKALAKLGEPKELSVCHEAGPCGYGLVRSLRKRGYATEVIAPSRTPRRPADRIKTDRRDALLLARLHRSGDLTPIIIPDPKDEAVRDLVRTREDAMHDRQRARLRLRSFLLRQGHSYTGRRWGPAHQLFLSKIKFEDSAHHIAFTEYRMAVHFRTECVERLESALRAEVQSWRSLPVIQALMTLRAIDFLSATTIVAELGDLRRFPHPRDLMGYLGLVPSEHSSGPTQHRGELTRTGNTHVRRILIEAAWNYRFAARIGESLQPRLEGQSKEIVTIAWKAQVRLCARFRRLRARGVHHNKVTAAIARELCGFIWDIGRRITVSGAG

SEQ ID NO: 58725 - protein, 358 aa, unidentified
MNRHRIQDFILEDKEIFVGLEDSKRTWKLAVRSEKMLIHQTSMEAKYPILIKYLRNKFPKCRVHLIYEAGFKGFNLYDQLTEDGIECVVIPPHIVTEPKVSRVKTDKRDARRLAKILENQDYKFGCYVPDKERREDRQISRTLGAVKKDIIRTRNRIRKFLDFHGIILPFKDSQKWGRVEFMGLKNLSLSDPLRKSLDILLEMLGALWAHAKELREYLRELCRKERYHKAYEIAKSMPGIGWYTAIRFVLEFGEDLSRFTSGKQIAGFVGLGCSEYSTGETENRGRITGVGSGYIRATLIENSWVAIRKDPVLLDKFNRVWRNSGSKKKAIVAVARMLIVRFRACVMSGKPYVIGVIQ

SEQ ID NO: 58726 - protein, 427 aa, unidentified
MRKKAYGTTRVNDVDLERLIRGRRSLGVTVGTDVGKYDLLGVCRWSDGTFERPWRVRNPIEIPQLVTLLKSLRVGRTLVVALEPSGTYGDALRQALADAGIPVQRVGSKAAHDYAEIFDAVPSQHDGKDAAVVAELAALGKATAWDYQAPSVWEQELKYWVDWLVAQRRMLAMWQGRLEALLARHWPEATRALKLSRVTLLRVLERYGSAQALAADPEACRHIARWGGCFLEPRKVEELLAGARSTVGVRPGAWESRQIRDYAGQALETRRQGQRGERRLRQLAQGHPVLQAQGKVVGVVTACVLWVSTGDPRNYHSAAAYRKAMGLNLAERSSGIYKGHLRISKRGHPRSRQWLYFAMLRLVQKCGVRRWYEAKKARNADDAKRVLVALMRKVALALYHVGVSGQEFEPRRLFNRMACRSRSGVHR

SEQ ID NO: 58727 - protein, 337 aa, unidentified
MGMDQHRAQISAEWIDTITGEISRARVAPADRAGVRKFLARFAGQDLEVALEATTGWRFVVEELERVGADAHLAEPAETSGLKGKKKRPKTDWADARHLRELLLIGRLPESWIPPAHLLDLRARVRCRHTLSQQRTEWQQRMQAVLYHHGIAQRRDLLTLEKREWMAGLALPAAAREQITISLQIIDALDLQLAPFDLDLRAYARKQPGCRALSDQIYGVGGLVAVTILAELGDARRFDNSRDVVRYSGLDITIYQSDQHRAPGHLSRQGPPALRWALYEAAQHARFPTSPDRAYYLQAAERIGGNRACLALARKLLKRSYHILKELGDPALEPVPS

SEQ ID NO: 58728 - protein, 431 aa, unidentified
MCRELLEVVEVDEIEDWVETVDRVAGLDLGKASLTACIRVPSEQRPGGRSQEVRDYATTTGSLLELADHLRAQSVRLVAMEATGEYWKPVFYLLEAEGFTCWLLNAHHVKNVPGRPKTDKLDAVWLAKVVERGMCRPSFVPPKPIRQLRDLTRYRRVLIRERTREKQRLHNVLEDAQIKLSSVITDLFGVSGRAMIEAMIDGQRDPKALAQMAHGVMRSKIGALTEALRGHFEDHHAFICRVMLQRIDTLDAQIGQLDDKIGQMIAPFAGQVTRLDEVAGIGRTNAQELIAEIGVDMSVFATSAHLVSWAKYCPQPRQSAGHDKQRSTGKGNPYLAGALGEIGIGASRTNTFLGERYRRIARRRGKKRALVATGHSVLTIAWHLLADPDTHYLDLGPDHYQSKINKDRQARALIRQLQHITGQQVLLEPAA

SEQ ID NO: 58729 - protein, 337 aa, unidentified
MEFKRIAVDTSKSVFTLHGVDEQGRPILRQDLTRAQFEKFLGKISPTEVVLEACGSSHHWGRVAQGFGHTVRLIPPQYVKPFVKRGKNNRNDAEAIGEAASRPTMRFVPVRSAETQAEAMDLSARDQLIRQRTQLVNAVRGHAAEFGVIAAKGISQVEPLLKKIAETDMPQAAKQTLAQLGRVIMQLDAQLTEIDQRLTTQHKTHPVSQRLAAIPGVGPLTALTVALKVDADQFESARHFAAWLGLTPKERSTGSRQSLGGISRAGNERLRQLLVVGAMAVIRHAKPGSKTASPWLLQLLERRPRKLAAVALANKMARILWAMMANGTAYRRTPQAA

SEQ ID NO: 58730 - protein, 343 aa, unidentified
MTQVVIVGIDLGKNWFHLIGLDRAGAIVFRKKMNRLQLAHFAATAPRCIVATESCPGSQYWGRVFTAAGHEVRILPAQFVKPYLKSNKNDFNDAAAIAEAGDRASMRYVSLKTTEQLELQALHRVRRRFVVERTAVINQMRALLLEHGIVIPVGRAAFVHRMPAIFAEAEQRLSPRLLLLIHRLRQRWHALDVEIAQATRDLTEWAEQSPLCRRAATVPGIGPLIATAVVAAVGDGRMFARGRDMAAWLGLVPRQNSTGGKPTLGSISKRGNTYVRELFIQGAQSSFVHLKRDQSSLGHWLRQVEVRRQRQVAIVALANKMVRICWKVLTSEETFQPYPARMA

SEQ ID NO: 58731 - protein, 346 aa, unidentified
MMVIGCDYHPSWQQICWLDTATGETEERKLEHGSGEAEKFYRGLPGHALIGMESTGNCQWFVEMATTAGHDVWIGDAAQIRASEVRQQKHDRRDAALILKLLLEGRFPRIWTPSGAEKDLRQLLIHRYKLVRIRAQVKTELQHLAMNQGVTKKRKLWSKAGEKVLRELPLKPWASRRREDLFKVREMLNGQIVLLDQAVVEAAEKNEKARLLMTQPGVGPITSLAFVLTMGDVNRFQRGKQVASYLGLIPREYSSGGHQRFGSISKQGNRFLRMLLVEAAQGAVRCDPQMRSEYLHRCHKKAKGVAKVAAARKLAVRLYWMLRTNTGYPEVVRVESSSRVPLVSAS

SEQ ID NO: 58732 - protein, 372 aa, unidentified
MNYNTVYVGMDVHKESFTLCSCKYEDEKASHYQRTPASYKNVLRYLAFLRTIYGEDTRFVCGYEAGCLGYSLYHQLENFNVECVILAPTTMLEQRSKRRIKTDKRDAEIIARSLAQHNYSPVHIPTETDNQTKEFIRMRDDHKAELKKIKQQILSFCLRQGYQYDGSGNWTAKHVKWLRSLKTEGLYKEILDEYLLTYTILTDKLNRLDQRIEELASEEEYKEPVSKLTCFLGIKTHTALSVIVEVGDFQRFASARKFAGYLGLVPGQHSSGDDRNGLGITKAGNTHVRRLLVESAQSYTRGKIGYKSRVLRSRQAGNSPQVINYADRANERLRRRYYKMVLKDGKKYNIAKTAVARELACFIWGMMTDNIY

SEQ ID NO: 58733 - protein, 334 aa, unidentified
MTVSVGLDVAARSVVMAAHEAGAAGKAVAKGTFEQTPAGHARLVKQLLKLAPTYVVMEATGIYHLDLAIALDRAGLPVSVINPRSAKRFAQLKLKGSKTDSIDAGLLADYGHALLPPRWSAPSIGDLALRDLGRQINRLTADRTRVKSRLHALNAKQDTYALLLEDEAEAIEALDRRIERLRAAMRTLIDDDPIRQSQLKHMIAAPGVAEVSAMALLAELAMLPTTMKAPQVSRHAGLDVCLNQSGSSVHGASRISKGGNAYLRAGTYMPALVAVRHDPLAKAFYEQLVRRGKKKRQALTAVMRKYLTGLWACLQNNENFDTSKLFSPEHLKTA

SEQ ID NO: 58734 - protein, 461 aa, unidentified
MRPKTKRKAKAKTTVPEGLETINVNAAGIDIGSTEHYVAVPPGRSSEPVRSFGSYTAALYEMARWLKECGITSVAMESTGSYWIAPYQVLEASGFEVILVNSRHVKNLPGRKTDVLDCQWLQKLHTHGLLSGSFRPVNKVCVLRSYLRHRENLVHAASAHIQHMQKALTEMNLSLHHVLSDLTGLSAMMIIRAILAGERDPWKLAGMKDRRVKKSQEQIARCLEGDYRDEHLFALTQALELYEFYQAKIAQCDLQIEKQLHTFKAQVDPKKNPLPENPKKKSLKAQSHFELKTHLYAICGTDLTRIDGIDVMSAQSLISEIGLDMNRWKSEKHFTSWLNLCPSNRISGGKPLTRQPRKGHNRAADILRLCAQSAIKSSSAIGAFGRRLKARLDAPTAVKAVAHKLARIVYRMLKYGKQYRDAGERYYEEKYRDHLLRRLQKQAAAFGFQLTPQQPIMDPVS

SEQ ID NO: 58735 - protein, 350 aa, unidentified
MIIIGVDFHPEFQQIASVDTDSGEFQEKRLTHREEAEKIYRALACAGQKVRVGMEASGHARWFERLLAELQIELLIGDAAEIRTKRVRKQKTDRQDAQLILSLLLEDRFPRIWVPSWENRDLRQLLWHRHRMVQARTRIMNQLQAVALNEGLRCKKKLWRERGREQLESFRLAPWASRRRRDLLELLDRLNPTIAELSQAIQQEVEKCPEARRLMTHPGVGPLTALAFVLIIGEADRFQCGKQVASYLGLVPLEDSSGNRRRLGHITKQGSSMLRFLLVEAAQVTARSLPQWRSKYLHLMMRRGRKTAKVAMARRLAVHLYWMMRQGWDYQQWIKFGSHAGQLGNRHGVQ

SEQ ID NO: 58736 - protein, 328 aa, unidentified
MSNPESFVGIDVAKGWLDVAWLTGETLRIDHAEKAIAGLVERLRSQPPALVVMEATGGLETGVASALAAAGLAVAVVNPRQVRDYAKACGRLAKTDRIDALILAAFAAAIRPQVRELPDEHTRALGDLLARRRQLVEMRVQEKLRLQRASNVQRASLREHIVWLDERIGRLDIDLTHALRSSPAWRDKDDLLKPIPGVGSLTRATMLALLPELGTLSRRQIAALVGVAPFNRDSGQHQGGRVIWGGRAQVRRTLYMAAVAAMRCNPVIRSFYQHLRSQGKPAKVALTACMRKLLVTMNAMLKHHSAWSNRLDTQHSCSRVNTLHDGLQ

SEQ ID NO: 58737 - protein, 376 aa, unidentified
MESGIEEKLETFVGLDVHRKTVVATAVDAQGRSLSQVTLGPSDDELLGFLNELPGTKHVALEACPVWEHFFDAAETAGATVVLSNPLRTRLIAEASLKTDRVDSEALATLLRLKALPTSFAPPPELRDLRAQIRERVFYRRKAGAILHRIYPALLRRGIEYEDGLLQHRRKREVLRELHLPEVDRGLDALRYLEDLSRDLDRGIEAACETSPDAQLLRTIPGVGPLTSMGVVAFLTPIDRFSSVDKLCSYVGLCPTTHQSGESVHYGSLKRDSNGLVRWLLIEASWHHRRRVPRGAVARVANRVGRRRGRQQGTVAGAHTLLKIIYAMLKHREAFHTPAPGLSTAVRIRRRRKTTARTCVRRTALELPTAHPPSAS

SEQ ID NO: 58738 - protein, 384 aa, unidentified
MNKMGSNVACAGMDVHYKFSNVTFRDAGGRIVSRQRLDHPDRQGLARRLGHWPEGIPVVMEASFGWGWLSDVVEDAGLAVHLSNCFKVEQMRKARGWVKTNRKDADLVSLLPFEPCDWWKVWRAPPEIRARREQMRFRGDLVALQTEVKNRIHAVFHRHGIFHEFSDLFGGRGRRFLVELCIGGSEYLSPEALQALRGQVKLLDHLRRQLADVARVLRRQLAKTPLIRRLDHIDGFGLILSHVLTAEIGQIERFRNDKALASYSLLAPRSNDTGQEDPSQSPKGRHLGLRGNRTLKWAFLEAARGAVRSGGRWRAMFDRVTAGGTKDRNRGYTKVARELVKVVYVVWAKGVDYQPTPPARPGRKSNKNKSRSGTGQLLHPMVHA

SEQ ID NO: 58739 - protein, 456 aa, unidentified
MPKATTGDRPELKPVNVGAAAIDIGSKMHMAAVNPNCTDLPVRAFGTFTQDLHDLADWFKACGVTSVAMESTGVYWIPAYEILEQRGFEVILVNARYAKNVPGRKTDVSDAAWLRQLHSYGLLRGSFRPDAEIATLRAYLRQRERLVEYAAAHIQHMQKALMEMNLQLHHVVSDITGATGMRIIRAIVAGERSPDVLATYRDVRCHSSIETIRAALVGNDRDEHIFALTQSLELYDTYQAKMLDCDRKLESLIATLTEKGAKPVGKLSKPRVKTKQVNTPSFDVRAALYGVLGFDLTEIHGLGPSLALKLIGECGKDLKAWPTAKHFTSWLCLAPGNKISGGKVLSSRTRRSSSRAAALLRLAATTIGRSDTALGAFYRRLSSRAGKAKAVTATARKIAVLFYNTVRHGMTYRDPGADQYEEQYRSRVLANLKRRAKSLGFVLQAVPFSAEVAVFS

SEQ ID NO: 58740 - protein, 358 aa, unidentified
MADKVTVAAVVGGVDTHKDLHVAAVVDRNNKVLGTQYFATTRQGYRLMLAWMTSFGALKRIGVECTGTYGSGLLRYLQNAGLEVLEVTAPDRMERRKRGKSDTIDAECAAHAAFSGIRTVTPKTRNGMIESLRVLKTCRKTAISARRVALQIIHSNIISAPDDLREQLRNMTRMQLIRTLGSWRPDASEYRNVTNVYRISLKSLARRCLELHDEIADLDVMIAAIVDELAPELIKRNAIGYESASQLLITAGDNPQRLRSESGFAALCGVSPVPVSSGKMNRYRLNRGGDRAANSALHIIAIGRLRTDDKTKEYVARRVAEGHTKMEAIRCLKRYISREVYTLLRNQNRQVNSIPIMA

SEQ ID NO: 58741 - protein, 309 aa, unidentified
MKGELVYLGVDIAKSYLDAAIWNEKRRLANERVGHRELIKWIKQLKGPVQVICESSGGYERALVQALVGAQLKVSLVQANRVRQFARAAGILAKTDRIDAKLLCDFAEAMQPGTISASQLEQEHLRELESQRRHLTHLMVMEQNRAARASDRCVRRLNRSLLNQIKKQIEQLDLLIKEYIEASPELSAKAQKLTAINGVGARTAALLLAQMPELGQLNRREVAALVGVAPFNRDSGKMRGKRAIYGGRRPVRHGLYMAALVASRHNPILHAFYLRLRAAGKPAKLALTATMRKLLILLNSALKPDLNYA

SEQ ID NO: 58742 - protein, 377 aa, unidentified
MKAPSTRPAAVLGLDVGKSSHWACLIDRDGEVLASAPVRNREAELDALFASAPAGTLVVVDQFRNIGSLAVRRARAAGLVVAHLPGLAASRAAGLFAGEAKTDERDAAVIARTALGVPDSLSGVPGRGEALEAARALSSQRDHVVACATRDKNRLRAVLLESCPALEAAVDLSDRRWLELLAGFGGAWGIARSGAEGPRAEAAGEAAAASTAPPPALVEAENRQVRFLAARISEALDEAGALEAETAALLEGDETYACLLTVPGIGPRTAAQLAVSVDIGRFPDHDHLASYCGIAPRVRSSVTSVRSVRASRRGDARLKSLLIFSCNSLVRSSGRYGEYYRACRARGMGHGRALKAVARKRLRAIYAVMRDRVPYRE

SEQ ID NO: 58743 - protein, 412 aa, unidentified
MNAVGIDVSKGKSMVAVLRPLGVVVAKPFEVSHTATELGKLANFLKSLDGETKVIMEHTGRYYEPVAQVIHEQGVFVSAVNPLLIREYGGNSLRRVNTDKEASKKIARYGLDNWAELREYTPMDTIRYELKTLNRQFHLASKNRVACSNNLVALLDQSFPGVRGWFDSPVRKDGSQKWVDFALVFWHVDCVRMVSLAAFTERYRKWCKRHGYLFSASKAEQIHQEAKEMIALVPKSPTSKLLIQEAASQLLSISRMVEVLRAEMNRLAAQLPEYQVVMSMYGVAKSFGPQLMAEIGDIRRFAGKQSLVAFAGVDPMPNQSGMKNIRSNKSSKRGSPYLRKTLFNVMSCLLQNAPPDVPVYQFLDRKRTEGKPYYVYMTAGANKFLRIYYGKVRDHLAALDAIPPATTSANPQ

SEQ ID NO: 58744 - protein, 346 aa, unidentified
MEQIIRIGVDTSKHIFQLHGVDAAERVVLRKKLSRKQMLEFFAKLPATVIGMEACGGSQYWARELGKLGHEVKLMAPQLVKPYVSRNKNDWRDAEALCEAMSRPKMRFVPVKAAEQQAALMLMGIRDGLIGRRTQLGNTIRGYASEFGLIAPKGLDKLEELLRQIAQDETLPALAQEMFTVLGRQYDRVESELKETEAKLMAWHRADAVGRRLAQIPSVGPIIATMLVMKAPDPHAFRSGRHFAAWLGLTPQDHSTAGKTRLGKITRAGDEDLRRLLVIGATAVIQQARRRRGQHSRWLLALIARKPPKLAAVALANKVARIAWKLMATGESYDAARMNAEPALAA

SEQ ID NO: 58745 - protein, 429 aa, unidentified
METHAGPRAPGEHMRRSRRRWKPIPQNLTVVGVDVAKRANVAVAQLGEGWTAKPLTFTNDREGFASLWQYCQGAVKEGNFEGFVVAYEPTGHYGDPLVEWLHTREVPLYQVQPLHTKRAKVLYDGTWRKTDAKDAELIADLCRQGKCKPYRPVRGVFLELRVLGREREQLVKRRSQVLNRLHRHVDVLFPELLQHFSELTGAGALWWLETAPSPAETLQKRRRSLVEGLRKVTRGQLKDARVDAIRSSAQMSVGVQEGASTHSTVIRSTVWELRLLDQRLDAIEAEMVGRLDQVDYAATLLTIPRLGAVTLAILLGEFGDLRRYGHVRQLLSMAGLDLVEVKSGETPRGEPGRVLSRRGRRYIRQILYLAALRLGWNVLAEPRRRLLEDSKKPPMKAVVANMCRLVRIFFAMVRDGASFDPTRWEPAMT

SEQ ID NO: 58746 - protein, 318 aa, unidentified
MSTAPCFIGIDVAKAAFQVASRPERLSGNFPNTAVGHRQFLKQLIDVDVALIVLEATGGYEKTLAAELVQAGYPVVVANPRQVRDFARGLGRLAKTDAIDADTLAHFAHMVHPTPKPPQRPEVEQLAELVTRRRQLTDLLTQEANRAQMIHHVKVRKSIRKMIKTLEYQIRELDRLIQEHIQADDDFQGKDRILRSSSGVGPQTSAMLLSHLPELGRLNRHQIAALAGLAPYDRQSGNLVRGAHIAGGRHEVRCLLYMAAVTARRCNPTIRQFAQNLENKGKSFKVVITACMRKLLIILNAMIRDQQVWNNEKNLKNT

SEQ ID NO: 58747 - protein, 315 aa, unidentified
MTNPVFVGVDVAKEQVDVALRPSGDRWSAVNDEVGITALVARLRPLAPALIVCEATGGFERAAIAALAAAGLPVVVANPRQVRDFARATGQLAKTDALDAGMLALFAERVRPTPRPLPDAAAQLLDAVLTRRRQLLEMLVAEKNRLGFAPKPVHRGIQAHIRWLERQLDEVTKELAGLIEASPVWRAKDDLLQSVPGVGPIVSYTLLGELPELGTLSHKQIAALVGVAPLARDSGTRRGQRLVWGGRASVRTALFMAALCGRRWNPALKQFYERLKAAGKPTKVALIACARKLLTILNAMVRDQSHWACHVQYSC

SEQ ID NO: 58748 - protein, 429 aa, unidentified
MRTESTPGARGPVFCGVDTHADSHWLYVLDWRGRRVLSRRFPADAAGYEALAGAIAAAGEPACVAMEGTSSYGAGLTRHLASLGMPVREALSPARTQRRRPGQGKCDEADAERAARAAMSGSRLGTPKSQDGWVDGVRCMLAARSGAVKARTSAINTARSLLTTAPEGLRSRFRGMGGPRLMEELPSVRSEGALGAALGALADLWAAARDAALDMERAIEASLEENCPALLAMYGCGPVSAAKLAVAAGDNPGRLRSEASFAAICGACPIPASSGKTVRHRLYRGGDRQANSALHEIARQRVMRDPETAEYAERARARGKSDREVMRCLKRYVAREAYRALMRPHEIRRPADASELVAARRAAKVSQVRAASILGTSEKYISMLERGQRELKPIRRAYEAWVEAGLPLNWDRQAFEAERKMDSKKHLAK

SEQ ID NO: 58749 - protein, 537 aa, unidentified
MRVVQEVRRPGYNAGGLSTAAKTVTRLVRTSPPLSVVPVSCDVSSGGVVAHGYDDPVEQRTDVTSDRAWAVPIWILEDCLMAKRQAQVKSEPALPVLQPDAAGLDIGSAEIWVCVPADRDAAAVRRFATYTPDLHQLADWLVACRIASVAMEATGVYWLPVFEILEARGLQVYLVNPHQLKHVPGRKSDIQDCQWIQRLHSYGLLNNSFQPEADMRALRSYLRQRSTLLEHRAAHIQHMQKALLQMNVQLTQAVDDITGQTGLLIIRAIVAGERDPQQLATHRQRNCAKSVADIAKALTGNYRAEHVFALKQALALYDTYTLQVQECDGEIERQLQALTPQTDAALPPPGQRDKQHSHSKNAPSYDARGLLYKATGVDLCAIKGLGETTVQQILFEIGGSVAAFPTVKQFCSWLTLAPRHEISGGKILRKHVRKTGNRAGQAFRMAAQTLARSQDSALGNYYRRMRARHGPEHAIVATAHKLARIFYHMLKHRVPFDACSTEAEEQRVRERKLKYLEREAAKYGMTMTASTPAPSPA

SEQ ID NO: 58750 - protein, 348 aa, unidentified
MLADQLDYIVGVDPHRDTHALAIVHVVSGVVVAEATVLANSDGYAESLRLVEEHAPGRRAFAIEGTGSYGLGLTRFLIGRAERVLEVGRLRRERRSGGKTDSLDAVRAARSVLAAERPSMPRAGGERQALQALVAAREGAVNAKRAGLCQLRDLLITTPEPLRSELRPLTRARLLQRLAATRPHGRGDAELRGSLLALRSIARRVLALTVEERELAREIETIARRLAPQLLEQPGVGPHAAAQIVLSWSHQGRITSEAAFARLAGAAPIPASSGQTIRYRLDRSGDRKLNRALHMILVTRKRSDPATIAYIERRLQEGKTRREANRCLKRYLARSLYRLLEHGPPLAT

SEQ ID NO: 58751 - protein, 370 aa, unidentified
MLDTTTFVGLDVHARSIKAVSLDVMTGEVRCATFGYDAGAVAEWVRSVDPKAKCVYESGVTGFDLQKRLSGLGVDCVVGAVSKMIKPSADRRRKNDRNDAEFLARMLSVGNVVEVWVPDDECEAARDLTRALEDARDDLSRSKQRLSKFLLRHGLAFDERTPTGRRKGNWTRAHWSWIESIRFAEGADNDVLAYYVDAVRRAAEEKARLEGLVEAEARKPRWRRRVDSLRCLKGVDTATAADLVFEAGEFSRFRNARSFAAWVGLTPSEHSSGESDRRGAITKAGNKHLRKTLVEAAWHYLTCSGRPKDLAKGQAPDRGARRHAAKGVRRLVERREALLARGVHGNKANVATARELACWVWAVGLMAEEA

SEQ ID NO: 58752 - protein, 370 aa, unidentified
MKKNNTDEQSPKRAGSSKAEPMTIGMDLGDKVSRYCMLGGRESEALSEGSVATTKTAMTRKFAGLRRCRVAMEVGTHSPWLSRLLTKLGFEVIVANARQVQLISASSRKNDRMDAQLLARLARVDPQLLRPIRHRSEQGQTDLMVIRVRASLVDARTGLVNAARGFAKAMGERLPACDTDALDVEKLEGLPEGLRQTLGPLVEQVESLTEKIKESDARIEQIARSKYPETALLRQVSGVGILIALTFVLTVEDRERFQKSRDVGCYVGLRPKQSESGQSQPQLRISKEGDCYLRKLLVQGAHCIVSRRGPDTDLKRWGLKLASHGGKNAKKRAVVAVARKLAVLLHRLWVSGEVYEPLRNSQAAGSQRAA

SEQ ID NO: 58753 - protein, 454 aa, unidentified
MYAKKKSSISFPILHHNAAGIDVGSRSHYVAIGQGKDDVKEFGVYNEDLLALVQHLLDNDITHVCMESTGTYWQSLFSTIQDAGLTVELCNGRYTKNPNGKKTDVQDCQHIQKLYSLGMLQSSFLPDIITEQLRTYTRHRLKLIEQEADSVRKIQKYLRLLNVRLDVVIKDVTGLTGMAIIEAICKGETNPQVLASFRNANCKKSVEEFVKALQSNKRPDYLFCLQKELALYKTYRTQITDCDTAINKLVEEEINKDENKKTLKTDAKPHKRVNKNAPKNMDINQMAYQYFGGVDLMKIEGVSHATVLAIMSEVGLEGFKKFKTAKEFVSWLHLSPNTKITGGKVISSHVPKGGNRLKIALRNAANVIGNLKDTHLSDFFRRILYKSDRITAISATARKLGVIIFNMITKKEEYKPPTEYLLLDQKRKLGLVKRIRKQIHKFDLTTEDLGLATT

SEQ ID NO: 58754 - protein, 348 aa, unidentified
MRFYKQQHQFYCGVDLHAKTMHICLVNQSGEVLVHRNLPTRPDRFLNAIAQYRQHDLVVGVECMFTWYWLADLCAEHNIPFVLGHALYMKAIHGGKAKNDKIDSEKIAMLLRGGMLPQAYVYPKAMRATRDLLRRRMYLMHHRAEALAHIVNTFSQYNLPELSKKLTYAANRQGVAEQFADPSARLSIEADLQLVDHFDEQLRHLELQLSRSAKVDDPQSYYLLRSVPGIGKILALVMLYEIHNVCRFPKAGNFLSYARLVRCAHESAGKRLGSGGKKIGNPHLKWAFSEATVLLMRQLPAAKQHVETLAKKHGKGKALSILSARLGRTVYLMLKRKEPFEASRFLKQ

SEQ ID NO: 58755 - protein, 326 aa, unidentified
MTYQLGIDISKAKLDVALLNADGKYRSKVFPNDATGFKSLLQWLHTHVPTGKAEVHVCMEATGSYHEALALFLSDQGVAVSVVNPLLVKRFIEVDRVRNKTDDGDAKCLARFCQMTQPELWEAPSVAVRTLQALVLRLDTLQEMRQGELNRLEVAHASVQQSMRDVIAGLERSIEAVREQIRQTIDDDPDLKQRQGLLASIPGLGDKTIPQLLAYIGRPERFKSVKALIAYAALAPLIRQSGTSLNHHKGTHPQGHRELKSALYYPAMVAGKYNPLIAAFWQRLKAQNKPGKVIVVACMHKLLAIAYGVLKSRKPFNADHLKPIVT

SEQ ID NO: 58756 - protein, 375 aa, unidentified
MKEKVRFLGLDVHAETIAVAIAEPDGEVRSLGTIANREESIRKLIKKLGPQEHLRACYEAGPTGYVLYWQLTQLGVECAVIAPTLVPTKAGDRVKTDRRDALKLARCHRAGDLTPVWVPDGDSEALRDLVRTRESAKQDQLRARHRLSKFLLRTGRRAAVGMKAWTEPYMAWVRQVRFERPAQQATLLDYLHEVDHMAARVKRLEQAIAEVVKLASPQVQEVVKGLQALRGIAEISAVTIVAELGQISRFDTARQLMGYSGAVPSEDSSGKRKRQGSITKTGNAHLRRIVVEAAWSYRHRPAIGPRLRKRQEGVPEPIKEIAWKAQVRLSRRYARLAAAGKDQRKIVTAVGRELLGFIWAIGVKAETRVNRQIAA

SEQ ID NO: 58757 - protein, 354 aa, unidentified
MNSTQVCEKRKIAVTIGIDLAKDHCDVVAYNADNKICFTKANMTYPKLMEWLANTPPAVVLTEACKGSMVHARDIADLGHDARLVKGADVKALRNVAQKNDIRDADFIARLFYVPGTKYVFVKNQRQQSLQFLQNEYKSLQELRIRVGNQIHAGLEEFGCPARKSKTFIQTRLMDHLEKNAELIPEDVMASFQRRREMWLSLFEQEEEAQKRMEEIAKTDDDARRIMSVPGVGAQTAVRLLVHIGGDIGRFKNSGQFAASIGLVPKQNSTGGNTTLNGITKCGPKRLRANLVQCAQVILMHADKLKGNFGDWVRKMQDSGKKRGVIACAIASKIARIVYRLMKDKVDYTPVPSR

SEQ ID NO: 58758 - protein, 355 aa, unidentified
MVMVLGVDVHKDTHTTVVVDYAGREQALRTVRAIDSGHEQLVAWARREYPCERKWAVEDCRHVSTRLERALLAGGETVVRVPPKLMADARSGARTRGKSDPIDALAIARAALREPDLPEAVHDETSRELKLLVDHREDLLGERTRMINRLRWHLHELDPELELPARSLSRLRRLDGLAAWLVEQPPTATTGLITRLATELVADIRALSVRINALEREIAQRVEKVAPQLLELPGCAALTTAKIVGETANMARFRSEACFAMHAGVAPIPASSGRTQRHRLARGGNRQLNAALHRIALTQVRMSGSLGHAYHQRRRTAGDTSKEALRALKRRLARVVYGRLTNTATPAADGHPIAA

SEQ ID NO: 58759 - protein, 482 aa, unidentified
MKKRNIFQNQSQEILTLFERAKDRSKVMCIPMDYAKKDHVVMFCNGNGKILRKPFSIKNSPEGVEYLIDRVTRSCRHHGIDIKHTFLGGEDCGTYADNFIEALRSENWLVAGVNALDAKRHRENIQASTDRLDLLGISNMLLSCRGNCSPAQSGIYWNLRTLCRQRQKLVVTKSGVKNRIHTIVDQIFPGFLNETQSGIPPFSPASLILMEDRFSVHQIRRRRPAALIKALAKQGLPNPERRAKKLQHYAAQVLKPQKDHIVTLQLSLKQQIKLILCLQDSTEQLKRDIAEQLAQIPGAFLTTIRGIGLILAAGVSAEIGDPNKQKSLTKLVSYAGIIPQIKQTGGEQGKTQVGRVGKRCNRILKNYVVQSGSHMGLHGPDELMADYKRREAREQHADFGMARRFLRMAICLMRTHQSYLPKRLRNQQCKMEERARYYHKAWPLIMDKWRRVRMLDIAFDKKMPLGQWRNMIQELYGIKLSL

SEQ ID NO: 58760 - protein, 348 aa, unidentified
MEHYAGMDVSLESVCVCVVDGSGRIVREAKLASEPDALIGWFTALDFPVARIGLEAGPLSQWLYAAMAQAGLAVELLETRHVRDAFKAMPVKSDRTDARGIAQLMRLGWFRPVHCKSLPAQEVRALLTARKLVQAKRHDLEMSLRGILRGFGRKVGKTTPRMFEGRIRELVAGHATLTIIADALLAARAALARELRGLEKRVRETARTDERTRLLMSTPGVGAVVALTYVAAIDDPGRFRSSKQVGAHFGLTPRKYQSGETDVTGRISKIGDGSVRTVLYEAANIILTRPVKGSTLKRWAMAVARRAGPRKAKVALARKLAVVLHRMLADGTPFVAEPATRAPIGAAA

SEQ ID NO: 58761 - protein, 333 aa, unidentified
MTAVSTLGIDLAKNTFSVHGVDAQGVVTVRRTVSRAKLGELVARLPPCLIGMEACSGAHEWARRFSEAGHTAKLMAPKFVTPYRKSGKNDGNDAEAICEAVGRPNMRFVPIKSVQQQCDLSLHRVRLGFVEERTATLNRIRGLIAEFGYVVPLGTERLRREVRDLLERLPARAASCVRDLLEHAERLRSKALEYEREIRSSLQHNELALRAHTRPGIGPITASALVATVGNGHDFRNGRQFSAWLGLVPRQYSTGGKTRLGHITKRGDPYLRTLLVMGARSVLQRAYRETDPLSRWALALQQRRGYHRACVAIAAKNARVAWALLAKGAPAAA

SEQ ID NO: 58762 - protein, 466 aa, unidentified
MARSKPKASRPAPPAPAFPPQLAAANLHAAGIDVGAEAHFVAVPPSDDPQPVRGFGAFTADLEAIAAWLVACAITTVALESTGVYWIPLFELLEARGFEVLLVDPQQVQKIKGRPKSDVHDCQWIQRLHTFGLLASAFRPADQVCVLRSYLRQRAMLLTYAAHHIQHMQKALTQMNIKLQHVVSDITGVTGLAIIRAILVGERDPAKLAQLRDYRCKHDEATIARALQGTWRDEHVFALAQAVALYDVYHQKITECDRHIEAYLQTFADRREGQPLPPAPRPRKRGRNQPGFAVREPLHRITGVDLTQIEGLDETTSLVILSEIGLDMHRWPTVKHFTSWLGLCPHHRVSGGKVLSRRTKPCANRAATALRLAAACLHHSQSALGAFFRRMKARLGAPKAITATAHKLARLVYSMLKHGMAYVRQGMDEYEQQYRDRTVKNLTRRAKTLGYTLVQTPEGTLKGALV

SEQ ID NO: 58763 - protein, 447 aa, unidentified
MRIVYQRCCGMDVHKDSITACLLLIDEVGEFRTESRRFGTMTRHLKEMAAWLASEGVQAIAMEATGVYWKPIWNILEAEKKFELLLVNAQHVKQVPGRKTDQKDSEWIAELLQHGLLRASFVPPVEIRHLRDLTRMRARIRQTLASFANRIQKVLEDANIKLGSVASDVLGVSGRHMLKALMAGEQDPQRLANLAQGHLRKKIEPLQLALQGHFTDHHRLQLKLLLEFVEFGEQQLSHLDSEIQLLLNKVHAEPDLPGPAEGTVAEAEASPPQPTSPLQTAVELWDSIPGIDQLAATTLVAEIGANMDQFPSAHDLASWAGLCPGNNESAGKRRSGKTRKGSVWLRRALCQAAWSASRTKNTYLAAQYRHLIVRKGKKRTIVAVAHSMLIIAYYLLKRQCTYQDLGPDYFNLRNEDAITHRLVKKLTGLGYHVTLEPARAEAGSETA

SEQ ID NO: 58764 - protein, 325 aa, unidentified
MGVYGIDLSKEKFDVSFLYAGNEKKKIVPNNFKGICNFLKEVDDESILVAEHTGSYGDLLVHLSCQFGIKIALVSGYSIKHSLGLQRGKSDSKDASRIRKYGERFTEDLRFAEPTPESIKELKELYTLREQLSKSRKSLLLGQKTRKHGASQSIVAHQSCNRAIMHLDLEIRSIEDEIEKVVQTDSNLKDNYELITSIKGIGPVTANNLIIKTENFKRISTAKKAAAFAGVCPYPNSSGKMSLKAKTSHMADKKLKSLLFLAAKTAVTHNKEYSLYVARKRLEGKPYFLIMNNVSNKMLRTVYGVIQSRKPYDINHICNDPRQIN

SEQ ID NO: 58765 - protein, 408 aa, unidentified
MDLMFDRVAALDLAKASLTACVRVPGPRGGRKSTTRTFVTTVGGLLVLRDWLVAERVQVVSMESTGVYWKPAYYLLEDTVECWLLNAHQVKTVPGRKSDVKDAEWLAQLTECGLVRPSFVPPPPIRELRNLTRYRRSLVNDLTRETQRLEKLMEDTGIKLSSVTHSLRSKSGRLMLEALIAGERDPLALAELAQGRLRSKRSELAQALVGRFTDHHALLVTQMLARMDSTQDSIEAVQAAITDAMRPFSSQLLNLQTIPGIGPRIAEVIIAETGGDMSRFPTAAHLASWAGLVPGINQSAKRRGSTRCRRGNRHLNSAMIEAARAASHTKDTYPAAQFWRLARHGTNVAAVAVGHSLLVAAWHVMHNDVPYHDLGGDYFQRRIDPARRTRTLVAQLEALGHTVTLDAA

SEQ ID NO: 58766 - protein, 367 aa, unidentified
MLYLGIDQHKSQLTVSLRGEDGSVTLKRQVSTQWERVRAFFADLAEKARPEGGYLAILEVCGMNPWLLEMLKAYGCRETVVTQPTSRSKQKTDRRDAGVLSHLLWVHRQQFLEGRHPLGLRRVQPPTPQEADDRQLTALRARLTKKRTAVLNGIHKILRKHNLEQERPTKLFQTQKVRRWLAAMELPAVDRMEMNLLLPQWELLDGQLELVDAKIAERAAADEQVKLLESMPGIGQYSAVAIASRIGSISRFKRPDSLANYFGLTPGCRNSGEATQRLGSITKQGSKMVRYLLGQAVVKVLRFDGAMRSWYKRIKKRRGAKIARVAVMRRMATILWHMLKRNQKYRYESPIKKHREFEAFEGTVEAA

SEQ ID NO: 58767 - protein, 332 aa, unidentified
MSVYVGIDVHRKRSQVAVIDQDGTVLANRNVNNGVTPILSVIGGLPPGTPAAFEAAYGWGWLVELLEDYGFEPHLVHPLQCKAIASARLKNDKVDAAILAQLLRADLLPEAWIAPPEVRQLRALLRHRVQLVRLRTLLRNRIHAVLADHGYGRPEGCWSGPGRAWIARLDLPAISAEVIQDALALIDAVESVIGRLDTEIRGHARSDPRVNVLTQLPGVGPFTALVLLAEIGDITRFASARKLAAWAGLTPTVRGSDRTVRHGHISKQGSAWVRWILCEAAQKAKRHPDFAASYQAIAGRRGTKIATTAIARKLLTRAYHLLTDASSAGASS

SEQ ID NO: 58768 - protein, 456 aa, unidentified
MKKKAAMEIIHPHAAGIDVGSRSHFVAIGQDKEDVREFGVYNEDLMALAQWLLDNDITHVAMESTGTYWQSLFSTLQEAGIIVTLCNGKFTKNIKGKKTDVIDCQWIQKLHTLGLLSGSFLPDAITEQLRTYCRHRLNLVDAAADRTRKMQKYLRLLNIRLDIVVRDITGLTGLSIIESICKGETDAATLATLRNGNCKKSGAEIAKALQSNKRPDYLFALQQELHLYKQYQQQMTACDIEIEKAILQSINTDENKKQLRASNKPHKRINKNAPKNFDLNQLSYQYFNGIDLMAIEGVSHSTVIALMSEVGYDGVKKFETPKQFSNWLRLSPNTKKTGGKVISSHLPKGSNRLKIALRNAANAIGNLKDTHLSDFFRRISFRRGRAAAVSATARKLAVVIWNMIVKNLPYKPPTDYMFLDQKRKLKLVTRIRKSITKFELKPDDLGFVNASLSATS

SEQ ID NO: 58769 - protein, 355 aa, unidentified
MDNITLLGIDLAKNIFQLHGVDKLGRTKLKRTLRHRALVKYVSQLPVCTIAMEACSSSNHFSRKFQKFGHEVKIISPQFVTPFVQSNKNDAADAEAICEAASRLNMRFVSTKSVAQQDIQCLHRVRKRLVGNRTSLTNEIRSILGEFGIVFSQGRSALEEGIKGLLNGSHPPEELSSKGLVLLQALYSELLELDKRIEDYELKLEQIARQPQCQRLLKVGGLGILSVTALTVALADPEQFKNGRNFAAWLGLVPKHVGTGGKSRILGISKRGNTDLRTLLIHGARAKLRGINRKFINGTKLDPLEDWAYRLCQRQGFNKATVALANKNARIAWSISANKTDFDPKEAVALLKEAA

SEQ ID NO: 58770 - protein, 338 aa, unidentified
MIVIGVDVHKHSLTAVAVDELGRAVAERTSAVTAEPLVEWARALEAERLWALEDCRHVTRGLERALLAAGEQLVRVPPRLTAPQRRRGRTRGKSDAIDALAIARAALQQPDLDRPRAGEETLRELKLLVDHRDDLVAERRRCQQRLRWHLHELEPSLAVPLGALDRSIWLERLGRRLARREQTTQVRIARDLLGRCRNLTRSVLELERELQARTCAIAPALLQLPGCGALSAAKLLSEIGPIERFGSDAQLARHAGVAPLEASSGKQRRHRLDRGGNRQLNCALHRIAVTQGRVHAPARAYLERKQNEGKSRREAIRCLKRQLARTVYNTLKAESALT

SEQ ID NO: 58771 - protein, 308 aa, unidentified
MAAIMVSEQRVVVVGVDTHSEVHVAVALSELGERLSAISVPTTPGGFERLVRWAESLGEVRAFGIEGPGSFGATLARHLRDRGHGVLEVARPDRRIRREEGKSDTIDAEAAARTLLSGTDVGEPKSADGCVEMIRSLRVARRSAMKARTQAANQLHALVITCPEPLRSRLHRLPVGALAERAAGFRPGPVDSPQAASKLALRHLARRHVALGAEIADLDRELDVLVARAAPGLVGMMGIGTDVAGALLVAAGDNPDRLGKETAFARLCGAAPLPASSGKTNRHRLSRGGQPELQEQLHASIEPRRRRS

SEQ ID NO: 58772 - protein, 347 aa, unidentified
MTQAQIYIYGIDLGKNWFHLVAMDRMGHVLTKQKLTRSQLKQFISTTPPCRVAFEACPGSQYWGRLFQQAGFEPKIIPAQFVKPYLKSNKNDFNDATAIAEAGSRGTMRCVPLKSHEQLALQATHRVRQRFIVERTATVNQMRALLLEYGLTVPVGRKVFERSLPTILEDAENGLPDFIRALVLRLRERWQQLDIQIDDMSLMLGQASSTSSLCQKISTVPGIGSIVSTALIAAIGNGSQFKKARDLSAWLGLVPRQYSTGGKSSLGGISKRGNSYLRQMVIQGAKALKIHMKRDKSSLGEWVARLEVGHHHHVVLIALANKIMRICWKVLTSGRDYQPYPNTSSAV

SEQ ID NO: 58773 - protein, 362 aa, unidentified
MSKDNKKRISLKDESETFIKYSVGSDISKEKFDSCISLIDNQQRIRIIATRTFSNTPSGFKFFEEWVFQKCKLDIPVIFLMEATGVYYEHLAWFLHKTSKHVSVVLPTRAKKYLQSLGYKSKNDKIDAKGLSQMGAEQRIEEWCPPTSEILQLRSITRHRQALQETRTRLNNQMEGYTHAEHVNDDVVSHLNLLIEMIDKQIKQTEKMIKEAVKKDENMYRKIDNITQIKGVGLVTVATVIAETGGFHMIKNQRQLVSYAGYDIVENQSGSRVGKTKISKKGNSRIRRILHMASLSVVRYGENQFVTLQQRVFERTKMKMKGYVAVQRKLLILIYTLWRKDEIYNNELSEMQSRSLSFRMAS

SEQ ID NO: 58774 - protein, 412 aa, unidentified
MLFLGDDWAEAHHDIELQDDQGRRLVRRRLPEGVEGIAALHALVADHLPDGAEPGDVAVGIETDRGPWVQALLAAGYTVYAVNPLQAARYRERHGTSGAKSDPGDAHVLAELVRTDRAHHRPIAGDSELAEGVKVLARSHQSLIWARQRQANLLRSTLREFHPAALAAFGTDLASRDALAVLALAPSPEQGRGLRVGQVRAALQAAGRQRNLDSAAERIVTALRSEQLAARPLVAAAYGTTVQALVAVIAELNRQVARLDEQVSESFGQHPDAEVYRSQPGLGPILAARVLAEFGDDPDRYADAKSRKNYSGMSPITRASGTRRVVLARYARNRRLADALYLQAFAALTASPGARRYYDAHRSRGDTHHQALRALANRLVGILHGCLRHHSEYHEATAWPQAEANDQHADAA

SEQ ID NO: 58775 - protein, 356 aa, unidentified
MTSNIKYIGMDVHKESISIAVRNSVGKVVMESVIETKASMILQFIDGLRGDVQVTFEEGTSAAWLYDLLKPRVTKLVVCDPRKNKSMREGNQNDKIDARRLAELLRLDHLTPVYHGEHGLRTLKELVRSYLTVTKDLTRVMTRVKAIYRSWAIPCSGKQVYARCHREEWLGKITEPGVRRRAEFYYLQLDALRVLRQEVRRDLLAESKKHKAWKRLCEIPAIGPIRAAVLLGILQTPHRFRSKRPLWNYGGLAIEMHSSADHRSVAGQLQRSRKNVLVRGLNRNCNHDLKNLFKGAAAVASSKPGPFQEFYTALVAKGMRPEMARLTLARKIATIVLIVWKKGVHFDAQHLKPQTV

SEQ ID NO: 58776 - protein, 324 aa, unidentified
MCLDVHKDSTYATILDPHGKIVNQTRMNNERVLSYLFHFKVERVAMESSNQVAPLYRQLTKEGYSVMVSHPKKTRYIAEAKIKSDRVDSKAIAELARLDALPLAYMPDKETAILREKVRRRAFLVRERVKLRVKIKSILTYEGLKWPSDHGLFTVKGEAWLHGLNLESVGSYLRVLKLLDDEIKLVSKQLKGLAEDNEDVRLLMTVPGIGYYSGLLVKSEIGDINRFPFGERLCSYAGLVPSTHASGNTVRHGGITKEGSKWLRWVMVEAAQAHVRMYDTVMTQAYHRIAERRGKRVAVVAVARRLLMCCYSVLKNRRPYHDQI

SEQ ID NO: 58777 - protein, 342 aa, unidentified
MDSMVAIGVDTHRDSHVAVALDGLGGNLGSLTIAADASGYAGLWQWASELGSPLFAVEGTGSYGAGLTAFLVAAGGVVFECERPRRRDRRKGKSDLIDATLAAKRLLTGEPLPRPRGGGGVRDDLRMLLLERRGAVRARTAALNQLQAVIVTAPDAMQDSLRGLDGKQVAKQAARLRSRTDETAVTVSVLRRIALRVQHLGSEIDELDGQLETITSELVPGLLEECGVGPVCAAQLVVSSGDPGRMRSEASFAALAGTSPVQASSGQTQRHRLNRGGDRQLNRALHIIALHRSRWHPDTAAYQQRLLAKGKTPREARRCIKRQLARHFYNKLKTTPTLHLTQ

SEQ ID NO: 58778 - protein, 340 aa, unidentified
MTDVTRIGLDLAKSVFQVHGVNADEKVTIRRSLRRGQLLAWFSKLPPCLVGMEACAGAHYWARELTRLGHTVRLMPPLCVKGYVWRNKNDAADAAAICEAVSRPAMRFVPSKTPEQQAAAGIHRARSLLTKQETMTMNSLRGLMAEFGIIAPQGRKGMAELLAILNDPDDRRIPEPLHGALQALAATLRSLAAQLKTVDKALAAWGRQDAITRHLSTIPGVGLVTATAIAAHVPDPHVFASGRHFSASVGVVPRQEGTGGKVRLGSISKKGSRYIRRLSVNGAMSYLRSKSGRQDPWVVKMLASKPMKVVAVALANKNLRIAWALMVRGEEYRPATVAAA

SEQ ID NO: 58779 - protein, 343 aa, unidentified
MFYAALDVSLRSVAICIIDHEGKVRLERSVPSDVPDLVRCLREFGEPIHQVGLEAGTLTQHLTYGLAESGFEVVCMEARQVKAALSAMRNKTDKHDARGIAQILRSGWYSRVHVKSVEAHYTRALLTSRKVMQRKCIDLENEIRGLLKVFGVKLPLRLSRGAFDVAVRETIESDSALSLALLPMLEARGMLFDTFVELDRRVKRKARADALCTRFMGIPGVGEITALSFKAAIDDPSRFKSSRTVGAHFGLTPRRFQSGEKDNPGRISHAGDRDVRATLYAAANAMLMRSIAWSSLKAWGVKLMKTKGRRRAIVAVARKIAVVLHRMWIDGSDFRLGSQETAA

SEQ ID NO: 58780 - protein, 393 aa, unidentified
MRFAGIDIASETHVVALVAADGSVELKATPFGEDDIGYQKALALLGTPGEVLIAMEATGHYWKNLFAVLAAAGHAVALLNPLRTHRFAGVDLERTKTDAIDALTIARFAAQKRPAATTVPDALTEELRELVHLRQRLLQDFGDRVRQLHRLVDLGFPEFTRYVRTLDSELASAILRVYPTAAAFRGVSVRRLAALRYDGRHHVGLDLARLLTEAARRSVGQHHSATYRLQIRYACDDLDTLRRRLRDLDRDLDGKLREHEVGRLLTTIDGIGTHTAARVIATVGDPAHFRSGSALAAYVGTIPALKQSGKRQSVRGAVTPIGNAQLRAALWMPTLTAVRCNPWLRAHYQRLLARGKLPKVALVACMHKLLLAIYSVAKHRRPFVPNLTAPATP

SEQ ID NO: 58781 - protein, 348 aa, unidentified
MAHFVGLDVSVKETSVCVVDDTGKVILEQKVPTEPADIITLLNSLGVSYGRIGIEAGSLSQWLVNGLAEAGLPVVCVETRHMKALVEAQKVNKSDRNDARGIAQMMRVGLFKPVHVKTLASQERRMLLTSRKLLQKKLLDVEADLRGTLRNFGLKVGMVSPREFEPRIRALVEGFPRLAAIVEPVLTVRQTLRQQFAVLHKMLLGLVRQDPVCRRLMTAPGVGPVVALAYRATVDQPQRFLHSKAVGAQAGLTPKRRQSGETDYDVGISKSGDVMLRTMLYEAAQSLLTHSRKWSWLKAWGLRVAQRRGMRRAAVAVARRLAVILHRMWIDAADFRWTRANKKAVLAA

SEQ ID NO: 58782 - protein, 349 aa, unidentified
MLHVGLDLSRKRVDVCLISSDGELVDHFRALADRDGLYGLTRRVAVYGEPVRGVVESMNGARFVHDELVRYGWEVLVADAQRVKGLAPLACKTDKIDARVLAELSFRDLVPAIWLPTPELRAERERARWRLHLVKHRSILKNRVHASLIAFGHQVPMADLFGVAGRKLLAGLEFPEPWLGHVQASLELIDDLDHRIGEIEKWLHRSGADHRYIPLLMTAPGIGWVTGFTIAAEIGDIARFSSPVKLTGYTGLCPRVNQSGEVDRRGPLSKHGPRYLRWGLMEAAIAASSHPLFKDRYQRTKRRLGRQRGAKVAQIELARKLTEAIWYMLTRNQPFKPFAPAGAISRLTA

SEQ ID NO: 58783 - protein, 348 aa, unidentified
MLIIGCDYHPGFQQIAFVDTETGECGERRLSHREEAEQFYAGLRERSVRVGMEASGHARWFERLLNELRFELWIGDAAEIRTKRVRKQKTDRQDAQLLLRLMVEERFPRIWVADAANRDLRQLLWHRHRLVQMRTRIMNQLHVAALNEGVRRKKALWRPAGRSELESLVLAPWAKRRQQDLLDILDQLTPKIQGLTRALEEEVEKRPAARRLMTHPGVGVLTALAFELVIGTPDRFHCGKQIASYVGLVPTEESSGDRRRLGHISKQGNSLLRFLLVEAAQVTVRSQAQWRSKFFHLAMRRGRKIAKIAMARKLAVHLYWMWREGLNYGEWSKLGSYAGEPGNPHGVQ

SEQ ID NO: 58784 - protein, 310 aa, unidentified
MNDTIGIDISKPMLDVFRLATGEHRQFSNDKPGCTRLIRWIGNEPVRIVFEPTGPYHRLLEQTLTKAGIAAVKVNPRYARRFAEATGELAKTDRIDAAILARMGAALDLEARPARPENHHDLRELSVARQALIKDRIAARNRAQVARNALLRRQLKARLSQIEKQITEIEKAMAAIVSADETLARRREILASIPGIGPITAMAILVEMPELGNLDGKQVASLAGLAPITRESGGWKGRARIQGGRAALRRALYMPALVALRLNPDMRRKYRALKDAGKPSKVAIAAIMRKLIVLANALVRDNRKWSENAA

SEQ ID NO: 58785 - protein, 391 aa, unidentified
MIFVGIDVAKDKHDCFILNSEGTVLADVFTIANNRIGFETLLSRIQSCSQGESKIKVGLEATGHYSYNLLGFLLDSGLTTYVINPLHTNLYRKSLSLRRTKTDRIDARTIAMMLMSDVDLKSYSNTAYHNEELKSLTRYRFDKVKERAKLKSSVARLVNILFPELEKLVSSLHIAVVYALLSNYPGASYIANANTEELAETLCTASKGRYTKSKTAEIQVAAGVSIGSKMPAKSMELKHTIALIRELDKEISEVESAIDKITSQMDSPIFTIPGIGRHMGAMILAEVGDFSNFASADKLLAYAGLSPSTYQSGQLQNCYAHMEKRGSRYLRYALFNAAKYVCLWCPTFSAYLEKKRSEGKHYNVAISHAAKKLVRLIFAIQRSGKAFLADY

SEQ ID NO: 58786 - protein, 339 aa, unidentified
MELYAGLDLHSRNTYIGIMDKAFNRVFKKRVPNQLEHILKTLAPFRDQIKGFVVESTYNWYWLVDGLVDAGYSSAHLANPSAIKQYEGLKYSDDQHDAFFLAQLLILGILPQGYIYPKKDRPVRDLARKRMFLVQHKTAHILSLQSLIQRCCAIKIRTNDMRHLTVTELEMWLGEEYLVLSAQANLDSINFLVQKIQGLEKAIRKKVKLRKAFYQLKTVPGIGDILALTIMLEVGDINRFPKVGNFTSYCRCAPSQRLSDGKSKGQGNRKNGNRYLSWAFTEAAHLGRRYNERFRAYYNRKVAQANTILATKALGNKPARICYYIMRDQVPFREELFCH

SEQ ID NO: 58787 - protein, 424 aa, unidentified
MRPVLLWCRVPVLWEFGPGSRAATSLVTGSVPIPLGRVLQPSPLPRSLPQSIPCHPIVERAVAKHKRKKSPAEQQLPAQLHAVNLHAAGIDVGAEAHWVAVPVEADPQPVRAFPAHTASLHALAAWLTLCGITTVALESTGVYWIPLFEVLETQGFEVILVDPGTMPKNGRPKTDVHDCQWLQRLHTLGLLSAAFRPDDPVVVLRSYLRLRLTLLADAARHIQHMQKALTQMNIKLQHVVSDITGVTGLRIIKAILNGERDPRRLATLRDQRCKEDETTIAQALHGTWREEHLFALHQAVAAYEFCHQQIQEGDAKIAAQLQTFEDRSKGESLPPKPRKRHRNRLSFETRPLLYRMTGVDLTKIEGIDETTALIVLGEIGLDMSRWPSEKQFTSWLGLCPRVRVSGGRVLSSRTRPTANRAAAA

SEQ ID NO: 58788 - protein, 380 aa, unidentified
MDGRNREAALGSNTPQGTRYFGVDLHKDQITWHCITRQADGSLERTNGKVSTSHIVDSFVPMLGATDCYVIVEASCSTFFFYGLIERHCTKAIVINPAAFREMYMTGKKTDRIDAKKLADRLMYHIEMNDPEDGFPEVFVPDAEALHIRKLVTAYELLVKQMTQLKNQFKAVLRSKLIADYDAALEEGLGKLMEDSRLDEADLILVKALATAHTGLGEEKNLIKKAILEMGARRFRNETRLLITVSGISILGAIVFMSDIVTIHRFKSAKKLTAYLASVGKVDSSGNSVREGGLSRRGRRTSYRFILQGLEHIVQGNSGFRRFTERHASKKANKVRSAIVRKTFVAMYYMLKNEEAYRFIDERIYRRKEREFEKLLQNAA

SEQ ID NO: 58789 - protein, 344 aa, unidentified
MELVIGMDVHKDTVAVSLIDGTGREQAATTVENTVAGHERLITWLSERAPTARCGMELSGGIARGLATALGAAGHLVVAVSPRLSSREARRLRSRGKADPSDALAVARVTAREPALPAVRTGDAEEDLKLLVDHRDQLWSERTRVANRLHADLSIAYPGYQRTVGRALTSRSSLARAEELLAADASTRAELARRRIRRLRDLDGELRELERRLTVQVGSLPTTLTTIVGISTLTAARILGEVGDVRRFPSQAAFASANGTAPLPASSGRTERHRLNRGGNRRLNRALYVIALTQTRHEPRAIAYLQRKRTEGKTRREAMRCLKRRLSDVVYRQLVADAEARVDT

SEQ ID NO: 58790 - protein, 414 aa, unidentified
MDGEINKSCGLDIHKRFVIATILSRSGEKQQHRFARDDDGILDLKNLVTSEKCDVVACESTSDFWVPIYEALIDHLPVIVGNARDMKAFTHKKTDKIDSEVIAKLALNKMVQPSRVFPKKHREFRSYVRLRLTLVRKRTDIKNEAHAILSSEMLHLGDVLTDIFGKNGRAILAGISSGKNIDQIIESLSPNVRKKSVQIREILDREISQSAAIRLQICLNLIKHLDEEIEVLEREIFNYAYQKHKREMEILMSVPGIGELGAATLIAEIGDFRDFPTGDKLASWLGIVPNVYQSADKYHNGRITKRGSKVARWILTQIAQAAARKKNSRLKEFFNRKKKTIGYAKAIIALARKIATIIWHLITNDEMYEDETGYKKGEVKKRKIVEAEIFSVDERITIISGIIAIMGKKEGEST

SEQ ID NO: 58791 - protein, 368 aa, unidentified
MHEGITTYVGLDVHKDSIAVAVAGDGRAVPHFVGTVRPDFKQVRKALSHYGSPSSLQIVYEAGPCGYTLARQLLADGFGCQVIAASRITRSPTERIKTDRRDAITLARLARSGDLIAVRIPDERDEAIRDLSRARQDAVRACLKARQQLKAFLLRHGRPLRNSKPWSPTGELYLSKISFAHPAQNIAFADYRQAVLHTRARVERLTEALRAQCEHWRMQPLVSALACLRGVDLLTAVILVAEIGDFTRFAHPKELMGYLGLVPSEYSTGERHHRGDITKTGNAHARRVLVEAAWNYRFPARLSHPITRRQEGQSKSVRDIAWKAQLRLGHRYRKLQARKLHQNKIIVAIARELSGFLWDIARHVQIAA

SEQ ID NO: 58792 - protein, 360 aa, unidentified
MQKQISELNFEGQKVFVGIDVHLKSWTVTPLTEKLTHKTFSQPPDAEVLHNYLVNNFPGAEYHSVYEAGFSGFWTHYKLKALGINNIVVNPADVPTSQKEQLQKDDPTDSRKLARSLRSGDLRSIYIPEPNTLEDRSLVRMRASLVKDLVRYKLRIKSFLYLYGISYPPEFENSKTHWSKRFMIWLKEGVSLQHETGNQTLSYLVRQAEYQRQLLLELTRKIKEMSRSEKYMRNIALLRSVPGVGFITAITFMTEIENIERFRNTDHFAGFIGIVPNRHSTGGKENDTEMTFRGQDMLRRYLIESSWTAARTDPALTMCFHKYTYRMEANKAIIRIARKVLNRIFFVMKTKTKYVSCVVK

SEQ ID NO: 58793 - protein, 337 aa, unidentified
MSRFIGVDLHKTAFTVCFMEGEEKRLATYKMGEIDRFRSELHLDDEVALETTTNTRSFMKQIQDRVARIHVINTMQFKVVSHSVKKTDANDAETMAFFLSKGMLPEVRMKDERYAELESLANTRHKLVQLKTALKNKIHNILNAHGIVTKKECLSSTKGLAKVLEYRVSAVARIELEVIIDQIKGLNAGIAKIDEELAAQGKDLDGHEGLTSIKGIGDKSGAILLSVIGDVNDFEDEKKLAAYFGIVPRVSNSNETNRQGRITKQGSKLGRTTLVQCTLVAIRYSNYLRAFYEKLKAKKGSGKAIIATAKKLLGIIYLTLKNKWVFEDFPNFVLKTA

SEQ ID NO: 58794 - protein, 408 aa, unidentified
MEVIHERCAGLDVHKETVVGCLRVRERGQVRREVRRWATTTAELLELGDWLRQAGCTHVAMEATGVYWKPVWHVLEGEFELILANPAHIRNVPGRKSDVNDATWIADLLAHGLIRASLVPPGPIQELRDLTRTRKQLMREIVQHKQRIQKVLEDANVKLASVVSDVFGESGRRMLKAISAGQTDARQLAALGDGRLSASRETLAAALQGKVTTHHRFLLSQHLRMIEHLEQTVTAFEGQIEAAVQPFRAAREHLVTIPGVSATAAHVIIAEIGVDMSRFATVGHLRSWAGLCPELHESAGKVMSRRLRHGAPWLKTVLVQCAWAATRNKNNYLHAQFVRLRARRGSKKAIIAVAASILTTAYFLLRNQVPYRDPGALYFARIDQERTAQRLARRIKELGYEVQIRKAA

SEQ ID NO: 58795 - protein, 339 aa, unidentified
MQIVTIGLDIAKNVFQLHGVDAAGDVVLRRKLRRSEVRIFFSRLTPCLIGIEACATSHYWARELVSLGHSVRLIPPSYVKPYVRRGKNDAADAAAICEAVARPTMRFVPVKSVDQQAVLVLHRSRDLLVKQRTMLINALRCHLAEFGIVAAQKRTGLAELVACVEEGVDDDFPELLRRGLNPLIHQLKQIQAQILQLEKEIETWHRYNSISCRLATIPGDGPIIASAIAATMLDPAHFRSGREFAAWLGLVPRQNSSGGKERLGRISRQGNRYVRRLLVIGATAVLRHDRRRTSGIGWMRALLERKPARLVTVALANKMARTAWALLARNADYRVPTTE

SEQ ID NO: 58796 - protein, 314 aa, unidentified
MEGQKAGIDVGKKNLYLSYQGKIYKLNNDEQGYEEIRKILPKETKIILEDSGIYTRRVLRALGKEYEIRILNPLIISKHKSIRGKKSDKIDAKRLEEIKLDETRMAKISKERELTTQWDFITKTTSKIKNRIRRDLNSLGLEDKLNKKNIEKTLSMNEPEAEEIKFLLQELKHFEEQKKKIEEELKSLIPRDHVIFTIPGIGEIIGSLIVARVGDFSRFPTKKKFVAYCGLDPFTEQSGSRVLNQGISKRGDALLRKLFYLSALVAIRVNPTIKEFYENHRGKLRGKKLVIACARKLAVITWAVCYYNKPYNEL

SEQ ID NO: 58797 - protein, 429 aa, unidentified
MQNESTPGARGPVFCGVDTHADSHWLCVLDWRGRKVLSRRFPADAAGYEALAGAIAAAGEPACVAMEGTSSYGAGLTRHLASLGMPVREALSPARMQRRRPGQGKCDEADAERAARAAMSGSKLGTPKSQDGWVDGVRCMLAARSGAVKARTSAINTARSLLTTAPEGLRSRFRGMAGPRLMEELPSVRAEGALGAALGALADLWAAARDAALDMERAIEASLEENCPALLAMYGCGPVSAAKLAVAAGDNPDRLRSEASFAAICGACPIPASSGKTVRHRLNRGGDRQANSALHEIARQRVMRDPETAEYAERARARGKSDREVMRCLKRYVAREAYRALMRPHEIRRPEDASELVAARRAARVSQVRAASILGTSEKYISMLERGQRELKPIRRAYEAWVEAGLPLDWDRQAFEAERKMNSKKHLAK

SEQ ID NO: 58798 - protein, 415 aa, unidentified
MTESTFLFFVGVDLGSERHQVQAIDAQGKELAGRSVEHGGAGVRDLLEWLAQVTQGAHAERVAIAMEVPRGAIIDALLERGYSVFSINPKQLDRFRDRFSMAGAKDDRRDARVLAHSVRTDGPHFRRLHSDDPRIVRIRELSRGEEALGQDLRRHANQLWSFLQRYFPAVLRLCPGADEPWAWALLRRCRALPSRAARLHPDTVRDVLRQHRIRRLSAEQVCETMRQPLPLAPGVEAAIAEQVLLLLPQLELLHRQGLQFQHRLEALLEELTVDQNFAEHGSLAILRSLPGFGRVCTATVLAEAFPLLAEKNYRALRALCGVAPVTKESGKTRVVSMRRACHNRLRNAMFHAAQVHSHHDPRAQQLYARLRHRRCTHARAVRGVADRMLALLCTLLEKQTRYNAACRGLAEAQCA

SEQ ID NO: 58799 - protein, 345 aa, unidentified
MTNNIQFSSVCGIDIAKSVMQVYKVTSDGVVSNKAVKRADFLNEFRNIPPALIGMEACGGSQHWARELQSLGHTVHLMPPKLVKPYVTGLKNDKNDARGIYKALEMSVREVPVKSAAIRDLALLQTMRTKRQREKVAKINHIRGILTEYGLVMGKSINAFLAKAGSLIVQLKERADVSPYIVSELTALFREVKEAMEKIKELETNIDSIAKTLKQYDLFRSAPGVGPITAATMLVLLCNPAVFKNGREFAAYIGLAPKSSGSGGKNFVTHIPKKCECNNDVRALLVQCAHSICRCKHKSDWVSSILARKPKKVAIIAIANKLARQLWIMAKKGEKFEKRFILAAV

SEQ ID NO: 58800 - protein, 346 aa, unidentified
MPETEVDTFAGIDVSARELSVALRRGKGEDKPALAKFSNHPSGHKALIAHLLRGGRRVRVCLEASGNYSLDLALTLQAHRQVEISVINPRRARRFAESLGQRSKTDPVDARVLCEYAARMPWVAWQRPSSVAIHLRAVARAIADLGVIHTQQNNRAHASAASQALPVLVVREMQRHQKYLEQRMTRLRREALRLIAGDSELDRRFRLMLTTTGIAETSALQILGELAVLPEMLDARQWVAFCGLDPRLFKSGKSVEKRPRISRGGSRHLRRALYMPALVALRRDPYLRCFYQNLLARGKARLQAVVAVMRKLLHALFAMFRTNQPYDGSKLCCAVDMTGHAIAAFA

SEQ ID NO: 58801 - protein, 430 aa, unidentified
MTVMEVIHPRCAGIDVSKKDAKVCVRIQGRGRKATSSTVTTWTSMTGSILALREHLLAERVTCVVIESTAAYWKPFYFLLDEALNVMLVNARHARNVPGRKTDVSDAAWLAELGAHGLVRASFVPPEPIRVLRDLSRARTTIAQARTKEIARLETLLEDAGIKLSSVACEITGVSGRAMLEALIEGQHDPGELADLAKRQLRKKIPALTEALQGRFTAHHGFMVRLYLDRIDAHEADIARLDARIEEAIGPFRAARELLVSIPGWSQVVADVFIAETGADMSVYPTAEHLASWVGVTPRANESAGRITSAKTMPGNRHLKAALGVAALSASRSTNTYFGARFRRIAGRRPVRPGTKKSRRQSAAGQTAIVALEHKMLTCAWHMLVNGTFYQDPGPDYYTRNHPAQTKAKAIKQLQALGYDVTLQPHTDAA

SEQ ID NO: 58802 - protein, 341 aa, unidentified
MNGSKTVVGIDIAKRVFQLHWIDMETGEIVSLQLKREQFLEHFANRHKCLIGMEACGGAQHWARKLTGMGHQVKLLLGKAVKGFVIGNKNDRQDARAIWTAVQQPHVKAVAIKTEAQQAILALHRMRSQLVKFRTAQINGLRGLLTEYGEVMPQGKAGVRKGISDALGKLADRLPAMVIDTLREQWARIEKMDEEIATIEQRIKHWLKQDDACKRIAEIPGVGPLTATAAVAMMGDPKAFKSGREFAAFAGLVPRQVGTGGRVKLLGISKRGDTYLRTLLIHGARSVLTHAKDPGPWVTELRRRRPLNIAVVALANKMARTIWAVLAHERTYQKGFVSRPV

SEQ ID NO: 58803 - protein, 436 aa, unidentified
MEEVTDEPLYRDRVCGIDIGKAGMAATIRVPSDENPARRASETREFATAKRGVLALADWLRAWQVPAVVMEATSEYWKPVFYRLEAEGFECVLADAKQVKNLPGRPKRDPSDSRWLAACFERGAVRSCFVPDPEFRIIRLHTRYRRDLTDERTREKNRTDKLLESAAIKLSSVVTDLHGVTGRDIMEHLIAGERNPKVLAQLARARARRKITELEHALDGAEFFTPEHAALLTTMLERIDRLTGDITRLSGVIEQLLAPYEEQLQQAESMPGWGRRSAEDAVAETGVDMSKFPTGGHLSSWAGRTPLDSQSGKRTGRARHKKGNKYLAAVTGETAVAAGKTATREGARYRKLARSRGKGKAQVALGNTQLKVYHKLLSSPGMRYQDLGPDYYERQAAIRRKIAYHVREIEALGLDVTLTRPAPEPGPDEPANTPAA

SEQ ID NO: 58804 - protein, 367 aa, unidentified
MKKLTTTMMQRTLNKEDGRLTIGLDLGDRSSFCCVLDEAGDVLLEQKVSTAPKAIKEIFGAMPPSRIALETGTHSPWISRLLSELGHEPIVAHARSVRLIGESRRKDDRLDARTLARLVRIDPDLLCPVKHRSAEAQADLTVIRARAALVRTRTMLVNAARGLTKSYGERLRGCNARGMKPKAAQDLSPELKSALEPMLREIESVSERICEYDQMLESMARNRYPEADQLKQIKGVGTLIALTYMLTLEDPHRFRKSRDAACYVGLQPGRRNSGQSEPQMHISKEGDPYLRALLVQAAHHVLGPWGVDSDLRRWGMKLAEHGGKRGKKRAVIAVARKLAVLLHRLWVSGEVYVPLGLNSRTTLPAAA

SEQ ID NO: 58805 - protein, 406 aa, unidentified
MELTTLHKRVIACDVHQAQVTVCAILEEPEGSVRIEQQRFGAFQRDRRALAEWVGARRPDVVVMESTGIYWKSLYAALEAVGIRAVVVNARHVKNVPGRKTDIGDAQWLATLARAGLLRGSFVPPATLRELRLIARQRQKLMGQLASEKNRLHKVLTDGGVRLGVVVSDLHGQSARAMVKALIRGQAPHEVLRHASRRLKATRAEILDAVQGELTDSHRFVLDELMQHIEGLEARVARFEARLLAGLADQRPVLALLQTLPGVDLIGAALLLVEIGADMDVFASADRLASWVGICPGNNESAGKRKSGRIRKGNPYARRLLCEFAHAASRTPSAFQGKYKTLVVRRGHKRAIVALAHKLLRTIFFMLKRGEPYRDSATDYEALAVQRNAPRWIKALTRFGYITPAA

SEQ ID NO: 58806 - protein, 343 aa, unidentified
MNFVGVDLHKKTISLCVVVVVGGKRKVVSRRRFDCQNTAAIRGFFEKQGTFQAVVEATANYEWFLLLIEDLADRCVLAHPKKLRVIAECKHKSDKVDAQILAEFLAMDMIPEAYRPSPRIRQYRVLVRYRHYVQGRITSLKCKLRDKAAHYNADIAELFTLKGEQHLAEIAMGRADRFQTTEMLELLHFCQKQFEEVNAELRRFTKTAPGPEQEAHAVLSTIPEVGPVTIDIVLSELGDWRRFRSAKQVVSYAGLDPGYRESDGKGKRLSITKEGSRLLRWAMVETAWRLVGKFARWRHIFETLKKNTGSKKKAIVGVARRILCMMYAMLREGKAYRPAAQAA

SEQ ID NO: 58807 - protein, 410 aa, unidentified
MEVLYAVCCGLDVHKASVTACLRAPGDGPQRRQEVRTFGTTTRELLRLADWLSAAGCTHVAMESTGIYWRPVYNLLEGRFELSLVNAQHVKMVPGRKTDVRDSEWLARLLELGLLRRSFVPPAAQRELRDVVRYRKRLIEERAREANRVQKVLETANIKLGSVVTTVLGVSARAMLKALITGEGAPEQLADLAKRRLRRKRAALGEALTGRVTAHHRFLLDQLLCHIEFLDGAIAVCDRQVETRTAPDADALARLDTIPGVARRPAEVIAAELGCDMSRFPTAGDAASWTGLCPGNRESAGKRLSGRTRHANRTLRQALVESARGAVRKRDSYLAAQYRRLVKRRGDKKAIVAVAHSILVIAYHLLRDGTSYRELGGDYFERLNADRLTRYHTKRLAALGYAVTLTKCAA

SEQ ID NO: 58808 - protein, 429 aa, unidentified
MNSTQNKKIDQVKETTMIVGIDVGSEKHYFRAFNWRGIELTRKPVAFSNSMEGFNSFYNTIVELMQKRELEEALVGIEPTGHYWFDLGQFMGEKNIKFVMVNPHHVHKTKELDDNSPSKNDRKDPRVIAGLVRDGRYFYSYMPTGVYAELRNASNRRFVLVEEQTRAKNRLQKWIAVYFPEYKGIYTHIDAKGGMLVLKKAPTPEEIVRLGVEGIIKIWKDAKLRGNGHKKAMLILNAAMKSIGLKSGLTEARMEIQDLIEDYELQTKRLERVNDLIKELCQQVRYADKLLEIKGIGITTVAGFIAEVGDITRFDSTKELQKLAGLELVSDSSGKHNGKTKISKRGRKRLRYLLFEAAISVVGKNEEFKEIHKYYTTREKKPLKKMQSLIAVACKLIRVFHVILTKGISYDATKMLKDIRHPGEQLKAA

SEQ ID NO: 58809 - protein, 451 aa, unidentified
MSKNKISAFDEIRRNVAGIDIAGHADHYICGPRRDDGSRETVHFGTTTSELYKLLDWLKKRAVDSVAMESTSVYWIPVADVLESAGIEVVLVDTREVRMVPGRKSDVKDCQWLQKLHSSGLLRGGFRPPENIAAVRTVLRERENMTSIRTQCIQQMQKSLDQMNIRVHHAVSDIDGKTGMAIVGAIVSGERDPKVLAALRDPRCKKSVKQIAEELTGTWREEHLFNLGQAYQTLLFMNERIAEYDEKSADMFKALADASGNEPPPPAKEKLTVKERRNLEEKCILQQFVGFDMTSITGIGYETAAIVSSEIGIDLSRFYTEKHLVSYLGLAPSLGKSAGKNVRQRKRCKNTSRAGRALRMAASTLYRSDSELGAYFRSVARRSDRKTAVKATARRMAQMIYRGIRYGEAYVERGAEAYEERMRDRAVRAAYRIIKSNNINELELKKAFATV

SEQ ID NO: 58810 - protein, 475 aa, unidentified
MNIKGTKKKNQVVTANIFEQQELLKKSEVIKENLTASTWRELETNGKFDKNKKLSFISDDMLILGCDVGSETHYVRAIDTRGRELSKSAYSFNNDYEGFQSAKEWAVKIAAEHDKSQIVLGLEPTGHYWFCLATWMIANGISVVQVNPYAVKQTKEVEDNSQLKDDRKDPKLIANLVKDGNFGMPYLPEKIYAELRRLSMFRDQLNEDRIRTINRMHREMKIYFPEYKDALGKVDGAFSLELLKEAPFPEELTALGEEGIRQIWHAAKLRGRGYSRAREILQYAKASVGIKDGSIASKAAVKWFVQKIMELDVELAVIENQINQKCQEIPHTGNVLEISGIGENTLSGILAEMGDISRFDDIKEIQKLSGLGLVECSSGKHKGETKISHRGRKRLRYWLFQAAKSAVAHAEEFKELHMYYTTRADNPLKKMQSLIVIACKLLRIIYTILNTGTKYAPKKMLMDIRRPENKEAIVA

SEQ ID NO: 58811 - protein, 420 aa, unidentified
MKAFSPSDFPVLIGIDWADQKHDICEILPNQTSPTFYVISSKPNAIHDWATQLKSRFPNQKIAIACELKKGPLIYALEQYDHIILFPVNPTTVSNIRKAFASSGAKDDPTDAFIIAELLQRNMDKFSPLVPDQPSIRAITRLVEGRRKLVQNRVDLTNRITALLKEYYPQPVEWFKEKDTEIFCDFITQWPTLERAQQARPSTLLKFFNAHNAHYPERNQRRVEQIKSAVTLTQDQGIIAPNTLMVIICIEQLRLLIRAITAIDKDIKQRYKAQKDRAIFDSFPGAGPQLAPRLLVAFGTNRQRYNNAAELQKYAGIAPVIERSGKKSWTHWRYCCPKFLRQTFIEWAGLSVRFSFWAKAFYQQQIEKGKPHNTAIRALAFKWIRIAFRCWKTSTPYDETKYLESLKAKGSQLLTYALNG

SEQ ID NO: 58812 - protein, 385 aa, unidentified
MSQFSGSRKAALDYNSTIIGAVELSEKKWVLAVQLPGVGRHSRHVLEACGDGLASFVERLKARCAAAGHRIARVILTHEAGRDGFWLARFLARRGIEVHVIQPSSLPVDRRARRAKTDIIDVEMLLRTLMAWLRGEPRVCSMAPIPSEADEEARRAYREREDLTGERRSIVNKIDGILATLGVKGYKALRRDRREQLTALRQPDGDPIPQKARARIERLLDRLDLVLKLIEHVESARDAVLKKDAPADEAERMIRSLTDLRSIGPDFATLLVREAFVRQFRNRRALGGYVGLGGTPFSSGGSEREQGIGKDGNRRLRAAMVELAWMWLRWQPDSALSTWFRARVGAMGGRIRKIMIVALARKLLVALWRYVKDGVIPDGAKMKAA

SEQ ID NO: 58813 - protein, 343 aa, unidentified
MEVHTIGIDLGKTLFHLVGVDADGSVVVRKRCSRSQLLTYTGNLQVLRIGMEACSGSHFLGRALRDQGHDVRLMPAQYVKPYVKTNKSDYIDAHAIAEAVQRPSMRFVPIKTEDQLDLQAVHRVRERWVRRRTAVVNQIRGLLLEHGLTLPKGRCYVDQALPDILEDATLRLSDSFRMLLAQLKLELDQLSAGVEQLDAVLQHTAQENEACQRLTTIPGIGPVIATALIAAIGNGSGFRRGRDLAAWVGMVPREYTTGGKQKLLGISKRGNSYLRRLFVQGARAVMRQRHNQAPGLNCWLTELMTRSHPNVAIVALANKMLRVAWAILSKNETYRTPAPSPSC

SEQ ID NO: 58814 - protein, 529 aa, unidentified
MVYGIISAKDNNTSLAFFKSKKVSQGNLVTADRLQQLANTLRAGDVVYVVSVDRFPSVNAFVMFAGIILKTGASMKILEQPYLDVGNGRHYKASVEEHLKVLAGLESANASRLIGALKLTDAGKGYVSRCITDITIGILAKTYASDGIEFANRPSEFPKLVRKVKKYCVDGKQAVFGLENAYGYGRSLAVWLINKGYVVKDVNTSLSHRESKHRAMFKKSDRDDAQAVALVTINMLHELPDACPNDAYWSLGQLVHRRDNIMSHMTRLKNQLHEHLCISYPSYKKFFTDIGRPTALYFWKQYPAPKYLRGKTVEDLRDELVPISHNRCSTKTCQNILDTVKGDKALENDYQDSRDMIIRSLVRDLKHYEEQLKEMDKAIEELYDRMGCTLTTIPGVNVITAAKIASEIGDVRRFKSASKLAQFAAIAPLKISSSNSEKTEKRKEGNRRLQSTIYFLAIQMIQVSTKGVPRNPVFRDYYERRTKEGKPSKQVLICISRRLICIIYGMLKTQTEYRMPQLKEDTQDLEMQG

SEQ ID NO: 58815 - protein, 427 aa, unidentified
MSYRIAGIDVHKKMLAVVVSDVEGDGEYQFARRLFGSNPEQLRSLAEWLLEQEVEEAVMESTAQYWKPVWGALERFWKPMRQKREGAGPMSGALHLAQAQSNRGPQGRKRDFPDAERLVKRLVARELTLSFVPDGEQRLWRTVMRRKYQLTRNRVQLQNRLECLLEEAHIKLSSFVSNLLGVSARRMLKALAEGETNPASLAALADRRLRATPEQLCDALGACMDLNPVYRRLLKMMLEELRLIEEHIGKLDQEMADLLHPYQDQVKRLAEVPGLGVDSAQQILAEVGVRAAAFPSAKQLSSWVGACPGDNQSAGVNYNHRSPKGNRAMRRILNQSANAAVKAKGTIFEVVYRRSVSRLGHKQMIGAIAHRQCRLIWKVLHDGVRYEERGPTVSKGSKQRRAWRMIRELRGLGYRVELESPQQPNPA

SEQ ID NO: 58816 - protein, 363 aa, unidentified
MTSLTRLAEVVDVVIGVDTHVSTHCAAMLAATTGGVIEDLTVAAVGSGYAELTDWADDLATEHGALRAWAIEGTGSHGAGLARHLRERGELVIELDRPERAKRRNGAKSDPLDAVRAAREALSRARLGTPRQGQQRQALSVLLAARRSAVHAAGVAQRQVFSLVIAAPEPVRDRFRVPTATSMKLKTMVSIAARLRVHPSWDQETTTTVTVLRTLARRAQALQAEADDYERELTAIVTTWRPDLLDQVGVGTITAAVILCAWSHPGRIHSEAGFAMLAGVAPIEATSGQVVNRHRLNRHGDRQLNRALHTIAITRQRRHQPTREYTEKRTSQGKNPREIRRCLKRYIARDIYRLLEHQPLDAT

SEQ ID NO: 58817 - protein, 416 aa, unidentified
MKLFVGIDVSSEKLDTCFLTDELNVLIEDTYDNDSYGATALKNQLLMLQTQFQFEQLVIGMESTSMYSFHPALFFQEDKDLQALQTIVTIEDPHRIKQYTKMFDTDKTDTIDAFMIADYLRIQRFTNSPIKQEKYMALQRLTRARYQMVRQLVETKQHFIENLSYKCNTLKKELRDSEGSTTVFSATIMDLLTEDLTLDDLAMMPLEQLSSFLQEKGRGRFKDPDKLAKTIQKAIRGSYRLGKLMDESIDIVLGILVREIRSLEKAIKEYDKAIQELIQVIPEYQCLTSIPGVGPVYAAGILAEIGQIERFDDQTKLAKYIGLAWKRNQSGRRESEATPLTKKGNRYLRYYMIEAANSVRRYLPEYREFYQKKFQETPKHQHKRAIVLTARKFVRLVDYLLRNHQLYTPPRSVREK

SEQ ID NO: 58818 - protein, 411 aa, unidentified
MDKVYDKCCGIDVHKKLIVVCFRKGNKQEIHSFGATTRELLKLADWLKEGGCEMVAMESTASYWKPLYNILEACELPAMVVNAHHMKAVPGRKTDVKDAEWIADLLQHGLLTASYIPDRDQRELRELVRYRKSLVGERNRELNRLQKMLEGANIKISGTIRDINGKSARNLLEYILTGKQIDSAEYDILYEQKVIAHNLKATKQQIIDDLNGVMSDLQRKMMRLLLKHLDELNAIIKELDDDIDNFMKPEEKQAAKLIQDIPGIGNTSAQAIISVIGTDMTRFPTDAHISSWAGLCPGNNKSANKRKSGRTTKGNNLLRDTLVVCAHSAVKKKDSYFSAQFARISAHRGRKRAYVAVAHSMLVAIYHILKEGVFFKDLGSDYYNQFNKERKINAYLKKLKALGWEAPVVAA

SEQ ID NO: 58819 - protein, 343 aa, unidentified
MQTITTIGLDIAKSVFQVHGVDADGNVVLRRQLKRRYVLAFFQKLPPCLVGIEACASSHHWSRELQALGHTVRLMPPAYVKPYVKRQKNDTADAEAICEAVTRPNMRFVPTKSPEQQSCLTLHRTRHLFIRQQTAIINSIRAHLAEFGIVAPVGRRGVERLLEIVADPDDNRLPEVARACVAALGSQLLALKAQILAFDRRIMAWHRSNETSRRLDAIPGVGPALATALVASIADPKVFRSGRDFSAWIGLVPKQNSSGGKDRLGSISKQGDRYLRSLFTTGALAVIRYAKLHGTKHRPWLAALLARRPTKVAAVALANKIARMVWAMMTRGERYKEPVALAA

SEQ ID NO: 58820 - protein, 360 aa, unidentified
MRCERSFVGLDVHAWSVTGHGLDAVTGQVWQRKLTPDPSEVEGWLRTLPQPVAVTYEAGPTGFGLARHLRAAGLRCLVAAPSKLQRPWGDRVKTDARDAELLARLLKLDEIVEVVVPSVAQEAARDLVRAREDVRGDLMRARHRLSKLLLRQGIVYTGGRPWTGVHDVWLRGQRFDQPPRQLAFDAAYETMLLTVQRRDRLDAAITVMAEHGEYTDLVHRLGCLRGISTLTGFGLAVEVGDWHRFTGSSIGAFLGLVPTEHSSGQSRSQGSITKTGNGHARRLLVEAAWHHRKTYRHPGLTMRTRWEQAPPAARARGHEGNRRLHQRWQTFTARRKKPVIANVAIARELAGWAWSLAVLE

SEQ ID NO: 58821 - protein, 344 aa, unidentified
MGINEEKEVIMLYLGIDYHKRWSYFTCEDEGGRVKWSKKVRNDREEIEGLLNLEERYKVVLECGRNWGVMYDTLEDIGCIEKLVLANPFKTKAIAYAKIKTDKIDSKVLCDLLRANLIPLVWVPPKDIRWKKYIARNRAFLVSLKTMIKNRIHVIIDRNHLNSPSVSDIFGRYGRQWLYSISLPEEERRLLDNHLKMLEFLEEEIKGVERWLKDLFRGDRYVELLNTIPGIGKIFGVMIALEIGDINRFPDAKHLHSYAGLVPSTYASGNKVYHGRLIKYANKWLRWAFVEATLTAIRVSPFFRSYYERRLENKSTQASIISTARMLASVTYHVLKENREYREW

SEQ ID NO: 58822 - protein, 457 aa, unidentified
MSQTKRSRKSRDLTKVHPAAAAIDIGATIHVAAVGPDRDNEPVRTFQTFTGDLHRLADWFAGCGVKTVVMESTGVYWIPIFEILEQRGFEVMVVNARDAKHVPGRKTDVSDAQWLQRLHEYGLLRASFRPQAEIAGLRAYLRQRERLLDYAAAHIQHMQKALTQMNLQLHHVVSDITGVTGMAIIRAIVEGERDPAVLASHRERGCHATVETMCQALVGNYREEHVFALTQALELYDVYQTKVTACDKQIQAILTRLKQTAPPPANKLLPVRRRSRQPNAPGFDARAALHAILGVDLTQIDGLGPYLALKLVGECGTTLTAWPSAKHFTSWLALAPHNKISGGKVLSSKTRRTSNRAASLLRLAAGTVGRTDTALGAFYRRLSARVGKAKAITATARKIAVLFYNTLRHGMSYADPGATYYEDRYKQRVLTNLQRRAKSLGFVLREADQETAQVGVS

SEQ ID NO: 58823 - protein, 273 aa, unidentified
MDHFAGLDVSVKETSLCIVDDTGRIVREVKVESEPAALLQVLINPAYHFKRIGLEAGPLSQWLFSALAEAGLPVICVETRHMRAVLKAQINKTDRNDARGMAQMMRVGLYRPVHVKTLRSQKLRMLLTHRKLLQSKAIAIDNDLRATLRNFGLKVGAVGTAKFEARIKELVEDLPDLVVLVEPLLIVRRVLREQVGILHRRLLAIVRDDNVCRRLMTVPGVGPVVALTYRATVDVPARFRNSKAVGAVFGLTPAKHQSGESTEPARYRGVEMR

SEQ ID NO: 58824 - protein, 408 aa, unidentified
MEILHRRCAGLDVHQKEIVACRRIVTGKKVRSELGRFATTTPGLLAMSEWLAEAKVTHVAMEATGVYWKPVWHVLCPDFELILGNASHIRNVPGRKSDANDATWIADLAAHGLIRASFVPPQPIQELRDLTRTRRELTREIVRHTQRIQATLEEANIKLTSVISDVMGWSGRRILKAIVAGESDPRRLAALGHSRLSCSREELAAALEGRVRDHHRFLIGQHMKTIEQLEATIGEFEKQLEATLAPFSDDVERLKDIPGVSNNVAQTVIAEIGADMNAFATDGHLLSWAGMCSRLDESAGRKRSRRLRKGAPWLKPVLVQAALAAKKVKNSSLRARYYALLPRLGHKKAIMAVAAAILRIMYHMLKDGTFYHDLGPNYRQPKHPERTAQHLAKRLQALGYEVTLKKAA

SEQ ID NO: 58825 - protein, 389 aa, unidentified
MQSMRLPSRRLLDAVREGRPLESEFSDVMKEGLPETAYVTWSRPKEVPQMGVYTGLDLSRKRLDWYACRVDGTVVDAGAVTPDLDGLAWLVHRLGDGDVLAVIETMNGARFVHDRLELAGWDVRIADAQRARALAPLACKTDRIDAQVLAELARRDLVPEVWLPDPRVRGERERARFRLHLVKHRTMLKNRINQTLVAHGLGRPTRHLFGPKGRAVFERLPLPEPWQGTLRASLVLIDSLDEQIDELERELRALGADHPYVPLLRSAPGIAWILAYTIASEIGDINRFPTPRKLIGYTGLCPRVYQSGETDRRGALAKNGPNYLRWALIEAAHTAGRTSHYRPIIERMRDRHGRRRGSAIASVEIARRLSEAIWWMLTRNQPFAPAGAL

SEQ ID NO: 58826 - protein, 421 aa, unidentified
MRGIRGKKITMVKEGTLIATVDIGMTTNTGYCTTTDGGDIKVFKFGNTKEGFEKFWHMVVAAKNRFKCTEVIVGYESTGPYAEPLVQYLMDKPVSIVQVNPMHTKRLKEVNDNSPGKTDDKDPRVIADIIRLGRSLSVVVPEGDAAYLRRLNNARERHIGERTALLNQMQQLVFLIFPEFKTVIQQLMGKTVRFILKNYTTPEKIGALDKNVFGEEMRKRSMGKLGIKDAELLINAAQQTVGIKEGVAGIVLDLQHIIAQLDVVDSFKTEIEAEMAVTLGRLPCSARLLSIKGLGVVSVAGLIGEVGDFSKFRTQSEIMKLAGLDLYEISSGKRKGEKRISKRGRSLIRKILYFAAIQTIRKNGIMHEYYESLIGRGMLKLRALVAVMRKLLGVIHAIVRDDRDYVGEYHAPKRRVIQKAA

SEQ ID NO: 58827 - protein, 409 aa, unidentified
MDRQLERCCGLDVHKETIAACVRIGGRGGRAAQHVQTFRTTAADLVVLRDWLAAHGVTHVAMESTGVYWRPVYYALESDFTCLLVNAAHIKQVPGRKTDVHDCVWIAQLLEHGLLRGSFVPPVPIRELRDLTRYRKALIQDRTRVANRLHKALEDAGIKLATVASDILGVSGRAMLEALATGTTDPMMLAELARGRLRGKLPALRAALAGRFRTHHAFLVGQLLTHLDYLDEAIGTLSTEIEDHLAPFADQLNRLDSIPGVNRRTAEVIIAEVGVDMSAFPTAAHLASWAALCPGNNESAGKHKSGKTRKGNRWLRTALIEAAAGASRAKDSALQARFRRVLRHRGPKKAVVALAHALLRIAYHVLAHGTTYRELGGDYYDRGHTQRLTRRAIRLLEGQGYRVTLEPAA

SEQ ID NO: 58828 - protein, 402 aa, unidentified
MNCVGIDVSKGKSMIAVMRPFGEVVVSPFEVRHTASELSELARLLKSLDGETRVVMESTGNYHAPVAWLLHDAGLYVSVVNAMLVHDYGNNSLRRGKTDKKDAVKLANYGLDHWLTLPRYVPEEDTRLMLKTCYRQYQQYSKVQTMLKNNLISLLDTAFPDANRLFTSPPRADGSEKWVDFVATFWHCECVCGLSKKAFTAKYQKWCRKHGYNFSQDKALDIYASACGRFGVMPKTNTAKLLVEQAISQLQTTSAALAALKQEMQSLAASLPEYPVVMGMFGVGPTLGPQLIAEIGDVRRFHSKKALVAFAGIDAPPYQSGQIDVRSRSISKRGSASLRRTLFLVMGVLLQCAPMDEPVYQFMNKKRSEGKPYRVYMMASANKFLRIYYASVKAYLESLEHD

SEQ ID NO: 58829 - protein, 485 aa, unidentified
MALVLAVVLGLLILEVAMSRRKPNPTSPDPASLALLQTLHPHAAGIDVGAAELWVCVPPGAVAVPHPPAVLPAHVRRFGAFTADLHAIAAWLRQCGVTTVAMASTGVYWIPLYDFLESAGFEVLLVDPRQVQRAPNRPKTDVHDCQWIQRLHSLGLLTAAFRPEEKIRVWRSYQRHRTNLIEDASRHLQRIEKALEQMNVKLTEVVSDITGVTGMSMVRAMVQGERDPKALAKLRDHRCKESMETIAQALQGTWQPEHLFALRQSLELYDYYHQQIRDCDRVIEAHLQGMALPAVTPLEPTRRVRRRKDNEATFDARQRLHHVAGVDLTAIEGIEESTALVVLSEIGTDMSRWPSEKHFGSWLGLAPNPRKSGGKVKSSATRPGVNRAAQALRLAAKNLQRSRSALGAFFRRIAARRGLAKAITATAYKLARIVYALLKYGTAYVTQGLEAYETAYRERVVRQVKRKAMELGLVVVEREAVAQPS

SEQ ID NO: 58830 - protein, 482 aa, unidentified
MKKKTIYSNQSQELLRVFEEAGNNSKMMCVPIDYAKKDHIVMFCNGYGDILRKPFSVKNAPEGVKYLTEQVRRSCRHRGINYKHVFFGGEDVGSYAENFVNTLRSKGWLVAGVNAHDAKKQRANIQASTDRLDLMGIASMLLNRRANCSPAQSGIYRNLRTLVRHRRKLVVMSTEVRNRIHTVVDRLFPGFLDERKTGIVAFTNSSLYLMENRFSARQIHRRKRDRLIDILRRNGTSKPDLAAAKLQEYAREVLTTPQEYMSTLQLSLAQHVKHFRCLNENIKQVEREIALWLCRTQGAFLTTVRGIGIVLAAGLTAEIGDPSVQKPLNNLVSYAGIIPRVKQSGGVEGKTFTGKVAKRCNRILKDYVVKSGLHLGLHGPEDLMADYKRRDAAGQHADFGMARRYLRMAMCLMRTSQIYLPSRLRKKEVDVQQRSSYYLMTWPYIREKWYKLGALEATFKKDRPLGQWRYMVQELYEIKLKL

SEQ ID NO: 58831 - protein, 315 aa, unidentified
MAEQLVVGIDVSKAKLDVAISPSGEQFTVSNDRLGAGQLVQRLTQLGPLRVVLEATGKLEHLAASELAAAGLPVAVVNPGQVRHYAKARGQRAKTDKIDARLIAEFARDLQPAIHPLPDAQTQALAALCQRRNQLLEMQQMENHRLERAPRASQKSIKAVLRFLDRQVAQVEQELDESIKQSPIWQAKRKLLESVPSIARVSSSTLLARLPELGQFSRQKICALVGVAPYEDDSGEWHGRRHIAGGRAPVRQVLYMAALSAVQYNPVLRDYDQRLLDRRVEKKAALIAVVRKMLTILNAMVRDNTPWTPPCPTPA

SEQ ID NO: 58832 - protein, 371 aa, unidentified
MFSSDYTVGCDAHKHFSLFAVLDGRGNLVQRTRVDHQPGAIRGFLEALPEGTAVAMESVGNWYWIVDEIEAAGCLPLLANPAKAKVMMGNVHKTDKLDAQGLATLQYLGKLPSVWIPPAELRDERELPRTRMTFAKHRAMVKNRIRSTLGKYALALKTDSDIFTPKWRPDLESLLEQLPPETGRCVRQQLQILDALTHHIQQLEARIADRLEVTPTIQLVQSVPGPAKVLAIVIDREVGSVERFPSPHHFAGYCGLVPKVSASAGRAHYGRMVRQCNTYLKWAFIEAANVIVAHRHHPNWGRKYVVNLYERTRRRKGHAVAVGAVARYLAESTYWVLKKGEPYREPPHWAPSGKRSPVSLSQEQARAQHGS

SEQ ID NO: 58833 - protein, 359 aa, unidentified
MRIIGCDLHARQQTIAMLDTTTGEMSTLTLMHEGNQVREFYSQLPRPVLVGIEATGSMHWFLNLMDELGIECRVGHPATIRAAEPRKQKHDRRDAELILKLLVEKRFPAIWLPSKELLDLRALLLHRHQWVRIRTRIQNALQAIALANGLRRGPSLWSYDGQAKIAFLPLLPHASYRRSALQGLYRKMEEEIENLTQQVAEQAEQRCRSRLLITHPGVGPVTALATEVFLGDPRRFVDGKALASYVGLIPGERSSGRRQRLGKITKQGSPLLRFLWGEAGTHAVRRDPELKRFYRRKLVQKGLGKARVAVARKLGIRLWIMLRDEIDYEEFCRRGQKQSGEACAGMPETRMVNDRRAVD

SEQ ID NO: 58834 - protein, 394 aa, unidentified
MILVGIDIGKNQHTFSIVDMNTGEILSNPSLFNNNQEGFLFLIKKLNIYSKSDLLIGMEDTGHYHFALLKYLLDIRYTVALINPTTTDLTRKLQGGITKNDPLDSLTICDVIGSNQRKKPYRVTKVNCFDLYEQKQLTRHHHNLKEELNTYKNRLQKCIDIVFPEFNSLFRSKYGIVYMNVLKTFASAQKIANSDIRTIRKCFEYDGRGKRITLSADQLKAAAKTSIGIPSVAEEIQIRHLVCQIEMIEEQLSEIDKKIEEFSLQNNSPILSIPGISHFSGTSILAELGDICNYTKASQIIKFAGVAPYHYESSQFTAQHTAITKKGSKYLRKTLYQIILPVISNNEVFYAYYTKKLNEGKGHRCAQGHCIRKLLRVIYHLLSTRQPFNPKLLV

SEQ ID NO: 58835 - protein, 355 aa, unidentified
MSQEKYIGMDVHQATISVAVMDASGKLIMECLLETKAATIVEFIQGLHGTLSLTFEEGTSAAWLHDLLKPHVNRLVVCDPRKAALLKDGNKSDRIDARKLAEMLRTNQLKPVYHGEHGIRTLKELGRSYLTITKDVTRSMNRIKALYRSWAIPCAGTSVYAPRHRAEWLAKIEQPGVRVRAERLYQQLDSLQPVRLQARCELLRESHQHAAVQLLRQIPSIGPIRSALLVALLQTPHRFRTKRQLWAYSGFAVETHDSGEYRSVRGKLQRNRERITLRGLNDNHNKDLKNLFKSAAISASTRPGPLQDFYVALVAKGIRPTMARLTLARKIAAITLTMWKKGVSFDPKQLNRQAA

SEQ ID NO: 58836 - protein, 369 aa, unidentified
MTDLTLFVGLDVHKKTISVAVVEAAAGAVVRFYGTIANTPDSVRTLCRKLSKDGQQLHFCYEAGPCGYGVHRQLTRLGHRCDVVAPALIPRKVGDRVKTDRRDAMMLAQTLRAGQLTAVWVPDEAHEAMRDLVRLRTQAMRDLRKARQQLLSFLLRHGRNSPYGHWTKMHRRWLGELVFAHPAQHLALEEMLQRIERAEALCDRLKAAILELVPQWSLAPVVQAIQALRGVSLIVAAAIVAEVGCFSRFESPRALMAYLGLNPSEHSSGATIRRGAITKTGNTLARTCLVEAAWTYRFPPRVSQIIRDRLKELPEPIRAVAWKAQVRLSARYRKLTAAGKPGPKVVVAIARELVGFIWAIARMVEPKFA

SEQ ID NO: 58837 - protein, 343 aa, unidentified
MARFVGLDVSQKLTSICVVDDAGRRLWCGQCHSEPEPIERAVRRHAGDDASIGIETGPMTPWLVHELRGRGLNVVCLDARHASAALKMQMNKTDQNDAEGLAHIMRTGWYRSVHVKSLDAHRTRALLGARAQLVGMTTRLSNHIRGVLKTFGMLPGAMRGVPFDRRVEALLADHGGVAAIVRPMLTAWRQLREQIAVFDKAVRTLAKNDPTCRLLMSVPGIGVVTVLAYVSMIEDPARFARSRSVGAHIGLTPRQYQSGEVDRSGHISRCGDTLARTLMYEAAVVILSRVKKASGLKDWAQAIAKRSGIGKARVALARKLCTILHSIWRSGQPFRWSAQPAGA

SEQ ID NO: 58838 - protein, 341 aa, unidentified
MAKISMIGLDLAKNVFQVHGVDASGAVVLRRQLRRGQVEKFFAQQAPTLVGMEACAGAHHWARVIGELGHQVRVMPPSYVKPYVKRNKNDGRDAEAICEAMSRPSMRFVAVKSIEQQASLAVHTTRALLVRQRTQAANALRAALNEIGIVAAQGVKSLRQLMQQLEAPSAAIPEVMRGALLLLAQQWERLDAAERALEGKIKKAALADQAARRLIEVPTVGPITASATVAKVTDVRVFRTARNFSAWVGLTGRDCGTGGKHRVGPISKQGDRMLRTLLINGASSYLRHQKAHGMKDPWVRAMLARRPYKVVMVALAARTARIIWALLTTGERYRAPLPAAA

SEQ ID NO: 58839 - protein, 413 aa, unidentified
MISVGIDISKDKITVCTLEQGSKIIWKPFDVSLKKTEVEKLLNKLEKLKEEVKITMEATGKYHLPILYELKDRGYFVAVINPLKMKQYCRALNFRKAKNDKIDAKQIAEYGLMYWKELEEYKVDKDNYKILKELNRSYQHYMELRIDQMNYIDQTIHQTFPGIKKLIPHNSGNFSKDKLLDFLEKWWHKDLVLEKTEEEFIEEYKRWAKEKRYHPNANKAKAIYQLAEDSISTQPSHNSKIETNIREGINLIKQINQILNRILSQMIEISEPLEEYKEAKKFSGISEKLAVQIVAEFGDLSKFKNKKSLISFIGIDAPPYESGNFKADQRKISKRGNAILRKVGYQAMKCMMSAKNPENEIYKYMIKKEKEGKAKKVCKFAGLNKFLRIYYARVMELKAQKQELKVAQNLKLH

SEQ ID NO: 58840 - protein, 350 aa, unidentified
MSTGQPFALIAGVDLGDKTSHICVLNAASGGVVERSSVRTCIESFERYFSKAAPMRVALETGTHSPWASRTIASFGHDVIVANSRELQLVYNTRRKSDRIDAEKLARLARLDVKLLAPVQHRSAHAQQGLALLRSRSALVRARTMLINHVRGVFKSFGYRTPPGSAAHFPVLAREVMPEELANSMLPALNVLEGTTAQIIALEGAIKELAAREYPEVALLMQVPGVGLITAMTFILTIEDPRRFESSRIVGAYLGLVPGRRQSGARDEKEGITKQGDSALRVLLVQCTQYILRRSSPDSDLKRHGLKIAGSNRTGGKQAAIIAVARKLAVLLHALWVTGEVYEPLRNQAA

SEQ ID NO: 58841 - protein, 376 aa, unidentified
MEKFNGIYVGLDVHKATIAVAVVRGLRSQAQYFGEIANTPAEIKKLVKRLSPEGEVMNFCYEAGACGYEVYHQLKKLGQDCDVVAPSLIPRKAGERIKTDRRDAMMLAKLHSSGDLTAVWVPDKEQEAMRDLSRAREDMMQMQTKARQRLGAFLLRHGKIFQGKSRWTQAHWRWMEEITFETAMQHIVLQEYIEAAKDLERRVQCLEGQIRLAMTGWNLEPVVKALMALRGVGMLTAVATIAELGDLSRFDTPKELMAYLGLVPSEHSSGGSKRQGGITKTGNSHVRRMLVESAWNYRFAARKTRDIQKRAEQTSEKVQAIAWEGQKRLCARYQRLLHAGKVKQQVTTAVARELTGFIWAIACEVSGKAHASKATR

SEQ ID NO: 58842 - protein, 366 aa, unidentified
MLQEAELSGQADSENNLGGSSETMYFIGLDVHKKTISYCVKDAAGCVHGEGKIGSTRRELDQWVRTLPQPRTMAMEATIFTGWIYDYLLPHAESVKVAHPLMLRAIAAAKKKNDRIDAAKIADCLRCDFLPECHIAPTEIRNRRRVLRYRNLMQRQTVQMKNRISGLLMETGVTYDKLRLHRMGYFSRLLSTNEEIEDSIRPLLKLCREHIDRSIRVDRALLRSLQLDPLLTERLRRLRTVPGVGPITALTWVLEVGDTSRFRSIKQATSYCGLCGAEKSSADKVMRTPISKQRNKHIQRILVEAARMAPRVSDELAAVYERERQRGNGNRATLAVARKMVAHMLAVERRKTDFVSAKRSTPAAAV

SEQ ID NO: 58843 - protein, 313 aa, unidentified
MSTHNFVVGIDVSKTHLDVALGSTGPLFQVPYTEEGLHTLASRLQGATLVVLEATGGLETRLLHFLTQAGFPVARVNPRRVREFANATGTLAKTDRIDARILAWYGEALCPPVTPVPDENRQRLEALITRRRQLVEMRVAEENRLAAAPEVIRPSIQQHLEWLEEQISALDEEIRQLLQKDPGWAEKVEILQSVPGIGMVTAATLVAELPVLGQASPKEIAALAGVAPMNRDSGRRTGKRHITGGRSSARRVLYMATVAAIRCNSVIRAFYLRLLAAGKEKKVALVACMRKLLTILNALLRKRQRWNPAAATY

SEQ ID NO: 58844 - protein, 349 aa, unidentified
MQARPDEIIIGIDTHADSHTAAAINGIGQVQGTLEIVTTTAGYRQLVAWARSIDGTWERAGVEGTGAYGAGLCRHLQSEGIEVIEVDRPNRQRRRRRGKSDPTDAEAAARAVLSGDATTVPKDRTGVVETIRILHLTRRSAMKARTQAGNQMKDLVLTAPEGLRAELRGLSTRQRVRLCATWQLEPVTDPTTATRRALHDLACRWLTLHDEISYLDKDLKRLLDATVPTLLAESGVGTEVAAKLLIAAGENPERIHSEAAFAALCGTSPVEHSSGKEDHRRLNRGGNRQANNALHVVALHRARTCPESRAYLAKVQQRKTQRAANRCLKRALARRLYHALMADLRPLLT

SEQ ID NO: 58845 - protein, 343 aa, unidentified
MQTVKTIGLDIAKSVFQVHGVDANGQVVIRRKLKRRYVLSFFEKLPACLVGIEACATSHHWSRQLQAHGHRVRLMPPAYVKPYVKRQKNDVADAEAICEAVTRANMRFVETKTPEQQSCLVLHRTRHLFIRQQTSVINAIRAHLAEFGIVAPIGRKGVEQLLDVVANTKDKRIPEVARACVAALGAQLRALKGQILEFDRQIMIWHRSHETCKRLDEIPGVGPALATALVASIADPKAFRSGRDFSAWIGLVPKQHSSGGKEKLGSISKQGDRYLRSLFTAGALAVIRYAKIYGSKHRPWLTALLARRPTKVAAIALANKLARIVWAVMTRGERYREPVALAA

SEQ ID NO: 58846 - protein, 380 aa, unidentified
MDSIKYIGLDVHRDTISVAVLNAEGKLVMQSVIATHASAILDFLQGLRGTLHVTLEEGTHSAWLYDLLVRRVAHLVVCNPRKNALLKAGSKSDAIDARKLAELLRAGLLSPVYHGQNSTAAVKHLERSYAALTEDTTRIMGRLKALYRSQAIACEGKQAYGVRHREEWLARLSGSGLQQRARRLYAELDFLQGLRGAARQELILECRKYREAKLLRTIPWLGPIRVALLLGRVQTPHRFRTKRQFWAYCGLALETRDSGQYRVVRGQIEHKKKPLFIRGLNRNHNHDLKNLFKSAATTAGSSAGPLGEFYQNLLQKGMRAEMARLTLARKMAAITLHVWKKGEPFNPEYLKSQAAGALRLQDRAELASRRSPGRSARVRG

SEQ ID NO: 58847 - protein, 352 aa, unidentified
MAMLAAQIDAVIGVDTHTDSHTACLVNHLGSQLAVVTVDADPEGYKTLLAWALERSPGPRLVWAVEGCRSHGAGLLRALQQAGQLVVEAGQPQRASRRSGGKSDPVDAGRAAREVLAAQAHAQPRTDGDREALRILLVTRGHATTARTAAVNTLKALLLTAPDQLRQPLRGLTTAAQVRSCAGLRVSTRQPAAERVLCHSLRQLARHISILDRELAANARQLRGLVAAVMPALLNEPGVGPMSAAQLLVSWSHPGRFRSEAAFAALGGVSPLPASSGRVVRHRLNRFGDRQLNRALHTITTWRMLHGHQPTSAYLARRRAEQKSDAEIRRCLKRYTARRLFRLMEAEALDRP

SEQ ID NO: 58848 - protein, 401 aa, unidentified
MQENQQHSSVDVFVGVDVGKGHHHAVALDRRGKRLYNKALPNDEAKLRALITELKTHGQLLFVVDQPATIGALPVAVARDEDVLVAYLPGLAMRRIADLHAGEAKTDARDAAIIAEAARSMPHTLRSLRLADEPLAELTMLCGFDDDLAAQITQTSNRIRGLLTQIHPALERVLGPRLDHPAVLDLLERYPSPAELASASEKTLANRLTKLAPRMGKSLAADIVQALSEQAVIVPGTQAATIVMPRLAQQLASLRKQREEVASEVERLVHAHPLWPVLTSMPGVGVRTAARLLTEVAHKAFASAAHLAAYAGLAPVTRRSGSSIRGECPSRRGNKVLKRALFLSAFAALRDPISRDYYARKVQQGKRHNQALIALARRRCDVLFAMLRDGTLYQPKSAPTA

SEQ ID NO: 58849 - protein, 424 aa, unidentified
MKNCNKQNEKIELVDEKTLVIGVDIGSYDEYARAFTCRKQELSKKPLHFYNTAEGFKTFKDWAVNIMKANGLEKIIVGMEPTSIYWEALATYCKDNGMILVHVNPAAVHKSKELDDNDPSKNDRKDPKVIAGLVADGRYQFPYMPEEEYAELRELSNLRIRTQESLTQWKNRLSRWYSRYFPEFKGAYKNVVSKTAMMILDLYPLPEDIVTLGVEGILQIWKSKKVRGAGERKARKLYEAARNSIGRKEAASIARIEFKSIKEDLDRYQERLDEIEKKADEILPKIKNVDKLFEIKGVGKATVLTFLSEIGEISRFDNPKEIQKLAGYAIVTNESCKHQGEKRISYRGRKRLRWVLYQTALSVIAKNAEFRQIHAYYTTRANNPLKGIQSVVAVACKMIRIFYKILTDGVSYDGTKMTQDIVHA

SEQ ID NO: 58850 - protein, 333 aa, unidentified
MHYVGIDVSKRSLDVCLLAEGSKGSRKTKTLSNGQDSAQNLAKWLILQKCELSQTHVIMEATGIYHEYLACGLHQMGILTSVINPCRSREFAKAMGIFTKTDAVDAYVLAFYGCLKQPEVWTPPEEEVRKRRALLQHRDSLLNDKLRIDNRLNTLKSTEAVQEVMDSLSLVNQYLKSEVARIERLISSHIAQHPGLKRDLKLLMSVDGIGKQIGWNMLAVLRGNNFKSAEQLAAYLGVVPVERRSGTSVHGRARLSKIGSSNIRAKLYMGALTAISKNSHIKALYERLLAKGKMKMSALGAAMRKLVHLCYGVLHTQQPYDEKYKAKIINFSS

SEQ ID NO: 58851 - protein, 391 aa, unidentified
MIYIGIDVAKDKHDCFITNSDGEVLFKAFTISNNRLGFEELYQRIESVTTDLSRVKVGLEATGHFSYNILGFLIDKGLTTFVINPLHTNLYRKSLSLRKTKTDKVDAHTIATMLMSDVNLKSYSDISYHNEELKSLTRYRFDKVKERAKLKTSISRLVTILFPELEKLVPTLHMVSIYALLSEFPSASLIADAHLTRLTNLLEDASRGRYNKDTAIMFREAARTSIGSVMPAKSLELKHTIRLIKELDHEIDEIESEIKLIIDKINSPILSIPGISYRMGAMIIAEIGDFSRFESPDKILAYAGLSPSTYQSGQLESTYARMEKRGSKYLRYALFNATKFVCRWDPTFASYLAKKRAEGKHYNVAISHAAKKLVRVIYQLEKSGHSYIKAA

SEQ ID NO: 58852 - protein, 321 aa, unidentified
MLPTLGIDISKAIFHVELLVNEKLRQRRFNNRPEGFKELCAWLAKHKAERVHVCLEATGRYGDDLALYLYQQGHTVSIVNPARIKAFGESELLRNKDDRPDAGLIRRFCEKQQPPAWQPPAPELRELQALTRHLDNLLETRQQQLNRLDGVSTKTVAKSLRKLVAHLDTEIQRTEKQIQDHIDDHPDLRQSQQLLASIKGIGKLTAAKLLAELEDISHYQTARQVAAYAGLTPRNRRSGTLRGKTRLSKTGNSRVRKALFFPAIVAKRHNPIVRSFCQRLADNGKNKMQIIGAAMRKLVHIAFGVLKSGKPFDPNHELLLN

SEQ ID NO: 58853 - protein, 338 aa, unidentified
MAIVTVGIDLAKNVFAVHGVGSSGKPEFVRPEVRRSKLLELVASLPACLIGMETCSGAHHWAREFEKHGHTVRLMAPKFVAPYRMSGKRGKNDANDAAAICEAVTRPSMRFVPIKSIEQQAVLFVHRARQGYVEERTALINRLRGLLSELGIVLPLKASVMRREVRKVLEDLPGWCNTVVGDMLSHLTRLDERITEYDKHLSQIAQHNDHARQLMKLAGVGPTTASAIVASVGNGHDFKNSRQFSAWLGLTPGQHSSGGKARLGSITKAGDSYLRTLLVMGARSLLMKAANHSDSVSRWALKLKERRGFGRAVVAIAAKNARMCWAALRLGEAFKVPA

SEQ ID NO: 58854 - protein, 417 aa, unidentified
MEGITTMDVVYRCCAGLDVHKQTVECAVRRLTQSGTVQVEIRQFGTMTDDLLEMVTWLKAQGVTHVAMESTGVFWKPIYNILEGHCSVLLVNARHVKQVPGRKTDVRDCQWLAQLLQYGLLKGSFIAPRWQRDLRDLTRERTQLTDEQTRVANRIHKVLEDANIKLGSVATDILGVSGRDILERLMAGEEDVEALAERARGRLRGKIPELRRALRGRLSEHHRFELRLNWDHLQRLQELIERLDQRIRELSQPYHPQIEQLDKVVGIDQTSAESIVAEVGVEMKVFPSDGHLSAWAGMCSGNNESAGKRRSGRTPKGNRWLRRTLTLAAQAAGHAKDSFLASRFRRLAARRGKKRACVAVAHSILKVVYHILKDGRPYQDLGGSYFDRLDPQRLTRYLVRRLERLGLKVTLEPATVA

SEQ ID NO: 58855 - protein, 305 aa, unidentified
MTDSEGNYYQFKNNGSGFKKFSKLLDLDSHCVMEATGYYHYQLAYYLLESGIKVSVENPLAVKRFIQMKLSKIKTDKSDSRLICEYAQQVELKLWKGNSKDELECLQITRALAIYTKQSTMLKNKLHGEDVLGNPSKAVVRSLKRNLKQLNKEIETLENRLLILVKHTHQDLLTRLQTIPGIGRKTAIMLVVLTGGFERFTSASELCSYAGLTPVIRQSGSSVKGRARISKIGNQKLRNLLFMCSFNACKYNKACRDLYERIVAKGKSKKLALIAVCNKLLKQAFAIAKSGLIYDDTYRSTLVKN

SEQ ID NO: 58856 - protein, 398 aa, unidentified
MTESSDYESVQVFIGVDVGKDTHHAVAINRSGKRLFDKALPNDENKLRSLISDLKQHGQILLVVDQPATIGALPVAVARSEGVLVGYLPGLAMRRIADLHAGEAKTDARDAAIIAEAARTLPHALRTLKLADEQIAELSMLCGFDDDLAAQTTQASNRIRGLLTQIHPALERVLGPRLEHPAVLDLLQRYPSPEKLASLGEKKLAAQLCKLAPHLGKRLAADIAQALAEQTVVVPGTNAAAVVLPRLALQLITLRKQRDEVALEVEQRVLAHPLYPVLTSMPGVGVRTAARRLTEVACRAFASAAHLAAYAGLAPVTRRSGSSIRGEHPSRRGNKALKRALFLSAFAALRDPLSRAYYTRKMSQGKRHNQALIALARRRCDVLFAMMRDGTFYTPQGS

SEQ ID NO: 58857 - protein, 339 aa, unidentified
MELYAGLDLHSRNTYIGIMDKAFNRVFKKRVPNHLEHILQTLAPFRDQIKGFVVESTFNWYWLVDGLMDAGYSSAHLANPSAIKQYEGLKHSDDQHDAFFLAQLLILGILPQGYIYPKMDRPVRDLARKRMFLVQHKTAHILSLQSLIQRCCAMKVRANDMRHLTVKELEAWLEEEYLVLSAQANLDSINFLKQKIQGLEKAIRKKVKLKKAFHHLKTVPGIGDILALTIMLEVGDIKRFSKVGNFTSYCRCVPSRRLSDGKIKGYGNRKNGNRYLSWAFTEAAQLGRRHNERFRRYYNRKVAQANTSLATKALGNKLARICYFIIKDQVPFREELFGQ

SEQ ID NO: 58858 - protein, 343 aa, unidentified
MRLFIGLDVSLAKTAICVISEHGKIVNEAQVASEPEALVRWAREQEGTVAAIGLEAGPLSQWLHLGLTDAGLDVVLMETRQVKGALKAMPIKTDRRNAEGIARRLHLGLFTPVHCKSVSAQEVPAVVGARKAIQQGMIALKMSMRGLLRNFGLKVGAISRGRYDQRIRELADGNPMLETATAPMLRARASLRQELAGLERLVRQMAQDDPVCRRLMSMPGVGAMVALTYRSAVDDPSRFRSSKKVGAWVGMTPSRNQSGERDVSGGITKAGDVNLRRAVCQAATVMMHRGRSTWLRTWGAQVARRRGGKRAMVALARRMSVILHRMWLDDADFRSDLAGPHEA

SEQ ID NO: 58859 - protein, 351 aa, unidentified
MSMVCGLDLHRQQITFDALDTTSGEVWRGRVWHPDRCRVRRWLRDDVARHANGEPVAIAVEGCTGWRYVVEEIEAAGFEAHLAEPADTQAARGRKHRAKTDRSDARLVRELLQRGDLPESWIPPSIVLEWRERVRLYKWLVDQRLMWMQRIHAELFQHGVAVPEAAIRCASTRTLLAGDEVTLTAAARQRIAVGYAMIDAADAQSQPLKDQLTRFGTRQPACRALVDAIYGIGGLTAVAVWSELGDCRRFSRSDQAVRHTGLDISVDASDLRRAGGYLSRQGPPVLRWALVEAAINASHQRSPDHAYYAQVKERHDGKLAAISVARQFTRRCYHILRNLDPDVVYLTPSAA

SEQ ID NO: 58860 - protein, 334 aa, unidentified
MRQVSQVGVDVDSEKLVCMMQRVGQRMLLPTFANTAAGHKKFIRWATKRARSARVCLEAPGIYSLQFALALHDAKNVEVMVVNPRAIKDFARACMQRAKTDAVDAGGILEYLERTPFTAWQPPAPEILQLQAINRRIVQLQTELTREKNRCHASKFAGASGDAVANDIEVNIRHLERRIERMHDSGLQLVHGVPALATKLAHLVSAKAIGEASAMRILAEVLVLPVDLAAPQWVAHAGLDPRPYESGTSIHRPRRITKVGNRHLRAALYMPALVAIQHEPNVKAFYNKLVAAGKKPMQAVVAVMRKLLHAIWGMLKHDQDFDGNKFFRLAEKTA

SEQ ID NO: 58861 - protein, 350 aa, unidentified
MKTEKKLLMPVWAGLDVAKETFEAALYPPVEPGQMPRDIMSLSKKTFALTADGVRNFHQWSFMVRDEAGIEGGNMRIVMEATGRYSKELVRWLNEEMPFTMPAIEDPRAIKNFIRSLKLRNKTDEIDAGALARYGADRMPEPFEEMPEDYLYLRELTRQRSALKDQLTAAKARLTEIGGFKILAKIQQGVVKAIELAVKKMELEIKRCVNDSEELRQSVEKASTVPGVALITSATVLGECGPLYRYTSRQLGSYSGIAPQIRQSGTSVHGSKISKHGPARLRRALYMASLAAIEGNPNMKVFYNRLIAKGKKPMQARCAVMRKILILVRAVVVNGTEYDKNFSKKFVLNS

SEQ ID NO: 58862 - protein, 353 aa, unidentified
MTDIATHNDRIATIGMDLGKRSFHLIGMDSRGKVIMRQQLSRGRFERHMANLQPCLVGVEACAGAHHIGRRLSAFGHNVRLIPAQYVKPFRKGQKNDYRDAEAIAEAVQRPTMRFVPIKSAEQLDLQALHRIRSRLVGHRTAVINQLRGFLLECGVVVPQGPAMLRKVLPSVLAQRTDVLSPRMVRLIEELADDWRRLDDRVDAVTGEVQALARQDEGCRRLMSVPGIGALTASAVVATIGNGAAFTKGRDFGAWLGLVPKQLSTGDRTILGRLSKRGNKYMRTLFIIGARAVLAKPGSWAKFGLEGWLAAAAKRLHHNVLAAALANKLARIAWSVLYHGRSFARDFEPQSVS

SEQ ID NO: 58863 - protein, 444 aa, unidentified
MEVVYRRCCGLDVHKQTVVACLLLLDEAGRKTKKKREFGTFSDDLRQLMLWLFSNHVTHVAMESTGVYWKPVWNVLEDKFTILLVNPQHMKALPGRKTDQKDSEWIAELLQHGLLRASFIPAREIRELRDLTRLRVHLKQEVNRVRNRVHRILEDANIKVSCVVSDLFGVSGRAMLEAIVRGKTDPGWLADYARGTLRLKKDELTRAFQGHIGEHHRFVVGELLAELAFLEGRIVRLEAEIERRLQAHANVLERLCTIPGVERITAWTLIAELGLDMSAFADAAHLASWAGLCPGNCESAGKRKTGRTRKGNVYLRRGLCQAAWAASHCKDTYLTALFYRVASRGGVKKAVVAVAHRIAVIAYFLLAEPVAYKELGGDYFDRLHPERTTRRLVRRLEQLGHQVALQPRAPLPPLTALSHIPKCGQRRGRPCKCAQRGITCIHKT

SEQ ID NO: 58864 - protein, 316 aa, unidentified
MKYTPVGVDIAKHVIQVHFINENTGEVVDKLIRRQDFLTFFSNREPCLIGMEACGGSQHWARELKKLGHEVRLLQARFVKAFVMGNKNDVMDARAIWMAVQQPGKEIAVKTEDQQSVLVLHRTRRQLVKFRTMQINSLHGTFLEFGETLHKGRAAMDREFPEALEQLKERLPPYIISALENQFNRLNELDLQIDDIEKQLTSVAKQNETCKRLLDIPGVGPLIATAAVATMGETSAFKSGREFAAYVGLVPKQTGSGGKIRLLGISKRGDTYLRTLFIHGARAAALLTKEPGPWITELKKRRPASVAIVAMANKLA

SEQ ID NO: 58865 - protein, 314 aa, unidentified
MQAVFIGIDVCQDMLDIAGCPGQQHLAIANRRSEIQHWLNGLPAGSFVGMESTGSYHQLLATLAKAAGFHVFVLNPKRVWYAARGDGRRSKTDRIDAQVIAKFLRDHVNDLHEWNPGTPLQSEIAMLERRRQCVERHCTAMTLSLKHMAGLDDQLAAFLASLKAMRQAIDQRIQALVSSDQELARKNALIATVPGIGSVGAASLAALFARVPFKRSDSVVAFIGLDVRASESGSHRGRRKLTKQGPPHLRRQVWLMGFAGCHAKIYKPIYAALKARGLKSTEAIMILGRRILRIAWAVWRTDKPFEPQLVGRQA

SEQ ID NO: 58866 - protein, 319 aa, unidentified
MTPAQVYIGIDVAKRRLDVALWPTGELRTVANDATDINELVTWLQTQRPTLIVLEATGGYERAVVASLGATGLPVVVVNPRQVRDFARAVGRLAKTDTLDATVLARFAEAVRPSPRPLPDAQMELLRALVTRRHQVVEMLTAERQRLASVPPAIQGLIQKHIAGLEQELTHLEEELDRTIRQSPLWRARERLLRSVPGIGPAVTAVLLADMPELGQLDRRQVAALVGVAPLNRDSGQHRGRRCIWGGRARVRAALYMAALVATRRNPVVKNCYQRLLASGKAKKVALVACMRKLLTILNAMLRDGTAWQEVPAVHAIPA

SEQ ID NO: 58867 - protein, 371 aa, unidentified
MADYREAFVGIDVAKLKNAIAVAESGREGEVRYFGEVDASYASMRRIIQRIAAKFDRVHFCYEAGPTGYGLHRLIQSLGHECMVVAPSLIPRKPGDRVKTNRRDALALARLLRAGELTAVWVPDEGHEAMRDLVRARAAAVETLRVHRQQISAFMLKHGRIYPRKKGWTMRYLCWLQEQQFDHPAHQIALQEMVEAVRVSKERVERLEKVIEEFVPNWSLAPVVRALQTLRGVDLIVAVTFATEVGDVSRFESPRQLMGYLGLVPGERSTGETVRRGAITKAGNGRVRHMLVESAWTYRHPPKVGARKLYRLEQAPPKVREIAWKAQNRLTARYRMLTGRGKRTTVVCTAIARELTGFMWAVAREAQAIRS

SEQ ID NO: 58868 - protein, 483 aa, unidentified
MKRSPKSKHHFQSKRRPEGPIRPAASMPVINPHAAGIDVGATEHYVCVPLDAAPAGEEFVRCFGTFTQDLDQLVEWLLKCGIQTVALESTGVYWIPLYEKLEAAGIKVVLVNARHLRQVPGRKTDVKDCQWLQQLHSYGLLNGSFRPEAPIRRLRTLMRHRGNLVEQKAQQVQHMQRALQEMNILLHHVVSDLDGLTGLRILDAMLAGEREPAKLVELRDPHIKRSTIREMEAALKGNWQPEHLLVLAQARKAYQFVESQMQELDNAVDEVLQSLPKASVVAVAENPPLPAEAHQVPKADKPKRKRRAGGNEPAQDLLPALHRICGVDLSQLGGVNMLGILILISEIGTDMSLWRNEKAFSAWLGLAPGNKISGGRILSSRTPYVVNRIATLLRTLAVTMGRTDTWLGSFHRRMRARLGPGAAATATAHKLACIIYHLLKHKEPYVDVNRIVYEEKIQRRRLGHLRKQAEDLGFELVEIQKAA

SEQ ID NO: 58869 - protein, 388 aa, unidentified
MQVAADRPDALTAIQTDLPAILVSLELSRSTWLITSLSPGAGEKMSKHSIRAGDVAGLLMRLAQLKEKARGRTGRDFPIIAIQEAGLDGFWIHRVLQSEGIESHVVDAASILTSRRRRRAKTDGIDGETLVRTLLAYKRGEPRVCAMVKAPTPEEEDRRRICRERKTLVGERVEHVNRIKGLLFAQGVSDYEPLKRNRRARLEELKTGDGRPLPAHLKAQISRELDRLELVLPQLKAVEAERDALLKPVSEGCPTPVAMLAQLKGMGPEFTAILWSEGLFRSFSNRRQLAAYAGLAPTPWQSGSVAHEQGVSKAGNPRLRTTMIQLAWLWLRHQPTSALSVWFQERVQSNGGKMRKTTIVALARKLLVALWKYSTSGVVIEGAVMKTI

SEQ ID NO: 58870 - protein, 316 aa, unidentified
MDPREYFVGIDVSKGSLDVAVLPDGQSWSIANTEMEIPSLVERLKELSPTLIVLEATGGLETLIATSLGLAQLPVVIVNPRQARDFAKATGKLAKTDAIDARMLALFGQMLRPEPRPLKDEQLQEMVAIVTRRSQLVGMLTAEKNRLGSSAQAVRGDIQEHISWLEQRISETNNTLRQRIRESPLWREKDQLLRSVPGVGPVLSASLLSGLPELGTLNRKKISALVGVAPMNRDSGKHRGKRMIWGGRASLRSSLYMATLVAIRHNSVIAAFHERLIAAGKVKKVAITACMRKLLTILNSIIRNSTAWDPLMSINP

SEQ ID NO: 58871 - protein, 329 aa, unidentified
MELLHQRCAGLDVHKQSVVAAVRLAVEGKVITEVRTFATTTQGLLSLSDWLAENGCTHVAMEATGVYWKPVWHVLSDGDFELVLANAAHVKNVPGRKTDASDAAWLAELLAHGLIRGSFVPDGPTQDMRALLRTRKQLTREKTRHTQRIHKTLEDANIKLDAVLADVLGRSGRAMLEALVAGESDPVRLAALAHAGVKCPQEKLREALRGRVREHHRFLLRLHLGQIDALDAAIATLDREVDANLGPFRAAVEQVSTIPGVKALGAQAIVCEIGTDMSRFPTVGHLLSWAGMCPRNDESAGKRRSRRLRKGAPWLRPRSRKSESKRGEG

SEQ ID NO: 58872 - protein, 376 aa, unidentified
MEGGSLMLNTTTFVGLDVHARSIKAVALDAMTGEVRSATFGYDAAEVAGWVSSVDPSAKCVYESGATGFDLQKRLSSMGIDCVVGAVSKMIKPPADRKRKNDRNDAEFLARMLSVGNVVEVWVPDDGCEAARDLSRALDDAREDLKRCKQRLSKFLLRHGYVFSETTPTGRRKGSWTAAHWAWIKSISFPEKADNDVLAYYVDAVRQAMEDKARLERLVEAEASKPRWKRRIDSIRCLKGIDVTSAADLVFEAGEFSRFKSARSFAAWLGLTPSEHSSGESVRQGGITKAGNKHLRRVLVESAWHYLGCSPHSKDLAKGQVPDPAARRHAAKGVRRLVERRRAMLERGVHKNKANVATARELACWCWAVGRMVENG

SEQ ID NO: 58873 - protein, 419 aa, unidentified
MTEDIEWFVGFDWASQTHVVCLLDRNGRTIGERKVVHGGAELGEFCDWLIAKTGAPPARIGVAIETPHGPIVEMLLERGLAVFAINPKQLDRFRDRFTVAGAKDDRRDAQVLGDSLRTDRRAFRLLAVDDPTVIELREWSRIADDLTQERTRLANRIRQQLWRYYPQMLQVADDLTAENFLALWECAPTPARAAEIDEARLAKVLKAHRVRRIGAAEALGVLRQKPLQVAAGATEAANIRVAAERVRLVNRQIKEADRKLEALCARLEHPGKTPGESEPGQSSEQRDVTILRSLPGVGRTGLATLLVEATEPLRRRDYQVLRVLSGVAPVTRRSGKARLVTRRMACNERLRQAVYHWARVAMQIDQACKSRYAALRKRGHSHGRALRTIGDRLLAVACAMLKSQTPFDPDHKTPKRALA

SEQ ID NO: 58874 - protein, 326 aa, unidentified
MPQSRTLSIGMDVHKDAIAVASVGQEHHAEVIYLGALGTRQCAIDQLVRKLQSKSQQLVFVYEAGPCGYWLYRYLTKKGHACWVVAPSLIPKKAGDRGKTNRRDAIQLARLMRPGDLTPVYVPQVADEAIRDLSRAREDALRDRKTAKHRLKAFLLRHDIRSTGQATWGPAHLRWLSEVVCPTPAQHIVFQAYVRAVTAQSERLGRLAQDLQDGVQTWRLRPVIDALQALRGVQFTVAVTIVAELGDLTRCDKPSQLMSYLGLTPSEYSTGDHRHQGTITKTGNAHARRALIEGAWAYRYPAQVSRHLQWRLEKAPKAVQDRSWKA

SEQ ID NO: 58875 - protein, 339 aa, unidentified
MSDVIVTVGLDLAKNVFQVHGVDADGRVCVRRKLRRAEVAAFFGELSPCLVGMEACASSHFWAREIARLGHEVKLMPPAYVKPYVKRGKTDASDAEAICEAVTRPTMRFVAVKSEEQQAVLILHKTRELLVRQRTMQTNALRAHLAELGIVAAQGVDGLSSLKAHFQRVMRSLPEHAAEALQAFIRMADGLVDEIERLESRILDWHRTNDASRRLATIPGIGPITASAIAANVPDASLFKTARQFAAWLGLTPRANSSGGKERQMGISKQGDAYIRRLLVSGASAVMRFTRQGDPGKAWLAGIKERKRPKVAAVAQANKTARIAWAILRRNEVFVARSA

SEQ ID NO: 58876 - protein, 330 aa, unidentified
MTMTPAQQTYNHVVAFEVSKEALVVHTLPADEQCTIANKPQSVRRLLKSQLKHNRKQHLGPILIVCEATGGYERHVLDAAIDLGLRVHRAHGARVRFFARYCGLIAKTDPIDGRVLAHYGVKTDKLRLYVPPPPETAALRALHARRTEIQQMMIAETSRLDQTHHKSIVKSLKAHIAQLKSALEAIEDEITHLLQENASLKKKVELMRTVIGIGPVSAMILLAYLPDIGSMTKGEVARLSGLAPINNDSGKKRGARHVEAGRTAIRRALYMAAVVAMRANPVIKRFADRLRGKGYPFKYVAVAVMRKLVVILNAVLRDGQPWKGAQAACA

SEQ ID NO: 58877 - protein, 335 aa, unidentified
MDVQYYIGIDVSKATLDWAVFNGKTIVLQTQSLNSVAAIKATIKALKSLPGFTNTQSVFCLEHTGVYNAHILDQLMAHQLPTWLESSLHIKQAGGLQRGKSDSIDAQRIAEYAYRFRDRMRLWQPPRQLLQELVILSALRQRLLLVRQQLQVPVNEQAAFVSTKLQKQLTRHCQASLKSINADLEQVSRQMDELIHQDQQLCELFKLMTSVPGVGPAVATEVILATDEFKNFSEPKKLACHAGVAPFEHSSGSSIRGRSRVNQHARKRLKFLFHLAAMSAIRVKGELQTYYQRKVAEGKNKMSILNAVRNKLIHRICAVVKRKQKYDIFYPLSFV

SEQ ID NO: 58878 - protein, 356 aa, unidentified
MDITSVGADLAKEIITVYAVDAAGQKRQLRDLRRKEFGAWLAGLPKGCIVGMEACGSSHHWGRMMLALGLVPKIMAAEFVKPFRKSRSTKNDHNDAEAICTAVRQPNMRFVAVKTIDQQQRLSWHRMREGWKEERTALINRSRGLLAEFGIVIGRSSAAFTRALTGLIRDETVPATLRTLLDRVQKQLLVLDEQLAQCDHAIAQQARHCEAAKRLQAISGVGVITADAITASVGDARDFRNGRQFAAWHGITPKQFSSGGTTRLGRITRRGDAYLRTLLVQGARSTLQVALKRAPDKLTRLQQWIVQLYARAGYHKTLVAIANKHARMIWVILAKGEAFDANAWEKYQVGTNEQGM

SEQ ID NO: 58879 - protein, 272 aa, unidentified
MFPVGIDVSKNTLDLCMLYDGIKRRIKTRNIQNNRHSVENILRWLRLQHCSPEDVHVVMEATGVYHERLATELHDACFRVSLANPHRSREFARGMGIMTKTDKVDAYMLACYAFLKKPHRWEPPAPEIRYLGALLRRRDVLLGDALREENRLEKYLSTDTPADIISSCRRMAQLLREEVSNIERQIKAHIKASPALRRDYTLLTSIKSVGPQLGMHMLVVLRSHNFVSAEQAAAFLGVVPIEKRSGTSVRRRPRMSKIGPPQLRAKLYMSAL

SEQ ID NO: 58880 - protein, 357 aa, unidentified
MNRSKNISFFGCHFFIGIDTHLKNWKVTIRLDGIELKTFSMNPSPEELYNYLKKNYPDGIYHIVYEAGFCGFWIQRKFMELGLDCIVVNPADVPTSNKEKVNKNDPIDSRKLSRELENKSLKGIYIPDIFHEELRNLARLRFRIVQNQTRTKNRIKALIYTHGITIPQYFTGNSRWSAAFIEWLKAINLNTSAGNFTLQNMIAQLIQLREHKKNVLKELRAQTKQKEIAVIINALLSVPGVGFITAITLYTEIIDMKRFSNDAQTAAFVGLVPSTRSSDETVYNNGISFRQNKFLRPILIEAAWTALRNDPAMTLKYKELTKRMKSQDAIIRIAKKLLRRIRHVWLNQEDYVFSLVA

SEQ ID NO: 58881 - protein, 347 aa, unidentified
MTIVEDTRAITGGVDTHADLHVAAALDRIGGLLGVREFPATTAGYASLLRWLSGFGDVALVGVEGTGSYGAGLARHLAAAGVRVVEVDRPDRQDRHRQGKSDPLDAVSAARAAQSGRASGAPKGRDGAVEAIRALMVAKRSARHERTQAINQARALILTGPDELRARFAGHTTAALAAAIAALRPRPGGVPGYATRVALRELGRRVQFLDAQLDRLDELIGPLVTARAPGLLSLHGAGPDTAALLLVAAGDHPERLRSESSWAHLCGVAPIPASSGKVAGRYRLNRGGNREANQALWRIVICRMSSHPATRAYVERRTKEGLSKREIIRCLKRYVAREVYRHLRGGA

SEQ ID NO: 58882 - protein, 355 aa, unidentified
MNAIKYIGIDVHVATSSIAVLDAQGKLLMEVTLATQAGALLDFIRGLSGTLQVALEEGTAAHWLYTLLAPHVAQVVVCDPRQNPRRLGEKKSDRLDARKLAELLRLGSLKPVYHGNSLGPALKELARSYRTLVSDVTRVMNRLKALYRARAIRSAGTRVYSPCFRDQWLEQLREPGVRGRAELLYEQLDLLLPLRQKARAAMLAESRRHPAHQILCSIPSLGPVRVALLLALLQTPHRFRGKRQLWTYAGLALVTRTSADYQLVDGQVTRARKPALVLGLNAHHNHTLKGIFKDAAASALVHPGPFKDFYTTRLAQGMKPELARLTLARKIAAITLTLWKKGESFNAEQVKAQAA

SEQ ID NO: 58883 - protein, 337 aa, unidentified
MRMVGCDFHSSFQQVAILDTETGEIEERSLTHASREAEQFYGSIARPALVGMEAVGNSQWFVGLLERLGHEVWIGDAAQIRASYVRQQKTDRRDAGHILKLLIEGRFPRIWTPTTEMRDHRQLLVHRHRLVQLRTRVKNELQHLALNQGLQWKRKLWTTEGRVKLETLPLEKWTAWRRHDLLQLLGMLEGQIELLNQAVAEVAETYPAVRLLMTQPGVGPITALAFVLTIGDVGRFSRSKQVSSYVGLIPREHSSGGKQRMGSISKQGNRFLRTLLVEAAQSVVRFDPEFRREYLHRCHQKHRAVAKVAAARKLAVRLFWMLRTQRPYPEVLAPRAA

SEQ ID NO: 58884 - protein, 411 aa, unidentified
METVFERVGALDVHKAQVTACVRVPDSAGRRTPHLAEFAATVRGLLALRDWLAAHHVTHVAMEATGVYWQPVWQLLEDDFELTLCNARHVKNVPGRKTDVSDAQWLCQLMEAGLLRGSFVPPKPQRRLRTLTRYRKTQIAERQREANRLHKALEDTGIKLDCVATNILGLSGRAMLDALVAGTTDPEQLAELAKGRLRAKLPALREALEGRFQPHHALVIGAMLAHLDFLDEQIQRLTDAIATELGPTGQAGVALAATITGVAARTAEVMVAEIGTDMRVFPTARHLASWAGRCPGNDQSAGKRRSGRTRNGCKWLGIALEEAALAAIRTRDSYLAAQYRRLKPRLGHGRALGAVKHSMLIAYWHMFTTGEAYHDLGGDYFQRRNPERHTKRLVAQLQALGHDVTLQPAAP

SEQ ID NO: 58885 - protein, 281 aa, unidentified
MKIVGCDLHARQQSIAMVDTETGEFTEKTLCHEGNAVRAFYASLEGPVVVGIEATGAMQWFLELLDELGIEGRVGHPAKIRAQETRKQKHDRRDARLLLQLLSEDRFPEIWMPSTEQRDLRTLLRDRDQWVRMRTRVQHTLQAIALNHALRQGRALWSATGQTALEALPLPPYTRQRRDELLALYAQLQKRIQELNKEVEAQARQRPPARRLLTHPGVGPVTALATDVFPGDPSRFASGNQVASYIGMIPSERTSGKRQRLGKMSKQSNALLRYLWTEAAM

SEQ ID NO: 58886 - protein, 447 aa, unidentified
MEILHERCAGLDVHKKNVKACFSGPGKGGQRTKETRTYLTMTQTLLEMRDWLKEQGCTHIAMEATGVYWKPIYNLLEGDFEILVVNAHHIKTVPGRKTDVKDSEWIADLLAHGLLSASFIPSAPQRELRELTRYRTSLVEERAREVNRLQKTLEDTNLKLGDVVSDVMGKASRLILAAIVEGETDAARLASLAAGRVHASQQDLERALTGKVTAHHRFMLGQHLVLIVHLDEAIRHVSEELARRFTSPEPPTEEEGAHSPESGQTPESSEPASSSDAPAPLSWQEAAEIIDQVTGISLRVAQGLLAEIGVNMGQFPSAKHLASWVGICPGNHESAGKRLSGKTRKGNPYARRLLIQAAHAAAHSKNTYLAAQYRRIAAHRGPKRAAVAVGHSILVIVYHLLRDRGTYQDLGGNYFDEHDQQMVQKHLVRRLERLGYQVDLQPRSEAG

SEQ ID NO: 58887 - protein, 417 aa, unidentified
MKKHNNSAKKSEPTSKRAKSRGPVQRDTKEVLAELVGKLREKLDPKVGAASAGEKNQRGELRPNLDRLTVGVDLGDQWSHYCILGLEGETLAEGQLRTTQPDVAEFFRALNAARVAMEVGTHSAWVREVICSYGHEVLVANPRLMEGTKRRKRKKDRIDANKLARLGRVDPESLQPIEHRSAEVRQDLVMLRARDALVAARTELINATRGLVKSMGARLPKCSSPSFAQKVEEAVPAQVREALLPLVHMTAALSDCINGYDEKIEKLASEKYGHTALLRQVKGVGPITALAYVLTLENPERFVKSRDVGPYLGLVPKQEDSGESQPQLGISKSGDTMLRKLLVGSAHYILGPFGPDTDLRRYGLRLCERGGKNAKKRAAVAVARKLAVLLHCLWVSGEVYEPLRQGMSARIAPAVAA

SEQ ID NO: 58888 - protein, 451 aa, unidentified
MPKERSKVGSLPVIEPNAAGIDIGATQIFVAVPVDRDPEPVRCFPTFTIDLERLADWLQQCQIRTVAMESTGVYWIPLFQILERRSFEVRLVNAHHVKNVPGRKTDVADCQWIQHLHSVGLLRGSFRPDDEICAIRSLWRHRDNLIQLATLHLQHMQKALDQMNLQIHHVISDLDGTTGLAIMDAILAGERDPHKLAQLRHPRVRASEETIMKSLVGDYREEHLFTLRQSLKAYRYYQELIQEVDLRVKQMMQQLPSKVAHGEKPPTGGKPRPRKTPWRNEPPQLRDDLYRAFGVDLTEVPGINTLTAQMLLTEIGPDLFRFPTAAAFCSWLRLCPDPKISGGQVLSSRTRPTKNRAALALRMATQALHRSDTFLGDYFRRMKARMGVPKAMTATAHKLARIVYHMVTTRQEYDATIFQQQEQRRRQQKSTRLFAQARELGFHLVPINSVP

SEQ ID NO: 58889 - protein, 342 aa, unidentified
MYYIGLDVHKKTISYCVKDAAGCVYGEGRIGSTRQELDAWIRTLPQPRTIAMEATIFSGWIYDHLLPHAEAVKVAHPLMLRAIAAAKKKNDRIDASKIADCLRCDFLPECHMASTEIRDRRRVLRYRHLLVRQMMQTKNRVSGLLMETGVEHNKSRLHKAGYFRRLMTTSSEIDESIRPLLRISRENIERCQKTEYALVSSLERDPLLKERIRRLRTVPGVGPITALNWALEMGDISRFRSIKEAVSYCGLCGDERSSADKVMRMPLSKQRNKHIQHVLVEAAKLAPRQSPELALIHQKAMEKGNRNRATLAVARKMVAWLLAVDRENREFIPAEQRETRAA

SEQ ID NO: 58890 - protein, 360 aa, unidentified
MEVGQTMADHGVVGGVDTHKDLHVAAVVDELDRVLESRCFATTRHGYQQMLTWMRSFGQLRRIGVEATGTYGAGLLRYMQNAGVEVLEVTTPDTHDRRKRGKNDDLDAQNAAHAAFAGRRTVTPKSRDGMVESLRVLKACRKTAVAARRVALQMIHNTIVCAPDELRETLRRMTRMQLIRTLAAWRPDLTDYRSVVSAYRITLKSLGRRYLELHDEIADLDTMIVAIVDELSPALVARNSIGHGSAAQLLVTAGDNAERLQSEASFAALCGASPVPASSGKTTRHRLNRGGDRAANSALHIIAIGRLRTDPRTKAYIAKRVAEGHSKLEAIRCLKRYIAREVFSLISQRKREINQGRNAA

SEQ ID NO: 58891 - protein, 319 aa, unidentified
MNPNPSPVYVGVDVAKARLDLDRPAPHHTVPNTAAGQATALTALAQVPGVHVVLEASGGYERAFVAALHQAGVPVTVTDPLRVRQFARSKGLRAKSDPLDARLLSAFGRAHQPAPTPPDTEAERRLAALVQRRRQWQAALIAEQNQAAGLRDKDLQQRSAKLQRFLAKELAMLEADIAAHLQASAALRERAAKLDALTGVGPATVAVMLGELPELGRLNRRQAAALAGVAPYDRQSGGWDGARHIAGGRTPVRNALYMAALSAARCQGPLRDFYQRLRSAGKAVKVALVAVMRKLVILMNHVLKPENLTAAPQNEPQPA

SEQ ID NO: 58892 - protein, 423 aa, unidentified
MPYRIAAIDVHKKMLAVVTADIAVEGEYAFERRQFSASPDQLRALTEWLVEQKIQEVVMESTAQYWRPVWQTLERHWKTECQKWEGAAPMSGTLHLAQAQSNRGPRGRKKDFADAERLLKRLVAQELIMSFVPDAEQRLWRTVVRRKYQLTCDRVRLQNQLESLLEEAQLKLSSLVSDLLGASARRMLKALADGEASPSVLAALADRRLHATPQQLCDALGASKELNQVYRRLLKMSLEELQLIEQHMDQLDHEIANLLSHYQDAVQRLAEVPGLGVNSAQQIIAEVGAAAATFPSEKHLASWVGVCPGQEESAGVSISNRSPKGNRFMRRLLNQAANAAVKVKGSIFEIVFRRLLPRLGFKQAIWAIAHRLCRLIWKILHQSVRYDERGPAVSQKSRGARTAKMIRELRSLGYHVDLPINPA

SEQ ID NO: 58893 - protein, 338 aa, unidentified
MGRYLGVDLHRNCFTTCLIAENGREYISEYRLEEIDRFLRKLRQTDEVAVEVTGNTRLFYDLVRPHVARVVVVNPSEFRVIRQSTKKTDKHDARALALFLSNDMLPEVRMKDKQHAELASLSQTRDALVKQRTALKNKVNNLLSSQGVNLRKESLASEKGLREVLGMKFAPLLEFELEVLVEQIRALNASVAKLENTIKEEGAKLPGHKNLKSIKGIGDLGATILLSVIGDVNDFASEGKLAAYFGIVPRVSNSNETERSGRITKRGTKLGRTTLVQCALIAKRYSPYLARFYERIKARRGTGKAIIALAKKFLGIIYNTLKEDWVFVDFPNFELAIE

SEQ ID NO: 58894 - protein, 344 aa, unidentified
MQHYVGLDVSVKETSVCIVDKAGKVMREVKVATKPEAILAVLTEEGLAIERIGLEAGPLSQWLYSALAEAGLPVICVETRHMKAALSAQINKSDRNDARGIAQMMRVGLYRPVHVKTLASQKRRMLLTSRQLLQAKALDIENDLRGTLRNFGLKVGMVGTVKFEARIRELVADHLDLAAIVEPLLIARRVLREQLGVLHRQLLEIVRQDEVCRRLMTTPGVGPVVALTFRATVDVPSRFNNSKAVGAALGLTPRRQQSGEIDRMGGISKSGDAMMREMLFEAALVLMTHSRKWSWLKAWGMKIARHRGMKRAIVAVARRLAVIMHRMWVDGTEFRWTREEAAAA

SEQ ID NO: 58895 - protein, 343 aa, unidentified
MKTVYSIGLDIHKKVIAYCIKTKDGHLVGQGAIGADRASLIEWVNGLPGPWVGAMEATIFTGWIYDFLAPFAIFLKVAHPEMLKAISAAKKKNDRADAEMLCDLLRVNLLPQCHMLPEEIRELRRILRYRNHVVHTAVKMQNKMSGLLMEVGAGYSKRRLHGKKYFHELLERVEEIPPSVKDLLKLSRASFEMFRDVQKRLIAGLRNNDLIRERVRRLMTIQGVGEVTALTWALEIGDPSRFTSIRQAVSYCGLCSAQKESAGKEQRGPISKKRNKHLQTMLIEAAKIAPNWNPQLAVAHDRELKKGNRNRATLAVARRLAAYMMAVDKAQTDFVLHEAKKAA

SEQ ID NO: 58896 - protein, 410 aa, unidentified
MTKIIVAQDAPVLAAIDIAKARHEVLIAIPDKKRRRRFTVLNELADFNRLVTVLKEYGRPVRVAFEATGNYHRALAYHLATAGFEVKLVSSVALARTREALNNSWDKNDPKDAQVILHMMEIGNEQYYYDPLVCGTNDIQELSKTHDIVSKSKTELWHRVLTHYLPLYFPEVDRFHRSSRSDWFFAFLERYPSPHFITAMGKDAFTADAWDVIGRKVAKERLLADIYETAKSSVGLPVAPDSDAIRMFRLVLGEGRSLIAQRNQIEDRAIALLKDLPDYQLLTSIPGIGPINALTILAEAGDLRRFGHHRQFLKFCGMDLATIQSGTFRGQTKLSKYGNARLRRTLWMAGQVAILQRTNSFRDKFERYIAKDRHNTHLRRKAYTAIAAKMARTVHGIIKHGEPYRPFFEG

SEQ ID NO: 58897 - protein, 403 aa, unidentified
MSPEHSIDIFLGLDVGKSEHHACALDRDGNKVFDKPLPQLESELAGVFHQLQKLGTVLVIVVQPNTIGALPIAVARDCGCEVGYLPGLAMRKAADLYPGRAKTDKRDAFIIADTARTMPHTLRAVDRNDEVLSALKMLSGFDDDIARDCTRTVNRLRSVLTQIYPSLERVFAGSTLTRTPILELLIHYKGPQGLKRAGYQRVLNWMIKRTRKDPTPLVDDIFTALKAQTVTVPGSDAAELVIPQLAANIQALKEQRNTIAEQVEEMLADFPLCEVLMSMPGVGIKTAAQILLAIGDGSDFASAGHLAAYAGIAPVTRRSGSSIRGEFPARSGNKRLKNALFYSAFAVIRSHEPSRRYYERKRAEGKRHNAAVICLARRRCNVIYAMLKNKEFFREIPPRPVAA

SEQ ID NO: 58898 - protein, 415 aa, unidentified
MKIVFPTCCGVDVHKRFLVATIITSPAGSLQPHYQKKRFSTFNSDLNRFADWLHENACLDVCMESTGKYWVPVFNILEKRGIRVVIANPKWVKAVKGNKDDTKDSKWIGDLFRIGLVKSSFIPDKNIRILREFTRYRYKLTSMKSSEKNRFQNAFTVCNVALDSVVSDMFGKSATAITDYLASNEPFDAEHCVSLLQRSLKKKADAVLESIEGYSITDEQKLRIGIIREHLDHIVGLIDKVDACINTLVSDYESQINLLCTIPGVRRDTAITIISEIGIDMSQFGSSKRLCCWAGLTPGNNESAGKKKSVRISRAGVYLKPALVEVAHAAVKDKATPYYALKYERIAKRRGKKRAIIAIARMILTAIYEMFSTGEIWNPVDLYKVDMPEHLKEKQLAKAVKQAIRFLEAQGLKVG

SEQ ID NO: 58899 - protein, 418 aa, unidentified
MKVVFPTCCGVDVHKSFLVATIIKTQQDSLQPSYQKKRFSTFNSDLNRFADWLHENNCLDVCMESTGKYWVPVFNILEKRDIRVVIANPKWVKAVKGNKDDTKDSKWIGDLFRIGLVKSSFIPDKDIRILRELTRYRYKLTSMRSSEKNRFQNAFTVCNVALDSVVSDMFGKSATAITDYLTSDEDFDAQHCVSLLQRSLRKKADDVLQSIEGYEITAEQKTRIGIVRDHLHYIDALIARIDICINTMVDKYEGYIVLLRTIPGVDRSSAITILSEVGVDMTQFGSSKRLCCWAGLTPGNNESAGKKKSVRISRAGVYLKPALVQVAHAAVKDKLSPYYALKYERISKRRGKKRAIIAIARMILTAVFVMLSNLEEWNPVDLYRVDMPEHLKEKQLSKAVKQAIHFLIAQGLTVLDSA

SEQ ID NO: 58900 - protein, 323 aa, unidentified
MDGILGIDVSKNTLDASMSSCNKVRTRKFANSPDGWRHLLDWLITKGVRRVHACLESTGRYSLGIAGALNEAGHVVSIVNPAQIRDFARTKLGRNKTDGVDASHIREYCELFKPQPWAPPSEAHRRLGELQAIRAGIVAGLTEWKNRKNSGMVDAVAQSLADVTISHFTSQLGAVDEAIAQTIDNDSVLRRKRDLLLSISGVGETLAGVVLAELPGPNVLHSSAAVVAYVGLNPRQYQSGTSIDRVTRISKIGNAVLRAALYMPAMSAMRYNPAIVALVTRLKSRGRLTPKQIVVAAMRKLLVLCFGVLKTGKPFDPAIAMGC

SEQ ID NO: 58901 - protein, 349 aa, unidentified
MTIVGCDLHTRKQQVAVLHTDTGEVVEQELVHAGDAVERFYRTLPRPVTVGIESTGYALWFHELMQHLGHTLLVGEAAKIRAMVVRKTKTDRRDAQHLLDLLKHDRFPAVWIPDPATRDLRALVTHRMRLVRMRTMVKNGLHAIAMNRRLTLGPSLWSQRGLAQLQGLALAPHTTQRRDESLQLLTWLTARIAALDDRVAAAAQADPGARLLLTHPGVGPLTALTTVLVLGPVSRFPDSKHVGSYTGLAPAVHASADTCHLGQITKQGSPLLRFVLGQAGLIAAHAEVDLTRHYRTLLRRRGRPKAIVAIARKLLVRLYIMLRDQIDYEEFRRRGRTPRRQEVPPPALA

SEQ ID NO: 58902 - protein, 320 aa, unidentified
MMTQNDLVVVGIDVAKDRVDACIRTVTERRTFPTTASGRRSLIAWLRKHQVGKAVMEASGGYERVWAKALRQTALEVRIVDPKRVRSFAESAGRLAKNDKIDAEMIAWFAETFSEAPSQVEDPAHEEIKALVKGRKSLIDLRTRLEMQKEHEVPALVGKAHARLLKKLASEIAAIETAIGAKIKATPAFAVRAEIIQSVPGFAEATALTLLAGLPEFGQVSNEVAAALVGVAPYDDDSGKRHGQRCIKGGRRWVRNALYMPCVGAATLNNPVFKAFYQRLIAKGKEPKAALIACMRKLIVILNTMIARGEKWDPKRYQVA

SEQ ID NO: 58903 - protein, 363 aa, unidentified
MEEAKRRYVGIDLGKREYTMAVIGKNGKMTIHQGKTSIQGRQALYKLLEPTDKIALEAGNLAFIMAREIMEQTGGEVRVLNSAKLPFIWDAPTKTDKEDAMKLAHLVEERRDEKLPIVPLPSEKEMERRKTLASYGREMKNRIRHINTLHALFVHQGHTTIVKKNLATAEKRREAVQILTGLEREEAEWLLKYLELHEQRIKELSGKIRKEAKNDEDMKNLQTIPGVGPIVAYAFTAHVGDGSRFSTGAQVSNYIGFVPRLDYSGTIQREGSITKRGNGYLRGLLVQAAWVMVRCKRESSLKDRYVCLTVFGGKGKKKTIVSIGRRLAELMYSVLRDKSSYESRIWAGRREYLAKLKELKNSA

SEQ ID NO: 58904 - protein, 427 aa, unidentified
MNNPEQQAASWLEQRGFGGLDWATEHHSVVVVDPQGRVLEDFEIEHSALGWKKFRERMQPYGSIPFAIETSQGAAVEQLLEAGMQVYPLNPKSAQSYRQRKAPSGVKDDRLDAWSFADACRVDGQGWKALRPEDPLIKELRLLCRDEVALIEQRTAFINQLRHALAEYYPTALEAFEDWGALSAWMFVQRFPTPQALKEAGKRHWEKFLHSRHLWRTESGPLRLELFAHATDLCGSVPMANAKSRLALSLVSILFALEKQLAIYRQRIEELFGRHPDHDLFGSLPGAGPKIAPRLLSEIGDDRGRFGKEPQPLQCLAGTAPVTRRTGKARTKPPRWPCHQRWACDKHLRHAMYLFAEQTLTRCTWAEIYYHHHRQKGHSHADTLRRLGQRWLKIIFQMWMDRKPYDAMLHNQNQLKHGSWVLQLKET

SEQ ID NO: 58905 - protein, 375 aa, unidentified
MKEKLRFLGLDVHAETIAVAIAEPEGEVRSLGTIPNRADSLRKLIRKLGPAEKLRVCYEAGPTGYVVYWELAELGVKCEVIAPTLVPVKAGDRVKTDRRDAEKLARCYRSGDLTAVWVPDEGSEALRDLVRTREAAKQDQLRARHRLSKFLLRSGQRPPSGIRPWTRPYLIWVAQLRFTQMAQEATRLDYLHEVEHMRERVERLEQAITEAVKLASPTLQQVINDLQALRGIADISAVTIAAELGQVSRFDGARQLMGYCGTVPSEDSSGKRTRRGSITKTGNAHLRRIVVEAAWSYHRPPCIWYGLRKRQESISEEIKEIAWKAQHRLHKRYMRLAAAGKDKRKITTAVARELLGFIWAIGTRAETVARQRIAA

SEQ ID NO: 58906 - protein, 387 aa, unidentified
MGRVIIGMDPHKRSATIEIINDREKILGRGRYATDHDGYREMLTAGRRHRDRIWAVEGCAGIGKHLAQRLVADGETVVDVPAKLSARARVFATGQGRKTDPVDAHSVAVAALRTNGLRTVAADDATVALRLLVDRRDGLGRARTDTINRIHKLLLELLPGGAKKFLSAPQARTLLNTIRPRDIVGRTRRQLTAELITELAVIDKKIKTVKAQLNELLDDTGTTLRQLNGIGPSGAARLIGDITDIARFATPGHFASWNGTAPIDASSGDQERHRLSRAGNRRINRALHIMAVVQLRNDTPGRAYYRRKLAAGKTPMEALRALKRRLSDVVYKQMVNDAKAARTGPGGHPGATSQSSAASPIPTADSSDQSQPGPATNEPRTQPPATH

SEQ ID NO: 58907 - protein, 343 aa, unidentified
MQITTIGLDLAKSVFQVHGVDATGQVVVRKSLRRSQMLPFFAKLPSSLVGMEACGTSHYWARELIKLGHEVRLMPPAYVKPYVKRGKTDAADAEAVCEAVTRPTMRFVPVKSPEQQSALSIHRTRDLLVKQRTQLINMIRGLLAEFGVDIPKGLERALLMARQIVNGKAPDVPIEAAKIVGTLSQQALDTHVRLREIDRDLAIWLRGNDVARRLMTIPGIGPIGATALAASVTDPHQFRSGRQFAAWLGLTPLQKSSGGKERLGRITKMGDKYLRKLLVVGMTALVRRARQNPEGDPRLADLLARKPTRVATVAMANKTARIIWAIMTRGETYHAGHRPALAA

SEQ ID NO: 58908 - protein, 411 aa, unidentified
MEVVYPRCCGLDVHKQSISACVIIREHGKAEKLERRFGTFTHQLEELAEWLEEFGVTHVVMEATGVYWKPVWNVLEGRFDLMLVNPEHIKALSGKKYDRRDASHLADLQHGLLQGSYIPPMEIRQLRDLTRNRARTVQEAARIKSRIQKILEEANIKLGSVATDVLGVSGRLILKGLIEGEQDATKLADLAVGVLRKKRNQLTQALNGKVDDHYRLMLRKLLRALKEREAEIADDETDIRQQIEPFGKAVLAWMQLPGIDEVTAWSLVAEMGPDMAPFETAEQAASWSCVCPGNHESAGKQGNGRTRKGNPWLRSAICEAAWGASRTKKSYFHAQYARICVRHGPKRALMAVAHSMIVVGFYLIKYDLEFKDLGADFFDRRNREHATRRAVKRLIALGYKVHLEEEVSVLS

SEQ ID NO: 58909 - protein, 455 aa, unidentified
MDGSYAGVDWASEKHDVLVADAAGEKLLAATFAHDEPGLRSLCRQLVRLKVRLVAVERPDGLLVERLLDAGLRVLALHPNQVAAARDRFRVSGGKSDHFDAFVLCELARTDHHRFRVLEPDSDATKAIRALTRGREDLVGARTAVVNQLRAELERFWPGPLGLFSDLHSRISLAFLERYPSPADARGLGEARLRAFLARERYSGRRTAAQLLAKLRAAPAGRVGERELATRRGLVRGLVAMITTLNEQIAELEREIAAAIREHPDGRIFTSMFKGSVLTAAELLAEMGDCRGRYPTRDTLAGDAGQAAVAIESGKRKAACFRWGCNKRLRNAFHTLADSSRHHNPWAQDLYAQALARGHDHPRALRTLGRAWSRIVWQCWQDGVPYDPARHRALQRHITVTIPTSSGPVPDIAATQRTAGAAVTRRAARRAERPALDREPTSAKPAGRRAKRQRG

SEQ ID NO: 58910 - protein, 402 aa, unidentified
MPDARRRRRLTVANTRAEHDRLVAELQALARPVTVGFEPTGHYHRPLAWRLVRAGFDVRLISSVALARTREALHNGWDKNDPKDAQVILHMLRIGAAKPYHDPLEHGINDIQELSMTHEVVSKAKTEALHRIQTHYLPLYFPEVDRFRNNTRSDWFFALLERFPVPASITALSKEAFIEAAWDVAGRKVSKARLLGDIYETAQSSIALPIPADAPAITMFRLVLAEARHLIQQRDTIERLAGELLGEHADFQRLQQVPGIGPINALAILAEAGDLRRFGHHRQFLKFCSLDLATHQSGQFRGKTKLSKRGNARLRRTLWMAAQVAIRQRENSFRAKFERYVAKDREDPDLRRKAFTAITAKMARVVHAIIKSGGDYRPFVEGPVPGGRTPLYRSRQGASATL

SEQ ID NO: 58911 - protein, 366 aa, unidentified
MDTIYIGVDFHARQQTICYLKTETGELVISELKHEDKEQLRAFYQQFQGHVIIGLEASGYSPWFEAMLEQLGKEVWLGDATEIRRRARWRQKSDRRDAELIWDLMVHDEFPRLHQPTAQSREILRMLRYRQKLIKVRTMSKNSLQAIALQAGLAKGSRLFTKAGQAEFKAAAMSPALQWQRDHWFELLKPLNEQLLETMVWFKAQSKDDLVIARLRTHPGIGLLTALCIWHTLQPVSRFRNQRKVVAYAGFDPMIRSSAERAIYLGISKAGSRMLRYLLVEAVHTALRYDDALKRFYKRVAERRGRPKAKVAAARKLLIRAYIMLRDEIDYAEFRRRAVAVDLPDEVKGQAKVPEVLIRKSTSPGA

SEQ ID NO: 58912 - protein, 342 aa, unidentified
MKSTTIAVDVAKEVLEVAVSVRPGQVSEQRRLSRAAFVKFCTDQPPATVLLEACGSAHYWGRQLQSLGHQVVLLPPHATRPYVFRNKTDRTDTRGLLEAYRNEDIHSVPVKSVSQQALTALHRLRSTSLATRTARINTVHGLLREFGCTIPLGAHHVLTRASALLADADSDVPEALRPALAAACIEIRDIEDRIRVVESQLQVLADQTPVVARLCSIPGVGLITATALVAFVGDIQRFPSGRHFASYLGLTPRERSSGLIRRLGAISKRGDVYLRMLLIHGARAVLWAAKKRRTPDHLRAWALHLQTLRGHNKAAIALANKLARIVWAVWKHDVDFREVPAA

SEQ ID NO: 58913 - protein, 358 aa, unidentified
MTQVKKLDFSGTTIYCGVDVHKKSWRVNIQDSEFELEDFTQNPQAVLLHKHLIRHYPGATYKIGYEAGFSGFSMHRSLSQLGCQCWVVNAADIPSSDKDKKQKHDKADARKLCNYLQSKKLKGIYIPDQTWEHARTLVRTRERIVNNQTRCKNRIWQLLHFSGLPIPAQQQEGKYWSKRFIEGLQKLECEGSIHLQQSLELHIKDYLQTRGLLLEATRGIRALCREEKYAGDIKLLRSIPGIGEINAAVMLFELQDVRRFKRFDHLCSYVGLVPDTADSGETKRTKGITHRHNRYLRTALVESSWSVVRKDPALLMKYKQYCKRMEKNKAIIRIAKHLLSRISFVLKNKKEYVTGVVV

SEQ ID NO: 58914 - protein, 401 aa, unidentified
MHYVIGIDVSKATSQVAVAVDGKVTQHFKITHDVLGFNQLNTIIMQFNEFPDIVFEATGIYSRRLKSFLDWHNYPYTYLNPLAAKKQLDQLRPNKNDLNDAKNLAETQFILARAKSYVQNPIYIELQDMSRFYQQINHDIVSTKNRLHRILQLTFPEIEGLFSATDSPHYWELLTIVPHAIITRRSRQALMDTIQGGISWHIGHERLRKLVDQLMSMGQISAPAVAANSYNVAQVIYYAKRLIELHGTKGDILTAMVDKAKDLPEYSIYQSIPGFSDKTVVSLIAELGDLHRFRTANKLNAFVGIDLRFNDSGDYKSIGFITKRGNSTARKVLFRAISNIASTASYGHPSHINDWYQKKKHSSLSKGTKKIAIGAMSRLLRTMHYLVINHQLYDYKAASKQ

SEQ ID NO: 58915 - protein, 367 aa, unidentified
MKKISTAATKQSKNISQQKLTVGLDLGDRNSWYCVVDEAGQIQLEQRVRTTAKALQEVFGAMPRSRIALEIGTHSPWISRLLSELGHEVIVANARKVRLIGESRKKDDRLDAQTLARLARIDPELLYPVKHRSAQAQADLTVIRARAGLVRARTGLVNTARGLAKSYGERLRGCNVRNMNPEKAESLSPELQAALEPLLNAIEALSERIVEYNERIEKLAQQSYPQTAMLKQVKGVGTLIALTYMLTLEDPHRFGKSRDVGCYLGLQPGRRNSGQREPQMHISKEGDPYLRTLLVQGAQHILGPFGIDCDLRRWGLKLAERGGRNGKKRAIVATARKLAVLLHHLWVSGEVYEPLHNNSRITVAAAA

SEQ ID NO: 58916 - protein, 310 aa, unidentified
MEQIFIGIDVAKDRLDVHVLPSGEAFAVARDSEGVATLADRLGSLNPTLIVLEATGGFETLVAGALAAAQLPLAVVNPRQIRDFARAVGQLAKTDALDAKIIALFAERVHPEPRPLPDDQTRALAELVARRRQIVEMMTAERNRRRMLTSRRLLKSVDRLLAALQKELSELEADLDDIIRGTPAWRDAEDLLTSVPGVGDKLARTLIADLPELGRLDRKQIAALVGVAPINRDSGTMRGKRTTWAGRAKVRAVLYMGALVASRHNATLKSFYQRLLAAGKPKKLALTAVMRKLLTILNAILRDRAPWQNA

SEQ ID NO: 58917 - protein, 408 aa, unidentified
MNPLYVGIDVSSKSNVVYLMLPDGSKHSNFSVANSHDGSTQLVKRILSAITSLSLDTVIIGLEATSVYGDNLVYFLREDATLAQFDKKIHVLNPKQVKNFKEAYNDLPKNDYVDSYVIADCLRFGRINKEVYQSDYRYKALQNLTRARFFAVQNLVKEKQRFINVLFKKYSTMTQEKVFTDTFSTTALAVYEEFDSAEALASMDLQELTVFIMEKGKNRFPDPDAVAKAIQKAARSSYRLPKTVNDSVNQVLSISITSIKALDAQIKEFDKAIKAQMELLPNVLTSIPGIGPVYSAGIIAEIGDINRFPSQAQLGKYAGLVWTQNQSGDFEAENTKLIRSGNRFLKYYLCEGALSLVRCDTEYSNFYHSKYKEVNRHQHKRALALTARKFVRLVFRLLKDNRLYRAAE

SEQ ID NO: 58918 - protein, 313 aa, unidentified
MVQSIGIDVSKGKLDVGLINSDQTTTNLQCGNDHQGIPSLVKTLQNRQDIRDIPIVIEATGGYHYGITFALIEKGFKKVFVINPIITKKHLSSQIRKIKTDKKDSLLLAKIGLLEDLHTYAESKQEVLFKRNIRLFHFLKKQLQQVNNRLSSAKSLNIENDFEQEMLKETKKNFDIQLKKVKQVIIIGITVEITPIKGLSELHLKAIISELGNINRFKNHKQIVAYAGLDPSIRESGSSVRGKSKLSKRGSKTMRYFLFQSAWGVMMHNDKYKEYYRKKRSENKHYYTCLSAIARKLLCEIYHNLKEHPYCIN

SEQ ID NO: 58919 - protein, 316 aa, unidentified
MITVSVFVGIDVSKDRLDVALRPSGDRWAVANEEPGLATLVERVRGLSPTLIVLEATGGLEAPLTGALAAAGLPVVVVNPRQVRDFAKATGTLAKTDALDASILAQFGEVIRPALRPLPDAATQALSALLARRRQLIEMLTAEKNRLGPAPPPVRKGIRAHIAWLARQLARTDDDLASAIRESPVWRAKDDVLRSTPGVGPVLATTLVANLPELGTLSRQQIAALVGVAPLNRDSGTLRGRRRVWGGRAQVRTALYMAALTATRYNPVIRAFYARLCAAGKAKKVALTACMRKLLTILNSMVKHRTRWQENLASTP

SEQ ID NO: 58920 - protein, 428 aa, unidentified
MSNQELIRRKQYCQIVKEITGSDQHMVVGIDVGKDNHHAFMGTATGKSLFRKLIFENNLEGFSKLLKTSDLIKTRNNLSKVVYGLEPTGNYHKPLARHLIRCNSNVVLVSGEAVNKNRSLLDGRWDKHDTKCAANIADLVSRGRCLYYDSPSPGIIELRSLLSLRKRLKKEDHSFRMRIRNNLLAQYFPELDRFYSACESESLAIVKWCLEPDQIAGMDFEPFFQMVTRTRRGTAQLLRLRKIHQQAIESVGCPMGSAAAFEAQLLVDKLEQVRQQLKDTEAAIKDVALEFDEYRYLLTIPGFGLYISSSVIAAIANPFRFKNRKQLLRMAGYDLCAKRSGKTSDNAVPVISKKGNSNLRYALFQAAKIASARTEIFRNYFAEMLRGRERERGIITKMRVKLAAKMLIIAWTLMKKREPFDPAYLTIE

SEQ ID NO: 58921 - protein, 299 aa, unidentified
MNSMYYIGLDVHKKTISYCVKDASGQVHREGKIGATRRELDDWIKTLPQPRSVAMEATVFTGWIYDHLLPHASQVKVAHPLMLRAIAAAKKKNDRVDAGKIADCLRCDFLPECHMAPTAIGDRRRTLRYRHLLVRQMVQMKNRVSGLLMETGVEYNKRRLHKVGYFRELLSTNEEGKESIRPLLKLSRETIVRLQKTEYALLRSLQRDWLLAERIQRLRTVPGVGPITALTWALERGDTSRCRSIRRAISYCGLCGDEKSSADKVIRTPLSKQRNKHIQRVLVEAAKLAPREDHKLALV

SEQ ID NO: 58922 - protein, 319 aa, unidentified
MFHLGIDVAKAKLDCALRLPNGKHRHKVIDNTQSGFAGLKEWLLKQDNSSPRVCMEATGTYWEGVAEYLAGLGMVVSVINPAQIKAFGASRLVRTKTDKVDAKLIADFSHERQPEPWIAPSPAEQALRAMVLRLEALQAMRLQETNRLDVAREAVRKGIEDHIAWLDGQIKELIKAIKHHIDDDPDLRGKRELLDSIPGLGERTIPVLLSYYANTERFDSAKQAVAFAGLDPRQHESGSSICGKPRMSKIGHSFLRKALYMPAMVTVHRTAWGKQFGQRLSAAGKATKLIIGAMMRKLVHVAFGVLRSGKIFDPTLHGA

SEQ ID NO: 58923 - protein, 416 aa, unidentified
MKDLLEVCCGLDVHKEMIAACLLSGSLGTEPKEEVREFSTLLSGLEEMREWLKANNCRDIAMESTGVYWFPIYNVLEAGAEEDFKFNITVANPYHMKNVPGKKTDIKDSRWIAGLLRAGLLEPSYIPPREIRELRDWTRYRRTLVQEMTGHKNRIEKQLQACGFKLSTVLTDIFGKTGMALIRKLCEAGSIEPEEILNLLHGTARKKLDVIRQAVNGRMDGHDRAFLSMLVRNYEQSLKEIEDVEREIYACAQKYEPSIALLETIPGISGMTAITMISELGTDLSMFPTSGHLCSWAGVVPGDNESAGKKKSNRLKKGNPYVKCVICQCAWAATRARKNYLREWFYRLSKRRGMKKAVIALGHKLLVIVYNILTTGEAYDESRFAEAQKRVDESKKMKLIAQARKYGLVLTDARGT

SEQ ID NO: 58924 - protein, 378 aa, unidentified
MRPMTTRESASSVSTPLYLSFELGERDWKLAFSIGLGQRPRHRTMRAGRLPVLDDEIARARQRFGLAADCPVRSCYEAGRDGFWLHRALLARGIDNVVVDASSIEVNRRARRAKSDRLDAEKLNEMLLRHHAGGRRVWHVVRVPSEADEDRRHLERERQTLIQDRTRLRNRIQGLLATHGVTLRLAGGGAAALGTARRWDGTPLPTGLVARLRREWARLEAVGAAVAALEAERTTAMTRPNATAQCSRRLARLRAIGPTFAWTLASEVFGWRAFRNRREVGGLLGLTPTPSQSGAERRELGIAKSGDPHLRALAVELAWLWLRYQPRSALSRWYQARYARGGPRLRRIGIVALARKLVIALWRYVAFDQLPEGAVLKA

SEQ ID NO: 58925 - protein, 411 aa, unidentified
MGRSVGRAIGLDVHRDFCEVAIAEEGVVRSAGRVETTPQALELFARSLGADDRVALEVTGGAWAIARMLEPHVERVIVVSPDDTGIRRARAKTDRLDARTLARLLAAGELDAVWVPDEACRVLRRRLARREQLLRARTRAKNEIHAVLMRRLKGKPPVSDLFGVKGRGWLRGLALPVEEAETLESALRHVEFLDQELAAVERLIAREALGSPDARRLMTVPGVNVICAATFLAAIGDVRRFGTARKLVAYLGLDPRVRQSGSEPARGGRISKQGSASARWVLVEAAWSVVHQPGPLRAFYERIRARRGHGKAVVATARKLTVLFWCLLTRGEDYAHQQPSLTAKKLRLLEVRAGAPTVKGTNTGLFATRERMRKAERELAQQAEASYKRTVSDWHATAAQRTGASVTPGRA

SEQ ID NO: 58926 - protein, 326 aa, unidentified
MHGYRCDKEVGILGIDISKDHLVTSEGRVYENNKKGYEEILKVKLNTIVVEPTGAYSIKPCQYFKEKGIKILQVSPNILWKEKDLRGKKTDFYDAQKLINMANKAKEYNYNPLKELVTLYVFLKDLEVKYKNRVKRALFLVSDEEKISKEMLEEFSKGNFKIQLYNLEYTKIVLEEIEVLSKALLETSEKIKEVEKMIQSQSENHVLLTIPGIGKLSSGIIIGIVGDIKRFPNPESFVAYCGLDPIVERSGKATVSKGISKKGNKYLRSLFYFLAEMNYSRNPTLLEFYENHKEKLKGKKLYTALARKLARIVWSVWYNNKPYEPK

SEQ ID NO: 58927 - protein, 315 aa, unidentified
MQHNGELFVGIDVSKRQLDVALGAGGELWREANEPVAHAALSARLGSLQPALIVVEATGGYETALVAELAGAGLPVAVVNPRQVREFARAAGQLAKTDALDARMLALFGERMRPQLRRLSNEQERALRALVARHRQLVEMLVAEQNRLGTAPQLLHHALRSHIDFLRKELHHLNQELDRFLRSSPLWREKERLLRGVPGVGPVLCTTLLAAVPELGSLSRRAIAKLVGVAPLDRQSGRWQGRSMIGGGRSAVRAVLYMATLRATRCNPILRDFYDRLCLLGKPKKVALTATMRKLLTILNAMLKQRSPWRPPCVA

SEQ ID NO: 58928 - protein, 347 aa, unidentified
MTILSSTRPVTGGVDTHLDQHVVAVVDGVGGVLGVARFPVTPAGYRQLLAWMRGYGRLDRVGVEGTGSYGAGLSRHLLEAGLVVLEVTRPNRQERHRNGKDDDLDAIEAARAALAGRAVATAKNSIGNTEALRVLVGAQRSAKQARIATIVQLRHLMFTAPDELRERYAKLSRVELTRQCARLRPRPDGDSVRYATKTAALTLARRAQTLAAEIDELDALIAGLVKQSAPDLLNVYGVGTDVAAAILVAVGDNPNRIANQAAFAKLCGVAPLPADSGKRSGRHRLNKGGNRHANSALWHIVLTRLSQREPRTVAYFERRRAQGLSTREIFRCLKRYVAREVFAALPR

SEQ ID NO: 58929 - protein, 369 aa, unidentified
MEKYSEVFVAFDVAKKKHAVAIAEGGRTGEVRFMGDVENSPLPIEKTIRRLAARYDQLHVCFEAGPTGYGLYRQVQALGHDCMVVAPALIPKRAGERIKTNHRDAVTLARLHRAGELTGVWAPDPAHEAVRDLARAREAAGDDLRRKRQQLLSFLLRHSRIYSGGGHWTLAHRRWLAGQKFDHAAQQIVFQEGIDAIEDSLQRLRRVEKQLALVVPEWSMAPVVEAYQAMRGASFLVAVTFAAEIGDVRRFDTPRQLASFLGLVPAESSTGDTIRRKGLTLAGNRRARRALVEAAWTYRYPARVSETLRARLDGLPKPVRDIAWKAQVRLCGRYRRLSAAGKKPPVVVAAIAREMAAFLWAIGREVALA

SEQ ID NO: 58930 - protein, 436 aa, unidentified
MTLINFVAANQKYYAFNLLSVFIMVFWSVQYLLQHLLVQTQVSHQLLQPLILILQLPQTPQFRHARPGKFFLPVNGMDYFLPLRLTVRNVLTRRITMNIVFLGIDLAKNVFQLCGLNQAGKPVYTKRTGRKELLQTLANIPACLIGIEASTGAFYWQREFEKLGHKVKVISPQYVRPFVRGQKNDGNDAQAIAVALMQPTMQFVPPKSPEQQNIQALHRARQRIVNHRTATVCQIRGLLLDRGIPIGSAVSRARRAIPLILEDAENGLSSRMRRTIAELYDLFNDLGRRIHFFDKEIETVFRQSEACPRIAKVKGIGPKTATAVVAAIGKGTEFKNGRHFAAWLGLVPRQHSSGDRQVLMNMTKKGDKHLRTLFIHGARAVVRVATNNNDGHMNQWVNQLKERRGFNKTTVAVANKNARIIWSMLRNDTGYQVVCN

SEQ ID NO: 58931 - protein, 340 aa, unidentified
MRQLYVASDLHGNNNLLGIIDGEGKRIFKKKLPNDPLLINDILKPFKEEIVGIVVESTYNWYWLVDALMEEGYKVHLANPAAIQQYSGLKHADDKHDAFWLAEMLRLGILPEGYIYPKEERPVRDLLRKRGHLVKLRTSLILSLENIISRNFGRKLPVNDVKGLRKDRVTPLFEGKEDLALAGKVSKETIDFLTHQIRQIEGVVEKRVMLKEAYRNLLTLHGVGKILGLTIMLETGPIGRFETVGDYTSYCRKVPSQWISNGKRKGSGNRKNGNKYLSWAYAEASDFARRFHPESRAYYNRKMQKSNPAVAHSALSHKLARAAYYIMRDQVAFRPEKLFG

SEQ ID NO: 58932 - protein, 414 aa, unidentified
MEVIHPRCAGLDVSKRDAKVCVRIASAGRTKAKSTVTTWGAVTNQVLALRDHLIAEQVTLVVMEATSDYWKPFYYLLEDGPFEVMLVNARHVKNLPGRKTDVSDAAWLAQLGAHGLVRGSFVPPEPIRQLRDLTRIRTTLVRARAKEIQRLEKLLEDAGIKLSSVASDISGVSGRAMLEALIEGQRDPVVLADLAKRRLRSKIPELTEALTGRFSEHHGFLARVHLDLIDNHTRAIEELTGRIEVVIEPFRHVRDLLVTMPGFSTLVADVIIAETGADMSRFPTPGHLASWAGTCPGSNESAGRIKSTHTRPGNPYLKGALGVAALSAARSHDTYLAAKYRRIASRRGPVKAIVALEHAMLIAIWNMINTGTIYRDPGGDFYARLNPDKARHRALDQLHKMGYSVTLTPLAEAG

SEQ ID NO: 58933 - protein, 409 aa, unidentified
MIYCGIDWAERTHDVALVDDTGRLLAKRHITDDAAGYKILLDLLAEHGDTEENPIPVAIETSRGLLVAVLRAGKRQVFAINPMAAARYRDRHSVSRKKSDPGDALVLANILRTDMHAHRPLPGDSDLSRAIAVLARAQQDATWNRQQTANQLRSLLREYYPAALAAVETWKNGLCRPEAFEFLRLAPTPSQAARLTRAQLQAALKRAGRKRGIDADAERLREVFRAEWAHQPPLVEDALGKQMLALLIQLEAASKAADDLAEAVAEAFPQHPDAEVILSFPGLGIQLGARVLAEIGDDHTRFADARGLKAYAGSSPITRASGKKSSITRRWVKNDRLNHVGYLWAFSAITASPGAKAHYRKRRDEHGDWHAAAQRNLFNRMIGQLYHCLQHNKPFEEQTAFPTQLAAAA

SEQ ID NO: 58934 - protein, 325 aa, unidentified
MAEVVGVDVAKATFDVAVALDQAGKFRTRAKLANAAKGFEEFAAWMDKHAPGAAVCMEATGHYHEALATFLVGRGTVVHVVNPAQVKYFAKSQLARTKTDRTDAKLIAQFARSQATSAKLLRPWVPPTPAQRVLRALVERLEDLKAMEQMEANRLEVADPAVRGSVEASLKELKQQIKALEKRINQHIDSDPDLRRDADLMDSIQGVGKTTAAFLLATLGDLRRFKQPGQLVAFAGLNPALRESGTYKGKVRLSKTGASSLRAKLYMPALVAMKHNPVIRAFYERLLARGKQPIVGVCAAMRKLLHLVWGVVHSGKPFDPLHAVA

SEQ ID NO: 58935 - protein, 340 aa, unidentified
MRQLYAGCDLHSNSNFVGIVDEQGKRIFKKRVANEPQLILEALRPYQEEIVGIVVESTYNWYWLVDTLMDERYQVHLANPSAIQQYVGLKHSDDQHDAFWLAEMLRLGILPEGYIYPKEDRPVRDLLRKRTHLVRLRTSLILSLQNIVSRNVGRKMSLNDVKALKEDRIGPLLERNEDLALAGRVSKEVIDHLTYQIHQIERVVQKKIHLKPEYRYLPSLFGVGKILSLTIMMETGPILRFPTVGDYASYCRKVPSRWTTNGKWKGSGNRKNGNKYLAWAYSEASEFARRRHPEARAYYQRKMQKTNVAVAHSALAHKLARAAYYVMRDHVPFEPKKLFG

SEQ ID NO: 58936 - protein, 381 aa, unidentified
MKKDSIAKLQVTKSQIRRMAAKQRLTVGLDLGDRSSRYCILNEAGGKASEDQLPTTKAGLDSLFGKMAVCRIALEVGTHSPWVSRHLAAMGHEVIVANPRKVRLITQSVKKNDRMDAEQLARLARVDPQLLGPIRHRGAEAQGDLAVIRARGELVDCRTALINTARGLAKPMGERLKSCDADYVKESLAEGLSEATQNAIRPLLKSVEEITRQIGAYDKKIQKIEKRYPETKVLKQVHGVGTLIALTFILTLEDAERFVHSRDVGPYLGLTRKLRDSGESQPELGISKAGDVLLRRLLVQAAHCILRDGAPDSDLKLWGLTKVQAGAGKKGSKRRKKRATVAVARKLAVLLHRLWVTGEVYDPQYNRKAVEAAKGRGKAAA

SEQ ID NO: 58937 - protein, 411 aa, unidentified
MDAIRICCGGLDVHQETVVACVLKGPLEKKPQSFMRTFGTTTRELLELQDWLREQECREVVMESTGVFWKPVWNLLEGNCELVLANARRVKNMPGRKTDTQDAKWLAQLHRCGLIEASMVPDQEIRDLRDLTRYRTKMVQAVTSEKNRIHKILQDGNIKLTTFISDLYGVSGRALLQKIMNGEVLEEAEVRSLVKTTLKKKVPQLLDALNGKLRRHHREMISEHWEHLTYLEQKIARLEERIEACIGAYAEMIEQIDSIPGIERTSALTIFAEIGPHVAEMFPTDAQFASWAGLSPGNNESAGKRKKAKTKQGNKHLKTALCQAAWANSRSNNRIGQFFRRIRKRRGEKKANVATGHLLTRILHAMMREQTHYKEIDVPLGEGTSSKKTLDTYLTYIRQMGYNVMLQAITE

SEQ ID NO: 58938 - protein, 399 aa, unidentified
MNYYTGIDVSKQTLKVFDGVKDYEVKNEKCMKEFEKALKERYGKEWKEVKLIYEPTGPYSNYLREFASLNKIKVYEVNPKRSSNFAKTLGNRSKTDTIDARMLYSFSLLLKEHNFHIPVTDEVVEELGTLLHTYEMVQKTRTMLSNHFTSMKYKSVDVKIPQDAVEKEVKHLKKTEENLEKDIRTFIESIPEWKDDFHNILTIKCVGTITAAVLLYVFKKYPKTNRAEVTALAGLDPIKKETGLSKGKERISKQGDPMIRKILYTSCMSCIQYNDYIKTYYHHLIKDNHKKPKEALVACMRKILLLAHYIYTNKTTYAPVEVQQTKKTETTKKTITDKQEKLNEKAKVTLKTELNKTKKITLNKKTKKNKKIELDKKPKQNKKHDTTDKHLYSSLLTKS

SEQ ID NO: 58939 - protein, 318 aa, unidentified
MPPAASVYVGIDVAKAELVMAIRPSGERWTAANDEAGIQRLLTRLREDAPALVVLEATGGYQRAAVAALAAARLPLVVANPRQVRDFARATGQLAKTDQIDADTLALFAERVRPEPRALPDASAQALDALLTRRRQILGMVGAERNRLEHAVPAVRRGIVQHIRWLERQLRDVDDDVDRTIQVSPIWRAKENLLRSVPGVGPVVSRTLIGDLPELGTMPRKQIAALVGVAPLARDSGTLRGKRLVWGGRAPVRAALYMAALVATRRNPVIREFYQRLLAAGKPKKVALTACMRKLLTILNAMLRANTVWRHTAHAPIT

SEQ ID NO: 58940 - protein, 375 aa, unidentified
MSFTSDAILVALELSNSIWLVGVRMPGARKSQMHRIDAGDTTALMGFLTGLKSRHERTSQIVAPIVCCFEAGRDGFWIQRFLVDRGIPTHVVEPTSILVNRRAKRAKTDRLDAEGLLRVLAAYLAGDTEICSMVRVPTPEEEDRKRMHREREHLVQEKTRIENRIAALLATQGVRSRPSLRSWERDMAALRTGDGREIPDHLATELGRLRRRLVLTRELIQELDAQREAFLAAAPADDKTTAKVVALSTLYGIGDNFSAVLGREIFYRDFGNRKQLASYVGLTPMPHQSGSMDKDRRIARAGNGRARKTLVQAAWLWLRYQPASALSGWFRERVGELKGRTRRIAIVAMARKLLIALWRFAENGEIPQGAILRAA

SEQ ID NO: 58941 - protein, 355 aa, unidentified
MKRTTKYVGLDVHQATIVAVVRDETGRVIARTILPTEAAALTAFVGPWRGRVEVAYEEGTQAQWLHDLLRPLVARVVVCDRRAVRRQGNKSDWRDAEELAAMLQRGAIRSVYHGGGPQQAELKELTRTYVTLVQDATRVMTRVKALYRARAIPTRGRGVYHAGERATWLAKLPAGGVGFRATTLYRELEVLLALRATAKAALLGAARRDPAWALLQTIPFLGPVRVALLLGIVQTPWRFRTKRHLWAYAGLAVVTRTTAEYTLAGRTPVHRRRAPLTRGLNRNHHRLVKALFKSAATAATARPGALQDWYQQRLAHGMRDELARLTLTRKLAALTLHVWKTGEAYDPAKLTRPAG

SEQ ID NO: 58942 - protein, 363 aa, unidentified
MNKCLNTELSSHEGTRCQFNGGTGLIKLGIDVHQNFYVVVEQVGSTNPKPPQRFEKQAFLHWAAKLKRRAGQIHAVYEACGFGFSLQRSLSALGINCYVVCPEKLDQRNKRVKTDRLDAKALCLKLDRFVEGNREALAIVRVPSEKEEQVRAIHRQREQLVKARKQLEAQGRSLMVNHGLEPVQQWWKQRAFAKLQLPEWMEELLANSQPILLALEEKIRALTQQLEAAATASQPRGFGKLTSVVIDREVGDWGRFQNRRRVGSYTGLCPGEASSGDTRLQTCVTKHGNPRIRAALVEAAWRLVRFQPNYKPVIKWRRILAKGALATGAARKKAIVAVARQLAVDLWRIRTGRTQLEQLGLTI

SEQ ID NO: 58943 - protein, 446 aa, unidentified
MVEDSGLSRGDKRRNAKLAALRELVPVDNAVFAIDLADHKQVAVLVDHDSRVLKRQRVKARAWQLGPVLDWAREQARKRGFADATIACEPTGHRWRVLDQLAAERDMTLVCVQPLLVGQARQTEDYTRDKTDDKDAVLIARLVTELHCYVPERPDEAWAELRHLGAYRDQLITTATTCRQQLRDLLECAWPAVLTAAAEPFDSITWCATLAAVLDCYDGHLERPAHRSYKRFEAAIRRELPRWGAKQGPCQRIAYAVYAALTDSAGVIAQRRGALRRARWVLADWHATKTRLAQVQDRMLAIIDELGLTQIAGTIPGVSVLGVASILAETGDPTRFTNPRALAKHAGLCPREDTSGTMTGRSRISRRGRPRLRLAAWRAVWGALSHNPVMAARYQHLTTREHNRLTPGQARAAIAAALLRQIHVITVQRTPWNAAIASAAKHPTAA

SEQ ID NO: 58944 - protein, 440 aa, unidentified
MNEVRGRSAEPEYAAFAAIDWADQKNFWRLLPAGSDRSEQGQLDNTPEAVEAWAVNLEQRFGGKPIALCLEQSRGPLVYMLSKYPHLELFPVHPTTAARYRETFAPSGAKADPSDTASLLDLLLRHRERLQRLRPDTVETRLLHFLVEARRQMVDERTRQSNRLKDCLKMYFPQILRWFDDVTRPLVGDLLKRWPDLERLQRAHPGTLRTFFRQHNCRSEELMEERIQGIYAAIPATKDEAVLEAGIRIAEGLVALLNTLGTQIALFEKRIAELVAVHPDAPIFESLPGAGEALAPRLIVAFGTQRDRYPKTDDMERYSGIAPVKEASGKTEWVHFRFACPKFLRQTFHEFAAHSIAQSKWAKAYYDYQVQDKGKDHHTAVRSLAFKWIRIIFRCWKDGKPYDEEMYLQSLRRRGSLLKNALGTATPFEWTSVAGFKKLS

SEQ ID NO: 58945 - protein, 387 aa, unidentified
MPQPNDLSRSLATLDQDRTLIAVIEISQSSWLVAGIVPGIERQPLKKLAAEPTALLALLDRWRAEATKAGRVIDRMAVAYEAGRDGFWLARWLQRQGIEAHVIHPTSVAVSREHRRAKTDRLDTELLKRAFLGWLRGEPRHCSMARIPTLEEEDTKRPNRERENLVSERTRIVNRMKSALARLGIRGFQPTLRKAPERLARLLTPEGAPLPPNTLAELQRDMARLRFTMEQIREIEATRAARIAQHPEQANHAMILLLARVIGVGIETADMLVHEILSRPLRDRKAVARYAGLTGSPDESGARRREKGLAKAGNARVRRGMIQLAWRFLMFQKQSALVQWYQRQTADARGGTRKTMIVALARKLLVALWRLVTTGEIPEGAVLRRAA

SEQ ID NO: 58946 - protein, 390 aa, unidentified
MIYVGIDVAKDKHDCCILGLDTEELFQVFTVPNNSDGYGELFHKIESVSKDKSQIKIGLEATGHYSYNILGSLLDHGYHTFVINPLHTNLYRKGQSLRKTKTDKVDARSIAEMLVTDKTLKPYTGTSYHSEELKSLTRYRFELVKERAKLKTSVSRLVNILFPELESLVPTLHMNSVYRLLQELPGAYFIASSNLTHLKALLADASKGRYGREKAIVIRETAKSSIGSLMPAKSMELRQTIRRIDTLTSDIKEVEQSIQKIMDECGSPITTIPGIKYRMGAMILAEIGDFTRFSNADQVLAYAGLSPSTYQSGQLISSYARMEKRGSKYLRYALFNAAIYVSGWDERFRLYLSKKRAEGKHYYVAISHVIKKLVRTIFRMEITHTSYQPL

SEQ ID NO: 58947 - protein, 356 aa, unidentified
MLNDKKYIGMDVHKESISIAVRNGVGKIVMECVIETKASTILQLIDGLRGDLHVTFEEGTWAAWLYDLVKPHVTELVVCDPRKNASMREGNQSDQIDARRLAELLRLNHLSPVYHGEHGLRSLKELVRSYLTITKDLGRVMSRVKAIYRSWAIPCTGKRVYAPRHRAEWLGKISELGVRRRAEFYYQQLDALRALRQQVRRDLLAESKKHPAWKRLCQIPSIGPIRAAVLLGILQTPHRFRTKRQLWTYSGFGIETHSSADHRSVHGQLQRVKKPSSIRGLNRNCNHDLKNLFKGAAIVASSKPGPFQEFYTALLTKGIRPEMARLTLARKIATIALIVWKRGASFDAQHLKPQTA

SEQ ID NO: 58948 - protein, 450 aa, unidentified
MARKTNRFEEVRRFVAGVDLAGHADHYVCGPRKDDGTHDVEHFGTTTNELLRMAAWMKERKVESAAMESTSVYWIPVYDTLESAGIEVVLVDTRTVKMVPGRKSDVKDCQWLQRLHSCGLLHGAFRPPEKFNAVRSVIRERGNVLQMRTQSIQAAQKALDQMNIRLHHAVSDIDGVTGMRILGAIVDGERDPRVLARLRDRRCRKGEAEIAEELTGSWREEHLFNLKQAYRTLCFLDERVAEYDRQIREMYAKIAEGFPPVDPPPGGGKKPKDREDAKAKADLARICGGFDMTSIDGIGYDSAASILAELGPDLSAFPTERHFVSYIGTAPSLGKSAGKNVSTRRNHKNTSRVGLTLKMSASSLFRSESALGARIRCVRSRTCSRTAIKDVAREMGKRIYRGLKYGQAYVDEGEQAYMSRTRERTIKSMKKKISKLGISAEELGIFAVAV

SEQ ID NO: 58949 - protein, 508 aa, unidentified
MILRPNHSNPPSPKVRERLPAAKREQIQKRQAAPQKKPQKSPRKSKASRSLPVTAPSMPAELKQVNLNAAGIDVGATVHFVCVPEGRDPQPVQSFGAFTADLEAMADWLAQCGVTTVAMEATGVYWIPLFELLERRGFEVKLVEPRRLKHVPGRKSDVLDCQWIQQLHTFGLLSGSFRPDDSICVLRSFVRQRQMLVRSLSRSVQHMQKALTQMNLKLQHVISDISGATGMAILHAILAGERDPQQLAKLRDGRCSNDEATIALALQGNWREDHLFALKQAMDTYHFYQEKLTEVDEKIRAHLETFEDKSQGKPLERVTKKHRVNDPAFDARKYLYTITGTDLTDVDGLEANTVLSVISEIGLDMSPWPTEKHFTSWLTLCPGVNKTGGRSESKSGRTRPSSNRAATALRMAACTLMRADCALGAYARRMRARLGAPKAITATARKLAIIIYNMLKYGKAYVDRGAEYYQEQYRATMIKNLKRRAKQLGFEVLELTLQPVAPESTLPA

SEQ ID NO: 58950 - protein, 353 aa, unidentified
MIVIGIDPHKSTHTATAVDPATNTDLGSIRIDATLTGYKTLIAWAKSWPQRQWAVENAYGLGHHLAQWLLVLGEVTLDVPTTATARVRELSRGGRRKNDRIDAAAAACVAALQGDARPVDPEGPAEILGLLDERRTNLSNSRTRSMNQLHALLRQLLAGGAPTSLTASAAAALLRSFRAKSPVDRMRVGLCRDLIADIRRLDDQLAANEKQMAETLDEHGTRLREVDGIGAVTAARLIGRTGRPDRFPTAAAFANYNGSAPVQIASADTDRHRLSRYGDRQLNSALYTVAMVQIRMRASAGRNYFEKKIAEGKKPAAARRALKRHLSDHVWRIMLSDEKRRLQPEKNHSARAA

SEQ ID NO: 58951 - protein, 317 aa, unidentified
MTAPSLCIGIDVAKGELVVAQWPDPAPWVVANDESGVRTLVDQLRALGPALVVLEATGGYERAAVAAVAAAGLPVVVANPRQVRDFARATGQLAKTDRIDAVLLALFAARVQPEPRPLPDAARQTLDGLLTRRRQVLDMLTAERNRLAQALPPIRRDIAQHIRWLERRLHDVDQDLDRTIQASPVWRAQENLLRTMPGIGPVVSRTLLGALPELGTLSRKQIAALVGVAPLARDSGTRAGKRLVWGGRAPVRAALYMAALVATRRNPAIGRFYQRLLRAGKPKKLALVACMRKLLTILNAMMRTNTPWQPLAAPEYP

SEQ ID NO: 58952 - protein, 343 aa, unidentified
MRHYAGLDVSIKETSVCIIDESGKVCRETKVPSHPEDLARALHDRAWCLERVGLEAGPLSQWLFSGLAATGLPVVCIETRHTKAFLQAQVNKSDRNDARGIAQMMRVNLFRPVHVKTLTSQKRRALLTARKLLQEKALAVDNDIRGLLRNFGLKVGPIGASRFETRTRELVDGMPELAEIIDPLLEARRKLRELFAVLHRKLLVIVRDDTVCRRLMTVPGVGPVVSMAFTATIDVPARFKSSKAVGAALGLTPILNQSGESKRLGRVSLCGDGMTRTLLYEAAQVMLTRTTKWSWLKAWAMKVAARRGIQKAIVALARRLAVILHRIWVSGTDFRWTREVQSP

SEQ ID NO: 58953 - protein, 348 aa, unidentified
MQQFYIGLDVSLDETSICVVDAKGAIVQEITASSDPESVSAALKMYRDRIARIGLEAGALTSWLAVELRELDYPAIVVEATHMRSAIRAQASKTDRNDARGIAHMMRLGWYKTVHVKSAESQRLRVLLSNRRILKRKLIDIENHIRGTLRAFGRKMGRIGRSSYEARVLELIEDLDPATAEFIVAMLEVRRGIWKGYTALHNLVVRIVKDDPVCRRLMTVPGVGPIAALTFRAGVDDPLRFARSRALGAHFGLTPKVHQSGTIDRDGHITKRGDIDVRTSLCEAAASLLMRVQKWSALKAWGLRIAKRSSMMNAVVAVARKLAVILHRLWLEDRDFQWAAEAAVAEKQ

SEQ ID NO: 58954 - protein, 415 aa, unidentified
MKVVFPTCCGVDVHKTFVVATIITTPANSLQPHYQKKRFSTFNSDLNRFASWLLERDCLDVCMESTGKYWVPVFNILEKRGIRVVVANPKWVKAVKGNKDDTKDSKWIGDLFRLGLVKSSFIPDLDIRILREFTRYRYKLTSVRSSEKNRFQNAFTVCNVALDSVVSDMFGKSAVAITDYLTSDESFDPYHCVSLLQRSLKKKAEQVLESIEGFSITNEQKARIKIIREHYDFIEKLIAKVDTRVDEMVAKYEGAINLLCTIPGVDRNSAITIISEIGTDMSQFGSSKRLCCWAGLTPGNNESAGKKKSVRISRAGVYLKPALVQVAHAAVKDKANSYYALKYERIAKRRGKKRAIIAIARMILTATYSMLCTGEVWNPVDLFKIDMPEHLKEQQLTKAIKQATRFLEKQGLTVA

SEQ ID NO: 58955 - protein, 372 aa, unidentified
MQQSSTLYVGLDVHKESIAVAYVAQEHGAEVVSLGTIGTRQCDIDKLLRHLQSKGQQLVFVYEAGPCGYWLYRYLMKKGYVCWVVAPSLIPKKPGDRVKTDRRDARQLARLMRSGDLTPVYVPAVDDEAIRDLSRAREDTLRDLKAAKLRLKVFLLRHDIRYTGRAHWSPAHLRWLSEVVCPTPAQHIVFQAYVQTVTEQTARLQRLEHALRDQVTTWRFQPVVEALQALRGVQFTVAVTTVAELGDLTRFNNPRQLMNYLGLTPSEYSSGPRRQQGSITKTGNTHARRALVEGAWAYRYPAKVSRHLQLRLEKLPAAIQAISWKAQVRLCKRYRQLMAKGKNANQVVVAIARELSAFMWAIAKQVVVPPKA

SEQ ID NO: 58956 - protein, 343 aa, unidentified
MDHFAGLDVSVKDTSVCIVDEVGKIVREVKVASEPDALLAVLANRAYHFKRIGLEAGPLSQWLFSALAEAGLPVICVETRHMRAVLKARINKTDRNDARGIAQMIRVGLYRPVHVKTLRSQKLRMLLTHRKLLQAKVIAVENDLRATLRNFGLKVGVVGTVKFEARIKELVGNFPDLAALVEPLLVVRRVLREQIAILHRRVVAVVRDDEVCRRLMTVPGVGPVVALTYRATVDVPARFRKSKSVGAVFGLTPARDQSGERDRPGAISRCGDEMMRTTLYEAAQVMLLRSAKWSWLKAWAMKIAKHRGTKKAIVALARRLAVIMHRIWTDGTEFRWTREAAAV

SEQ ID NO: 58957 - protein, 434 aa, unidentified
MSRRLKVGLDISLKSNDVCIETESGEILVTHRRFDNDWLGFQRLLELLLTTLRQGEFDGVDIAGEATGLLWFHSFYHLAQSDGLALFDPHLYLFNARVTKHFRKVLAERDTCDPKDAYVVAECLRFGRLPHEVTFDERYLPLQRLTRYRYHVAHTLAREKVYFITVALYLKASVYTRLKPFSDPLGVTSQHILSHYVTIDELASISVDDLAAELDLIGKRRFDDPANNARRLQQVARASYPLTPCLIEPVNLILDSLLQHIRFLEAILQSLDEPIEAALRETPGAAYLHSVDGLGLVYTSGILEVQAPGRFFDGLKRDKQGLLRPKTKHDAQAALAKFAGLWWPRNDSGDFHAEDRRLPHTGNCYLRYYLVEGANSLRRHNAEYTAYYDRKFQESAKHKHWRATILTARKLVRLVFTLLHEEQMYQPPEVRYRK

SEQ ID NO: 58958 - protein, 396 aa, unidentified
MQITPAAGLTACKGGHFMYRILKIGMDVHTTNFTLCALESKFGEEDQIIANITVGPDHKNVLDFIKRIKEKMDPKGQDEIDVECGYEAGCLGYSLYHTLTACKLKCRILAPTTMLSEQGPRIKTDRRDAKLIAQCLSNGGYHAVHIPTAEDNAVKEYVRMRDDHKLALKKVKQQTNALCLRFGFFYDGTHWTGMHLKWLRALELPELIREALNEYLATYDELTAKIDRYDKRIQEIAAQSEYQEKVKKLECFLGIKTHTALSLIVETGDFIRFRKGNIYAAYLGLAPGEHSSAESGGRLGITKAGNSHLRRLLIEAAGGICKGQIGKKSKDLIARQKGNPADVIAYADKANVRLRSKYYRLTRHGKKRNVAVAAVARELACFVWGMMTDNIHGNAA

SEQ ID NO: 58959 - protein, 338 aa, unidentified
MIVIGVDVHKHSLTAVAVDEAGRMHEEKTVAAGDGELLAWASMLSDQRLWALEDCRQLTRWLERHLVEAGEELVRVPPKLMAPQRRAGRARGKSDPIDALAVARAALREPGLSQPRPDEQPFRELKLLVDHRDDLVDERRRAQQRLRWHLHQLDPSFAVPARRLDRLAQLDRVGRWLARREQDVQVRIARDLISRCRSLTRAIVELDRELEQRTEQLAPALLELPGCGALTAAKLLGEVGPIDRFRSDAQLARHSGVAPLEASSGRVQRHRLDRGGNRQLNAAFYRMAITQARYYPAARAYLERKQAEGKSRREAIRCLKRQLARVVFNTLKASPALT

SEQ ID NO: 58960 - protein, 331 aa, unidentified
MYFSQFIGVDISKDTLDAAIYPAKDKKMDFLHFDNTSKGLCEMLAWLKRRGIKSSEMVICAEHTGVYTNPLIAFAEKKGLALSLNSPLDIKHSMGIARGKNDAVDAGRIAEYAHRHQDKLKLYEKPSETIIKLQYLLTERRLYMRQRTALLNINSAMGKYETAEARSRNESAIHHIEKMVKKVEGQMTAIIYDDPETKRNFDLISSVKGIGLINAINTVVYTNNFKSFETPRRYACYIGVAPFDYTSGISVKGKTQVSKICRTQQKAELSMAARSAIIHDPGLRRYYQRKMKEKGGGKEAHGVVLNAVKFKLILRMFAVVRSGEPYKVLNY

SEQ ID NO: 58961 - protein, 341 aa, unidentified
MKNLFIGVDFSKEKVDVAIIFADGLTETAARVFNEFKTTVSGYKQLVKWVEQNSCGIDSSLWLFCGENTGDYSKGLCNFLYGKGYDMWLENAKSIKDASGLRRLKSDRADASMIAEYAMRNYDKAIMYEPLSESLAQLRELFLYRQMVVRHRCSFQVRRGEKRLTMEKSPIKTMISQSGRHIVSELNKEIEKIDKRIADLIKSDEELTEVFTIVTSVPGIGTQNAVCLMVYTDNFRRFNYDSRKIACYYGLAPFGKDSGTSVHSDPHVHYMANRQIKAMLTQAALAAVNFNPIMARYYMRLVERGKKKQVALNNVKNKLVHLVTAMVRNRQTFTPEYKISA

SEQ ID NO: 58962 - protein, 340 aa, unidentified
MKHIGIDVHSTTTDACVRNDKGTIVLRRRIQTKASELEKFVLGITGKKRIVLEEDQMADWVTRVLQPLADEVIRCQPQYNRLIIGSEDKCDKMDAESLSELLYLNRIKPVHHPAMHFRTLREAVRAYWIASRVLTRAKNRLKGWFLFNGLHEPGRRIYSSRKRTKYLKPLQEQGRNIELAELLYERMDVCRQLKAKHIRMLRKVSRPVKDLVELVQTIPAIGPISSYTLVSLLEDGRRIPNKRKLWRYAGLSLRRHESRDIGFQGASKTGNRLLKHVVMSAAITIVSRGERNGLLNLWERDIRKNVDPKRARRNLARKIVVIAQHLLRSKQEYIDELIRA

SEQ ID NO: 58963 - protein, 387 aa, unidentified
MTVRTVNNLPAATHGETVRCLFAIELSKQSWVIGFNTPLSEKISRRTLSGCDWKGLLELIEDVRARVSREMGRAVAVMSCYEAGYDGFWLHRQLEAHGVRNYVIDPASLQVDRRARRVKTDRIDAERLLRSLMAYLRGEPKVWSVVRVPSVAEEDARRLHRERDRLVLERVQHVNRIKGLCALHGIYDYHPLRPQAMARLEQLCTAQGGELPPRLKSEIKRELHRLELVVEMIATLEAERDAIVEDEASTHLNAEKIQNLHKLKAIGPEFAAVLVGEIFHRSFDNRRQLASYVGVTPSPFQSGSMAHEGGISKAGNRKGRTTGIELAWLWLRYQPDSDLSIWFRARVGIMKGRIRRIAIVALARKLLVALWRYLETGLVPRGAVLNG

SEQ ID NO: 58964 - protein, 366 aa, unidentified
MQKISTEQTCKSEIFKEQRLTIGVDLGDRWSSYCVLDEAGKIILEQKVPTTPEAMKQTFSRIPRSRIALETGTHSPWVSRLLTELGHEVLVAHAQKVQLITKSNRKDDRHDARTLARLARIDPELLGPVRHRSVQAQIHLTVIRARAALVSARTALVNAARGLVKSYGERLPKCGTQQVSRELAAELSTELRDVLEPLLKEIESLNERIKEYDERMEKIAKEVYPEVSLLKQVKGVGTQIALTYVLTIEDPYRFPKSREVGCFLGLKPGRRNSGESEPQKKISKEGDRYLRTMMVQGAHYILGPFGADSDLRRWGRQLAERGGKNAKKRAVVAVARKLAVLLHRLWVSGEVYEPLRNSQKAMRAVA

SEQ ID NO: 58965 - protein, 478 aa, unidentified
MKQNKSQCKGVRQPSAKSKSARKRRRERPDPTQGLLVAHPNAAAIDVGGSEHWVAVPPGRNQPSVRRFGCCTADLEELTNWLKACQIDTVVLEATGNYWVVLYDMLEERQLKPVVVNPRYAKNMSGKKGDISDCQWMQKLHTYGLFANSFRPEEPIRILRAYLRQRESLVEMSGVAIQHMQKALREMNVQLTNVISDISGGTGLRIIDAILGGQRDPDTLARLKDSRIRASLKEIARALQGHWKDEQLFVLEQARLTYAHYQEQLLQCQARIEQQMRALATRLPQSPAETRKRMGKTYMLKTTHPVPEPAELTRFNLSAELKRVVGVDLTNIDGIGAITAQVVLSEIGTDMSRWPTEKHFSSWLGVCPDHRISGGKILGRSTRPVVNRARNALRLAAYGLECSQSANGAKYRRFKRKLGAPKAIVAMAHHLARLIYRMIKNGQEYVDKGTAGYEAKYREQRLRWLQKQAKELGVQLVA

SEQ ID NO: 58966 - protein, 405 aa, unidentified
MCIPDESLPRRYVGLDIHKAYFVAIGVNRDKEPVFGPQRVPNGQLAAWVRRELSDRDAVVLEMTTNTWTMVDALEPFVHSVTVTHPPHVHLITRAQVMTDNKAALILAQLHAAGLLPAVWIPPAEVRSLRALVAQRWKMVRLGTQAKCRLQSLLHRYHFDPPPKRDPYTPHMRPWWEALPVEPLEAFRLQSDLDTVAFAQAQKARIETCLAQFAARDDRVPLLAQIPGIGFINAITILAAIGDISRFPTANQLVGYAGLGTKVHDSGQVQWRGRITKMGRRDLRRAMVEAAQSAVRYHAHWRAVYSRLCHQTAPKKAKVAVARKLLITVWHVLTHGEGDRFASDEQVACSFFALAYKLQVRNLPNGMSALQFTRHHLDRLGIGQELTHIRWGSKTYKLPPPQLAG

SEQ ID NO: 58967 - protein, 420 aa, unidentified
MEIMYERVAGIDVGKKEIAVTVRVPGDGPGAGRVEVTRKFTTFYPVLAVMAAWLVEQGVTHVVMESTGVYWRPVFHAVCEADADLEILLVNAGHVKNVPGRKTDVKDSQWLAQLLEVGLLRGSFIPPADIAAIREVTRYRKKLIQSRTSELQRLGKVCEDAGIKIDSVASSLKTKSARDMLEALIAGERDPRVLADLARGVMRKKIPDLSMALAGRFAAYHAVLARLHLDHLDHLEVMIARLDTQIEEMTAPFTAQVAALCTIPGIGDRLAQVIISEIGVDMGRFPTADHLASWAGLCPGNNESAGKHGNTRTRKGNREIRTALVEAAWATARTNTYLGARFRRLHRRFGKKNGGKAAVAIAHNLLVIIWYVLRDGVEFYDLGPDYFTRPGTSATTRRKDHLIQELRALGYTVTLQPTAA

SEQ ID NO: 58968 - protein, 341 aa, unidentified
MDHIGIDLGSRDSQVCVRNSAGEIIEEARRATIGLGPWLAGRNPARVVFETSTGAFRLASMAQQQGHDVRVVAATLVRSLGVGQRGLKNDVRDARILSEASCRIDLPSVHIPTVISQEVKAICVSRESLIRMRTQLVNRVRSYVRSRLGRRVRATPETLTAQVRRALLDDAEGLPAHLERVLVVLDTLREQIALAHAELKALAHEDVRMQRLMTVPGVGPVTAARFVAALDDVERFPNAASVASYLGLVPGENTTGFRTKRTGLTRAGAPQVRWALGQAAWSVYLRRPQDPMVQWAKQIATRRGVQVAIMALARKLAHILYALWKHGTTYDAARGAQPVAA

SEQ ID NO: 58969 - protein, 360 aa, unidentified
MGSRPVKGVSTIQTVFSFPKTKVMKKHALLIGIDISKETLDVCVMLAENQTILYHQVCPNNKLGIKQLVAGIMKRTKLSVCQWLFCMEHTGIYSMPLCVYLSEQGMDYALVPALEIKNSTGIKRGKSDKSDAVQIARYACLKDTQIKLYQLPAKELMKLKVLLSFRDRLVKTKQSFTVTYKEHEAFMEASIITVMVKESKSLIEVFNKKIKKVDEMIQDIIHSNQTLSTTYQLVTSVPGIGAQTASYLIVYTCCFTSFTDARKLACYAGVAPFEYSSGKSIRGRSKVSHLANKKLKALLSLATLNAKRKDKELQLYYQRKISEGKNGMLVMNALRNKLIHRIFATVKRGTPYVPLMKFAA

SEQ ID NO: 58970 - protein, 411 aa, unidentified
MEKIYDNCCGIDVHKKLIVACFRQGRKQEIREFGATTRELLELCDWLKQGGCQKVAMESTASFWKPLYNIFEVSEISAMVVNARHMKNVPGRKTDVKDAEWIADLLQHGLLTASYIPDKDQRELRELVRYRKSLTDERARELNRLQKMLEGANIKLSGTVRNINGKSARSLLEHILSGKVFDAAAYDVMYDKKIIAHNLKATKQQIIDDLNGFLSPLQKRMMKELLNHLDELNQHIENLEKEIDDSMKPQEHQAVEAIKEIPGIADASAKAVISVIGTDMERFPTDKHLASWAGICPGNNESAHKRKSGKTTKGNAILKETLVICAHSAARVRDSYFYAQFQRLRSHRGAKKAYVAVAHSMLIAIYHILKYGTVFKDLGAGYYNQFNKESKINAYIKKLKVLGCNVKVAVA

SEQ ID NO: 58971 - protein, 345 aa, unidentified
MNEHTTEVVRLAVDLAKQVFQVAGEDARERVVYEERLKSRQAFSKLLASLGPQVEVLMEAGPGAQAWARQVQSTGARVRILPAQRVAEHRSGAKNDRNDCLAILRAGRDRAIHAVPVKTLDALTMQAEHRVRVGYMRRQTFIGNQIRGLLLEHGIAVARSNALLATWVARIQDDASYPIPEVLREMIVELWAEWEHLAQRRARLDSRLEQVARTDETARRLMGIRGFGPITSTALVAKQTQPERFPNARQFAAYFGLVPDQHSSGAHVRLGRMTRRGDSYIRSLAVTGAQAVLRQLRPDATDADSKRLLRWCRQHGKKGAAIRLANRNLRIAWVLMTRKEAYQAR

SEQ ID NO: 58972 - protein, 427 aa, unidentified
MAFQTQLCNEFAAIVGLDWADRKHDLCLQVMPSGAREYTVLEQRPEAIEDWANMLRVRFGNRRVAVCVELRKGPVIHALAKYEHLVLFMVSPGLVAKVRRAFRPSGAKDDPSDAGLILDILEKHPEQVRRLNPDDPRTRQLAALVEARRALVDRRTGVTNRLTANLKGYFPQALACFEDLASLVACDFLRNWPSLGEAKRARATTLETFFHRHGVRGKARIDARIALLGEALPLTTDAGVLKPAILATRTLVEELRVMLASIERYDRTIAQVFDSHPDAFIFKSLPGAGAIFAPRLLAALGSDRTRYPDAAAAQQYLGIAPVTEKSGNSTWVHWRLACPTFLRQSIVEWAGMSMRYSIWAAAFYRQQREKGKGHHAAIRALAFKWLRILYRCWQDCKPYDEATYLIALRERKSPLLAYFVQQPAEPV

SEQ ID NO: 58973 - protein, 343 aa, unidentified
MKEVSTIGLDLAKSGFQVHGVDAAGEVIVSKQLRRRQVLPFFEKLPACLIGVEACATSHHWARELGALGHAVRIMPAGYVKPYVKRSKNDAADAAAICEAVTRPTMRFVAVKSRAQQSLLMVHRSRALLVRQRTMLVNAIRAHLAELGIVAPVGLRGLQALLAVICDPKDERLPSLARSCLESLAAALMTVEQEAASAERQILVWHRSNEASRRLESIPGIGPIIATALIASVADPSIFKSGREMAAWICLVPKQNSTGGKQRLGRISKQGDHYLRWLLVAGAMAVIRHGRKTNFAARPWLADLVERKPPKVAAVALANRIARTAWVLLAKGGTYRQPGMATP

SEQ ID NO: 58974 - protein, 347 aa, unidentified
MRFYNHSHAFYAGVDLHARSMFTHILDHDGKTVFEADLPANPAAFRNAIAPYRAGLVVGCECMFSWYWLADLCEDDEIPFTLGHALYMKAIHGGKAKNDRIDAAKIAGLLRGGMFPMAYVYPRAKRDTRDLLRRRCFFVNQRAQLLAHIVNTNSQYNHPPFEKKLSYAGNRSEEITERFTQASTQASIRADLNLIDAYDAQIDEVERTVLKNAKIIDPVTLKLLRTIPGIGKILSLVLRYEIDQIARFPEVGNFLSYSRLVRCEHESAGKKKGSGGKKIGNAHLKWAFSEAACLMLRAEADAKKWLDRQARKRGKKKALSVLEAKLGRAVYHVWSKQQAFDLRRFFA

SEQ ID NO: 58975 - protein, 344 aa, unidentified
MQAAVSTIGLDIAKSVFQVHGVDVDGQVVIRRKLKRRYVLAFFEKVPPCLVGMEACATSHHWSRELQALGHRVRLMPPAYVKPYVKRQKNDAADAEAICEAVTRANMRFVETKTAEQQSCLVLHRTRHLFIRQQTSVINAIRAHLAEFGIVAPVGRNGVEGLLDIVADANDKRLPELARACLGALGAQLRMLKAQILNFDRMITAWHRSNETSKRLDELPGVGPALATALVASVADPKVFRSGRDFSAWVGLVPKQNSSGGKQKLDSISKQGDRYLRSLFTAGALAVIRYARIHGTKHRPWLTALLARRPTKVAAIALANKIARMAWAMMARGERYREPVALAA

SEQ ID NO: 58976 - protein, 452 aa, unidentified
MAKRSKKRCEELPILHPHAAGIDVGASELFVAVSADRDPQPVRSFPTFTRDLNALADWLQQCGIRSAAMESTSVYWIPVYQILESRGLEVCLVNAQHVKNVPGRKTDVSDCQWLQYLHSVGLLRASFRPPGFICAIRSLWRHRSSLIQMATEHVLHMQKALDQMNLQIHRVLNDITGLSGLRILDAILAGERDPVNLARLCHSGVKSSQDMIAKSLEGDYRPEHLFALRQSLAAFHYYQQLVVEVDQEIQRQLGSLETATTAEPTLPKRTKASAYQRRRYEPKTFDLRSELYRIFGVDLTNVPGISAITAQTILCEIGTDVSRFRNASAFASWLGLCPENKISGGKVLYTKSRRVRSRVATALRMAANSLHHAKDYLGEFFRRITRKLGKPQAITATAHKLARIVYHLLSTKEAYNETVFHRCDEEALRRAQFRLRRQAAQLGFQLIPVQNG

SEQ ID NO: 58977 - protein, 355 aa, unidentified
MTFVGLDLHKRYITACAIDREGKALGEVRRMPVVLDVLLDFLGELPKPVSVSVEATLYWAWLHDQLSRAGYTVKVAHAYQAKLIWQARSKTDPIDARKLAELLRVNLLPVIWVPDAKTRARRQLLRSRAFLVRQRTQVKNRIHGHLTVENKLCPRTDLYGRAGRAWLAAVELSPVLAIEVQRLLRLHDFLTAEIHELDGQVKTAARGNATAKLLHTIPGVGLFGALFLLAEIGSIDRFRSSHELAAYAGLVPSTRSSGDRTTHGTVGHSSNRWLKWILVEIVTTLKLAPGPVGEHYRHLLRAKGKSKAATAAARKLCCYIYWMLKESWSYEEWLQQHDNSRRSGVRPSQLLGAVA

SEQ ID NO: 58978 - protein, 421 aa, unidentified
MEETNEPAELVERVAALDIGKAALTACIRVPHEDKPGRRCQEVREYATTTRALLGLADHLRCQGVTLVVMEATSDYWKPPFYLLEAEGFECWLLNARHVKNVPGRPKTDKLDAVWLAKVAERGMCMPSLVHPQPIRQLRALTRYRRTLIRERAREKQRLEKILEDAQIKLSAVVSDLFGVSGRAMIEALIAGERSPWALARLARGTLRNKTRILEDALTGHFNDHHGFLCQMMLERIDGLTAQIGQLDARVEQAIAPFARQVTQLDEIAGVGTTSAQELIAEIGVDMARFPTAGHLVSWAKFAPIDNSSAGKKKGSSTGKGNPWIGGTLGEIVLGASRTHTFLAERYQRLARRRGKKRAIVATGNTVLTIAYHLLSDPTARYTDLGPGFYDSKAGRERHARNLIRQLEHLTGKKVALNEAA

SEQ ID NO: 58979 - protein, 319 aa, unidentified
MQSKLTIGMDIGKAEVVVACHEGAFAVFKMANAVPVLRRWLATLPAGSRLGLEATGGYHEPVAELAHSLGFSVYILNPKDVHHYARALGARGKTDRLDAQVIAAYVAEHNARLHPFAPLSADEKLLRELARRRATLVNAKSMLQQSLRVLPGFEREGRELLRAMGSFADRLERKLAEIAARSSERAALVKRLQTIDGVGTLTSIRCATLFTRVPLHSSDAAVAFFGLDPRPHDSGQHRGRRRLSKRGPSEDRRLLYNAAMSAIRTPAWRPLYLHLRNRGLASTEAIIIIARRMVRIAFAMYQNHSDFNPRLVPRPCCPA

SEQ ID NO: 58980 - protein, 442 aa, unidentified
MLRHAYPAGAAIYELPAAPSDTGSHTATTWSLSMSTNACTDVFAGLDWAMHTHAVCIIDTAGAVLSRFEIAHDREGLAELMRGLARFGTRVRIAIERPSGLIVDALVEAGHRVFPIHPNAVKASRPRYRSHGAKSDASDAYLLADLLRTDGHRWRELSPQSDSIRALRTLVRSRDDLVTTRVGLGNQLLSTLQTFWPGAACIFADVTSSIGLAFLKRYPSPASAARLSETALGRFCRSHHYSGRRSPPELLARLRSAAPGLAGPLTNEAAGQVVRSMVAVLLPLVARISELTRRIERFVESLPDGQIIMSFPRAGRVCAAQILAELGDVRERFPSLDQLAAEAGTVPLTYQSGKTRTVAFRWACNHRLRQAITCLADNSRHANAWARRIYTAARARGCDHPHAIRILARAWLRVMWRAWTDRTPYDPARHVGARNLASAEAG

SEQ ID NO: 58981 - protein, 370 aa, unidentified
MLDTTTFVGLDVHARSIKAVSLDVMTGEVRAATFGYDAGAVAEWVRSVDPKAKCVYESGVTGFDLQKRLSGLGVDCAVGAVSKMIKPSADRRRKNDRNDAEFLARMLSVGNVVEVWVPDDECEAARDLTRALEDARDDLSRAKQRLSKFLLRHGLVFDERTPTGRRKGNWTRAHWSWIESIGFAEGADNDVLAYYVDAVRRAAEEKARLEGLVEAEARKPRWRKRVDSLRCLKGVDTATAADLVFEAGEFSRFGNARSFASWVGLTPSEHSSGESDRRGAITKAGNKHLRKALVEAAWHYLTCSARPKDLARGQDPDRGARRHAAKGVRRLVERREALLARGVHGNKANVATARELACWVWAVGLMAEGA

SEQ ID NO: 58982 - protein, 348 aa, unidentified
MVTIGIDPHKDTHWAVAIDEVGRQIADRECRAVSDGFGEMLAWARTLGGQRTWVLEDCRHVSGPFERFLIDHGERAARLAPHLMAQARGTVRERGKSDPIDALAVARAALKEGLDNLSTAQLGGIELDIRLLHQHHQRLVRQRTALINDLRWNLHDLWPDLKLPARALNSLKLQHQLARRLARAATSARVKIARDELRRIRELTRAIHQLIHDLHTTVSEVAPQLLAETGIGPITGAQLIGEIAGIDRFANDSKLARLAGCAPIPVSSGRTDRHRLDRGGNRQLNNAIHTIALTRLRHDPRTAAYIARQRQTGKTHREAIRCLKRHLIRRIYQLLTHPNQIRRTACLT

SEQ ID NO: 58983 - protein, 400 aa, unidentified
MLSIGIDVSKGKSTVCGMKPGGEIVYAPFEVQHTREGMLELVSLLRGSGEEVRVVLESTGSYHCPVVAALLENGIFVSVVNSLRMKRFCSQSIRKVKTDRIDAMQIALYGLAYWQELQPARLPEDTYRELQLLARQYYQMTSMLIKAKVDFNAICDQVLPGMQELMSDHAGRHKLSDFVLRYHHTTHILEMGETRFRKDYCKWAEKKGYRNCERMAALIFATAQNGIPVLPNAPSTQIVITEAIRVLHTVEASRDAILTQMQALAKTLPEYSLVREMPCIGDTLAPRLIAEIGDVRRFHSKRALIAYAGIDAPPYQSGKFCANNRHISKRGNRYLRKTGYEVMQSYVMHKPANDPIFTFIEKKRSEGKCGKLAMVAGLNKFLRVYYGKVTELYRSLPAIE

SEQ ID NO: 58984 - protein, 349 aa, unidentified
MNKFSKAKSDGNVCTDMFVGMDLHKNYLQVAVLDGKGKVLKNSRIDNDLSKVGRFFDRIGGSGNSSDVKVVMESSCVWYNIYEYLSEERQLDVSLSNPFKTRAIASAKIKTDTLDAVKLADLLRGGYIAKCYVPDRKIMDLRQLVRHRIVLVRMRTKLKNKIHGITLMQGIRITDTSAFSNNYVQKLKQLNDYRIDAYIRLIDSLDSEIKKVSKEIQSRAEKEDMTKLLVTIPGIGYYSALLILSEIGDINRFPNSYHLCSYAGLVPTTHSSGGITYHGAITKTGSKHLRWIMIECVYTHMRISKNSNITRFYTRLANRKGNSKAVVAAASKLLKVVYWVMKEKREYHV

SEQ ID NO: 58985 - protein, 446 aa, unidentified
MEIEGSGVTVGLDAAVVANHHVIVRRPSPGSPGEVVANFVAAPTLAGMDTLAKRLAPYAPVMAVAEPTSMTWLPLSIALGRAGCSLALVGNRHSARLRSALAGKNKSDPIDADMLSRAGEFFSLEPARIPSPDELALKRVCQRRGKLIVDANRSLRRIISLARWAFPDVWNAFAGSRPTALAVLTRWPELAQLARARVSSVSDVVAAHTRGVGNVDDRAAHIRAAARAWAEFWDGHVDLDALAWETSELLDDYAAAQARLERATDAARRRWEQLWGDDPLLLSVPGMGPITAPTVRAFLADAQQFSDAKQAQSFVGLNPSNWSSGQMEAPSRAITKEGPGVLRLAFYQAGNVARTVDPQLAEFYRRLMVERGHCHTQASCAVARKLVGRTWATLTAGRCYELRDLDGQPITRRQAKQRAATLAVPDDVRRRARARSAATHRARLTR

SEQ ID NO: 58986 - protein, 423 aa, unidentified
MEVMQERVAGLDVHKAMIVGCVRVMAAGKVERECRTYATTTAGLLELLAWLSESGCTHVAMEATGVYWKPVWNILSDGDFELIVANAAHIKNVPGRKTDVNDATWIADLAACGLIKASFVPEEAIQELRSLMRARKQLTREQTGHVQRIQKTLEEGNIKLSSVISDILGVSGRRMIEAMIAGVRNPAKLAELAHSRLKASPKELYDALHGRLTDHHRFMLQLYLGQYDTLAASIAKIDEAVDVAVAKMDAQAADGHATFRSLIHLLCTIPGISALAAVTILAEIGRDMSRFPTAGHLVAWAGMCPGQNESAGKRKSSRLRKGAPWLKTILVQCAWAASRKKDSYYRAQFNRLRGKSGPKKAICAVAASMLTAIYHMLKDGTEHQDLGIDHFDRRTTDVKAKRLVAQLAKLGFHAEIRPLAEAA

SEQ ID NO: 58987 - protein, 358 aa, unidentified
MKKIVVGIDISKEKIDASAIDVTGSQPGVVRLDYREFGNRPMGFRRMLVWVRHLKEDACLDDVLFCCETTGGYDRRLCDYIYAKGLSIWREGALQIKRSMGVRKGKDDKADSLMIAEYAMRHMDKAVIYETPSQSVRDLKSLLLYRHKLVQEKTEKTVRMKELQATSAGSKSLRFILRDARKSIKSIEKSIKECERQILQLYKENNDLNKSYEHLTSVSGIGIVNATAFIAYSNNFTGITTANKLASYWGCASFRERSGTSLDRRAYVKCYSSSLLKAYLTQAAECAIKEHGIYHEYFLRLTAAGKPYRVIINNVRNKLIHLAYSLVTNDVNYEREHESLRKKRKSEQGKSVSLEIIN

SEQ ID NO: 58988 - protein, 316 aa, unidentified
MTEAGGFVGIDVAKAELEVVVRPSGARWTVTNNPVGLAQLQERLQASAPSLIVLEATGGYEVAVVAALATAALPVVVLNARQVRDFARATGRLAKTDAIDAGVLAHFAEVVRPPVRPLPDAMTQSLQAWLMRRRQLVEMLLAEEQRRSRAPRPIQRQIDQHVRWLRAQLGAVEKDLAQTLRESPVWREKDNLLRSVPGVGPVLTTTLLGDVPELGQLNRKQIAALIGVAPLNRDSGTYRGRRAVWGGRARVRATLYMATLTAARYNPVIRAFYERLVAAGKPKKVALTACMRKLLTILNAMIARRTAWKPPAAVSA

SEQ ID NO: 58989 - protein, 414 aa, unidentified
MIIAEEPTGARVCGGVDWAKDDHAVCIVGAEGEALQRFMVTHDRAGLTNMVHRLLRAGVDEVGIERPDGPIVDALLAAGLTVLVIPPAQVKNLRSRYGSAGNKDDRFDAYVLADVVRTDRRRLRPFERDTVATTALRTTVRARRDLVIHRVAAANQLRAHLQIVFPAAAGLFDSIDSEVSLQFLERFTTQGQADWLSVKRLSSWLASIGYSGGTDPGVIYARITAAPRGTIGADAATHAVMTHAYIAVLRTLNTQIRTLAVNIGAQLDVHPDAKIFTSLPRSGSVRAARLLAEIGDARGRFPTASSLACLAGVAPSTRQSGKVKAVTFRWGADKELRDALCDFAGDSRHSNPWAADLYAKARARKCDHPHAVRILARAWATIIWRCWQDHTAYNPAEHGGLQRILNQDQQTVAA

SEQ ID NO: 58990 - protein, 345 aa, unidentified
MEPMYYVGLDVHKRKISYCVKDASGQLHSEGSLTATRFDLDCWMKTLPQPWSAAMEATMFTGWIYDHLKPHATALKVAHPLMLRAIAAAKKKNDRIDANKICDCLRCDFLPECYMASTAIRERRRTLRYRNLLVRQMVQMKIKTGSLLMEAGVSYNKERLHKAAYFRELLASNPDIDDSLRALLRQCRETVLRLSKTENALIRSLQHDRLLAERVERLMSIPAIGPITALTWALEVGDVGRFSSIKKAVSYCGLCGAEKSSGSTVRRTPLSKQRNKHLQTTLIEAAKMAPRFSPTLALLYDIEKQKGNANRATLAVARKLVAYLVAVDRGKTHFLVVDRESSVAA

SEQ ID NO: 58991 - protein, 366 aa, unidentified
MLYLGIDQHAKQLTISLRNDAGDIVLKRQVSTEPKRCAEFFAKLRDKAGDEGFIAILEVCGFNDWLLKFLPTVGCTQTILIQPTKKLKVKTDKRDAHALSELLWVNQHRLRAGEPVRGVRQVILPSKHHAESQRITLLRKDAGRMRTRATNRIKNILRKHNLQWQMPTKTFPSVRAVAWLKTVELPPCERAEMDWHLDELERWTTRMNDLEVQIIERSKDDPVVTRLRTIPGCAHYSALSLVCRVGDPHRFPKGKSLAHYWGLTPGVNDSGEGTGRRGRITKAGSTMARWVLAQITLHCLRRDPVLKAWYKPIRNRRGSKIARVAVMRKLAVIIRNMMVHEQTYSECRDAMLARRKRQVAIHKQTA

SEQ ID NO: 58992 - protein, 333 aa, unidentified
MDEYDRVLGSKTFATTTHGYKSLLAWMRSFGELERVGIECTGTYGAGLLRYLQRCDVKTLEVTSPDKTARRKRGKDDVMDAENAAHAAFAGIRTVTPKTRDGMIESLRVLKVCRKTAVAARRVALQIIQTQIVSAPETLRDQLRSMTRMKLIRTVAAWRPDLTGYRDVTTAYRIALKSLARRYIELHDEVAELDIMIKAIVDDLAPNLIARRSIGYEAASQLLITAGDNSERLHSEASFAALCGASPVPASSGQRQRYRLNRGGDRAANSALHIIAIGRIQYDPATQAYVKKRTEQGLTKLEIIRCLKRYIAREVYHLIRARNHMINQVQIGT

SEQ ID NO: 58993 - protein, 385 aa, unidentified
MGTQTFIPRDYDVFAGLDVDKKSISVTFTDHQGFLKSLNMPYKVEHLVNYVRKHYPDKKVAFAYEAGPTGYGLYDGLEAQAYPCLIASPSMIPKAPGQRVKTNRLDSRGISENLRGGQLKGIHVPTPLYRELRHLTQLRDTLVSEMVRMKQRIKSLLLMEGLEFPPAPAGSQWSFLVKKKLRELPCSTTVRFKLDRLLDSLEFDEKQVLKATREIRRFCQTDPELSQCIEYLKTLPGIGWIVASQLLARVGDWRQIKNIRQLPAFLGLVPTENSTGERTERGSITHSGDGRLRSKLIQASWSALRQDGELREFFRTVAKKHPRHLGSRVAIVAVAHKLSVRASVVLMKQRPYEVRQKVQSAPLTQEETVPQGTTRRLAVPGETNS

SEQ ID NO: 58994 - protein, 444 aa, unidentified
MHTIPDNATRVQRFRELKATLRTRRDRLLVGIDIAKAQHVAQIRLAHTRILDAKVTIPNTQAGFGAFWTRLVAHQATTRAPEIVCAVEPTGTYHQALATFLEAQGATVVFVNNHVAQLNRRTLDGTWGKSDPKDAHNLCDLLEQGKVLFYSLPAEPLADLRRLVRLLRRARAELSACKARFTTTLRPQFGPVGDGLAAGLVARLPASLQAFLPRSGRRGGGPTPASAAALSPALAYECTDLAARVTAVQARIAGIEAELVRLADRLPAYRLLRTIPGIGPTVAAILVAEIGDIAWYTKFSQLRKLAGLDIVSIQTGQWTGGGRISKAGRALLRWALYQAAIGATRNPAWRARREALIAKRRGNRHAFFKANVELGAKILRLVWGVWRSGRPYEPARAPVSLRAPRCRAGARASGPGRLTLLDGEGRVRFALRDATEPPAPRRRG

SEQ ID NO: 58995 - protein, 385 aa, unidentified
MTKLRFIGLDVHKRTTDVAIAEQGDAPPEFYGTVPSDTPRLTKLLKKLGRGVELRCCYEAGPTGFALYRALRDAGIDCVVVAPSCVPDTKGGVVKTNKRDARRLARFLRSGDLVAIHVPDGQTEAFRDLSRAREDAYHAVQTARQQLSGFLLRHGRAYPGKHQGTKAHLEWIRSQEFEHETQKRVLAKYIAAYESAVEREKELEDDIRELLPSWMLEPVVRALMAFRGIDVISAVMIVAEIGDFVRFPEIAKFPSYLGMTPGENSTGDDKRRGRVTRAGNAHVRRVVIEASWGYRYRTLSPAIRKRGLGTLEAVRLIAQKAQTRLSKRYLHLLARGKEKNKVAMAIGRELSCFLCAAATHPEVQELVRRRKEEQQRLTAARPMAA

SEQ ID NO: 58996 - protein, 337 aa, unidentified
MIVVGVDVHKHSLTAVAVDELGRELAVTQGAVDGRVIGWGRSLEAERLWAVEDCRHVTRGFERSLLAAGERLVRVPPRLTAPQRRRGRVRGKSDAIDALAIARAALQEPRLDGPRPGEETLRELKLLVDHRDDLVDERRRAQQRLRWHLHELDPQLTVPAGALDRTVWLDRVARKLARREQTTQVRIARELVGRCRLLTRSIVALDRELETRSHELAPRLLELPGCGPLSAAKLLCEIGPIERFTSDAQLARHAGVAPLDASSGKHQRHRLDRGGNRQLNCALHRIAVTQGRWHPPARAYLERKQSEGKTRREALRCLKRQLARVVFNTLKTSPALT

SEQ ID NO: 58997 - protein, 374 aa, unidentified
MGEHTRFVGLDVHKETITVAVAEREGVARLVGTIVHNPVAVAKLVRKLGPVGELRVCYEAGPCGYALQRQLASLGVFCEVVAPALIPVRPGDRVKTDRRDAQRLATLLRSGELTAVWVPDEAHEALRDLVRAREAAQKDLLRARHRLGKLLLRQGQHSPRGTRAGTQKYMSWVRSLALSQAAQEVVRLDYLAEVDRLVERVARLNAEIVVAVEQLPAEVQRVVHGLQVLRGVALVSAVTAVAEVGQFSRFSTPRQLMAYSGLVPRERSSATAIRRGGITKTGNAHLRRVVVEAAWHYRHAPFIRPQLKRRQVGQPASICATSFKAQQRLHMRYRRLLGRGKNMQQTMTAIARELLGFMWAIAINLESTAGTRAA

SEQ ID NO: 58998 - protein, 418 aa, unidentified
MDPMDHPKMRCTYVGVDSHKDTHTAVFLDCFFGKLGEIRFPNRPSAFPAFLADAERFRLPGTEFLFGLEDVSAYGRMLSGFLSDCGQQVKHVNALLVARERKNRNITEKTDSVDAECAARVLLSRLSDLPDAEPLGKYWILRTLVIRRGFIVKNNVCLKNHLHTLLTQHYPNYTDFFTNIDCKTSLIFFMKYPSPSALANVSHEELSEFLKDPSNKRVGEDKAREILDSLEDTTVEYQEIRDMAVRSAIRQIESNLKELDCVEEAMASFLEKFDCTLTTMKGIDVVTAAALLSCIGDIKKFSTPAKLARYSGIAPITYSSGKKDLQFANQRGNRELHTVFYGLAIRVSSPVGPASKVINPFFYEYYHRKRAEGKTKRQALKCVERRLVNIVWAMLTNNEEYVNPPMYYVQKEDAAAKK

SEQ ID NO: 58999 - protein, 337 aa, unidentified
MKHLGIDVHLRSSEVCELSERGKVLDRSRIPTTESGLRSYFGRRNRCRIVMECGASTPWIYRLLRELDHDVVVVDARNIRLIAESTLKCDRVDAEILARLSRFDPALLQPVYQRSYAAQELRTRLKVRQSLVRSRAKLITTIRGSLRAHGYRLGSCATRSFVARWATLEVEESLRQTLEPLVETIAELTDRITVLQRELYAEAKSDELPVRLQEVPGVGPLVALSFVAWVDRPERFATSRAVGASLGLRPILRASGDRAHRGRITRQGDVEMRWLLVQAAHASFLARRDSALRRWAEQLERRVGKAKAAVALARKLAIVMHRMWVTGEGYQPFPKAA

SEQ ID NO: 59000 - protein, 361 aa, unidentified
MRIIGCDLHARQQTLAMLDTETGEVVNLTLMHEGNQVREFYSQLPRPVLVGIEATGSMHWFLNLMEELGIECRVGHPATIRAAEPRKQKHDRRDADLILKLLAENRFPAIWLPTKELLDLRALVLHRHQWVRMRVRMQNALQAIALANGLRRGPGLWSYDGQAKIAFLPLLPHASYRRSALQTMYKHMEEEIENLTKQVAEQAGHRSGARLLMTHPGVGPVTALATDVFLGDPKRFVDGKALASYVGIIPREYSSGERQRLGGVTKQGRPLLRFLWCEAGAHAVRRDPELQRFYRRKLVQKGLGKARVAVARKLGIRLWIMLRDEIDYQEFCRRGQKQQSGAACAGMPETGYGANSHRPVD

SEQ ID NO: 59001 - protein, 348 aa, unidentified
MMLIGCDFHPSWQQVCWLDQETGETSEQKLVHASGAAEKFYKQIPAPALIGMEATGNCQWFVEMVTAAGHEVWIGDAAKIRASDVRQQKHDKRDAALLLQLLLEGRFPRIWTPSTEQRDLRQLLIHRNKLVRLRAQAKNELQHLAMNRGLQKKNRLWSEAGRKLLCELPLMHWASRRREDLFKVMALLDTQILSLDLAVKQAAENDPNARLLMSQPGIGPVTSLAYVLTMGDVSRFARGKQVASYLGLIPREYSSGGHQRLGPISKQGNRFMRMLLVEAAQVAVRCDPKFRSEYLHRCHQKPKGVAKVAAARKLAIRLYWMLRTQKRYPEIVSIESSSRVPLVVRHGG

SEQ ID NO: 59002 - protein, 359 aa, unidentified
MRTQSNKLNFEGENIYVGIDVHLKSWNVTICTEYLHHKTFNQPPVPSILRDYLNTNFPGGTYYSAYEAGFYGFNIHFELKKLNINNIVVNPADIPTSQKEQILKNDSRDSMKIARSLRANELIGIHVPFIETLENRTLIRTRDVMVKDMTRFKQRIKALLYFYGISYPSEFQRSTNHWSRRFIKWLKEEVSLNTANENDALSLLIREVEQQRVLLLEINRKIHSLAISEKYVKEIELIRSIPGIGLITGVTFLSEIEDIERFPNTDKLAGFVGMIPTCHSSGEVENYGEMTFRKKTILRRCLIESAWIAVRIDPALTRCFSQLCKRMEPNKAIIRIARKLLNRMYYVLKKRQKYEYGVV

SEQ ID NO: 59003 - protein, 419 aa, unidentified
MESSRSKVCGIDVHKRFLVATILERNGPKKTEKFLNNLEHLLKLRAWIITEHCQAVAFESTGEYWVSLYDVLQGYVEIIVANSYHIKWIPGKKTDIIDSEWIAELALNDLISPSRILPKDMRDTRALTRLREKLVNERTDHKNRAHKVLDSACIRLSAYFTDLFGKSGLKILKCILSGVPPEEIARKLPKRLQARSDAILDAIRTQLSAHQLIQLQTSVTMIELLTGKIKELERTILNDLQKDRRKLQILMSIPGIGFVGATTILAEIGDVKDFSSPDKLTKWAGITPRVYQSADKLHTGSITKQGSKHLRWILVEVAHSCIRTKNTALRIFFDRIFNRSGYKKAIVALARKILKLVWHLLTNDELYEEKNTLLAKLCRLPIAIETGSFSVSAAIELLVKAGFQVIDGDDHPDKRVLGT

SEQ ID NO: 59004 - protein, 345 aa, unidentified
MKILALDLGNYKSVACIYEMTSLSHRFTKVATTPKAIHDLLVEEEPDRVAIEICPLAGWVSDLVRALDIELEVASTTHDAWRWKNVKRKNDRQDGLKLAQLSALGQLTLVHVPEQGVRQWRALINYRQRLVSRRTKIQNHIRALLLRQAVAMGSGHRGWTRAGIAQLEALARPLNEVGQEELWRGELALELEGLKALAEPLRQVEAKLDELGAVDERVQVLRTIPGVGPRGAEALAAVIDKAQRFKRGKEVGAYLGLVPKQIQSGESNRLGRITRQGNRLLRSLLVEISWSGLRYNSWMRSVYERVRRGSKARKKIAIVAVARRLLIRCWAMLRDGTTWRPATST

SEQ ID NO: 59005 - protein, 291 aa, unidentified
MRFYQTQHPFYCGVDLHAKSLHVCIVDQAGAVLVHRNLLAQPELFLQTLAPDRAQGVAVAAECMFAWYWLADLCAQHQIPFVLGHALYMKAIHGGKTKSDKIDSQKIALLLRGGMLPQAYVYPPAMRATRDLLRRRTRLVRTRAEALAHIQNTLSQYNLPPIGKKLGFAANRVGVAERFQEPSVRRSVEADLNVIGHLDNEIREVELYLVRHAKVDDPQGYARLQTIPGVGKILALIMLYEIHDIARFAGVGNFVSYARLVRCSHESGLSTPMASPRRWALPASSLATPGS

SEQ ID NO: 59006 - protein, 443 aa, unidentified
MSTLPDAPAEPVFAGLTAIDWGSKEHVVGSVAADGGRIEISKLTHTPEAVELWAASLRQRFAGGLVAVAIEQKRGALIYMLSKYDHLVIYPVPPTMSASYRRAFFPSGAKDDNSDTLLLLDLLRHHRDRLSPLQQDTKETRLLRFLTEDRRGLVEQKVSVVQQLTDCVAQYFPQVRTWFGSLDAPLVDALLQRWPTLQQLQGSHPGTLKRFFTDHCSWNNDRIAEQIRLIYDTIPATGDDVVLEACSRKTAACLIQIRVLRDQIAAYDKRIAAVTADHPDAPIFDSFPGAGAALVPRLLAVFGTDRKQWHNAGDLQRFSGIAPILVRSGNSSRVAMRRACPKFVRQTFHEWAAHSIRFCPWAKLLYEHHLRGDRKNHHSAVRVVAYQWIRIAYRCWVNREPYDERIFLEAQRRRNSPFASNNAAGAGIEFQNCAGFQKLTVTP

SEQ ID NO: 59007 - protein, 364 aa, unidentified
MDVHLRSTTVCALDAETGEAVTRRFRGNPWGEVAEWMSGFPGPSLAAYESGYLGFAPQRELSGLGVDCVVAAVSRVPRSAADFSSKNDRNDAARMAKAILSHDVTPVWVPSPEIEGLRDLAGAHDAATARLAAAKQRLLAFLARRGYAYGGTTPAGNPRRYWTYDFLRWLDKVRPADDGGIRALAALRSEVEAAAETRDDLLAEYRAAVAAGPLSAEVEALQSIKGCGFALAAAFASEVGDFSRFRSGRQVTSYFGLAPKQRSSADSVRLGGISGAGNALVRRLAVEGSWSYVQASHQPKLMPKGSGVPLEVRMHGRKGSERLLRRREEMLARGMPQAKANAATAAELVRWLWALGAMCREATE

SEQ ID NO: 59008 - protein, 319 aa, unidentified
MGTVVNNKSSSQVVGIDVSGAFLDVAFYPDGETFRVGNDVEGINQLVARLSPLKPRLIVMEATGKLELAVLKALCQAQLPAIAVNPRQVRDFARATGQRAKTDRIDALVIAHFGHAVEPVVRPLNDEQTEQLQALVLRRLQLIDMLTAEKNRLKRAHRAARNSLRDHIAWLEKQLDAADHDIDGFLRDSPAWRQKEDLLRSVPGIGPGTASTLIGFLPELGSLTRREIAALAGVAPFNADSGNHVGKRHIQGGRAIVRRALYMACVPALRFNSVIRAFYDNLKEKGKPSKVALTACMRKLLIMLNAMVRNSSPWKASDA

SEQ ID NO: 59009 - protein, 417 aa, unidentified
MAEEIEWFVGIDWASQSHQVCLIDAHGECLGERAIAHGGPGIEELCDWLIARTGGTPEVIGVAIEMTQGPVVEALLERGFCVYGINPKQLDRFRDRFTVAGAKDDRRDAHVLADSLRTDRHAFRRLSNDEPVIVQLREWSRMADELQQERARLASRMREQLWRYYPQMLELADDLAADWFLNLWSHAPTPAKAARLRVTTIERFVKAHRLRRWQAPEALRILKQKPLSVAPGVVEAATAHIRTLSVRIRLVNQQLKTAHRKLDELCAQLIPSDEDEPGQRYEQRDVVILRSMPGLGRIILAVLLAEVWQPLRRRDYHALRSLSGVAPVTRRSGKTSVVVRRYACNKRLANALYHWARLATQHDALSRRRYAALRQRGHSHGRALRTVADRLLSVACTLLKQQTLFDPSYEVRNAAGA

SEQ ID NO: 59010 - protein, 389 aa, unidentified
MKIYVGIDIAKLKHFAAAISSDGEIIIEPFKFTNDADGFQLLVSKLESFDKNSIIIGLESTAHYGDNLVRYLVAEFYQVCVLNPIKTCQMRKNNVRKTKTDKVDTFVIAKTLMMQDDLRFITFFDLDMMDLKALGRFRQKTIKQRTRLKIQLTTYVDQVFPEIQYFFKSGLHQNAVYALLKEAPSPKEIASMHMTHLANLLKVNSHGHFTKEHAKELRVLAQKSVGANDSAISIQITQTIQQIELLDSQLEKIEAEMTDIMKFNDSVIMTIPGIGYINGGMILGEIGDIHRFSNPNKLLAFAGLDPSVYQSGNFQAKTTRMSKRGSRVLRYALVNAAWNVVRNNATFKAYYDAKRAEGRSHYNALGHCAGKLVRVIWKMLTDEVEFNLE

SEQ ID NO: 59011 - protein, 402 aa, unidentified
MTYDYVIGMDACKYFHHACVLDIDGTQVLSKRINQNEQSLRALFSAFSAYDHKVLVVVDQPNNIGRLTVAVAQDIGIDVRYLPGLAMRQLSRIHAGNAKTDIRDAYIIAHAAKNLPESLRSVDRVEEAFLQLKVLNGIDEDLARSYTRLINQIRSALVGCYPQFEQALRGQIIHRKWVLHLLARYGGPTKIKRLGKAKAAAFARRYKARNPEPVLDAIFAAISEQTVTIAGAHYAEMGVAMSAKDALLKLEHRQQIEKEVIELINDIPHTQFLLSMPGIGPKTAAQILMTAGDMSDFPSAGHLASYAGLSPRTNQSGTSIMSNSLNRAGNKKLKNALWQSSFASIRSHERSRQFYERKRREGKRHNAAVVALARRRLNVLYAMMRNHEHYHDPAPSQEDLAA

SEQ ID NO: 59012 - protein, 387 aa, unidentified
MPEQFDSHNAMAAFDHDSTLVVALELSGKSWQAGAVVPGAARRPRRRLEPRDIAGLLKAIERWKAEAAGASREVRRVALTYEAGRDGFWIARDLLARGIEVQIMHPASIPVARPGRRVKTDRIDLDMLLRTFLAWLRGEPRVCSMVRIPSEAEEAMRRPGRERERLVGERIQLENRIENLLCLHGVADFRPRLKKAAERLDELRSFAGAPLPAQTMAELRRLMARHRLLSEQLREIEAERDRVARVAHPDGAERMIQHLAQIVGLGLETATLLVREMFCRPFRDRRAVAGFAGLTGTPFQSGGMAREQGIGKNGNPRVRRIMMQLAWRWLRFQPQSALAQWFAARTDGAKGRIRTVMIVALARKLLVALWRYAGTGEVPAGARIAAA

SEQ ID NO: 59013 - protein, 332 aa, unidentified
MSITMIGLDTAKSVFQVHAVNEAGEVVVRRKLQRSELIAFFEKQASCTVVMEACGAAHHWARALTGLGHEVKLIAPEAVRPFVKRGKKNDAADAAAICEAASRPGMRFVPIKSLEQQGVLALHSARSLLVKQQTMLANAIRGLATEFGLTVGLGMGKLGELMALVDADEAVPEKARQALNALFDQCRALDESTEAFEAEIVAHARHDDTARRLATIPDIGVFQSARHFAAWLGLVPRQHSTGGKTRLGRITKAGNREIRRLLVLGATSMVHRAPGWNSAAGAWTRGVLERRPVRLVTVALANKMARIAWAVMTRKEVYHAKGRVAAAAEAMA

SEQ ID NO: 59014 - protein, 353 aa, unidentified
MKQICVGVDVSAATLEVAWRGEDERLHRGTFSNDPHGHRALIKELRRGARSVRVALEATGIYGLDLALALDRRENVEVMVANPRTIADFGKALLQRSKTDRTDAETILMFVERMPFVSWHAPSKAALELRTITRRVAALTKLTSGEKTRAHAADASEAVRKILQKSIRNTIALLEREIATLRQVALKVIEADELLARRFELLTSIKGIGPLSAIQILAELMMLPADMTDRQWVAHAGLDPRLVQSGTSVRLTTRISKAGNHYLRGALYLPAVTASRFEPHVMTFRAHLSARGKRPKQIHVAVMRKLLHAIHAMFATDSLFDGSRFYRPAAAGAAGTSGIASSAISEVSAALSS

SEQ ID NO: 59015 - protein, 451 aa, unidentified
MTQSKRRHPERDFTPTHPNAAAIDIGSRMHVAAVPPDRDPEPVRAFGTCTGDLQQLADWFERCGVRTVAMESTGVYWIPAYEMLEQRGFEVVLVNARDAKHVPGRKTDVSDAQWLRRLHEYGLLRASFRPKGELAALRAYLRQRERLLDYSASHIQHMQKALMQMNVQLHHVMTDMTGETGMRIIRAIISGERDPAALATHRDRRCHASEAEIAAALAGNWREEHVFALGQALELYDAYHAKVAECDLRIEVVLRRLRDAAAKPVGRLPPARHRDKTANAPAFDARGALHAVLGVDLTQIHGLGPSLALKLIGECGTDLSAWPNAKHFTSWLCLAPANKISGGKVLSTRTRRSGSRAAALLRLAAVTVGRTQTALGAFYRRLSARVGKAKAVTATAGKIATLFYNTLRHGIDYADPGASYYEDRYRARVIANLRRRAKSLGYMLHEMPAPA

SEQ ID NO: 59016 - protein, 348 aa, unidentified
MRFYKPTTKYCCGVDLHNRNLYVCVVDRDGEIHCHRSMRSKGRELLRVIEPFQGDVTVAVECTFAWYWVADLCRQHDIPFALGHALYMKAIHGAKKKNDRVDSEKIARLTAANLLPMAYVYPWENRATRDLLRRRLRFVRQRADLYTHVHHLNTQSHLDPIGRDVKSRPRRMALPERFSDPEVRMSVQANLTMIEQLDEVIEQLEKHILAKAKGRFQKELAALQSIPGVGPITALTILYEMDTVKRFDSRQQFASYARLVKCLHESDGKTYGYGGKKMGNAYLKWAFSEAAVFAVEWSQPVEKLYNRLARKHGKGKARTLLAHKLGRAVYYMLLRGQVFDLERFLNGK

SEQ ID NO: 59017 - protein, 334 aa, unidentified
MNNKFYCGIDVSKKKLDVMLLAQEKFHYKVVENSNDGVIFLQEWIKSKLEKDAFVHFCMEATNVYHELLAFTLLENKNYKVSVVNPRIVKAFAKSLVKTKNDKTDAKILAEFCKERNPKPFTPQTKERRELRDLSRLMDNLIELRIMQKVRLQTFNTEAAARVVKTTLKSIEDTITENEKEIKFYYDNFPELKKEYELLNSIPSFGKRVSNVLISEIYKDEYGLYNSKKLTAFFGLEVREMESGSSVWNKPRITKFGNPRVRNMLYMAALVAIRHNKKMSDFYLHLVNKGKPKKLALIAVARKLLVIACAILNSQKPYEENHISCYNKNSVKIA

SEQ ID NO: 59018 - protein, 347 aa, unidentified
MEYFVGLDVSLETVNVCIVNAAGDILLEKKIAAEPAAIVHLLKSFGSPFKRIGLEAGPTSSWLYGELRAAGYGAICLECRHVKAGLSAMRNKTDRNDARGIAQLVRLGWFRQVHVKSEEAQRTRMLLVNRQQLLTKALDIENSVRGSLKVFGLRVGVVARRGFEARVLELVADDPILLAVTEPMLRVRQALLEEFERLDRLCQQLARRDPVCRRLMTVPGVGVVVALTYRTGVDAPERFSKSRDVGAHFGLTPKRYSSGQTDYDGRISRCGDEMVRTALYQAANVLLHHGRWSSLRSWAMRIAKRGSVKGAKVALARRLAVVMHRMWTDGTDFRWSDTSRMTAPTAA

SEQ ID NO: 59019 - protein, 362 aa, unidentified
MNNKTKTNTNTHSHTQPQPIAKAKSIKLGIDVHADSYRVVRQIDHATPQPAQKFTPKDFLDWAKKQLALAHEVHSCYEAGPLGYGLHRKLEAMGIHNVVVRPQDWDELHKGVKTDKTDALMLAQRLSRFVDGNRNELAVVRVPTPEQELARSQSRLREQLMSHRLRLEAQGRSLLLFNGIRPRGRWWQQRGWAALAGQLSSGLQELLEVIRGLVLAVQAQLEAATIRLESAATPQVCGVGALTSQVLEREVLDWKRFENRRQVASMTGLCPGVRASGLKSHHGPITKHGNRRLRTALIELAWRCLRFQPDYGPIKKWSPVLLSTKATSGAKKKAIVAVGRKLAIDLWRLNTARTTAAKLGFK

SEQ ID NO: 59020 - protein, 389 aa, unidentified
MKIYVGIDIAKLNHFAAAISSDGEIILEPFKFTNDADGFQLLVSKLESFDKNSIIIGLESTAHYGDNLVRYLVAEFYQVCVLNPIQTCQMRKNNIRKTKTDKVDTFVIAKTLMMQDDLRFITFFDLDMMDLKALGRFRQKTIKQRTRLKIQLTTYVDQVFPEIQYFFKSGLHQNAVYALLKEAPSPKEIASMHMTHLANLLKVNSHGHFTKEQAKELRVLAQKSVGANDSAISIQITQTIQQIELLDSQLEKIEVEMTDIMKFNDSVIMTIPGIGYINGGMILGEIGDIHRFSNPNKLLAFAGLDPSVYQSGNFQAKTTRMSKRGSRVLRYALVNAAWNVVRNNATFKAYYDAKRAEGRSHYNALGHCAGKLVRVIWKMLTDEVEFNLE

SEQ ID NO: 59021 - protein, 333 aa, unidentified
MWDKATGEMLERALSHERKEEVRAFYAGLQGPVRVGIEASGQSQWFEPLLAELGHEVWIGDAAKIRASCERKQKTDRRDAELLVKLLDEERFPRIWVPTPAERDARQLLLHGHKLVRMRTQLKNQLQALALNQGVQRKRKRWSEAGRKQLEALPLLPWASRRRAELLVLLDQLEASIGELDGAAAEQANTRPAVRRVMTHPGVGPITALAFVLTMGPAQRFRRGKQVASYLGLIPTEHSSGGRGQRLGPISKQGNPFLRGLLVEAAQSAVRHEPEMRRAYQRLAQRKCRALAKVAMARKLAVRLYWMLRTEVDYAQLIQGSHAGQLESFRGRV

SEQ ID NO: 59022 - protein, 370 aa, unidentified
MLDTTTFIGLDVHARSIKAVSLDVMTGEVRAATFGYDAGAVAEWVRSVDPRARCVYESGVTGFDLQKRLSGLGVDCVVGAVSKMIKPSADRRRKNDRNDAEFLARMLSVGNVVEVWVPDDECEAARDLTRALEDARDDLSRSKQRLSKFLLRHGLAFDERTPTGRRKGNWTRAHWSWIESIGFAEGADNDVLAYYVDAVRRAAEDKARLEGLVEAEARKPRWRRRVDSLRCLKGVDTATAADLVFEAGEFSRFGNARSFAAWVGLTPSEHSSGESDRRGAITKAGNKHLRKALVEAAWHYLTCSGRPKDLAKGQAPDRGARRHAAKGVRRLVERREALLARGVHGNKANVATARELACWVWAVGLMAEEA

SEQ ID NO: 59023 - protein, 367 aa, unidentified
MKKLTTTMMQETLNKQDGRLTVGLDLGDRASFYCVLDDAGDVLLEQKVSTTPKAIKEVFGVMPRSRIALETGTHSPWVSRLLSELGHEAIVAHARSVRLIGESRRKDDRLDARTLARLVRIDPQLLCPVKHRSAEAQADLTVIRARAAPVRTRTMLVNAARGLTKSYGERLRGCNAPGMKPQAAQDLSPELKRALEPMMREIESVSERICEYDQLLESMARNRYPEAEQLKQIKGVGTLIALTYMLTLEDPHRFRKSRDAACYVGLQPGRRNSGQSEPQMHISKEGDPYLRALLVQAAHHVLGPWGVDSDLRRWGMKLAEHGGKRGKKRAVIAVARKLAVLLHRLWVSREVYVPLRPSSRATLPAAA

SEQ ID NO: 59024 - protein, 362 aa, unidentified
MEYFAGLDVSVDDTAICVVGDDGQVVLETAVETDPVMIAEALRRYAGRLRRVGHEAGSLSPSLHTGLLEIGIPAVCLETRHVRAALSAQRNKTDAADALGIAHIMRTGWFRQAHIKSEGCYRIRLLLVQRRNLKRKFLDLENAIRHSLKVFGIKLGKVGRGGMEKAVREAIADDPMVSGVMECMLRARAALWTEYLVLNKLVVRLAMRDELCRRFMAIPGVGPVTALSFSSAIDDPKRFRRSRNVAAYFGLTAKRWQSGTSIDVQGRISKAGDPDVRRALYEAASAMLTRFKGRDTVKTWGLKLAKTKCHAKARVAVARKLAVIMHAMWRDGTFYAGDLDASMQDVADWNAAKVQRLSYANS

SEQ ID NO: 59025 - protein, 339 aa, unidentified
MQVTTVGLDLAKNIFQVHGITADGTVAFNKSLRRAQLLQFFESLEPCLIGMEACGTSHHWARQFLKLGHEVRLMPAMYVKAYVKRGKSDAIDAEAICEAVTRPTLRFVAIKTEEQQGILFLHRARDLVVRQRTQLSNMLRGLLGEFGIVIAQGIGRAVKFAKAVLDGDRPSIPEVAIEVLTNLCNQMVALHLRILWYDKRILLEGRRDPKVMLLRTIPGIGPVTASAIVATAGDGHQFRNGREFAAWLGLTPINRSSGGKERLGRISKMGDRYLRRLLVTGMTARLNQMKVNPDRVDPWAMSLRERKSPRVATVAMANKTARIIWAVLTRNERYRPHTA

SEQ ID NO: 59026 - protein, 354 aa, unidentified
MIIIGADYHPGFQQIAFVDTDTGECGERRLEHREDAEKFYRDLAAQEVKVRVGMEASGHARWFERLLAELQVELWIGDAAEIRTKRVRKQKTDRQDAQLILRLLLENRFPQVWVPNWENRDLRQLLWHRHRMVQARTRIMNQLQAVALNEGLRCKKRLWRDAGREQLEAFRLAPWASRRRHDLLELLDRLTPTIAELTQAIEQEAEKCPAAKRLQTHPGVGALTALAFVLILGRADRFECGKQIASYLGLVPSEESSGQRRRLGHITKQGNSLLRFLLVEAAQVTVRSDQEWRGRYFHLALRRGRKIAKVAMARRLAVRLYWMWRKEWNYQQLTKFGSHAGEPGNPDGVQSSTE

SEQ ID NO: 59027 - protein, 338 aa, unidentified
MNLSRIGLDLAKQVFQVHGVDRHEHVVCRRQLKRAQVRDFFRQLPPCLVAMEACGSAHYWARELRELGHTVRLIAPQFVKPYVKGDKHDAHDAEAICEAASRPSMRYVPVKSAEQQAVQSVHRVRSRLVRARTALCNEVRGLLGEFGLIATRRGRAATMALLETVTATEPAPLPAPMGELLRELKDELQTLEARIARLERQIQAHVCGDARIQRLLAVEGIGPISASAVAASAGDARQFRTGRQFAAWLGLVPRQHSTGGQQRLGNISKRGDTYLRTLLIHGARAVVRCCANKTDARSRWLQGLLQRRPANVVAVALANKNARILWALLSRETCYRPG

SEQ ID NO: 59028 - protein, 315 aa, unidentified
MDEALAVFVGIDVSKDRLDVHLRPSGEAFFVSRDGRGLDELTARLAACPVALVVIEATGGFETTVAAALAGAGLPLCVVNPRQIRDFARAMGRLAKTDALDAEVIALFAERIRPQARAVPAPEATRLAELVARRRQIIEMIGMEANRARRMPDKRLAKGLARHIAFLEKELSEIDRTIGDGIKNSPAWRETETLLKSVPGIGDVTARTLIAEVPELGSIDRQKLAALVGVAPMNRDSGMMRGHRTIVGGRTCVRNTLYMAALAAIRHNGVFKTFYERLTTRGRPKKVAIVAVIRKLLTTLNAIVRDNTPWRTQNP

SEQ ID NO: 59029 - protein, 341 aa, unidentified
MIKAAITVLGIDLGKNSCSAAGLDASGAIVFRRRATREGVLKLIASLPPCIVAMEACCGAHFMGRAALAHGHEVRLMPPEYVQPYVKAQKTDERDAEAIAEAATRPTMRFVPLKSEAQLDLQTLHRARQRLVANRTRLTNQLRAVLFERGVIMPKRRAALRLRLDALASDGLPLGDRSMRLLEDLRDEWAELDRRIAAYDEELASLARTDEAARRLTAIPGIGVINATALVAAVGDGAAFAKGRDLAAWLGLAPRQHSTGGKTKLLGISKRGNAYLRTQLIHGARAAMTHFVKQDSPTGAWLRQLLSRAHPNVAVVALAAKLARIAWATLRSGQAYRPLPG

SEQ ID NO: 59030 - protein, 425 aa, unidentified
MGTLQTVFEKENFAACIGMDWGDKEHVYRILDCASGVITERSLRQRPDILQEWVIELQRVYPGQKIAVAIEQSKGAVINFLMQYDFLVIFVVNPKLSAKYRQAFKSSGAKDDGNDSGFILDILLKHGDKLNHWKPGDAKTRTLQILTQKRRDAIKDRTRLSNQLKAVLKQYFPLALDVAGDSLATVIACNFLKRWTTLESLKRARTSTIRDFYTKHSCRQLKVIENRIRAIKQAKPLTTDVVIIETSILEVHMLIEQLLCVIKHIEKYDNAIDEVFPTHPDAEIFSSLPGAGAVLAPRLIAAFGSDRNRFKTSEEVQNYSGIAPVTVQSGKRRLVRWRWACPKFVRQSFHEFAGESRKHSIWASAFYEKQRDAGKTHNSAVRALAFKWIRILFRCWKNHERYDELVYIQALKRQGSGLFTHIAQS

SEQ ID NO: 59031 - protein, 349 aa, unidentified
MREYISFDSHKYYTLMEREDIQTQVARQRRIEHAPDAIRAALRGCEADTPVAVEATGNWYWIVSEIEQAGLRPLLVHPRKAKLMMGMINKTDKLDVHGLNRLQRNGTLPTVWIPPAALRDLRELTRTRLMLTAQRTRLKNRLTATLAKYGRQHSEFTDAYGPRARTELRQRLEVLPTQTRFVSELLLQQLDFVQQQIQTIEQRLQQLVQITPEMQLLQTLPGIGVILAATIALELGQIDRFASAAHLASYAGTTPRVHASGDKTRFGALRTDINQYLKWAFAEAGNSVALYHQRRPQRHVSQLYRRVRLRKGHGKAIGAVARHLAEATFYVWSRREAYREPTGGRSKAV

SEQ ID NO: 59032 - protein, 388 aa, unidentified
MIYVGIDIAKLNHFASAISSDGEELIKPFKFTNDNDGFQLLISKLNPLDKDSLIIGLESTAHYGDNLVRYLVAKNYKVCVLNPIKTSTMRKNNIRKTKTDKVDTYIICKTLMMQESLRFVTFYDLDLMDLKALGRFRQKTIKQRTRLKIQLTSYVDEIFPELQYFFKSGLHQKSVYALLKEAPTPEAIASMHMTHLAHLLKVNSHGRFDKEMAQQLRVLAQKSVGASDSSLSIQVTHTIQQIELLDSQLERVEAEMTEIIKINDSVIMTIPGIGYINGGMILGEIGDIHRFSSPNKLLAYAGLDPSVYQSGNFQAKKTRMSKRGSKVLRYALVNAAHNVVKNNTTFKAYYDAKMAEGRTHYNALGHCAGKLVRIIWKMMTDNLEFNLD

SEQ ID NO: 59033 - protein, 338 aa, unidentified
MVVIGIDPHKGSHTAVAIDEVERKLDEVRVRADRRQLEVLLKWAIDFPDRYWAIESAHGLGGLLSEQLLEAGEEVFDVPPTLSARVRVLATNKSQKSDPNDAYSVAVAALRSSRLRPVGSEDHVAVLRLLCNRHKNLTSAHTQAVCRLHALLMGIVPGGARRRLSADKAAAVLAGVRPTSVVERARKVQAQELVADIRRLDAQLKASKQLMADVVATVPTTLKELSGVGPISASIILAHTGDVRRFPSEDDYASYNGTAPVDASSGPRKRHRLNTRGNRQLNHAMHIIAFSQLSHPGPGRDYYERKLAEAKSQKEAVRALKRRISDAVYRQLRIDVSR

SEQ ID NO: 59034 - protein, 344 aa, unidentified
MTTKLMAGIDLHSNNLFCAIVDLNGKRVFEQKLPCDLNSVIRALKPFKKRLEKIAVESTYNWYWLVDGLQDHGFTVVLANPAAMQQYDGLKQADDKSDAFFLAELLRLNILPTGYICERQWRSVRDLLRRRMGLVHKRTSLILSLKSLHTRTTGRDLGTARIKTLEPEEAEKLFGHPADQLITRLDLELVQQLDRSIAEIETTILAEVKSFPEYRVLQTMPGVGKILGLTIILETVDPRRFASAGDYASYCRCVDSRRTSNGKKKGENNSKCGNKYLGWAYVEAAQFARRYDEDCRKFHDRKSAQVNSIVATKALACKLAKAAWHMMSQNTPYDGKRMFPDVKK

SEQ ID NO: 59035 - protein, 395 aa, unidentified
MLLDHPSDEPTAIRTHIGAIFVSLELSRSNWLVTSLSPGKGEKMSKYRVAAGDMAELLTLFAELRRKAEIRTGQSYPIITIQEAGLDGFWLHRVLQQNGIESHVVDPASIATPRRRRRAKTDRLDGEALLRALLAYKRGEPRVCAMVVAPSPAEEDRRRICRERTTLIAERITHVNRIKGLLFAQGISEYGPLRRDRRARLEALRTGDGRELPSYLKAQIGRELDRIELLQEQIKAVEAERDAVLAAARKPASARKPASEEAAPEPVAMLLALRGVGANFAAVLWSEAFYRSFSNRRQVAAYAGLAATPWQSGGIRHEQGVSKAGNPRLRTTMIQLAWLWVRHQPQSTLTRWFKERSQQGRKRAIVALARKLLVALWKYVTQGVVIEGAVMKPAA

SEQ ID NO: 59036 - protein, 417 aa, unidentified
MNPHPKSIPIQRYIGIDIHKHYLMIGGQNTKREWTLRPRKVQVSRFRDWAEKNFQPGDAVVIETTGSVWDIYDIVAPLVSRTLVAHARKVRQIAEARVKTDKEDIKRLITLLIADIVPEVWVPPMHVRELRSLISFRWRLTKQITMSKNRLHSVVQRFNLDPPEGGLLTDKNKSWWEEQEFSDLTGFEVERDLEIVKTLEEQKEAIDQKLGELSNTEPWASDMVYLMQIPGMGLIFSMVVLSAIGDIKRFSDPKKLVGYSGLGAGVHDSGQKHQSKSITKEGRKELRWALVEAAWRAVGSDPYWKAQLKQLEKRMHRNKAIVAIARRLLVSIWHILIKREPYHHFDEETIAYKMLIWSWAMDEKSRGGMTPQQFAKYGLLRLGIGQDLERIVRGGAPRRIAPTEEILALKPELAPPR

SEQ ID NO: 59037 - protein, 399 aa, unidentified
MLAVGIDISKSKSVAAILNQDGSMHTSPFEFHHTQPELDAFIKYILNSKQSATILMENTGHYHYPVLKAFQEAGLPVCMVNAYQIKKFGDTDLRKAKTDKKDAVRIARYALEKSYSLVPYTSMEQKYEDLRFLARQYNQRMLTLKTNKVFLLNLLDETMPGITNILPLTTRTPETSLSVLFINRFKSYDRIKKMGKSRFLDAFEKIARKSRNRQTKTYGLAIYEAALRNITTRGENEYTLAAQDQCLELVCESQKAADSIILKMKTLAETLPEYAVLRSMAGVGNRLGPLILAEIGDIRRFHSGKALNAYAGNDAPPYQSGTFESHNRHISKRGNAALRKYCFEVMQALKLTRPQNDPVYLFLLKKEQEGKPYNVAKMAGVNKFLRIYYARAMETLKQQ

SEQ ID NO: 59038 - protein, 323 aa, unidentified
MVMDREGQTIRSGRVANVRVEIEKFLEGLEAVEAVIETGRSSYAMVDVLEEMGVPVKIAHPHEVKAIARAQIKTDKRDSEVLAHLLRMNMVPEVYRRSRENRQAQRVLRQRAFYVSAMTALKNRVYAFLAQQREEVREEVARETNIFSERGRKRLLGLALMGDEKRRLEALLKTYRHLETRIGESAALIEKLYEESREAQLIRTIPGLGKHLAVLVAVETAEITRFADAAHLHAYAGVIPSTHSSGDRTHHGKIVRAGNRWLRWAAVEAVWPGIRADFDLRCFYERPARAKGANKAKVATARRLLTIIYKVWKEGRNYIAYRR

SEQ ID NO: 59039 - protein, 367 aa, unidentified
MKKVSTRAAGQSRNISQQKLTIGLDLGDRSSWYCVVDEAGQIQREQRFHTSGKALQEVFGAMPRSRIALEIGTHSPWISRLLSELGHEVIVANARKVRLIGESRKKDDRLDAQTLARLARIDPELLYPVKHRSAKAQADLTLIRARAGLVRARTGLVNTARGLAKSYGERLRSCNVRNLNPEKAESLSPELQAALEPLLNAIESLSERIVEYNERIEQLAQQSYPQVALLKQIKGVGTLIALTFLLTLEDPHRFRKSRDVGCYLGLQPGRRNSGQSEPQLHISKEGDPYLRTLLVQGAQHVLGPFGVDCDLRRWGLKLAERGGRNGKKRAIVATARKLAVLLHHLWVSGEVYAPLHNSSRTTVATAA

SEQ ID NO: 59040 - protein, 359 aa, unidentified
MLKYALGIDVSKKDIHVCLSAIDAKQQVKVKSSSKFANNVHGFKDLLVWLNRHKKESDIPLVNVIEATGVYYEACALFLFKAGLSVAVVLPNKAKKYLQALGLRSKNDKIDAMGLARMGAEQCLEPWQPMDEFFYSLRAMTRHHQSLQELKTNINNQLHADEHSIYSNKTVIKQLKKLITTIEKQIAETDKDIHEHLFNNDGVAEKLNHIIDIKGLGYLTVAVVLAETNGFALFRSASQLVRYSGYDVIESQSGDRSGKTKISKKGNSHIRRAMHMPAFNVVRYDAGNFKTFFERIFARHHQKMKAYVAVQRKLLVLIYTLWKKNEAFKPNGKINTSGNEETVPSFALTEGQLNEVAPA

SEQ ID NO: 59041 - protein, 374 aa, unidentified
MENTITYAAMDTHKKQHKIALHYPCQEEIVEFTINNTVRDIKKMVNKIKKHAPGKVEFCYEAGVCGFTLKRRIEQFNCRCCVIAPSLVPRKPGERVKTDRRDARKLLMMFKAGLLTEVHAPNEHQEAARELTRLRETAKDNLKRIRHQLLKFLTRHGYIYSNGNHWTQKHITWLRTLEFSEPMLANVFESYFNEMIYCIGRLKNLDKEVELLAGSQEYKEIVGLLRCFHGVDTLTAITIITEIFEYGRFESPRHLMSYLGLTPSENSSGDKQKKGSITKTGNKRIRRLLNETSWHYRYRYVPSKVLKKRRKGQPRWAVEIADAAGRRLSKRHRHLVSKGKMACKENIAVARELAGFIWFLVTQYHARKNTKDAA

SEQ ID NO: 59042 - protein, 420 aa, unidentified
MSETPYAYYVGIDWASEAHRICLLDAEGRRRGERSVEHTGPGLATLVDWRLTLSGAEPAGIAVAIEVPRGAVVETLLERGFPVFAVNPKPLDRFRDRPTVAGAKDDRRDAWVLADALRTDRHAFRHLVLDDPRIIRVRELARVADELQQAARRLANRLRDQRRRCYPQLLRLCPAVDEPWLWALLTQAPTPAHGQRLHRRTVERLLQTSRIRRLSAETVLADVKVPALRVSPGTVDAATIQIALLLPRLKLVHEQRTQVERHIEAVLTELAGTEAEAEGPCHEHRDVEILRSLPGIGRLVAATMLGEAAQPLATRDSHTLRALTGLAPVTVQSGKRWRVAMRYAGHRRLRHAVSHRARVSVQCDAHSRAHDAALRARGHSHPRALRGVADRLLAVLIAMLKTDRLYDPTRRHGPYAAVAA

SEQ ID NO: 59043 - protein, 421 aa, unidentified
MKGLRGRRVKMVKEGTLIATVDIGIASNTGYCTTLDGRSTKSFRFDNTKEGFEKFWGMTIASKNRFGCDEVVVGYESTGPYAEPLVHYLVNRPVRIVQVNPMHTKKMKEVNDNSPLKTDDKDPRVIADIIRLGRALSIVVPEGDAASLRRLNNARERHVGEQTALLNQLQQLVFLIFPEFKTVLKNMKGKTAQYILKRYTLPERIGTLSKEALGEAMRRRSMGKFGIKDAESLIGLARETVGIKEGLGGIFMDIRHILLQLEAEGRFISEIEAEMGAILERIPCSARLLSIKGLGIVSVAGLIGEVGDFSKFSTQSEILKLAGLDLYEISSGKRKGQRRISKRGRSLLRKILFYAAIQMIRKNGIMYDYYARLTGRGMERMRALIAVSRKLLRIIHAIVRDNRDYVGQYQTPERRVIKMAA

SEQ ID NO: 59044 - protein, 356 aa, unidentified
MRDRLGVVPGSDVFLGLDISSVSWHVTARSGGETLLSASFPPKREALNGLLGRLEGCRVHSVYETGPFGYGLHDWLRSRQVDSMVVSAAHVPGEIGNRVKTDRRDGLKLARTLEAGLLRPIFVPEARQRADRELVRQRHRVQRDRCAAMVRIKSFFLTYDIEIPEEAGAHWGGDFEAWLRRLKLADQSLDRVLEEQRGLYFDLDARVDGLTKELREMARSTDYASMVELLSTVPGIGWLTALTLVVEIVDFGRFPDGEALSSYAGLTPSEHSSGDRIRHGHITRQGNPVVRSVLVESSWILIGKDPEMRRFYDRIKVRRGGKRAIVAVARKLCHRLLAIAQSGQPYQVNFSQTKEN

SEQ ID NO: 59045 - protein, 410 aa, unidentified
MEVFLEHCAGLDVHQASVVCCVLIGTPERKPQKLLRTFGTTTRELEALRAWLAEHGVTHVGMESTGVYWKPVYAVLEGHFELIVGNAHHIKNVPGRKTDVKDAEWIAQLVRHGLVAKSFVPPPAIRDLRELVRHRRTLIETRTAMRNRVLKLLEGANIKLSGVASDVFGVSGMAMLEALAAGTNNASEMAGLARGRMRRKHAALEAALDGRMREHQCFLLGMQLRTLGTIDQDLEALDARIETQLEPYQDQHRLLMQIPGVDWVTAAAIIAEIGTDMDVFATAQRLAAWAGVAPGNYESAGKQKGAGTRRGNVFLKSALFAAASAAVRTKGSYYRDKYNRLRARRGPVRAIMAIAHKLLIAAFHMLSTGEDFRDLGEGYLDQVARKRSTTKLVQRLSNLGYDVMLVPKAA

SEQ ID NO: 59046 - protein, 343 aa, unidentified
MSEVTTIGLDIAKTVFHAHGADERGRGVFSKRLTRAKLLAFFAAQPRCTVALEACGGAHHWARELTALGHEVRLIPPAYVKPFVKRHKNDAVDAEAICEAAQRPTMRFVAVKSEEQQASALVFRTRDLLVRQRTQLANAIRGHLTEYGWVAPKGVSYVSMLGDILEEEMAASLPPAAVAMFKVMLDLMADLNERIADLDREVERRAREDETARRLTTIPGIGPITATALTALAPAAQTFAKGRDFAAWLGLTPLQHSTGGKQKLGATSKMGERTLRRLLIIGASAVIKQVVRRGPVKGSWLEQMLARKPRMLVTVALANKMARIVWALLSKGGTYRAPMAVAA

SEQ ID NO: 59047 - protein, 340 aa, unidentified
MRFYTKQHRYYCGIDLHARSMYVCVLDWQGEIVLHKNMPCTPDLFLKAIAPYREDMAVAVECIFTWYWLADLCGKENIPFVLGHALYMKAIHGGKAKNDKIDAHKIAVLLRGGMLPMAYVYPALMRSTRDLLRRRMHLMRKRSELLAHIQNTNSQYCLPQFGKKIAYKANRQGVCEHFTDSSVRKSMEMDLSLIDHYDKLLTEVELYITKTAKVHNVNAFFRLRSVHGIGKILALVILYEIHDINRFPTVQDFVSYARLVKCAKESAGKRQGTSGKKIGNVHLKWAFSEASVLFLRGNPAAQRYLDRLTSKHGKPKRYRSSLTNWAGRSITCLRGNKLST

SEQ ID NO: 59048 - protein, 358 aa, unidentified
MFKGATKVNNFTGQDIYVGIDTHFKSWMVSIYSDEFELKTFSQAPDVEQLSGYLRKHYPGANYKLAYEAGFCGFGIQRAFAQKTIDCIVIQPGDVPTSDKDKKRKQDKVDSRKIARGLRNGDLNAVFIPDEQQEADRQLIRSRAKLTKDLTAVKNRIKAFLKVRGIPIPDTYSEGAWTEKFIDWISTLEFSATSNKIALSAYKEELVFLMAKQKQLGKAIEDLSETERYKDDVRLLKTIPSIGILSAMIILTEIGDVNRFKKPEHLFSYCGITPNCHNSGDKEYTGSISKRGNAVLKTMLIECSWMAVRKDPALLLYYKQQLPKMVPNKAIVKVARKLASRIRYVLKEKKEYVIGIIE

SEQ ID NO: 59049 - protein, 377 aa, unidentified
MKAPSTRPAAVLGLDVGKSSHWACLIDRGGEVLASAPVRNREGALDALFSSAPAGTLVVVDQFRNIGSLAVRRARAAGLAVAYLPGLAASRAAGLFAGEAKTDERDAEVIARTALGVPDSLSGVPGRGEALEAARALSSQRDHVVACATRDKNRLRAVLLESCPALEAAVDLSDRRWLELLAGFGGAWGIARSGAEGPQAEAAGEAAATSTAPPPALVEAENRQVRFLAARISEALDEAGALEAETAGLLEGDETYACLLTVPGIGPRTAAQLAVSVDIARFPDHDHLASYCGIAPRVRSSGTSVRSVRASRRGDARLKSLLIFSCNSLVRSSGRYGEYYRACRARGMGHGRALKAVARKRLRAIYAVMRDRVPYRE

SEQ ID NO: 59050 - protein, 339 aa, unidentified
MTEVYAGLDVSDKATHICVVDEAGAIAWRGVCATDPQALTDTLLRRCPDVVRVVLETGALSAFLYHGLIERGVPAVCICARHAKGVLSTRINKSDPHDAEGLAQLARTGWFKAVHIKGTSTHLDRTHLKVREQLVKAHGAMKNQLRGLLKLFGLRLGQATTPAKRAERLQALLGPRPELKAALEPLVAALSALEGQIAIATGELKRRAAADPVCVRLMSAPGVGPVGALTFKTGIEDPNRFARGADVGAFAGLVPRRHQSGERDSRGRISKAGDPMLRRALYESANSLLGRVKRDCALRRWGLELAKAKGPKRARVAVARKLAALLHTLWQSETDFRWA

SEQ ID NO: 59051 - protein, 354 aa, unidentified
MVVVGTDVHKRTHTFVAVDEVGRKLGEKVVKATTEGHHQAIAWAREQFGEQLLWGIEDCRNLSARLERDLLTAGQSVVRVAPKLMSQARASARTRGKSDSIDALAVAHAVLRNPGLPVASHDAVSRELKLLIDRREDLVAQRTSTINRLRQRVHELDPGAEPKPASLHRHKPCAALGAWLDTQHGLLAELARDELTDVRRLTETINALAARIGTRVQQVAPALLALPGCGELTAAKIIAEAAGINRFRSEAAFARHTGTAPIPVWSGNTAGRVRLNRSGNRQLNAALHRIAITQLRIPGSAGQVYYRSRLARGKTTKEALRCLKRHLNRTVYRCLHADQTKSGTSQETHTQAAA

SEQ ID NO: 59052 - protein, 312 aa, unidentified
MTTIICGVDVSGATLDARIRRDGPHLRVERSCQGIAELAAFCRRHQASLVVMEASGGYEKLAFALLWQAGLACAIVNPRAVRRFAQAMGYLEKTDRIDAGVIAHYGAAMELEPQTPDTPAQARLEALALRLRQLTAMRAAQDNQRRLVEDATALVSIEQTVAFLSGQIRTLEAAIDACLGEDPLWTRLASAFRAIKGVADRTVATVLALMPEIGTLSNKAVAKLAGLAPIANDSGKRSGPRSIRGGRSHVRTILYLVADVARKYDPSLADFRQRLLAQGKPKMVVRVALARKLLVRLNAKARETRAELAYAL

SEQ ID NO: 59053 - protein, 334 aa, unidentified
MENIALIGIELGKNSFHIHCQDRHGKAVYRKKFTRPKLIEFLATCPATTIAMEACGGSHFMARKLEELGHFPKLISPQFVRPFVKTNKNDFVDAEAICEAASRPSMRFVQPRTESQQAMRALHRVRESLVQDKVKTTNQMHAFLLEFGISVPRGAAVISRLSSILEDSSLPQYLSQLLLKLQQHYHYLVEQIKDLESQLKRKLNEDEVGKRLLSIPCVGTLTASTISTEIGDGKQYGSSRDFAAATGLVPRQYSTDGRTTLLGISKRGNKKIRTLLVQCARVFIQKLEHQSGKLADWVRELLCRKSNFVVTCALANKLARIAWALTTRQQTYEA

SEQ ID NO: 59054 - protein, 426 aa, unidentified
MLGIGIDWAEEFHDVAFGTPEKGVVEQFRISHGPDGVGALIDRALRLEPDPAQVRVVLETRHGLLVEALLDAGFTVVPVNPDLVARRRGPARKKDDAEDARICCLLALDRHAGLKALVPHGELGGELRAIARDDERAARDQRRLLNRLRADLQTTYPAAYPAALTLAGADLGAPTVLRLLERWPTQPELAQASRDDLISFARAGRHGWPDRFAHQVAAALATPSLPTRDYLVRAKAAGIRLAAVQLLALHEARRGWEQRMAELLLGGRRTGRDHTVKDPDPGNAFPGGAIYLSMAGLGDRLAARVAGEIGEHIEQFTSPNGLQCYAGQAPVTRRSGKSDFVVARRLAHNRYLGDAVHQWAFCSLRQSGWAREFYDQKIAAGKSHHNALRALGNRWLEILWHCLTKGVLYDEAVHVANRNRALGRAA

SEQ ID NO: 59055 - protein, 381 aa, unidentified
MTTPATCQVPESPTAGTLFVAFELSEKTWKLGFTTGHGQKPRERTVPARQQERVLDEIAHAKRRLGLPNTAPVVSCYEAGREGFWLHRCLQGHGITNHVVDSSAIEVNRRRRRAKSDGLDVRKLLSMLMRYHHGERHVWQVVKVPSIEAEDHRHLHRDLETLKQERARTTTRIQGLLSSQGLRVPSLTKLPEQLDALRLWDGSPIPQGLRRRVLRVYAHHTFLSEQIAAVEAERRAQLQAATDARIDQVRQLMQLKGIGSNGAWLLVMEFFGWRAFKNRREVGGLAGFTPTPYQSGESAREQGITKSGNRHVRWMTTELAWSWLRFQPDSALSVWFRERFGHGGKRLRRIGIIAVARKLLIALWRFLETGALPEGAALKVG

SEQ ID NO: 59056 - protein, 381 aa, unidentified
MNTTATAHVEYSTEPVLYLAFELGNVHWKLGFTIGLGQAPRQRTIRAGDLERLQEEITAAKQRFKLAEPVRVVSCYEAGRDGFWLDRYLRSAGIENVIVDAASIEVNRRARRAKTDRLDLGKLVTMLIRFHNGEPKVWHVVHVPTAAQEDRRQLHRELLQLKRERTQHINRLKGLLVSQGVRLAVKPDFLKQVETVRLWDGWPLGPGLKARLQREYERLQQVNDQIKVLEAERRAALRHSNDPAVEMVRHLLRLRAIGPNSAWLYTMEFFSWRTFRNRREVGALAGLTPTPYQSGASDREQGIDKAGNRYIRSIAIEIAWRWLYLQPDSDLSRWYQERFGHGSKRLRKIGIVALARKLLIALWRYLETGEVPAGAVLSASA

SEQ ID NO: 59057 - protein, 414 aa, unidentified
MQDILDCCCGLDVHKETIVACILKGPLEEGLKPRSEIREFGTQLNDLVALRTWLEAQDCRYVAMESTGIYWQPVYAILETAFSDTMHLLVVNARHMKNVPGKKTDMRDAEWIATLLRAGLLKGSFVPDRDIRDLRQFTRYRKALIRDITSQKNRIEKLIQASGFSLSSFLSDIFGSSGVAIMGELVKVGFITKASLELCLKGRARQKTNEILSSLNGVLSAPQHKLLKMELAHLKDLQDNLAEVEEEIRTGFNQFEGPRQLLDSIPGIDTTAAYAILAEIGSKLDTFPTAEHLCTWAGLAPGSHQSAGKKKKQRITHGNNYLKTILCEVAWVIASHKKLFLSGWYWRLKQRTDAKRAIVALARKLLVIIYAMLKSKSTYDEQKFLQRKESTEQKRVSRMVHELTRLGYAVTVAA

SEQ ID NO: 59058 - protein, 452 aa, unidentified
MAKKGKRRCDTLPILHPDAAGIDVGASELYVAVSTDRDPHSVRCFPTFTRDLHALADWLVHCGIHSVAMESTSVYWIPVYQILEARGLEVYLVNAQHVKNVPGRKTDVSDCQWLQYLHSVGLLRASFRPPGFICAIRSLWRHRSSLIQMAAEHVLHMQKALDQMNLQIHRVLNDITGVSGLRILDAILAGERDPMTLARLCHGGVKNSEDTIAKSLEGDYRPEHLFALRQSLAAYHYYQKLVLEVDQEIKLQLGELKTAATAEKTTPARTKPSAYQRRRYEPKTFDLRGELYRIFGVDLTNVPGISAITAQTILCEIGTDVSRFRNASAFASWLGLCPEKKVSGGKVLFTKSRRVRSRVATALRMGAQSLHHAKDYLGEFFRRITRKLGRPQAITATAHKLARIVYHLLGTKEAYNESVFHKSEEDILRRAEYRLRRQAAQLGFQVVPTENS

SEQ ID NO: 59059 - protein, 334 aa, unidentified
MNTVLQLGIDTSKDSLVNCLVGKHPKPMEFAVGNTDEGVAQLLSELGEDVSRTRVCIEATSRYHCRGVRALVSAGANVTVVNPTRSHALAVALGLLDKDDKVDARMLAKAAKLLEAKDAEFRTKAHEDLRDLSRLIDTLTKQNAEHKKRAGALEVGTPAHGLLKETIKLLAGQIKAAKAQWKKLLKQDAEILRRFNIAMSVKDVGKETARVSACELPARLEDYRSDQLCAYAAVVPRRNQSGNQKVKASVGNGGNSHLRTGIYMAASHSVYLSKVNESFYLKLRAKGKTHHQAMVAVMHRLLRNIIAVLKRNEQWQEAPPRKNGNPAISAAGSS

SEQ ID NO: 59060 - protein, 410 aa, unidentified
MGYETINRRAHVMTRKNTLKSLPTDTEFRVVGLDLAKSDVSVAAIPVDDNTPSLVDRMTYADLLDWAGKISPTLFAMEPCNGYSLLCLQLENLGHEIKVISGSTVSMWINTHLSGQKTDLNDAIALARLAVSDAELTPIRHKSISEIRIQTVQAVRQQLMSQRSKSIVSFKALAQQWGIPCAAGHRNLKKLRESIEAKVDLITRPVANAMLFLLDAVKSLDRQIGQLNQTLQELVMSDERGRLLQSVLGVGTQISARVITVVGNVERFNSPRSLVAYVGVAPRNFITGHKNLTKKKHGNCPDLSHKGQGKIRRRGDKLLRSLFIQGAACLYMQFCKDQLPECLLKRWILKQLAIQKPYGKLIVSLAAKLIRIVWAVLTYREKFNIQKAGMTRSMWSEMELEKPINKEVPA

SEQ ID NO: 59061 - protein, 438 aa, unidentified
MSNKVIFNLDELFISVGIDVGADFSWMSIALPNQQFVGKPFKILHNSIDSLTTAVSKIKEAEELYSLESRIFLESTGIYHYPLFCYLRDKGFNCSVINPIITKNSTNINIRKVHNDRFDSKKAALVGLKPDLKVSLMPSDLALNCRNLCREYYDLMDNRSAYVNKLQGELRMAFPQYLGIFSKVTINTSLTLLETYTSPSAFLKADKQEIIDIIKSTARFGLTYAQNKYNAIIQAATDANQFGYIIDSNIKRIRLYISFIRKYDEEINSILESLHELVDANEDADFVKQIHLIETFKGAGFLSAVSIMGEIGDFSAFSKPKQLFAYFGLDPSVKQSGKFEGTKVQMSKRGSAIARRVIHTLTLQSISISRNREAKNPVLREYYLKKCDSKPKLVAMGAVSHKVCNMIFAILRDNKPFKIIAPQEHIKQYNSAKCDIAA

SEQ ID NO: 59062 - protein, 438 aa, unidentified
MPDGQSLSACNYKSQEVIFLAFKIFRKNCCGLDVHKTWIYACIGITDTNGRTEYKQARFSSFSKGLKELADWLAKYRCFEVCMESSGKYWIPVFNILEKAGLFVTLAHPKYTKPQKGNKTDRKDAKWICDLFMCDMIKPSFIPPADIRHLRDLVRYRFKLTCMITGEKNRAQNCLTVSNLKLDDVFSDVFGKSSRSITEQILAHPGETFDVAPFVDRRCKTPIGEIQAAIDGAVSPEQAVKLRQCLDHIDELEMHIEKVQQEILRLSDKYQAALDLVRTVPGFDKNPMTAIQILSEIGGDMSVFPTAKHLVSWAGCCPRNDQSAGKIKSTRISRAGSYFKPVLVQVASALTRSKDHPEITNRYRRIKARRGHKKAIIAVCRMLLTAIWHILSDLKPYTPDGFVEPRPAEKSKVLTTAQALSLLKQRGYVISDSAPALG

SEQ ID NO: 59063 - protein, 287 aa, unidentified
MNYSNKHNSLDFSGQSIYVGMDVHNKTWKLCIRTEELELKRMTTEPNPEILVRHLRKNYPGASYRCAYEAGYSGFWIQQKLESMGVDCVVVNPGDVPTTNKEKTYKTDPRDCRKIARGLVNDELNAIYVHSREELENRNLVRMRQLIVKKITRVKNQIKSLLAFYGISVNGPDCKSSWTKKHKAYLKTIRLETEHGNYSLNVLIDELSYQEESLSKLEKEIKKLSCDIRYFADAKLLVTIPGISLNSAMVWLTELGDIKRFKSLDQLCNFVGLAPSSNSSGEKEIIG

SEQ ID NO: 59064 - protein, 351 aa, unidentified
MGRPVLPPQELEQLPGLISPHHSQDRATVEASREKEVSMEAPPTFVGIDVSKARLDMALCPSGVPQSFSNDETGIKTLIERLCEAKPVLIVLEATGDVERAVVRALVAAEMPVTVANPRQVRDFAKATGQLAKTDILDAQILARFAEAVRPVLRPLPDEMTLELRALIGRRRQITEMLTAEKNRLSRAPRGVHKRIEAHIHWLEAELKRYNKDLDQTIHQSPIWCEQEDLLKSVPGIGSVISRTMLAELPELGSLNRKQIAAPVGVAPLNWDSGLLRGRRVIWGGRAHVRTALYMAALTASRRNPVIRDFYRRLRAAGKAPNVALVACMRKLLVILNAILRHRVPWRPVVT

SEQ ID NO: 59065 - protein, 350 aa, unidentified
MEKISIIGLDLAKEVFQVHGADAAGRCVLRKQLKRREVLRFFATLAPCTVAMEACGTAHYWAREIKKLGHKVLLIPPAYVKPYVKRSKNDAIDAEAICEAASRPTMRFVPMKTVENQAVATLHRSRDLLIKTRTMQVNALRAHLAEFGFVAAKGIGKLPDLAKIVSEAPAEALPDMVRATLSGLLDMIAAIGGQLDGIEKRLRAWHKGDEASKRLDSVPGIGLIAATACRALVPDPKLFENGRHFAAWIGLVPKQDGTGGKTRLGRISKAGDRYLRRLFVLGATSLLKSLENKTTPLALWMQGLLARRSRRAVTVALANKLARIAWAVMARNEAYKPQAAAKLEAAAGCA

SEQ ID NO: 59066 - protein, 329 aa, unidentified
MKMAKRTTICAGIDTGKRKLDVALDGSSEQLQIDNTPEGYKALSDWLRRYRVKRIGIEASGGYEQAVVAELRRKRFVVVVFQPAQVRAYAKFHQQRAKNDKIDAALIAACTAAVRKIHAPPDARLLPFAEQLTMIDQIGEDIARLKNRLETCRNSRLRQIWKEDIARLEKRKRIELKALVAAIREHRDLAGRLDLIYSVSGAGLPTAVAILVRMPEIGQLTREQAAALAGLAPYDDDSGERVGGRHIEGGRERLRRALYTAALPASFRWNPQLIALYKRLIAAGKEHKRALIACARKLLIFVNTVVARGIPWDHQRPPIASITAAPLAG

SEQ ID NO: 59067 - protein, 379 aa, unidentified
MMKNTRYVGLDVHGQTIAAAVGEGHGKTRGLGQFPNRPESVRRFIEQLGGPEGLKICYEAGPTGYALYWQLTKMGVECEVVAPSLIPKKPGEKIKTDRRDAEKLAQCYQAGTLTAVWVPDAAHEALRDLVRARAATKRDESRAKHRLVKYLLRNGLRHADDCRAWTHPWWRWVQAIKLDFEPQQVTLADCVAEVLHQRERLGRLDLAIDRAIELAPPEKKTVVEALQAMRGVAKLTAITIVTEVGTFQRFRRPTELMGYTGLVPSEYSSGGREAKGRITRTGNAHLRHVLGEAAWHARHRPWLNVRLRKTLPTLPAGVSEIAWKAQERLHRKFTKLTFHRKPPAKIATAVAREFVGFIWAIGRLAESHATTGAAQLAAL

SEQ ID NO: 59068 - protein, 409 aa, unidentified
MRIIGMDIHRVFAEAVVLEDGEIKRLGRIGMTRDHLEDFARTLLPTDHVVVEATGNATAVTEILAPHVARVAVANPLQVHLIAKAKIKTDAIDARVLAQLYGAGFLPEVWIPDAATLARRRQVTRRRQLVRQRVRLKSIVQSVLHANLIPPCPFADLFGGKGRAWLRAQYLPDDEREAVERHVEEYDRLSEALKGVERDIARAALADTNVTRLMTIPGVDMVVAVGLMAAIGRIDRFDRPDKLVAYIGLNPSVHQSGIGPAHHGRITKRGRSDARHLLVEAAWQTVRGPGPLHAFYERVRGKRGNHIAAVAVARKLVVIIWHLLTKAEDYSWVRPSLHAKKIRDLELRAGYPPRRGQKGASYDYNIPQRRRDERNRAQQAEGAYRRMTTGWRRSGPRSEPTGATNEERQ

SEQ ID NO: 59069 - protein, 404 aa, unidentified
MTSLSRARPGERDLIRSLFAQTRRSAVRPPGRRVPSTTRICRAGGTAITTIAHTQPARLTVGVDTHKEVHVACAKDQLGRRLATTLVATTTAGYAELLGWADALGQVEAFGIEGTGCYGAELARFLRGHGQRVVEVNRPDRAARRRHGKSDPVDAEAAARAVQAGEATGLPKAGDGVVEMLRVLRVARQTAVRARTQTINALKALVVTAPDSLRQQLRDLPTRQLVATAAAFQPDTPATPTMATMVALGALARRYQVLDGEITMLSKQLHRLVRLAAPALLAVFGVGPETASALLVAAGDNPQRLHSDAAFAALCGASPIEVSSGKTVRHRLNRGGDRQANNALWRIVLVRLRAGHPPTVAYLQRRTAQGKSKREAIRCLKRYVAREIFAVLTTMADQAVTTAA

SEQ ID NO: 59070 - protein, 456 aa, unidentified
MPDYFFGIDVSKGHSNFVMLDSSKRCVEDDFQLDDTFDGHQKLYSILSEFCVRHPKANIFAAVESTGGYENNWFDVLAKFQAHLPIRAARLNPCGVYNNSKAGLDRNITDKISAENVAKYIIEHPEKVRYQLQDPLAPLRKQWGFIKMLKKQKTQLLNQLESNLYTANPEILAYCKNSTPTWVFNLLQRYPTASKLAKARNSSVSLIPYVTPQKAKKLVETAKQSVASATDETTSQIIKATVQQIRQLSKVIDAQTKAMTGKCSIPEVELLKTFIGIGDDSAVGLILEISSIKRFKKAKHLASFFGLHPVYKKSGDGSWGFHMSKKGRTVPRQILYMVAMVAIQSNPLIREIYEKHTEKGMEKKAALGVCMHKIIRIIYGMLKHNKAFDPEIDRKNREKRNSQDEKKVGLDKSRRYQAYDPKAPISRRQAKKREERKQSQNDNNAKCGIKTPVPVF

SEQ ID NO: 59071 - protein, 270 aa, unidentified
MTFVAATPDRERTPLFVGIDVSLSKLDVARSDQDAVVAVANDAGGIGELVARLAAAAPQRVVIEATGGYEQPLLAALLEAKLPVARVNPRRVREFARGLGKLAKNDRCDARVLVEYGRLAEPRLAERRRQVQDELEALVTCRRQLIATRTVHVTQLKQTRAKPAISAIRQVVKTLDGQVASLDTQIRKLIEGDDDFGRKDRLLRSAPGVGAVASSTLIAELAELGKVDRRQVGALAGVAPFDHDSGKFKGTRCIGGGRSSVRRALYMCAP

SEQ ID NO: 59072 - protein, 387 aa, unidentified
MAQTDDLSRCLAAFDQDTTLVVVVEMSQSTWLAAALVPGLDRQPLKKMAPDQTTLLRLVERWRDAAVQAGRTITRTVLAFEAGRDGFWLARWLRERGVEAHVIHSASVAVSREHRRAKTDRLDTGMLKRVVLGWLRGERGHCSMVAVPTLEEEDAKRPSRERENLVGECTRIINRMKATLARLGIRGFKPQLKKAPQRLDALRMPEGEPIPPNTLAELRRDMDRLALIREQIAAIEQARLECLERAPEHGPDAMVRLLARVIGVGIETADMLVREVLSRRLRDRRAVARYAGLTGSPDESGSKRRERGLAKAGNARVRRGMVQLAWRFLMFQPDSALARWFKSRTAGPAGARKKTMIVALARKLLIELWRMVTAGSVPEGVVLRPAA

SEQ ID NO: 59073 - protein, 338 aa, unidentified
MNRTNIIGIDLAKHIFHLVGHDHAGRETFRKKLSRQKTLQLLSVHEPVIVAMEACGGCHWFARKCQEFGHQVKLIPAQYVKPYVKTNKNDFIDADAIAEAAMRPKMRFVSPKTEQAQLGIVIRKVRTGYIKDRTACMNRIGSILLEFGISFPRGHHHMKNLFQWLANKKEPVPPLLIIELRQQLDYYNFLNQRIKEQEEKLLELNKDNELNDLLQSIPGIGPMTASCCLSVVGNPHDFSSGRNFAAWIGLVPYQYTTGGKPKMLGISKRGNKELRELFIHAARSVLWRDSSAERYFGTWLIELKKRKPFNVAVVALANKLARIAWSVMTSETSFEVRI

SEQ ID NO: 59074 - protein, 417 aa, unidentified
MSLNVVGAVFFVGIDWASAIHAVCVQDAAGRRVAAFTVEHSAAGLAGLMRRLARLGDPDTMPVGIERPDGRLVDALLEAGHPVVPVKPNAIKTWRDGEVLSGAKSDAGDAEVIAEYLRLRHHRLQLATPYTPETKALRTVTRARGDLVDMRVATTNQLTALLDLHWPGAKAVFADVESPIALEFLTRYPTARHAQHLGAKRLTAFCVKHGYSGRRTGEQLLTRLRAAPAGTLDDTLCEAVRDAVTALVAVLRAVGAALKDLSRSVVAHLGEHPDGEIFTSLPRSGQINAAQILAEWGDCRQAYDGPDSIAALAGVTPVTKESGKHRAVHFRWACNKRFRVAITTFADNSRHDSAWAAKVYTDACARGLDHPHAIRVLARAWIRVIWRCWIDRTPYNPGRHGNAVRLHQSGQTELIAV

SEQ ID NO: 59075 - protein, 366 aa, unidentified
MEGRRFIGIDLGKRHYEACVLHAGEKVIRWSGSTSAAGREELAKKLEAGDVIGLEAGALSLVVARRLLQVEKVRVLVLHAAKLAVIYSSMRKTDKEDALKIARVLQNTAEECLPVVRLPSEKEEEARRLSNHQIFFNRQRTQVINQIHALCVENGLSEITKKDLKNESGRMAVLEQTTGIYRELVENLCCILATLEVRLARIKERVLQALLDRNAEAEILMSIPGVGPMAALAYLGFVGTEARFDNPAQVSYYVGMVPRVEMSGTSVYRMGHITKQGSPALRRALVQAAWAAVRSPLGTNFRTVYNRIAERRGKRIAIVAVARHMLELMYTLSVKHELYRFCTQEERLKKLRFYKLSSLGTEEILT

SEQ ID NO: 59076 - protein, 398 aa, unidentified
MTESSDYESVQVFIGVDVGKDTHHAVAINRSGKRLFDKALPNDENKLRSLISDLKQHGQILLVVDQPATIGALPVAVARSEGVLVGYLPGLAMRRIADLHAGEAKTDARDAAIIAEAARTLPHALRTLKLADEQIAELSMLCGFDDDLAAQTTQASNRIRGLLTQIHPALERVLGPRLDHPAVLDLLQRYPSPEKLASLGEKKLAAQLCKLAPRLGKRLAADIAQALAEQTVVVPGTNAAAVVLPRLALQLITLRKQRDEVALEVEQRVLAPPLYPVLTSMPGVGVRTAARLLTEVACRAFASAAHLAAYAGLAPVTRRSGSSIRGEHPSRRGNKALKRALFLSAFAALRDPLSRAYYTRKMSQGKRHNQALIALARRRCDVLFAMMRDGTFYTPQAS

SEQ ID NO: 59077 - protein, 347 aa, unidentified
MAIIGGLDVHRSQITYDWVDRDSGQHQRGRLAPAHREHLRAWLGQFAGQQAAFALEGCTGWRYVVEELQRAGIAVQLAEPADTSALRGPKRRAKTDQLDARHLRQLLETGRLPRSWIPPTHVLEARTQVRLYKALREEHTAWLQRIHATLFHHGVPAERNLLAPARRAQLERGSGLSPAAHQLVRVALGTADHLDAELERLRAELVGLARRQVGCRALAGLYGIGPVTAVAIWAELGDVGRFSSSRFAVRHAGLDITVYASDTKRTPGKLARQGPPVLRWALFEAATCAARASSPDHAYYRQVKQRLGGNRATLAVARKLARRCYHTLAALGDAALAPVGTDLGQVA

SEQ ID NO: 59078 - protein, 346 aa, unidentified
MVEYVGLDVSKEETAYCVKDERGKVLARGKVASDPDALFAVLREHCLCPERIVLETGTLSNWLARELRKRGLPVTVIDARQAHAVLRLQHNKTDENDASVLADLARTGFYRSVAMKSESGQRHRALLKAREHLVGQLRSRGNAIRGLLGAFGIRLAKGTAKFDLRVRAALAERPDLAAIFEPLVGERAALLGAIEQLDRAVDAEAEADPACRLLMTAPAVGPVTALAYVATIDEAGRFGKSRAVGAYVGLTSRRNQSGEMDYSGRISKQGDRMLRALLYGAANSLLTRVRRAHPLKAWARKVKRKVGHKKACVALARKLAVILHRMLITGEAFAWPQDDAKETATA

SEQ ID NO: 59079 - protein, 356 aa, unidentified
MSTLETVHSGHVVIGVDTHKHIHVAAVLDTIGGILATLTVPTDTGGFKQLLTWADSFGKVLAFGIEGTGSYGATLTSFLRRHGHKVVEAGRPDRRQRRLNGKSDTLDAENAARSVLAGFATVIPKTADSSIEMIRQLKIAHDSAVTDRSAAMISMKAMLVHADDTLRRETNRMTPIKLARHLAALRPRNLETPADSLRHALRSLARRWQHLDSEAKELRASIEALVIRTAPQLLEQFGIGVDTAAEILIVAGDNPERIHSEAAFAKLAGISPVPTGSGMTSGRHRINHGGHRQLNAAIYRTVIVRMRFHEPTIAYVARRTAEGKSKRDIIRCLKRYVIREVYQLIKVNPRTGEIAG

SEQ ID NO: 59080 - protein, 409 aa, unidentified
MDRTQYLYVGMDIHKETHTAVLLNYLEEKQGEITITNTLQGFHKLENYVLKQKGKLIPIFGLEDVTHYGRNLSIFLLDKGYPVKEVNPSLSFMERMSYASTKKNDSWDAQCISAVLMRRSHLLPDANPQDYYWTMRHIVNRRNALVKSLGGLTRQFHEQLQVAYPSYKQFFHELTCATSLAFYERFPSPKHLEYVSEEELGTFLRVPSHNTCSTNRARKILDLVAQEQQTTLDYQQERDCLVRSIAQQIRFILREISSIEKLEKQMYRQLGYQLETIPGVNIVTACSLVAHIGDIHRFSSPHKLANYAGVAPLHFGSAGKGKDVQNKSQGNRNLYSTLYFLAIQQIYLTNKGEPRNPVYRAYFEKKISEGKTKIQALICIMRKLIRIIYVMMKKKVAYELPELKQKAVS

SEQ ID NO: 59081 - protein, 400 aa, unidentified
MTAVGIDVSKGKSTVALLSDTGEVLKKPYDAPHTRCALSELAKLIKECKDDVCVVMEATGNYHKPIANFLCEQGLSVSVVNPKLIRDFGDNTLRKPKTDKKDAIKICRYALTYRVQLPNYSPENDERSALKILNRQYSLAEKTLTMHKNLLISYLELVFPEINKMFTSHIRNSDGHEKWIDFLVRFPHADMVAKVSLNEFRLKYKNWCKTAKYRFCESKAEELHQFARECVCAVQNDEKMRFLVKEQAKMVNQLLEHMQNIRTKMTAIAQTLPEYDTVIEMYGLGSTLAVQMMAEVGDVRRFQNRRAVTAYFGYDSESDQSGTHESKSNPMTKKGSAYLRRTLFLEMVAHMQNQPDNAVYQFLDKKRSEGKNYYSYMAAGSAKFLRIYYAKVKKVMEQIT

SEQ ID NO: 59082 - protein, 480 aa, unidentified
MSFRLTLQDENALSWQRRGPGNVGYPWYRESAISLTWELPAPRSVALSTQNRVVEKEAPPAHGASTGRRETMEQLIERCAGLDVHKETVAVCVRVPGPESERVQRVQTFGTMTADLLVLRDWLLAHQVTHVAMESTGVYWKPVYYVLEEAFTCLLVNAAHMRNVPGRKTDVQDCVWIAQLLEHGLLRGSFVPPAPIRELRDLTRYRKTLIQERAREAQRLHKVLEDAGVKLASVATDILGVSGRAMLEALVAGTTAPDVLAELAKGRLRAKLPALRAALAGRVRRHHGFLLGELLAHLDYLEEAIARLSQQIEEQLRPFAEALTPLDAIPGVNQRTIEGIVAEIGVDMAPFPSDRHLASWAGLCPGHHESAGKRQSGRTRKGNRWLRTTLIEAALAAIRVKDSRLAARYRRIMRHRGHKKAVVAVAHTILVIVYHMLKHRVPYCELGAAYLDQRDREQATRRYVKQLERLGHRVILEPAA

SEQ ID NO: 59083 - protein, 389 aa, unidentified
MPSVADRTEASTTIRTDLAAIFISLELSRSIWLVTSVSPGSGEKMSKHSVRAGDVAALLARFSELKHKALARTGKSFAIVAIQEAGLDGFWLHRALEQEGIESHVVDPASIATSRRRRRAKTDRIDGEALLRALLAYKRGEPRVCTMVRAPTPEDEDRRRLCRERKTLIAERVEHVNRIKGLLFSQGISSYEPLRRDRRQRLEDLRTGDGRSLPTHLKTQISRELDRLELLLDQIKLAEAERDALLAEDQAAAPEPPGRMLLEFKGIGAEFAATLWLEGLFRRFDNRRQLASYAGLAPTPWQSGSVDREQGVSKAGNPRLRAILIELAWLWLRHQPQSALALWFKERVKRNGGRMKKTTIVALARKLLVALWKYVTAGVLIEGAVMKVA

SEQ ID NO: 59084 - protein, 376 aa, unidentified
MEEITEEAAELVARVAALDIGKASLVACVRVPHETKPGARRQEVRTFTTTTRSLLQLQDWLVCQGVTLCVMEATSSYWKPPFYLLEDAIECWVVNARDVKNVPGRPKTDRLDAVWLGKLAERGMLRPSFVPPPWQRELRDLCRYRRTLIQERTREKQRAEKLLEDAQIKLSAVISDIFGKSGRDMLEALIAGQRDPYVLAQMARGSMRGKIGVLQEALTGHFRDHHGYLLTMMLARIDALTAQIEALTGRIDEVIAPFARQVAQLDEIPGVGATGAQEMIAEFGADMTRFPTAGHLVSWAKYAPKARQSAGKHKPGSTGKGNPWIAGTLGEAAMGAARTKTFLGSRYHRLARKRGKRRALVAARQLPARHRSPPAV

SEQ ID NO: 59085 - protein, 345 aa, unidentified
MRILALDLGKTASVACGLDVETGEVEYETVATRPAAMEELLTRRRPDRLVMEVGPIAGWVHDLGRAMGIEVQVANPNHDAWRWRNVKRKSDRIDALKLVRLSVMGDLPTVYMPGPRVRQWRSLIAYRHQLVKRRTQAKNHIRAVLLRQGLQMPPGTCGWTRECRAALRGLCLPIGEGEEAWRFELAVELDQLDAIEDAIARVHAELDGIAARDDRVALLRTIPGVGPRLAELVVAIIDDPRRFRSGREVGSYAGLAPGRFQSGDSDLSGGINKRGNTLLRSLLVEVSWLALRYNGWAQALHARLVRGSKTRRKVAIVGVARRLLVICWAMLRDGTPWNPGRPAAT

SEQ ID NO: 59086 - protein, 391 aa, unidentified
MLPSIHHASTEQTASDSPDLTLYASLELSRATWLVTCLLPERDRMSKYSTPGGDGGALLGLLERMRARAQQLTGRPVKIVVIQEAGLDGFWVHRLLEANGIESHVVDPASIAVPRRRRRAKTDAIDGETLLRTLLAWTRGEPRVCAMVVPPTPEEEDRRRVCRERAILLQERIRHTNRIKGLLAGQGITDFNPLHKDRRQLLDAARTGDGRPLPHQLKAEILREIELIELLLRQIADVEAAREVLAGPKAAKAPSPVVLLEQLKGIGPEIASVLYLEGLFRSFGNRRQLAAYAGLAPTPWRSGTVDQEQGISKAGNPRLRSTMIELAWLWQRHQPASTLSRWFHTRVGNERGRIRRISIVALARKLLIAVWRYVTQGEVPEGAVLKAAVRA

SEQ ID NO: 59087 - protein, 386 aa, unidentified
MRFAGIDIGGERHAVAVVNEGGAVVVKSTFFGEDAAGYQRVRDLVGDPHDCVVAMEATGHYWRNLFAFLVGQGFKVALLNPLRTRRFAEEELERTKTDSVDALGIARFAAQKRPVPTPVADEVTAELRELVRLRTRYVDEHSDRMRQLHRAVDLGFPEFTCHVRMNTVLATAILARYPTARSYSGVSVRKLARLAYDGRHQVGEILARALIETAKISVGSHHSEAYGLQVKYTCSDMELLRNRVKQLDQEIEGKLQTHEVGKLLTTIDGIGSRTAACLIAELGDPSRFRDAAALASYVGVVPRLRQSGKRAFSGARGLPLGNARLRHRIGRCPEKPVVARALRPPVGCGQATEGRDRGLYAKVARRDLQRRAQPAPFCASLGHGWT

SEQ ID NO: 59088 - protein, 350 aa, unidentified
MNIIGCDLHTRYQVVAWIDEETGEIRTRRLAHDQEEPGAFYAGLPRGARIGIEATLPALWFERLLAECGHELWVGDAARIRAMEVREQKTDGRDAKHILELLRTHRFPRIWVPSVAERDVRQLLVHRMKLVRVRTLVKNQLHALAMSQGVCRKRKLWSVKGRAELESLVLLPWANRRRKELLAWLDQLDAAIAPLDHAVAEEAEARAEARLLMTHPGVGPVVSLAFVLTVGRVERIAHSGQLVSYLGLNPREHSSGGRQRLGAISKQGNPMLRWLLVQAAQTAAWGDVELRRVYQRLKFRRVSGVAKVAIARRLAVRLYWMLRERKDYAQLVRMSGSPSSAVVPEKGSKV

SEQ ID NO: 59089 - protein, 398 aa, unidentified
MRVMALDVSKGKSYVVIYEEELCVAEWEIKHNQEGFNQLKSQLCKETTEVVFEATGVYSKQIESFFKTERISYCILNPLLAKKQTDGLRGNKTDKVDAHKLAQSHYRFDREKKNHQTSIYSEIHEVSILYDEVHANLIKQRVQLHAVLQQCFPEIETLYSSNLSKYALNIIERFPHPAYIKELSKTRIKNIILASTKKNISKEEALLKADQLIHLADVSYPAVDKDHFLVTKVQYRIKQIQQLFDTKERLSKKMIEQSKKLNEFSVLVSIPGIGPLTAALIISELGDIRRFSTSNQLNAYVGIDIRTHQSGTMRKKDRINKRGNARARKILFFTIRNMLKTQKTAPNHIVDYYYKLKKQPYSKRDKVAVIACMNKLLKVTHYLVNKNELYDYAKSPHS

SEQ ID NO: 59090 - protein, 417 aa, unidentified
MLVIGVDPHKDSHTLVAVDAAGCKRGQLTVPARQDGHLRAVTWAHRFGEPVRWAVEDCRHVAGGLLRDLLAGGQSVVAVPPMLMARTRASVRQRGKSDPIDALAVARAAQREPGLPAARLDEVALEMRLLVDHRRTLIGERTRMINRLRWHCHALDPDLAPGLRELSRKCAQTELLRRLDALPVSVRREIAVELVEDIRALTEKITALGRRLTFRVTPLAPNLLAMPGVGALTAAVLVGETAGVDRFTSKAAFALHAGAAPIPVWSGNNVRVRLNRGGNRQLNAALHVIALTQLRPGIHPPARALYDRLRANGKTRPEALPVLKRRLADVVYRNLLHDQQHKAHTAGTSSLHWKSGPPDSPDSQPAPGAGRAVKGGRSPSRSDAACALDREERSELSTGGRIRHPEARNPQRPAPAA

SEQ ID NO: 59091 - protein, 342 aa, unidentified
MGSVKGGGRSGHVMSALVCGLDVHKDSTYATILDPSGKIVNQMRMNNERVLSYLSNFNVGKVAMESSNQVASLYRKLESKGYSVVVSHPKKTRYIAEAKIKSDRVDSRAIAELARLDALPLAYMPDKEISMLREQVRRRAFLVRERVKLRVKIKSILTYEGIRWPSDTGLFTVKGVEWLHGLCFEPVESYLRVLKPLDDEIRLVSKQLRGLAGKDEEVKLLMTVPGIGYYSALLVKSEIGDVNRFPFGDRLCSYAGLVPSTHASGNTVRHGGITKEGSRWLRWVMVEAAQTHVHKYDTSITRVYNRIAERRGRRSAVVAAAHKLLLVCYSVLKNKRAYYDQA

SEQ ID NO: 59092 - protein, 355 aa, unidentified
MNSIKYVGLDVHQSTISVAVLDAEGKLVMQSVLATEASAIVDFFAGLRGTVHVTLEEGNYAAWLYDLLVRRVAKLVVCNPRKNALLKAGNKSDQIDARKLAELLRAGLVSAVYQGQKSTAAVKQLGRSYAALTEDTTRTMGRIKALYRSQAIACAGEKAYSVRHRGDYLAQFTEPGLQRRAQRLYQELDLLEQLRREARHDLLRECRKHKESQLLRSIPWLGPIRSALLIARVQTPHRFRSKRQFWAYCGLALETRSSADYQMVNGQLERHAKPVFIRGLNLNHNPDLKNLFKGAATSASGSRGVFGSFYENLLRKGMKPELARLTLARKIAAITLHIWKKGEPFDADYLKLHAA

SEQ ID NO: 59093 - protein, 465 aa, unidentified
MKSKIRKSQKQKKKIVIDPAWELINPDAAGLDIGFREHWACVPAGRAEKNVRSFGTFTADLEALADWFQQCGVKTVAMEATGVYWIPVFQILERRGFQVILVNARQTKNVAGRKSDVQDCQWIQRLHTYGLLQGSFRPQDPYCVLRAYLRYRDEMVSARATQCQHLQKALQQMNVQLHQVLSDVTGVSGLTIIGAILEGQRDPVKLAAMVDRRVRASQPTIQKALTGDYRPEHLFVLKTAFELYHTYEAKIEACDEQMVAEAAQLPDVVDVKVKPLPARKEGRPACADKMLDQDMRAALYPKLGVDLTAIEGIGVLTELVFLTEVGPDLSRFPSEKHFASWLGLCPDQRISGGKVLSSRTRRVINRVSDALRMAAVSLERSQSALGSFYRRMKAKLGAAEAVTATAHKLARLIYRLLKHGEAYVRQGMEDYEKRYQNRKLSALQRTANAMGFQLIAKQPIAQGVS

SEQ ID NO: 59094 - protein, 355 aa, unidentified
MATKERATKTKSTQLKLTSIGVDIGKDVFHIVGFDRDGKIALRRKFKRLALIKEFEKLQRCIVGMEACLSAHFVSRQLRALGFKPRIIPAIHVKPFLKGQKNDYNDAEAIAEAAQRPNLKLVKEKTQDQLDLQALHRVRSRLVSRRTATINQIRAFLIEQGIAVRTGANSLRNSLLAILQNREDEISPRMHDLIIGLYEDWLGLDKRIETVTHDIEEISRREKNCQRLMSVPGIGPIISTAMVAAIGTGEAFERGRDFGAWIGLVPRQYSTGGRSILGRISKRGSKYLRTLFIQAANVIMMRPQNWEKFSFGPWLAEAAKRMHRNKLATALANKLARIAWSILKHSKKFDEALAV

SEQ ID NO: 59095 - protein, 338 aa, unidentified
MQVTTIGFDIAKCAFQVHGADRQGRAVLKRKLARSKVLVFFANLPPCLVGLEACGGAHFWARQLTRLGHEVRLIAPQYVKPYVKTNKHDAADAEAICEAVQRPGMRFVAIKDEHQQSMLLLHRIRDRLVAERTAGINAIRGHMTEFGMVTAKGQAGLVELRSIIADPDDARLTPLARELLTLAVAHLRSIEEKIVDLDRQVGRLAREDANCRRLSAIPGVGPIVATGVLATAGDLRLFDSGRSFAAWLGLTPRQHSTGGKQRLLGISKRGDGYLRRQIIHGARSIVSLARGREGKLWSWLNALLARRPFNTVVAALANKLARVMWALLVRDEPYRAAA

SEQ ID NO: 59096 - protein, 467 aa, unidentified
MPRVRAHPQRRGPAVTLPRELQQVNLNAAGVDIGAESHYVAVPEGRDADGQDVRAFGAFTADLAAVADWLTRGGVETVAMESTGVYWTPLFELLTERGFEVMLVDPRRLKYVPGRKTDVLDCQWIQPLHPFGLLAGAVRPTDQICVRRSYLRQRAMLVTYAAHHIQHVQKALEQMHLKLAHVVSDIAGLTGLAIIRAILAGERDPRGLAQLRDRRGKADEATLARALEGTWRPEPRFALRQAVELLDCYRGQIATCDAEIEAQLGRFEDKSGGQPLNAAARGRKAGRTALSFDARPPLQRLTGVDLTRIEGIDAATALKVVAEIGLDMTRCPTDKHFASWLGLAPGNKVSGGKRLSGRTKPSASRAAAARRLAASPLHHSRSALGAFYRRLKGRLGAPKAITATAHKLARLIYSMLRFGTEYVDRGQDYYERRYQSRVVSQLMRRAQELGYTLTKTADFSSPAGSPA

SEQ ID NO: 59097 - protein, 339 aa, unidentified
MNYIPVGLDIAKHVIQLHMVDFHTGEMVDKQIKRDALLTFFANREACLIGMESSGGSHYWARELEKLGHKVRLMPGRFVKAFVMGNKNDVMDARAIWLAVQQPGKSVAVKTEEQQAVLAMHKIRQQMVKYRTAQINGLHGLLLEFGETVRKGRTALDKAMPFVLLRLEKRLPAALVEMLREQWERLSRFDEQIEDIEKRLKAWAQQDKSCQKLLKIPGVGVLIATAAVATMGDSKAFRNGRELAAYIGLVPKQTGTGGRVKLLGISKRGDKYLRALLIHGARSALLLAREPGLWAEEIKARRPTNVAVVAMANRLARTIWAVIAHNREWQQDYVSIRPF

SEQ ID NO: 59098 - protein, 394 aa, unidentified
MILVGIDIGKKQHIFSIIDKQTGEILSNPSVFHNNQEGFLLLIGKLSYYAKSELLIGMEDTGHYHFALLKYLLDRHYTVALINPTTTDLTRKLQGGITKNDPLDSLTICDVIGSNQRKKPYRITKVNRFDLYEQKQLTRHHHNLKEELNTYKNRLQKCIDIVFPELNSLFRSKYGIVYMNVLRTFASAEKIANSDIRILRKCFEYEGRGKRIHLSAEQLKTTAKASVGISSVAEEIQIRHLVCQIEMIEEQLSEIDKKIEEFSLQNNSPILSIPGISHFSGTSILAELGDICNYTKASQIIKFAGVAPYHYESSQFIAQHTAITKKGSRYLRKTLYQIILPVINHNRVFTVYYDKKLAEGKSHRCAQGHCIRKLLRVIYHLLSTGQSFDPALLI

SEQ ID NO: 59099 - protein, 355 aa, unidentified
MNDTKYIGLDVHQATISAAVLDSSGKLLMEAILETKAETILQFIHGLRGSLRVTLEEGTCAAWLHDVLKPHVAHVLVCDPRKNTSMKEGNKSDRIDARKLADLLYLDKLHPVFHGETGNRALKELARSYLALTRDTTRVMNRLKALYRSWASPCAGQRVYAPRYRSEWLTKISEAGVHRRAEIYYEQFDALRSLREQVRRDLLAEARKHKAMKLLRQIPSIGPIRAALLIALMQTPHRFRTKRQLWAYCGLALKTSSSGEYRIVEGRLKRARKFLTIRGLNTNHNHDLKNIFKGAATRAAAVPGPFQEFHAGLVARGMKPTMARLTLARKIAAITLIVWKKGVDFDAEHLKQQAA

SEQ ID NO: 59100 - protein, 342 aa, unidentified
MEQTEGVRSFVGIDAHSGHCSIKVISAAGENLSELSVPTEPQRLRSALRGLPSPAWVMLESSFLAGFVKDSVEPEVARVIVCETRENRWIAKSEDKSDPKDADRLARLLRMGEFKEVYVPKGIGRDRRELLRMYGKAQGDVARTRNRIKGKYREHGIFPKGTKVYSSKHREEWLAKLDRPAIRQLVETLYEKLDRDVEFRDRVLAQLVAAMKGTAEYELLPTIPGVGKILAGVLAALIGDAGRFAGKRQLWSYAGLGLCSPWSADPAKSRVRGSSGGNRSLKYAALSAATSAIRGANRFSRHYAKMVDEGIDPAMAKRTVARQILATALAMLKSGQAYREAP

SEQ ID NO: 59101 - protein, 403 aa, unidentified
MFDTEDVGVFLGLDVGKTTHHGHGLTPAGKKVFDKQLPNSEPKLRAVFDKLTAKFGTVLVIVDQPASIGALPLTVARDAGCRVAYLPGLAMRRIADLYPGEAKTDAKDAAVIADAARTIPHTLHSLELTDEITAELTVLVGFDQDLAAEATRTSNRIRGLLTQFHPSLERVLGPRLDHPAVTWLLERHGSPAALRKAGRRRLVELIRPKAPRMATQLIDDAFDALDEQTVVVPGTGTLDVVIPSLARSLAAVHDQRRALENQINALLEAHPLSPVLTSMPGVGVRTAAVLLVTVGDGTSFPTAAHLASYAGLAPTTKSSGTSIHGEHVPRGGNRQLKRAMFLSAFACMNADPSSRTYYDKQRDRGKTHTQALLRLARQRISVLFAMLRDGTFYESRVPEAAIA

SEQ ID NO: 59102 - protein, 413 aa, unidentified
MEVLYPRCAGLDVHKATVVAAVRLVAGGKVAREVRTFATTTAGLLALAAWLGENGCTHVAMEATGVYWKPVWHVLAEGGFDLVLANAAQVKNVPGRKTDVNDATWLAELLAHGLVRASFVPDAPTQELRSLLRTRKQLVRERASHVLRLQKTLEDANVKLDAVLSDLLGRSGRAMLEALVAGETDPEKLAAFAHPRLAATPERLREALRGRVTAHHRFLLRLHLDQVDALEAAIGRIDREVEERLAPFSTAVDLLASIPGVGALAARVIVAEIGLDMGRFPTAGHLVSWAGLCPRNDESAGKRLSARLRKGAPWLKTILVQCAWAASRKKASYLQAQYHRLRARRGARKAVCAVAASILTAAYHMLKDGTVYRDLGPGHLDRRSRETQARRLVRRLADLGYAVELAPLEPAPA

SEQ ID NO: 59103 - protein, 373 aa, unidentified
MPKYSTAFGMDVHLRSTTVCALDADTGEAVTRRFPGNPWGEIAGWMGGFPGPSLAAYESGYPGFAPQRELAGLGVECVVAAVSKIPRSAADSASKNDRNDAARMAKAILAHDISPVWVPSPEVEGIRDLAGAYDGATARLATAKQRLLAFLAKRGFAYGGTTPAGNPRKYWTYDFLRWLDKVRPEDDGGVRTLAALRSEVEAAAEARADLLSEYRAAVDASPIAAEVAALQSIKGCAFALAAAFSAEVGDFSRFRSGRQVTAYFGLAPKQRSSADSVRLGGISGAGNALVRKLAVEGSWCYAQAGHQPKLMPKGSGVPLEIRMHGRKGSERLLRRREEMLARGMPAAKANAATAAELVRWLWAFGTMCREGAE

SEQ ID NO: 59104 - protein, 427 aa, unidentified
MEEVTDEPLYRDRVCGIDIGKAELYATIRVPSDKNPARRASETRSFAATKRGVLALADWLRAWQVPAVVMEATSDYWKGPFYRLEAEGLECVLADAKQVKNLPGRPKRDPSDSSWLAACFERGSVRSCFVATPEFRVIRLHTRYRRDLIEDRTREKNRAEKLLESAAIKLSSVVSDLHGVTGRDIMGHLIAGHRDPRMLAQLARGRARRKISELEQALEGAEFFTDHHAGLLKTMLARIDQIDAEITRLTEVIEQLLAPWEEQLQQAESQPGWGRRSAEDVLAETGPDMSKFPTGGHLVSWAGRAPLDKQSGKRQGRSRHKKGNKYVAAATGETAISAGKTSTREGARYRKLARSRGKGIACVAVGNTQLKVYHKLLSNPGMRYEDLGPDYYDNRASVRRQVNALEKRARELGYTLIPDLTGCPEVA

SEQ ID NO: 59105 - protein, 340 aa, unidentified
MNYYAGIDVSLEASSVCVIDASGKIVREAKVASEPAALIAWFGSLGLELTRIGLEAGPLSQWLYAGMREAGLVVELLETRHVRNAFKIMPVKTDRKDAHGIAELMRLGWFRPVHCKSMEAQETRAMLTARKLVQKALHEVEMSLRGVLRGFGLKVGKVAPARFEARIEELVEGHPNLAVIAASLLAVRATLRREFNGFERRLRAIARSDTRARLLMSVPGVGTIVALTYAAAIDDPARFTSSKTVGAHFGLTPTKYQSGETDRSGCISKIGDGSVRAALYESAHIIITKPIKGCTNLKSWAMRVAKRAGMKKAKVALARKLAVIMHRMLADGTTFTTQPA

SEQ ID NO: 59106 - protein, 309 aa, unidentified
MSSSVGIDVSSTTLAVHIRPEGVNFNVSNDLSGFKQLVEKISDYPLSQVLLEATGGYECAALRALQQAGIPVFRINPSRARSFAVSMGRLAKTDPIDAAVLAHFAEVLPLQRCIEMTAERALLRELLLQRDRFVQQRDDDKRRLKQAQSPSVCASLERHIAYLKLEIKALDQAIEQQGAELDDDRLLRLMQVKGIGMITAAKLVALLPELGEVDSKEIAALVGVAPFNQDSGKHSGKRSIWGGRSRVRQALYMACWSVIRHNKDFNARYSALRAQGKCAKVAVVACMRVLIVRLNAMLKSGAAWREQLA

SEQ ID NO: 59107 - protein, 449 aa, unidentified
MKKSATKQPGLPVVHERAAGIDIGSRFHVVAVPPDCAEEPVQTYQAFTGDLQRMADWLVRTGVKTVAMESTGVYWVPVFEILEERGIEVILANAREARAVPGRKSDVNDAQWLQRLHACGLLRASFRPARDIAALRVYLRQRESLLDFTAAHIQHMQKALTLMNLQLHHVVSDVTGVTGMKIVRAIVGGQRDPHVLANMRDVRCKASLETICAALVGNYRPEHVFTLTQALALYDFYQERIEACDRQIEHALAILNVDKVCPEAPMPKAKHRTKQPNDVSFDVRSVLYQLTGRDLTQIHGLGPYLALRLIAECGTDLSKWRSAKHFTSWLTLSPGCKISGGKVLTAHTKKTTNRVTAHLRLAAVTVGRTHTALGAFYRRLAARIGKAKAVTATARKIAVLFYNAMRFGMAYQDPGAEHYEKQYRDRVVKNLHRRAAEFGYKLERAEGVS

SEQ ID NO: 59108 - protein, 336 aa, unidentified
MSRITVFVGLDYHQDSVQVCVMNRAGSVLANRRCANRWTAIRTVVRRRSCRVRAAIEACSGAAELADELVSRAGWSVDLAHPGYVARMKQSPDKTDFSDARMLADLERVGYLPRVWLAPHPIRELRRLVRFRQQMADQRRSCKLRIRALLRDGRVKLAGVKAWTVAWMQWLRTTREVSEQTRWILDRQLAHLQYCSSEIRSVEKRLGELTADDPVVEKLLGLAGVGLVTAVTLRAEIGRFDRFRNGKQLARFCGLSPRNASSGQRQADAGLIKAGNRQLRAVLIELAHRLPRCDVRWARLNIQLRAAGKPGSVAAAAVANRWVRWLYHQMQTVQAA

SEQ ID NO: 59109 - protein, 362 aa, unidentified
MQVRHIFVGIDLGDKNSVARIAVDRQKSERIGFVNSQRGRARLLEELQRRAKQVGATQIYMAYEASAAGFLLCDEAESAGLQCWVLAPTRMEKSVEQRKHKNDDRDGEDVLEKVRAHVLAGSRLPSVWVPDRQTRDDRELVRTRLELAEKQSRMKTQIQMLLKRHGLEKPSGLGAGWTIRYRQWLEALTAVESVGWGARQALGSLLRQLGWIEQEIEWIQKSVQQLAAAPRHEAVIEELRKENGVGLLTAMVYRTEIGQASRFRRGRQVGKFAGLTPTSHESGQQNDRKGHISRQGPPRLRKMLCQASWVHIAHDAQAAQLYHKLVSRNPKKKKIAIVAIMRRLAVRLWHRMRRVEMESAVA

SEQ ID NO: 59110 - protein, 425 aa, unidentified
MTHSQYSTEEVVLVAIDIAKARNDVLVSFPDDKRKKFKVANKMQDYRDFSAYLKSLNHPCLIGFEATGNYHRPLAYYLQTQGFELRLISSLAVSRTREALYNSWDKNDPKDAQVILHMLRTGMTQTYYDPLIHQFNDIQEISKTHYQVSLRKVRVQHSIMTHFLPLYFPEAQKYFNCSSAEWFSTLMVRFPNPAAVLKYSKEEFIKIAWDAAGRKVNKTAWLTNFYETASESIGLDVPEDSKAIRMFRMVLEEHQHLCRMRKTIEEYAHNHLKHNEDYNRLRTIPGIGPVIALTVLAEAGDIQRFSHYKKFLKYCGFNLSTQRSGCFRGITKLSKHGNARLRYVFWLAGTSAIRMRENTFRKKYDNYIKTDPSNADLKRKAYTAVAAKIARVAYGLIKSGKDYRCYYDESIPSGKIPSHGPSRQA

SEQ ID NO: 59111 - protein, 332 aa, unidentified
MLYENYVGIDVSKLSIDAFIRESRIHRRFKNEESGFKQLIRWIKEHIGEGLESLLICFEHTGLYSLSLALFLEREHITYAMVPALDIKRSLGITRGKNDQIDAKRIAEFAYRFNDRVMPTSLPAEDIRKLHSLLAMRDKMMRNMGGYITSRNELFRVIPDRELPVLTSVYENIISTLKNEVHELEREIRSIIMANKELKTTFELITTVKGIGFIVASFLIVYTCNFTRFENWRKFACYSGIAPFEYQSGTSVHARTQVSSIANQQMKRLLHLAAMTAIHFDAELHNYYVRRQAEGKSKMATINIVRNKLIARVFAIVKRGTPFVDIQKYVYL

SEQ ID NO: 59112 - protein, 352 aa, unidentified
MNLLKYIGMDVHKATTVIVVLNSAGKAVAEAIIETKASAILDFIMSQRGSLNVAFEEGTQAAWLYDLIRPHVANVVVCDPRKIAIEGNKGDKPDAKRLADRLRTNSLSSVYHGEQTNRAVKELAYSYTAMVEDSTRVKNRLKALFRGRGIDCSGGAVYSPEERKEWLAKLDSATLGARADRLWQELDCLRDLSEQAEQELVAEAQKHAATKILRSIPGIGPVRAAVILGVADTPHRFRTKRQFWTYCGLGIVTKTTGEYILVDGQLRKSKNQPLVRGLNRNYNRALKQVFKSAAKTVSSAQWKSHFDAMVANGKREPLALLTLARKIASITLTLWKKGERYDYRKLKIKHAA

SEQ ID NO: 59113 - protein, 375 aa, unidentified
MIYIGMDVHKDSCYITAIDAEGKTIDEKEIKTEDIDNLIKILDKESKIAMESSTASKPLYHLMKEQGFDVLMAHPSGLRVIAESSQKTDRTDSFHLANLLRMNYLPCSYVPDEKYELMRNICRYRVSLGQKTTRIKNEVHALLTRNNIRLKQSDIFGTGGLEELKSLQLNKIDTLLLKSYLDELIYLMDKAKYVQDVMAEQAKDMPEVKLLMTIPGIDFYSAMTIIGEIGDITRFPNPKKLVSYAGLAPRLKESGNLSLQGRISKKGSRTLRWILISAAHSVIRCKKGNNKLRKFYNHLKKRGKSKQVAAVAVAKKLLTIIYTMLTNGTEYECEDKLLTIRKLGRMKARATPVQIISCVNEIDELKEKINLIGGT

SEQ ID NO: 59114 - protein, 369 aa, unidentified
MNECITYIGLDVHKETIAVALAEGSRRGEVREYGQISNTPAALTRLSIKLSRPGSVLRFCYEAGPCGYVIQRQLAAAGHDCVVVAPSLIPRKPGDRIKTDRRDAINLAGLHRAGALTAVWVPDPAHEAVRDLVRARLAAVRSLRQARQQLSGFLLRHGRHYSRPAWTLMHRRWLAGLRFEQPAHHIVLEDCIATIEAATARRDRLTAQIEAMLADWALAPVVHALQSLRGIALVSAATVIAELGDITRFANPRQLMAYLGLVPSEHSSGGTRRQGGVTKAGNSTARRMLIEAAWSYRFPARISREQLLRQEALPKPIRDTAWKAQVRLCGRYRKLSRAGKPATTVTTAIARELAGFVWAIACQLPRPTN

SEQ ID NO: 59115 - protein, 370 aa, unidentified
MLDTTTFVGLDVHARSIKAVSLDVMTGEVRCATFGYDAGAVAEWVRSVDPGARCVYESGVTGFDLQKRLSGLGVDCVVGAVSKMIKPSADRRRKNDRNDAELLARMLSVGNVVEVWVPDDECEAARDLTRALEDARDDLSRSKQRLSKFLLRHGLVFDERTPTGRRKGNWTRAHWSWIESIRFAEGADNDALAYYVDAVRRAAEEKARLEGLVEAEARKPRWRKRVDSLRCLKGVDTASAADLVFEAGEFSRFRNARSFAAWVGLTPSEHSSGESDRRGAITKAGNKHLRKTLVEAAWHYLTCSGRPKDLAKGQAPDRGARRHAAKGVRRLVERREALLARGVHGNKANVATARELACWVWAVGLMAEEA

SEQ ID NO: 59116 - protein, 345 aa, unidentified
MNKQVSRPQAMVFCGIDVSAASLSVALIEPSGGLTQREFANCASGHRALLAWLAQCSDRVRVSLEATGIYSLDLALALDASGTVELAVLNPKLVNRFAQTLRRSKTDAADAVVLAEYSQRMPFTRWQRPQASHLQLRTVGRYIESLVVEQSGLKNRLRTAEQTSTTPRAMLADLRRALASFERRVAKMRREALLLVRAEAALWERFQLLTSVPGIAQVSAIRILSELVLLAPTMSVRQWVASSGLDPAHQQSGTSLHKPSRISRAGNRHLRAALYMPALSAARYDPHIRAFYRALRQRHKTGLQALMAVARKLLHAIYGIFKSGTPYDGRRLFPNIQTDVESIAG

SEQ ID NO: 59117 - protein, 345 aa, unidentified
MTDVTTIAIDLAKKVFQLCGLNRGNKMVFNRSVKRGQLLQVVREYPDVLFAMEACATSQYWARRLMGMGFRVVLIPAQHVKAFTRGNKNDAKDALAIAEAAHRPGIHEVPVKSCHQQDIQTLLRIRSGYVESRTALVNRVRGLLAEYGVVMPRGVGRFRKALPEVLEEGENALTPRVRAAMGIQYQAFVELCDRIRAADAELREVARQDPICRKLMRLRGIGPMTALALYASVGGATQFKNARQFAAWLGLVPKHTGTGGKVTLGPMSKRGDRAVRTLLVHGARSVLTWAHRRDDAFSQWALAVAQRRGKHKATIAIANKTARMVWVALTRGLDALPRHHLSSAV

SEQ ID NO: 59118 - protein, 312 aa, unidentified
MDAMVVGIDVSKDWLDVAVRPTGESFAFKRTAAGIEDLVERLKDLSPALVAIEATGGFEAVVAAALAGAGLPVVVVNPAQVRAFAVALGKRAKTDPIDAAVIAHFAEATKPQLRQLPDEKTRFLADLIARRRQIVEMLAAESQRARRISDHRLTRSITRLRKALEEELAELERLIADHMRRSTVWVEKEKLLASVPGVGKTIARTLIAELPELGSLDRRQIAALVGLAPWTRQSGQWRGKSFIGGGRKTVRSALFVGAMVAARYNPQLKQFRDKLVAAGKPKLLALVAVARKLITILNAILRDRRPWHPNPA

SEQ ID NO: 59119 - protein, 342 aa, unidentified
MKDMMIGVDLAKNVFQVHGALWTGEVQFRKKLTRKQFPGFMAQQEPCLVIFEACGSAHYWAREMEALGHEVKLIAPQYARPFVKRQKNDAADAEAIVIAARQPEMRFVAPKTAEQQSRAAVFRGRERLVHQRTADVNALRALLYEHGHVFPQGIRYLNRMTALVEDETTDLHALIREECLDLLAQIAEKTARIIERNTKLKTLAAESDKARQLQTMPGVGPLTAVAVEAFGPDMAQFKTGRDFAAWLGLVPKQHSSGGKQRLGRMTKAGQADIRRLLIIGAMSRLGWLGQRKIVEGSWLSEMLARKPKMLVAIALANKMARQIWAMLTNNEDYRDPALAGAA

SEQ ID NO: 59120 - protein, 367 aa, unidentified
MSHRPFQSDTTFVGLDVHKNSITSAVLAPGADVAVIDRFFPDEPSIKRFVGALGDPGSVAVCYEAGPTGYSLARFLERLGVTCEVIAPSLIPTTAGARVKTDRRDARRLAELHRVGQLTAVRVPTEPEEAIRDLCRTRSDLVIDRNRARHRLVKFLLRHNVVFRDGRHWTLRHEAWLAKITFDDEALTRTYARYRSVLCALDAEMAAVEADLRCYLAEGPFAGAVARLGCYRGVTELGALSLAAEVGDWARFPRATSFMGFCGLTPAEYSSGDRTKRGRITKTGNIHLRTALVESAWSYQHRPATGAVIARRQARASDETIARAWKAQIHLTTKFRRLAATKSSRNVVVTAVARELAGFLWAEMVAA

SEQ ID NO: 59121 - protein, 337 aa, unidentified
MAVATIGLDIAKNVFQVYGADEAGEQLFNRKIARTAILDYFRKLPPCVVAMESCATAHHWGRSIAALGHEVRLIHPTYVKPFVNRDKTDANDAEAIHAASSRKSMRFVPVKSAGHQASTMLFKTRALLVRQRVQAVNALRAHLAEFGIVSRPGAANVPTLVAAVRNRTNTILPPQARAALRIIAKQIDRLSQDIAGLEKALKAHAKADDEMRRLMTIPGVGPMTATAVKAFVPDAKIFKSARHFASWTGLTPRTLSSGERTWTGGITKRGNCELRSLIVAGAMSVVRNTKEDARSWVASLKRRRPFKVAAVALANKIARTIWALLVNGGIYNPELLA

SEQ ID NO: 59122 - protein, 360 aa, unidentified
MFTERTSVGLDVHARSVVAHAMDVQTGEIFKARLCPDPVEVTAWIKALPGPAAAIYEAGPTGYGLARTLLASDIRTVVAAPSKLQRPSGSRVKTDAIDAEHLSTLLRLDAYSAVTVPDELTEAARDLVRAREDCRSDLMRSRHRLSKLLLRHGIVYSGGQAWVGAHDAWLRRQRFDSPLVQAAFDEAYDCVVTITARRDRLDERITTMAENSQYTDVVRRLGCLRGISTLTGFGLAVEIGDWTRFTGNSIGSFVGLIPSENSSGQSRSLGPITKTGNGHARRLLVEAAWHHQHRYVPGKTIRDRWDLASPAARARGDLGNRRLNHRWNQFKARKKPNNVANAAIARELAGWCWSLAILEE

SEQ ID NO: 59123 - protein, 389 aa, unidentified
MKIYVGIDIAKLNHFAAAISSDGEIIIEPFKFTNDADGFQLLVSKLESFDKNSLIIGLESTAHYGDNLVRYLVAEFYQVCVLNPIKTCQMRKNNIRKTKTDKVDTYVIAKTLMMQHDLRFVSFYDLDMMDLKALGRFRQKTIKQRTRLKIQLTTYVDQVFPEIQYFFKSGLHQHAVYALLKEAPSPKEIASMHMTHLANLLKVNSHGHFTKEQAKELRVLAQKSVGANDSAISIQITQTIQQIELLDSQLEKIEAEMTDIMKFNDSVIMTIPGIGYINGGMILGEIGDIHRFSNPNKLLAFAGLDPSVYQSGNFQAKTTRMSKRGFRVLRYALVNAAWNVVRNNATFKAYYDAKRAEGRSHYNALCHCAGKLVRVIWKMLSDKVEFNLE

SEQ ID NO: 59124 - protein, 390 aa, unidentified
MPVDHHSEEPTAIRTNLGAIFVSLELSRSTWLITSLSPGGGEKMSKHSVSAGDIAALLSRFSELKQKAFARMGQSFPIIVIQEAGLDGFWIHRVLQSEGIESYVVDAASIATSRRRRRAKTDRIDGEALVRALLAYKRGEPRVCAMVRAPTPEDEDRRRLCRERKTLTVERVQHVNRIKGLLFSQGVSGYEPLRRNRRQRLGELKTGDGRPLPPHLKSQIGRELDRLELLLGQIKAIEAERDALLTPATETEGMPGPQAMLIDLRGIGAEFAAVVWSEGLCRSFANRRQVAAYGGLAPTPWQSGSVAREQGVSKAGNPRLRTTMIQLAWLWLRHQPNSALAQWFKERVKRNGGRLRKTTIVALARKLLVALWKYVTAGVVVEGAVMKAVS

SEQ ID NO: 59125 - protein, 422 aa, unidentified
MKKRIYRKMPVNQFQPASISCDEVGARLVVAVDVAKVDMVAAIAGGDGRVLNTIAWKAPAENVTVLDVLRSFRAAGFLVEVAMEPSGTYGDVLQYQLEKEGFPIFMVSGKRTFDAREIYDGVPSLHDAKSAAIIARLHADGLSKPLSVPCPERRQLRAAITIMDLHQRRYLQLVGNLESWLARHWPELPALVELTAASLMALLARIGGPADVAAHRSAAAKLLHGMSHGLMAEDKITAVLDSAGTSVGVPLVGLERDALMTIAGEAHRALRDFKVAKTAVEKLSAHTPAVVLAPVIGRTTAAVVYSEVGDARSFSSAGSFLKAMGLNLKEKSSGTIKGQLKLTKRGSSRVRHYLWLAVFRWIQKDPIANAWYQRKKERDGGKSSRAAVALMRKLAKALYHVGRGATFDSSKLFDIRRLALAA

SEQ ID NO: 59126 - protein, 433 aa, unidentified
MKVKYEDRQKQKVTAITTDTLVVGVDIAKNYQWARFVDFRGIEHGRALKFKNSRGGFETILARIREICRKENFAKAVVGMEPAGHYWKAFANWLEKQDGIKAVLVDPYATKQAEELDDNSQTKSDKKDALTTAELVKDGRYFELCLPHDVYAELRGLSTARTGLNRRKNALKNTITAVMDEYFPEHGEVFKCPLSGKASRHILKTCPFPKFILEPGEDGVTDEIKKAVKKTVGRKKAAQLIETAKESIGVDYGEEAAGLKLRLMLEELELLEKQAEELEVQMEAALQKTDYAGFLLSIKGIGVVTLAACLGEPGNPARFENPRQMSRMAGCNLAEDSSGKNKSGTKISKRGRKNLRSVPYQMALIMAATNDEMKQLYHYLKTREEAPLRKMQALIVVSKKILALVHAPAKKKENYDPGKVFGPVRREQLKAAA

SEQ ID NO: 59127 - protein, 345 aa, unidentified
MGQVVTIGLDIAKSVFQVHGVDASGATVLRQRLTRSKLLPFFEKLPRCLVGIEACATSHHWARQLITLGHDVKLMPAQYVKPYVKRGKNDAAGAEAICEAVARPTMRFVAVKTPEQQSAMMLHRVRLVLMRQRTQLTNVLRSHLAEFGIVSPVGREGVEQLLEVIADGKCTRIPPETRACLEMLVEQLELVKRQILENDRQIKARARETEVGRRLMTIPGVGPLLASAIVATIADPAIFKSGRSLAAWIGLVPRQNSSGGKERLGGITKAGNRYLRQMLVVGAMAVIRYAERHGTRRPWLVQLLARKPRKVAAIALANKIARTVWALMTNGETYRDPAVRQIAVA

SEQ ID NO: 59128 - protein, 365 aa, unidentified
MGKFWVGVDLHKGQFTCYVKGEKGAYQRFATNTAGYTAFLRMLETFRANEQECEVAVESTGNTRYFVTMVERLGVRVRVINTLKFKVVNESVNKTDRRDAKTIAEFLAKDMLPEARLCGERSEALRRLVKSRSILVSTLVKLKNQVHGVALSYGLTVKSGKLNSLKGRAEVVAALQAVEGAAVVEPLVAAIKTMEAEVTRVEKKLSELTTGDRAVEILRSIPGTGPICATTVRAFVDDIKRFRSAKELCGYAGLAPWVQQSDQTVHYGNITKRGPSELRRALVQMALGMIKVNRENNNRLMVRYRQIKQRRGSGKAIIATARKLATIVWTLLTDDTEYDPAVMNNPVLLRLAQAMTEEALARTTA

SEQ ID NO: 59129 - protein, 355 aa, unidentified
MTEIRRLVTGGVDAHADSHHAVALDEQGRLLGDAVFATTARGYRELLAWLEGFGQVRLVGVESTGAYAAGLVRFLSVRAVAVVEVNQPHAHTRRRRGKSDPVDAEAAARKALAGEATVVPKLSSGIVESIRQLRVAREGAVKARTAALNQLSVLLVTAPGELRQQLAVRKTSRGKVSLCLRLRPDLARVHEPLQAAKLALRSVAERARELDRQISLLDKHLAPLVAAAAPRTTSLLGISTQHGGQLLVSAGENIERLSSEGAFARLCGASPIPASSGRTTRHRLNRGGDRNANRALYLIAVCRLRTCARTRAYAERRIAEGLSKKEIIRCLKRYIAREVYHTLRADLAALTHPRT

SEQ ID NO: 59130 - protein, 311 aa, unidentified
MDHLGIDLAKLTFDAMLLRAGVSFFQQFANSPAGFQQLHQWLLDQGVSRLHVCMEATNVYWEALALFVYEQGYTVSVVNPARIKGYAMSQMQRNKTDKLDSATIASFCATQTPQPWTPPTAAQRKLRALVRHRDDLIATRIQQTNRLQDTSEPDVRASLELVLATLEAQLKTNQQQITAHLAAHAELQELHGLIDTVAGIGAVTAQKLLSEFYDLAEYPSAKAAGADAGLRGANYQSGTSVRRRARLSKIGKASVRAALYWPAITVMTHSSEFKQYAARLAARQTLRRDPGCGDAQADPYHLWRCEAQNPL

SEQ ID NO: 59131 - protein, 330 aa, unidentified
METNQYIGIDLHKAFFQVCAMTGSGERTWEGKYPRTPDGLQAFRARCSPQSAVAVEATTPTWSFVDQIIGEVGRVCIVDTRKTKLKAGYAAKTDRLDARRLADALRRESVVSIYYPPPAIRELRELCRHRLMLTQLRTRVLQRLRALLLRQGLGDPPVRTLRSVEGQRWLDQIVLPPRAQEACTTLRSVERGISEQLARVDADVRREAEADPIVLRLRTIRGVGPVVGLTLRAEIGDMARFPTPGHLASYAGLVPRVDSSASHTRYGRITKEGSPWLRWALGEVGLHALRRQDGVGRWGRQLAVRKGAMTAHVALARVACGDVMNVWRQG

SEQ ID NO: 59132 - protein, 341 aa, unidentified
MSDYSYFGGIDLAKNHFSIHVVDSQGKVILHKSVTRSKLLPTLANMPPMRIGLEACGGAHYWARTLHGLGHDARIMAVKYVVPHRTKGKNDLNDAVSICQAVQHSSTRFVPVKSPEQQAILSVHRMREHWVRERTALMNRIRALLSEFGLIIPVGRSSLMKQVPLMLEDSENELPHLARTVIADAYHHLEALNQRIADTEQVFDAFAKVSDNVQRIMKVRGIGPQTATAILASIGNGAQFDKSRDFSAWLGLVPKQYSTGGKPRLGRITKHGDKYLRTLLVHGARTVMANLGDKQDRLSQWCRSILERRGMNRAIVALAAKNARIIWSLLHNQTEYENYAA

SEQ ID NO: 59133 - protein, 426 aa, unidentified
MNCTQNYKIDQVTEQTLVVGIDIAKRTHYACFVDDRGRVLRKSFPIFQSKEGFQQLYKAIQEAMQAFGKSEVIVAVEPTGHYWLNLAYFLEEHGIPLVMVNPAHVCRSKELDDNLPTKHDAKDALVIARLAKDGRFLVPRLLHEIEADLRVGSTLKEKLRKEQTAVKNAIIRWTDRYFPEFWMVFRDLGKTALSVLEWTPLPADMAGRTAEELIEVYRQSEGLKCPQKAKIQALINAAKDSIGVTEGTTMARFEIAALVRRYRQLEAKIAALDAELKALVQTTMEYQWLKTVDGLGDATIIDLLAEIGSFAHYRDPRQLVKLAGLTLKENSSGQRKGQKHISKRGRKRLRSVLFRAMIPLIRHNEAFRELHEYYTTRSVNPLTGKQSIVALCRKLLNVLFAICTKKQAFDAERMKQDVLSQVQRAA

SEQ ID NO: 59134 - protein, 396 aa, unidentified
MPRPSRERIADMPMILGQSRFAPFGLSFPCFDELKEGVQNVTAPYDYHIGVDYHKSYSHLIVQDSCGKTLRSGRVKNDRQSLGSFLERYRQNSHAVMEATRNWMVMYDWLDDICDDVVLAHPLKVKAIADAKIKTDKIDATVLAHLLRADLVPEAWAPGDRVRELRLALRERMFYVRLRTMTKNRVVTVFDRYPEQTAQLKKPTDLFGKTGRQQLAAIDVSEIDRVQIDRGLEFIGDINERIKQSEATIRAMTKTNGKVKLLKTIPGIGEFFARLIDAEIDDISRFRNPKKLAAYAGLVPSTYSSGGKTYHGKIIKQGNKWLRWAFVEAVQPAIATDPQLRAQYEHLKFRGVNKARVAIARKLLTITFQILRDQRPYERRGTNSKEGPSSTISRLS

SEQ ID NO: 59135 - protein, 346 aa, unidentified
MVGVDAHKATHTMVAVNHVGAKLGQKTVAARTEGHRQALSWAHSTFGVDITWAVEDVRTVSRLLEQDLMDAGQKVVRVPTWLMARVRGKGRQSPGKSDPIDALAVARSVLQEVKLPIAQHDNESRECKLLADHRDRAVTQRTGAANRLLWFMHELNPDHHLTVRRLYTGRNRDALDVWLAEQSGPVARLAREELADVGRLTDVAGHYERDLASIADRVAPSLLELPGCGPLLAARIVGVTANVTRFRDESAFARFAGVGPKPSWSGNTYGRARPFVGGNRQLNAALHHIAMVQIRDGHTGERYFHRRIEEGDSPAKARRCLKRKLARAVYTRLRADYFARHPVERT

SEQ ID NO: 59136 - protein, 390 aa, unidentified
MQVMHPVCCGIDVHQKSIVCCILDGPLTSNEPKKYQTSFGTTTKELKAALDWLLEHQVTHVFFESTGQYWIPLFNIFSDSDLELVLANPQHIKNVPGRKTDVKDAEWIAQLGRCGLINQSYIPSQEVLQLRYLTRYRLSVKQRLTQIKNHIHVILQRANIKITSYLTDIFCKTGQALLTLFIDGEVINEDNVESCIHGRIKASTRQLIEAMEGKLSTVDRFLIKECMEEYKLQKKISDELNKEINEYILEHFPEEYQLLLTIPGISDNCCATILAEIGPNVDAFKTDKKLASWAGMCPGSNESAGVKRSSHTTQGNKYLKQALVMSVLSVQRAKEESFSLFYQRISSRGSKMKAIIACGHKMLRIIYKILQSHQPYNSQKALGLRQQTNA

SEQ ID NO: 59137 - protein, 421 aa, unidentified
MNKTRPKPTPPKTTLFVGIDWADQKHDVFWMHVDGRHGRRQIEQSPEALEELASWMSDLAGDGQVAVALEKSRGPLQVALMFRERIVLFPVDPKQAARYRESFRSGKAKNDSDDAFLLARMLRERHREWKPLKPDDQATRRVAQLAEARRQLVDENTRLKLKLQALLKIYFPLLLTLGEVDSALVLEVLRRWPNPKAFRRVHPKTLARLFQKHGVKSAEAIQQHIERIRSTPLLTKDDPLIESLVFRVTALAGQLQVLAKQIAAIEEALDEAMRAHPDAAIFQSPPGAGRAMAPRLLGAFGSDRQRFAHADEVAVLSGIAPVTRQSGKTKIVSRRRGCSKFLKQTFHEFADHARKWSSWSKAYYRWLRSKQMGHHAAIRKLASRWIRILYRMWQTRTPYDEDRYLQSLRQKNHPALKFLET

SEQ ID NO: 59138 - protein, 340 aa, unidentified
MAHVGVDLHKRTSQIAVLTEDGELTQHRLENEVARVEQFFAQLPPKTPVAIEASGTWWWLVDLLEGLGHQPILSHPKQTKAIAAARLKNDRVDAQRLALLLRGDLLPTVWIPPAALREARELIRHRIQLVWLRGELRNRQVAMLARRNLQPTSGKSWFTTRGQREFEHLPLPTIPSRLREDYRALLPMLDAQIRQLDCEITQRWGDDPRVRRLCTIPGIGPFIATVLVLELGDIARFAHAKQVASYAGLTPRVRASADRIRSGHITKEGNRLLRWVLVLAATQAVRRPGPLRTWFHAVKKRRGRNLARVALARRLAEIVYHVWKQECDYFTVIHHGVVRG

SEQ ID NO: 59139 - protein, 413 aa, unidentified
MDVMVERCAGLDVGKDEVVACIRTPKTSGHGRHSELRVFATFTSALETLADWLTENGVSEVVMEATGPYWKPIWYVLEDREFDLKLVNAKHVKMVPGRKTDMADAAWLAELLEHGLLRSSFVPPPAIRELRDLTRYRKRLIQTHTAEQQRVQKILEDAGVKLDSVASDIFGVSGRAMLAALIAGERDPDTLAALAKGTLRQKLPELREALRGRFRDHHAIILKITMDHVAHLEDAIAALDAEIERVMVPFCKARDHLDTIPGVAKRSAECIIAEIGIDMTRFPTAAHLASWAGMCPGNNITGGKRGSGKTTKGNRWLGEILNQCASAASHTRDTYLAAQYWRLVRRIAKRKAAVAVGHSILVICWHLLTNDCDYADLGGDWFTRRTDLDKRRDHLVRQLQDLGYGVSLTKAAA

SEQ ID NO: 59140 - protein, 428 aa, unidentified
MNIEDTIRREQFCQIKSQIRGSDQHLVVGIDVAKDKHHAFMGSATGKSLLRKLVFENNLEGFRKLQERSEAIGIQNALSKIVFGMEPTGTYHKPLGAYLIGCGHHVVLVTGKAVKNNRELLDGRWDKNDIKDPANVADLICQGKCLYYDYPSASINQLRELLSLRRRLKKEEHSLRMRIRNNVLAQYFPELDRFYSSCESESLAIVRWCLDPSTISCLEFDEFFSLVTRTKRGIAQKLRLEKIHRLAVESVGCPMGPAVEFEAELLVKKLDQVRQELKETAELMKDFCMEFSEYSWLLTIPGFGPYIAARVLASISNPWRFDSSNQVIKLAGYDLSANRSGKTSNEAVPVISKRGNGELRYALYQAAHVASSRNPDFIRYYTRMLRGRERERGIKTKMKVKLAAKMLKIAWTLMRKQEVFDPNHLIIE

SEQ ID NO: 59141 - protein, 304 aa, unidentified
MSTNNSIIYIGLDIGKDSLQVNLQNQNFPIPNTRPGHRKLITQLKALAQPLLVVCEATGGYEQAIVAALHQAGIPVTIVEPARVRHFAKACALRTKTDRIDAALLTEFGRQTAPRAQAPLAQNTAVLRELSRHRLQLQAMTQNVVQQARHLTLPALRQQNAALLRQLRGHLQKLQKQIEALLQQDATLQTKAQRLQQVVGIGPKTIVSLLAEMPELGKLNRAQAAALAGVAPHARESGRWQGKRFIGGGRPLARKALYMAALVASRYHPTLKLRYQSLIASRQSPKSSARRFDASSHYPFKQPP

SEQ ID NO: 59142 - protein, 342 aa, unidentified
MKQYVGLDVSQRETAICVVGEMGQVIFEGKAKSDPGALTSLLRKHAPHAERIGFETGAMASWLWHELRRVDLPVVCIDARHAHAALSVRMNKSDQNDARGLAELVRVGWYREVKVKSEESQKIRAILVARFRLVTIRRDIENQVRSLIKEYGLLFPRAIGLQFRHQVHELLGDDHQLLSVIAPLLSIHETVCQQQNKFDDQVRRLAKQDETTRRLMTVPGVGVVTALTFRHTIDDPSRFRSAPAVGAYLGLTPRRNQSGETDTNGRISRWGDRLLRTYLFEAATVLLYRTKKWSCLKAWGMKLAKRIGMRKAKVAIARKMAVILHCIWVDGTSFDWGQAKEA

SEQ ID NO: 59143 - protein, 422 aa, unidentified
MLEETADREEIIQRVAALDIGKAEVMCCVRVPYESRPGRRLQEVQAYSAMTRSLLGMADHLRSLGVTRVVMEATSDYWKPAFWVLEAAGFETWLVNARDVKHLPGRPKTDKLDCIWLCKVAERQMIRPSFVPPPQIRRLRDVTRYRIDLVGARTAEKNRAEKLLEDAGIKLSVVASDIFGVSGRAMMAALIAGERSPAALAQLARTRMRGKIPALQEAFTGHFTDHHAFLLGKMLGRVDGIDADIAELDARIEETIAPFGQAAERLNEIPGIGRVAAAVIIAEIGTDMTRFPTAGHLASWAKFAPGVKESAGKKKGKGSTGHGNRYLARVLGEAAVGAARTDTFLGERYRRIARRRGKKKAIVAVGRSILVITWHLLSDPEARCTDLGPGFFDQRTNPERRKRAHVHQLEALGYKVTLEPAA

SEQ ID NO: 59144 - protein, 366 aa, unidentified
MKKISTVAKRGNDIFKQSKLTIGLDLGDRTSHYCILDGAGNVILEHSLPTTPNGIQQVFRRIPRSRIALETGTHSPWVSRQLTQMGHEVIVAHARNVRLIGESSRKDDQLDARTLARLARIDPGLLGPVRHRSAKAQIHLTVIRARATLVSARTALVNAARGLTKSYGERLRKCGTGQMNREIAKGLSQELRDALEPLLGEIESLNERIAEYDRRIEQIAKEVYPETALLQQVKGVGTLIALTYILTLDDPHRFRRSRDAGCFLGLRPGRRNSGMSEPQMHISKEGDRYLRTLIVQGAHYILGPFGEDSDLRRWGLKLAERGGKNAKKRAVVAVARKLAVLLHKLWVSGEVYEPLRNNHKVVSAVA

SEQ ID NO: 59145 - protein, 344 aa, unidentified
MTYYAGLDVSLRSTHICVVNDDGELLAEGKTDSEVADIIAFLDSLDVKISTIGLEAGTLMQYLTYGLQFAGFEVVCMEARQVKAALSAMRNKTDKHDARGIAQLLRSGWFSPVHIKSIESHQTRALLASRKAVLAKCIDLEQEIRGLFKVFGIKLPARLGHGSFDPKVRPLIEADEALSQSLLPMLDARLVLYHTFRELENRVRNLAKDDPVCQLFMTAPGIGPITALTYKAGVDDPTRFRQSRTVGAHFGLTPRRCQSGEFDFDGHISRAGDADVRSTLYVAANSMLTRSGKWSPLKAWGMKIAKTRGHKKAVIAVARKLAVILHRMWIDDTPFRWSTEAARS

SEQ ID NO: 59146 - protein, 309 aa, unidentified
MNKAVVYIGVDVAKASLDVAWAERSRRFANNKSGLSALTKWVKQSPFAVHLICEASGGYERGLLDAAEQNAIKVSLVQANRVRQYARAAGILAKTDKVDARVLCAFGSAMQPEPTPPLSAQQKRLRELETQRQHLSRMMVAEQNRLAQLNDKELQRLTRSLLATLKKQMAAIDMRMVGLIAEDQTLKQKAQKLTAIAGVGTRTAVLLLARMPELGTLNRTQAAALAGLAPFNRDSGTLRGKRTIFGGRRALRCGLYMAALVAARHNLILRNFYQRLRSNGKPHKVALTAVMRKLLLALNHTLKPTACFA

SEQ ID NO: 59147 - protein, 312 aa, unidentified
MERELFVGIDVAKDSLEVATTTGVKANAVNTSAGHKEVERLVKPLKPVLVVMEATGGYESALAEHLAACALPVVVVNPKRVRDFAKALGILAKTDPIDAGVIARYAQAVRPELRLLKDDQTQKLDALVARRKQLVEMIAAEKNRLPLAKKWVKEDIATTIAWLTKSVDRINKEIDDLIKKDPVWCAKEKLLRTVIGVGRVTSMDLLCDVPELGSLTRKKITALVGLAPFNRDSGKTRGKREIWGGRAYARSLLYMAALAAKRSNPVIKPFYDRLLAKGKRPKVALVACMRKLLTILNAMVRTNTPFEVPCGV

SEQ ID NO: 59148 - protein, 349 aa, unidentified
MLADEVDYVVGVDTHRDQHVLAVVVAGTGVVVARRSVRSSARGYAEALRFAQAAADGARVWAVEGAGHDGAGLARHLSGRGETVLEAGRGPRDQRRLQGKDDSLDAVRAARTALASETPALPRTGQQREALRLLLLARRSAVDVRRLALVQLRSVIVTCPDQLREELRGLPAGRLVERCSRLRRSPSRTPDELAATLVLRSLARRIQAATVEAAELEREILAHVRALAPQLLDEPGIGPIVAAQLIVSWSHHGRVRSEAAFARLAGVAPVPASSGQTTRHRLSRGGDRQLNRALHTVILHRRQHDPATKDYIARRVAEGKTRRDAVRLLKRYLARHLYRVLDNQGPLMT

SEQ ID NO: 59149 - protein, 352 aa, unidentified
MSRARIYKEGRETVHLNSNSQALSVGVGLAGEPDADSWVGIDVSKDWVDVVVLVKERKAEQLRCERASAALAELGRRLQPYAPRGVVLEATGGLEGAVITALVAAGLPVLRMNPKRVRDFARAHGLLAKTDALDAHVLALFGARMQPELRAWPEAERQQLAGWVARAQQVTTQRAAERTRLRQAAEPQLRKSIERVIAFLGKELARLERQLAEWIEASETWKAQEALLRTAPGVGPKTAVRLLAHLPELGRLNRREIASLAGLAPWACDSGHWRGRRRIGGGRGAVRAALYLASWSAVRVAGRFQEAYRRMVAAGKPRQVALIAIARRLLLALNEMVRSNTPWRGQPEPITT

SEQ ID NO: 59150 - protein, 350 aa, unidentified
MNHKCKIIIGIDTHKATHVAVALDTQGTRLAALSIPTNPKGYLELERWSQSLGEVHAFGIEGTGSYGAGLSRSLLAQGHNVVEVTRPNRQLRYSQGKTDTLDAEGAARSVLSGQATARPKTQTGISEMIRHLKVARDTAVKSRSQAMVTLKTLIINAPADLRDVLDKIRGKVALIRHIAAFRPGEINNTMASAKAAMRALARRWLWLHEEIITHDKELERLVTERAPDLMTSHGIATLTVAEMLIVVGDDPTRVRSEAAFAKLCGVCPIPASSGKTHRFRLNRGGNRQANAALYRVAIVRMRSHEPTLAYVRKRTKDGKSKSEIIRCLKRYIVREIYSQLCVPKSAQIAA

SEQ ID NO: 59151 - protein, 349 aa, unidentified
MKIIGCDFHPSYQQIAVLDSVTGEMVEKALSHERKEEVRAFYAGLEGSVRVGIEASGQSQWFERMLVELGHEVWIGDAAKIRASCERKQKTDRRDAELLLRLLAEDRFPRIWVPTAAERDGRQLLLHRHKLVRMRTQVKNQLQALALNQGVQRKRKLWSEAGRKQLESLPLLPWASRRRAELLQLLDQLEASISELDRAVAEQASARPAARRLMTHPGVGPVTALAFALTMGPAERFQRGKQVASYLGLIPSEHSSGGRQQRLGHISKQGNPFLRGLLVEAAQSAVRYEPEMRRAYQRLAQRKCRALAKVAMARKLAVRLYWMLRLQVNYAQLIQGSHAGQPGTFCGRG

SEQ ID NO: 59152 - protein, 358 aa, unidentified
MAETAVTTQVVVLGVDTHQQTHHAAIVAIDGRPLADREFPTTTAGYTQLWQWACGFGRVEDAAVESSASYGAGLTRMLTAEGVRVIEVNTPDLPRRYAHGKTDQLDAYAAAMAVITGRATAVAKDTRGAVESVRMLTVARASAVEEATRIGNQIRDLCTTAPAEYADQARQARTIAKRAAFIKDLPVPAEKADLSGPAAAFVRAARSLLDRHRLAQQQARSLARELTRLLSKLVPTLLSRPQIGPITAARLVITAGDNVERMGTEARFAKLVGAAPLPASSGKTSRHRLNRGGDRQANSALHMIAVGRMKSHAPTRAYVERRSAEHKTKKDILRCLKRYIAREVFRDLTTDLGALDKL

SEQ ID NO: 59153 - protein, 353 aa, unidentified
MALNHRWCVGVDLHKDTLTACVFCGCCGEVSFQKIACRNRRQIAEYFAALPGPHAVAIESVGFYRWLWEMLEPIVEELVLADATQARALAGRRLKTDREDALNIAQLLAAGRLPRSYAPPIEVQWLRDLTRHRNSFSRQHARVLHRVKSIMNANNRPGPARMQSDGLIRYLKAQGEKLPARHVEMLWPCVDALVITERQIAQVERTIGQIVQRDSFREVYGILTSFPGVALVTAATIIAEIGDFKRFSGGKAVGRYAGLNPRVYASGGKQRMGHIAKAGSPDLRWILQQAAWTAIRYDEHVKRIFLRIAKRAGRKAAAVAVARKLLTWMQIAVKKGEPYRTPGPGHTLLPGAA

SEQ ID NO: 59154 - protein, 403 aa, unidentified
MNAVGIDVSKGKSTVVALAPGGKFLSRPFNVLHTKSGIKELVSFVRTLDGDTRIVMEHTGRYYEPLLQRLAASDLFVTAVNPKLIKDFGNNTLRKVKTDKADAKKIARYALDNWCDLRQHTGMDTTRTQLKTMNRQFAFCMKQKTACKNNLIALIDQVYPGANTYFESPARADGSQKWVDYVLTFWHVDYVCSMTLSTFTERYRKWCHRHGYNFQPDKPGLLMEKAKDLIAMLPMDKTTKMLVQTSIAQLNVLSKTVEALRTQMIALAEQLPEYPVVIDMNGVGPTLASQLIAEIGDITRFPRRGSLTAFAGVDPGAKQSGTMQVKSNKTSKAGSPHLRRALFQIVSGLLMRSPDDAVYNFMDKKRSEGKPYYVYMTAGANKFLRIYYGRVNEYLASCPKDHE

SEQ ID NO: 59155 - protein, 343 aa, unidentified
MDHFAGLDVSVKETSVCIVDDTGKIVREVKVASEPEALLAVLTNPAYHFKRIGLEAGPLSQWLYSALAEAGLPVICVETRHMRAVLKAQINKTDRNDARGMAQMMRVGLYRPVHVKTLRSQKLRMLLTHRKLLQSKAIAIDNDLRGTLRNFGVKVGIVGSARFEARVKELIENLPDLAVLVEPLLVVRRVLREQLGILHRRLLAVVRDDDACRRLMTVPGVGPVVALTYRATVDVPARFRKSKSVGAVFGLTCAKYQSGESERTGAISRCGDEMMRTMLYEAAQSMLFHSTKWSWLKAWAMKIARHRGMKKAIVALARRLAVIMHRIWVDGTEFRWTREVAAA

SEQ ID NO: 59156 - protein, 345 aa, unidentified
MELHTIGIDLGKTVFHLVGLDLHGEVVVRKKFSRTQLLRFTANVHVGLIGMEACGGSHFLGRALREQRHEVRLIPAQYVKPYVKTNKSDYIDAEAIAEAVARPTMRFVPVKTDEQLDMQSLHRVRERWVMRRTAVINQIRGLLLERGITLRKGRHHVHAALPLILEDADANLSGAVRLLLTQLKLDLDQLSVRIDEADAVIQKTAHENEACRRLVAIPGIGPVTATALIAAIGNGGAFHKGREFAAWMGVVPREHSTGGQQKLLGISKRGNSYLRRLFVQGARAVLLQRTKQSSGLSAWLAQLTSRTHRNVAAVALANKLARIAWAVLAKNEQYRPSVLADVAAA

SEQ ID NO: 59157 - protein, 361 aa, unidentified
MDSTKYIDSTKYIGMDVHKETVSIAVMNSTGKLVVESILETKAATILQFIQGLRGNLQVTFEEGTWAAWLYDLLKPHVTKIVVCNPRRNALLKEGNKSDKVDARKLAELLRAGLLRPVYHGENGLRTLKELSRSYLTISKDLTRVMNRLKALYRGWGISCEGATVYAPRHRSEWLGKITEAGVRRRAEFFYQQLDALQALRQQVRRDLLAESRKHSERKLLRQIPAIGPIRAALLMALIQTPHRFRTKRQLWAYSGLAIETHDSAQYRYVAGQLQRSKKPQQLRGLNRNHNHDLKAIFKGAATKASSGAGPLHDFYEALLTKGMRPSMARLTLARKIAAITLVVWKKGAHFDAEQLKPQAA

SEQ ID NO: 59158 - protein, 523 aa, unidentified
MSATRSRKRRKPRFDSFIQKPRGIVHPRVQRVGPEHFGVVSVDCAKARFKWMFCDFYGNVLIPPTEVAHNRVELDAALAQLRQARADHDIQDLVVAVERTGRYHHVPRKAFAQECSDVRTVHPFTTKQFRQPSDPGVKTDDTDLAAIHRAAVNGFALVETAGDPLYRELQLSIRHRRDLVHKSTAVRCQLREHLDAAFPGYAACFTTFWQSDVAMLLVRHFDAAEALLQAGPAGLRDFLRQRRIQFQQRTLETILVWAAQAAPADTAAARHRRIALALDDDRLRKTQEIQAAERDIAAQLVRTPYIILLSFPGINVVSAADFAGEAGPISNYATAKTLTGRAGLFPSRYQSDRVDRADGPLVRCANRSLRAVILGSADNLINCNRHFGLLAEIWRAKGHDPRLRHVRVGCRFCRIAFHMVAGRRVFKHPSMQQRHYILDKLSAFHRDHDTPMHQTMTDLLAAIEQLPRSAYAEEAEPLRAELDRIEAGRRRGPQLLGDILPIVLARLGVGRVQSSKSGESDPT

SEQ ID NO: 59159 - protein, 387 aa, unidentified
MPQPKDDLSRSLVALDQDNTLIAVLELSSSTWLVGGLIPGIERDPLKKLIPDEEALVKLLHRWRDEAIKVGRRITRIVVAFEAGRDGFWLARWLRARGIEAYVIHPTSIPVSREQRRAKTDRLDIGLLKRCFLGWLRGETKHCSMAAIPTLQEEDAKRPTREREQLVGKRTATVNRLKAALVRLGIRGFNPKLRKAPERLAALRTPEGGPIPPQTLAELRRGMAHLRFIDEQIKQIEAARLSRLTQEPQQGSNAGILQLRRVIGLGIETADMLTHEVLSRDLRDQRALGRYAGLTGSPDESGRRRREKGLAKAGNARVRRGMIQFAWRFLIYQKDSALAQWYQASTTAGGRKRKTMVVALARKLLIALWRLVTTGEVPQGVILHPAA

SEQ ID NO: 59160 - protein, 355 aa, unidentified
MSQTANTAIAVIGIDIGKNSFHLVGHDARGAIVLRQKWSRGQVEARLANIPPCLIGMEACVGAHHLSRKLASLGHDARLMPAKYVRPYSKGQKNDFNDADAIAEAVQRPTMKFVATKTAEQLDLQALHRVRERLVSQRTGIINQIRAFMLERGIAVRQGIGFLRTELPTILATRTDALSPRMLHVIEDLAGDWRRLDPRIDGLSGEIEALARQDQACSRLMTVPGIGPIISSAMVAAIGTGDVFSKGRDFGAWLGLVPKQISTGDRTILGKISRRGNRYLRVLFVQAAWVVLVKIKNWERYGLKSWIEAAKRRLHHNVLAIALANKLARIAWAVLAKGRAFELTRTDDAGIVRPA

SEQ ID NO: 59161 - protein, 416 aa, unidentified
MEVIVCRCAGLDVHKNTVMACVRVPGPDGGRVSTVRQFRTFTAGLRQLRDWLVAEQVTQVAMEATGVYWKPVWHVLEAATGLELMLVNAHAVRNMPGRKTDVADAVWLAQLCECGLLRPSFVPPPVIAQLRDLTRYRKKLIEERSRETQRIQKLLEDAGIKLDSVVSDILGLSARQMLEALIAGVRDVAALAELAHTRMRPKIPQLRQALEGRFAAHHALMLRMHLDHVDQLSAGIERLDVEVDRVIRPFSDQLQRLITIPGVGRRTAEVLIAEIGVDMRRFATAAHLASWAGMCPGNHESGGKRRSGRARKGNAALRAALCEAAWAASHSRSGYLPAQYRHLLRTFGRKGQTRAIFAVGHSILVIAWHLLADNSTYQDLGGDHFILRNDTEARKRYLIRQLEALGQTVTIEPAVA

SEQ ID NO: 59162 - protein, 367 aa, unidentified
MKQQTSATSETQVKGKNIIDFTGKTIYVGIDVHLKDYQVAKVYEGICLGNHRMESNADKVIEHLHRHYPGAHFKCVYESSAWGFNLQRKLSAAAMECIVVHAADVSTSDKERKRKTDKVDALKLARSLASGDLKGIHVPDETIQKERTLIRYRKNVVNDINRSKNRLKSLLKYQGIEIPEAYSKSNWSSNFMKWVEQQAAKDDLLKDSLELMLEQVKLLRLQLLKVEKKLGALRNGKYAAKAQLAMSVPGIGPTTAMLFLLEVGDIGRFRGFDALNDFIGLCPDTASSGEKDRDTGITTRRHKQLRTALVEAAWQAIRNDPALLESYQLLTKRMKGSQAIIRIARKLLRRLRAVLLSGKPYQKGVIA

SEQ ID NO: 59163 - protein, 339 aa, unidentified
MIAVGVDTHKERHYAVVLDQVGQLLGELSFAATAAGYGELQRWAERLVDARELVFGLEGAGSWGAGLYQHLQHAGYSVLEVERPRRKDRRAGKSDRIDALAAAKCVLSGESVSTPRRRGILTAIRALLIARRSVVAERTRVLNQLQALNATAPIVLRERIGEGTGKQLERRILSMRARSAANLEERIAFSVMRDLAAHSRTLGADAQRYEHQLADLIRSLDDTLLDEPGIGPISAAKLLACDPARFSSEGAFARCNGTAPIPASSGKTVRYRLNRGGDRQANNAIHTIAIIRAKHQPETRAYLERRIREGKTKREALRSLKRHISRELYHRLNAIPLTS

SEQ ID NO: 59164 - protein, 375 aa, unidentified
MGLDRDRIHGGADMAQVRSWVGLDVQASKVVAAVVDRETGELSVRRLSGVTGEVVAFCAGLPGRVQVAYEAGPSGFALARALTAAGVGCVVAAPGKIERPAQDRVKTDRRDAERLVRLLMVGGLHRVRVPSEGEEALRDLVRAREDVRGDLMRARHRMGKLLLRHGVRYDGAGDNWTQRHRGWLGHVELPDRGAQVTLLDYLGAIDALVVRRDALEQAITELVPGSPWAITVARLRCLRGIDTLSAVGLCAEIGDWERFRRPAQLMSFLGLVPSENSTGEQRRQGSITKSGSRHGRRLLVEAAWHYRRPPARSTALRRRQQGQPAHIIALAWKTQQRLHRTWRRLDTERGKRRTLVAVATARELAGFCWALATAD

SEQ ID NO: 59165 - protein, 447 aa, unidentified
MKTEPEEIPDADHELIIERVAAIDVAKASGKVCLRLPRPGRPGHRVSRVWDVEATTAAVCELADHLVAGQIERVTVESTSDYWRIWYYLLEAAGLSVQLVNARDVKNVPGRPKSDKLDSVWLAKLTEKGLLRPSFVPPAPIRQLRDYTRLRVDLTRERSRYWQRLEKLLEDALIKVSAVASTLDTLSVRDMLEALIAGERDPRRLADLARGRMKTKRAALIEALTGRFDDHHGELARMLLDQIDALSGQINTLTIRIDQLLATIANEVPGHDDGDSGAGGQPSADLTVVQRLTEIPGIGPTEAQLILAEIGLDMSRFPTAAHLVSWAKLCPRTIQSGAIQRSGKSGKGNPYLKGALGEAAAAAAKTNTFLGARYRRIVKRRGKLKALVAVARSILVIIWNLLSDNHARFRDLGPDYHATRINTERKLRNHIAQLAALGYHVAVEPAA

SEQ ID NO: 59166 - protein, 375 aa, unidentified
MNDHSEAFVGFDTSKLRNAVAIADGVRGGEVRFLGEFENSAAATAKLVKKLAAKYQRLTFCYEAGPTGYGLYRQIKNLGPDCIVVAPSLIPKKPGDRVKTNRRDALSLAKLLRAGELTAVWVPDRGHEAMRDLTRARETAMMDLRSKRQQVSAFLLRQGLHYSERKKTWTKTHMNWLASQKLEYAEQRLVFEEMMLAVRQAQERLERLEQAIRVAVPDWSLAEVVTALMAMRGIDLISAATFLAEIGDLSRFQHPSELMGYLGLVPSEHSTGDKINRGPITKAGNRRARRMLVECAWSYQHPPRVGQEKQEKVAAAPRAAREIAWKAQCRLHGRYRALVRRGKLKTVAVTAVARELAGFIWAVNRAITTARAVAK

SEQ ID NO: 59167 - protein, 442 aa, unidentified
MRIPSSVPMPNEVPIEQEIVAYVGLDWADQQHVICWQAADSAAVQSAVVQQRPEELQAWVAELRQRFPQGLVAIALEQSRGAVIAALMHFDFLRLYPINPKSLARYREAFASSGAKDDPDDAALLLELLVKHRDRLTPWVPDDALSRELALRVEHRRQLVNLQTKLIQQLRSHLKVYFPQALDWVGELDSLQACDFLQRWPTLAAVQKARPSQLEKFYHQHHCRRPQLIQQRLEQIRQAQPLTQDTAIVQAYSQMVLALVAQLRALIPTLQQWQQQISQLFAQQPDAALFASFPTAGPVFAPRLQAAFGSRRDRFGSAAEVLQFSGVAPVTKRSGKSRQVQRRWARPKFLHQSFVEFTGLSIPHCCWARALYQQLRARGHRHWAAIRVVAYKWIRILFRCWQDRVPYDEQKYLKSLERRNPTLWAAIQQLPAQPSRKEVGRL

SEQ ID NO: 59168 - protein, 364 aa, unidentified
METSSVALPPVEADRATLFVALELSKSTWLVAVHSPGADKIGQHRLGGGDVAGLLALLERKREQAEATLGRAVRVVSCYEAGYDGFWLHRYLCARGIDNRVLDAASILVDRRSRRAKTDRLDAAGLLRTLMALERGESRVCRVVRVPSVEQEDQRRRSRERARLVVERGSHASRVKGLLMTQGVRDFEPTRRDWRERLEAEIVRECRRLHLVCAMIAEVEAEQREASDATARCAARLMQLRGIGPTIAAVLAGEVFFRDFRNRREVAAYLGLCSSPWQSGSTRRDQGIAKAGNPRARRIAVELAWLWLRHQPESALARWYRDRVGTGAGRIRRITIVALARHLAVALWRYLGDGLVPDGAVVKG

SEQ ID NO: 59169 - protein, 403 aa, unidentified
MNSVGIDISKGRSTIAVMRPFGEVVISPFEVRHTGSELSKLARQLKSLDGETRVVMEATGNYHASVAKLLHNAGLYVSVINAKLVHGYGNNELRRVKTDRKDAVKLADYGLDRWLTLPRYIPEEDTRLLLKNCYRQYRQYSKVQTVLKNNLISLLDTVFPNANRLFSSPIRGDGSEKWVDFVAEFWHCRCASEKSERAFTSKYLRWCRKHGYNFREAKAHTIYAEASGHIGVMPKSETTKLLVKQAVSQLRATSTALAALKHEMQSLASQLPEYPVVMDLFGVGPTLGPQLIAEIGDVRRFYSKKALVAYAGLDAPPNDSGDVTGRHKSMSKIGASSLRRTLFLVMSVYLQTAPLDEPVYQFMDRKRAEGKPYRVYMMASANKFLRIYYATVKAYLESLEHTA

SEQ ID NO: 59170 - protein, 318 aa, unidentified
MNTIGIDISKEWFDCLCWQRQRNRRFPNNHSGWKAFKDWIIDEKVHVIMEASGPYYLGLASYLYEQGLKISVVNPLVIRRYGQMKLTRTKTDAKDAALLAQYGIDQQPDLWSPPSKARQGLKKLMSMREGLVRQKAILTGQAEAFTQNKEIEPMVNELNGKMQKEIQKNITRIDRRMAALAEEHYQQVMEALLTIPGIGPKTAIELVTVTDGFGRFDSPRKLASYVGICPRIWESGSSVKGRGSLSKLGCPQLRKLLYMCSWSAKRSNPACRKMYDRLKKRGKPEKVIKVAIAHKLLRQAFAVGKRCEAFNEKKALAA

SEQ ID NO: 59171 - protein, 389 aa, unidentified
MKIYVGIDIAKLNHFAAAISSDGEIIIEPFKFTNDADGFQLLVSKLESFDKNSIIIGLESTAHYGDNLVRYLVTELYQVCVLNPIKTCQMRKNNVRKTKTDKVDTFVIAKTLMMQDDLRFITFFDLDMMDLKALGRFRQKTIKQRTRLKIQLTTYVDQVFPEIQYFFKSGLHQNAVYALLKEAPSPKEIASMHMTHLANLLKVNSHGHFTKEQAKELRILAQKSVGANDSAISIQITQTIQQIELLDSQLEKIEAEMTDIMKFNDSVIMTIPGIGYINGGMILGEIGDIHRFSNPNKLLAFAGLDPSVYQSGNFQAKTTRMSKRGSRVLRYALVNAAWNVVRNNATFKAYYDAKRAEGRSHYNALGHCAGKLVRVIWKMLTDEVEFNLE

SEQ ID NO: 59172 - protein, 352 aa, unidentified
MIVIGADTHKSTHVLAAVDAGTGQLLREREIVAKDAGHLEALRWAHELDGEIVWAIEDCRDFSHHLEQAFLAAGERVVRVAPKLMGASRRGEREPGKSDQIDARAIARAVLREGIERFPVAFLDEDAMEIRLLCDYREALVNERTRLINRLRINLVILDPELEASIPSRKLDYPGQRLRVTRRLRGMPQTARVRVAREQVKRIGVLTREAEQLKRELRDLVAAHRPELLTETGCGPLTAAILIGQTAGAQRFHSDAHFARMAGVAPIPVSSGRKDRHRLDRGGNRQINRALHVIAITRGRRDPATPRPASTCSERKPKARAASRRSGALSVSLHAATTDYLPTHQVRGASKL

SEQ ID NO: 59173 - protein, 359 aa, unidentified
MDATTVAVDLAKNVFELVAADQHWKVVERARLTRTQFQRWFGNRDVSLVVMEACGSAHHWARVLQQQGIQVRLLPPRYVRAYVKRNKTDAADAAALLEAVRCADIVPVRIKSVEQQAMQSLHRVRSAWVATRTARINTLRGLCREFGILISAGARLGVEQISRVLVDPHSNVPAMLRETLKLLVEEIRLLEVRIAQLERELSEAAKLSPACCTLLTVPGVGLLTATALVASTGGSVQHFKDARHFASWFGLTPKEHSSGSSRYLGRISKRGDRYLRTLLTHGARAVLRAASLAQRRGAGLDPLRRWGLLLQSRSNYNKATCGLANKLARICYASLRDQQPYQSLRLAKKLERQTFPMPA

SEQ ID NO: 59174 - protein, 441 aa, unidentified
MFEPNAAGIDIGAREIYVAVPVDRDEHPVRKCGTFTGDLHQMAEWLVSCRVTTAAMESTGVYWIPVYDVLEQHGIQVCLVNPRNMKNVPGKRTDFHECQWIQHLHAMGLLHAAFRPDGEVCAVRSLMRHRNDLVMMAGEHIQQMQKALTQMNVQFQHVISDLTGLTGLAILDAILAGERDPAALAKLRDPRIKAPEETIRKSLEGNWQAEHLLALKQRLSLYRSHRELIHACDQEIEKLVAAFEPRVNPAERPLPEDRKQKQRRRRKKSGSPDFNMRTEAYKLFGVDLTQIPGLMLLVFMLFSEVGRDMSRWPTAAHFVSWLGLCPDNDISGGRVLWRGARRTKNRAGTLFRLAAHSLHRDQTPMGDYLRRMKAKLGPAAATTATAHKIAIIFYTMVKNQVEYDASLWAKRDAMREKRIEARLQKQAAQRGYKLVPIQPAA

SEQ ID NO: 59175 - protein, 414 aa, unidentified
MGSGCEFCIGGMNVNCVGVDVSKGKSMIAVMRPLGELVIPPFEVGHTGIELCELSSRLRELGGETRVVMEATGNYHLPVASFLHDSGFYVSVVNAMLVHGYGNNSLRRAKTDKKDAIKLANYGLDHWLALPRYIPEDEVRLMLKTTYRQYQQCAKVQTMLKNNLIALLDTAFPDANRLFASPARADGSEKWVDFVAAFWHCECVCGLSEKAFAAKYQKWCKKHGYNFSQDKALDIYASACGHFSVMPKTDTAKLLVEQAVSQLRAASAALATLRNEMQSLAASLPEYPVVMGMFGVGPALGPQLMAEIGDVRRFHSKKALVAFAGIDAPPYQSGQMEVRSRSISKRGSSALRRTLFLVMSVILQHSPSDNPVYQFMDRKRTEGKPYRVYMMASANKFLRIYYSSVKQYLDSLEA

SEQ ID NO: 59176 - protein, 348 aa, unidentified
MRTHPRNAETYGIDIGKTVYHIVGADAEGRPIQRAKLSRATILTFFSNAPAALIGMEACPGSQWLARKLTALGHNVRIIPAQFVKPYVKSNKNDTVDAEAIAEAVRRPTMRFVQIRRCDQIDVQALHRVRDQLVYSRTRLICQMRAFLLEYGIPMRNGAGAFKATLPALLADESNDLTPAMRHILIDMRVDLTRLEERIDIVSEEIKAIASRDDTVRRLTSIPGVGVLGATALVAAVGDGKQFRKARDMAAWLGLAPAQYSTGGKPHLLGISKRGNPYIRRLLIHGARSCVIHLDRQRDRLGAWLDALGARLHPNKVAVALANKLARIAWVILTTPGATYERRDPRFA

SEQ ID NO: 59177 - protein, 412 aa, unidentified
MEAIVSRAAGIDIGKAVLKATVRVQGEHGRGTRREVRTFGTTTAQLLALRDWLVAEGVTLVGMESTGVFWKPVYYMLEDVAECWLLNAQHLKKVPGRKSDVSDSEWIAEMVAHGLVRSSFVPPPGIRQLRELTRYRTALTQDRTREVQRLQNVLEDAGIKLDCVVSDILGKSARAMLAALIAGERDPKVLAELALGRLRPKVGALEQALVGRFCDHHARLCSKMLAHIDSLTATIEELTGEIQTQIEPFQHIRKQLRTIPGVSDRLAENLIAETGADMSRFPTPQQLASWAGMCPGNNESAGKHFTGRTRKGDRWLRGALGEAAAAAASTKHTYLSARYRRLASRRGKKRAKVALGHDILIAAWYIMRDGVDYADLGADYFDTHVIDPRLKAARLAQQLQALGYRVTLEHAA

SEQ ID NO: 59178 - protein, 344 aa, unidentified
MEHFAGLDVSVKETSVCIVDDTGKIVREVKVASEPEALLAVLKNPAYHFKRVGLEAGPLSQWLFSALAEAGLPVICVETRHMRAVLKAQINKTDRNDARGMAQMMRVGLYRPVHVKTLRSQKLRMLLTHRKLLQSKAIAIDNDLRGTLRNFGLKVGMVGTVRFEARIRELVESLPDLAALIEPLLIVRRTLREQFCILHRRLLAIVRDDEVCRRLMTTPGVGPVVSLTYRATVDVPARFRKSKSVGAVFGLTCAKYQSGEVDWDGRISRCGDEMMRVMLYEAAQSMMRSKKWSWLKAWAMQIARRCGMKKAIVALARRLAVIMHRMWVDGTEFRWTREQSAVAA

SEQ ID NO: 59179 - protein, 422 aa, unidentified
MLGIGIDWAEEFHDIALGTQEKGVIEQFRIDHGPAGVAALIERALRIEPDPAEVRVVLETRHGLLVEAVIDAGFSVVPVNPDVVARRRGPARKKDDAEDARICCLLALDRHAALKTLIPHGQIGGELRAIARDDERATRDQRRLLNRLRADLQTTYPAALALAGKDLGAPTVLRLLERWPTQPELAEASREELVEFARLGRHGWPQRFAERVVAALATPSLPTRDYLVRAKAAGIRLAAIQLLALHEARRGWAARMAELLLGGPRTGRDHTVKEPDPGKAFPGGEIYLSMPGLGDLLAARIAGEIGEHITQFDSPAGLQCYAGSAPVTRRSGKSDFVVARRLAHNHYLGNAVHQWAFCSLLQSGWAREFYDSKITSGKSHHAALRALSNRWLEVLWHCLTKGVLYDETVHVANRNRALGHAA

SEQ ID NO: 59180 - protein, 343 aa, unidentified
MDHYAGIDVSLELSRICILDASGQILREAKVTSEPEALAAFLTGLNLPLTRVGLEAGPLSQWLYAGLHRAGFDVVLLETRHVKAALSAMIVKTDRRDARGIAQLLRMGWFCPVHCKSPPAQEVRALLTARKQLQAKMRDIELSLRGLLRGFGLKVGEISKGQFATRVRTLIAGHQMLETIAEAMLRAREALQAEFARLHRTMLAIARDDAVCRRLMSVPGVGALIAVTFTSAVDNPERFSRSRAVGSHFGLTPKKYQSGETDITGAVSRVGDPMVRTALYEAAHILLTRAVRFSALKRWALEVATRRGMRRAKVALARKLAVILHRMWIDGTTFRWGRECAAA

SEQ ID NO: 59181 - protein, 407 aa, unidentified
MDLLKTVFGIDVSSRKSNVCIMVNGQKVNDYAISNDMVGFNQLLGDLKQVTKPQIIFEATGVYSRRLQAFLDMHELRYVMMNPLEAKRKTKDDLHQNKTDKLDALYLAKLQSEHPQRMAYVQSKEYQELMANNRIYEQASHDLITNKNRLHKAIQLTFPEIEHLMANPRGKNYWSIVLKFPHPNIVLETKEADIIDFLKSLSGIGEKRANDLAQRLIRLAKLACPAVKKSSAHIRGLEMAINNILSAEEECQSALQEMAKLAPKRDLEILTSIPGIGENTALRIISELGDIRRFNNPSQLNAFVDVDPQVYESGNLTAHLSISKRGTAIGRKVLYLAINQIQSAKKAGNPCHIADYYEKRKRSSETASHKKAAIASIHKLLRTIFALIKNDQLYSYDVAKHNQRLLS

SEQ ID NO: 59182 - protein, 431 aa, unidentified
MPSKKQNTSTVSVVHDICCGLDVHKKTVCACLLWSDASGAEQCEVMEFETFTDDLFRLKEWLMERECPVVAMESTGPYWTPIHNILEGFFQVILVNARHMRNVPGRKTDLSDSRWLAGLLRHGLLKAAFIPPKYQRQWRDLTRMRNKYQQTVGHFKRRVHQLFQQANIKIDSVLSDLFGLTGRNLMKLLTSKKATPSLSEVEQCLRGSLKAKRTEVYRSIQGFFEKHHRDMLALMLETIEKLESQVKELDHRIVQAMRTYQGKMDLLDEIPGISDISGPAVLAEVGPTVEAFPNADALSSWCGLCPGNNQSGGKRFSGKSRVRKNRLKTIMIEIAWPAIKKKGSYYRAKYYALKARLGPKKAIVAVAHRILKAIYHVIKYDTPFKDLGEAYLLEKNKDAKIRYLTRQAALLGFELVPAHQAPAQPQQPIFP

SEQ ID NO: 59183 - protein, 336 aa, unidentified
MTIIRVGLDTSKHVFQVHGVDENEQPVLRRQIRRGAVEKFFAKLPSTRIGIEACGASHHWARLLRGLGHEVLLMPPQYIKAYVKRSKNDKIDAEAICEAMSRPTMRFVPVKTAEQQAALTMLGVRDLLVKQRTMLINAIRGHAAEFGVTAAKGPKQITELLARLASDEHVPGLAREMIGVLASQLNGLDIKLKALEARLMTWHRQDQTSQCLATIPGIGPIGGVSFAFKVPDAKAFRSGRRFAAWVGITPREDSTAGRQKLGRISRAGDEDLRRLLVIGATAVIRAAKPGRTAPWLMGLLARKPKKVAAVALANKMARIVWAMMVSGETYRRPAQA

SEQ ID NO: 59184 - protein, 391 aa, unidentified
MIYVGIDVAKDKHDCFITNSDGEVLFKSFTIPNNREGFEALFQKVQSVSDDLTKVKVGLEATGHYSYNLLGFLLDKGLPTYVINPLHTNLYRKSLSLRKTKTDKVDAHTIASMIMSDVNLKSYSDTSYHNEELKSLTRYRFDKVKERAILKQSISRLICILFPELENLVPTLHMASVYALLSEFPSAHAIASAHLTRLTNLLSESSRGRYGKDTSIMFRDAARSSIGSNMPAKSLELKHTIKLIQELTSEIDEIETEIKSIMDEINSPILTIPGISYSMGAMIIAEIGDFSRFDSADKILAYAGMSPSTYQSGQLDNCYSHMEKRGSRYLRYALYNATKYVCHWDESFGAYLAKKRSEGKHYNVALSHATKKLVRTIYAMEKTGQSYSNAS

SEQ ID NO: 59185 - protein, 397 aa, unidentified
MYIVGIDIAKRKHEAAVIDGDGAVIIKPFSFTNNCSGYNRLLAMLAKAKLPLDEVSFAMEATGHYWLALFTRLQKEGFRVQVINPVQTNSIRSFYIRQAKTDPRDALLIAEVIRFGHFSESTLHPENIYELRELCRGRHAIVSMQADVKRKVVALLDQVFPEYETAFTNMFSDTSMAILQTCPTPKELSEMPLEELCHLIEVSSHKRFRMAKAQELQALARNSFGFAMAGDVFSTMIRLYAKHLDFLKQQVREMDRKIAEIMDTLDTPITTITGIGPTLGAYILSEIGDINRFSSSAKLAAYAGIDPTMRQSGEYNGVRNRMSKRGSPYLRHAIWLATSSAVLHDPALKLYFQKKRDEGKPYMASVGHACRKMVSIIYAVMRDNKAYTPYIPNKISA

SEQ ID NO: 59186 - protein, 395 aa, unidentified
MNTSYITVGIDIGSFQHRVAIADPNGNIIDEFDLAHHKLGFCDFFKRLAEHEKRMGHPVAIAMEGFNGHARPLDTQIRMRGYPLYNVNNLKLARFKEIFPGPAKSDPIDARKILELFQLRTHLPVAKDVLQEVAACPAVNEQLKRLTRRRRQLVNDKVSLVNRLQADLKAVVPGLLEITGSIDNRWFLNFLTYRKELASLARIQKKSILGIKGVGDTYAEKIVQWQNTAYFAPEVDWVGDMIIEDARRVLELMNSIERLEKQIEPLVQDSEIAGYIQSIPGFGIISSAELAGEIGTVERFATESSLALYIGMAALTNQSGACKGTKTPRQVNKRAKAAMMVAVARHINHVPSSKRYYDKKRSEGKKHNQAIRALGRHLTRVIWALIKNQRDYEMR

SEQ ID NO: 59187 - protein, 453 aa, unidentified
MTQKKNSIAKDSPLPVIQPDAAGLDIGADKIWVSVPADRATPSVRSFGTFTPDLHTLAEWLKICRIQTVAMESTGVYWIPIFEILEAAGFEVYLVNARHIKNVPGRKSDVQDCQWIQRLHSYGLLSASFRPEAEMRALRAYLRHRSMLIEYRAAHIQHMQKALQQMNVQLTQVLSDITGVTGLEIIRAIVQGERDPLKLARFRDPRCKSSADEIAKALTGNYRAEHVFALQQALGLYDFYTQQLHACDQQIEEQYSVLKPRFDDDLPPLPPDRKVNSHSKNAPDFDVRGHLYRLTGVDLTRVDGLDDSTVQLVLSETGTDISKWRTEKHFCSWLGVAPHNDITGGKVTRSRTLKVHNRAGQALRLAAQSLSRSQSALGAFYRRMRARLGGEQAIVATAHKLARIIYHLLKHRQPYQQVSAKEYDQQQCDRHLKSLQRQAAQLGYALSPLPSPI

SEQ ID NO: 59188 - protein, 321 aa, unidentified
MTNGTHNPRFIGVDVASRHVDVAAYGQTKVLRVSNEPQALTRWLKTVPAGSVLAMESTGRYHLLLARLAHERGLRVYVLNPRDVRHYAQGIGQRGKTDRLDAQLLARYVAHEHVQLHAWQPPAPELQRLDDLLRHRAAVVRHREALRQSLSQDKSVTGLMTSLLGPFDQAIKALDAQLRQAIAALPEGKSAVARITSVPGLGLLNGAALLRLFTRLGSVSVDVVIAFTGLDPRPMDSGNKRGVRRLSKRGNSELRRLLFNAAMSASRTDTWRHFYQRELAKGLPCTAALVVLARKLVRVAFSLFKSGSLFDPAHGLPPSMA

SEQ ID NO: 59189 - protein, 333 aa, unidentified
MTAVLTIVTAYVGIDVAKTKLDVVLRLGERAIHQVFANTAEGFTALDAWLSSFGLSPVQVRICLEATGSYSDALALDLFARGYTLSVLNPAVLVDYRRSQNIRSKTDKLDAHLLARYAQEKQPRAYTPLPDEIVTLRALLHHRDDVQHMLRQERNRLEAGRMTQAIQQRVRTHVEALQAEFKTTEGEIKAHLKAHAHLKAIWQRLQTIPGIGWLTAARLLAHLGEIERFEKVGSLVSLAGLAIKEHSSGSSVRGKAEIDRHGRKDLRQTLSMSALVAKRVSPHMQGWAKRLQAQGKPKKIILVAIMRKLLHIVYGVWKKEQDYQPALAFPVAA

SEQ ID NO: 59190 - protein, 349 aa, unidentified
MLADVVDAVIGGDTHRDTHTLEMTTPAGATITTITVGNDEAGFVEALAWIAEHAPGPRLVVGLEGTRSYGIGLARAAAAAGLRVVEVERPRRAARRRGKSDPIDAHLAAVHVLQLDADRLPTPRADGAREALRILLGARAEITTARTAQINRLRALLLGGDDTDRALARGPLTQARLTAAARRRGRTHDHVTDTIRRAEIRRLAAAIHTATGHLATNKRQLTDLVTTIAPALLDKTGVGPVSGAQTIVSWSHPGRCRTEAAFAALAGVNPIPASSGRTTRHRLNRGGDRHLNRALHDIVKTRWRVCPRTHHYITRRRAQGKTDRDIRRSLKRYVAREIYRTLNTTATTT

SEQ ID NO: 59191 - protein, 406 aa, unidentified
MRSIALDIHRDFCEVAIKEGGEVRSRGRIKTSPEDLKLFAQSLAADDQVALEATGPASEIARILEPHVARVLVANTRKVRAIAESKVKTDKVDAHTLCELLDAGFLPAVWRPDEPTRALRALLGRRERMVRSRTRAKNAVHAALQRNLKGRPPMSDVFGVAGRHWLAALELPAHERRIVESCLREVDFLSREIGALERELARLALSSEAIKRLMSVPGVSLISAATFVAVAGDIGRFSSPKKLVGYVGLDPKVRQSGELPARHGRISKQGSAAARHMLCEAAWIVVRTPGPLRAFYQRLRARRGPQVALVATARKLCVLFWQLLAKEEDYAFGRPSLHRHKLRRLELAAGDPPRRGRRSGSAASKREQRHERELSEQFELAYRRLTDDWQAKPKRSGAGATRGRAS

SEQ ID NO: 59192 - protein, 350 aa, unidentified
MKEYIAFDSHKHYTLVEWEQVGSGRTRQRRVEHQLGAIRGCLAGCEPGTPVAVEATGNWYWIVNEIEEAGLQPRLVHPRKAKLMMGMINKTDKLDVHGLNRLQRNQTLPAVWIPPGPLRDLRELTRFRMVLARHRTRLKNRLQANLAKFGLRLAEKVSDLFVTKVRPALEKLLERLPEQTRWTSQVMLKQLDQLNEQIGELEGRLAQLLKVTPPMELLLSLPGIGPILSAVIWLEVGSIDRFADGPHLASYAGTTPRVHASGDKTRYGRLRTDVNRYLKWAFVEAANSVAIHSQQCPDRHVSQLYGRLRARKGHPKAIGAVARHLAEATYHVWSKQEPYRDPLLGRISKG

SEQ ID NO: 59193 - protein, 342 aa, unidentified
MDHFAGLDVSVKETSVCIVDDTGKIVREVKVASEPDALLAVLTNPGYHFKRIGLEAGPLSQWLFSALAEAELPVICVETRHMQAVLKAQINKTDRNDARGIAQMMRVGLYRPVHVKTLRSQKLRMLLTHRKLLQSKAIAIENDLRATLRNFGLKVGMVGTVKFEARIQELVEKLPDLAVLVEPLLIVRRVLREQIVILHRRVLAIVRDDDVCRRLMTTPGVGPVVALTYRATVDVPARFRKSKAVGAVFGLTCSKYQSGEIDRSGRISRCGDEMMRVMLYEAAQSMLHSKKWSWLKAWAMQIARRSGKKKAIVALARRLAVIMHRIWVDGTEFRWTRETAAA

SEQ ID NO: 59194 - protein, 313 aa, unidentified
MKQSHRVIGIDVSKKKLDIAIRHDQKYWSIDYNDKEVISLVKQLQEYNPSLIVVEATGGLETALVSQSVVAKLPIVVCNPRQIRDFAKATGKLAKTDRIDADVIAHFGEAIRPEVRPFKDEQTQKLTDLLTRRRQLVNMLTAEKNRFQQASKNTKGNIKIHIVWLEKQVSKINSNLQELIKNSPIMSRQDEIVQSVPGVGPVMSIAFFSGLPELGKLNRRQIAALVGVAPFNRDSGLFKGKRTIWGGRAAVRSVLYMCALTGIRCNPVIKAFYQRLIKAGKMPKVAITACMRKLLTILNTMVKNNTVWNPKSA

SEQ ID NO: 59195 - protein, 328 aa, unidentified
MECLSVGIDVSKRELVIAVHPTGDQWTTATTPAGIATVVKRLQTLGPGIIVVEATGGYERALVAALAVAELPVAVVNPRQVRAFAQAIGRTAKTDAMDADVLALFGGRLDPAPRPVTDMATQTLAALVARRRQLLEMIGMERGRLEHAPPTGHLTRELRRHIRWLERRVKDVDDEIGTCIAAHPTWRVQEELLRSVPGVGPTTARTLLGELPELGQLDRRAIAALVGVAPFNCDSGQQRGQRHIWGGRASVRATIYMAALSAARYNPVLRVFYRRLRDAGKPAKVALVATMRKLLTILNAMLKHQSPWATQVASTPASLSGPARAATV

SEQ ID NO: 59196 - protein, 395 aa, unidentified
MFIVGIDIAKRSHEAIIIAEDGQVVRKAFSFRNNCTGYNLLLEQVRRLTLVKSQIVFAMESTAHYWLALYARLLKDGYTVMVLNPIQSHSLRELYIRKAKTDARDSLIIADLVRFGRCKASNVPQDKILALRELCRSRAYRVDMAADLKRKLIALLDRIFPEYESLFDSVFSKASIAVLSKYSTPQKVKNANLRKLTDILMESSNGHFGEWKAHQLKEAACSSFGIDDSGGVYSTLLGMFLEQILSLTAQADSLEKQISVFFQEFNNPLTSIPGVGTVLAATILSEIGDITRFSSADKLLAYAGLDPSVKQSGEFKSNQNRMSKRGSPYLRRAIWLASTVAVHRDPMFQTYYEKKISEGLHYMNVIGHVSRKMTAVIFAVLRDGQPYQPILQSAG

SEQ ID NO: 59197 - protein, 386 aa, unidentified
MQKLNDLSRSLIALEPAGTLIAVIEMSLSSWLVAGIVPGVERQPLKKLAVDESALLKLLHRWREEAEKAGRRIERIVVAFEAGRDGFWLARWLKAHSIEAHVIHAASVAVSREHRRAKTDRLDTELLKRAFLGWLRGERDHCKVVAIPTLKDEDAKRPNRERESLVGEQSRIVNRMKAALIRLGIRGFNPKLKRAAGRLDSLRTPEGEPIPPNTLAELRRDMERRRLVSNQIRQIEEARLERFEHAPNDGPHAMVRLLARVVGVGIETADMLVHEVMSRNMRDRRAIARYAGLTAHPTRAAEKRREKGLARSGNGRVRRGMVQLAWRFLTYQKESALAQWFRTRTENALGARKPMIVALARKLLIALWRLVWQGVVPDGVVLRPAQ

SEQ ID NO: 59198 - protein, 469 aa, unidentified
MRKKTTKEPQKPQKEKTKNVVEMPLVNVHAAGIDIGDKEHAVAVPGPGGKQKVRTFGTMTSDLKEIIAWLEEEGINSVAMESTGVYWKPLFSMLVKESFEVLLVNSRHVKNVYGRKTDEDDAMWIQKLHSCGLLRSSFLPDAEQEDLRKLTRHRRTLTEESSRFINRLQRSLELMNIKFHTVINDITGKSGLAVVEAIIAGERNAENFLPLIDGRVKADAQTICRSLEGNWHEKDLFILKECYESYKFFQSRIAVCDKEIETQLLKYEAYCNDGEIEIKKERSKAPVKAIPDFKKKKKGKNHPKFDIRSYLYRIYGIDVMAMSGLNEMGALTLLAELGTDLKNKWPRVEQFISWLNVCPNNKISGGKLISSRLMKKKANAASQAFRYAAGGVQNSKSWIGDYFRRSKAKGGFQYACIAVAKKLATIFYHIVCNKVDFNPDLQDKYQQAHNQRKIASLEKRLAELKREAA

SEQ ID NO: 59199 - protein, 467 aa, unidentified
MAHVGGQLQAQFMARIRGRDPQRCLVVPVDVGKSAAMALVADHYGEMVVEPFEFPLTETGFGLLSTAVARASAVRCAEIVRVGVESAGHYHRTLVARLRAEGFEVVELNPAGVKEARAQQLLRRLKSDARDLGAMAELMVRGGGRCPAIRTDALATQAAWVAHRRRKVAARVALANQVIGELDLVFPGLDGCFSDLLRSKAGWVLVTDICDPDRVRRQGVEGLRRFIARRGVALSCPKSVQVVEAARVALRLPAAERAALGRVLAADLALLASLETEIVAAEAALTEVLGATPAAVLTTLPGVAVVRASNYGAGIGDPARFPNAAAAYRSAGLVPASYESAGRSRPRQHISREGSVELRQAIIELGRGLAQHEPDFIAYRRKLLHANKPASVAAVAVGHRAHRLAFAMLRDQKAYDPAKWSAAVAAGMTAMAKTEKAHQNDVTCPPPGTSVVEGGERHNTNHRRAQG

SEQ ID NO: 59200 - protein, 487 aa, unidentified
MPQLAKNATLRWPAASEPARQNSPRRRSKARRRAKDPTEGLQVANPNAGAVDIGCAEHWVAVPPSRAEPPVQAFGCCTAELKRLADWLGQCGVDTVVMEATGNYWVVLYDLLESRGLKPVVVNPRYAKNMSGKKGDIPDCQWMQKLHTYGLFANSFRPGPEIRVLRAYLRQREMLVGAASQQIQHMQKALTEMNVQLANVISDISGESGLAIIDAILAGERDARALAKLKNSRIVASLATLARALEGHWKDEELFRLEQARLSYAHFLEQIQQCQERIEQAMRAIESREAGSALISRAAGDAATEGVGSGVAAGLDSSFDLGAELRRIIGVDLTAIDGIGPVAAQVILSEVGCDMSRWPTEKHFASWLGLCPDHRISGGKVLGRSTRPVVSRARNVLRLCAYTLTHSQSWLGAKYRRLKAKLGAPKAIVAMAHHLARLIYRLINKGEAYVDKGMAVYEAKYRVQRIKWLEKQAKELNLQLVEQVSVA

SEQ ID NO: 59201 - protein, 343 aa, unidentified
MHTITTIGLDIAKSVFQVHGIDAQGQVVTRRQLKRRYVLTFFQKLAPCLVGIEACASSHHWSRELKALGHTVRLMPPAYVKPYVKRQKNDAADAEAICEAVTRANMRFVATKTPEQQSCLMLHRTRHLFIRQQTAVINAIRAHLAEFGIVAPVGRNGVEELLDVVADPSDKRVPEIARACLLALGAQLRKLKEQILEFDRMIRAWHRSSEMSMRLDEAPGIGPVLATALVATVTDPKAFRSGRNFSAWIGLVPKQHSSGGKDRLGSISKQGDRYLRSLFVAGALAVIRYAKIHGTKHRPWLTALLARRPTKVAAIALANKIARMAWAMMAKGERYKEPVALAA

SEQ ID NO: 59202 - protein, 354 aa, unidentified
MPETAQKTIAVVGIDIGKNSFHVVGLDERGAIVLRQKWSRSQVEARFANMPPCLVGMEACVGAHHLSRKLNSLGHVARLMPAKYVRPYSKGQKNDFRDAEAIAEAVQRPTMKFVATKTADQLDLQALHRVRERLVSQRTGMINQIRAFLLERGIAVRQGVRFLRAGLPGILARPPDVLSPRMARVIEDLATDWRRLDARIAGLSSEIEALARQDSGCERLMSVPGIGPIISSATVAAIGAGDAFSKGRDFAAWLGLVPRQISTGDRTILGKISKRGNRYLRVLFVQAAWVVLIKPKSWERHGLKPWIEAARKRLHRNVLAIALANKLARIAWSVLAWGRNFEARKIDDAAAQPV

SEQ ID NO: 59203 - protein, 352 aa, unidentified
MGIVVALDVHRKQITYKTLDRETGEVKRGRIAPAARADMRAWLARFAGCEVEFALEGTTGWRFVVEEIERAGHRAHLADPAETAAKRGRKRRAKTDSADCDLQLRLLCAGELPESWIPPAHLLELRTRVRMRKTLVDQRTAWQQRLQAQLFHQGVPAGLRPRTRAGREALVRAELSPAGRELVSLALRMIDAIDRELAPLDRQLCSFARRQPGCRALIARLYGVGPVCATAILAELGDCRRFARSDDAVRHSGLDVTVYQSDEKRAPGRLSHEGPELLRWALFEAALSAARAGSPDHGYYLQVAERIDHNRACLSVARKLCRRAYHILRELGDEALAPVEGDPYAEEAIAAA

SEQ ID NO: 59204 - protein, 442 aa, unidentified
MATKLVNPNAAGIDVASNEHVVAVREDKSKDSVRTFKGFTRDLHQLAKWLLSCKVETIAMESTGVYWFDLYTILLDYGFEVYLVNAHHVKNVPGRKSDVSDARWLQQLHTFGLLRASFQPDNLTRSLRNHVRQRKNIVQQMSRQTQHMQKAFDQMNIKLNNVIRDLNGATGTKIITAILEGERDPKKLAQHRDRRIKASEQTLIKSLEGNWREEQVFNLQLAYDHYIFLQQQLKQCDAESEKIIQKMTSGNSPKSRTKKIQKSKNNPDFDVAQYLHAALGVDVTQIYGIKEVTALTIFSETGANLKEKFPTEKQFLSWVNVVPNNKITGGKVISSKVKKKKNVAGQAFRDGASALWRAKNPIGDYLRRKKAKSGAKKAVVATARKIAAIYYKMVTEKVEFNPLELTKGKEQYLQKRLKQLEMAKEQTQMQLSDFQQQNSLVI

SEQ ID NO: 59205 - protein, 345 aa, unidentified
MAGGDAAYQLYVGIDIAAETFTAAWRTPAGTPTAAFTGEQTPTGFAALQRRLATSRVGSAEVLVAMEATGTYWVALAVALHEAGYRVAVVNPRQAHHFAQAQLRRAKTDALDAQDLAQLAAALRPAPWAPPPAVYHEVRQRLVARDGLLAMRTQARNQRHALLQWPVVVAAVREHLDELIADLDRRVAALEAELAAVLKESAWAESLACLTSAPGIGLITAAWLLVSTLNFTLCAGPDTLTAYAGLAPMPRESGRSLRGRARIGHDGNGRLRTALYMATLSAARYNPAIKAFYDRLRAAGKPMKVARCAAARKLLHQAWALGSRLQRFDPDHKQQQHATLPQLAA

SEQ ID NO: 59206 - protein, 326 aa, unidentified
MTAHVGIDVSKATLDVMLLQDEQQYHGIFDNHPTGFGKLIRWLEKRCPSSVHVCLEATGRYGQAVVTCLHETGCTVSVVNPARLKAFADSQLSRQKTDKADALSMALFCRSQRPDPWTPPDPAQHELKAMVRHLDALQAMRQQERNRLSSGVNAPAVIETLQQHIAFLDQQIDHLKQRIKQHIDQHPHLKQQSELLLSIPGLGEATVAVLLAEIPAIQAFDRAPELAAYAGLTPQHHRSGSSVHRPSHISKRGNARLRRALYFPAMVAMRHNPILRAFAQRLQAAGHAPKSVIVAVRRKLLHLAYGVLKSGQPFDPEYLSKHPLAA

SEQ ID NO: 59207 - protein, 347 aa, unidentified
MRFYKRQHNYYCGIDLHARKMYVCILDQTGKTKVHQNIKTDPEQFFELIFPYLDDVVIGVECVFCWYWLADLCAEHQIPFTLGHALYMKAIHGGKTKNDKIDSYKIALLLKGGNFPTAYPYPAKWRATRDLLRRRMYITRRCAQLVAHIQNTNTQYNLPAFSKKLSRKYNHEGVAERFEDPQVKKSIEVDLAMIDSFNQILKPLEWHIEKTARDHDYHTLYLLRSIPGVGQILALVILYEIHDVKRFPRVQDFSSYARLIRPVKESDGKWAGHSNKKIGNHHLKWAIKEAAILMLRDSAQAKSYLARYQRKYNKGKALGIFTHKLGRAIYFMLKNKEAFDMKRFFAQ

SEQ ID NO: 59208 - protein, 307 aa, unidentified
MRFYTKQHQFYCGIDLHARTMYLCIVNRDGEILLHRNMPAGPDPFLKAITPYREDLVVCVECICTWYWLADLCARAAIPFVLGHALYMKAIHGGKAKNDKIDAQKIAVLLRGGMLPQAYVYPADMRATRDLLRRRMHFMRKRAELLAHVQNTNSQYNLPEIGKKIAYKANRDGVAERFPDPAVHKSIEVDLALIGHYDDLLHDVELSILKAAKQDNANTFYLLRTVPGIGEILRLVLLYEIHDIQRFSRVQDFVSYCRLVKCAKESAGKRYGTSGTKIGNAYLKWAFSEAAVLFLRNNPHGQKYLPR

SEQ ID NO: 59209 - protein, 338 aa, unidentified
MNISLVGLDIAKSIFHLVGLNQAGKPVKRKILKRPHLLRFFSQLGPCTIVMEACGSAHYWAREFQKQGHQVKLIAPQYVKPFVKGNKNDYNDALGIAEAGQRPNMRFVPIKALEQQDIQMVHRLRERLVKNRTALVNQIRGLLAEYGIVIRKGIYAVHAELPLILEDAENGLTVMARESFNALYAELLELNVKHRACEKKVIEINKANEICLRLDEVIGIGPVTATAVYAAVGDGRDFENGRHFSAWVGLVPKQHSSGGKANLLGISKRGNAYLRTLFIHGARSVLQYVDGKDDRFSRWARALVERRGKNKACVAVANKLARMAWVIMAKGERYRVAE

SEQ ID NO: 59210 - protein, 411 aa, unidentified
MENVFSCCAGLDVHKESVEACVRRIEPNGRLHQQTHHWGTMTCDLLAMADWMTAQGVTHVAMESTGVFWKPIYNILEGHFTMLLVNARHLKQVPGRKSDVRDCQWIAQLLQYGLLKGSFIPPRSQRELRDLTRHRTQLVEEKARAANRIHKVLQDTNIKLSSVATDVLGASGRAMLEALITEEEDPVKLADLAQRKLRGKIPQLEKALEGHLTEHHRFMLKLLWKQLAQQEELIAELDRKIEEQTRPFEAEIDRLDAVPGVDRRVAEVVLAEVGPDMKAFPTHENLVSWAGMCPGNEESAGKRVRKRITPGNRWLKRTLAQATWAASHSKNSYLAAQYRRLAGRRGKKRALIAVGHSILVIFYHMLKTGTTYTDLGGDFFDRLEPQRLTRYYVKRLESLGHKVTLESCAAA

SEQ ID NO: 59211 - protein, 349 aa, unidentified
MRFIIGCDFHPGYQQIAMLDTQTGEVVERSLAHENKEEVRKFYAGWPEPARVGIEASGSSQWFERLLVELGHQVWIGDAAKIRRMENRKQKTDRRDALLLLDLLRQGRFPSIWVPTPAERDARQLLLHRHKWVRMRTQVKNQLQAMAMSQGVRKKKKLWSVAGRAELEKLSLPPWTHRRRHDLLQLLDDMQPGILELDRDVTEQAAARPEARRLMTHPGVGPVTALAFVLTMGPVDRFSRGKKVSSYLGLIPSEDSSGGRQRLGHISKQGNAFLRGLLVEAAQSAVRHEPEMRRQYRRLAQKKGRAIAKVAMARKLAVRLYWMLRGGKDYAQLVQVRVQDSSSHSVVEV

SEQ ID NO: 59212 - protein, 319 aa, unidentified
MRDITQTAGIDTGKKKLNLGFWPKAERLVVDNAPEDFERLAAVLDKHNIKRVGIESTATYHLAVSEFLRARGFEVIVLQPLQVKAFAKVHLQRAKNDKMDPEMVAGCAAIQTKVHTPHSPEILRLAEHLTFIEQCDDNAARLKTQLERFTNEQYRKKIKQEIARFRLMVRRELKMLEKELRLNRLLSERLDLVLSIPCVGLRSALATLIRMPELGTLSREQAAALLGVAPMDDDSGDHKGKRFIQGGRARPRKTLYMAAFSGAMHHNPQLKAFYLRLIKRGKEHNLAVVACMRKLIIMINAVLQRGTPWKTHEGMPCPQ

SEQ ID NO: 59213 - protein, 363 aa, unidentified
MSKLLYIGMDVDKQKIVAAKLTSSAKVSQECVIANTPQAVRKYFAALTKEADVVAAYEAGCFGFGLYHQLTDLGVAAVVAAPGLIPRKPSDRLKTDRRDARTLALALRAGQLTAVHVPTKQDESVRDYLRMCEDMRDDLRKCKQRILHLLLRRGIRYEQGGPWTVKHKDWLATLDLGSELDRQTLDSYLARLQELESTCSQLTAEVESIAQGERYREPVRTLSAFKGIKTLIALSFITEIGDFRRFSSAAQFMAFLGLVPSEHSSGNKRRQGGITKAGNSHLRRLLVEAAWHYRSYHPSSRVLIERRRGVDPRIISYVNRAGRRLNRKYLHLLLRGKRSQLAVTAVSRELAGFIWGAMVGQVA

SEQ ID NO: 59214 - protein, 342 aa, unidentified
MEIKTVGIDIGKTWFHLVGCNRGGTPVARHKLNRGKLAMFIAKLPACLIAMEACPGSQHLARAFQRHGHDVKLIAPKFIKPYLKGQKNDFNDAAAIAEAVTRPTMRFVTIKSNEQLDMQAVHRIRDRLVGQRTAVINQIRAFLLEYGLPIKEGRASLNISLPDILEDATNGLSHRMRQLVAELRSHWAAIDAQITDYTHEIQLAARRSDDCQRLLSIPGVGPLGATALVAAVGNAAAFSKGREMSAWLGLVPRQHSTGGRPTLLGIGKRGNSYVRRLLIHGARSLLKNMHRNDNELGSWLNKLQERVHRNVAVVAVANKIARIAWAVLARHDIYRPSAAAAA

SEQ ID NO: 59215 - protein, 386 aa, unidentified
MPKLNDLSRSLTVLKGDSTLLAVIEMSQSSWLIAGIVPGVERQPLKKLAVDESALLKLLNRWREEAEKAGHRIERIAIAFEAGRDGFWLARWLRARDIEAHVIHASSVAVSREHRRAKTDRLDTELLKRAFLGWLRGERDHCKMVAIPTLAQEDAKRPNRERESLVGEQSRIVNRMKAALARLGIRGFNLKLKKAVERLDGLRTPEGEPIPPNTLAELKRDMERRRLVRSQIRDIEGTRLERLEQALGEGPHVMVRLLARVIGVGVETADMLVQEVLSRNLRDRRAVARYGGLTGAPDESGKKRREKGLARSGNARVRRGMIQLAWRFLMFQKDSALARWFYARTKNAPQTRKTMIVALARKLLITLWRLVREGVIPEGIVLRPAS

SEQ ID NO: 59216 - protein, 386 aa, unidentified
MSQSSNILLRSINYDHTLVLAIELSNKSWVLAVQVPGLPQTKAQRTIEPNKNALLAAIDGYRARAAALGYVVERVITTYEAGWSGFWLARWLVAQGVEVHVVQPSSVPVDRRMRRAKSDGIDAELLLRTLLAWLRGEPRVCSMAPIPDEADEDARRCVRERTELLSERVGLTNRIGAVLATLGVGDYNPLLQSRRRRLAELRTGLGEPIPPNALAKIERLLTRLELVLAQIAELERERDEVAAADAPDRAGKMIQQLASLRGIGVQSATVLVREAFVRHFSNGKALGSYAGLTSTPYSSGGINREQGIGKAGNRRLRTVMVELAWLWQRYQPGAAQVAWFRDRVGSTGRRIRKVMVVALARKLLIALWRFVIDGVMPEGAVMKPSI

SEQ ID NO: 59217 - protein, 323 aa, unidentified
MSASSVVVGIDVAKTHVDVAVLGARLEAQRFDNQAEAHSALAAALKPLDVALVVMEATGGYETQLACALQAAGLPVAVVNPRQARDFAKSMGRLAKTDAVDARMLAEFAAVLLRREDLARFLRPLADPQQQWLAALVTRRRQLLAMLLAERQRLQITPRGLHPSIEAIVAAIKAQLDEIEGQMVGHVREHFTELDRLLQSASGIGPVASATLIAELPELGRLNRREIAALAGLAPMANDSGSSKGRRRIQGGRFDVRRVLYMAALTASRRNPVVKAFYERLIAAGKCPKVALVACMRKLLTTLNAMVRTRTVWHADHRSAAKT

SEQ ID NO: 59218 - protein, 327 aa, unidentified
MEHCSEVFVGIDVAKARNAIAVADGERGGEVRFFGEVDAAEESMRRVVKRIAASCDRAHFCYEAGPTGYGLHRLIISLGHPCTVVAPSLIPRKPGDRVKTNRRDAIALARLLRAGELTAVWVPDAGYEAMRDLVRARAAAVETQRVHRQQVTSFMLKHSRVFSRPKAWTMRYLRWLQEQTFDHPAHQIALQEMIEAVRTSKERVQRLEAAIEEFVPTWSLAPVVRALQALRGVDLIVAVTFVTEIGDLNRFESPRQLMGYLGLVPSERSTGDTVKRGGITKAGNGRVRHMLGESAWTYRLGSERRSSTRWSRPRPGCARSPGRRRLG

SEQ ID NO: 59219 - protein, 316 aa, unidentified
MRKRETFVGIDVAKKDLEVAVLPGTDTRTWPNTEEGLVLLVEWLKPLRPAIIVLEATGGLEMPCVGTLAAEGLPVVVMNPRQIRDFAKATGRLAKTDRIDARVIARFAEAVRPKTRELKTAEMQALTALGVRRRQIIQMITAERNRLTSASKWTREDIRDHISWLQQRLDDVTDELKKAIRNSPVWREKDDILRSVPGVGPIVSATLLSQLPELGSLNRRQIAALVGVAPLNRDSGLSRGKRSIWGGRATVRCALYMATFVATRFNPTIAAFYQRLRIAGKETKLALTACMRKLLTILNAMARDRARWAPVGLRES

SEQ ID NO: 59220 - protein, 308 aa, unidentified
METVQFEQLISVGCGIDVHKDVVVATIRKSDTNYQTKSFSAFTSSLIDLKDWCKKEGVTHIAMESTGIYWKPLFNILEEDFEIILVNARHVKNVPGHKTDKKDSIWISKLLLSGLLKGSFIPPVEIRELRDLVRYKKKKTQFISSEKNRMIKFLEDCNIKLSSVVSDTQGVSATKIINDIIDGKDDVTSLLTHAHYKLKASKEDIAKALTGRITPHHRFMLKMIRETIDENEKLIVKLDQQIDLSVEKYQIELELLQTIDGVGRDTAITVISEIGIDMGRFENEHHLAAWAGLSPGTNETAGKKKAQE

SEQ ID NO: 59221 - protein, 353 aa, unidentified
MTIVVALDVHRRQITYKTLDRESGEVRRGRIVPATRGAVREWLEQFAGREAEFVLEGTTGWRFVVEEIEQAGHPAHLADPAETASKRGRKRRAKTDNADCDLQLKLLLAGELPESWIPPAHILELRTRVRTRKLLIDQRTAWQQRLQAQLFHQGVATGLKPRTRAGREALARAELSPAGRELVALALRAMDAIDRELAPLDRALRSFAHRQPACRALIANLYGVGAISATAILAELGDCRRFASSDDAVRHSGLDVTVHQSDNKRSAGHLSHQGPELLRWALFEAAHQSARRGSPDHAYYLQVARRIDHNRACLSVARKLCRRSHHILRELGDAALAPVERERQTGEAIQAAA

SEQ ID NO: 59222 - protein, 340 aa, unidentified
MDMTTLGIDIAKSVFQLHGIDADGAVVVQKKLRRGAVLNFLGKVGPCLIGMEACATSHYWAREIAALGHEVRLIPPAYVKPYVKRQKNDAADAGAICEAVTRPNMRFVPIKTEEQQSVLVLHRARDLLMRQRTMILNAIRGHLAEFGIIAAQGPRQVMGMIARLRDDGDASLPEIARSALLALGAHLEALAGEIRALERQLIVWHRADPTSQRLETIPGVGLITATALAASVSDPSVFKSGREFAAFLGLVPRQNSSGGKDRLGRISKMGDRYLRKLLVVGATSVIRRAGSNPTKTGAWVRSLMERKPARVVTVAMANKTARIAWAVMTRGEAYRASPIA

SEQ ID NO: 59223 - protein, 362 aa, unidentified
MAQVRSWAGLDVHAASVLAATVDSESGELVTRRLPGRTSDVVAFCAGLPGPVRVAYEAGPTGFGLARALEAAGVGCVIAAPGKIERPSSDRVKTDKRDAERLLRLLMIGGLHAVRVPSVVEEALRDLVRAREDVRGDLMRARHRLSKLLLRHDVRFDGTAGAWTTHHRTWLGQVDLGERGAQVTITDYLGAIDALLVRRATLESAIGQLVPDSPWAQSVARLRCLRGIDTLSAVGLCAEVGDFARFQRPGQLMSFLGLVPSEHTTGSTRRQGAITKTGSGHGRRLLVESAWHYRRSPRKGDALRRRQAGQPPHVIAISWHAQQRLHRTWQRLDHERGKRRTLVAVAVARELAGFCWATANAD

SEQ ID NO: 59224 - protein, 336 aa, unidentified
MNDATWFLGIDVAKRKLDIALLVTDKIKSKVFDNNTSGHAALTRWLIERGAIQSHTHICLEATGPYSEALAIALVDAGWHLSVVNPARIKGFAQGELARNKTDRADASMLARFCAAMRPGFWTPPSSEWRELRGWVDRLQALKDMHQQERNRLEAHLASGQAALVTAVQTHLDWLTKHIEQLERDIDDHIDRHPELKRDAELLHSIPGIGNTTIAKVLAYAGDVRRFASAKALAAFVGVTPRQRLSGTSVKGRSMMSRTGHADLRRALYMPGLVARRHNPLLKVFGDRLSAAGLAPKAVVGAVMRKLAHLIYGVIKSGQPFDPKFYTARLDFQDGI

SEQ ID NO: 59225 - protein, 350 aa, unidentified
MVVVGADVHKRTHTFVAVDDVGKKLGEKVVAATSSGHAEAVMWVRERFGAAMVWAIEDCRHLSARLERDLLTAGQKVVRVPPKLMAQVRASARSRGKSDPIDALAVARAFLRDPDLPVASNDEVSRELKLLVDRREVLVAQRTATINRLRWRVHELDPERAPRPNGLKNAKHRDMLRAWLETLPGLVAELARDELADITRLTETINALAKRISERVRAVAPALLAVPGCAELTAAKLVGETAGVTRFKSEAAFARHSGAAPIPVWSGNTAGRVRLTRSGNRQLNAALHRIAVTQIRLDGLGQTYYRKRLQVGDSSAEALRCLKRRLSRVVFSRLHTDHQNRTQPCQPAAA

SEQ ID NO: 59226 - protein, 356 aa, unidentified
MTSSVKYIGMDVHKESISIAVRNSAGKVVMESVIETKASMILQFIDGLRGELQITFEEGTSAAWLYDLLKPRVTKLVVCDPRKNKSMREGNQNDKIDARRLAELLRLDHLTAVYHGEHGLRTLTELVRSYLTITRDLARVKSRVKAIYRSWAIPCTGKQVYAQCHREEWLGKITEPGVRRRAEFYYRQLDALRGLRQEVRRDLLAESKKHKAWKRLGEIPAIGPIRAAVLLGILQTPYRFRTKRPLWNYGGLAIERHSSADHRSVNGQLERSRKNVLVRGLNRNCNHDLKNLFKGAAAVASSKPGPFQEFYTALVAKGMRPEMARLTLARKIATIVLIVWKKGVCFDASHLKPQTA

SEQ ID NO: 59227 - protein, 435 aa, unidentified
MPTIAYVGLDVSQDDASVCFLLADGAEPIPRWTSANTQPGAEALAATLAELAHRYHVDQLRIGMEATGLLWWHLACMLKDAPALSPFAPQLYALNPHLIKTFRANYGALPKSDYADAFLIAERLRFGRQLPSPFQLDARYAPIQRLTRFRCHLAQNLAREKSYFLSFLFLTFSTYGQIAPFGDPFGATSSAVLEEFTTEDLAQQSLENLATYLQQKGRGRFADPGALAATLQRAARDSYRLDKVLQEPLRLVLGTTLATIRTLQSQLKTLDKTIGQELAAIPQTLASVPGLGPVWTAGLIAELGDITRFDDEAAIAQYAGLTWERSESGQFQAEDTELTKRGNSYLRYYLVEAANSVRQHCPDYGRYYAAKYAQTPKHAHQRALVLTARKLVRLIDVLLREGKRYLAPEERPVRQALTAPHPTRPARQRRSRRAG

SEQ ID NO: 59228 - protein, 410 aa, unidentified
MRYYLGVDWADQTHAVWGVDEAGTKIAARTVPHTAEGLSEWGRELDEWRAQGIALWAAIERPEGRVVDFLLDHGVVVYPVNPKALDRARDRFRQSGAKSDPFDARVLADFLRTDHAHLRALQPSSDAAQELKLLAEDYQRHIRQQNRLVNQLTATLKAYYPRALEVTELTTALAREFLQAYPTPEAVAVLTARQWQRWARARRLSEARTRALWDVLQQPQLPVPAHVVRAKARLMLTLVAQLTPVVAAVGAYREAIEDFFASMPAAQWVRTLPIGNHGITAPTLWARLGDAPGRWESFRHLQAHAGTVPVTKRSGKQLRVVHFRFACDKALRYVVDHVAFLSLHSSEWARAYYDEQRARGHSHRQALRALGAKWLKIIFVMWQRQVLYDEQYHLATMTRQQLRQRQKEIA

SEQ ID NO: 59229 - protein, 411 aa, unidentified
MEIVHTRCCGLDVHKKTVVACVLISQEDGLIERQVRTFKTMTADLLALADWLSSLNVTHVALESTGVYWRPVYNVLEDDQRTLLLVNPQHMRAVPGKKTDVKDAEWLADLLRHGLLRASFIPPAPIRVVRELTRYRKTVVQSRADEANRLQKTLEGANIKLASVATDVLGMSGRAMFAALLDGERAPEVLADLARGKLRAKLPQLRQALVGRVQPHHLVLISQILAHIDFLEEAIAQVQAEIERCLPPFDEALELVQSIPGIKEVAATAILAEIGTDMSRFPSAGHLSSWAGLCPTNKESAGKRMKGPANHGNVWLRAIMGEVAWASIRTKASYFYAQYHRLARRRGKEKAAIAVAHSLLVVIYHVLRTGQPYQELGVDYFDRLDSARVERHHVRRLEQLGFTVTLTPTAA

SEQ ID NO: 59230 - protein, 356 aa, unidentified
MPSITPDDTVIEVFGGVDTHQDTHTAAAIDQLGRVLGTHEFPATAAGYADLLAWIRGHGRLVRAGVEGTGAYGAGLARLLRNEHVTVIEVDRPDRKTRRFQGKSDPIDAIQAARAALAGERTGTPKQRDGHVEALRNLRVARRSAVDQRADTQRQMKTLIVTAPDELRARLRGLSVKQLITVCANLRPERTDAVTPLTAVKLALRSLARRHQQLSVEITDLDELLEPLVAAINPGLLAANGVGAEVAGQLLVSAGQNHDRLTSEAAFAMLCGAAPIPASSGKTTRHRLNRGGDRQANAALYRVVLCRLRWDPRTRDYMQRRTQEGMSKKEIIRCLKRYVARELYQLITTNDLELAA

SEQ ID NO: 59231 - protein, 381 aa, unidentified
MTTLATRNTQEHTTEGTLFVAFELSEKTWKLGFSTGHGQKPRERTVTARQQEGVLEEIAQAKRRLGLAETAPVVSCYEAGREGFWLHRLLQAHGVTSHVVDSSAIEVNRRQRRAKSDGLDVRKLLRMLMRYHAGERQVWQVVTVPSVEAEDQRHLHRDLETLKQERASTTTRIQGLLRSQGIRVTSLSKLPEQLDALRLWDGSPMPPGLRRRVLRVYAQHTFLSEQIAEVEAERRSQLQASTDARIDQVRQLMQRKGMGINGAWLLVMEFFGWRAFKNRREVGGLAGFTPTPYQSGESAREQGITKSGNRHVRWMTMELAWSGLRFQPASALRVWFRARFGSGGARLRRIGMVAVARKLLMALWRFLKTGVVPEGAALQKA

SEQ ID NO: 59232 - protein, 399 aa, unidentified
MNAVGIDVSKGKSTVAVMQPLGVVAASPFEVAHNESELRELAKFLKRLPGETKVVMEYTGSYYEPIARFLHNEGIYVSVVNAILIHNYSGSSVRRAKTDKKDSVRIAQYALDRWLDLREYIPAEETRSTLTLLNRQYSAICKHKTQLINNLISLIDQSFPNANEFFDSPVRQSDGHMKWVDFIIKFPHCDCVSGISRAAFKDKYSRWCKKQNYNYADGKADEIYDHARSCVATLPDSECVRAMIQQSAKLLNSTLETAESLRKLMTATAEQLPEYDTVLGMYGVGRVLAPQLMAEIGDTRRFHSRKAITAFAGLDAPPYQSGTVDVKSRSISKRGSPHLRRTLFLVVETYLKRKPADEPVYQFLDRKRSEGKLYKVYMTAAANKFLRIYYAKVNQVLNA

SEQ ID NO: 59233 - protein, 416 aa, unidentified
MSLALPEALFFTGIDWAAETHAVCVMDAGGTIAAEFTIEHSADGIAALIRRLARHGQPGGMPVAIERPNGRLVDLLLEAGYPVVPVSPNAIKTWREGEVLSGAKSDAGDAAVIAEYLRLRQHKLKTAAPYSDETNALRTVVRTRDDLVEMRVAATNQLSALLEAHWPGAKAIFADVESPVSLEFLTRYPTPAAARNLGEKQMAAFCIKHGYSGRRTAAELLTRLRAAPAGTTGAAVTEALRDAVLAAVGVLTALNASVKNLDRSVAAHLGEHPDGAIFTSLPRSGQVNAAQVLAEWGDCRQAYDGPDSVAALAGVTPVTRQSGKHRDVHFRWACNKRFRKAMTTFADNSRHASPWAAKIYNDARAAGKDHPHAVRILARAWIRVIWPCWLSHTPYDPARHGAAAALTAALAEPIAA

SEQ ID NO: 59234 - protein, 368 aa, unidentified
MKNVTTYVGIDAHKKDLFVAMLIGHEKTPVMWQLANEPRAVHRLVRKLERQAPGPIHVFYEAGPCGYALQRQVTTSRVSCDVVAPALIPRKPGERVKTNRRDARKLAELGRAGLLTVVQPPTPEDEAVRDLARARDDAREDLQRCRHRLGKLLLRRGLHYAGRNWTRAHRQWVDSLTWTHAAERAVVDDYLRAIDHTETRLQELDTQLAEIAETEPYREPVGWLRCFRGIDTLTAILILAELHDFRRFASAPALMAYLGLVPSEDSSGDKHRRGRITRTGNTLVRRLLVETAWHYQHQARVGAALTRRRQRQPGRVIAIADKAQQRLCRRFRKLAAEHKPGPKIAVAIARELAGFLWAALQPAAVPVN

SEQ ID NO: 59235 - protein, 341 aa, unidentified
MVKTPAITGGVDTHADAHAAAALDGIGGLLGVSEFPATPAGYARLLGWLNSFGTVCLVGIEGTGSYGAGLARHITAAGIRVVEVDRSDRQDRRRKGKSDPLDAVSAARAAQSGRASGAPRGRDGAVEAIRALMIAKRTARAQRTQAINQARALILTGPDDIRTRFTRHGPAELVAELAALRPRPGSMVRYHTLLSLRELGRRAQFLDDQLERLDLLITPLVTARAPGLLKLYGVGPDTAAMLLIAAGDHPGRLRSEAAWAHLCATAPIPASSGKVTRHRLNRGGDRQANHALWRIVITRMSCHPATRAYVQRRTAEGLSKKEIIRCLKRYAAREIYPHLPG

SEQ ID NO: 59236 - protein, 355 aa, unidentified
MKRTTKYVGLDVHQATIVAVVRDETGRVIARTILPTEAAALTAFVGPWRGRVEVAYEEGTQAQWLHDLLRPLVARVVVCDRRAVRRQGNKSDWRDAEELAAMLQRGAIRSVYHGGGPQQAELKELTRTYVTLVQDATRVMTRVKALYRARAIPTRGRGVYHAGERATWLAKLPAGGVGFRATTLYRQLEVLLALRASAKAALLGAARRDPAWALLQTIPFLGPVRVALLLGIVQTPWRFRTKRHLWAYAGLAVVTRTTAEYTLEGRTPVHRRRAPLTRGLNRNHHRLVKALFKGAATAATARPGALQDWYQERLARGMRDELARLTLARKLAALTLHVWKTGEAYDPAKLTRPAG

SEQ ID NO: 59237 - protein, 343 aa, unidentified
MYFIGLDVHKKTISFCVKDAAGQVHQQGKVAATRRDLDGWVRTLPQPRMMAMEATMFTGWIYDYLLPHAEKVKVAHPLMLRAIAAAKKKNDKIDASKIADCLRCDFLPECHIAPTEIRDRRRVLRYRNLVVKQMVQMKNRVSGLLMETGVSYNKQRLHKVGYFGELMSTNADISDAVRPLLNLSRGMIRRSGKLEYDLVSSLERDPLLKERLRRLRTVPGVGSITALTWALEIGDYTRFSSNKQAISYCGLCADEKSSADKVMRMPLSSQRNKHIQRVLIEAAKLAPRESPELAMIRTRELERGNPNRATLAVARKMVCYMLAVERRQQDFVPAGEIIPTAAA

SEQ ID NO: 59238 - protein, 386 aa, unidentified
MNQIIRIGVDTSKSVFQLHGVDAAEQPVLRKQLRRRDFVKFLAKLPPTRIGLEACGGSHHWGREISALGHQVVLLPAQYAKQYLMRGKNDAADAEAICEAMGRPRVQTRFVPIKTADQQAAQMLIGMRDRVVRNRTQLSNAIRGYAAEFGLVTAKGLDKIEPLLARIAGDPGVPALAKELFAAHGVEFAQLKARLRAIDARLTAWRRDNELSKRLMEIPTVGPIGAMRLAIKVTNPKAFRSGRDFAAWIGLTPKDHSTAGKQRLGVITRAGDESLRQNLVLGATAVIKQVRNGCPGASPWLVELVNRKPPKLAAVALANKIARIAWKLMVSGECYNPEAGAIRLVPATGSVAPGSRRQGRCAPPSAVALEASLDHARRWRSGLPSR

SEQ ID NO: 59239 - protein, 359 aa, unidentified
MRIIGCDLHARQQTLAMLDTATGEVVKATLKHQDNVVREFYCKLPRPVRVGIEATGSMQWFVNLMEELGIECLVGHPAEIRAAEPRKQKHDRRDADLLLSLLAEERFPAIWLPTKELLDLRALLRHRHQWVGLRVKIQNALQAIALANGLRRGSSLWTRAGQQAIASLPLSPHAAYRRNELQAMYRKLETEIEKLNRRVEEQAGERCGARLLMTHPGVGPITALATDVFLGDPTRFADSKELASYVGMIPGEYSSGKRQRLGGLTKQGNPLLRFLWGEAGIHAVRRDPELKHFYNRKLIQKGLGKARAAVARKLGIRMWIMLRDRIEYPEFCRRGQKQQTNGDACAGMPAARYGAKVTG

SEQ ID NO: 59240 - protein, 353 aa, unidentified
MLAEMVDHVVGVDPDRDWVTAAVVEASTAGVVATGRFPANAAGYRQVVAFADGYSTDTERAWAVEGTQSYRRGLTAALTRGGEWVIEFDRAHEKPAKDGSKTDELDAIRAARETLGRTRLASPRTHQGIREALRVHIVARDTAVRARTAAINELKAFVVTADDTLRAELRGLGTAGLVQRCSRFRHSTSRSVDQACTRTVMRAVARRVIHLNDEIATHHQALIGLVDQAAPQLVAEVGIGPITAAAFYIAWSHPGRCRNEAAYARLGGVSPIPATSGQTQDRHRLNRRGDRQLNKALHHVAVTRLRCHPPTRAYKQRRSAEGKTDREIRRCIKRYIARRVWRLLEHQPPQTTT

SEQ ID NO: 59241 - protein, 383 aa, unidentified
MNRLLKYSVGTDVSKDKFDACVSVIDDLQQVTIKASRAFKNNPEGFEDFLAWVKRHCKQGLPISYIMEATGVYYEKLAIYLSNNKCYVSIVLPGKSKHYLKSIGLKTKNDKIDAKGLSRMGAEQRLEQWQPYSKSIYKLRSLTRQNESLNKQKTIYTNQLHSIEHSGYMNKTVVKQIKQFVNLIDKQLAEVSQEIEKTINQDIEIRDKVKKICKVKGLGMLTVATIIAETNGFVLFKNQRQLVSYAGYDVIENASGNHIGKTKISKKGNSHIRRILHMPAFSVVKYEQHYKGLYERVFDKTKIKMKGYVAVQRKILILIFTLWKNDSEYNPNCNKSSGNDEPKLLFSLGFEKAVKKVVPEKCSRTTQDELPCNESPEVLFSLA

SEQ ID NO: 59242 - protein, 348 aa, unidentified
MEHIGIDVHKNQSQICIITSEGEMIEKRISTERDRFQAALGSHPGTRILIEASTESEWVARCLEGLGHEVIVGDPNYAPMYGQRTRRVKTDRRDARALAEACRSGTYRRAHRTSDERRHLRGQLAVREALVRTRTRYISLIRSLLRREGLRVRSGSAERFLERLAEVDLRDHLRHEIQPLLKVMGPLGKQIACMDRQVEKLASEDTEVRRLCTAPGVGPVTATSFVATLDTAERFRGAHQVEAYIGLVPREKSSGEKQSKGRITKSGNNRTRWLLVEAAWILLVRSKSAKAQPLQAWALRIAGRRGRHVAVVALARRLAGILYAMMRDGTEFNGMRLAQPTDRLSATA

SEQ ID NO: 59243 - protein, 331 aa, unidentified
MKFKSFIGIDVSKSTIDAYLKINQLHAVFDNNEEGFKELVEWVMENSGLVLAEDLFFGFESTGIYSSELALFLEKHALPFYIMSGLELKRSLGIRRGKSDKSDSKDIAEYLYEKQEKIEPTVLPSQTIQDLKKLFNYRERLVKARAAFTTRLNEYETIVSQNKLKVYQKSHTTVITCLDKQIETIEKEIEKLLHKEELLLNQYKLLNSIKGIGPQTALALIILTEGFTLFNSWRKFASYAGTAPFPNQSGTFNGRTKTSKLANKRIKTLLTLCAGTAIQYSTEMKNYYQKRIGEGKSKMSTLNIIRNKLLSRAFAVVNRNSSYVDTLKYAA

SEQ ID NO: 59244 - protein, 453 aa, unidentified
MEILYTHCAGLDVHKKTVKVCLLTQGSNGQPHKEFRTYFTTTEELLKLSDWLKEQEVTHIAFEATGVYWKPVFNLLEGNFEILVVNAQHIKAVPGRKTDVRDAEWIADLLRHGLLKASFIPSGPQRELRELTRYRVKLTEEKAREINRVQKTLEDTNLKLGDVVSDIMGKASRMILHAIADGEKDPSHLAAFALGRVRASQEQLEAALTGHVTDHHCFLLREHLTQIHHLEQAIDRVTAEIIRRFTPPSSPEEPTSAAQKEDQTTPERTSDPSSASQEAPVPPKAALSWAQAVVLLCSIPGISERSAIGILAEIGTNMQQFPTAAHLASWAGVCPGNHESAGKRLSGKTRKGNLFVRCLLVQAAHSASHQKQCYLAEQYRRIAKRRGAKRAAVAVAHSILVIIYHLLSDQTTYLEKGELFFEERDREGTQKRLVRQLFRLGYQVELQPIAQAG

SEQ ID NO: 59245 - protein, 394 aa, unidentified
MIYVGIDVASTKHDIVISSESGELFKKAFSIKNDLDGYKKLLSEISSAKEFFNDLNVRIGLESTGHYSRNILHFLILARFEVMFINPLLTNMDRKAASVRKTKTDAIDAKAICMFLIRNQNDFKPYTLSSYHIDELKTLVRQRKSLKTQINKEMNLLHAYVIQAFPEYYRIFKKINSKASMEVLNRYASLSEFKRVRLETLKELIRKSSQGRHGIREAQMLKELNSSSIGIDSSALSFSIKQTIKRILMIKEQICDIEREITHHVDESHTTLLSVPGVGYTTGAIILAEIGDIHRFKTDDQLLAYAGLDPSVYQSGNFEGSYKISKRGSSILRFAIYHVAQAAVKFDPVFKAYYLKKKAEGKRHRVIIGHVTKKILRVIRSILKNNSTYSINTH

SEQ ID NO: 59246 - protein, 327 aa, unidentified
MDNFYFIGVDVSKKKLDFCVLFEGKVLREEQVSNHQQAVARLIGELKNDLEMDNEQFLICAEHTGQYTFPLVCACKSVECKLWLENPSQIKYSSGMQRGKNDKVDAKRIAIYASRFGDKVKYYDRPSEEIERLKQLERERALYVTDLAKYDQKDFMPAALYRKKTKRMKGLIQELQAAIDAITAEMEKIIGSTEVLARQMELLMSIDGVGKVVALNVIIETEAFSRFDNPRKFCCHAGVAPFSYTSGSSQHSKNKVSHRANKNIKKLLHMAAVSVTHRKEGELKAYYMRKVEEGKNKMSVINALRAKIVARMFAVIKRNEFYTPIYS

SEQ ID NO: 59247 - protein, 461 aa, unidentified
MGRARAKRIPAKVVEDEEYQLTHERSCGIDIAKDKADIAVRLPPEREGGRRRTRTWTVAATFANITELGTELLGARVEIVVMEATSDYWRSWFYLLEAMGLNVRLVNPSDARQLAGRPKTDVLDCQWLARLAEMGLLRPSFVPPPAVRALRDLTRTRLHLTRDRTREWQRLEKLLEGALIRISSAVGKMAGNQSALRILQAIADGERDPAALAATAHGNVKGGRDGIRAALEGMMPGEHHIELIRVHLRVITMLEQEADRVDDLIAAHIDAMEDAWGVTADGVPSPHPGPDAAVLTAATRLAEIPGVSPELAVSIIAETGLDMTRFPAAAHLVAWAGLSPVSRQSGKQNKKAKKGKGDACLKGYCSQASLGASKTPTFLGERYRRLARRIGAPRAQTAVARSILVITWHLLADPAARFTDLGPDWHLRKTDRARRTRSHIQQLRALGYDVTLTPAGADPAA

SEQ ID NO: 59248 - protein, 349 aa, unidentified
MNEITTVGVDLAKNVISVCGLDGQGRVVLERSMSPNGFARWAEGQNACVMGLEACGSAHHWARTLAGHGHDVRLMPAHLVSPFRMSRAAKNDRNDAQAIAVAVRQPTMRFVQAKSVDQQCMLAWHRLRDGYRVERTALINRTRGLLAELGVWVGRSPEQLLRVLPRLIAGEELPVSFRQLLEQALHHLQQLGEQMAGCEAHICAHAKQHPDAVRVQKISGIGAITASACVATITDPSAFRNGRQLAGWIGLVPRQSSTGGKTRLGSITRRGDTYLRGLLVQGARSALQSALRARPEKRSGLQQWICALNTRVGYHKTLVAIANKHARILWVILARGEHYNPEAAAPAAA

SEQ ID NO: 59249 - protein, 387 aa, unidentified
MQVSTVDTPTAGYCGTIFVTIELSQKTWLVTLHSPDRDRISRHKLEGGDRAGLLALLERIRGRAAGKLGSAPKIVSCYEAGYDGFWLHRLLTAAGITNYVFDPSSIAVDQRARRVKTDRIDGETMLRTLMAYLRGEPRVVRIVRVPTPEQEDARRDTRERDRLTKEQTAHTNRIKALLRLHGFAVGQPRRRDWLSWLAAQRDWQGQGVPPRVLSEIENEHARLMLVRKQLAALARTPAAADPAPAVAEMVRRSELLQRLKSLGLVFAAKLTQEVFYKDFRNRRQVASYFGLAPSPWQSGGTDRDQGISKAGNPRARCSAIELSWLWLRHQPDSELSQWFRQRTLNAGRRTRRIAIVALARKLMVALWRYLTTGLVPAGAVLKSAEAS

SEQ ID NO: 59250 - protein, 335 aa, unidentified
MKEITTVGVDLAKSVFTVHGVDAMGRVVLRKTVRRAQLVELIAGLPPCLIGMEACGGAHEWGRKFQLCGHRVGIMMARFVAPYRKSSKNDGNDAEAICEAVARPNMRFVPVKSAEQQAILSLHRVRQGFIEQRTATINRIRGLLAEFGVVLPQRAEQVRRAAVVMAEGLPVLAREAVADLRTHLTYLDERITRYERQLVSLARQREAAVRIQRLPGVGPLTASAITASISDGHEFANGRQFAAWLGLVPRQYSTGGKARLGRITKRGDPYLRTLLMLGARAVLQNAAPKTDRLSRWALALRARRGYHRAIIAVAAKNARIIWALLAKNREFVLPA

SEQ ID NO: 59251 - protein, 309 aa, unidentified
MEHFIGIDVAKDRLDVHTRPGGEVFAVARDSNGLAMLVERLQRLAPALVALEATGGYETVVASALGAAQLPLAVVNPRQIRDFARATGKLAKTDRIDAAAIAHFAEAVRPPARPLADAEARALGELVARRRQVIEMTIAERHRRRMASQRRVIRAIERHLALLQAELSELEGDIDDAIRKSPAWQADADLLASVPGVGKVTLRTLIAELPELGHLNRRKIAALVGVAPINCDSGTLRGRRTIAGGRPAVRTALYMAALVASRANPVIAAYYAKLRAAGKTGKQALVACMRRLVVILNAILRDRKPWQPA

SEQ ID NO: 59252 - protein, 318 aa, unidentified
MPQESRIVGIDISKRKIDACIRSLGLWQTLASTPEGHEELVGWLRANGVDTAMMEASGGYERPWAEALRTAGITVRIVDPKRVKYFAKSAGRLAKNDRIDAETIAWFAETFPVGVALPHDPERAALERLVKARASLKDLETRLTQQGEHQQPSLVSKAHGRILKSMRAERRKLEAAIAAKIKANPVLARRAEIIESVPGLADLASAGIITWLPELGEVPNKAASALLGAAPFDDDSGARKGKRFIKGGRRKLRNLLYMPLVGAVTQHNPVLKAHYLSLIARGKEPKVALIACMRKLIVILNTMLARDQTWNPPAQATA

SEQ ID NO: 59253 - protein, 344 aa, unidentified
MTNIQHKETAHETKPDLFAGIDVGAEELILVIRKNGKLFDPQKFANTPADRDRLVKKLVKLPGIMVCLEATGIYHFDLSLALHDAGVLLMVVNPKASHNFAKVLMKNSKTDAVDANTLAEYAARMDFVAWTRPSDETIALRSFARRINALTGQKAAAKNHLHALNATSETPKAVLKDAKLAITQLEKRIDRLTDEALVLIGKHPELKRILALLIGIKGVGETSAIALMGELLLLPPDLSHREWVKFAGLDPRAFDSGKSVHKQTRISKAGSRHIRAALYFPALSAKQHDKHVKAYFQHLMDNGKTPLQGVCAVMRKLLHAIHGMLKNNEPFDNTRFYAIPESNG

SEQ ID NO: 59254 - protein, 394 aa, unidentified
MKLVGIDVGKNSHHFCVMDKETGELNVTPSSFSNNKEGFDFLINSLKPYSKKSILLGMEDTGHYHVALLKFLLSNGYTVALINPKTTDLTRKMEGGITKNDKLDTITICDVLDTPERKKQYRITKVDRFDLYEQRQLTRHHHNLKEELNVYCNRLQKSIDLVFPEFNTLFSSKYSIVYMNLLKTFGSAEAIASTDIRTIRKCFEVKGRGGRISLTPEKLKECAKNSIGISSEVETIQIKHLVNQITLIKEQIAEIDKKIEEFSIKNNSPILSIPGISHFSGTSILAELGDIGNYSKPSQIIKFAGVAPYHYESSQYNAQHTGITKKGSKYLRKTLYQIILTVINNNPVFKKYYLLKISQGKGHRCAQGHCIRKLLRIIYHLLETGQSFDPALLR

SEQ ID NO: 59255 - protein, 347 aa, unidentified
MLADQLDYIVGVDPHRDSHALAIVEVVSGVVVFESTVAANSDGYRRALEVAERHAPGRRAFAIEGTGSFGAGLTRFLTCRGERVLEVGRLRRERRSGGKTDALDAVRAARSVLTQQRPAIPRAGGERQALQALVAAREGAVNAKRAGLCQLRDLLITTPEPLRSELRPLTRARLLQRLAATRPHGRHDPELRGSMLALRSIARRVLQLTAEERELARQIETLTRGLAPQLLEQPGVGPHAAAQLVLSWSHHGRISSEAAFARLAGAAPIPASSGQTIRYRLDRSGDRKLNRALHMILVTRKRTHPATIAYIERRLAEGKTRREANRCLKRYLARNLYRLLEHPPQTT

SEQ ID NO: 59256 - protein, 351 aa, unidentified
MNTNAAKPTVTTIGIDIGKNSFHLVGLDRRGEIVLRQKFSRGQVEARLANMPPCLIGMEACVGAHHLSRKLLALGHDAKLIPAQFVKPFLKSHKNDFKDAEAVAEAVQRPTMRFVPIKSIEQLDLQALHRVRARLVSHRTAVVNQIRAFLLERGVAVRQGIRFLRHSLPDILANRGDVLTPRMARMIEELAQDCHRLDTRVDDVTEEIEALVKKDEACERLMTVPGIGPIISSATVATIGDGSAFRRGRDFGAWLGLVPRQISTGDRTILGRISKRGNRYLRMLFVQAARVILLRPANWYKYSFGRWLEAAAKRMHHNVVAAALANKLSRIAWSVLHHGRGYEARIGMQAA

SEQ ID NO: 59257 - protein, 423 aa, unidentified
MFIVGIDVAKRSHEVCMITSDGQTVQRPFSIRNNCTGYNLMLEKIRKHTNIKSQIVFAMESTAHYWLALFTRLRKDGYHVILLNPIQTSAMRDMFIRKIKTDAKDSFIIAELIRFGRYAESNVAQDRLLALKELCRNRFYLVDMAGDLKRKLIALIDRVFPEYEAQFDTIFCKSSVAVLKKYPTPQKLSNAHLDKLTELLWNSSNGHFGEWKARELKELARNSFGVEDCDGAYSTLILLMLDQIQSLSGKADALEKEISQLFQSFDTSVTTIPGVGPIIGAVILSEVGDISRFSSADKLAAYIGVDPSVNQSGEFQAAHAHMSKRGSPYLRRCIWMASQVAVQRDSMFRAYYEKKAAEGLKYMTIIGHVTRKMTAVVFAILRDHSARQIVELQGRNDIVFVHQIIFLLCHTHHLPAFSASSIP

SEQ ID NO: 59258 - protein, 344 aa, unidentified
MKITTVGIDLAKNVFQVHAVNEAGKKVFNKQLRREQMAEFFAQLPPCLVGMEACGSAHHWARKLTSYGHTVRLMAPQFVKPYVKTNKNDMADAEAICEAVARPNMRFVPIKDVEQQSVITLHRVRQGFVKERTACANRIRGLMAEFGLIIPQGIANVAKRVPDLIEDASNELTGMFRQMIDRMLQHMLALDRQIDEIEALIKAWHRQNKASRKLETIPGIGPITATALVASIGDARNFDNARQLAAWLGLVPRQHSSGGKNNLLGISKRGDAYLRTLLIHGARAVIYARQKSSEKTGWLNQLLERKKPNIAAVALANKNARIVWALLTKDCVFQLDHQGAQALV

SEQ ID NO: 59259 - protein, 339 aa, unidentified
MDHIAIDLGGKESEICRRGDDGRIIEQIRRPTARLSSYLKRRPPSRVILETSAEAFKIADAAIELGHDVRVVPATLAPSLGIGSRGIKTDRRDAQLLSEISTRIALPSVHLPSPTSRSRKAACTAREALVNSRTQLINMVRGWLRTQLIKLPSGDSTTFPRRVRSKVLDQPEGLPEFIEQALRVLDVLNQQITLADDELEQIALSDPLCLRLMSVPGVGPVTSIRFVAAVDEVSRFPNAHALQSYLGLVPGEHSSSNKKRRTGITKAGPPRVRWALTQAAWSLRRARKLDPLSLWAQSVEARRGKRVAAVALARRLAGVLYAIWRDGTRYEPSRLRLPT

SEQ ID NO: 59260 - protein, 339 aa, unidentified
MTVKTVGLDLAKDVFQVHGISENGRVIFNKAIKRAKLLAFFEALPPCRIGMEACGSSHHWGRQLRKLGHEVKLMPAGYVKPYVKRGKNDAVDAEAICEAVRRPTMRFVEIKTEEQQAILSIHRTRDLAVRQRTQMANMIRSLLREFGHILPIGIEAVTAFAKRHLDGDHPDMPEIANGLLGIQCYQFIGLNARIEGYSKMIGQHAPVTADARRLMRMPGIGPITASAIVATIGDAKQFRTGRDLAAWLGLTPLNKSSGGKERLGKITKQGDRYIRKLLVVGMTSRAVMAKRSPEKVDLWTAKIIADKPFRLATTAMANKAARSIWAMLTKKQEYRQPAF

SEQ ID NO: 59261 - protein, 366 aa, unidentified
MYIVGLDVHAKRSSMCILDENGKLVKHLEVKGSWQRMLQVVDEQVPKPFAICYEASCGYGYLHDQFAKRAERVTVGHPGQLRLIFRSKKKNDRVDADKLAKLLYLKEVPAVHVPGMDVRAWRGLINYRRKLIGRRAAVKTQIRAHLRGLGIAVGVKGGLWTKKGIAWLSEQAMSSSAADGLRRDVMVDDLTELEAKVRKVERELDRIGRAHPGVTLLRTIPGVGPRTAEAFVAHVDDVSRFARVKQVGSYFGLVPCQDASADRNRLGHITKDGPAPVRWLVAEAAWQGRRRSPKIRAYFDRVMRGDPQRKKIALVATAHHLTRVMAAMLRSGEVWREEEPQQPQTPPPASDQQEAKKTKTKTSNKE

SEQ ID NO: 59262 - protein, 420 aa, unidentified
MSFKIIRKNCCGLDVHKTWIYACIGIADSHDRVEYKQARFSSFTKGLNELCDWLAKYNCTDICMESTGKYWIPVFNILEKHNLWVTLSHPKYTKPQTGNKTDRKDAKWICDLYMCGMVKPSFIPPADIRQLRDLVRYRFKLTCMITGEKNRAHNCLTVSNLKLDDVFSDIFGKSSRSITEQILQHPGEFFDVTPFVDDRCKTPIEEIQAAVDGAISPEQAVKLRQCLEHIDELEKHKSEIEREIFRLSDKYEVALNLIRTVPGFDKNPLTAIQVLSEIGSDMSVFPTAKNLVSWAGCCPRNDKSDRKIKSTRISRASTYFKPVLVQIANALIKSKKHPEFTTRYRRIKARRGHKKAIIAICRMILTAIWHILTDLKPYTPEGFLESRPVNEAKVLTASQALNLMRQRGYIIKDDMSPVMN

SEQ ID NO: 59263 - protein, 332 aa, unidentified
MITEMNIGIDYHQESLQVCAMERDGKVIFNRRIKNDVNAIIEVVGKRSCKVVAVAEACNGSAAFLDELQAKAGWQVKLCHPGYAQRMRSNPDKSDKSDSELVADLTRVGYLPEVWLAPAAVRDLRALVRYRAQKMEEQRAVKLRIRSLLRNNRICLPVKLSLWTKAGISWLESNAELPSHSAWVLSRHVIELSHLQAEIKITTQRIKSYVDEDSLCQKLLQHKGIGVITAAVMRAEIGTFSRFKNGKQLARFCGVSPCNRSSGEIVSDSGLIRSGNPLLKLCIIQGALSLVRYDDTYKTFAQTMLARGKPKCVVIAAVANRWMRRLFHLVQQ

SEQ ID NO: 59264 - protein, 332 aa, unidentified
MYYIGIDLHKQDLVMAVEDERGPVGRARRIACRDVQAIRSAVERWRPFRAVVEASASYRWLYDLVSPQGEVVLAHPLRLRAITAARAKTDRLDAAMLARLLRANLIPAAYVPPARYQTLRDLTRLRARLSYGATLAKNQVHALLARANVHPPFKTPFGVRGRRWLAGLDLGLSGNLARDELLRRLEHYGREIAALDAHLEGVAAEFPEASALEVLHGVGRYSALLVVAEIGEPERFRNPRQVGAYAGLTARVHQSGGHEHRGGISKQGSRWLRWILVQAAMKLVRRDERLANFYQRVRKRAGRNVARVAVARKLAGICWVRRRAWRRARAAA

SEQ ID NO: 59265 - protein, 316 aa, unidentified
MAKHTTICAGIDTGTRQLDVAIDGRAEQLQVNTAHGHEKLIEWLRQHRVKRIGIEASGGYERAVVAALRRNRFVVVVFQPAQVRAYAAFHLQRAKNDKIDAALIASCTAAVKKIHAPPDPRLEPFADHLTMIDQISEDIARLKTRREPCRDPRIRQLWKEEIARLKKLEKTELKGLAAAIRAHHDLAQRLDLIHSIDGIGLRTAVAILVRMPEIGRITREQAAALAGLAPYDDDSGNLVGVRHIAGGRERLRGALYAAAFAAAFHWNPQLIALYKRLNRAGKLHKVALIARARKLLIYANTVVARGTPWTTQAAAA

SEQ ID NO: 59266 - protein, 339 aa, unidentified
MMYGAIDLHLRYSELRVVEADGRVVRERRVVTSRETLTAACAGLGELRVLLETGTESEWVAQALEQAGHDVVVADPNYAPMYGEVRRRVKTDRRDVAALAEANRRGWYRATHRRSRAQRTLQQILRSRRQLVAMRTGSISVVRALLRQEGYRLPSGSAAQVPARLARVPLPDELAATLAPLRQVIDTVTRELAAIDTRLRTTAAADPVVTRLQTVPGVGPVVALTFRATLDEVTRFQAAGQVSAFLGLVPREDSSAERRHRGHITKAGSGELRSLLIQAAWACWKSRGSGTLRAWAERLAGRRGRRIAVVALARRLSRILYAVWRDGTTFDGARVAAAA

SEQ ID NO: 59267 - protein, 344 aa, unidentified
MAYYTGIDVSLRSVSICVFYDKGEVCLEAKVAAEIDAIVDRLRRFSSKVKSVGFEAGTLTQCLTYGLQAAGFEVIRLEARQVSVTLAAMRNKTDRNDARGLAQILRTGWYSRVHVKSLQSHQVRALLASRKAILKKCVDLENELRGLLKVFGIRRPSQVKHGSFDAELRGTVSSDEMLACALVPLLDARTVLYKTYLKLDNAVKGLVRVDPICRRLMSILGVGPVTALTFKTAVDDPSRFKSARTVAAHFGLTPRRFQSGEVDNPRHISRAGDADVRSALYVAAHSLLTRNAQWSTLKAWGVRLAKTRGHRRAVIAVARKLAVILHRMWVDGSEFRWGTAVTPA

SEQ ID NO: 59268 - protein, 346 aa, unidentified
MREIIRIGMDTSKHIFVLHGVDAAEQPVLRKKLSRKQVLEFFGKLQPTVVGIEACGAAHYWARELGKLGHEVKLMAPQLVRPYVARNKNDDRDADGLCEAMSRPRMRFVPVKSAEQQAALMLAGVRDGLIARRTQLSNAIRGYAAEFGLIAPKGLDKIEPLLARIAQDESLPPMARELFAMQGRDYAQLQSELKTIEARLLAWHRANATSRRLAQIPSVGPIIATSLVMKTPDPHAFRSGRLFAAWLGLTPKDHSTAGKTRLGKITRAGDETLRCQLVAGATAVIRQARLGRGQPSRWLVALLKRKPPKLAAVALANKVARIAWKLMVTGESYDAARINAEPAIIT

SEQ ID NO: 59269 - protein, 551 aa, unidentified
MRFAVEGVGDEAGPLPDLDPVWKIVCSSPQADPRSGFSTVTITRAMKHSASSFAGKRQARNLNQLARQTKPKGSTPSGAAKPLDELTPVHRRAAGIDVGSAENYVAIPASGLAQGEESVRVFGVFSAEQDALVEWLHKHQITTVAMEATGYYWWTLHDKLEQRGIEVYVVDPHSVRTVPGRKSDWLDCQWLQKLHTYGLLSKAFRPDLPIRRLRTLTRQRTELVINGAAHQQHMGKVLVAMNLQLGLVVSDLIGETGLRIIEAILAGQRDPEELVKLRDPRCKKSTIEEMKAALRGTYNDEDLFVLEQSLAGWRFYQQQMVACDQRIAKALAAIPQAPPATKASPAKPLTPAANPRPKAKRIDVGNNSPTINFTEALVRICGMNLMKVCGLNLLSVLMLIGEIGTDMSRWRSSRAFCSWLGLCPGAKISGGKVLSRRTRNVKNRASTILRLAAWAVSRTDTWIGSFYRRIQRRRGTAKAVTATARKLACVIYHLLKYREEFLLFDTVAYGTSLELQRLTRLRTQAREMGYELKERQELHKLVKDELAIIPG

SEQ ID NO: 59270 - protein, 340 aa, unidentified
MRLYTGFDLHSSNNYVGIIDENGKRAFNKKLPNDPAVIVDTLRPFRNDITDIAVESTYNWYWLVDLLMAEGYKVHLANPSAIQKYTGLKYSDDRHDAFWLAEMMRLGILPEGYIYPKEDRPIRDLLRKRSHLVRLRTSLIISLQNIVSRNNGIKLKVGDVKALKTDRVAPLLTDNDDLALAGKVSKETIDFLTHKIKAIERVVEGKAKLREPYDRLLDVPGIGKILALTIMLETGPISRFDKVGNFVSYCRKVSSKWVSNDKTKGKGNKKSGNKYLAWAFSEAAELARRFHEEPRTYYNRKMQRTNFMIAHNALAHKLARATYYIMRDQVSFMPEKLFVS

SEQ ID NO: 59271 - protein, 322 aa, unidentified
MRTQELFIGIDVCKDRLDIANDSNSETWSETNDDSGISSLIDRLRSLKPSLVVMEATGGLEILLYSALVAAGFAAVVVNPRQVRDFAKALGKLAKTDAIDAWVLARFGASIRPEVRPAKDEQTRELVALVTRRHQLLSVRTAEKTRLKQAAKWTRKDIKSLIKVLDTRLIKLEKEISEHVQNTPGWREKDQIITSVPGAGPNLSSHLLACLPELGRLNRHQIAALVGVAPLNRDSGKFRGSRIVWGGRAQVRSALYMATLSASQCNLGIKLFYQRLIKKGKKPKVALTACMRKLLTILNAMVKNNTVWNINHPLTFDSLHGC

SEQ ID NO: 59272 - protein, 423 aa, unidentified
MDVMHERVAGLDVHKETIVACVRIMAGGKVTRECRTFDTTTAGLEALLSWLTESGCTQVAMEATGVYWKPVWNILSDGKFELLVANARHIKNVPGRKTDTNDAMWFADLVSFGLIKASFVPEQEMQELRSLLRARKQLTREQTSHVQRIQKALEEANIKLDSVISDIVGFSGRRMIEAMINGVRDPWKLAELAHHRIKATRKQLYDALHGRLTDHHRFMLRLHLRQYDALEDAIKEIDQQVDAAIARMDTEVAADQTPFRTLTNLLCTIPGVGELAAKTILAEIGTDMGRFPTAGHLLSWAGLCPGQNESAGKRKSSRLRKGSPWLKTLMVQCGWAASRKKDSCYKAQFNRLRGRHGAKKAICAVAASMLTAIYHMLKNGTEHEDLGADHFDRRSTEIKARRLAAQIKKLGFEVEIRPLPQAA

SEQ ID NO: 59273 - protein, 345 aa, unidentified
MNIIRVGVDIAKSVFHVHGVDRHGQTQWQSKYSRSKWLDALSRKVPAGAEIGMEACASSHYWARELQSRGYHVRLIAAQFVKPYVKSNKNDRVDAEAICEAMSRPNMRFVAPKTVAQQDIQAAHRIREELVGQRTAKANQIRGLVGEYGIIAPVGIQQLRRTLPGWLEDAENGLTDSFRVLLNGLAEDLRHLDDRIKALDDRITESVRQDPVAKRLMTLRGVGPLTASALAGALGDGKAFRKGRDFAASLGLTPKQHSTGGRDRLLGISKRGDSYLRKLLVHGARAVLRHVDGKDDGLSHWLRGLASRKHVNVATVALANKTARIAWALVHNETGYDDNLAAASM

SEQ ID NO: 59274 - protein, 413 aa, unidentified
MNKHTYRSKKVNAINWEQLRERWSGQALLFAVDVAKDGQYAELSCQGPDGAVLMHWDLLEGTAALIAELKGFGSPVAVVMESSGTYGDALRHRCRLAGFEVFRASAKRVHDAREVYDGVPSLHDAKAACLIAKLHRDGLTKPWHEPDARERELGALRREYEMHRGQYERCQNRLEAYLSRHWPEALRILSPDSVTLEQVLKKYGSPAEVAARGEEAAADMRRIGGHFLAEGTIREAVASAGATLGEPCVEAERRYLMALAGEMEHSRLHMRQAGRAMEALVGADGELSGMAKAVGLLTTAILLSLHLDPRHFASARAFQKALGLNLREQSSGKHKGRLMLTKRGSALARKYLYYAALRLIKNDPVVARWYAGRLDPKAKLKAVAAVMRKLAMALWHVARGQAFDAGRLLKPAA

SEQ ID NO: 59275 - protein, 349 aa, unidentified
MRHIGVDLHKTNFVVCYIEADDTKRLETYPLTRADLARFVAQLDAADELAVEATQNVHYFYDQVKAHVSRVAVVDTYRFGVIAKSKKKTDKADASALARFLKLGWLPEVSVPSEQVRTLRQLLQARETLVSMRTKLKNMAHATFSRNGIALTRAAFASAVGRARLSGRDDLPAADLLVLRTCLRQIEQLNSEIRQIEEEITKRGKSLRGVKRLLQVHGLNLLSAISLLAEIGDIALFDTSKQLVSYAGLATSTKQSSETTRHGGITKRGRKRLRTVCIGAVLAMVNRTDTPLMEFYQQKKREKGAGKAICATARKLLTIIFVLLKKELDYWYLEDRLYNRKLRALNAAA

SEQ ID NO: 59276 - protein, 344 aa, unidentified
MDHFAGMDVSVKETSVCILDDAGKVVKEVKVASEPQALLRVLGNSTYRFKRIGLEAGPLSQWLFSALAEAELPVICVETRHMQAVLKAQINKTDRNDARGIAQMMRAGLYRPVHVKTLRSQKLRMLLTHRKLLQSKAIAIENDLRGTLRNFGLKVGMVGMVRFEARIQELVKNQPDLAVLVEPLLIVRRALREQIVILHRRLLAIVRDDEVCRRLMTTPGVGPVVALTYRATVDVPARFRKSKSVGAVFGLTSSRYQSGEIDWNGKISRCGDEMMRVMLYEAAQSMMHSRKWSWLKAWAMQIARRRGMKKAIVALARRLAVIMHRIWVAGTEFRFTREQAAAAG

SEQ ID NO: 59277 - protein, 317 aa, unidentified
MPRRDIFIGIDVAKEVLDIAVRPTGEAWQVTNDEVGIAALVERLRALRPTLIVLEATARLHVAAVGALAAVGLPVQAVNPRQVRDFGKATGKLAKTDAIDAGVLAHFADAVRPAVRSLPDAQTQALSMLLARRRQLVEMLTAERNRRAGVSPSIRAEIDEHLAWLTARLKQADRELVRVLRSSPMWRERDALLEGIPGVGPVLTATLVADLPELGTLNHKQIAALVGIAPLNRDSGRMRGKRAIWGGRSAVRAVLYMATASATRCNPVIRAFYQRLVASGKLRKVALVACMHKLLTILNAMARTNSPWVAAEPQITA

SEQ ID NO: 59278 - protein, 343 aa, unidentified
MQAVKTIGLDIAKSVFQVHCVDAQGNVVFRRQLKRRYVLAFFQKLPPCLVGIEACATSHYWSRELQALGHKVRLMPPAYVKPYVKRQKNDANDAEAICEAVGRPNMRFVETKAPEQQGCLTLHRTRHLFVRQQTSVINAIRAHLAEFGIVAPVGRRGVDQLLSIVADANDKRLPEVARTCVAALGAQLQMLKARILEFDRMIRAWHRSSETSKRLDAIPGVGPALATALVASVADPKAFRSGRDFSAWIGLVPKQSSSGGKDKLGSISKRGDRYLRSLFTTGALAVIRYAKIHGTRHRPWLTALLARRPTKVAAIALANKLARMAWAMMARGERYREPAALAA

SEQ ID NO: 59279 - protein, 412 aa, unidentified
MDETEVGRIASWVGLDVGKQDHHATVVSAAGERLFERAVGNDEAAIERLLDRALESGPCALVIDQPGSIGSLAVCVARRRGVPVAYVPGLVMRRASELYRGEAKTDRRDSYVLADTARTHARRLHWLEVSDETLERLRLLGGYDDDLAHDVNRTANRLRDMLLAVSPALERVLGPRLDHPVARALLARYPTPTALRAAGRRRLGPLAKRHAPRLGARLVDEIEAALAAQTVTVPAEDTAGRVIRELAEELDRLADRRDRLAHEIEQTFTSHPRAPVLLSIPGIGARTGARILTEIGDINRFPTAGHLAAYAGLAPVTRQSGSSINGETRSRRGNHRLKNAMWLSAFCSLHHDRSRDYYARKRSEGKLHNAAITCLARRRCDVIHAMLRSGLSYGELPGPPTPAPEPDIALAA

SEQ ID NO: 59280 - protein, 350 aa, unidentified
MIIIGVDYHPEFQQIASVDTETGEFKERRLQNREEAEKFYRELAAGGVAARVGMEASGHARWLEHLLKELQLELWIGDAAEIQTKRVRKQKTDRQDAQLILRLLLEDRFPRIWVPSAENRDLRQLLWHRHRMVQARTRIMNQLQAVALNEGLRCKKRLWRERGRQQLESILLLPWASRRRSDLLQLLGQLNPTIAQLTQAVEREAEHCVEARRLMTHPGVGALTALAFVLIIGEPERFHCGKQVASYLGLVPLEKSSGKRRRLGHITKQGNSMARFLLVEAAQATVRSDPRWRSKYFHLLMRRGRKTAKVAMARRLAVNLYWMWRKGWNYEQLISFGSHAGQPGNPYGVR

SEQ ID NO: 59281 - protein, 406 aa, unidentified
MAGQEFEWFVGIDWASAEHEVRLLDARGTDRGRRSVPHTGPALGELGDWLEDVSGRHPERVAVAIELVRGAIVEALLARGFAVFGINPKQLDRFRDRYTVAGAKDDRLDAFVLADTLRTDRARYRALQLDDPKIIGLRGVVEAHEELTQELRRLCNRLRAQLERFYPQVLRLCPAADEPWLWALLVLAPTPAHAARLRGARVDRLLRGYRIRRLERTEVMTALREKALPVAPGTVEASSAQVALLLARLRLAHAQHAHCEQQIDAALEDLAGDDGESDAALRSLPGVGRVVAARLLVDATPLLAARDYGALRSQAGIAPVTRQSGKRRVVTMRRACSGRLRQAMYHWAFASVQRDPRSREIYAAARTRGQTHGRALRGLADRLLRVLVAMLNSRTPYDPDRIRRAA

SEQ ID NO: 59282 - protein, 367 aa, unidentified
MKKVSTVAGGQSRNISQQRLTIGLDLGDRNSWYCMLDEAGQIQLEQRVRTTAKALREVFGAMPRSRIALEIGTHSPWISRLLSELGHEVIVANARKVRLIGESRKKDDRMDAQTLARLARIDPRLLSPVKHRSAKAQADLTVIRARAGLVRARTALVNTARGLAKSYGERLRGCNVRNMNPEKAESLSPELQAALGPLLNAIEALSERIVEYNERIEKLAQESYPQVALLKQVKGVGTLIGLTFLLTLEDPHRFRKSRDVGCYLGLQPGRRNSGQSEPQMHISKEGDPYLRTLLVQGAQHILGPFGVDCDLRRWGLKLAERGGRNGKKRAIVATARKLAVLLHHLWVSGEVYEPLHNSNQRAMPAAA

SEQ ID NO: 59283 - protein, 402 aa, unidentified
MKVCGLDVHKDSIFCSIYDGKTSSEVKVFDSTTRFIYEMGEYLMTEGVNQVAMESTSIYWIPVWNILMEMGFELTLVNPFLIKQMPGRKSDIKDAQWIATLLHKNLIRGSMIPNSTIQELRFYSRKYMRMQQDKCKLLTKMDRIMVMANIRISSCVSKLTNKSVIIVIEALIKGETNPDNLVKLVYGNTKNKQSGKLREALTGYIMDHHRKSLKWEKESYDILERQILECIKEMERICNEHYKDEMLLLQTLPGVSKISAICLIAEAGADMSVFENSGKLTGWAGLRPRNDESAGKFKSKAITKGNKYLRAILIQVAWGASRTKGSYFMEKYHRLAMRKSNKKAIVAIGRKILVIIWNMLKEKKPYNPNLVSIYDPIKIERQLAYHRKEMEKAAKLLHKEII

SEQ ID NO: 59284 - protein, 352 aa, unidentified
MQCIAFDAHKQYTWALVEDEGGKVVREQRISHSKGALIEFLAGCEAGSAVAVETVGNWYWIADEIEAAGMVPRLVHAGKAKAMSGSINKTDKLDVRGINRLQRSGTLPTVWIPPRELRDARELPRTRMVLVGQRTRLKNRIHANLAKYGVAVGGASDLFGVRGRVLLKKRLGELPSETKYATERLMEELDHLDEQIQGFEERMAELFQPTRELELIETLPGVGFILGVVILMEVGDVRRFPSASQLAAYSGMTPRVHSSGGRVRYGPTRPDVNRYLKWAYAEAANATAIHRRKHAPWHVSRLYERVRHRSGHQKAIGAVGRHLAEATYWILRKGEPYRDPTLDLVVKSKGEA

SEQ ID NO: 59285 - protein, 381 aa, unidentified
MNNNKTKKSENRTQRQANLDTTEPKAKTIKLGIDVHLDRHVVVRIVDGGTPQPPQRFGSPEFLLWLAKQITLAEKVFTCYEAGPLGYCLHRKLEKMGATNYVVRPRDWDEYGKKVKTDKRDAKQLALHLDRYVNGNHDSFCVVRVPSPEQEQERSLSRQRESFQRERQRLAAQGRSHALYYGEHIQGEWWREKVWKTSAVQLPAIVVNLLEPLRRLISALEVELKIRTQEMEAAAPEQLPVGLGKLTSEILEREVADWNRFKNRRQVASYTGLCPTEDSSSERRFQGSINKHGNRRLRPVLVECLWRLSMFQPEYRAVKKWQPELLNPKTGRARRKKIIIAMARNFAVDWWRVRTNRCKAEDLGLKLQPRLQPKTTSVHDK

SEQ ID NO: 59286 - protein, 355 aa, unidentified
MSQEKYIGMDVHQASISVAVMDAGGKLITECLLETKATTILEFIQGLHGTLSLTFEEGTSAAWLHDLLNAHVSRLVVCDPRKAALLKDGNKSDRIDARKLAEMLRTNQLRSVYHGEHGLRTLKELGRSYLTITQDVTRVMNRIKALYRSWGIPCSGSTVYAPRHRAEWLAKIEQPGVRIRAERLYQQLDSLQPLRLQARHELLREGHQHAVVRLLRQIPSIGPIRSALLVALLQTPYRFRTKRQLWAYSGFAVETHDSGEYRSVRGKLQRNRERITVRGLNDNHNKDLKNLFKSAAISASTRPGPLQDFYVALVGKGIRPTMARLTLARKIAAITLTMWKKGVSFDPKQLHRQAA

SEQ ID NO: 59287 - protein, 414 aa, unidentified
MLKIVYRVCCGMDVHKSFVVACIASTTEYGVTTYKSKRFSTFTGDLRRCAAWLAENSCKDVCMESTGKYWIPIYNILEPTCNIVLAHPKYVKAIRGKKTDKRDAKWIADIFKHDLVAGSFIPPADIRQLRDLVRYRWKLTNFTTGEKNRAQNCLTVSNIKLDDVFSDVFGKTASAITTRILENPAEKITDVSGFRTKGMKATNEQVLAAVDGEMCEEQAEKLRIIRSHMDSLQLCKLDLESLILATAEKYLPQLNLVMTAPGIQSFAAIGIISEIGVDMSVFPTSKHLCSWAGLTPQNNESTGKKKTTRISRAGAYIKPLLVQCALCAIRAKQFPEVRNRYLALKKRRGHKKAIIAIARMLLTVIYNMLKKNEPYNPELYRKDDRPPAHREVFVEEAIFILQRQGYLVTAPSTT

SEQ ID NO: 59288 - protein, 394 aa, unidentified
MKLIGIDIGKNKHFFCVMDQQTGEIISQPVSFSNDKEGFDFLVQKIKSYPKDSILIGMEDTGHYHFALLKYLLDLQYTVALINPKTTDFNRKMQGGITKNDKLDTINICDVLDTPERKKQYRITKVNSFDLYEQKQLTRHHHNLKEEENVYKNRLQKCIDIVFPEFNKLFNSKYGIVYMNILKMFGSAENIANTDIRTIRKCFEIEGRGNRISLTPERLKECARSSIGISSSAEVIQIKHLTAQIELIEEQLTEIDKKIEEFSIQNNSPILSIPGISHFSGTSILAELGDISNYSKPSQIIKFAGVAPLHYESSQFNAQHTAITKKGSKYLRKTLYQIILPVIRHNPVFNKYYQLKISQGKGHRCAQGHCVRKLLRIIHHLLKTNQQFDPQLLR

SEQ ID NO: 59289 - protein, 344 aa, unidentified
MSEVITVGLDIAKHVFHAHGADERGRAIFSKRISRGKLLDFFAAQPRCMVALEACGGAHHWARQLTQLGHEVRLIPPAYVKPFVKRQKNDAIDAEAICEAAQRPSMRFVAVKSEQQQAAGLVFRTRDLLVRQRTQLINAIRGHLTEYGWVAPKGPSHVAMLADLIEEDEMASSLPKAAHAMFRLMLDLLAGLNGKIADLDKEIARRAREDEVSRRLMTVPGIGPISATAIAALAPPAETFAKGRDFAAWLGLTPLQRSTGGKQKLGATSKMGERTLRRLLIIGSSAVVQQASKRGAPRGSWLEQMLARKPRMLVTVALANKMARIVWALLVKQENYRAPVAAKA

SEQ ID NO: 59290 - protein, 333 aa, unidentified
MNKITLIGIDTAKQTFHLVGVDARGHYVWRKQVSRARLLSTLAQIECCEVVLEACGASHHWARSIQALGHTVRLIAPQHVKPYRRGQKNDYRDAEAIISAALSPGMRFVGVKRVEQQAEQALHRVRSRLMSQRNAAANELRGLLGEYGVVFRRGLKPLRDGARCFAEADEAHTLGLVDLVNDVLEEISVLQARMDHYERLIEQRVQADETSRRLREELNGVGKLGASALRVKVGDVRDYGNGRHFAAYIGLAPGHSGTGGQVRIGHLKRGHDRYLRQLLIHGARSALRHLGDKQDAQSRWLRGLLERRGFNIASVALAHKNARQAWAIMAREQ

SEQ ID NO: 59291 - protein, 312 aa, unidentified
MDAIYVGIDVSKDRLDVAMRPDGGSFAVNRTGAGIDELIARLKSLSIKLVAVEATGGFETVVAAGLAGAGLPVVVVNPAQVRAFAQALGKRAKTDPIDAAVIAHFAEATKPQLRPLPDATTQLLADLVARRRQIVEMIAAESQRARHVTLPRLKKSIARLRKALEKELAELDHDISDHVRGSPAWAEKEDLLASVPGVGPIIARTLIAELPELGSLDRRQIAALAGLAPWTRQSGKWRGKSFIGGGRASVRRALFMGALVAARHNPTLKLFRDRLVAAGKNKLVAVVAVARKLLTILNAILRDKTPWQPKIA

SEQ ID NO: 59292 - protein, 414 aa, unidentified
MEVIHPRCAGVDISKKDAKVCVRIQGRGGRSTASTVTTWGSMTGQILGLKEHLLEERVDLVVMEATGDYWRPFYYLLEDDGLNIILVNAHDARNVPGRKTDVSDAAWLADLGAHGLVRASFVPPPPIRELRDLTRARTIITQERTREIQRLEKLLEDACIKLSSVASNITGVSGRLILQALIDGQTDPAALAEMAQRRLRSKIPELTQALTGRFTEHHRYLTELYLHRIDAHTADINDLSTRIEAAMEPFRFARELLVSIPGFSTTIAEVFIAETGADMSTFATAGHLASWAGTSPGSNESAGRIKSTKTRPGNRYLKGALGIAALSASRSKNTYFAAKYGRLAARRGPMKALVAIEHAILTAAWHMLTTGELYNDPGADYFTRQKPAKAKARAIAQLASLGYQVTLEPLRQTG

SEQ ID NO: 59293 - protein, 351 aa, unidentified
MRLYTNQHRFYCGIDLHARTLYLHVLDHDGQARFERNIPARPDTFLEAVRPFRDGLVVGCECMFAWYWLADLCAAEGIDFVLGHALYMRMIHGGKAKTDKIDAAKIAGLLRGGLFPQAYVYPKALRETRDLLRRRTFLVRQRAQFLTHVINTNSQYNLPSFPAKLGYKANRSNLDDIINRFPHESVRHSIRADLTLIDALDARVDALESYLTRRARIDDPVTYHLLRTVPGIGKVIALILLYEVQDVRRFGRAGNFLSYSRLVRCQHESAGKVKGAGCTKIGNGHLRWAFGEAACLMLRCHEPAKHWLQRKTQKCGSKAKALGILAAETARAVYHVWRKQQPFDPKKFLTS

SEQ ID NO: 59294 - protein, 365 aa, unidentified
MRIIGMDIHRVAAEAVALLDGKLEKLGRIPMLRESLEEFARRELTHDDHVIVEATGNAAAVVEVLSPHVDRVVIANPKQVRLIAHAKIKTNAIDAAVLAKLYATGFLPEVWVPDEATLALRRQVARRTQLIRHESAAEEPHPVHFIPPCPHGNLTGISGRKWIAAQRLPDDERAAVQRHLAQIDLIEGSLKDVEADIASATMSDPVIRRLMTLPGVDMAVASGVAAAIGDMRRFKDLTELVGYLGLNPSTRQSGQGPAYHGRITKKGRGQARGMLVEAAWAAARSPGPLRAFFQRVAAKRGKPIAAVATARKLTMVIWHMLTKGEYYLWVRQTLSHAPMAAACSRRCATEEAPTGPQWNAKPGRV

SEQ ID NO: 59295 - protein, 431 aa, unidentified
MDTQQFEVIRPKCAGLDVHKKSVVAAVCTSDPITLTASYKTKVFNTTNSDIAALRDWLIAQDCHEVCMESTGKYWIPIFNILEPHMHVILTHPKYVKAIKGKKTDKRDAKWIANLFRFDIVKASFIPPADIRALRELSRYRLKLSYMRTAEKNRYQNSMTISRIRIDCVLTDPFGLSASRIMDYLLSDEPFDEEKCRTLIDHRVKASKDEVMDAVHGYHILEEQKFKMAHAKAHMDFINKSIDEIEAELFLRSRQYDSQIKRIATVTGITELSALFILSEIGADMSVFESDRHLCSWAGLTPANNESASKKKSTRCSKAGQYLKPLLIQCALAAVKSKKDPYFQIKYQHLTKKRGKKKAIVAIARMMLTSIYHMLSKGVDFHPDDYEATVNPKKQKTVVLTIENTLQFLREQGVDPETIKLIQQQCAAQAG

SEQ ID NO: 59296 - protein, 377 aa, unidentified
MKNDIRFIGLDVHAETIAVAVAEASGEVRSLGVIPNRPEPVRRLVRKLGRAQSLRVCYEAGPCGYVLYWQLAGLGVHCDVVAPTLVPVKVGDRVKTDRRDAQKLARSYRSGDLTAVWVPDAAHEALRDLVRAREAAKKDQLRARHRLQKFLLRRGLQPPEGIKSWTLKHLSWVKTLRLEQFALDATLLDYVTEVDHARERIERLERAIDQAIEAAPVAIRAVIDALQSLRGVAPLSAATIVAEVGQLSRFAKPRQLMGYTGAVPSEHSSGESVRRGAITKTGNAHLRRILVEAAWAYRHRPNLGSELRRRQDGASEEVKGIAWKAQHRLHHRYVRLAARGKTKQHIVTAIARELAGFIWAIGVEVERKLATDSKRAA

SEQ ID NO: 59297 - protein, 365 aa, unidentified
MSTITMGVDLAKDLFSVCAVDASGHVQRRQDLGREAFALWLAQVPAGSVVAMEACSGAHHWARRCLEYGLQPRLMAAQFVTPFRKSRTLKNDRNDAEAIATAARQGNMRFVPVKSVEQQARLAWHRVREGYKTEGLEISNRLRGLLAEFGIVMAQGDRALRIALADLDAAASLPAELKELLRELGAHWVQVRDRIAACDARIEAHAKADERCVRLRALIGIGPLTADAMVASVGSAKEFKNGRQLAAWLGLVPTQHSSGGHTRLGTISCRGDAYLRTLLIHGARSSLQRAKAVSAEKSTPEQIWIRQLACRMPFGKLLVAIANKHARQLWAMLAREETYDAEAWLKHPMVQRPASQHALRIAGMA

SEQ ID NO: 59298 - protein, 414 aa, unidentified
MLKIVYRVCCGMDVHKSFVVACIASTTEYGVTTYKSKRFSTFTGDLRRCAAWLAENSCKDVCMESTGKYWIPIYNILEPTCNIVLAHPKYVKAIRGKKTDKRDAKWIADIFKHDLVAGSFIPPADIRQLRDLVRYRWKLTSFTTGEKNRAQNCLTVSNFKLDDVFSDVFGKTASAITTRILENPAEKITDVSGFRTKGMKATNEQVLAAVDGEMCEEQAEKLRIIRSHMDSLQLCKLDLESLILATAEKYLPQLGLVMTVPGIQSFTAIGIISEIGVDMSVFPTSKHLCSWAGLTPQNNESAGKKKTTRISRAGAYIKPLLVQCALNAVRAKKFPEVRNRYLALKKRRGHKKAIIAIARMLLTAIYNILKKNESYNPELYRQTDRPPAHREVSVAEAIFILQRQGYLVAAPPTP

SEQ ID NO: 59299 - protein, 342 aa, unidentified
MEHYAGIDVSLECSSVCVVEANGKILREAKVASEPEPLIAWFRSSGFDLERIGLEAGPLSQWLFAALREAGLAVELLETRHVRKAFEAMPVKSDRNDARGIAQLMRLGWFRPVHCKSMSAQETRTLLTARKLVQSKLRDVENSLRGILRGFGLKVGKTTELKFAGRIEELVVGHRHLQVIAKALLAVRTVLRKEFAAFEKQARKMARSDPRARLLMSMPAVGPIVSLTYVSAIDDPGRFKSSKQAGAHFGLTPKKYQSGETDYTGRISKIGDGSVRTALYEAAHVMLTKPVKGCSALKSWAMRIARRAGMSKAKVALARRLAVIMHRMLADGTPFNLAAAAA

SEQ ID NO: 59300 - protein, 344 aa, unidentified
MENINQNQKHHWIIGIDVSKESLDVCLINNSDGQLFNGKFNNNLSGFKSFKAWCKTHACECDQQSLCCMEHTGLYTRQLVHYLLTRQVNVWLESSLHIKRSMGLVRGKSDAIDAQRIARFAHAHQKDAKSLNLSSLTLDKLKDLNANRNRLMKAVQSLQVSTKELKEVDPESGKTIARVNREAIHGLEKSLSAVEETISEFIKADENLTKQFDLITTVKGVGKIMALLVLIYTQGCTKIMDGRKLACYSGVAPFEYRSGTSIMGPTGVSKFANGELKRVLHMAAISSVQHNPELKQYYKRKVAEGKSKMSVINAVRNKLLHRIVAVIKRGTPYQATPKNNLQLS

SEQ ID NO: 59301 - protein, 482 aa, unidentified
MTKRTIFPYQSQELNTLFKEAGNNAKVMCIPIDYAKKEHVVMFCNGHGNILRKPFPIKNSPKGIEYLTQQVLSSCHHRGIDPKYAFFGGEDVGSYAENFINTLRSGGWIVAGVNAHDAKKQRANVQASTDKLDLMGIASMLLNRRANCSPAQTGIYRNLRGLTRHRKKLVDMSTEEKNRIYTVVDQIFPGFLDEKNTGISPFSNSSLYLMADRFSPAQIRRRKRQKLIDTLRKYGTVKPEVGADKLQLYAAHVLNTPTEYLSALQISLAQHIKHLKCLQESIEQLEKEMAIWLAQTQGAFLTTLRGIGIVLAAGATAEIGDPTKQKPVANLVSYSGIIPRVKQTGGPEGQTRTGKVSKRCNRILKNYVVQSAHHIGLHGPEDLMADYKRRDANGQHADFGIGRRYIRTAMCLMRNSQIYIPKRLRSKGINPEERAGYFLMIWPSLRDKWAKLGALETAFTNDNPLGRWRNMVQELYEIKLKL

SEQ ID NO: 59302 - protein, 343 aa, unidentified
MEYIGIDVHQRACQVCILDSTGRVVLERRVGTNRERFAALLGRRAPARVLLEASTESEWVARALEALGHEVIVADPNFAPMYATRSRRVKTDRRDARTLAAACRLGAYRAAHRTSAAQRVVRAQLAVRDALVHTRTRYINVVRAVLRQDGMRVPSGGAATFAARVRALALTATQAAVVAPLLEVLAALHRELAAVEATVARGVAQSQAASRLCTVPGVGPVTAAAVVATLDDVSRFAGAAQVAAYLGLVPRERSSGERHWRGALTKTGNRRVRWLLVQAAWGYWRSRATAGTALRAWAVRLAARRGKQRAIVALARRLSRVLYAVWRDGSTFTPLPALAPAGA

SEQ ID NO: 59303 - protein, 312 aa, unidentified
MTKLTIGIDISKALLDVALHPGGEVVQFSNDKKGHKAFVKWASAFDVNLIVFEATGAYHRGLERFLGDRELAYAKVNPRHTKRFSQAIGNLAKTDTIDAKMLAKFGQVLNPSQTVTKSQTLDELGEFVRMRQALIKDRTAAKNRMHIVHSKLGQRQLKKRVKQIKSDIKEIDDACKALIMGDEVLRKRFETLMSIPGLGETTCIIMLSEMPELGTMDKKQVAALAGLAPITRQSGTWKGKSFIQGGRANLRRALYMPALVAMRHNPQLAKKYQDMISKGKPPKVALTTLMRKLIITANALIRDNRKYTEKTA

SEQ ID NO: 59304 - protein, 315 aa, unidentified
MTSDMYVGIDVAKDTMFVAILPTGETWEERITEDGLKRLVAKLRPITPQLVVMEATGGYEAPIFEVLWKHNIPVAVVNPRLVRSFAKALGRLAKTDKIDATVIARFGEAVKPKPKVRNDQQEKILGDLVARRRQILRMIVAEGNRKKRAVGEVQKLIDKHIKWLNKALEEIEKKLEAYISKTVEWRERNEILQSVPGIGKIVAYSLMAELPELGKLNRKQIAALVGVAPLNRDSGNMKGKRSCWGGRASIRTALYMATVVAMRFNKTIKAFYERLCQNGKHKKVAITACIRKLLCVLNAMMKNHVRWGEFKPAET

SEQ ID NO: 59305 - protein, 460 aa, unidentified
MKRNKMKKAQRIRAHLKQVNLFAAGIDIGSRSHFVAVPDELDEQPVREFAGFTGDLNRLADWLVEMGIQTVAMESTGVYWIPVYEILESRGLEVLLVDARHVKNVPGRKTDVLDCQWIQQLHTYGLLRGAFRPQEEMVALRSYLRQREGLIASASDSIRHMQKALRQMNLLLDNVVSDITGMTGLRIIRAILAGERDTKQLAKLRDKRCRNNEQMIADSLEGHYREEHLFALQQAVERYDFYQQQVEACEGVIERHVREIEGDNDNDQDVPPASKPKGHSKNGFDFDVRSQLYRLTGVDLTEINGMSESNVLTIISETGIDMNAWPSEKHFASWLGLSPGNKITGGKRLSGKTKPSPNRAAAAFRLAAFSLANSKTALGAFYRRLRNRLGAPKAITATAHKLARLFYRLLKNRTPFIDPGQDYYEQQYQERATRNLKKRAAALGYKLIPESTDGLQESMC

SEQ ID NO: 59306 - protein, 339 aa, unidentified
MKLSAAIDLHSNNNVLVIIDEKDRVVYERRLPNDLRVVLKELAPHRKNIQAIAVESTFNWYWLVDGLMDAGYELKLVNTVAVKVYDGLKYSGDEHDARHLAHLLRLGILPTGYIYPKEERAVRDLVRKRFQLVRQRTMQILSIQNLVSRNSGTGITKEQIRDLDDKAILKTCEGDRARAIAISSNLTVLRCLDEQIAKLEREVLSRAKLKPEFAQLLTVDGVGKILAMTIMYEAGDMDRFARVGQFASYARCVGSSRWSNGKKKGEGNRKNGNKYLAWAFVEAAVAGIRHCEAIRRYHQRKKAKTNAVVAIKTVAHKLARACYHVVKEQEPFDVTRAFA

SEQ ID NO: 59307 - protein, 370 aa, unidentified
MKKVATLFVGLDVHKDSISVAHVIGDRRADVTYVGRIGTRGADIDRLVSRLGGKAERLIVAYEAGPCGYVLHRHLTRRGVRCLVVAPSLIPRKPGDRVKTDRRDAVMLARLLRSGDLESVYVPAVEDEALRDLCRAREAAVVTLKAAKYRLQSFLLRLGLQYTGRATWNDAHLRYLARVVCPTPAQQIVFQEALSAVDEQVERLKRIEAQLAELVPARRLAPVVRALQALRGVQQTVAVTVVAELGDITRFDNPRQLAAFLGLVPSEDSTGDSRRLGPITKAGNGHARRVLIEGAWAYQYPAKVSEHIRKRLEGLPKPVQAIAWKAQVRLCKRFRRLVAKGKHPNVVVTAIARELAAFMWAIAREVPITV

SEQ ID NO: 59308 - protein, 455 aa, unidentified
MNKKVKSKKQQNDQATTLQLGIIYSGAAGIDVGSMNMMVSYPGAEGIQTVEEYGAYTEDLHAMANQLKESGITHVCMEATGVYWMAVYEILEQYGFKVTLVNARHYKNVDGQKTDVKDCQWLQQLHAHGLLRASHIAEEQYRELRTYIHERGVLQKQKSDTLNRIHKVLTQMNIKVQHVISDIEGVIGMQIVERIAAGVNTPDKILEGLKTDKLKARKQDLEKSLKGIFKPWYIKVLKQHLTAYHFFKKQMLAYETEIEATLKILLPSQAEQIAIEKKTVKVRKNQYHFNLKEYLHKIAGIDLTEIDGLDENTVLTIIAVVGLNMHKWPTAEHFTSWLNLSARPKKSGGKTIGHQRRFTNNSATQAFRMAAQTMWQQKGMLGHLYRRLSHTKGTKKAIKAVARRLAVIFYNMLKKQTAYDSKIVVLDEAKIKARKITRLQKEAEKLGCRIEILAA

SEQ ID NO: 59309 - protein, 421 aa, unidentified
MLAESHDEEQIIARVAALDIGKAELVCCVRLPAQRGPKRLQEVSTHSTMTRSLTELASRLVELGVQRVVMEATSDYWKPVFYLLEAHGLDPWLVNARDVKHLPGRPKSDVIDAVWLCKLAERQMLRPSFVPPWPIRRLRDLARYRVDLVAARTAEKNRVEKLLEDACIKLSVVASDIFGVSGRAMMAALIAGERDPHVLAQMARARMRTKIARLEEAFNGHFDDHHRFLLARMLDRIDSTEADIAALDNQIEAHLVPFAAAAARLDEIPGIGPVAAAVIIAEVGVDMSRFPTAGHLCSWAKLSPGLNTSAGKTKGNGSTGHGNRYLAGILGEAAVVAGRTDTFLGARYRRIAKRRGNKRAIVAVGRSILVIIWHLLASDDARFTDLGADHFTKHLDPDAKKRNHIRQLEALGYTVTLTPAA

SEQ ID NO: 59310 - protein, 314 aa, unidentified
MEAKIRPWVGIDVSKDQLDVYIHPTAQRFCFKHTNEDLMTLGQQICSLNPALVVLEASGGFESTVAGVLAYLGVPTVVVNPRQVRDFARATGRLAKTDSIDARILARFGEAVKPEVRPLPDDDTQKLRVLVKRRQQIVEMVTMENNRLLHASEPVAGNIKAHIAWLKQCLKDLDKDLGDLLRSSPIWREKEDLLRSVPGVGPVLAATLIAQLPELGQLNRKKIASLVGVAPLNRDSGTLKGRRTVWGGRGHLRAVLYMGTVAAIRCNPVIKAFYKRLIQAGKAKKVAITACMRKLLIILNAMFKHKTLWKPIYA

SEQ ID NO: 59311 - protein, 367 aa, unidentified
MKKVSTRAAAQSRNISQQKLTIGLDLGDRNSWYCVLDESGQIQLEQRVRTNAKGLREVFGEMPPSRIALEIGTHSPWISRLLSELGHAVIVANARKVRLIGESRKKDDRLDAQTLARLARIDPELLYPVQHRSAPAQADLMMIRARAGLVRARTGLVNSARGLAKSYGERLRGCNVRNLNPEKAEGLSPELQSALQPLLNAIESLSERIVEYNERIEKRARQSYPQTALLKQIKGVGTLIALTFLLTLEDPHRFRRSRDVGCYLGLQPGRRNSGQSEPQMHISKEGDPYLRTLLVQGAQHILGPFGVDCDLRRWGLKLAERGGKSGKKRAIIATARKLAVLLHHLWVSGEAYEPLHNSHQAAMPAAA

SEQ ID NO: 59312 - protein, 389 aa, unidentified
MLNSEGSTVDQRWIEHTGDSLHELIEWLRTKASPTPNTVAVAIEVPRGAVVETLVENGFAVFSINPKQLDRFRDRYSPAGAKDDRRDALVLADSLRTDLHCFHRVKLDEPTLIRLRELSRLEDDIAQEQNRLHNQLREQFHRFFPQLLALSPAANEPWLWDLFQAAPFPAKAAKLSAARIEGILKKHRIRRVDAVKVQAAVSTRALTLAPGAAEAASEHALLLLPRLRLLEQQREHIAKRVQTLLEELTQKADDEESLEHRDAAILLSLPGVGRKVAATMLSEASEAIAERDYHALRCYAGSAPITRQSGKKTVILMRQGCNERLRNALYHWARVSVICDPKAKTMYAGMRARGHSHGRALRGVADRWIAVLISMLRHNALYDSKKRAA

SEQ ID NO: 59313 - protein, 461 aa, unidentified
MKNKSSSKAKKHSKQKVAIDQNWQLINPDAAGIDVGSREHWAAIPPSRGGQTVRCFGATTPELEALGNWLKEAKVSSVAMEATGVYWIAVFQVLERMGLKVLLVNSRQVKNVSGRKSDVLDCQWIQRLHTYGLLGGSFRPADPYCVVRSYLRYRDELVSARSRQIQHMQKALLQMNVQLSHVISDISGQSGLAIIGAIVAGERNPLVLAGKASQRIKSSRDKVARALIGDYRPEHLFVLQMAYSLYETYQTKIAECDQAMIEELNKLPDRVDVQAKPLPPRTEGKKIDQALRQGLYQKMGVDLTAIEGIGAKVVLTMLTEVGPDLSAFPSEKHFTSWLGLCPDNRISGGKVLSSRTRRVVNRFSDALRLAATSLECSQSALGAYYRRMKGRLGAAEGVTAAAHKLARLIYRLIKHGEEYVRLGLEQYEQKNKNRKLRSLQNIAATLGLQLVPVQAQTEGVS

SEQ ID NO: 59314 - protein, 426 aa, unidentified
MADTNHPITALHWVAIDVARYWNAVLVETASGQRHRFRMTNSAADMQRLTDFLLGLGGRCRVALEPTGDYHRPIANRLLRAGFEVVSISSVAQSRFREAMFNSWDKNDPKDAAVILEMLKQGRTQKYVDPMLAGHHDIQELSKTYYQISRARTKVQHAIINHHVPLYFPEMHKYWTSTRNEWWVKFMIEFPTPAHVRQHTCQEFIELASPVVGRRVHRVAKLTEIWECCADSGALPHDPQSIAVQTFLFTLRHYQHLNDMRRQLEEQAQDLLASDSDYINLMSLPGVGPINALTILAEAGNLRRFGHHRQFLKYCGFDLAKSQSGVQRGRAQLSKRGNARLRLAFWLAAVVAIRARENSFREKYDRYVSSNPKGPDLKRKALTAVAAKMARVAYGIIKKNQPYRRFFEQSLPSGSIPLNRAVGAPA

SEQ ID NO: 59315 - protein, 443 aa, unidentified
MSRKKRTHLRGERGQAFANKIRGIPLEQILCVSLDIHKYFHVVMIHNALGEIVMPTFEIDIFQTGFDCLCQAIDRAVTRTNAKIVLVGMEPTGHYFENLARHLNNRPQPVTLINSFAVSRNRDQQMMHREKDDEIDTAAIGDLLRRGEGTPFQPVSGIYLEMQHLSRVRHSKVKMRTALKNQIIGHLDRIFPGLVIKGKVARERYEPLFVTDFWSCQTLQHLIRICPDPGKLAAMAPKDLRSAFHEQGLAMGPKTAAKIIIYAQKVLLPDPEVIAIRSELLTHDLALLEEVERHITELEDRLHALLQQTPYWVWTKVRGLSMTQVANLAAAIGAPSHYTYAAQVFRRSGLVSGRNDSGTRRHKGKGKQVVKTGDVYLRRALMTAIISLIRHQPVLNEYFKELNRTKHAGVARVATARRAMGILWAMQRDQHSRTLGLKRGAQM

SEQ ID NO: 59316 - protein, 482 aa, unidentified
MKAQQPEKGKPAIPARRCKWHEMNRKQRREIMRRLQSKDLSMEVIHPDAAGIDIGNESHYVAVPQQRGSQPVRRFGCTTAELRAMADWLKQCGIRTVAMQSTGVYWIAVFGILEEAGFEVYLVNARETKNLPGRKSDVQESQWLMKLHTYGLLRNSFRPAQEIRTMRTYGRQRNDLVRSACRHIQRIQKTLTQMNIQLANVLSDLSGATGQAIIKAILGGERDPHELAGFPDPRVKASEEEIAQSLEGHWQPDLLFVLKQEQEGYEFCQRQIAQCDRQLEQYLLQREDRSHGAPLPEEKRKIRLKKKKNGNKPQFDLRAELFRMTGTDLTRLDGVDVMTATTIVSEAGYDMSRWQTENHFVSWLRLCPDNRISGDKIIGQGRLPTNHRATIALKMAASTLRTNQTYLGAAFRRLRTKLGAPVAIKAMAAKLARLLYRMLRYGMNYVDQGVEFYEAQHRKLQINSLKWKAAQLRFQIIEAPAT

SEQ ID NO: 59317 - protein, 364 aa, unidentified
MKERKTLTRFVGIDLGKRTYEMAVVGKGGKVTMSNGKTYPSARQGLYNKLRPGDKVALEACSLAFIMAKEIEAAVRCKVYVLNPGRLSIIYKSMKKTDKEDALKLAHILEDFSEERLPVVAVPSDKEMERRKILANYRRADQNRTRNINLLHALFVSQGITTVKKSDLETGESRKETIQTLAGMERDEAEYLVKCLALIEERKEKLDRAINEEAANDEEMQRLREVPGVGPKVAFAFVSHVGAARFENASQLSNYLGLVPRVYMSGDTVRYGPITKRGNSYVRALLVQGAWALVRSKAGGKLKERYEYMTIEKSKNKKKAIVAAARQLAEMMYTLMRDKTEYEYRKFKPVKESGAELAQLALSA

SEQ ID NO: 59318 - protein, 337 aa, unidentified
MKSYLFIGIDISKATLDVCVLSPSDITDSHHHPFCNNAKGFSQLMKWLKQNSEGLAPEEWRVCMENTGVYSFELNFFLHEKGIWQSMENALQIKRSMGVVRGKTDKADSKIIAMYAYRFIDKLKPYVLPTSTLLRLRALFAQRERLVGMHSQLLVASQSIKGYPKELVKDIQDQNEMLLKNLTVQIKGIDKSIKECLQEDKDLQRKSKLIQSVPGIGQQTAAYLLIVSQGMKGFTSARQFACYSGCAPFAHQSGASITGKTKVHFIANRKMKVLLHMTAMNAITFNDELKAYYQRKVAEGKNPMSVLNAVRFKLICRIYSVVKRNEEYQKEYGKIAA

SEQ ID NO: 59319 - protein, 442 aa, unidentified
MQIIYEYCAGIDIHKKVVVVCLILVNATGQRVKEIRSFRTATAGLLALRDWLQAAGCTHVAMESTGVYWKPVYNLLEGAFELLLVNAQHIKAVPGRKTDVRDAEWIADLLQHGLLTGSFIPPTEQRELRDFTRYRASLVEDRARVVNRLQKVLEDTNIKLGDVATDITGQSARAMVKALLAGQTDPVKLADLAQGKMRAKLAALEEALVGVIKPHQQFLLTELLGQLDSLDAAITRVGNEIATWMDREIPAEPEPTLEQHPLSSPLPEQEEPKNPLTWAQAVALLCTIPGISQRAAQGILAEIGRDMTRFPTASHLASWAGMCPGNHQSAGKRLSGKTRKGSPYLRQLLVEAANAAARTKNTYLSVHYHRIAARRGRKRALIAVGHTILVIIYRMLSQQKSYEDLGSNYFDERDRQNTEKRLVRRLEKLGYQVELQPAVQVA

SEQ ID NO: 59320 - protein, 328 aa, unidentified
MFEHYIGVDLHQAFFQACAVTASGAREWEDRFPRTEAGMTALLARCNSQTALAVEASTPTWHFADAIRAGVGELRIVDPVKTKLKAGYAAKTDRLDARRLADALRRDSVVGIYHPPVALRELRELCRSRHALVQVRTAIVNRLRAVLLRQGIVDRRALAQTTSDAWLETLPLPPRARASVAALRRLLGAVRAEAVAADQHVRTVAAADPIAVGLQQIPGLGPVLALMIRAEVGDIRRFPTPGHLASYAGLVPSVAASATRVRYGRITRRGSPWLRWALIEAAIQGPKRTDPTGRWGRRLAIRKGALKARVGLARRLCEDVFRSWSAIG

SEQ ID NO: 59321 - protein, 371 aa, unidentified
MKKDSTTKFIGLDVHSKTISVAIADEGRKGEVRHYGTIENTFDAIDKTIKSLTATGVELKFIYEAGPCGFALYRYLTGNGFKCIITSPGLIPKRSSVRIKNDRRDALTLARLYRAGELTGIYVPEPEDEAIRDLARARDDARVAERKAKQRLNSFLLRNNLIYPGKTKWNRTYFNWLGSVGMKYPAQKVALQEYIEAVNECTGRVARLREQIGLAVEEWRMAPMVKALQALRGVSLICATVTVAELGDLSRFQNPKELMAYLGLVPSEHSSGETIRRGGITKTGNGHARRVLVEGAWTYKHHARVTLPLIKRQRDLPKSICQISWKAQLRLCARYRKMVARKKPNNVVVIAIARELAAFMWAIAQEVRAAT

SEQ ID NO: 59322 - protein, 348 aa, unidentified
MKNKSFVGIDISKNVIDVSIFREDTNIKMFPHEVFNNTRKGFGDMCSWLKKSRVVLSQALFGMEFTGCYSLDLEKFLTSKNYSFCMLSTRIVKHHPMGTIDKSDKNDSAKIADFLYRYDGTECAKPYKLPSKAMQQLKQLVNERKFLVEQRTNFMNRMQMFETKEDSAMYESYIKKLNHDIEKIDQEECELMSKEEDVLDTFQNLLTIPGIGFVNATNIIAITRNFTAFDTARQYARYVGVAPCSHTSGTSVKWRARPSAHCNGQVKADLSMAALRAVEYDVEMQMFYNRKLGGRKDSDTKRKALNAVKFKLICRMFAIGKQKRKWEVLNTSDDRKNLHIEKSKASEL

SEQ ID NO: 59323 - protein, 374 aa, unidentified
MAQGTRWVGLDAARVSALVAVEASNDGLVKGEAGRLPIVMGLDQHRAQITAEWIDLSSGEISRGRVVPADRASVRKFLKRFAGRDLEVALEATTGWRFVAEELERVGAGVHLAEPAETSGLRGPKKRPKTDWADARHLRELLLIGRLPESWIPPDHILDLRARVRCRHTLSHQRTECQQRIQSVLYHHGCPQRRQLMTGEGREWLDAQPLPLSAREQVTVAVAMINALDVQVAPLTARLYDYAKRQTGCKALIAAYYGIGGLTAVTILAELGDTRRFENSRDVVRYGGLDITVKQSDQHRAPGHLSRQGPPALRWALYEAAQQARHPRSPDREYYLQAAERIGGNRACLALARKLLKRCYHTLRDLGEDALTPA

SEQ ID NO: 59324 - protein, 450 aa, unidentified
MNPRINLWLQVPQILDRRGGDIMLKINPLSTLYVGIDVSSKSNYACALDFYKNKFFNAPFANNQPGADELVKRILECLKEHPDLNTVVAALESTSVYSIHIANYLSSCEELLRFKTYVFVLNPKCPANHKKSFIGMGKTDPIDAYVVADYARGGNIESEPWRGSQFLALKRLTRHRLHLVECMTREKSYLASNLYLKFSELQLLEGDDQPFSNIFGATSSGIITEYLSPEEIVEASEEELLSFIAEKSRNRISDISRTAELLKKAARDSYRLDKALYEPLNVSIASSFNCIETFKKEIKAIDAAIEREIKGLCPNAFIILQSIDGIGPVFAGGIVAEIGDITAFHSSDALAKYAGLYWKHNDSGDFSGEDTPMSKAGNRYLRYYLGEAANSMRKHNAEYGAYYRKKYNEVPKHQHKRALALTSRKFVRLVYGLLAKNQLYSGVSLDTSNE

SEQ ID NO: 59325 - protein, 388 aa, unidentified
MDVLLSSACGVDVHEKMIEACILMQKDSQIVPIRQRFSTLPKELSAFVKWLRENQCFDIAMESTGVYWKPVFETIEREIQEKHNIIVGNAYHIKNVPGRKSDVKDAEWIATLLMHGLISKSFVPDKRIRSLRDVARTYKKCVGENCRYRCRIEKFLQTHGYKLSSVMKDIFCVTGRNLLDSLARRGSLTLEDVTACRKGRLKSSALELFDAVNIPLDEIDRQLLSLLLDRLKTSESDLKKVIELMDEIAKPYSRQIEILDSIPGIDRIAALLIIAEISNAPQKDFSSQEKLTSWAGLAPRNDESASKIYSKKVLPGNQYLKTILNQVSWAAVKQRETPFHDWFWTRQGRLGKNKAITAVSRKMLKLIYTLISSNTLYNNMIALSNVNH

SEQ ID NO: 59326 - protein, 318 aa, unidentified
MGGVNAAIEVGKQQLVVQLGSQGEQFSEANEPRAIKRIAKRLFQAGCERVLIEGGSYQSVLIAGLRAAELPVVIVNPRRVREFARSIGQLAKTDKIDARILALYGEQTQPPLRELPDEQSQALRALWVRREQLIEMLVMEKNRLEHTAEKAKAVRHNLCSHIDYLRKQVKQADNDLDREVRNSALWDEYEMLNSVPGVGPVLSVALLSDLPELGRLNRGEIAALAGVAPFNCDSGTLRGQRRIDGGRSRLRRVLYIATVAAVRCNPALKPFYLRLRAAGKPAKVALVAVARKLLTILNAMLKTKTAWRPPCPARPELT

SEQ ID NO: 59327 - protein, 356 aa, unidentified
MVAVRFSLLIPYSCLGHRARIHKAGKKGELTSSLLQRRAKVKPSDSKTFIGIDVSKQYLDVAVLPSEETWQTPNRPKELPALVERLAALRPTRIVLEATGGLELPVAIALAAEGLPVVVVNPRQVRDFARALGRLAKTDRLDSCILARFAQAVRPKVKPLPDQEALLFKELVSRHRQLTVLLVMEKNHRHSALPVLHQGIDRTIRHLRKELDKLEKKMNQCIRQSPVWRAKEKLLLTVPGVGPTVAKTLLAELPELGLLSHKQIAALVGVAPLACDSGQFRGKRRIWGGRASVRQKLYMATLVGTRFNPIIRAFYLRLVEHGKPKKLALVACMRKLLTILNAMVRNQLPWQQQLQA

SEQ ID NO: 59328 - protein, 408 aa, unidentified
MQVLYPRCAGLDVHKDVIVACVRCVSTPVHQEVRSFQTTTSGLQSLDEWLSSHACTHVAMEATGVYWKPVWHILEADFELVLANAAHIKNVPGRKTDVNDATWIADLLAHGLIRSSFVPPAPIQELRDLTRTRKQLVREISQHSSRIQKILEDANLKLGSVLSNVLGKSGRAILHALIAGETNPERLADLAEGTARKKRAELIEALHGRIREHHRGLLKVHLELVAALEQALADIDATVGKTLAPIRDSARLLTTLPGVSDLTAQVMVAEIGVDMSRFPTAAHLISWTGLCPRSDESAGKRRSTRVRKGAPWLKTALVTAAWAAVRVKDSYLQAQFHRLRSRRGAKKAILAVAASMLTAAYHMLKNGLPYRDLGADHFSSRDRSKAILRLVRRLNDLGCEVQLTPQAA

SEQ ID NO: 59329 - protein, 364 aa, unidentified
MHSEFTKVQFTGQHVYVGIDVARRSWKVCIYVGQSYHKRFAQPPDPKALFEHLRSNFPGAIYHSVYEAGYFGFWIHRELTRLGVHSMVINPADVPTTDKERRTKTDRVDAAKLAWALANDGLKAIYVPERIAEGDRMLVRMRAGFVHKQTRTKNQIKACLRYYGEQLPDDITDRYWSRTYIKWLESRTFEHESGRAAFQALLTELLNLRATIADLTKRIHVLSRTERYRKRVDLLLTVKGISLVAAMTFLTEIVTLERFRKLDHLLGYIGLVPGEHSTGDTDQDTGLIPRRNTALRYMLIECAWIAQREDPVLLQAFSQYCRRMPKRLAIIHIARKLVCRMRYVLKHEEQYVTGVLSSGRVWAA

SEQ ID NO: 59330 - protein, 357 aa, unidentified
MNKASEHVGMDEGIRFGAQPLKLPPILIMRYLGIDVSKAKLDCLLLDPATGKQRSKTVANSAGGLQALLHSLHSWGVPLGEVHAVLEPTASYHEEAALALHEAGLRVSLVNPAQARQYAQALGMRSKTDALDAAVLARFAAAHPPQLWSPPSPAARALKALLSRRDAVAADLQRERNRQEKLLPPPHTPEAVATSVAQSLAFLQTQLDELQRQIEQHIDQDPHLRGKRELLLSIPGVGERVAQHMSALMSVHDFQSADQLSAYLGLVPVQRQSGSSLQGRSRLAKNGPSALRRLLYLPAITAKRHNPCVKAIYDRLIAQGKPKMAAIGAAMRKLACLCFGVLRSGLPFNPQYQAHKA

SEQ ID NO: 59331 - protein, 343 aa, unidentified
MWYIGVDLHRKSLTLAAVHDSGQVRPPVRFDCQDTEQILAAFSDLSPFRAVIEATSTYRWLHDLIHGHGTVVLAHPQRLRAMTLRRSKTDRLDSQLLAQLLRLDQIPLAYIPEPRYQRLRELTRYRGRLTQALAQVKVGLRLILARQNRLAPYKVPFGPRGRYWFSRQDFGPVDNLIRDELLERFTHFEKQITALNEQFEKLRPEYPEVEALLVLPGIGLYSALMVVGEFGDVTRFRMAKQAAAYTGLTTRVFQSGDTCRHGHISRQGSAWLRWILLEAAMKFVRKDVPLANFYERIRKRASAKIARVAAARKLAEICWKRLVRWHRELGRQKPTKEIERVAA

SEQ ID NO: 59332 - protein, 392 aa, unidentified
MRERITEMQMMIEGQSHFQPFGLSYWGFEDLNKGVGSMTASYEYHIGVDYHKSYSHLVVQDSSGKTLRSGRVKNDRQSLGGFLERYRENSHAVVEATRNWMVIYDWLDDICDDVVLAHPLKVKAIADAKIKTDKIDATVLAHLLRADLVPEAWAPSERSRDLRVALRERMFYVRLRTMTKNRIVTVFDRYPEQTAQLKKLGDLFGKAGRVQLAQVNVSEIDRIQIDRGLAFIGDIDMRIKQSEATIRAMTKANANVKLLKTIPGIGEFFARLIDAEIDDISRFRQPKKLAAYAGLVPSTYSSGGKTFHGKIIKQGNKWLRWAFVEAVTPAIASDPQLRAQYEHLKIKGINKARVAIARKLLTIAFQILRDQRAYEPRGTATMEGASTISRLS

SEQ ID NO: 59333 - protein, 418 aa, unidentified
MDVAEGMDVLHERCAGMDISKKDAKVCVRTPSTGNRFKQTITTYGATSGEVLRLRRDLEAAQVSLVVMEATGDYWKPFFFPLAETLNVELINAKQAKNIPGRKTDVSDAAWLAKLAAFGLLRASFVPDEPIRQLRDLTRARSGLAQEQVREFARLEKILEDTGIKLSLKASALTTKSSRKILEALIAGEHDSAALAELATRQMRKDMPVLLDALSGRFTQHHAFMVRLRLDRIDELERNIALLEARIDEVIEPFRLARELLTTIPGISDTVAAVIIAETGGTMEQFPTPGHLASWAGVCPGQNESAGRVKSTRTRPGNRHLKGALGIAALSVVRSNNTYLAVKYRRIKARNPKRSLIALVAIEHTILVAVWKMLTTGEAWHELGTDYYDHRNPDQLKRRALRSLRGLGYDVELTPAAA

SEQ ID NO: 59334 - protein, 419 aa, unidentified
MTIANTIPVSPLLVAIDISKHRHEVLIAVPGKARRRRLAIRNSLEDFERLIAVLRQYGLPVRIGFEATGNYHRALAHHLGAAGFELKLVSSVALARTREALHNSWDKNDPKDAQVILRMLEIGAVQFFHDPLIAGTNDIQELSKTHEIISRSKTELWHRILTHYLPLYFPEAERFHRSARSDWFLAFLEQFPSPHMISAMTKEAFIDAAWDVVGRKVSKTLLLSDIYETAKGSVGLPVAAESDALRMFRLVLAEGRGLVRQRDEVENRAVELLSDHPDYQLLVTVPGIGPINALTILAEAGDLRRFGHHRQFLKFCGMDLATVQSGMFRGQSKISKYGNARLRRTFWMAGQTAVLHRTNSFRDRFERYIAKDRHNAHLRRKAYTAIAAKMARTVHAVIKHGQPYRPFFEGASPGGRTLL

SEQ ID NO: 59335 - protein, 449 aa, unidentified
MNAMTGTLAVLDPRAAFVDVGSEQMYVSIAGGPPAVFGTFTAELHRLRDWLKERSVAAVAMEATGVYWLPLYGVLEAAGLKATMVNGRQTRNLPGRKTDMKDCQWGATLHAHGLLHAGFVPPAQIRRLQDYLRLRGDHLSSAAASVQHQQKALERMNVKLHDVISSLVGASGIKVIGAILAGERDLDRLLALCDVQIREKKATRVKESLRGTWAEEHLFALRQAVENWQHYQGQIAACDQRIEAVLRAINGPDQPAQPQDKASPIKRSGVNAPQIDDLHGLLFKLCGGKDLTVLPAHTDYSLLQLIGEVGTDLSPWPTEKHFTAWLGVAPGSHQSGKRKGTVRRKRNRAGRLFCVMARGLARSKHIALGGFYRRMAGRRGGLVANVALARKLAVLFWRVMVKGLSYAEAGLKAYEEQVLETKRRALCRLAKQLGRVVLPSLAELQTAKT

SEQ ID NO: 59336 - protein, 412 aa, unidentified
MTATNQFAAHLGLDWADKKHDVCVQFNNGERVLHVIEHTAEALDVWLTELHQKVKGRIAIAIELKKGPVVYALQKYPFITVFPVHALSLARYRQAFSPSGAKDDPQDAELALELMLRYPQKIKAIEPDNADIRLLQQPVEQRHQLVEDKRRFVNRLINTLKQYYPQPLEWFSHRGSLLLCELIMRWPSLQQLKRARRDTIRNFLNAKGGRTMVLTELRVASIDNAIPLTTDPSVIEANALMATALVTQIKVVSEIIKTDDERIETLFDTLPDAGLFKSLPGMGPCMGPRMLAALGDNRDRFNSTEEIQNYAGIAPVTERSGQKSWVHWRWQCARFVRQTFVEWAARAVNSSYWARLYYQGLREKGKSHQSAIRALAFKWIRIIYRCWKTKTRYDEAKYLLALETRKSPLLKP

SEQ ID NO: 59337 - protein, 339 aa, unidentified
MSQEYVGIDLHRRRSVIVRMTEAGEEIERVRIDSDPVAFALKFGDLEPGTDVVIEATYGWYWAADLLKDHDMNVHLAHPLGINGFKNRRVKDDFRDAADLADLLRMDRLPEGWIAPPEIRELRELVRYRAKLVALRSGAKAQVHAVLAKLGVKVDVTDLFGVAGNELLDDLCLKGAFRQRVDSLRDLIDVYGGEIVFFDKEIRTALKDHRGYRAIQAIPGVGAVIAAILVAEIGDVTRFSRPAKLCSWAGVTPRHRESDAVVHRGHITKQGPRLVRWAIVEAVVRLSGDTKQARDYRRISERRGKSIGRVAAARKLLTLVYYGLRDGHISCLERLGRAA

SEQ ID NO: 59338 - protein, 473 aa, unidentified
MAVRNRKPVCVGLDVHRNNVWACVTFKDPAKGKDGLVFVTKKFDSNHTDLASMCEWIYTTLPDLDDRAIDVYMESTGKYSTPVFDVCEEMGLKPHIVNPKHVRTIAGQKTDQKDCAWIAELGANGLLRESYIPVRELRESRRLSRSRTKLVQERGDTIRRIRNILTEANIRMDLVFSGIEGESARSVIEYLLTTEEPDLEEVKKRIRKSCRIMRFSTHKERKEKEEELRKAFAGAKFSSVQKFELENAYERVDRLTAQIQRYEQMMTEILEPFKSYLDLLDSIPGISGLSAMQILSETGTDMGQFKNEKHFISWCGLCPQSNQSNNKHKSVKIGKGGYYLKPVLIQCALNAVKHPYFKGKYEAIAARRGKKRALIAIARKMMVLAYHMFQTGEYFQERKKQIPAVLEKEQSEREQSMETSAEATDAPAIIRTAKEIVEMLQNTDDEMKHKIEQLLAQIGIAQCEYQTGAISTI

SEQ ID NO: 59339 - protein, 475 aa, unidentified
MNHNCYTLGVDPAKEKMTVCLLNSSRKVIARSVDLPNTREGFNALFALLRRHVPAGALVVAGVECTASLDDNVLEYLTHLEAPFKIAVIRADAAAVHRFTGPRVLRGKTDHADARRIAEFTHTYARELARFEHSSQLQALTRLVNERLALSEDLTAQKNRLRDRLVTSFPELTQVFNDPCCGVALALLRVAPTARHAATKRPSSLAKIKAPRRGAHVVGIERAHALHAEAQTSIASACDDTDAASIVRLVDRITMLIDQEEQAEKELRRALTPPAPAQQAASNQAGAQTGEEAPQQAGNEQNADADIARQVAIADSMPGIGFVSAAAIVLRSGGVRRFITDKAFAAQLGVCPERNQTGSSRDTARLTRRGDRRLRAMLYMCILAATQCDLAMKFHKWRLCKGGLTPKQAQCACMNRYAKILWHLIQKNTDYDPRRAIQNAQKHHPELWKTFLQTVENKGTNSKKNMQNTPKEALI

SEQ ID NO: 59340 - protein, 342 aa, unidentified
MVTFAPAITSPTSLTSPPSLASPASPTFLGIDVSKASLDVHFSDGRAALGKLDNRGVSIKRFVAQLSKNPPVLAALEATGGYENAVLHALLDAGVSVVRVNPLRVRRFAQSRGQQAKNDALDARVLADFARVNVDRLRPMARLSDTARMLKELVARRRQLVEQCTANKSQLEHAGFPQVRKSIRATLRHLQGQIAAVEALIQEQIDQDADLRRRQEILLTVKGVGLAVSRVLVSELPELGNLDRRQIAALVGVAPFDEQSGTVNKERHIRGGRATVRAALYMATLVATRRDPVIKAYYQHLKGRGKPKKVALVACMRKRLNYLTSLLSKKSEMPPDGGGGAK

SEQ ID NO: 59341 - protein, 428 aa, unidentified
MPYKIAGIDVHKRMLAVVVSDVEVDGEYAFERRQFGSNPAQLRLLADWLLEQQVEEVVMESTAQYWKPVWAALERYWTPTCKKREGAGSMSGTPHLAQAQSNRARQGRKNDFADAERLVKRLVANELTLSFVPDPEQRLWRTVTRTKYQLTRNRVQLQNRLEALLEECHIKLSSLVSDLLGVSARRMVQALADGETDPAALAALANYHLRATQEQLRDALGACQALNPVYRRLLKLALEELQLIEKQISQLDQEIADLLRPYQDQVQRLAEVPGLGVDSAQQIIAEVGPTAATFPSAGNLSSWVGACPGDDESAGVSHSHRSPKGNRQMRRLLNQAANAAVKYKGGIFEILYRRYVPRLGHKQTIGVIAHRLCRLIWKILYQGVRYEERGPEVRKKSQRYRAARMIRELQSLGYRVEQANSQSADVPA

SEQ ID NO: 59342 - protein, 358 aa, unidentified
MLAELLDAVVGVDTHRDTHEVEIALPTGIPIATCQISNDTTGYAQLLAWIIDHAPGPRLAVCIEGTRSYGVGLARAASAAGLLVLECEQPNRKTRRGKGKSDPIDAHLAVLAALRLNADKLPTPRADGDREALRILLGARQELTTINTAQTNRLRALLRDGDDTDLALARGPLNDAVLAAIARRREPRDASRHQSVRHAEIRRLALALRESGRTLRANRAQLQTIANDLAPGLIDRRGIGPVTAAQAIVSFSHPGRCRNDAAFAALSGTSPLQASSGRTVRHRLNRSGDRALNSTIHTIAMVRMRSCPRTQAYVTRRTAEGKTPREIRRCLKRYIARELYRTLTATMTTTATDTPGAA

SEQ ID NO: 59343 - protein, 407 aa, unidentified
MRYFVGLDWGSTAHAACVIDDEGAIVAQLEVQHTAEGLRQLLAQLARIAPPQQLPVAIERPSGLVVDTLVDAGHPVVPVHPNQLKACRPRYRAAGGKSDPGDAYILADVLRTDGHRFRPLRPLSDETRALRALVRCRDDLVAERVALANQLRSLLESFWPGTAVLFANIDSPIALAFLERYPTPGRAQSLGPKRLAAFLARNAYSGRRDPAELLKRLRSAATGLAGPREEEAKGEAVLDLVGVLSTLVARIRRLTCAVQNAVTQMPAGQIMMSFPRAGKVNAAQIVAELGDDPERFQTEDQLAAEAGVAPVTHASGKSRSVTFRWACNKRLRRAITTWADNSRHANPWAQQVYARARARGCDHPHATRILARAWIRVLWRCGRDGTLYDPNLHGAARAFLQQPQQAA

SEQ ID NO: 59344 - protein, 346 aa, unidentified
MTIVVNSVLRVKGMSVFVGIDIGASSVDAVTYGEGKFSKPKQYKQSPDGHNSLVGAMKKLRPKCIVMEATGVYYFDLAVALAEAGLPVAVINPKSTKHFANIKLQNSKTDSIDAALLAEYGMRMEPRLWTPPDQHRQAIRSLGRQINRLTGSRTQAKNRLHAMRATQSTPTLLVEDEQEAIEMLDRRIDRLKRAAVELMEQSPELKRLYEHFCSAKGIAQAAALALLAELCVLPDHLKSAQVSRHAGLDIRLYQSGSSVHQASRISKAGNVYIRSALYMPAMSAVRFDPNAKAFYEGLVARGKTKLQAQVAVMRKYLTGLWACVKTDTPFDSSLLFSDCHAKNACA

SEQ ID NO: 59345 - protein, 428 aa, unidentified
MIPAVIERCAGIDVHKKFVMVCALLGPAQANPEPKIRRFGTYNAELEQLRDWLQELNCMHVVMESTGPYWKPVFNVLEEAGVQTTLANPQQVKNLRGHKTDMKDCQWLAHLLRHGMIRPSYIPPRPIRELRDLTRRRKQLVRNGAMERNRVQKLLEEANVKLGNVLSDVFGASGQEMLLALVQGEATAEQMAQLAKQRARKKIPQIQAALEGHRMNQTQRDLISQCMSHMAFLEQQIEEVDRQIQDKIRNFGLSESYALLQTVPGMKKEAAATVLAEVGATVEAFSTPAKLSSWAGVCPGNNESAGKRKSTRTTKGNPYLRDMLLECAWASSHLKNSQMQHRYQRLQPRKGHKRAIVAVAHALIQAVYYVLSTRQPFVDTAEPPRSPATVRRLIRHHTRRLRKLGCWLQRGTRQIQTSTLQKPQVTSG

SEQ ID NO: 59346 - protein, 394 aa, unidentified
MKLIGIDIGKNKHFFCIMDQQTGEIISQPVSFSNDKEGFDFLIQKIKSYSKDSVLIGMEDTGHYHFALLKYLLNLQYTVALINPKTTDFNRKIQGGITKNDKLDTINICDVLDTPERKKQYRITKVNSFDLYEQKQLTRHHHNLKEEENVYKNRLQKCIDIVFPEFNKLFNSKYGTVYMNILKMFGSAENIANTDIRTIRKCFEIEGRGNRISLTPERLKECARSSIGISSSAEVIQIKHLIAQIELIEEQLTEIDKKIEEFSIQNNSPILSIPGISHFSGTSILAELGDISNYSKPSQIIKFAGVAPLHYESSQFNAQHTAITKKGSKYLRKTLYQIILPVIRHNPVFNKYYQLKISQGKGHRCAQGHCVRKLLRIIYHLLKTNQQFDPQLLR

SEQ ID NO: 59347 - protein, 314 aa, unidentified
MECVHVGIDISKDWLDMGVLPEGISRRYSYTEEGLDELEEYLKGVAPERVILEATGGLEISVASRLAGAGLPVVVINPRQARDFAKAIGRLAKTDKIDALVLARFGESVKPEIRPLKEEEVQVFSAMNARRRQLSGMISMEKSRLGKASLKVRKGIEEHIAWLQESLREIDRDMDDQIKGSPVWKEKADLLQSFKGIGPVISRALLSDLPELGEVGPKQIAALVGVAPLNCDSGKRRGKMMIWGGRGHLRALLYMAAVNAIRFNPVIKSFYERLIGAGKRRKQALVACMRKILVILNAMLRTRSSWDPAYSYAP

SEQ ID NO: 59348 - protein, 403 aa, unidentified
MNSVGIDISKGRSTIAVMRPFGEVVISPFEVRHTGSELSKLARQLKSLDGETRVVMEATGNYHASVAKLLHDAGLYVSVVNAKLVHDYGNNELRRVKTDRKDAVKLANYGLDRWLTLPRYIPEEDTRLLLKNCYRQYRQYSKVQTVLKNNLISLLDTVFPNVNRLFSSPIRGDGSEKWVDFVAEFWHCRCASEKSERAFTSKYLRWCRKHGYNFREAKAHTIYAEASGHIGVMPKSETTKLLVKQAVSQLRATSTALAALKQEMQSLASVLPEYPVVMDLFDVGPTLGPQLIAEIGDVRRFYSKKALVAYAGLDAPPNDSGDVTGRHKSMSKIGASSLRRTLFLVMSVYLQTAPLDEPVCQFMDRKRAEGKLYRVYMMASANKFLRIYYATVKAYLESLEHTA

SEQ ID NO: 59349 - protein, 320 aa, unidentified
METEKAYVGIDVSKETLDVAVHATDQRWRFANSDKGITETVTCLEELSPTLVVMEATGGMECPLAAALAVAGIPLVVTNPRQVRDFARATGRLAKTDAIDARVLAHFAAAMHPESRRLPDSQEQELKAILARRRQLIEMLTAERNRLHSARSKAVKANIKAHIDWLEKEMTHIDHDLEQSIRQSPLWREKDDLLKSVPGVGPVLSTTILADLPELGLLNRRQIAALVGVAPFNRDSGHMRGQRTVWGGRAVVRSALYMATLVATRHNPIIRDFYRHLLSQGKPKKLALTACMRKLLTILNAMVKHQTPWHYPVSGTLQTP

SEQ ID NO: 59350 - protein, 492 aa, unidentified
MRLPNAAATPGATCSSRRARLRISRSMIFPEVSLVSTRSTPFTRPPRLDVLAQGLLLHTPPPPVAEDLMRVDGDPTGNKLKVATHFSLWRRSMRCADHPVHLRAAVREEDSSLFVALELSKSAWLIAASAPGSEKVSKYRVAAADVAALVALLARLKSQAERYRSGSVQVVSIHEAGLDGFWVHRMLEANGVESHVVDAASIAVNRRSRRAKTDRIDVEGLLRTLMGWARGERRICSMVRPPSPADEDERRLTRERGTLVTERTRHVNRIKGLLATQGVFGFEPLHKNRRKRLEELQQWNGQPLPARLKTELVRELDRLELVMSQLGALEAERDRALQARRTVVGNTTKAPSSGTASAGEVGSRLLRLRSIGPEIASVLTLEAFYRNFSNRREVAAYSGLAPSPWKSGGIDVEQGISKAGNARLRTTMIQLAWLWVRHQPSSALSRWFHERVGDKRGKIKRIAVVAVARKLLVALWRYVAQGVVPAGAELKA

SEQ ID NO: 59351 - protein, 344 aa, unidentified
MLYAGMDISSKSFVVHVVNERKIVVLKTEIAASRESLRWMVRQLGREPKLFVFEAGNQLKWVADTLRKEEGVSLHVVHPNEVKWISASSGKTDKVDAKKLAELARGDLLPRKVHLVEGEARQLRELLSARTQLMQKRVSMLNTLRGYLKQEGVRLGANFFAREDWQGRLEKTRLSHTLKLILKVFRPSIEALEASEHELNQRISDIKNEKTQLLETIPSIGVLSSRTVVAALDDAKRFENRKAVAKYGALTPTIYQSGDTVQLGRINRDGRHEVRRVLLQCAHLLSRMKSPAAKPLRQFYERIERRQGKKKALVALARKLLTVAYGVLKSELPYDQSKLLPHGA

SEQ ID NO: 59352 - protein, 373 aa, unidentified
MNEFSKYVGLDVHKDTIAVSIADAGRTKARYYGVVENTAQSVSALLKKINRDGELLELCYEAGPCGYGLYHQLIASGHECRVVAPTLIPQRASDKVKTDRRDSLRLAELLRAGELTPVWVPDAEQEAIRDLVRTRDDFKTSQRQVRQQLLAFLLRHALRWSGGKKNWTKGFWYWLEAIRMPNPHQQYVLKEYIDAVRRCADQIQAIEKQMLAAKSGWSMEPIVEGLMAMRGINLVTAMGVVAELGDLSRFSKPTQLMAYLGLVPSEHSSGSTRHQGGITKSGNGHVRRLLIESAWCYRFTARKSREIEQRAQRTSTEVQAIAWKAQRRLCARYRALSERGISSCKVVTAVARELSGFIWALVQQVRREQAASR

SEQ ID NO: 59353 - protein, 363 aa, unidentified
MDSSPPADGVIMYHWDKQRNEEESEMNANVVGLDIAKNIFHLYSLGIDGKATKKKLKRADLLRFFANYTVSLIGMEACGGAHYWARELTKLGHEVVLLNARYVKGFVVGNKNDFNDAQAIHEAVLRPNKRVVRVKTEEQQDMQLLHNIRQDLVDKRTALVNQLRGLLMERGIVIAKGINHVRKELPFILEDAENGLTHLSRELFSEHYEKLKELDKAIKSHEQRIGRLCTQNQCSKRFLDVPGVGIITASIIAADIGDGKAYASSRDYAASLGVVPKQHSSGDKQVYLGVSKRGNRYIRKMLIHGARSVLKTCLGKTDKLSLWLQALIERRGFNKATVALANKNARILWAMASQDKGYQVHAA

SEQ ID NO: 59354 - protein, 342 aa, unidentified
MGSVKRGGRSCHFMSAFVCGLDVHKDSTYATIVDSHGKIVNQMRMKNERVLQYLSHFDVCKVGMESSNQIAPLFRKLTHNGYSVVVSHPKKTRYIAEAKIKCDRVDSKAIAELVRLDALPLAYFPSEETAKLREKVRRRAFLVRQRVKLRVKIKSVLTYEGRKWPADHGLFTRKGVEWLHGLSLQPVESYLRIMKPLDDEILLLSKELRGMAEDDGDVKLLMTILGIGYYTALLVKSEIGDVNRFPFGERLCSYAGLVPSTHASGRTVRHGSITKEGSRWLRWVMVEAAQTHVHKYDTSITRAYNRVAERRGKRIAVIAAARKLLMCSYPVLKNKRPYYDQA

SEQ ID NO: 59355 - protein, 386 aa, unidentified
MQKLNDLSRCLTTLEPDGTLIAVIEMSQSSWLVAGIVPGVERQPLKKLKVDESTLLNLLHRWREEAQKAGHRIKRISVAFEAGRDGFWLARWLRARDIEAHVIHASSVAVSREHRRAKTDRLDSELLKRAFLGWLRGERDHCKMVAIPTIKDEDAKRPNRERESLVGEQNRIVNRMKATLIRLGIRGFNPKLKKAAERLEGLRTPEGEPIPLNTLAELHRDMVRRRLVSDQIRQIENVRLEHLKQAPSDGPHAMVRLLARVIGVGIETADMLVQEVLSRNMRDRRAVARYAGLTGSPDESGTKRREKGLARSGNARVRRGMIQLAWRFLMFQKNSALAQWFQTRTKNARGTRKPMIVALARKLLIALWRFVREGVVPDGVVLRPTS

SEQ ID NO: 59356 - protein, 343 aa, unidentified
MDYFAGLDVSVKETSVCIVDDAGKIVREARVASEPEALLQVLTNTLYRFKRVGLEAGPLSQWLYSSLAEAGLPVICVEARHMRAVLRAQINKTDRNDARGIAQMMRAGLYRPVHVKTLRSQKLRILLTHRKLLQSKAIAIENDLRATLRNFGLKVGMVGTVKFEARIKELVENLPDVAVLVEPLLIVRRVLREQVAILHRRLLAVVRDDDVCRRLMTVPGVGPVVALTYRATVDVPARFRNSKAVGAVFGLTPSRYQSGESDRSGRISRCGDEMTRMMLYEAAQSMLAHSAKWSWLKAWAMKIARHRGMKKAIVALARRLAVIMHRIWVDGTEFRWTREVTAA

SEQ ID NO: 59357 - protein, 364 aa, unidentified
MSSVSQRSLVHLGMDVHKDSISIGILRPDDSMDVEKIFHDEESVRRFIARMGEPRHLVACYEAGPTGYELDRLLKRLQVRCDVVAPSLIPKAPGDRVKTDRRDCRRLARLHRAGELVVIRVPSPEEEAVRDLCRARGDVVIDLDRARRRLGAFLLRHGRVWRGGSNWTLKHEDWLLGLRFDDPALASTFAHYRSIVEERRLRLQALEADLLPYCEKDPYAEGVHRLCCYRGVDSIGALTLVSEVCDWRRFAKASSFMGFVGLVVSEYSSGDRTYRGHITKAGNVHLRTQLVESAWAYQRGPYVGERIRRAQERCSPATRERAWAAQVRLCGRFRRLAARKNVKSVVAAAVARELAGFLWGEMTA

SEQ ID NO: 59358 - protein, 353 aa, unidentified
MKTYYVGMDVHRASIVMVVLNGAGKVVMQSVIETGAERVRGFLKQLRGQVYVTFEEGTQANWLHEVVRPLVTEVVVCDPRHNKLLQSGNKNDRVDAQKLAELLRHGALKAVYHGDNGVRTLKELVRSYDCLVSDTTRVMNRLKAIYRGRAIGCAGHDIYRQDRRARWLEKLTERGAKQRASFLYQQLAALKPLRHEAKRMMVKEARRQTAYPWLMSVPQFGSVSVAQLLAIVGTPHRFRSKRQFWTYIGLAVVTRTTADHEVVNGVLRRSKRPVSTRGLNRNHNHLLKRVFKNAANGACNSGPFKAAYELRVTQGMVPSLARLTVARQLAAITLAVWKRGEQFNPERMKQQAA

SEQ ID NO: 59359 - protein, 351 aa, unidentified
MPRKSSVCTVTAIGIDMGKTTLHMVGLDSYGAIVLREKVSRGRITSRLANLPPCLIGIEAGMATHYVARELAALGHDVKQVPPAYAKPFRQGHKNDFRDALAVAEAVQRPTTRFVPPKSNEQLDLQALHRVRSRLVSQRTAVINQIRGFLLERGIIVRQGLRFLRQLLPDILAKRTDVLSPRMVRIVSDLAGDWRQLDDRIETVTDEIETLAKADDSCRRVMTVPGIGPIISSAMVAAIGNGSAFSRGRDYSAWLGLVPKQMSTGDRTILGRISKRGNSYLRMLFMQAARVILLRPANWPKHGFGAWLARAAQRLHPNVLAAALANKLARIAWTVLAQERSYEARVTKAAA

SEQ ID NO: 59360 - protein, 405 aa, unidentified
MLFVGDDWAQDHHDVEVMDAAGRRLSKARLPEGVAGIERLHAMIGAELGEDSRAEVVIGIETDRGPWVQALIAAGYTVYAVNPLQASRYRERLAVSGAKSDGADAHMLADMVRTDSHQLRPVSGDTADAEAVKVVTRTHKTLIWERTRTTQRLRHALLDYFPAALLAFDDLDAPDTLELLAKAPDPTAAAKLTTTQIAAALKRARRRGIPDKVAKIQAVLRAKHLGQPTAVTAAYAVSVRALIAMLVTLNEQVNFLHEQVEDFFGRHPNAEIIRSQPGLGAMLSARVLAEFGDDPHRYASAKARKNYAGTSPITRASGKKKVVTARHVRNDRLIDALIAQAFSALRVSPGARAYYEKQRARGIEFNAALRQLANRLVGILHGCLKTGTPYDEATAWSHRAHALAA

SEQ ID NO: 59361 - protein, 288 aa, unidentified
MTITTIGIDLAKNVFAVHGVDQNGKTVLVKSRVTRTALPGLIAGLPPCVIGMEACFGAHYWARLFRQYGHEPRLMAAKFVSPYRMAGKSGKNDAADAQAICEAVRRPHMRFVPVKDESQQAMQCLHRTRQGFIEEKTATYNRLRGLISEFGVIAPQSTDALRHMVSAQKNSLPLQVQQCVDDLLEHVDRIEANITEYDRILSRIAKTDHRSQRLMKLKGVGPTTACALVACIGNAHDFKNGRQLAAWLGLTPSQYSSGGKSKLGRITKAGDSYLRTLLVQGKLPGNSY

SEQ ID NO: 59362 - protein, 413 aa, unidentified
MSDQKRWYGGVDWASESHHVRLIDEQGRDVGEKIFKHAGEGLAEMVAWLLATSGAAEPGQIDVAIEVPHGPVVETLIERGFAVHALNPKQMDRFRDRYSMAGAKDDSRDALVMASALRTDPHCFRKLAATDPTIVELREWSRIAEDLGGERTALTNRLRQQLWRYFPAFLDLDADLGAPWLIELWQAAPTPDKARRIRKASIDGILKRHRIRRLDAPQILEILRQRPLAVAAGTTEAARAHIVTLIARIRLINRQLAEAHHQLDTLTARLGAAEEAEPGQIKQRDADILASLPGIGRIVLATLLAEATDALQRRDYPALRTLTGVAPVTKRSGRSHFVVRRHACHRRLANAVYHWARIATQHDRTSRAKYAALRARGHSHGRALRSVADRLLNVACSMLKTGTTFRPAFANPK

SEQ ID NO: 59363 - protein, 409 aa, unidentified
MRYYIGVDWADQEHAVWVSDEAGRKVTARGVPHTAQGLSEWGRELDEWRAQGLGLWAAIERPEGRVVDFLLDHGVVVYPVNPKALDRARDRFRQSGAKDDRFDARVLAEFLRTDHGHLSVLQPSSVEAQELKRLTEGYHRLIRQQTRLVNQLTATLKAYYPRALEVAELTTALARAWLQHFPTPEALGRLTERQWQRWAKAQHLSAARSQALWGLLQAPQLPVPAHVVRAEARWMQALVKQLAPVVDEVAAYRREIETFFAALPAATWARTLPAGQGGITVPTLWARLGDAPGRWSSFRHLQAQAGMVPVTVRSGKQQVVVFRFACDKLFRYAVDQLAFLSLQRSTWARAAYDQQRSRGHSHRRALRAVGAKWLKIIFVMWQRQVAYDEQYHLATMARQALQRPDRKIA

SEQ ID NO: 59364 - protein, 427 aa, unidentified
MNDTDLSRIEGFRQLKGEIRGSDRHLIVGIDIAKSKHHAFLGTANGKSVLKGLIFENSRQGLEKLLTRVQFYIDRDGFRNVVFGVEPTSVYHKPMAEQLIEHGHMVVYVTNEAIKKNRSLLDGRWDKNDTKDAANVADLISQGKCNYYDLPGMPIRELRSLLLLRKRLKKQLHSCRVRIRNNLVAQYFPELDKSWNQAEDENLAIVRWFLSPAKIRSLEFEDFFNRVTKRCRGIRQHRRLRTIWEMAGESIGCRPGAAMQLEAKVLTESIKNTKEQIVKVDKEIEKICGSCKEYTYLLTIPGFGPYVSAVVLAAIGNPHRFENIQQLKRLAGLDLNASRSGKRSSSAVPVISKKGKGDLRYALYQAALVASSLTVQFRAYYHSILKGREREKGIGTKMRVKLATKFLVIAWTLMKKKEPFSPSYLKT

SEQ ID NO: 59365 - protein, 401 aa, unidentified
MNPVIGLDISKEESHGQAFLERGKPYKGTFHFEHAREGLEKLLQVIQDVEHASCQRPMLILEATGHYQSSVVQFLEEHHFLYIVINPLISNRLRKSNLRKVKTDAADAYLLGELYYKEEFEPFKKWGVQLLNLRYLTRQYESLSKMCVQTKLQFQAVLDQVFPAYKGVFGAMYSSISLRFLNEFPTSYLVLQTDEETLKSKIKELLTSRRGRSEDWVCVRVQRLLNAAKQNPFQQTMYSSHLVNLRVLIALILQYQEHLTGLEENIDALAEEIQEYDLIQIPGIGHKIAATILSELGEIDRFDHPKKLVAFAGIDPSVFASGKFTATRNRITKRGSRQLRYALVMAVQCGLIRSRNARLKEFYDRKRTEGKPHKVALVACANKLVHWLYAILKSKKKFRLA

SEQ ID NO: 59366 - protein, 346 aa, unidentified
MMIIGCDFHPSWQQVSWLDTETGETGERKLVQASGDAERFYRQLPAPALIGMEATGNCHWLVDLLAELGHELWVGDAAQIRASCVRQQKTDRRDAEHIRILLQEGRFPRIWMPSSEVRDLRQLLLHRYKLVTIRARVKNELQHLCLNQGVQRQHKLWTKTGQQVLRELPLKPWAARRREDLLGLLIMLDQQIDPLDRAVKEEAQRDKMALLLQTQPGVGAVTALAYVLTMGDVSRFPRGKQVASYLGLIPREHSSGGHQKLGAITKQGNRMLRMLLVEAAQTAVRLDPGLRKEYQHRCHQKPKAVAKVATARKLAVRLYWMLRTQKPYPEVVRIESSPRVPLVGAS

SEQ ID NO: 59367 - protein, 421 aa, unidentified
MSQEPLPFAAFIGIDWADRKHDVCLHVPGQKKRERSVLEHRPTAIREWAQKLRERFGGAPIAVALELAQGPIVSALSEHDIFVLFPVQPTMLAKYRETFTPSRAKDDPTDAEFALELLLRYPERLPRLQPESADMRRLRRLVELRRALVDDRVAITNRLTSALKGYFPQILGWFRDKDAPVFAAFLERWPTLEAARRARHDTLVTFFQTHNVRSKSTIARRIDAIHSEEPLTTDSAVIDPLLLLVETTIPQLRAVNTAVDRFDAEIASLCPKLPDYELFDALPGAGPALAPRLLVAFGERRERFPDAASLQKYVGVAPVTERSGNKSWVHWRFACPTFQRQTFIEWVGQTVPRSFWAKAFYQSYRERGGSHQAALRALAFKWIRVLHRCWLDRKPYDEARYLMALQKRHAPLLAFAAKTST

SEQ ID NO: 59368 - protein, 401 aa, unidentified
MSKKNTRNALDTSLSYAVIGLDLAKADCAVAAVPCSDDELGLIDRMDYESLFEQAEKLEPTLFAMEPCCGYSQISLRLQNMGHEVKVISGHAVKNWIATHKSNQKTDLNDATALAKLALYDHDLQPIRVKNVEECRIASVQTIRIQLRTQATKSLVCFKILCQCWGIVIRRGSSNTKKMAEAVAAVEKLLGAEVASSLMILRDAYKFTMKQINALDKLLDALVEANEQARTMKTVLGIGTQTAARLAVTTGDIKRFPMPRSYVAYFGLAPRNIITGHSGTPSPSKRGALKPVSSRGQGKVSRRGDRVARSFIIQGAATIYMLYCKDMLPECQLRRWLHEQIKRGKPYGKIIVSLAAKLLRIVWALLTYGEKFDSHKAGVPRSVLAAMEKPLKHDAAAESAA

SEQ ID NO: 59369 - protein, 345 aa, unidentified
MKTVTLDVHAEACQMAVISPEGEILIELQVETKPEELRRVVSGIPGPKRVILESGPLSGLIHDALEGLADEVVSSDPTRNALISRSDSSNDRLDARRLGLLDRARAIHEVYVPPEPYRTLRSLVHYDHMMATATTRTKNQIKALCRRYAVPCRGTGVYRRAGRREFLGKMPNAHVRWQMRSLYRQLDGFRRERIGARRMIAKHTRKIPVVKTLKRVPGLGPRTTPALVAWVADPRRFRSESGLASYAGLGLKNDWTAGKPVKRARASKRGNRELKRALFLSARAALRGASALRKRYDARIAAGWEDRKAIRDIARTILFVACAMWKSGKEYDDGKVGVPETDGAG

SEQ ID NO: 59370 - protein, 433 aa, unidentified
MHEVEDEPLFAERAAGIDIAKAGIEVTVRVPSDTRAGRRQQETRSFATTRRDLESLADWLRSWGVTKVGMEATGDYWKPVYFVLESRDFDCQLYHAAAVKALPGRPKTDRADSVWLARITERGSLPSSFVPPAPIRALRTHTRYRRHLTQARTAEKQRAEKLLEDGHLKLSSVISDIHGVSGRAMLEAIIAGERNPKTLAQLARGTMRGKIAQLEEALDCSFFTGEHAAILKMMLAAIDSFTAQIDELTARIEVLAQPYLSQIERLDAVHGVGTISAQDVIAEIGVDMTVFPTAAHLVSWAKWCPQVRQSGGKRKGANAAGRGNPYLSAALGEIAISASRTQSFLGAKYRRLVKRMPKKKALVATGNSVLTIFHALLSDSAASYHDLGPGYYEQRTNIRRQARNHLRNLERLGYHVTIQTINPDTGELLTATA

SEQ ID NO: 59371 - protein, 315 aa, unidentified
MTSAQVFVGIDVSKAQLDIALRPEGRFAASNDDAGFAQVIERLRAVPSALVVLEATGGLELPLTGALAAAGVPVVVVNPRHVRDFAKATGKLAKTDALDAQMLAYFAEVMRPGARPLPDEQTQMLAAILIRRRQLVEMLTAEKNRLASARKPVRKSLRAHIAWLERELSHTDSDLAHVIRESPVWREKEELLQSTPGVGPVVTTTLLANLPELGTLTAKQIAALVGVAPFNRDSGTLRGKRTVWGGRAQVRAVLYMGTLVATRFNPVIHAFYHRLCAAGKAKKVALTACMRKLLIILNAMLKHRTPWRPDLVQCA

SEQ ID NO: 59372 - protein, 348 aa, unidentified
MQSFQYHLGIDLHRKTSYWTLIDKERKVLYKKNLPTTKEGIAQGLSEMNIAPSLVEAAIEPVSQWGWYGDCMAEQGMTVRLVDVYKTKLIAGTKLKNDKVDALALAELLRSDFLPTAYRAPEQTRDMREFMRHRAFLVRLRARIRGRVHQILWKHGIISPWSDLFGIKAREWLGKLTLRSPYKEEREELTSMWKDISERLAAHNRTCEELTVRNPKAGLLMSIPGIGVITSLTILAEVGDFSRFLSPDKLACYAGLVSSSYSSGERTRLGHITHRGSVWLRTALVEATATVNPKWGALHDFYARIKERKGSKVARVALARKMLTLSWHLVNSDQFYKPSVGHSDSVKR

SEQ ID NO: 59373 - protein, 316 aa, unidentified
MDHKQTVYGVDVSKAKLAIAQYEGETMVEIDNAPEPIAAWLASVPAGSAVAMEATGIYHRLLAQLAHAAGLVVYVLNPQVLKHYARAIGQRGKTDGCDARMIARYLVHERSKLRPWQPPVAAVDTLSRLLVRRRALVSARQTLAQSLSGMPMLKAPRQTLLASFKRMIATLDLLIRRELARIPEMAALHRRLMSIVGIGEVVAAQLVAALRTLCFTRAAAFIAYTGLDPRPDDSGQHRGRRRLSKRGPALLRCLLYNAAMSAAKSKVFKPVYARLRERGLQSTEALVILARKLARIAFALYKSGEMFDPEKHLKTT

SEQ ID NO: 59374 - protein, 362 aa, unidentified
MNYRIGCDAHKHYSQFAVLDQDGQLRQQTRVDHEPGAIQAFLENMPEGTPVALETVGNWYWIADEIEAAGCLPLLTHAAKAKVMMGNVNKTDKLDAKGLAKLLHLDSLPTVWLPPGEIRDERELHRTRMALSKLRTALKNRIHATLAKYGITSTEHSDIFAGAGRAWLKTTLSRLPPETRRCVTQEIEALDGLQLQIAQLEERIRERIALTPSIQLLKSLPGVGDILGIVIDREIGSIDRFYTSGRFTSYAGLVPTVHASGGKTRFGHMRKPSNQYLKWAFIEAANVVVRHRHHPAWKTKYVCQVYDQVCQRKGHSIAVGAVARHLAEAAFWILKRQQPYRPPANRQASPKQVQGRAQLVST

SEQ ID NO: 59375 - protein, 297 aa, unidentified
MAKSHLDIALCGERWRVANTQTGIGGLVERLKAAAPKKLQVICEASGGYEQALLGALAEAAVPVTLVQANRVRQFARACGILAKTDRIEAVVLASFGQALKPLPSPAPPLHLLRLRELDRQRCHLSRLLVAEQNRLAQLRCAQLRRLARSLIGKVQKQIASIDQRIASLIEQDQTLSAKAKKLTSFTGVGTRTAALLLAQMPELGRLNRRQVAALAGVAPYNRDSGSMRGKRCIFGGRRALRSGLYMAALAAARRNHILAPFYQRLLAAGKPPKLALTAVMRKLLIALNTALSPYPA

SEQ ID NO: 59376 - protein, 474 aa, unidentified
MKAKCRPMQGKWHEMNRKQRRNTMRKIQSDDLSLEVVHPDAAGIDIGNESHYVAVPPSRDSQPVRRFGCTTAELKAMAGWLKQNGIRTVAMQSTGVYWIAVYDVLEAAGLEVYLVNARETKNLPGRKSDVQESQWLMKLHTYGLLRNSFRPTQEIRTMRTYWRQRNDLVRAAGRHIQRIQKALTQMNIQLANVLSDVSGMTGQAIIKAILEGERDPHKLAAFRDFRVKASEEEIARSLEGHWQEDLLFVLKQEQDGYEFCQKQMAECDRRLKQYLQRREDRSQGATLPEEKRKERLRKKKKGNAPGFDLRAELFRMTGTDLSQIDGIDVTTAMTILSEAGWDMSKWETEDHFVSWLRLCPDNRISGDKIIGKGRLPTNNRVTLALKMAASTLRLSNTYLGAQFRRLRTKLGAPIAIKAMAAKLARLVYRMLRYGMQFVDRGAKFYEAQHRNQQISYLKWKAAKLGFKILETSAA

SEQ ID NO: 59377 - protein, 361 aa, unidentified
MHATTVAVDLAKSVFQIAIADANWKLIDQQRLTRSQFERWFHNRDVGLVIMEACGSAHHWGRWFNRLGIPVKLLPAAYIRAYVKRNKTDAADACALLEAARCADIVPVQVKSLEQQALQGLHRIRSRWMATRTSRINALRGFCREFGLNVPQGARTGVEAMSRALADPNSAIPLLIRESMKLLVEEIRLLELRVAQLERELTALARQSPACTELLTVPGIGLLTATAMVAATGGSVSHFKDARHFASWFGLTPKEFSSGNSRKLGRISKKGDRYLRMLLTHGARAVLRAAELAKRAGKPLDGLRTWATEIQARTHHNKAACALANKLARVCYAVLRDHTPFGSPQPRQEKKLTRTAFAIAV

SEQ ID NO: 59378 - protein, 427 aa, unidentified
MSEEKPLELRVSVDVGYRRHSVAMGLSSGEVLEEFEIEHRPEGFEEFFSRIEKQRKKKNCAVAVAMEGYNGYARPLDSMVRQRGYRLYNLNNLKFARFKEIFPGAAKSDRIDARKGLELFQLSDHLPLAKEVLQEVSGTPADNEILKRLTRRRRRLVNERVRVVNNLQADLQAVCPGLLEITGEASNQWFLNFLISADTVPQLARLRRSTLLKIPSVGVKSAAIIEGWQKRAHFSEEVKWVGEMIQEDARRCVELDEKIKRLEAKIAEIAKDSKIAKTLRSIPGFGAVCTSELAGEIGTIERFGSEGSFSLYLGMSTLDNSSGKYQGAKAPKHVNTRAKAAMMIALDRHRKYVPESQRYYEKKRSEGKKHNQAIRALGRHLSRIIYKMLKEERPYEIRSKKGDTQARARSRSCVKTKIRRPKISAKS

SEQ ID NO: 59379 - protein, 466 aa, unidentified
MTAGNKLWRNRKERKAWVRRLRSEDPGLEVVHAHAAGIDVGNSAHYAAVRPDRDPEPVRRFECFTADLYRLAEWLQSCGVKTVALQSTGVYWIPLYEILEDRGFEVYLVNARHTKNLPGRKSDVQESQWLLKLHTYGLLNNSFQPPAEIRVLRTYWRQRAEHVSGAATCIQRMQKALTQMNLQLANVISDLSGWTGQAIVRAIIAGERNPQKLAELSHPRIEASREEIAKSLEGNWRPELVFVLRQEVEMYDTYQRRIAECDQQLQKHLASFGDTVLPQSPEAEPRERKAKPTKNAPRFDLGSELKRITGVDLTRIDGIDVMVAQTLLSEVGMDMSRWNTEAHFSSWLGLCPDNRISGDKLLGKGTRRVVNRAATALRLAARNLIRSRSYLGAQYRRLRTKLGAPKAITAMAHRLARLVYRMLKYGQRYVDKGTEYYESRYRQQQIHLLQKKAAKLGLQITVAVQS

SEQ ID NO: 59380 - protein, 352 aa, unidentified
MLTKTKGYIMNSTTQEVYVGADLHSSNIVLSLTDNAGTEIIKKKVKTNITDIDKVLSPFKSQIKVIGVESTFNWYWFVDGLVDLGYNVKLGNPAKMKQYTGIKVTNDYTDARWLAEQLRLGIFPECYIYPKELRSVRDALRCRQLHVRRKTQTFLSFNGLLARYGYTETKAKDALKDWTLDDIENVFQDHFLCQELWVLIESTRFTGEQIKCLENLVRKFIKSTWQYKRIQQLPGIGDILGMTIVLETGDFNRFKSAGCYASYCRTVKSIRTSNDKKKGQNNRKNGNKYLAYAFMEAANFAVMHYPQVQSWYDRKKKRTNNIVARKALASKLSKAAWHVMKGEDFDMKMMFG

SEQ ID NO: 59381 - protein, 315 aa, unidentified
MRSTVAQSVGVDISKDALDVAIHPAGESFRITNNPEGHRAVIKRLKGFDIARIVFEATGAYHRLFQQALVEAGLPWVKVNPCQARRFAQATGKLAKTDRCDALMLARMGAALELETRAPASKTVEALRELVNARDALIKDRVAALNRQAIAVSPLIKRQLAQRLRQIDGQIEAIDRRLKTLRNADADLCQRFDILTSIPGVGEVTANVLVVETPELGRLEHAQAASLVGLAPVPRDSGQTHGKRSIRGGRSRARQALYMPALNAIRLNPEFKAKYQAMVKAGKPAKVAIVAIMRKLLILANALIRDQRKWAPANP

SEQ ID NO: 59382 - protein, 345 aa, unidentified
MDHFAGLDVSVKETSVCIVDDAGKIVREVKVASEPEALLAVLKNPAYRFKRIGLEAGPLSQWLFSALAEAGLPVVCVETRHMQAVLKAQINKTDRNDARGIAQMMRVGLYRPVHVKTLRSQKLRMLLTHRKLLQSKAIAIDNDLRGTLRNFGLKVGMVGTVRFEARIRELVEDLPDLAALIEPLLVVRQVLREQTAILHRRLLAIVRADEVCRRLMTIPGVGPVVALTYRATVDVPARFRKSKSVGAVFGLTCVKYQSGEVDRSGAISRCGDEIMRTALYEAAQVMLTHSAKWSWLKAWAMQIARRRGMKKAIVALARRLAVVMHRIWVDGTEFRWTREQTAAAA

SEQ ID NO: 59383 - protein, 474 aa, unidentified
MVQPKTKKKKNRQPPCKDRRPCEAPAEDMPLVQPNAAGIDIGSRSHWVAVPADRDAESVREFSSFTGDLHRLADWLASCGITTVAMESTGVYWIPVFEILEERGFEVLLVNAAHLRNVPGRRKSDVLDCRWIQRLHSFGLLRGSVRPDEPIVELRAYVRQRARIVQDAGRHIQHMEKALLEMNIQIQHVVSDITGVTGMRILKAILAGERDGNKLAALRDPRCRQPRERIAAALQGNYKREHLFVLGQALTAYDLHQSLLAQCDQRIEALLAELPARSEVPEEPCPPRRHGTPTHNQPRFEIQSPLHRLCGNVDLTQIPGLAPATALTVVSEIGTDVSRWPTEKHFTSWLNLAPGTKITGGKLLSARRAPSKNRAGQALRQAAVSVGRTQTALGGFYRRIALHRGAAKAAVATARKLGVLVYRALKYGMSFVESGLAAYEREQNARLIQHLQKRAAALGYQLLQAPAEAPAGAG

SEQ ID NO: 59384 - protein, 387 aa, unidentified
MYYVGIDIAKLNHFASVVSADGEVLVKPFKFTNDNDGFCKLLSVLASYEHSSLIIGLESTAHYADNLVEFLVSKRYQVCVINPIQTSTMRKNNIRKTKTDKMDTLVIARTLIAQPHRFFSQEDIDLMHLKNLGRFRQKNIKERTRLKIQLTAYVDRVFPELQYFFKSGLHQKAIYALLKEAPTPELVASMHLTHLAHLLEVSSHGHFNKEQAKELRILAQKSVGSSDRALSLQVTQSVEQIELLDRQIKDVESQMADIMLGLDSVIMTIPGIGYINGGMILGEIGDIHRFSKPCQLLAFAGLDPSVYQSGNFNASHTRMSKRGSRVLRYALINAAHNVVKNNATFKAYYDAKMAEGRSHYNALGHCAGKLVRIIFKMLTNDVTFSLE

SEQ ID NO: 59385 - protein, 343 aa, unidentified
MKVTTIGLDIAKSVFQVHGIDETGAVVLTRRFTRRKIVPFFAKLPSCLIGIEACATAHHWARELAALGHEVKLMPPAYVKAYVKRGKNDAADAEAICEAVTRPTMRFVPVKSPEQQGILMVHRTRSLVVRQRTMAANAMRAHLAEFGLVANPGVRNLLKLVARVFDAQNPEPGVPEMARTALSVLDRRLAELEEELQALDRTLLGWHRQNAASLRLAAIPGIGVITATAIVATVSDPGAFRSGRQFAAWLGLVPKQNSSGDKLRLGGISKQGDRYLRRLLVVGATAVIRHSKNKNTPLADWLRGLLEKKPVRLVSVALANKTARIAWALLVHDRTYHPYHRLA

SEQ ID NO: 59386 - protein, 327 aa, unidentified
MEKITTIGLDIAKHVFQVHGVNGAGATVCRRRLRRDDVVGFFKALPPCLMGIEACATGHHWARVLMALGHEARLMPASYVRPYVRRQKNDATDAEAICEAVTRPTMRFIPVKSEEQQSVLMLHRVRELLIRQRTMLVNALRGHLAEFGIVTLQGIAGVGMLIALIEDGDHDLIPLLARPALLLLIGQLREVHEKVSEMDRQIHAWHRSNELSRRLETIPGIEPITASAIAATVTDASLFKSGRQLAAWIGLVPRQNSSSGKDRLGRLSKQGDPYLRRLLVVGAHAVLHFSRKARVPPTRWAAELLAKKPYNVVAVALANKMARIVWR

SEQ ID NO: 59387 - protein, 320 aa, unidentified
MTQTIEADIIGVDVSKDTLDIYLSATDQSCSIANDTASIEHWLARQAGPIRLAIEPTNTYHLGIATAAHVRGHQVYLIDPYRLVHYREGVGQRVKADDQDARLLARYLQREIGELRVWTPPRQGPQRFWHLLKRRASLVQTVVRMKQSLTNLGALQTDVDDLIKQGQKTIRKIDQALMTQARRLGWDAQVRRCQGIPGVGPLTALAMVATYHRGQFRNDDAFIAFMGMDVRVRESGLYRGRRKLSKKGDPELRRLLFNAAMQGRRNAHWEPYYLALRERGLSSTAAFVALGRKLARLCFVLLRKEANFDPNFCSRGCMAS

SEQ ID NO: 59388 - protein, 367 aa, unidentified
MKKISTATTKKVEKVVSQKLTIGLDLGDRWSWYCVLDEAGEVVLEQKVATTAKAMKEVFGGMPVSRMALETGTHSPWVSRVLSELGHEVIVAHARNVRLIGESRKKDDRLDARMLARLVRIDPQLLAPVKHRSAPAQADLMAIRARAGLVRARTSLINTARGVTKSYGERLRGCNPRNMNPVKAQELSPELQAALGPLLGAIESLSERISEYSERIEQIAKQSYPEVARLKQVKGVGTLIALTYVLTLEDGHRFGKSRDAGCYVGLQPGRRNSGQSEPQLHISKEGDPYLRTLLVQGAHHILGPFGADSDLRRWGLKLAERGGKNGKKRAVIAVARKLAVLLHRLWVSGEAYEPLRNQRQVALPAAA

SEQ ID NO: 59389 - protein, 406 aa, unidentified
MELVPIHKRVIGLDIHQAQVTACAIIEESGGETRLEQRQFGAFKRDRRELAVWAAALDPDEVVMESTGIYWKSPYAALEAVGIRATVVNARHVKQVPGRKTDVGDAQWLATLARAGLLRGSFVPPAKLRELRLIARQRQKLVGLLSSEKNRMHKVLTDAGIRLGVVVSDIHGQSARAMIKGILRGQAPHEVLQLASRRLKASREELHDALQGELTASHVFVLDELLRHIEELEARIARFDARLLAELASEHNALALLQTLPGVDLIGAAMLLVEIGSDMSVFGTSDRLASWVGLCPGNNESAGKRKSGRVRKGNPYVRRLLCEFAHAASRTKSAFQAKFQSLIVRRGHKRAIVALAHKILRTIFFMLKRGEHYRDSATNYEQLSVHRNASRWIKALTRFGFIPVAA

SEQ ID NO: 59390 - protein, 398 aa, unidentified
MKTTLKTSARVADPATKVGKAQDFSNHDLYVGIDVHKKRWQVAVLCSGVCLSNSSIEADSDDLIRHLRGRYGAARFSCVYEAGPFGFALCRSLWAAGMECLVVNPADIPGTDAERRGKTDAVDARRLANHLAAGLLRGIHVPTERLQKHRSLIRFRKKLWGDLTRAKNRLKSELKFQAISIPPKFDNPHWSHNFLNWIEETAKGDEDLQDTLELMLEEVRHLRLLLLKTEKKLRALMRTESYIKQEGLLRSVPGIGPITAQLFTLEVGDVARFKNFDALNRFVGLCPDEHSSGERQQHTGITQRRHNQLRSHLVEAAWQLIRRDPAMLDAYKKLCGRMKSEHALIRIARRLLRRMRAVLLSGRMYVKGVEAGSSEAIGAPLPPEPKKKGRQPKQATMK

SEQ ID NO: 59391 - protein, 373 aa, unidentified
MSCKKDTSLSTAHCAMEPVGQEPKQLTLYGFRRCPMKTYAGIDLHSSNNYIGVIDAKDRRLYSKRHDNRIEDVLKVLGKFKSTLQGVVVESTYNWYWLVDGLMDHGFRVHLANPCAIKAYDGLKYTDDKWDSFWLAHMLRLGILAEGYIYPKHQRAVRDLLRRRLMFVRQRTSQILSLQSMITRNRGLNFSGSWIKRLTDEFIEKLFSDHHLVFTAKKNLATIQFLDRIVSEIEQQVASQIKLKKQFLKLLTTPGIGNILGLTIMLEVGDIHRFEKVGNYSSYCRCVESKKISNGKKKGENNKKNGNRYLAWAYVEAANHAMRNCAKAQRFFQRKMAKTNRVVATKALANKLSKATYYIMRDQVAYDSDKLFG

SEQ ID NO: 59392 - protein, 359 aa, unidentified
MIVKKQTQEILRNEKVYVGLEDSKKTWVICVRSDGMVVHETSMPADYEVLRNYFYNKFPECEIRVMYEAGFKGFGLHDQLVADGWECVVTPPHTVTEEKCQRKKNDRVDCRRLANNLEKDDYHTCFVPDKEQREDRQVSRTYGQVRSDIKRVCNRIRKMLEFHGLDKGLQPGRWSAAMYKRVKLHLDELGVSDSLQFSFHIMLSELEHLQGLKKELLQQLRRLANSDRYKESVELLKSAPGIGMLTAIRLAMEWGDVSRFERKEEFASFLGLVPSDYSSGEQERLGHITKQGSRSVRSWLVESSWIAIRKDPVLLEKFRRVLRNCGKKKKAIVAVARKLAMRLRWILLSRKPYVVGVIE

SEQ ID NO: 59393 - protein, 444 aa, unidentified
MNRNTKNKQNATKIDNSQNAKIRAITETTMIVGIDVGSEKHDARAFTYRGIEISDEPLEFSNSEEGFETFYAWMEDLRSKNGLDAVMPVMEPTGHYWFNLGAYLQDHGMKPVLVNPYHVKQSKELDDNNPLKTDRKDPKVIAGLVKDGRYIIPYIPEGVYAEVRNLTNLRYQATEALTRVKNRFARWTSLYFPELKDVYKQPGAVTAMMVLHEAPLPADIVKLGVDGILKIWREHKVHGAGEKRARKLVEAAEHSIGSKNSPEAAKIELQELLEDYEKYDTRVNELIELIDKKIAEIPNVDKILAIPGIGKRTAYGFVAEVGDIGRFDDPKQLQKLAGFAIVEDSSGKHKGESHISYRGRKRLRYVLYEGAVSLVARNAQFKELYKYYRTRKDNPLKKMQALIAVACKLIRVFYKILTTGVDYNGTKMLGDIRRTDEDRLALTA

SEQ ID NO: 59394 - protein, 345 aa, unidentified
MKKVMAGIDLHSNNLVVGIMDQDGKRVGQQKLPCELPAVVKFLAPFKERLEQVAVESTYNWYWLVDGLQALGYPVVLANPAAMEQYSGIKNAGDTNDAFFLAEQSRLKILPTGYIYDVELRPVRDLLRRRMLLVRQRTALMLSFKSLYTRTTGKEMELRALKALAIKEAQALYDHPANQVIAGLQIKHIEQLGESIEKIEKAVLASARELPFYSKLTSLPGVGKILGMTITMEVGDIKRFADAGHFASYCRTVEAKRTSNTRKKGENNSKCGNKYLAWAFVEAANCARRADEQCRKWHDRKAAKTLKVVATKALACKLAKAAWYLMAEGVDYNSQRMFGQPAPTK

SEQ ID NO: 59395 - protein, 344 aa, unidentified
MQHYVGLDVSVKETSVCIVDKAGKVIREVKVATKPAEILAVLTEKPLAIERIGLEAGPLSQWLYSALAEAGLPVICVETRHMKAALSAQINKSDRNDARGIAQMMRVGLYRPVHVKTMASQKRRMLLTSRQLLQAKALDIENDLRGTLRNFGLKVGMVGTVEFEARIRELVADHPDLAAIVEPLLIARRVLREQLGVLHRQLLEIVRQDEVCRRLMTTPGVGPVVALTFRATVDVPSRFKNSKAVGAALGLTPRRQQSGEIDRMGGISKSGDAMMREMLFEAALVLMTHRGMWSWLKAWGMKIARHRGMKRAIVAVARRLAVIMHRMWVDGTEFRWSRKEAAAA

SEQ ID NO: 59396 - protein, 320 aa, unidentified
MTTKPTQPYVGLDVSKKVLELAIHESDYRHCYPNNPSGFAELIAELITLEPALIVIEATGGLEKPAVAAMNTAGLPIVVINPRQVRHFAKALGQLAKTDRLDARVLAHYAAAIKPPLRPIKSVPEQDLDALVGRRGQLVGMLIAEKNRRATAPNDRVRAEIDEHIEWLEGRIAALDRQLQELMKSSATWKHTNQILRSVPGFGPVVSFTLLADLPELGKLNRQQISKLVGLAPLNRDSGQKHGPRHIYGGRASVRSMLYMATLTAIRYNPVIKAFYERLIANHKVFKVAITACMRKLLAIVNLMVRNGTTWNTADAHVSA

SEQ ID NO: 59397 - protein, 354 aa, unidentified
MRELGTFYFALTYSLFVSVDEKGRVGTPVRVAHEGRDLRDYLEGLEKGTPVAVEASGGWYWFMDELEAAGLDARLVNPLEAKHRMSGKHKTDKLDAKGLAVLLRSGTLPEVWVPPADLRDLRGLMRTRLATRSQTTVLKNRIHAALRRYGVMREERTANLFAQKNRLVLSVAIGRLPEETRRATLDEWEMLDLIERHIKELEVRIRERIGRLGWVRLLKSMPGVGEILGATIHLEIGDVRRFPTAAHLAGYAGLVPRVHSSGGKTWHGRTSQQANHYLRWAFVEAANAILLHRHKYADQHVIRLYDRLKHKCHGKAAVAVARHLAEASWWILVKRERYRPPRAQAAAMSSSRNG

SEQ ID NO: 59398 - protein, 349 aa, unidentified
MRSFTPPAGTRFYAGVDLHARAMFPVILDRDGQVVFARNLPANPDAFLRAVAPFRDGLLVACECMHCWYWLADTCRDHDIPFVLGHAWAMKAVHGCKTKCDRKDAEAIARLLRGGNLPPAYAYPRERRGLRDLLRARLRLVRQRAELYGHVHTARRQANLPPVSSDVKYKSKRDGITADIADPFVRRRVETHLALLQPLDTTIRRLEKEIEDAADQLFPTELAVLQSTPGVGKVLSLTILLEIDTSDRFDTRQQFCSYARLCGAVQTSDNKRTGAGNRKAGNAWLKWAFSEAAVLSAQKDERVGALLNRLASKLGKAKAYSALAHKLGRAFYHMLHTKEVFDVNRFVRH

SEQ ID NO: 59399 - protein, 342 aa, unidentified
MDRIGLDLHKRESQLCVLTEDGEVIERRIVTSRERFTAVLGGRTSARILLEASTESEWVARHLESLGHEVIVADPNFAPMYATRRRGVKTDRRDARTLAEACRLGAYRPIHRASAVQRHVRAQLAVRDALIRTRTRYVSVVRALTRRDGLRLASGGPEHLEAKLAALPLAPPLQAEIAPLRVVLDPLNAQITAADEQLAAVATADPVVERLRTAPGIGPVTAVAFVATLDVVTRFGSAHQVAAYLGLTPREYSSGEQQHRGRISKTGNPRMRALLVEAAWRVLRTTDSAAAPLRAWADRIAQRRGRSVAAVALARRLAGILYAMWRDGTDYRAPRPTPEVAT

SEQ ID NO: 59400 - protein, 370 aa, unidentified
MKPNFEPGKWFMQCVGIDIAKGTFTACLCMYEFDQGCSTAPVVFNNDKTGFNQFVKWSRKEALKGYPLRYVMEPTGVYYEQLASHLNKLSLNVCVVLPNKAREFAKYEGILTKTDDMDAYTLGMLGCLDKRLKPWTPPSPIYRELRQMTRFVADINKVKTELRNHLEALAHSETAEKSIVKHYNKLIDEIDKQLVSNQKAIREKIKQVPGLSERIDRITTINGIGFMTVVTVVAETNGFALITNRKQLTRYAGLDVPAHQSGPVDPKRHISKQGNVHIRTALYFPAIVSTQCNPQMKDFYRRLCARNTQSKMIGITAAMRKLLLLIYSLWKSGEEYDPKRDKPACSKKKKEAEPPEGQPHGIDVGTSAEE

SEQ ID NO: 59401 - protein, 412 aa, unidentified
MKVIHEICCGIDVHAKMLVACLLLANGEKQVRSFSTMTADLLRLRDWLVAASCTQVAIESTGVYWKPVFNILEDALTVILINPEHAHALRGRKTDVKDAEWLADLLRHGLLKPSFIPPPEIRELRELTRYRENLVREQGAVANRIQKLIESGNIKLGQVASDALGASGRSILWALARGEKDPRKLAALARGKLKEKSLALERALDGRLTVNQRFVLRELLQRWEELEKADARVTSEIDKYLQADPKLARARQVLDSIPGIGLRVAEVIVAEIGIEMTAVFINQAQLASWAGICPGNKATGGKRLSGRTRKGNTYLRSALVQAAWGASLKKHCYLSSQFFRLTKRLGRKKALVAVAHSLLVIIFHVLQNDQTYTELGGDYFDRHHVEQQREYYLRRLQMLGLKITVEELPQAA

SEQ ID NO: 59402 - protein, 428 aa, unidentified
MDEVDRNRLREFRQLRQEIRQSEEYLIVGIDIAKNQHHAFFGTATGKTLLRRFVFSNNAEGFGKLLDQAQDLRLRHGLKKVVYGMEPTGNYHKPLGEYLIHMERMVVLVSGVAAKHNRKSLDGRWDKHDDKDSANVADLISQGKCLYYEYPPVELRGLRGLLSLKRRLKRQEQGHRVRIRNNLIAQYYPELDSEFGRSESLGLAIVKWCFPASHISETDVEPFIERVTTRRISVEKRRRLEALWEKAGESIGCDEVPGLDHEVKVMVEGLKQIREAIEETEEKIEELCKKFPEYPFLLTIPGFGPDVSAKVLGAIGDPDRFDNGKQVLKQAGLDLSANRSGEDSSKAIPQISKQGKADLRYALYQAAFIASTKNREFMRYYTGKLHGREKERGIHGKMLIKLSAKMLLMAWTLMKKKEAFDPTYLKAE

SEQ ID NO: 59403 - protein, 386 aa, unidentified
MSDLLKYSLGVDISKDNMDVCLMSIDKKLDVKIKGQRKFSNSLPDFKQLHVWCKKHCKEPVPLDILMEATGVYYEKLAIYFTDEQYNVSVVLPNKARAYMQALGLNSKNDTIDARGLALMCLQQKFDTWQPLSKFYYQLRQLTRYHQNLQESKTAFANQYHALQHSGYTSKEVTRQLNKSIAFIEKQIEQIKVAIASHIRRDGEVEQKVKNLCKIKGIDVLTVATIIAETNGFILFKSLGQLVSYAGYDVVENQSGMRTGKTRISKKGNSRIRRILHMPAFNVVRYEQTPFVNLYERVYDKTKIKMKAYVAVQKKLLVMIYTLWNKNEAYNPDHKNTSGNDEPQRPLSVGAHEGKPKKIVPPFGSTTQDEHRYNESPEALFPLTQT

SEQ ID NO: 59404 - protein, 337 aa, unidentified
MEHFAGLDVSMAETHVCVMNRDGAVTYEAKVPSTPGDIAAALAQAPACQRIVFETGRMAPMLYHGLSQLGLPVVCIESRQAYQALKSLATHKTDRNDARGLAHLARTGFFKPVHVKSLRAHAVRSLIIARKKLVGQRVTLENQIRGLAVVFGVRLPRALTAAFIRQALRASEGITGLSAAMRGLVAARAAVLGAVMAIDADIRKMVRASEACRRLMAIPGVGQLTALAFTAAVDDPRRFRRSRDIGAYLGLVPRRYQSGEVDYTGSISKCGDRRVRTLLYEAANVMLTRYKGPLKLKDWAFAIARRSTMRKARIAVARRLAIIMHAMLRHGTEFKPA

SEQ ID NO: 59405 - protein, 345 aa, unidentified
MEIRTIGIDLGKTVFHLVGVNARGGVVVRKKCSRTQLLRFTSKLRACLIGMEACGGSHFLGRGLREQGHDVRLMPAQYVKPYVKTNKNDYIDAEAIAEAVTRPTMRFVPIKSDDQLDLQSLHRVRERWVVRRTAVINQIRGMLLERGITMHKGRKHLEASLPHILEDAENKLSGALRALLTQLQIEMQYLHRQIGESDKLIDRIAGELEPCRRLVAIPGIGPVIATATIAAIGNGAAFKKGRGFAAWLGVVPGEHSTGGKQQLTGTSRRGNKYLRKLFVLGAHTVLLQRTKQSSGLSTWLTSLSARKRKQVATVALANKMARMVWAVLCKGEVYRPPLVPQIDAA

SEQ ID NO: 59406 - protein, 401 aa, unidentified
MKTVLSVDVAKNKSMIMLMNSDGEILIDTKEIKHNLEDFEKAKEEIKEISPENLTVFMESTGTYHLPVERYFKENGFNTLVINSLTTKNNYDTIRKTKTDKKDCYRLAKLFFVNEVEYHELSKKDLYANLKAMTRQYFYLLQQNVSCKNRYKRLLNICFPELEKIFKSTRIYDDTALNFIKEFPHAEIVKEKRIDALYNNLYKTNGRNLNFYKRLSETIKIASANSYPGVDKEHKDVKNLSDMAKIVQNNNNVINELRDKMIETAKKSPYYEIINSFYGIGEILTAEILGELGDITRFDSPKQLIAFCGLDPTIKQSGKSINVKGAISKRGNKYARYILFNCSQMVVKLGASNYPEHPVYIYYQNKKAEGKHYYESLTACSTKILRMLYSMCKNNKQFLEN

SEQ ID NO: 59407 - protein, 340 aa, unidentified
MINNFLGIDISKDRFDVSLSFISNKGKRETRKRSFKNNDHGFQGLLSFLQKHNVEQVKACMEATGCYSEALAEFLHNTGHFVSVVNLACIRFYAKSKLIRQKNDQTDAEIIADYCQRQEPIRWAPPSPELKKLKHLYRCSAALKDELTLVNNHLEKKERLPKEVANAWEDLAMNIKQKIERIKNSLRELLNKHKELLENFQLLLTIPGIGEESAVAILAEVPNIKAFKDARQLAAYAGAIPRNITSGTSVHAKPRLSKSGSRTLCKAMYFPAIVAKNHNPTIMTFCKRLKEKGKHNMAIVGAAMRKLLHIVFGVLRSKKAFDPDHIKNYRARSLAESLVL

SEQ ID NO: 59408 - protein, 402 aa, unidentified
MNCVGIDVSKGKSMIAVMRPLGEMVIPPFEVGHTDAELCELSRRLGGLEGETRIVMEATGNYHLPVASFLYDSGFYVSVVNAMLVHGYGNNNLRRVKTDKKDAVKLANYGLDHWLTLPRYVPEEDTRLMLKTCYRQYQQYSKVQTMLKNNLISLLDTAFPDANRLFTSPPRADGSEKWVDFVATFWHCECVCGLSKKAFTAKYQKWCRKHGYNFSQDKALDIYASACGRFGVMPKTNTAKLLVEQAISQLQTTSAALAALKQEMQSLAASLPEYPVVMEMFGVGPTLGPQLIAEIGDVRRFHSKKALVAFAGIDAPPYQSGQIDVRSRSISKRGSASLRRTLFLVMGVLLQCAPMDEPVYQFMNKKRSEGKPYRVYMMASANKFLRIYYASVKAYLDSLEHD

SEQ ID NO: 59409 - protein, 395 aa, unidentified
MFIVGIDVAKRSHEVCMITSDGQTVQRPFSIRNNCTGYNLMLEKIRKHTNIKSQIVFAMESTAHYWLALFTRLRKDGYHVILLNPIQTSAMRDMFIRKIKTDAKDSFIIAELIRFGRYAESNVAQDRLLALKELCRNRFYLVDMAGDLKRKLVALIDRVFPEYEAQFDTIFCKSSVALLKKYPTPQRLSNAHLDKLTELLWNSSNGHFGEWKARELKDLARNSFGVEDCDGAYSTLILLMLDQIQSLSGKADALEKEISRLFQSFDTTVTTIPGVGPIIGAVILSEVGDISRFSSADKLAAYIGVDPSVNQSGEFQAAHAHMSKRGSPYLRRCIWMASQVAVQRDPMFRAYYEKKAAEGLKYMTIIGHVTRKMTAVVFAILRDHKVYEPVLPTAA

SEQ ID NO: 59410 - protein, 422 aa, unidentified
MKKRIYRRMPVNDFQPESIPPAALGGRLVFAVDIAKVDMVAAFAAADGRVLQTISWKAPAENITVLGILRGFRAAGVTVEVAMEPSGTYGDVLCHQLRQDDFPVFMVSGKRTHDAREMFDGVPSLHDAKAAAIIARLHADGLSKPLREEQPDRRQLRAALAIMDLHQERYLQLVHRLEGLLARHWPELPTHLELTSSSLMALLARIGGPADVAAAPVGARRLLLGISHRLMPEDTVAAVLASAATSVAVPLVGLERDALMAIAADAYRAHRAFATAKTKVDQLAARTPAATLAPAVGHTTAAGVYAEVGDARTFSCARAFLKAMGLNLKEKSSGTVQGQLKITKRGPSRVRQYLWLAVFRWIQKDPIANAWYQRKKQRDGGKGSRAAVALMRKLAKALYHVGRGATFDSRKLFDTRCLPQPT

SEQ ID NO: 59411 - protein, 420 aa, unidentified
MQVKNSTLVVGVDIAKNKHAARAFNFRGIEYDKAIFFENNEAGFKKLLHWIKKVSEKENKTDVIVGMEPTGHYWLSLEEYLRRKTDFLRVVVNPAHVKKSKSLDDNSPTKTDRKDAKVIAKLVIDGRYSVPHMPEKEYADLRVAMTHRERLVKDIVNLSNKVQQLIDKYFPEYSTVFKKWDGKASIAVLKELFLPELILEKTEEEIVEVFRKGANRAVGIKRARKLKKAALNSIGIKEGAEFARFELNNILEQFELLKKQLELLEEKVEKLLENMPEAKYMESVKGVGFMTVAGFIAEVGDINNYDHPKQIQKLAGLNLKEHSSGKHVGQTRITKRGRPKLRSLLYRVMLPMLANNPEFKQLHEYYTTRRNNPLKPKQSMIALACKLIRIFYALGQKHVMYDGQKLMNDIERNLDLQEAA

SEQ ID NO: 59412 - protein, 339 aa, unidentified
MKLYCGMDLHSSTTHVAIMDETRKRLIDRKLRNDRKLILNFLEPYRANLEGIVVESTYNWYWLVDALQEAGYRVHLAHPVANQQYRGLKHLDDRHDAFWLAELLSLGILREGYIYPKPLRSVRDLLRKRLQLVRYRTALILSVKNIVLRNQGVIVEASQIKRLTQDVVGLVLKGDEALELSGRTSKEVIDCLTRQIQQIERWVLQRIRLEEPFLKLLTLPGVGEILALTILLETGPIERFPKVGHYASYCRLVSSQWTSNQKIKGQGNVRNGNRYLAWAYSEGSEHARRYDGACRDFYNRKLNQSGINVAHKALAHKLARAAYFILRDHGLYQEDKMFS

SEQ ID NO: 59413 - protein, 344 aa, unidentified
MNIASIGIDLGKTTFHLVALGEHNKVLLRKKFSRPQLLACTANLPASLIGLEACAGSHFIGTGLREQGHQVRLIPAQFVKPYRKSNKNDFIDAEAIAEAVTKQNMRFVQIKTQEQLDWQAMHRVRDRLMQRRTALINEIRGFLLERGFTFAARPIYLRKNLPTVIEDAEQNLTPHLRWLLDRLWQEWKQTEIDIKAITDEIERISNDDARCRRLRQIPGFGPLVATATVAAIGNGAAFRRGRDFAAWVGVVPRQYSTGGKQRLFGISKRGNIYLRRMLIHGARAVLLRVKYDTGGFGQWVHRLAQRAPRNKVVVAIANKLARMAWAVLSSGKEYRHQPLQLAAA

SEQ ID NO: 59414 - protein, 355 aa, unidentified
MQKYKFSFKGQNIYVGIDVHLKTWHVTTLTESGCKYSFAQHADAKELFDRLNRKFPEAHLKSAYEAGFCGFSAHYALTDLGIENIVVHAADIPTTGKEKAIKTDAVDSEKIAWALKRGELKGIYVKDKRYMDDANLMRLRQRFIADLSRQKSRTKHLLYTQGVTYPERFRTSRSHWSRNFMKWLREEVELLSEQKLSLLLLCEQVENTRKAILKVTREIRRLSTTERYKENYDLLTSVPGFGMIVSMSMLTELDNDIMRFSNERRFVSMLGLIPTCHDSGEKKVSGEKINRGNKHLGPMIVEASWVAIQRDLELGAYYSNCCQSMKPHKAIIKVTRKLACRAYAVLKTKTRYELP

SEQ ID NO: 59415 - protein, 393 aa, unidentified
MEKPWRRATCEREPVVKKTIRFLGLDVHAETIAAAVATADGDVRFLGTVPNRLEAIRRLIRKVGPAKDLVACYEAGPCGYVVYWQLAELGVECQVVAPTLIPVKSGDRIKTDRRDAEKLARGLRNGDLTAVWVPDAAHEAMRDLVRARLAAKRDQLRHRHRLGKFLLRRGCRRPDGMKAWTRTHMEWVRKAVYFEQPAQREVLLDYVNEVDRCAERLTRLERAIDDAVAQAPEPMRDVVKALQALRGVAKVTAVTIVAELGQLSRFARAAQLMAYGGMVSREHSSGDTVRRGAITKTGNAHLRRVIVEASWSYRHPPGKSALIRKRQEGLSDEVKAIAWKAQHRLHKRYGALLGKGKSKQQVVTAVARELLGFVWAIGVNVERGSSSDDRRAA

SEQ ID NO: 59416 - protein, 338 aa, unidentified
MVYVGVDLHRKRSHVVALDPTGEVVLSRRIGNAPAEFLRIFGELEPQPVEVVFEATYGWSWFADLLADAGIPAHMAHPLATKAIAAARVKNDAVDAKTLAHLLRTNLLAEAWIAPPDAREARRLVLTRAGLVRMRSRVQSQLHALLADLGVIPELTTLSGPARRRWLADLPMPASARGRLDAGLRLIDAITVEVAHADADLRTTFAGDRRVHRLLPIPGIGLVTAATVVAEVWDIQRFPSPERLCSWAGLTPGERTSDAHTRRGHITKQGSRWLRWMLVEAATTAVRDPQLGRFTTQIAQRRGPKIARVALARRLLTLCYYALRDDGGCRAYPATSRS

SEQ ID NO: 59417 - protein, 419 aa, unidentified
MTRSDDSRIIGIVHPICCGLDVHKESISACVIFTDKDGVDQHDVKVFGSFTDELMRLRSWLLDHECPVVAMESTGIYWRPVHNVLEDAFRVVLVNARDIKNVPGRKTDIGDSKWLAGLLRHGLLKSSFIPPQDVRQWRDLTRLRKKYVQTVGDYRKRTHKLFESANIKIDSVVSDLFGVTGRNLMHLLVTNRERLTLSDIQSCVRGKLRGKEAELFRSLQGFFTDHHRFILEMLLSTIARLEGQTEALDHEIRFAMKEHGPVLDRMKKAAGIADVSACDILAEIGPTLDSFPTDTALVSWSGLCPGNNESAGKRKSGRSPVRKHHLKTIMIEVAWAAVKKKGSYFKDKYYRLKARRGAKKAIVAIAHRILLGIYHVIKDGVEFRDLGEDYLTLRNKSQKLVHLRKQALALGFDLVPQAV

SEQ ID NO: 59418 - protein, 450 aa, unidentified
MRREPPLRPSGANRRTMWPSAPDEIPDDCLFVGIDVSQEHFDAAVIDARGNLVRAAQRYENTGPGFDRFWTEAQSLGRALSRPVAYAMEASGVYHLGLLSSLVGRKARAWAFNPILLQGERKSRVRKTKTDPLDAELIAQFARKESARHRSVVWDEESVRLREHCRVRFRLVERASDAKRLLRRDLDVLCPQLASEFTDIAGPAALQLLKTFGQLTRPFTGTVEEIEEVLRPFYRSPEGRHLKAVAIEKHFAERRVASGFQEPLLWEVKALVHQLELFIEQIAQAEGRIERAMEGRKSLVVTVPGVGVVTAAVIESELGDAKRFENANQVRAFAGLDPSVFQTGKFEGTQMHISKRGSPQLREALYRSALWASRANPACRELYERMRAKGKAHRSALIAVSAKLLIQAWAVMRDGKSFEIPERYRHTTATPIGSNLPGKSVELTASEPVT

SEQ ID NO: 59419 - protein, 347 aa, unidentified
MHFIGVDLHKQIISVCVLVRAGDQRQVMARRTLRCDQPEQIQAYFVGWAPFQVVVEATSSYEWFVQLLEPFAQRIVLAHPKKLRIIAESTKKTDKLDAQVLAEFLSLDMIPSAHRPSPRLREYRALVRQRQYVQRRITSLKNRLRHLLSHYNADVKHLFSQEGQTYLDQLAISAADRFVVEQLREAWRFFDGQLVAIDKQLRQFARSAPVAEREARQVLESIPCVGPVTIDVVLSELGDVRRFRSQKQVAAYAGLAPGIRESAGRGKQLSITKEGSGLLRWVLIETSWRLVMKTRRWGLLYEKLKQRIGSKKAIVAIARRLLCVMVALLRSGQAYRLSSEARVLNPT

SEQ ID NO: 59420 - protein, 328 aa, unidentified
MVCRTVCKEGITKMDSIIQIAGIDVSKDKLDVHILASNLDFTVSRDRRGLGELRRRLRKAGVGDVALEASGDYERIVMEALEADGFVVHQLNPARVRHFGKAMGMLAKTDPIDARLTARYCRHFPEAGLARRPEQARKTGEFLSVRAMVLSAIGEARNRLEHLREASLRALVEEDLARAMARLKTVDAGIAKAIAEDEAMQRKAGLVRSMIGAGPVLASNLLARVPELGSVDRQQAARLCGVAPADRRSGKSRRQARIDGGRDQLRPILYMVALTAMRSNPAMAAFAKRLTANGKSKRLVIAACSRKIITILNAMLRDQTPWQNPKLA

SEQ ID NO: 59421 - protein, 351 aa, unidentified
MYYAGLDLHKRYFTLCILTSEGEVVADHRRLPAALEPLGTILRDLAGPVTVTIEATLQWAWLHDRLAEVGISVVVAHPQQVKLISQARCKTDPIDARKLAELTRVNLLPAIWVPTPEIRGWRQLLRGRAALVRWRTRAKNRIHGALAAENLRVATTDLFGAAGRAWLATAPVTPAARREITVQLAMIAALDEQITGYDSAVKRLAKQPDAQRLLTIPGIGPFGAALLVAEIGTITRFQSAAELAAYAGLVPSTRSSGDKTSHGGVGVANNHWLKWILIEAVQTLKQRPGPVQFHYERLLRAKGKPKATVAAARKLCLYIYWMWRDGLDYPTWLETEAKRVGCSMQTLVSPA

SEQ ID NO: 59422 - protein, 429 aa, unidentified
MNYNTQNAKIASITEKTLIVGIDVGSETHYARAFSWRNYEYSKKPFAFSNDEDGFASFKAWMDDIAEKHEMEKVIPGMEPTGHYWLNLGAYLQGQGMRPVHVNPHHVKKSKELDDNNPNKNDRKDPKTIAGLVNEGRFSYPYIPTGIYAEIRNLSNLRIQTQEEITRIKNRIARWFSIYFPEIKDVYRNPDAVSGLMVIKQAPLPCDIKGLGVDGVNKIWRDARLKGAGIKRAKTLVTAAEHSIGNTEAPRSARKEIRNLLNDYEIYKSRMDELMEEIEELLSEIPYIDKLMGICGIGIKTVSCFIAEVGDIERFDNPKQVQELAGYAIVADSSGKHNGESRISHRGRKRLRYALYEAAISVIGKNKEFKEIHHYYRTREKNPLKKMQSVIAVSCKLIRIFYTILTKGIDYDGQKMLRDIVRPGMQSAA

SEQ ID NO: 59423 - protein, 342 aa, unidentified
MDHIGIDVHKNASQVCIRTETGQVLERRVRTDRESFAKWLGKRNGARILIESSTESEWVAQCLEELGHEVIVADPNFAPMYAQRSRKVKTDRRDARALCEACALGAYRPAHRSSEASRALRAQVAVREALVQTRTRHISLIRALLRQQGYRVRSGGAASFAERVGELELPEALQDQMAPLLAVMRSVNAELKAADKSLAEQAKTHEVAKRLCTAAGVGPVTAISFVAIVDRVERFAHAKQVRAYLGLVPRELSSGEKQRRGHITKAGNRRMRALLVEASWQLLRSRRADTEALRAWAHRIALRRGKRIAEVALARKLAGILFAMWRDGTDFGKTTTSAAHAA

SEQ ID NO: 59424 - protein, 319 aa, unidentified
MAQNDFVVVGIDIAKDKVDACIRSLPLRQTFPSIPQGQRKLIGWLRKNHVNKAVMEASGGYERAWAKVLRAAGIEVRIVDPKRVRSFALSAGRLAKNDTIDAEMIAWFAETFRDAPSQQHDAAHEELRDLVKARLSLIDLRMRLISQSEHAVRGLVQKAHAHILKSLASEIAKLEAAICAKIKSMPDFAERAEIIESVPGFAETSSANLVAGMPELGQVSNEIAAALIGVAPYDDDSGNRRGERHIKGGRRWVRNAIYMPSVGAATLNNPVLKAYYRHLIAKGKKPKVAIIACMRKLIVILNTLIARRQKWDPLRHAVN

SEQ ID NO: 59425 - protein, 344 aa, unidentified
MSQVITIGLDIAKNVFHAHGADERGAMVFSRKLTRGKLLEFFAGQPACTVALEACGGAHHWARQLQALGHDVRLIPPAYVKPFVKRNKNDAVDAEAICEAAQRPGMRFVAVKTEEQQAAGLVFRTRDLVVRQRTQLINAIRGHLAEYGWVAPRGTASMAMLTDLLEDGEMASSLPEAARPMFKLMIDLLAELDEQIATLDREIARRAKEDEAARRLMTIPGIGPIAATAIIALAPPIETFRKSRDFAAWLGLAPRQHSTGGKQRLGSITKMGERTIRRLLIIGASSVVLQASRGVAPGGSWLERMLARKPRMLVSVALANKMARMVWALLTRKEDYRAPAAVSA

SEQ ID NO: 59426 - protein, 410 aa, unidentified
MAERFVGIDVALREHRIAVLDRDGEAVGPSFTIAASTDGVATLLRTLATRAATAAQTLIGLEASGHLWENLEAALVGAGYRVIVLNPLQTRRYRDVVRRKAKTDDIDAHVIAGLLRSGAAQASYVPDEPIQSLRELARLRARLMADRQDYLRRLVAQLDVVLPEHHAVLGDLLTARARGILAQFRTAQHLATANPRAIRRAAEDAGARGFALDDATVVRDSARRSLYSGKAAAARAHVVRTLVGQLERLTNAIDEVDHAATTLLPPSEPGTGPSDAELLQTIPGIGPQTAATLLGELGTLTRFTDARALVAYVGFYPVINQSGDRAATPRLSRVGSRIARHSLYLAAVNAVRRSGEWRTIYLRKKAQGKTGKQALVVVAVKLLHAVYAMLKHRQPSNPSRLLVASATIGT

SEQ ID NO: 59427 - protein, 427 aa, unidentified
MEVIHPRCAGIDVSKKDAKVCVRVQGRGRKATSSTVTTWTSMTSSILALREHLIAERVTCVVIESTAAYWKPFYFLLDDALDVMLVNARAARNVPGRKTDVSDAAWLADLGAHGLVRASFVPPEPIRVLRDLTRARTTIAQARTKEIGRLETLLEDTGIKLSSVASQITGVSGRAMLEALIAGQRDPAVLADLAQRRLRQKIPALTEALQGRFNDHHAFMVRLYLDRIDAHEADIARLDARIEEAIAPFQAIRELLVSIPGWSQIIANVFIAETGADMSVFPTAEHLASWAGVVPGSNESAGRVKSAKTRPGNHHLKAALGVAALSASRSTDTYFGARFRRIAGRRPARPGTKKSRRQSAAGQTAVVALEHKMLTCAWHMLVDGTFYQDPGPDYYTRHHPAHTKAKAVKQLQALGYDVTLAPHTDAA

SEQ ID NO: 59428 - protein, 346 aa, unidentified
MNQITRIGMDTSKHFFQLHGVDAAERPVLRRKLRRNQVLAFFAKLPPTVIGMEACGAAHYWARELRKLGHEVKLMAPQHVKAYVKRNKNDGRDAEGLCEAMSRPTMQFVPVKTEEQQAALMLAGVRQQLIARRTQLSNAIRGYAAEFGLTAAKGLDKIEPLLAQIAQVESLPALAREIFAIEGREYAQLQVKLKAIEAKLMAWHRANAASRRLAQIPGVGPIGATALVMKAPDPGAFPSGRHFAAWLGLTPKEHSTAGKIRLGKITRAGDEVLRSLLVAGATAVIQQVRHGRGHPSPWLVALVKRKPPKLAAVALANKIARIAWKLMTTGESYDSARMPGASAAAA

SEQ ID NO: 59429 - protein, 409 aa, unidentified
MTYFVGLDWAAREHAVCVVDGRGVIVAQQTVAHTTAGMSELVTRLAKLAPVAELRVAIERPSGLIVDTLVESGFVVVPIHPNAVKASRPRYSAAQGKTDLGDAYLLADLLRTDGHRFRPLVPLSDETKALRGLVRVRDDLVGQRVAAANQLRCLLEQFWPGAAEIFADVDSPIALDFLERYPTPLAAANLGEKRMTAFMARHSYSGRRSAKELLERLRGAPASVAGELEAEAKGECVRALVAIVRPLVAQIATLTAAVEHAIDAHPDGKIVTPLFRSGRVCAAKLIAELGDDRGRFASPDHLAAEGGVAPVTRESGKHRAVSFRWACNMRLRSALSTLADSTRHTSPWARAIYQRARDRGCTHAHAVRILARAWCRVLWHCWQKRVPYDPTKHRAATQFTLRLVDQEAA

SEQ ID NO: 59430 - protein, 341 aa, unidentified
MTAASSTLFVGIDIAAKTLAAAWLRPGEVASRPITLAQSPQGFAALHERLGQTGFTPTEIHVAMEATGSYWIALATTLVHTGYRVSVINPAQAHHFAKALLKRAKTDAIDAQTLAQLAALLQPAPWTPPPTVYYEVQQRLAQRDALLDVQRQLMNQLHALLLTPFVVASVKARMEELIDTLEQQITVLDAEVRESLAADAAWAASAAHLQSIKGVGLITAAWLLVTTLNFTICPTPEAAAAYAGLAPNPYESGTSVRGRPRIGHTGNGRLRTALYLATLSAAQHNPVIKAFYERLRAAGKPTKVARCAAARKLLHIAWAVVRNEEDFDPAYAQRHVQPLAA

SEQ ID NO: 59431 - protein, 412 aa, unidentified
MQDILTCAMGLDVHRDIIVACLVKGAVDAEPEAETRTFSTLIPEMQKLRDWVIESECRNIALESTGIYWQPIYEMLESCFDGEISILVVNARHMKNVPGRKTDMKDAQWIATLLRAGLLKGSFIPDKAFRELRHLTRYRKSVVHDITAQKNRIDKFLQSSGFRFTAFLSDTFGASGRNIIRHLIEHGSIDREALDKCLKTKTRNRIDEILVALNGSLSEHQCRFLNMVFRHLEDLEAHKHTVEDEITEEVLKHTDTLNLLCSIPGIDVTAAAAIIAEIGTDMSSFPDSQHICSWAGLSPGNNESAGKRKSVHINKGNPYLKSMLCEVAWIMASHRKLYLSGWYWKVKQRKGAKRATIALARKILSIIYTMLKTGTPYNEECFEQRRLRCERKRANRLVNELQKLGYVAVAPD

SEQ ID NO: 59432 - protein, 347 aa, unidentified
MKFYTNQHKYYCGIDLHTRKMYVCILDEKGEIREHRNMKTDRDAFLKAIAPFREDIVVAVECIFSWYWVADLCHNEGIPFVLGHALYMKAIHGGKAKNDKIDSQKIAALLRGGMIPMSYVYPEKMRATRDLMRRRNHLMRKRSELFAHIQNTNSQYNLPDPFGCISRPQQRNGIIEQFEHPSVQQSIAVDIEMISSYDCILSQLEKSIINMANHHDPVSYALLQTIPGVGKIIALIILYEIENIRRFASVQDFVSYSRLVKCAKESNGKKCGSGGSKIGNAHLKWAFSEAASFFVKNNNPAKKYFDRLINKHGKSKALSIIAHKLGRTVFFMLKNKEAFDQQKFLNL

SEQ ID NO: 59433 - protein, 340 aa, unidentified
MHIATIGLDIAKHVFQVHAVDTDGAVVIRKRYSRAQLVQLFEEIPPCLVGIEACGTAHYWGRKLQALGHDVRLMPAHYVKPYVKRGKNDAADAEGICEAVTRPTMRFVPIKAPDTQALALMHRLRTQFVAQRTAMLNALRAGMAEFGIVTNQGLGGATEILRIACAGDERLPAMIRDAYRLLADAIRAVEARLVTLDHQIAASTQFDDTCKRLSTIPGVGPVTSTTIIALAGDVSRFSSGRDFAAWLGLTPRQNSTGGKARLGRITKAGDQTLRTLLVLGAFSVIKRARVAPEKASPWLMALMERRPPLVAAVALANKMARIIWAILTRGGTFRAPARAA

SEQ ID NO: 59434 - protein, 359 aa, unidentified
MMSERTFVGLDVHARSVVACSIDAQTGEMTRSRLTPELEDVWRWLRDLPGPVAVAYEAGPTGFGLARFLTERQTRCVVAAPSKIMRAPGDRVKTDARDAVLLARLLLHGDLVAVTVPTGQAEAARDLVRAREDARSDLMRARHRLGKLLLRQGIVWSGGHAWTGAHDAWLRRQRFDEPARQLAFESDYEAVAAIVARRDRLDAAIEAMAADSEFTDVVQRLGCLRGISTLTAFGLAVEIGDWHRFTGSSIGAFVGLTPSESSSGASRSLGSITKAGNTHARRLLVEAAWHHRRQNRAGKVMLDRWQRAPMQARLRGQAGNARLHARWRRFDERGKRPTVANVAIARELAGWCWSLAVMD

SEQ ID NO: 59435 - protein, 397 aa, unidentified
MYIVGIDIAKRKHEAAVIDGEGTVIIKPFSFTNNCSGYNRLLAMLTKAKLPLDEVSFAMEATGHYWLALFTRLQKEGFRVQVINPVQTNSIRSFYIRQAKTDPRDALLIAEVIRFGHFSESTLHPENIYELRELCRGRHAIVSMQADVKRKVVALLDQVFPEYETAFTNMFGDTSMAILQTCPTPKELSEMPLEELCHLIEVSSHKRFRMAKAQELQALARNSFGFAMAGDVFSTMIRLYAKHLDFLKQQVREMDRKIAEIMETLDTPITTITGIGPTLGAYILSEIGDISRFSSAAKLAAYAGIDPTMRQSGEYNGVRNRMSKRGSPYLRHAIWLAASSAVLHDPALKLYFQKKRDEGKPYMASVGHACRKMVSIIYAVMRDNKAYTPYIPNEISA

SEQ ID NO: 59436 - protein, 331 aa, unidentified
MNQNLTNHSTTKEKNENTFVGIDVAKEELVLHILPTNEQLTVPNSAEGIKTLVKRFKKIEPQQIVLEATGKLERNLVAALAANGFAIVVVNPRQARDLAKGLGELAKTDAVDARILARIAQLQCLTVRPITSQETRDMNDLVTRRQQLIAMRTQEKNRLQQTAQKTIKKSIEKVIAAFDKQIALLDASIKKRIDANPDWSEKDKIIQSVPGVGEKSSQALIAGLSELGSLNRREVAALVGTAPRCQDSGKKLGARHIRGGRTYVRAALYMAALNAIKYCAPLKMFYERLREKGKSFKVAIVAVMRKLITILNVMVKTNTCWQEQKTNCERK

SEQ ID NO: 59437 - protein, 318 aa, unidentified
MQISGCFIGVDVGKFELQVAGHEGAIVSGIVPNNRSGIVGWLKRLPASSVIAMEATGGYQELLARLAHERGFVVYVLNPTHVHHYAISLGNRGKTDRLDAQVIAQYIAQRHTKLHRYEPISPELQQVRALQALRSTVVRVGTSLRLSAQRHGCASKHQKQALASLSAWAEQLERELIAKIKAQSEWAKTYGLLTGICGIGPINGAALTALFNRIHFASSDAAVAFCGLDPRPNESGRKVGRRRLSKQGDKAARTLLYNAASSAARTAHFKDYYAMLRARGLASTAALVVIARKLLRIAYGVWRTGQAFDPGRLNLKTA

SEQ ID NO: 59438 - protein, 382 aa, unidentified
MKKATTGVRRFVGLDVHAQTIAAAMAEKQEAVRGLGTIANREECVRKLVKKLNEGGAWTACYEAGPTGYTLYWQLTKLGIPCVVIAPTLVPTKAGDRVKTDRRDAERLASSFRAGELTPVWVPDAAHEALRDLVRAREAAKQDQLRARHRLGKYLLRHGKRPPQQLRAWTQNYLGWIKGKVTFDQRSQQVTLEDYLGEVEHAEVRITRLEKAIGEAVEQAPESMRELIQALQALRGVAKVGAVTIVAEVGRLTRFEHPRQLMGYSGAVSSEHSSGGEIRRGGITKTGNAHLRRVIVEAAWSQRYKPVLSSVMRKRQEGLSAEVQEIASKARHRLHSRYMRLLGKGKTKQEVVTAVAREMLGFIWAIGVSVERAQAQRAKGVA

SEQ ID NO: 59439 - protein, 323 aa, unidentified
MAKRITICAGIDTGKHKLDVAVDGSSEQLRVDNTMEGHQALVEWLKRIKVKRVGIEASGGYEQAVVVELRRKRFVVVLFQPKQVRAFATFHQLLAKNDRIDAALIAMCTAAIKTIHPAPDPRLQPFAEHLTMIDQITEDIARLKNRLESCRDKRIQGVWKAQIALLAKSKRAEFKALLAAIRKHPDLATRLDLIHSVGGCGLPTAVAVLIRMPEIGNITRGPAAALGGLAPYDDDSGNRAGARHIEGGRERLRRALYNAALAASFRWNPQLKALYSRLIAAGKCHKCALIACARKLLVTINAVVARGTPWVAEAPQLAKLPAV

SEQ ID NO: 59440 - protein, 419 aa, unidentified
MLSIKHFVCCGMDVHKKFVVATIAITDYRGVTTYLKKRYATFNSDLKAMKSWLLSHNCTEVCMESTGKYWIPIFNILEDSCHVVVANPKYVRAIKGQKTDDKDSAWIADLFKFDIVPSSYIPCKEIRMLRELFRYRQKLIGHRSSEKNRLQNALTVSNIALASVLSDTFGKSATAIVDYILTCEVFDPEYCKSLLLKKAKDKADDVVKSIIGYELRRDQSVKIEVCRKHFDYINECVDTLEETISDLSKPYHSFIELAITIPGITEQSATFIIAEIGVDMAVFKSSKRLCSWAGVTPQNNESAGKKKSVHVSRAGVYLKPLLVQCANAAIKDKKNPYFKYKYDRIKKRRGHKRAIIAIARMVLTCIYHMFQRQEVFNPADTDYSAIPEEMYQKFQEQYDRNAIKRLEKRGFVIIPPTTA

SEQ ID NO: 59441 - protein, 415 aa, unidentified
MKVVFPTCCGVDVHKRFLVATIITTSADSVQPHYQKKRFSTFNSDLNRFADWLRANDCLDVCMESTGKYWVPVFNILEKRGIRTVIANPKWVKAVKGNKDDTKDSKWIGDLFRMGLVKSSFIPAKEIRILRELTRYRYKLTSMKSSEKNRYQNAFTVCNVALDSVVSDMFGKSASAITEYLTSDENFDVQHCVSLLRGSLRKKADDVLEAIEGYEISAEQKTRIGIVRDHLQYIEKLIERVDACINTMMAQYEDYSSLLCTIPGIDRSSSITILSEIGTDMSQFVSSKRLCCWAGLTPGNNESAGKKKSVRISRAGVYLKPALVQVAHAAVKDKQHPYYALKYERIQKRRGKKRAIIAIARMILTAIFSMLSTGEIWNPSDLFKVDMPDQLKEKQLAKAVKQAVRFLEKQGLKVS

SEQ ID NO: 59442 - protein, 360 aa, unidentified
MQTQRSQINYEGQNIYIGIDAHLKSWTVSVIGEAMSYQTFSQPPTVEALTSYLAHHFPGGIYHSVYEAGFSGLWAHYQLVQAGINNIVVNPADVPTSQKEKLQKTDPVDSKKLARSLRSGDLDSIYILGKSTMENRSLVRLRATIVKDLVRFKQRIKSFLYYFGIKFPEVFSNGGSHWSRRFIKWLKEEVPIHLELGGQTMRFMVQEAEQLRNLLLEITREIRTLSKTDKYSSQMKLLRTIPGVGFITSITFLVEIENIERFQNSDHFAGFVGLIPTTHSSGEKNVDGEMTFRGQKVLRKALIESSWKAACYDPSLSLSYNNYTKRMDSNKAIIRIARKVLNRMYFVLKNNKEYVPGVVK

SEQ ID NO: 59443 - protein, 423 aa, unidentified
MEVMHERVAGLDVHKAMIVACVRIMADGKINRECRTFDTSTAGLKALLGWLTESGCTDVAMEATGVYWKPVWNILSDGEFELIVANAAHIKNVPGRKTDVNDAMWIGDLVACGLIRASFVPEQEIQELRSLLRARKQLTREQTSHIQRLQKTLEEANINPGLNPGDILGATGRRMIAAMIAGVTNPLQLAALADRRIKASPKALSDALHGRLTDHHRFMLKLYLGQHDCLSEAIARIDQQVHGLIIRMDEQVEAGQATLRALIILLCSIPGIGTLAATRILSEIGRDMSRFPTSGHLLAWAGLCPGQNESAGKRKSSRLRKGAPWLKTMLVQCAWAASRKKDSYYKVQFNRLRSRRGPKKAICAVAASMLTAIYHILKDGTEHQDLGADHFDRRSTEVKAKRLVEQLAKLGYQVELQPIAKAA

SEQ ID NO: 59444 - protein, 330 aa, unidentified
MTTNPPQIVFNHIVAFEVSKETLVVHTLPANEQCAIDNRPQAVRRLIKAEIKRNRNKQLGQMLVICEATGGYERHVLDAAVEMGVCVHRAHGTRVRHFGRYCGLLAKTDPIDARLLAQYGVKTEGVRLYSPPPPETAALRALHARRTEIQQMIIAETNRLDHAQHKSVLKSLKVHIASLKAALAAIETDIVQLVEESEILRKKVALMQTVIGIGPISAMVVLAYLPDIGRLTKGQAARLAGLAPINDDSGKKRGARHVEAGRTAIRRALYMAAVVALRANPILKAFADRLRGKGYPFKYVVTAVMRKLIVILNAVLRDGQSWKGAQIASA

SEQ ID NO: 59445 - protein, 400 aa, unidentified
MISVGIDVSKGKSTVCILKSYGEIVCSPFEVQHVEKELEGLDSLLKKLDGEIRVVMEATGIYHLPVLTFLEEKGYFVSVINPFAMKKYAKDNSIRGAKTDKLDSTMIANYGIEKWFKLQKHEGDEDTYAELKLLGRRYRYYMELHVKALLELTHILDYTMPGIKKLFNSWDEASGKDKLSDFVERFWHFDIITAQSLDEFVEEYLVWAGEKKYHRSRSKAEAVYKLASGGISTLSSGTPSTKMLVQEAVSVLRAVDNSLSRILSRMQELAKSLPEYSTVRSMGGVGDVLAPKLIAEIGDVRRLHSAKALIAWAGIDPPPYESGQFVGSKRRITKRGSSTLRKVGYEVMRVLKSHKAPEDDAVYNYILKKEHEGKDKKHAKIAGLNKFLRIYYARVMAIYR

SEQ ID NO: 59446 - protein, 343 aa, unidentified
MGEVSTIGLDIAKSVFQVHGVDAAGQVVIRRQLKRRYVLAFFEKLSPCLVGIEACASSHHWSRELKVFGHTVKLMPPAYVKPYVKRQKNDATDAEAICEAVTRSTMRFVATKTPEQQSCLTLHRTRHLFIRQQTAVINVIRAHLAEFGIVAPVGRKGVEALLDVVANPTDKRVPVIARACLAALGAQLCRLKEQILEFDRMIVTWHRSQETSKRLDAIPGVGPVLATALVASIADPKAFRSGRNFSAWIGLVPKQHSSGGKDRLGSISKQGDRYLRSLFVAGALAVIRYAKIHGTEHRPWLTALLARRPSKVAAIALANKIARMVWVLMARGERYKEPIALAV

SEQ ID NO: 59447 - protein, 321 aa, unidentified
MEPAILGIDIAKQKFDVALVVERKTITGRFNNTPEGFNMLERWLVKYGVERVHACLEATGTYGEALAEHLHRAGHVVSVVNPARIKGFGQSELSRTKTDKADAQLIARFCGAMQPGPWQPPAPEVKELQSLVRRLEALNDMLNQERNRLATADDIVKDSLERVITHLQQEIKATRKLIQKHIDRHPDLRGKRDLLETIPGIGPGTSAMILAEFGDVTRFHEAGQMASFCGLTPRHRQSGSSVRGRSMISKTGSSHIRKALFMPALAAIRYNPVVAAFRARLLANGKHPMIIVCAIMRKLIYLAFGVLKSGRPFDPSIAAAA

SEQ ID NO: 59448 - protein, 398 aa, unidentified
MDLPVYYELETNNGNRDYRIQIGGHYMNYNTVYVGMDVHKESFTLCSCKYEDEKASHYQRTPASYKNVLRYLAFLRTIYGEDTRFVCGYEAGCLGYSLYHQLENFNVECVILAPTTMLEQRSKRRIKTDKRDAEIIARSLTQHNYSPVHIPTETDNQTKEFIRMRDDHKAELKKIKQQILSFCLRQGYQYDGSGNWTAKHVKWLRSLKPAGLYKEILDEYLLTYTILTDKLNRLDQRIEELASTEEYKESVSKLTCFLGIKTHTALSVIVEVGDFQRFVSARKFAGYLGLVPGQHSSGDDRNGLGITKAGNTHVRRLLVESAQSYTRGKIGYKSRVLRSRQAGNSPQVINYADRANERLRRRYYKMVLKDGKKYNIAKTAIARELACFIWGMMTDNIY

SEQ ID NO: 59449 - protein, 438 aa, unidentified
MEEKKTADHPSVFDYPEYCTPVGIAAGEESRRKHKGGTKRFVGLDLSKQSCHVCIVDQQGMVVLHEGYSLRSSQRDKLYEILEEGDLVLMEASTGTFNIAREMNNIPGVVACVVNPHSTRINQTKKKTDKEDSLFLARLLLRTPVEELQLVSIPSDQEMANRDTISHYRSIDRSHSQMINRLHALFFNKGFPEVGKVHNIHTKTGRAAAIEACFGTDRSLAPSKRIAKELSMQLALLEELQERGEKQLAKIARSDDRTATILGSIPGVGLKTIASFIAFVGDIGRFHSAKQLAAYCGLVPRVYQSGQRDAARKITKEGQAALRGYLIESVFAMMRTSFDFPLKRKYEEFRERMGARKAAVAIARKLVTMMYSMLRHGTIFTVEDAEERQDVAAYHARKDLKAIGRYNKIQQSCKAYPEMLNLTNSMITNELGVFKFPD

SEQ ID NO: 59450 - protein, 359 aa, unidentified
MCSIAYGGLDVHKDRISACLIHSGTGEMFTDQVPNEQVEVVRAVKQWSKLGELRLCYEAGACGYVLYRWLEKVGIDCEVIAPSLIPRAPGDRVKTDRRDARQLARLYAAGLLKAVRKPSEEEEAVRAVVRLREQLTTDVVRQKNRVVKYLRAQGVVYRGGKAWTKRYWAWVRGVELPEKGRYIVDTLLEELEKQQALQARVGGRIEEIAKTEPYAGMVERLKCLRGIGTITAMVVVSEAGDMQRFGHAGQLMSYFGLVPREHSSGSQRKTGGITKSGSARVRGVMIEAGWHQRWPTDKVPKRLKKQWESQSKEVVAIAQKARERLNRTFRRIAVRRNPQIAVTAVAREMTGFVWAILRA

SEQ ID NO: 59451 - protein, 369 aa, unidentified
MPHVTSIGLDVHARSVAAAAFNPFTGEVVHRDFGTDAAEIAEWALGFEDPRACYESGPTGFHMARELRALGLDCAVAAVSKMQRPAADARRKNDRRDAEFIARMLATHNIVEVPLPDMAVEAARDLDRALDDATRELRRSRQRLNMFLIRLGHVWDERNADGTRKGSWTRAHWRWISGIRLEGPQRDVLEYYVTAARCAESDRRQLEKKGLALARTDRWRPAVEALSCIKGIDTLTAFRLAAEAGSFTRFRTAPAFASWCGLVPSERSSGETERRGGITKTGNRLARTALVESAWHYLTCTPRPKAPAPGADVPAAIRARADACTARLCRRREALAAAGKSSCKANAAVARELACWVWEIGRRAEGTLG

SEQ ID NO: 59452 - protein, 342 aa, unidentified
MNEYDGKQFVGIDLHRQRSVIVRQSESGEQLSAVRIVNDPVALGLQLEDAGADPEVVLEATYGWYWAVDVLQARGAQVHLAHPLGVKGFRYRRVKNDVRDAGDLADLLRMGRLPEAWIAPPATRELRELVRYRAKLVAIRSGLKAQVHAVLAKAGVLIAVSDLFGVGGRKRLAKVPLAAAYAERVRSLLELIDVLDSHETRFAGLIAKRLNTHRGYHAIQQLPGIGPTLAAVFVAEIGDVHRFAGPAQLCSWAGLTPRHRESDTVVHRGHITKQGSKLVRWAAIEAVQRHQTTAKISADKDRIEARRGKNIAKVAAARKLLTLVYYGLRDGHIRALDRDRAA

SEQ ID NO: 59453 - protein, 343 aa, unidentified
MDKNMMIGVDLAKNIFQLHIATMTGKVLSKKKLSRDRFKEFMKSHEPALVVLEACGSAHYWAETLGDMGHDVKLIAPQYVKPFVKRQKNDAADAEAIVVAAQRPEMRFVTAKTKEQRAKGVLFRSRERLVHQRTEQVNALRAVLYEYGYVIPQGIASISRIEDILARPNCDLPDLVCDECRHLLEQISSNTKLINAKTDLIKQLAKQTNMARQLQTIPGVGPMTAMAIDAFAPPMDLFKNGRGLSAWLGLVPRQYSSGGKERLGRVSKAGQADIRRLLIIGAMSRLTWLGRKSIPQGSWLARMLARKPRMVVAIALANKMARTIWAMLTKETDYRDPMISATA

SEQ ID NO: 59454 - protein, 355 aa, unidentified
MNQEKYIGMDVHQATISVAVMDGRGKLIMECILETKAATILEFIQGLHGSLSVTFEEGTSAAWLHDLLKPHVADLVVCDPRKNALLKEGSKSDRIDARKLADLLRLNQLNPVYHGEHGVRTLKELGRSYLTITQDLTRVMSRIKALYRSWGIPCSGTTVYAPLHRAEWLAKIVEPGVRRRAERLYQQLDLLQPVRQQARHDLLVESHRHEAVKLLRQIPAIGPIRAALLVALLQTPHRFRTKRQLWAYCGFALETRDSGEYRLVRGKVRRNRERLTVLGLNDNHNHDLKNLFKGAAISASTCPGPLYDFYVGLLQKGMRPTMARLTLARKIATITLTIWKKGVDFDAQQLNRQAA

SEQ ID NO: 59455 - protein, 450 aa, unidentified
MVLPSVAAASLRCRKRGAGHPINFAASLDEIAERDAAGKPIEIWFQMLWGRTLPPRLFKLAGVRNQIGEPAAMPSESTVHIAIELSVSSWLIAARLPGAEKSRLHRIEGGDTAALLALFAELRSRASAKVTGEANVACCFEAGRDGFWLHRLLTAHGFAAYVLEPTSILVNRRARRAKTDRLDAEGMLRVLAAWLGGDRQVCSMVRVPTPDEEDAKRTHREREHLVQEKLRIENRIQALLFTQGIRARPSLRSWARDMAELRTGDGRALLPLLRTELNRLRRRLVLILELIRELEAERTEALAAAANDAMVRKITALQRIRGIGSNFAAVLVREVLYRSFANRRQLASYVGITPMPYQSGGMDRDRSISRAGNPRARTTLIQLAWLWLRYQPGSALAAWFRERVGTLQGRTRRIAIVAMARRLLIALWRYAETGVLPEGVEIRAEAAPMA

SEQ ID NO: 59456 - protein, 390 aa, unidentified
MRFAGIDIASETHMVAVVDESGGVLVKATPFAEDDTGYRKLLELLGSATDCKVAMEATGHYWQNLFAALAGAGFEIALLNPVRTHNFAKEDLARTKTDAIDAVGIARFAQQKRPAATRLPDSVTQELRELVRLRDRVVQDMGDAVRRLHRVVDLGFPEFTRYVKTLDSELATALLHEYPTAAAFPTVPRPVAKLVYDGRHKVGPELAGKLVEAAKVSVGRHHGHAYRVQVRYACEDVDVARRRLRELERRIETTLRDHEVGTLLTTITGIGPQTAARVVAECGDLSRFPTPAKLAAYVGSIPGIKHSGKHTPKGAMTTIGNARLRCALWMPLLTAVARNPWLRAYYRRLVAAGKLKKVALVAAMRKLLHAMYSVAKNRRPFVPRLQEARS

SEQ ID NO: 59457 - protein, 430 aa, unidentified
MLSAGLANVQHSKTRKSRAATILTEERPQVIVGVDTHADTHHVAVVTEYGKPIADQRFAATAAGYSEMLDFITSHGIVTAVGVEGTGSYGAELSRVLVKEELTVLEVNRPNRQHRRIRGKSDPLDAYQAAQSVLAERGISTPKTKDGPVECLRVLRTARTSAIKARTVAINQIRSLLVSAPETIRSKYRGLHTSAMIATLVRSRPSGHPADTGYITALTLKTLAIRYQSLRSEIASTDALLQEILDSYAPMLTELPGVGVEVATQLLVTVGDNPERINNEAQFAALTGTAPVPASSGKTNRHRLSRGGDRQANSALHHVVLSRMQSDHRTKDYVAKRTADGKSKRETMRCLKRYVAREIFRQIFNPVAAPDITDLRTVRKQLGVTLQQAAEQLSQWPSNLSRIERGIARNDHVAESYRQWLAQQQLSPNM

SEQ ID NO: 59458 - protein, 338 aa, unidentified
MTMFAGLDVSDKATHICAVDDAGVIVWRGVCATDPQALAETLGKRCPGLVRVVLETGALSAFLYHGLVERDVPVTCICARHAKGVLSVRANKSDPHDAEGLAQLARTGWFKAVRIKDDATHLDRARLKVREQMVKSHRAMANQLRGLLKLFGLRLGTVTTPARRDARLQALFGQKPELRPILAPLVASLAALEVEIAGTTRQLKARAAADPVCARLMSVPGVGPVAAMVFKSSIEDPGRFEHGADVGAYAGLVPRRHQSGERDTRGHISKAGDPMLRHALYEAANSLLARVKRDCALRTWGLALAKAKGAKRARVAVARKLAALLHTLWRSETSFQWA

SEQ ID NO: 59459 - protein, 391 aa, unidentified
MTVMSDRVVIGMDPHKRSATIEVMAGDETVVGGGRFDTDRDGYTAMRRYAHRWPHRVWAIEGCQGIGRHIANRLLADGEQVVDVPPKLSARARVFATGQGRKTDATDAHSIALVGTRMAGLRPVVNDEQLALLRILVDRRRSLGEDHTRMVSQLHQLLLELIPGGAKKSLSAAQAKALLATVRPRDAVGKARRRVAAELIADLERIYRRTKEADKELKDLVASTGTTLMDLHGIGPSGAARLLVEVGDITRFPNRAHFASWNGTAPIDASSGEQMRHRLSRAGNRQINRVLHIMATVQLRNPTEGRAYFDRKKTSGKTSMEAMRALKRRLSDIVYRSMTNDAVATAAGPGGQQGTATGSSVTDSHPQAGSSEKSLPGPAATQDRTLLPAVS

SEQ ID NO: 59460 - protein, 411 aa, unidentified
MTGTQASESGELKQTPEELSQWATTLHHRFGGRPIAVALEQSSGALVYQLSQYPHLWLYPVHPATAARYRQAFYPSGSKSDPADTGLLLELVVHHRDRLRRLAPDTPETRLLRMLVEQRRQVVDEKTRWNNRLKAALKMYFPQVLDWVDIDTIMGCDLLERWPTLQQLQHAHPGTLRKFFREHNSRSESLITERIAAIYQATPAVKDPALLEGESAIAATCVAQIRTLLASIAKLDHQIQPLASQHPEASLFAELPGAGAALQPRLIAAFGTQRDRYANAAELQAYSGIAPITASSGHSRWVHVRWACPTFLRQTFHEFAGCSISRSEWARVFYDTKIAAGKSHHATVRALAYKWIRALFRCWKDGRPYDERTYLQTLAERNSPLTWGAGASTKPVWKTVGGFKKLSTENS

SEQ ID NO: 59461 - protein, 336 aa, unidentified
MTITTIGLDLAKQVFQVHGVDEAGQVVVKRRLRRAQVVSYFASLPPCVIGMEACATAHFWARELQALGHKVRLMPPQYVKAYVKRGKNDAADAAAICEAVTRPSMRFVPVKTEDQQAALLMHRARELLVRQRTQLINAVRGHLAEFGLIAARGPWNVPLLLASLEADQRVPEPARQLVQLLAAQLEDVKNRIAEVEARIMAWHKANPVSQRLATIPGIGPLIATAIAATVPDPKAFRSGREFAAWLGLVPRQKSTGGKPRLGRISRLGDKYVRQLLIVGAQTALLRSKAARANAWIQSLLARRPRLVVAVALANKTARIVWAVMTNGQSYRQATPA

SEQ ID NO: 59462 - protein, 348 aa, unidentified
MVADSLDVVIGVDTHRDAHALALVATASGALLLEAVVEASTDGYRDALELARAHAPGRRAWAIEGTGCYGAGLARFLLARGERVLEVDRPRRERRAQRGKSDALDALRAARSLLGGEQLARPRQAGAREALRGLISTRESAVGARRAALNQLRALIVTCPEPLRAELRPLTRARLLRRLRGTRPRRHADRQLRGTLLAMRLLAVRIEALTLEQRELEGEIVALVRELAPQLLAQPGVGPISAAHVLLAWSHKGRLRNEAAFARLAGAPPIPASSGKVVRHRLDRGGDRKLNRALHTIILTRRRTDPDTIAYIQRRVSEGKSDRDAVRSLKRYLARSLFRQLEAPPHTA

SEQ ID NO: 59463 - protein, 343 aa, unidentified
MNVFIGLDVSLASTAICVLGPQGRIVEELQAESEPEALVRAIASLSYSIDAIGLEAGPLSQWLSKGMEEAGFDVVMMETRLVKAALKAMPIKTDRRDAQGIARLLQMGWYRPVHRKSVSSQEIRALLTARKSVQQAIINLELSMRGVLRNFGLKLGHVTRIRYEARVRELVEQNEILSASTEALLRARSQLRAELADLDAKIAGLTKHDDVCRLMMTMPGVGPIVALTVKSAIDDPTRFARSKDVGPWAGLTPRRTQSGEMDIVGQITRAGDRGLRTALYQAAMILMHRGAPNWLQSWALKVAHRRGAKRAMIALARRIGVVLHRMWIDGTPFRYTQNSGATA

SEQ ID NO: 59464 - protein, 415 aa, unidentified
MPTILNVQHKACCGIDVHHKNVVACVLKADEFGEYTQCIKTFSTMTADLENLRDWLKQEKVEKVAMESTGIYWIPVFNVLEADFEIILSNARQIKNVPGRKSDPNDSSWISKLLALGLVNGSFIPPKDIRELRQLTRYRTKLVSMRTSEKDRVHNILESCNIKLSCVATDIFGASGMAIMQSLINEEFNPEDLAQLAKGRLRNKVPDLIKSLNGKMSKHDTVMLKMVLDHLAYLNEQLAELDQLIAEKSKPYQQEIELLDTIPGVDITTAQAMVAEIGTDMSVFENPERLSSWAGLSPGSNESAGKKKSTRTRPGNQYIKTITCQCAHAASHTKNTYLSSKFHSIKARRGPQKAAIATARHIMIAVFHIIRNKEPYKELGGDYLLKLRPHNVARSMIRRLKTLGYEVTAANGIQF

SEQ ID NO: 59465 - protein, 366 aa, unidentified
MKKISTVEIERIQIFKQNQLTIGLDLGDRTSHYCILNEAGEVILEHELPTTPKGIEEVFSRIPRSRIALETGTHSPWVSRQLTQWGHEVIVAHARNVRLIGESSRKDDPLDARTLARLARIDPGLLGPVRQRSAKAQIHLTVIRARAALVGTRTALVNAARGLTKSYGQRLRKCGTEQMNREIAKGLSQELQEALDPLLAEIESLNERIAEYDGRIEKIAKEVYPQVAVLKQVKGVGTLIALTFVLTLDDPHRFRRSRGVGCFVGLRPGRRNSGMSEPQLHISKEGDRYLRTLLVQGAHYILGPFGQDSDLRRWGLKLSERGGKNAKKRAVVAVARKLAVLLHKLWVSGEVYEPLRNNHKVVAAVA

SEQ ID NO: 59466 - protein, 342 aa, unidentified
MEYYAGIDVSLECSSVCVVDATGKIVREDKVASEPEALIGWFRPLGFELTRIGLEAGPLSQWLYAAMRDAGLAVELLETRRVRDAFKAMPVKTDRKDARGIAQLMRMGWFRPVHCKSIGAQETRAMLTARKLVQSKLFDVENSLRGILRGFGLKVGKTTELRFAGRIRELVSGHPSLEAIAEALLSVHAVLLCEFKAFEKQARTMARSDTKAKLLMTTPSIGPVVALTYAAAIDDPKRFKSSKAAGPHFGLTPRKYQSGKTDVSGRISKIGDASVRTALYQAAHIMLTRPIKGCSQLKGWAMRIARRAGMKKAKVALARKLAVILHRMLVTGTPFNASAMGA

SEQ ID NO: 59467 - protein, 359 aa, unidentified
MRQLYAGCDLHGNSNLIGIVDGEGKRVFKKKLSNDFSLVRDTLKLFQEELVGIAVESTYNWYWLVDGLMEEGYKVHLANPSAIQQYVGLKHADDKHDAFWLAEMLRLGILPEGYIYPKQERPVRDLLRKRGHLVRLRTSLVISLQNILSRNLGRKVNVNDVKALREDRVTPLLESSEELALAGRVSKEAIDFLTHQIRRIEGVVEKRMELKEAYRYLLTLPGVGKILALTMMLETGPIGRFATVGDYVSYCRKVPSQWTSNGKRKGSGNKKNGNKYLAWAYAEASELARRFYPEPRAYYNRKMQKTNAPVAHSALAHKLARAGYYVMRDQVPFESQRLFGRGRGWNGEPELGLVKSHEA

SEQ ID NO: 59468 - protein, 342 aa, unidentified
MQVTTIGLDIAKNVFQVHGIDASEKVVVRKQLRRSQVLELFKALPPCLIGMEACASAHYWARELTKLGHKVGLMPARDVMAYVKRNKNDAADAEAICEAVRRPTMRFVQVKSAEQQSQLMLHRTRDLLMRQRTQVINALRAHMAELGMTAAQGNAGLRELLAIIAGAADERLPAEAHASLIVLAAELQAMRTLIASIEKRIIAQHRSDEASKRLRSIPGIGLVGATAIVATITDPKAFRSGRDMAAWIGLVPRQDSTGGKQKLGPISKQGDRYLRRILVVGAHAVLKLARQKPEKYPWLTQLLAGKPFKVVAVALANKMARIAWALLVKGGPYRARALAAAA

SEQ ID NO: 59469 - protein, 354 aa, unidentified
MSNCTIIGIDLGDKKHAVVGLDDKANIVLKRWIQNTKEDLEALFRRNRGAVFGMETGTHCRWISTLCKECGCEVYVGNAYHLRSIFGNTHKNDMRDAEEIARLLHGDKRHFHPVQLRDAEHQDLVQLVKMREMVMSQRTKSASAIRGMAKANGVRLPTSDADSLHRKLAGLIDTLPDNLQLLLRPQIELLEKLCATIKEYDGIIRDYRNAHFGKECALLETIPGVGPINAAAFVAFTGDVRRFRHARDVGPYYGLTAGRDQSSSKDEPKQITKEGNGFVRHLLVNAANLIMQGRCRNTELLQFGLRVWGNRGKVAKRKAKVALARKLAVTMAAMLRSGTPYNGIIEDESADLKA

SEQ ID NO: 59470 - protein, 340 aa, unidentified
MEQYAGLDVSLKAVSICVTDALGAVLWRGEVFNDASAVCTALSRRAPRLARTVLESGSCGIHLYRGLKAAGVPVVCVCARHAKGVLQCRVNKTDANDAEGLAQLAWTGWYREVYVKSAEAHVIRAHLLARKQIAKARRDLENQLRAQLRVFGLKVGAVARAGFEARVRLLADQVPAVEAPIDQLLLVRRSLLAAQDTLDKEAKTLAKQDARCELLQTMPGVGPLTALAFVSTVDGSARFAKSSALGAYLGLTPRGHQSGAVAWTGRISKTGDALTRALLYEAANVLMVRVKAWPPLKVWAVKLADRIGAKKARVALARKLAVILHRMLADATAYRWKAAA

SEQ ID NO: 59471 - protein, 359 aa, unidentified
MNEAITYRIGIDVAKGVFQAHAVKVNEPGEPVAFKKRLKRAQVEAFFAKLPRSLIGLEACGSAHYWARVARCHGHEVRLMPPAYVKAYVKRNKTDAIDAAAICEALSRPTMRFVPVKDEADQALVALHRMRASFVEKRTAAANQLRAELAEFGIVAAVGKRGLCELLALIEPDPETGTETERFAALPAPLRLLLTELARQWRSCNEAVQRMDREIELGVRKNDRARRLTFVPGIGPIAASVIDAMLPNPQVFKSGRHFAAFLGLTPREDSSGKTVRRGAITKKGDAYLRRILVLGATAYLASVRRGKAKGASAWVLRMAAHPKRKLAAVALANKTARIAWAMLAKGEDYRAPTAALAAA

SEQ ID NO: 59472 - protein, 341 aa, unidentified
MHPTTIGLDLAKHVFQVHGVDAAGKVIIRKKLRRADLVEFFKKIPACLVGMEACGTAHYWGRELASLGHDVRLMPPAYVKPYVKRGKNDEVDAEAICEAVTRPTMRFVPIKSAEQQSILMLHRTRDLFVRQRTMLVNSLRGQLAEFGLIAPQGIWRIPELHALAQDTDSSVLPDPARACAELIMMQIKDLQAKIKAIERTLMVRHRANEMSLRLATIPGIGVITATAMVATVVDASAFKSGRHFAAWIGLVPQQNGTGGKIHLGRISKKGEPYLRRLLVLGATAVVRYARNKPDFAGWVNALLARRPARVVTVAVANKLARIVWAIMQRGGSFRERSFGIA

SEQ ID NO: 59473 - protein, 347 aa, unidentified
MLADELDYVIGVDTHRDEHVLAVVTAPAGAVVARRAIGADPRGYREALRFAERIAPGRRAWAVEGSGSYGAGLARSLSEHGEAVLEVSRTPRTERRLAGKDDSLDAVRTARAALASETLALPRSGERREAVRVLLVARSSAVDVRREALTQLRAVIVTAPEPLRQELRRLSEGKLLDRCSRLRRIGAADELATRLVLRSLARRIQAATAEAAELEREILAHVRALAPTLLDEPGIGPIVAARLIVAWSHPGRLRSEACFARLAGVAPVPASSGQTQRHRLSRGGDRQLNRALHTIALHRRQHDPATKDYIAKKIAEGKTRRDATRLLKRYLARQLYRLLENQEALMT

SEQ ID NO: 59474 - protein, 356 aa, unidentified
MKKDTKIDFSGQIIYVGIDVHKKSWSVCILTEHLEHKTFTQPPVPEVLLGYLKRTFPGATFYTVYEAGFCGFWICERLRQLGVECIVVHPGDVPIKDKERRRKSDPRDARKLARTSRSGELDPLYIPTVEQLQDRSLIRMRKTISKEQSRIKNRIKSLLHFYGIAVPERFDNRIWSGVFIHWLKDIQNETEAGRATLHSLLRQLQNYRKEQVQIDREIRVLAKSERYRNKVTLLKLLPGIGLISAVIWLTELIDIRRFKRFDELTSFVGLVPREHSSGDSQNFGSLEHRGNRYLRAILIENSCVAVRKDPQLMLDYHNYLKRMTGNKAIICIARKLLRRIRFVLINEQPYVTPNMT

SEQ ID NO: 59475 - protein, 433 aa, unidentified
MQKYCGIDWAESHHDISLVDETGAQLAKLRIGDDQAGYRALLDLLADHGDDPDHPIPVAIETSRGLLVAALRTGPRQVYAINPLAAARYRDRHGVSGKKSDAQDAYVLANILRTDRDMHRALPADTDLAKAITVLARAQQDAVWNRQQLGNQLRSLLREYYPAALTAFQHKTGGLARPDARAVLAAAPTPAVAAKLTKPQLKAALKRGGRQRSFDAEVERLQQIFRARQAHHPDLVEQAMGTQMLALLRQLDAACLAEADLAEAAQAAFHRHADAPILLSFPGIGNQTGARILAEIGDDRTRFTDARGLKAYAGSAPVTRASGKKTYVGRRFVKNNRLANAGYHWAFGAFNNSPGAGAHYRARRESGDWHAAAQRHLFNKLLGQLHHCLRTDTPYNEAIAFPAPRVQPGPDMPVPASTCDKEPSTMLPMLNVA

SEQ ID NO: 59476 - protein, 397 aa, unidentified
MRVVFGIDVSKASSEVAILVNGEKVHGYTISNDALGFARLLGDLRTVHKPEIIFEATGVYSRRLQTFLEDNGYAYTRLNPLEAKKQLDSLRVRKTDQIDAEKLAQSQFVLNRKPTYIQEEVYQNLRDLSRFYQNLTEDIVRAKNRLHKVLQVTFPELENILSTPTGEQYWNLVIAFPCKDFVLELSKDKLSESIRQSTSKQISDKRVAYLAEKLTALANQSYCAVKKTSPMLEEVRYYTKELLRLSEQRQAVLDEMVELAQPLPEYDILLSIPGIAETTATSIIGELGDIRRFQSANQINAFIGIDLRHYESGKFLAKEHITKRGNPYARKILFKCIHNIASASHTNPCHIADFYEKRKRQSQTTSTKPLQPSHFNQATHDCLHTSAHSDNVLPHYA

SEQ ID NO: 59477 - protein, 317 aa, unidentified
MRQTNTKTAGIDTSKDKLDIAIDGSTTCWQVENTAIGWRHVADRLTAAGVTRVGIEATGGYERGVVRYLREKGFTVLVLQPVQVKAYARMHLRRAKNDKIDAALIAACAAGLEAPAVPPDARLEALAGHLTFVEQVEEDIARLKVRLEHVEDARLRDILKADIAALKQRRATEMLRIIKALRAHADLARRYHLVLSVPGIGERTALAIIVRMPELGRISREEAAALAGLAPYDHDSGAHKGQRHIAGGRARLRRSLFAAALPAAFRWNKALIELYSRLIARGKCHKAALVACARKLLIYANTVVQRGTPWVQGPAAA

SEQ ID NO: 59478 - protein, 335 aa, unidentified
MLIIGCDLHTRFQQIAYLDLTTGEIVTRRLEHENCEARKFYAGLPEKARVGIEATGCTQWFERLLGEWGHELWVGDAAKIRACVVWRQKTDTRDAEHLLDLLLTNRFPRIWIPMPEERDVRQLLQHRNKLVSMRTSVKNQLHYLAMNQGVCRKRQLWTKRGRAELLALNLGPWASRRRQELLELLDRLDPRIEELDEVVKAEAERRPEVVNLMQQKGVGPVVGLAFALTLGPVERFANSRKVVSYLGLNPREYSSGGHQRLGPISKQGNEMLRWLLVEAGQSAAQYDPELRRKYQRLKFRRGANVAKVAMARQLAVRLYWRLRSAGCGTAGSHAK

SEQ ID NO: 59479 - protein, 412 aa, unidentified
MDLIHQRCAGIDIGKADVKVCLRVPGPGTRRRTEVRTFSSMTRDLLAMRDWLASEQVTLVGMEATGAYWKPIFYVLESEVECWLLNARHMKTVPGRKTDVKDAEWIAKLVEHGLVRPSFVPPQPIRQLRDLTRYRTEVVRERTREAQRLHNVLEDAGIKLTSAVSDVLGKSGRAMLEALIAGERDPHTLAELALGRLRGKHAVLIDALTGQFTEHHAFLVRAMLDRIEAATAMHNRLTTQIDQLLKPYRRHIELLASVPGVSEHTAQVILAEIGDDITRFPSAGHLASWAGVCPGNNESAGKHSSGTTRPGDPWLKSVLGQAAISASRGKDTYLAARYRRLMARRGRKRALVAVQHSILIAVWHMLTNNASYCDLGGNYFIERAGKGRATRRLIGQLNHLGYQVTLNPLAAT

SEQ ID NO: 59480 - protein, 385 aa, unidentified
MTCDTDHLTATTVPPQDTTICVALELSRSKWLVGVNLPGSDKISKHTLAGGDGAALLALLSKVKEKAEQQLGKPLRLMTIQEAGRDGFWIHRLLEAAGIQSHVVDPASIAVSRRHRRAKTDALDLEVLMRTLLAWRRGERRVCAMVRVPCVEHEDVRRGSRERERLVKERTQHVNRIKALLATQGILDFQPTHKEARQRLEDVITGDGRVLPPRLKAELLRELDRLELVARQLAEIERERDAAVTASNAAGDKAGLLVRLKGIGPQGATVLLQEAFHRQFSNRREIAAYAGLVPSPWQSGGTDHEQGISKSGNARLRGTMMELAWLWVRHQPGSALSAWFREHVGDAKGRRRRIAIVAVARKLLVALWRYVEHGVVPKGAELKAA

SEQ ID NO: 59481 - protein, 416 aa, unidentified
MKYARIHVLPETPPDGLTAGIDWGSADHVVCVVDPAGQVRARFAVSHDRAGIGKLIAGLRAAGVREAAIERSDGVLVDALLEAGLTLVVITSRQMKNLRSRYGSAGAKDDRFDAFVLADVLRTDRARLRPLVVDMPATAALRAAVRARRDLVAHRIAACNQLRAHLAVVFPGAVGLFAHLDSQISLAFLTRFPSQDTVDQLSEEDLSAWLHSLPRRGRPPRPGQLHARLQAAAHGPAGADGAARAPVTSALVATLTTLAAQIKALEADIAAQLAAHPDARIFTSLPRAGTVRAARLLAETGDCRARFPDPESLAGLAGVTPVTRRSGKHTSIGFRWAVNRQLRDAVCDFAADSRHASPWAAAIYDAARARGKDHPHAVRILARAWIYVIWRCWQEGTAYDPAKHTALQRVLEQQNP

SEQ ID NO: 59482 - protein, 355 aa, unidentified
MSQEKYIGMDVHQATVSVAVMDSGGKLIMECILETKAATILEFIQGVRGTLSVTFEEGTCAAWLHDLLQPHVSRLVVCDPRKNALLKDGSKSDRIDARKLAELLRGNQLSPVYHGDHGVRTLKELGRSYLTLTQDLTRVMSRIKALYRSWAIPCSGTTVYAARHRSEWLAKIPQPGVRLRAELFYQQLDLLRPLHQQARCHFVGESHKHPAVRLLRQIPSIGPIRAALLVALLQTPHRFRTKRQLWAYSGFAVETHDSGEYRYVRGKLLRNRERISVRGLSDNYNRDLKNLFKSTAISASTRPGPLRDFYLALLAKGMRPTMARLTLARKIAAITLTIWKKGVDFDAKQLDQQAA

SEQ ID NO: 59483 - protein, 356 aa, unidentified
MSKYSIKFFVGIDLGDIENEICILDLNGDIVEATSINNTAGAFNAFFDRFDQPREVLVAIETGTHSPWISQLLQTRGCRVLVGNARKLRLIWDTTNKHDKRDAEMLARIARFDPTLLYPIHHRSRAAHMDLAFLKARDALVRCRTNLINFVRSTSKTAGTRLPSCSAEAFPKAVIDHIPKDLIAAAVPCLNTISEMTQKIRNMDRQIEILCTKSYPETLVLRDIAGVGPLTALGYILTLEDPDRFKKSRDVGPYLGLTPKRNQSGKTDKPLSITKAGNIYLRRLLVGAAHYILGPFGPDCHLREYGNRIASRGGKVAKRKAVVAVARKLAVLMHHLWKTGSVYEPFYQHHIKAKAA

SEQ ID NO: 59484 - protein, 342 aa, unidentified
MQITTIGLDIAKNVFQVHGIDATEKVVVRKQLRRGQMLAFFKALAPCLIGMEACATAHYWARELTKLGHQVRLMPAKDVKAYVKRNKNDAADAEAICEAVRRPTMRFVPVKSAEQQARLMQHRARDLLMRQRTQLINALRAHLAELGIAAAQGREGIKELLAIVAQDGDTRLPVDAHASLIVLAAQLQAVQTMIGSIEKRIVAQHRSSEENKRLQTIPGIGVLGASTIVAVVPDPKVFRSGRDFAAWIGIVPREDSTGGKQKLGPISKQGDRYLRRILVVGACAVLRRARQQPEKYPWLTQLLARRPFKVVAVALANKMARIAWALLAKGGTYRAPALAAAA

SEQ ID NO: 59485 - protein, 478 aa, unidentified
MQDRRLVGIDLGITSAHTVRVLAGDGGLVCRRKAVPTVESLGEVEQAALAGAAAGTRLEVVVEPTGPAWLPIAVFFAARGHTVYRVSSAKAHDLRRFLRRHAKSNGIDADTLARLPLVDPAGLHPLQLPDAARAALDRRVRACDRLTRQAADHKRRIKGLVRQLLPASPLVGELGQADLAVLERWADPQGLVAVGRARLQQVLASASAGQQGAQRAEQWLAAARAALELYGDHPAIAWQDLAAEVHSEVRLLRATQAELAAHAREREACYRRVDPAALARSLPGLATIGGPALVATMGKASRFATAGKFRCFTGLAPKASETGQTDRKGQPISKAGNRLLRTTLVRAADHARRQDPQLARIYWTQMVQRGKDHLGAVCVVAAHLAERAWTVMDRATPYVICDTDATPVTPAQAKQIIAERWTVPEEVRRRRRHKKGKAPQQVLQGHVHGAQGATRRPSPSSATLGQPPSRVKPTQPQP

SEQ ID NO: 59486 - protein, 344 aa, unidentified
MNYFVGLDVSLRSVALCVIDGEGAIVLERTLDCEVEAIDACLDKFGKQITKLGFEAGTMSQTLFHGLRAAGYDVVCMEARHVSAALSAMRNKTDKNDARGIAQVVHTGWYRPVHMKSRESHYIRAMLTSRKAVLSKCIDLENEIRGLFKVFGIRLPKTLAHHKFEDCVRPIIEADEGLSFALLPMLEARTAIYVHFREMDKRVKHFAAQDKVCLLLMTTPGVGPMTALHIKAAIDDPARFTSSRLVAAHFGLTPRRFQSGEMDNPGRISRAGDTDVRASLYSAANSMLTNTRRMSPLKAWGLQLVRKKGRKRGTVAVARKLAVILHRMWLDGTPYRWDDEEVAI

SEQ ID NO: 59487 - protein, 369 aa, unidentified
MTFFIGVDLHKTQFTVHVRTEEESESLDQIRQYPTTADGYTEFLARISRYKETGSDVKIGVESTGNTRFFKNQVEKAGAEVTVINTLKFKVINESAKKTDKHDASTISEFLSKDMLPESYLCGKETENIRRLLKSRERLVRSTVGQKNEIHALLVSLGLSDELRSLQSKKGRQRILDTLESNNDYVLEAQSVKLMFEIIERIEESVKIIEKQLVELTKDDEMVNRLLTIRGCGKITAWTIRAYTEDISRFATAKKYAAFCGLVPWVQDSNETIHHGKITKRGPQELRTCFVQLVLGIRRCKDTSNWRMMQRYEYMKTNKGSGKSIVAAARKMAEIVWAMLSDKKDFDAQKMIGKYKPMSLAEEALTAMN

SEQ ID NO: 59488 - protein, 354 aa, unidentified
MTSSVRHVIGGVDTHGATHHAAALDAGTGKLLGDQQFPVTPAGYGQLAAWLRGFGQVEQVGMEGTGSYGAGLFRYLDAEGVTVIEVDRPNRRDRRRQGKSDPIDAIAAARAVLAGVATAIPKRRTGPVEAIRILRTTRAGVVKARVAALNQISGLIFCAPEDLHATLTGLSRADLIIRCARLRVDDTAIADPAAAAKFALRALARRVQNFDLEIDDADRQLHILTRATAPATSAIFGAGSDVTAQILATVGDNPDRITSEAALARLCGAAPVPASSGNTTRHRLHRGGDRQANRALWVIVLSRLRWHEPTRAYVARRTAEGKTKKEIIRCLKRAIVREVYIAIKTDFPDLTAIA

SEQ ID NO: 59489 - protein, 351 aa, unidentified
MTVTHYIGFDVHKKSVSYCVKDAAGTIAEEGKLRATREALRQWAGKRTEPWHGAMEATLFSGWIYDTLKPFAAELQMGHPAMMKAIGASKKKNDRIDARKTADLVRCNLLPACYVAPVEMRELRRMLRYRNLVVAQAVRMKNKMSGLLMEVGAEYNKQQLHGKKYFTELLGSLEEVPESVKELLRLSRVALEMFETTQQQILDKLQKDLRLVERLEVLKSIRGVGDVTALSWALEICDPHRFSSIADAVSYCGLTSALVSSADKQQRGPISKQRNAHLQTVLIEAAKLAPRWNAQLAAVHEREMGRGHRNRATLAVARKLVAYLLAVDKSRKPFQVRTPSAAEHQALATAP

SEQ ID NO: 59490 - protein, 456 aa, unidentified
MKMKRKKKVLQVPKLESLKQINPNAAGVDVGASELYVCVPEDRDPRPVRVFQTFTSDLHEIAAWLKRCRVTSVAMESTGIYWIPLYEVLEEAGFEVKLVNAREAKNMPGRKSDILDCQWIQQLHSYGLLTASFRPPKDIVALRSLVRHRDRLIVARAVHIQHMQKALHLMNLQLDNVLSDITGVTGMRILRALVAGERNLDTLASYRDPSCKSSAQVIRESLKGNYQEEHLFPLRQSLELYEYHTTMIQQCDREIEQKYRALPSRVDLQRKPLPPSKKQQKKPRKNAPTFDLRSRLYEMAGVDLTAIDGCNAATIQVVLSETGVDMEPWRTCGHFTSWMCLAPHNDISGGKVLRSRAKKTKNRANTALRLAAQALTHSDSWLGAYYRRQRARLGAPKAIIATAHKIARIIYYMLKYQREFVDLGANHYEAQYRKRQINSLTKKAASLGLLLVPAKA

SEQ ID NO: 59491 - protein, 365 aa, unidentified
MRKISTPAITGNKNLHSRLTIGLDLGDRSSWYCVLDESGEVIAERKLGTTPKAMKEGFTTMPRSRVALETGMHSPWVSRLLSELGHEVIVAHARNVRLIGESRRKDDRLDARTLARLARIDPQLLAPVKHRSAQAQADLTVIRARASLVRARTALVNAARGLTKSYGERLRGCNPRNLDREKAQALSPELQAALGPLLQALEGLSEHIAEYNQRIEEIAQQDYPQTTLLKQVKGVGTLIALTYMLTLEDPHRFGKSRDAGCYAGLQPGRRNSGQREPQMHISKEGDAYLRTLLVQGAHHILGPFGPDTDLRRWGLKLAERGGKNGKKRAVIATARKLAVLLHRLWVSGEVYEPLRNSNRTILTAA

SEQ ID NO: 59492 - protein, 385 aa, unidentified
MANQNDLSRSLVALEQNNTIIAVIEMSLNYWLIAGIVPGVDRHPLKKLNVDEKALLQLLRQWRDEAAKAGHVITRMAVAFEAGRDGFWLARWLRARGVDAHVIHPTSVAVPREHRRAKTDRLDTELLKRAFLGWLRGEPEHCRMAAIPSLQEEDAKRPTRERENLVGERTRIINRTKACLVRFGIRNFKPTLRKAPERLNQLYTPEGDPLPPNTLAELRRDMARLRFIIDQINEIEAARLLRLEQARVEGPTAMVRLLARVIGVGIETADMLVHEILSRDLRDRRAVARYAGLTGAPDESGSKRREKGLAKAGNARVRRGMIQLAWRFLLHQKDSALTQWYRARTASAGRKRKTMIVALARKLLIALWRLATTGEVPTRVVLRAA

SEQ ID NO: 59493 - protein, 408 aa, unidentified
MKPLFVGIDVSSRNNVAYLMKPDGSEYSSFSVQNNLGGAKLLSEKIVSALRSMQLERVVIGLEATSIYGDSLVYALREDGSLGRFQRKIHVLNPKQVRKFKEAYPDLPKNDWVDAFVIADHLRFGRIAKEVYMDDYRYQALRTLTMARFDVIQNLTREKQRFANYLFLKCSGIAQDKAIPNTSATTIALMEHFETVDDLANAILEELTAFIIEAGRGKFVDPDATAKAVRAAAKGSYRLPKTVNDTVNQAMSVSIASMRALKEQIKVLDKAIEQQFEIIPNTLTSIPGIGKVYSAGIIAEIGDIHRFDSQASVAKFAGLVWHKDQSGEFKAEHSRMIKSGNRYLRYYLLEAANSVRRCDSEFRRYYNLKYHEVNKFQHKRALALTARKLVRLVFRLLKDNRLYIPPEG

SEQ ID NO: 59494 - protein, 411 aa, unidentified
MESLLRQELPATVLVVAIDPGKVANRVWLASGERGLIGEPVTLPVLREGIDELERLVGASEAAGAPLIGIEATGSLHRAWTAELERRFPGRVRLLAPSETQAARAQLGSRRFKSDDRDCAALVYLLRQGLGRPPREPALEALLAAVSHRRALVDELKVLRQRLHAQLNALCPGLSAPQGHGRVLELLRPSGQAVLACAVAFGGKPPSMRSLIARAPGRLTRRNAAFWAARWRACLPPPADAELRAERLCFDLERLRGLLAALARVDAQSATLLAQTDGQVLTSLPGVKAVRAAAFACHSLPIERYATAEQLYSATGLAPASYDSATIRRRGGISRQGLPEHRDALMAIAWGLSSHSPAFRERGDELRSRGFAPIQTRVALARHACRLCHALLRSQQPYDEARYRQARRRGR

SEQ ID NO: 59495 - protein, 470 aa, unidentified
MVAVMIGIDPHKASHTAVAIDPAEVPLGQLRVRASAVQAERLLGWAQAWPERAWAVEGAGGLGHLLAQQLLSAGERVLDVPPKLAARVRLLATGNINKNDPNDARSVAVAALRSAGVREVRRDDHAAVLKVWSKRYQDLGRARTQVACRLHQVMCELIPGGVPGEITAGQAERILASITPAEAVQAARWELAAELTEDLRGIDARIRQARTKLAAAVRAAGTSLTGLFGVGPVIAAAVIGDVRHVARFPDRDHFAAYNGTAPIEVSSGGRKIWRLSRRGNRRLNHAIHMAAVTQIRHRHSQGHACYQKKLAEGKTGKEALRALKRQVSDAIYACLQADARRDAAHVKSPGGQPGNGSDSSAAGSHPGHRLFGQATPGLRHHTTTAASDPAPGPASARGRAGHSSIAATSPLAKPQVQVQRPQRSEDERPGGAASQRPYSAARKARGQGSQAKPQRPKTASRAHENDRRNP

SEQ ID NO: 59496 - protein, 350 aa, unidentified
MPCKTVAIAHTIGIDTGKNTLHMIGLDKKGTIVVREKVSRTRIAARLVNVPQCLIGIEAGMASHHVARELLALGHEVKQVPPAYAKPFRQGHKNDFRDAHAIAEAVQRPSTRCVPVKTADQLDLQALHRVRSRLIGNRTAVINQLRGFLLEHGIPVRQGLRFLRQQLPQILAMRTDVLSPRMIRIIEELIGDWEHLDERIERVTDEIETLARADENCRRLMTVPGIGPIIASAMVAAIGNGAAFAKGRDFAAWLGLVPKQMSTGDRTILGRITKRGNRYLRMLFIPGARAILFRPAGWAKHSFGPWLAAAARRLHRNVLATAFANKLARIALTVLVEGRSYAARVEPRAA

SEQ ID NO: 59497 - protein, 362 aa, unidentified
MGLIVPTAMHPEQDDQPLPYDWFVGIDWGSEKHQVCVLDRDRRRVGERVVDHDGASLAQLAAWLWALSAGQPQRVAVAIEVPRGAIVEGLVERGFPVFAINPKQLARFRDRHTMSGAKDDRRDAFVLADSVRTDQPSFRRIQLDEPQLLLLRELSRAEETLLEEFRRSANRLRDQLHRFYPQMLELCSAADEPWLWDLIDLAPTPAHATLLSEEQVQRLLKTHRIRRVKAKEVLTCLQGSALPVAPGAAEAAQAHCAFLLPCLRVLAEQLKACSQQVSALLSTLAEEPGKGEGPSDVAIVLSLPGVGRKITAWLFAEAAQPLAERDYQVLRTHSGVAPVTKQSGKRRVVVMRRGCNPIGLKP

SEQ ID NO: 59498 - protein, 388 aa, unidentified
MHQEWILRPRQVETTRFRDWAERNLKEGDAVVVEATGSVWDIYDIVAPLVSKTVVAHARKVRQIAEARVKTDKEDIKRLITLLIADVVPEVWVPPVHVRELRSLISFRWRLNKQMTMSKNRLQSVVQRFNLDPPEGGLLADKNKPWWEEQEFSDLTGFEVEQDLEILETLDRQKEALDQKLAELSNSEPWASDMVYLMQIPGFGPIFSMVILSAIGDIKRFSHPKKLVGYAGLGAGVHASGEKYQEKSITKEGRKELRWAMVEAAWRAVGSDPYWKAQQKRLAKRMHKNKAIVAIARRLLVSIWHILTKREPYRHFDEEDIAYKMLIWAWAMDEDSRKGMTPQQFAKYGLLRLGLGQDLERIERGGAFRRIAPAEEILALKPELAPPR

SEQ ID NO: 59499 - protein, 414 aa, unidentified
MVDDNVTWFAGIDWGSATHQVCLLDAAGKIVGERAFLHSGAGLAVLCDWLVSVAGDAGSVAVAIEVPHGPVVDTLLDRGFAVHAINPKQLDRLRDRFSVAGAKDDRRDARVAASGLRTDPHLFRPVQAGDPVVVELREWSRLAEELQQECVRLANRIRQQLWRYYPQLLEVADGDVAAEWVLTLWTMVPTPAKAVRLREATLAQLLRRHRIRRLDAATALGILRQPAIRVAAGVTEAAVLHLRSLVARLRLTNQELQQAERKLDELCATLTESTPATADSGLSDAAILRSLPGVGTVTLAALLTEAAGPLARRDYAALRTLSGVAPVTKRSGKSCVVVMRYAAQARLRQAVFHWARVAAQRDPKSRARYEALRARGHSYGRALRGIADRLLGVACVLLQRQTLFDPDHGTPAVA

SEQ ID NO: 59500 - protein, 345 aa, unidentified
MTIVEARPVTGGVDTHADTHVAAALDSIGGLPGVEEFPVTPAGYARLLGWLGGSGTVALAGIEGTGSYGAGLARHITAAGVRVVEVDRSDRQDRRRQGKSDPLDAVSAVRAAQPGRARGAPKGRDGAVEAIRALMVARRSARSERTQTISQARSLIVTGPDDLRARFTGHTVTALVSELAALRPRPGAVVGYATRIALRELGRRAEFLDGQLERLDEIIIPLVSARAPDLLALYGVGPGTAALLLIAAGDQPGRLRSEAAWAHLCAVAPIPASSGKVTRHRLNPGGDRQANHALWRIVITRMSSHAPTRAYVERRTAEGLSKTEIIRCLKRYVAREVYRYLRPAA

SEQ ID NO: 59501 - protein, 394 aa, unidentified
MILVGIDIGKNKHTFSIIDKNSGEILLSPSDFSNNLKGFLFLIQKLSSYTKSKLLIGMEDTGHYHFALLKYLLDRRYTVALINPTTTDLTRKLQGGITKNDPLDSLTICDVISSNHRNKPYRVTTLNRFDLYEQKQLTRHHHNLKEELNTYKNRLQKCIDIVFPEFNSLFHSKYGIVYMNILKAFSSAKAIANADIRSIRKCFEFKGQGKRISLSAEQLKLTAKSSIGIPSVAEEIQIRHLVSQIELLEKQLSEIDKRIEEFSLKNNSPILTIPGISHFSGTSIISELGDICNYTKASQIIKFAGVAPYHYESSQFTAHHTAITKKGSKYLRKTLYQIILPVISNNEVFYAYYTKKLNEGKGHRCAQGHCIRKLLRVIYHLLSTRQPFNPKLLV

SEQ ID NO: 59502 - protein, 345 aa, unidentified
MSYKIAGIDVHKKVLMVVVMDASTPNCKPELRRFATMPSDLRRLSSWLREQEVKEAVMESTAQYWRSVWLELGPYMRLQLAQAFSNRAPRGRKHDFKDAERLVRLIADELILSFVPNGEQRIWRNMTRMKTQLTRERVRLQSQMECLLEEMRIKLSSVLSDLLGASGLRILHALAEGETDPRKLAALGDDRLKCTEEQLVDASTGSSQPMHREMLALQLERLQLIDRQIEKLNGMIAQAMKPYEETVIRLAEVPGFGVDSAQQVIAWVGTCPGKDESAEENHSSRSAKGNKYLRRLLRPGGSCCGEEERQPLSGGVSASATAAGLSVRHLGHRTSTLPRALEDLA

SEQ ID NO: 59503 - protein, 342 aa, unidentified
MLYVGIDVAKNKHDVTALNVPGKTVLKPLTFSNNKAGFELLDLSFRQLNQDCLIALEDTGHYAFNLLNFLHEQGYKVYTYTPLLIKEFAKSLSLRKTKTDKKDAHGIALKLLSDPNREQFQHDNRQVELKILARHIHRLKKKQSDWKVQYTRCLDIIFPELDKIVGKHSEYTYQLLTCYPNPQKRLEAGFDKLIEIKRLTASKIQDILSVAPRSIGTTSPAREFEIIEIIKHYKRLIDKAETCVNDLMAEFNSVITTVTGIGGRLGAVILAEIRNTHAFDNPAQLQAFAGLDSSIYQSGQIDLAGRMIKRGSPHLRWALIQAAKACARFSPAFKAYLKTKLE

SEQ ID NO: 59504 - protein, 369 aa, unidentified
MKKNNMYVGMDTDKNSIDVAIGEEGRNKEVRHYGRIENNLSSIDKLVGKLETLGHTLHFVYEAGPCGYTIYRHLRAKGIDCAVVAPSQIPKRSGDRVKTNKRDAINLARLHRAGELHRVYVPLPEDEAMRDLSRAREDAKRAEVKTKQQLSAFLLRNGFKFTGKTPWSNPHRRWLNEIRLPHPAQQITFQEYRDAVDEAHNRVERISEQIRTLLPNWRLKPVVEALQAMRGVSLIVAVITIAELGDLTRFTNPKQLMKYLGLVPSEYSTGDNRRQGSITKTGNGSARRALTEAAWSYNRPARVSRAIDERQKNLPKVIKEIAWKAQLRLCARYRRLVNKGKNKQVVITAIARELAAFIWAIACQVKINA

SEQ ID NO: 59505 - protein, 339 aa, unidentified
MEAYVGQQLVGIDLHRRRTVIVRQTQAGERLGMVRIDNDPFALAEQVASWGEALQVVLEATYGWYWAADVLAEAGAQVHLAHPLGVKGFAYRRVKNDVRDAADLADLLRMGRLPEAWIAPPATRELRELVRHRAKLVALRSGLKAQVHAVLAKCGVSVPVSDLFGVGGGRLLDGLQIPDVYAGRVTSLRRLIDAFGFEIDIYTKLATTRLAAHRGYRAIQAIDGVGPVLGTVFVAEVGDPHRFPGPEQLCSWAGLTPRHHESDTKVRRGRITKQGSTLVRWAAVEAVQRVRSGPLGSVRARIGERRGANVAKVATARRLLTLVYYGLRDGHIRCLARPA

SEQ ID NO: 59506 - protein, 421 aa, unidentified
MVTDQNVTAPELVAYIGLDWGDERHAVHLQAAEGGPVERVELEQKPDVLHAWVAQVRERFHGRPVGIAIEQRKGAVMHALMMYEFFVLYPVNPKALARYREAFRTSGAKDDPADAELLLDLLRKHRDQLRPWLPDTVEARTLQSLCEQRRKLVNHRVALTNRMTSLLKQYFPQALDWVGDVASLQGCDFLRKWPDLAAVQRVRPSTLRTFYQQHNCRKATVIDERIRQIASACPLTSDPAIVDPLSLSVQTYATQLRVVIEAVQAFDTRIADVFAHHPDQALFDSFPGAGPVCAPRLAAAFGTDRSRWQSATELQSHSGIAPVTERSGKALWVHHRLACPKFVKQTFHEFADQSIRFSQWARAYYDQQRGRGNDHHAALRALAYKWIRILFRCWKDRKRYDEATYMDALRRHGSSLVKNNA

SEQ ID NO: 59507 - protein, 381 aa, unidentified
MFDQFYSDPTPTVYAAIELSKKTWIVAILLPGKAQPSLHRIAGGSFAGLVMRLRAAAAGRRLLICYEAGYDGFWLARALAGEGLDCRVLDPASLQVNRRARRVKTDRIDVLMLVRALIALDRGDQHVCAVVKVPSVEEEDARRSHRERQRLVRERTAHINRIKGLLFAQGVRGVEPGLRRTRIDFSQLRTGEGRPLAARLRAELGREYARLELVERQLREVEAERDTADAQDAMVERKRGMLLQLRGIGAASAAILAREIFGRTFANRRQLGSYLGLTPSAYDSGSVTRCQGISKAGNSFARRVMIEVAWLWRKYQPASALAKWYDGRAAAQSPRVRRIMLVALARKLIIALWRYVETGLVPDGAEIGDQKRPAPATVTAA

SEQ ID NO: 59508 - protein, 411 aa, unidentified
MEVVHQRCAGLDISKKDAKVCVRIAGAGRRKTVETVTTWGSMTNQVLALREHLVDQQVTCAVMEASGDYWKPFYYLLEGAGFEVMLVNARHVKNLPGRKSDVSDATWLAQLGAHGLVRGSFVPPEPIRQLRDLTRARTAITRERGREVQRLEKLLEDAGIKLSSVASEITGVSGRLMLAAMINGQRDPAVLADLAKRRLRSKIPTLTEALTGRFTDHHAFLARVHLDLIDRHTAAIEEITARIEVVIEPFQGFRELICTIPGIGPITADVIVAETGADMTRFPTAGHLASWAGTCPGSNESAGRVKSTKTRPGNPYLQGALGAAAMACSQNPGTYLGARYRRIASRRGPMKANVAIQHSMLTAIWHMGRDGTLYDDPGADFFTRLHPDRAKTRALHQLEAMGYQVTLDRAG

SEQ ID NO: 59509 - protein, 403 aa, unidentified
MIKVWAGVDTGKAHHHCVVIDAEGRRLLSRRVANDEPELERLVTDVTALGQEVTWAADMAGGGAALLIGLLAAAGQRLLYLPGHALAHAAGGYRGEGKTDARDAAIIADQARMRRDLQPLRPGDEVTAELKILTERRKDLSCDRTRAINRIRGLLTGIFPALERELDLTCAGPLVLLTGYQAPAAIRRIGPARLEAWLRTRHVHRAANLARTACAAAGRQHVVLPGETLTATLIAGLAQEVITLGERIRDADKLIEDRFRRHRHAEVITSMPGIGTLLGAEFLAATGGDMTWFATADRLAGFAGLAPAPWDSGRIRGNLQRPRRYHRGLNRVFYYSALISIRSCPDSRKYYDRKRAEGKKHTQAVLALARRRVNVMWALLREDRAYQPRTTQPRVPEPSDEAA

SEQ ID NO: 59510 - protein, 370 aa, unidentified
MTSIIYVGMDVHTTNYTLCCYSVSDDRTFAIVQVEPDYHEILKYLARVEKQRGEKCQFVCGYEAGCLGYSLYHQLRSNEIDCVILAPSTMMTVPGKRVKTDRKDAERISKCLAFHTYSPVYVPTEMDDAVKEYIRMRDDGNKALIRVKQQIIAFCTRHGKSYDGKSYWIKKHVDWLCEMDFGSAVLKETLQEYMILYFQLREKVDMYDVRIEELSQMNTYLEPVQKLGCLRGIAAHTALSLCVEVGDFRRFATAQQFASYLGLIPGECSSGDKQQYTGITKAGNSHLRKLLVEAAQVFSRSATKSGKSAALKARQAKCDSIIVAYADKANARLKKKYFRIAMRSKSNIAKAAVARELACFVWGIMTDNIA

SEQ ID NO: 59511 - protein, 397 aa, unidentified
MDTSYAVFCGIDVGKSEHHAVGLAVDGTRLYDKALPNDEGRLRAVFDRLATHGPLLIVVDQPNTIGALPVTVARSCGHQVAYLPGLSMRRIADLYPGQAKTDARDAFIIADTARTMPHTLRRVDTGDDTLAELDVLIGFDDDLAGEATRISNRIRGLLTGIHPALERVLGPRVTHPAVLEILSRCGGPAGIRAAGKRKLTAIAAKNAPRMGARLVAEIYAALESQTVVVPGSAAAETVLPKLADSLKETLQQRKTIAADVERMLDAHPLSSVLISMPGIGIRTAARILLEVGDGSAFKSAGHLAAYAGIAPVTHRSGTWIRGEHPARSGNRKLKRALFLSAFAALHDPTSRAYYDRKRAEGKKHNAALICLARRRCDVLFAMLKTKTLYQPPTTQAA

SEQ ID NO: 59512 - protein, 415 aa, unidentified
MAKVMEAIFRCCAGLDVHSKTVAACVRRIDDQGKIHAEVRTFGTMTRDLLALCDWLVAEGVSHVAMESTGVFWKPVYNILEGQFQILLVNARHIKNVPGRKTDVKDCEWIAQLLQCGLLKGSFIPPRPQRELRDLTRMRAQLTHEMSSVANRIHKVLEDTNIKLGVVATDILGISGRKMIEALIDGETDTVKMADMARGRLRDKIPLLEQALVGKVTEHHQFILKALMDHLIYLESQIERFNQRIDEAARPFEKAIAALIPMPGYERASAQSVIAEIGPDMNPFLTDAHLCSWAKICCGNNESAGKRKSGATGHGNRWLRAILVQVAWAASHKKGSYFQAQYRRLAGRRGKKRAIVAVAHSILTVTYYILKEQRTYKDLGGDHFDRISRDRICRYHVKRLQDLGYNVELAERPAA

SEQ ID NO: 59513 - protein, 323 aa, unidentified
MTNIPKSYIGVDISKNYLDVCILPNQNEFRIKNNADGFKQLFIQLSSHDVEQVVCEATGGYENAMIKALKSANYNTWQVEPGRIKAFIKSKGIRAKTDKIDAMMIAQFAQQNKCSHDKPILSDHQDQLRCLAERRYHFIKMIKAEKTRLQQQFEFVEKSLKNHIQYMENEVDELDKQMMDIIAKNDVLSKKAAILQSIPGIGNMTTSTLLATMPELGVMTNKQAGSLIGVAPITFHSGKKKEVAYTRGGRSLPRHALYMPALNACRFNDVFKSFYNRLREAGKSAKVAIIAVMRKIIETINAMLRNETKWNPIPLTTVVINED

SEQ ID NO: 59514 - protein, 419 aa, unidentified
MNKLGCIPITQIQIMEDVFMNAVGIDISKGHSTVSVLRMFGEVVMSPFEVNHTVSELKALAKTLKRLPGETKVIMECTGNYHLPVARTLQTAGLFVSTRHAELIHKFGNDTIRKGKSDPADSLKISNYGLTNWLNLKEFIPEDEIRQSLKVVTRQYTKYSKIKTTLANNFISLLDLSFPGVDKLFTSPARSSDGHEKWVNFACEFWHSDCVAKPSFKVFSERYRKWCKRSGYNAVNASGIHDFARKCVPVLPKNEATKLLITESALQINFICETLSIFAKEMKRLAESLPEFPIAMGFFGVGEILAPKIIAEVGDVRNYRKKSSTVRFAGLDPVDNDSGDFHGDKKISKQGSPHLRKVLFQVMDCLIQNAPEDDPIFRLLDRKRSEGKHYYSYMCAGSAKFLRIYYARVKEHLAKLDMI

SEQ ID NO: 59515 - protein, 323 aa, unidentified
MIMTKAASRFNHIVAFEVSKHELVVHSLPADQQERVSNTRAAVRRILKREAARNQRLGLGPLLVICEATGGYERHVLGAAAELGLSLHRAHGNRTRMFARFSGRRAKTDAIDARLLALYGLTPGLALYRQPGPELEALRALRRRRDDIQQMLRMEMNRTEQAILPRLKTSLSRHRNWLNAELEAIEAEIETLIARSPELSRKATLMQSVKGVGPKTAAAILAYLPELGTLDKAKAASLAGLAPHANDSGLQQGARHIAGGRAALRASLYMAALVARSFNPKLRAFAMQLRARGKPNKVILTAIMRRLIVILNAVVASGQPARA

SEQ ID NO: 59516 - protein, 321 aa, unidentified
MNKYTETFGIDISKDVFDCYGSKQGHLQFKNDETGFNKFQKKLVINSLVVMEATGYYHYRFAQFLYSKKVIVSVVNPLSVKRFIQMKLAKVKTDKSDAKAICEYGLVNEVPLYNALTDVQSECLQLFRLMDSFLKKRTATKNKLHGEEVLGIPSKWVYRSLKRDKKHLDKELLGIQTKLLSLVKQDQQQQLTLLQSIPGIGMKTALFLIVITDGFSKFENSSQLCSYVGITPTIRESGSSVRGRSRISKVGNKKLRNLLFLCAFSACKHNKACREVYERIVNKGKSKKLALIAVANKLLKQAFAIAKSGLPYDEGFVSVRR

SEQ ID NO: 59517 - protein, 413 aa, unidentified
MLKIVYPICCGMDVHKSFVYACIASTNEQGVTTYKSKRFSTFTKDLRLCAEWLAANNCKDVCMESTGKYWIPVYNILEPTCNVVLAHPKYVKAIKGKKTDKKDAKWIADIFKHDLVSGSFIPPADIRQLRDLVRYRWKLTNFVVGEKNRVQNCLTVSNIKLDDVFSDVFGKASSNIISRMLENPSEKITEVACFRTKGMKATDEEVLAAVDGEFCPEQAEKLRIIRSHMDSLELCKLNVESLILSVAEKYIPQIDLVSTVPGIQTFAAIGIISEIGVDMSVFPSSKHLCSWAGLTPQNNESAGKKKTTRIGRAGDYIKPLLVQCALAAIKSKKNSEIRNRYLSIKKRRGHKKAIIAIARMLLTAIYNILKKNEPYNIDLYTRSNDPPAHRTVSVDEAIFILQRQGYLVTPATS

SEQ ID NO: 59518 - protein, 317 aa, unidentified
MEISLIFVGIDVSKAQLDVAIRPTGEKESFANDKLGIKALVKRLAKIEPTLIVLEATGGYERQVTRALVSAELPVVVVNPRQVRDFAKATGQLAKTDSIDADVLAHFAEAVRPELRPLPDAVTLELRALTARRRQLLEMIGAENNRLAMTSKAVRKRIDAHIRWLEQDLQRADQDLDRAIEQSPIWKENEDLLRSAPGIGPVTSRTLLAELPELGTLDRKQISSLVGVAPFNRDSGSLKGRRSIWGGRAPVRCALYMATLVATRRNPVIRDFYKRLTAKGKLFKVALVACMHKLLTILNSMIKHKTSWSETFSRQTT

SEQ ID NO: 59519 - protein, 351 aa, unidentified
MNYKQNEKILQVTEKTLVVGIDIAKEVHYARAFNYRRIELDKVISFTNNQEGFKSFRNWVLEVMKENNLDNIIIGFEPTGHYWYNFAEFCRIKDFKYVMVNPYHVKISKEMDDNSQTKNDRKDPKTIAKLVIDGRYFETYVATGVYAELRNIVKIYEHVTGCKSVVENKIIQWLDNYFPEFPTVFGNWECKSGMITLKSFPLPSMIVELGEAKVLETWKKEIKQGVGMKRAQRLLVAASGSVGCTEGLRMGQKELEYLLKEYEMYLEQLEEIKSEMEILLVQVQGAKEILEIKGIGIVTATAIIAEIGDISRFEDARQIQKYAGLNLIENSSGKHKGQTTISKRGRNISCF

SEQ ID NO: 59520 - protein, 380 aa, unidentified
MKTNSDTTPAFYIGLDVHKEKTSVAIADPGPQGEIRLHGEVATTQVALDRLIRRIAKARDIPLSRISVCYEAGGCGMWIARMLVKMKVSCTVIAPSLIPTKSGDHVKTDKKDAIKLARLHRAGELVSVFVPDETDEAVRDLCRARVDAIDDRRRAKTRLLAMLRRLGFNYSGKTTWNDAHKRYLRDLSLPFPAHRVILEELIGQIDQLDARIARYESHMEHLYADWRCKPIVDAVMGLKGFQMIAAMMIVSEVGDFVRFTHPKQLMSYLGLTPGEYSSGGKSKRTGITKCGNSHARWILVECATHYGKEPRVGANLSTRQEGLPGWVRETSWTAQNRLYLRFSNLRKRLMHHNKIKVAVARELCGVIWEIGYRIQSGTAK

SEQ ID NO: 59521 - protein, 406 aa, unidentified
MTVMIGIDPHKGSHTAVAVTAAEEPLGKVRVRACPAQAGQLVAWAAAWPERIWAVEGAPGLGRLLAQQLIAAGERVLDVQPKLAARVRLLQTENTGKSDPNDALSVAVAALRSKAARPVLADDHATVLKVWAKRHRDLSRAHNQVACRLHAVLCDLVPGGVADEITAGHAAKILGQITPADPAAEARKELAAELLADIRHLDAQRREIKKKLATAVKASGTSTTQIFGVGPVIAATVIGDVVTVARFPRRDHFAAYNGTAPVEVFSGEKKIYRLSLRGNRRLNHAIHMAAITQIRYKHSDGRGYYERKIAEGKTHKEALRCLKRRISDALYARLRADARNAAAASTRDPGGQPGNDSVSSAAGSHPEHRLFGSATPGPAPSLRSATALPQAMRPSEPSAKKTRRDP

SEQ ID NO: 59522 - protein, 392 aa, unidentified
MSQHCHFDASRSLTALEQDSTIIAVIEMSQTKWLVAALIPGVERQPLKKFDAHEETLLKLLHRWRREAGQAGRNIKRIVVAFEAGRDGFWLARWLRARDIEVYVIHPTSIAVSREHRRAKTDRLDTELLMRVFLGWLRGERRHCSMVAIPTIEEEDARRPNRERQTLVTEQTRIINQMKAIFTRFGIRTLRPTMRKVAEKLEDLRTAEGTPLPQNTLAELRRHLARLRIVRDQIRAVEQERLRKLAVASAAEKKSPHAMVRLIARVLGVGVETADMLVNEIFSRHWRDRKAVARYAGLTGSPDESGSRRRERGLARAGNVRVRSGMIQLAWRFVRFQKNSALAQWFAARTADGRASTRKTMIVALARKLLIALWRLVTRGEVPQGVALRPAS

SEQ ID NO: 59523 - protein, 362 aa, unidentified
MRIIGCDLHARQQTLAMLDTATGEVVNETLAHEGGIVREFYSRLPSPVRVGIEATGSMKWFLNLMEELGIDCQVGHPATIRAAEPRRQKHDRRDAELLLKLLVENRFPSIWQPSKELLDLRALLLHRHQWVRLRTRIQNALQGIALANGLRRGSSLWSESGQEAMASLPLAKHTAHRRSELQAMYVRFEAEIEQLNERVLERAGERATAGLLMTHPGVGPITALATDVFLGDPKRFRDGKAVASYIGIIPRENSSGGRQRLGGLTKQGNPLLRFLWCEAAAHAVRRDPELRQFYRRKLVQKGLGKARVAAARKLGIRLWIMLRDQIDYQEFCRRGQMQQKSGDACAGMPGPRYGAKSHRPID

SEQ ID NO: 59524 - protein, 342 aa, unidentified
MSIVYVGLDLGSSNFQQVALNHHGVSRANRDFSTSEANLVKAFSDLQGEIHVHLEAGELAPWAAAVIAPLVTRVVCSHPQSNAWIAKDADKCDRIDAYKLAELLRLNRFKEVHYAPDQPRRNFKQLVQHYDELTGQQARMKTKIKARLRMQGVIVTGERPFSSKGRKEVLARVESRELRTAVTQIYAVLDQLVTAQEQARLLMLRAAQTFPEIKLLRTVPGIGPIGACRFSAYIHTPSRFSSKRKLWKYCRLSVSHRSSNGKPLRRPRLDRSGCGRLKDVSRKAFDVAIRSRQDNGFKRTYQRALETTHDKTHARLTVQRKIVSTLRAMWLRRTPYCDELNR

SEQ ID NO: 59525 - protein, 403 aa, unidentified
MAKVFIGVDPHRLSATIEVVDRHQRVLATGRFGTDKAGYATMRRRVASYPERVWAVEGSNGTGRPLAQRLLADGEHVVDVPAKLSARARLLDTGHNRKTDAHDAHAVAVVAVRAKGLRVLAHDADLEVLRMLGDRRDELSRAKVQCINRLHRLQSELVPGQSKKDLTALQAKAILAAARPRDSVRKLLKRLALEQLAELMVIEKKINASSRELKTLVLARGSHLMDLTGVGPVLAARILADVGDVARFADRNRFASWTGTAPLDASSGEQIRHRLSRAGNRKANHVIHIVAVNQIRLNTPGRAYYRRKLAAGKAPLEALRCLKRRISEALYRQLRADANTTATAHVDTGPGGHCGAALISSGAGLHPHTGTSDQPLPGPAPTTLPAPRTRRRTTTPRTLQPRP

SEQ ID NO: 59526 - protein, 296 aa, unidentified
MVVATISGEGLKTETRSYKTFSSSLTELKEWLLSSGITHVAMESTGVYWKPVYKILECPDMKVWIVNARHIKYVPGHKTDKKDSAWICKLLLAGLLKPSYIPEREQRELRDLTRYRNKLIQHVSSEKNRIVRILEDCNIKLSSVVCSLDGVVANKLIDMLIDKGHVTMDDITCIYHKKLEASPELLYQACEGFIEPHHIYMLQTIRKDMEQTKAIIADLTCRIKEVLSPYENVMELLQKIPGLSRKTVEDLIAEIGVDMEAFPTEKHLASWAGVCPGNNESAGKKKVVEPPMATNS

SEQ ID NO: 59527 - protein, 350 aa, unidentified
MNEQYAGHQIVGMDLHRRRSVLVRMTDTGEHLETVRISNDPEYLRAVMARAGEHPDVVLEAAYGWYWAADTLAELGATVHLAHPLGVKMFSLRRVKNDQRDAADLADLLRMGRLPEAWIAPPATRELRGWVRHRAKLVGLRSNLKCQVHAVLAGAGVQVSMSDLFSPGGQDLLARVALTPESRARVDSALRLITGLDFEVELFGRLVTNRLRRDRGYLAIQAIPGVGPVLAAVFVAEIGDIARFARPEQLASWAGLTPKHHESDTTVHRGPITKQGSRLVRWAAIEAVQRVGSHTRLGQIRDRVAARRGRNIGVVAAARELTELVFYGLRDGRLRCLSTPAASNTVNPAA

SEQ ID NO: 59528 - protein, 329 aa, unidentified
MYYVGIDISKRFIDVCLLVDGIKGKRRTKVLPNGTNSTESLTQWLALQKCEPVQAHIIIESTGIYHEHLAYGLHQAGILVSVINPHRIREFAKGMGILTKTDKVDAYVFACYGCLKQPDGWAPPSEEVRKLKALLQHRDNLLNDKQRIENRLNTLKSTRPPEEIVGSLESIEQNLKDELARIERLIADHIDKHPGLKNDLKLLKSISGVGEQIGWNMLAILRSNNFRSAEQVASYLGVIPVERRSGSSVRGRARLSKIGPPGIRAKLYMGAIAAISHNHHVKAQYERLLLKGKSKMLAIGAAMRKLVHLCYGVLHTQQPYDKNYGMMPH

SEQ ID NO: 59529 - protein, 394 aa, unidentified
MGKLYVGIDISKDRSSAKGIDEHGESRFEISFAMDGTGFAELLKAIRANSDGYGDVTAAMESTACYHINLYSFLSAKGIDTVVINPLLISNFAKLSLRKTKTDKKDAGTIAQFILAHKDSVKQLAVSQDLQDIRDMARERESLSHHISATKVEIQRILQTTFPELATLTNPLTKVMLHFIQRFPSARLVSVAKPKVIEETLKEKPCSCRLRFTPKDLIELARKSIATVSPAKEFILSGKIETLLHLEKRCDELSKALTKYCESTIVEDLRIVTSIAGINNKMATTLLAEIGQISNYHSHKNLIAFAGIDPSVYQSGKYEGASRISKRGNRHLRRVIWLMAISVIQHNPIFRKYFMKRRNEGYPFKKAVFATAHKLMRVIFAMLSHRTFFEEQCV

SEQ ID NO: 59530 - protein, 346 aa, unidentified
MNITTVGIDLAKLVFQVHGVDARGKAVLRKQLKRSQVSAFFAQLAPCLIGMEACGGAHFWARKLMEFGHTVKLISPQFVKPYVKTNKNDAADAEAICEAVGRPNMRFVPIKNTEQQALLGLHRARQGFVTGRTAQANQIRGFLTEFGLVMPVGIRSIKSKVPEMLEDAENGLSVVSRALIARLFEHFRTLDRQVDELEREINAWHREDTASQRLQAIPGVGPITASALVASVGDAKVFHNGRQFAAWLGLVPRQDSSGGKTNLLGISKRGDTYLRTLLIHGARSVLLSLKRHPDRADGWLARVAARRNPNIAAVALANKNARTVWALLAHGRDYQDGYSSVKPLAA

SEQ ID NO: 59531 - protein, 366 aa, unidentified
MKKISTMQAFSNELLKEQKLTMGLDLGDRWSFYCVLDEAGKILLEQKVSTTPAAMKQTFLKIPRSLMAMETGTHSPWVSRLLTELGHAVIVAHAQKVELITKSNRKDDRHDARTLARLARIDPELLGPIRHRSAKAQIHLSVIRARAELVSARTALVNAARGLVKSFGERLPKCGTHQVGEKLAEGVNAELRDVLSPLLREVESLSERIKEYDERMEKIAKEVYPEVFLLKQVKGVGTQIALTYILTIEDPYRFPKSRQVGCFLGLRPGRRNSGKSEPQKHISKEGDRYLRTMMVQGAHYILGPFGEDSDLRRWGLKLAERGGKNAKKRAVVAVARKLAVLLHRLWVDGEVYEPLRNSQKAMRAVA

SEQ ID NO: 59532 - protein, 343 aa, unidentified
MEAYSGKQFVGIDLHRRRSVIVRTTEAGEVLEAVRIVNDVPRLASVMARAGECPEVVLEATYGWYWAVDALQAGGANVHLAHPLGVKAFEYRRVKNDFRDAQDLADLLRMGRLPEAWISPPPTRELRELVRHRAKLVGLRAHCKAEVHAVLAKCGVQVLMSDLFGVAGTELLDGLELPSPYAARIASLRRVMDDVDFEITVFAGIIRGRMAREPGYTAVQKIPGIGPTLGAVLVAEIGDINRFASASKLTCWAGLTPKHHESDTHVRRGRITKQGSRLVRWAAIESVKTVSKNSEVGVLRERVADRRGRNIGSVAAARRQLELVFYALRDGHVRALEHLPMVA

SEQ ID NO: 59533 - protein, 368 aa, unidentified
MTTVASTEVQITVGVDTHADAHVAAALDQLGRLLETQSVPTTPTGYGALLAWARSLGELERFGIEGTGSYGAGLARWLHGQGVEVVEVERPERQNRRRRGKSDAIDAEAAARAVQAGTATAQPKAGDGPIEMLRSLQVARRSALKARTQAANQLHALVVTAPDSLRTPLRRLSRPRLVATAAAFRPRLPLTTPTAAAQLALKSLAVRHRQLSAEVESLEAQLALLVAQAAPDLVAVKGVGTDIATTLLVTAGDNPDRLRSESAFAHLCGAAPIPASSGKTNRHRLNRGGDRDANRVLHILAVGRMGWDPVTRAYVERRTTEGLSKKEILRCLKRYLARQLYPLLARNPALLLLRQEFSAGPALALARA

SEQ ID NO: 59534 - protein, 339 aa, unidentified
MKLIRVGVDLAKNVFQVHGVDRSEKVVWRRRLRREEWINRVRERAEPGCEIGMEACAGAHHWARVLQRLGYRVKLIAPQFVKPYVKSNKNDAADAEAICEAMSRPGMRFVPVKSVEQQDTQAMHRVRSELLEQRTAKANQIRSLVAEHGLVAPRELVQLRLALPRWLEDQENGLSATFRRLLEGLRADFALLDERMKELDCEIERLAQGDATAKRLMELRGVGPLTATALLAAEGDARQFANGRQMSAALGLTPRQHSSGGRDRLLGISKRGDAYLRTLLIHGARSVIRTAASKDDRLSQWVTRLAARSHINVAAAALANKTTRMAWAMLARGTDYQPV

SEQ ID NO: 59535 - protein, 338 aa, unidentified
MATVPIFVGLDYSDQVVEVAVLDSQGKVLSNRPLANDGAELDRFVRQFGSSIRAGIECGTGAANLTEELSERFNWSIDMAHSGVVKHMKQNPDKTDFQDARVLGDLVRVGYLPRVWLPPESIRELRRLVRYREELVAQRRQAKQRLRAIVRDARQKPACATTRAWTKAWWVWLEQVAQFGPQSRWVLSQLKGEIERKTADIATVEKRLTEVTGEDVVVNKLLQQRGIGPVTAWTLRAEIGNFERFNNGKQLARYCGVSPCNASSGQRKADAGLIKAASGSLRTVLIETAHRLARLEPRWVEFKAQKKKEGKAGSLIAGAIANRWVRKLYYVMTGKAAA

SEQ ID NO: 59536 - protein, 342 aa, unidentified
MDYFAGLDVSVKDTSVCIVDDTGRITREVKVASEPDALLQVLRNPAYRFKRIGLEAGPLSQWLFSALAEADLPVICVETRHMRAVLKAQINKTDRNDARGIAQMMRVGLYRPVHVKTLRSQKLRMLLTHRKLLQSKAIAVENDLRATLRNFGLKVGMVGTAKFEARIKELVENVADLAVLVEPLLVVRRALREQIGVLHRSVLAIVRDDEVCRRLMTVPGVGPVVVLTYRATVDVPARFRRSKSVGAVFGLTCSRDQSGERDRPGAISRCGDEMMRAMLYEAAQSMLRSRKWSWLKAWAMQIARRRGIKRAIVALARRLAVIMHRIWVDSTEFRWTREATAA

SEQ ID NO: 59537 - protein, 406 aa, unidentified
MKLTCGVDWAEAHYDVALVDGDGVVVARARIDTGATGFNKLLALIAEHEGSAQDTPVSIETDKNLLVVALVEAGFTVYPINPRAVARYRERYGQAGGKSDPGDAAVLAHILRTDRHLHRQMPAVSEQGRAVKALARQHQEAIWALHQTVSRLRSVLLEFYPQALQAFPNLTHKAALTVLAAAPTPASSRQLTRRRVVTLLQRSGRGNHPTLVEQILTDLHTAALRQPPQVEQALGHTVVGLVGIVVAMQRAVDDLELELAREFDQHPQTAILRSAPGLGPILAARILAEIGDDPQRFANPNSLRAFAGTAPVTIASGRSHYVKARKVRNKRLADACHWWAFTALTKSAGAREHYDKRRAAGDHHNAALRNLANKLLGRLWWCLANNQTWDDTAAWPHRLKPDSVAA

SEQ ID NO: 59538 - protein, 337 aa, unidentified
MKYSGIDLHSNNGVVVISDEADRVLVRRRVPNNAAAILALLAGHREELVGVVVESTYNWYWLVDALQEDGYRVHLANTAAIKRYEGLKHSDDEDDAAYLAQLLRLGILPSGYICPPAARAVRDLARKRMQLVRSRTAQVLSVENMLSRQTGAGMRSYAVQRLTAHAVESFGFHPDVGRALCANVAVIQTLNREIDKLEQRLHQCVGLRPEFRLLTSVPGIGQTLATLIMLEVGTIERFAAVGNFASYARCVDSARISNGKKKGQGNVKNGNAYLAWAFVEAANFARRYCAEARRFYERKKARTNGVVATKALAHKLARACYHMLKEQTLFDVKRCFA

SEQ ID NO: 59539 - protein, 313 aa, unidentified
MAQILPTVGIDVSKDWLDVAVRPGKEQFRVANDAAGWAELCRRLKAIEPRAIGVEASGGYERDLTHALLAADLPVRMVNAWKLRQFAKAAGLLAKNDRVDAHAIAWFTATLPSREVIHDPAREHLAELVRARRQLVDARQAFANQLEHMRDALLRRQTARRIRQLEADEAALDQRIVQAIAAEPDFAARHELVCSMRGVGPVLGSTLVALLPELGSATNRQIAALVGVVPYDFDSGKMRGLRCIFGGRADVRRVLFMAAQAAAMWNPDLKAFKQRLRATGKKPKVVIVAVMRKLIVTLNAMVRSGTKWQPKTA

SEQ ID NO: 59540 - protein, 349 aa, unidentified
MLYAGLDLSRKRLDFHLLDAEGETVEVGASPPDIDGLRGLTQRLARHGEPIRAAIESMNGARFVHDRLELAGWQVEIADAQKVKGLAPLACKTDRIDAWVLAELARRDLVPAIWLPDPRVRAERERARWRLHLVRHRSSLKQRVHAVLLTHGKPCPVSDLFGVRGRQLLARLGLPEPWQGTIDASLRLIDELDREISECERELRRLGADHRYVPLLCTVPGISWVLAYTIAAELGDIGRFPSPRKLAGYSGLCPRVYQSGERDLRGPLNKQGPRYLRWALVEAPPTPAPTPSTASAISKRRRASADSVAPRSLRSTSLAASQKRSGTCSPATNPSLPKAPPTPWPPDGP

SEQ ID NO: 59541 - protein, 343 aa, unidentified
MQAVTTIGFDIAKSVFQVHGVDMQGRVIIRRQLKRRQVLTFFRKLPPCLVGIEACASSHYWSRELQKLGHTVRLMPPAYVKPYVKRQKNDATDAEAICEAVTRPNMRFVATKTPEQQSCLMLHRTRHLFVRQQTAVINAIRAHLAEFGIVAPVGRHGVEELLKIVADASDQRVPEIARACVAALGAQLRVLKRQILEFDRRIMAWHRSNAVSKRLDAIPGVGPALATALVASVADPKAFRSGRDFAAWIGLVPRPHSSGGKDKLGGISKQGDRYLRSLFTAGALAVIRYAKIHGTRHRPWLTALLARRPTKVVAIALANKIARMAWAMMAKGEHYKEPAALAA

SEQ ID NO: 59542 - protein, 343 aa, unidentified
MNVDVLGIDLGKNSCSVVGLDPTGRVVLRRRMRRESIVGLAAKLSGCVVAMEACCGAHHLGRLLTAQGHEVRLMSPEYVRPYVKAQKNDDRDAEAIAEAATRPTMRFVALKTEAQLDVQVLHRVRDRLVGQLTALTNQVRSILLERGIVVPQGRRRLLEALQVLSDQPDGSGVGPRVRLLLDDMLDQWRGLDRRIAALDDEFAAMARNDPAARRLATIPGVGVLNATALVAAIGDGRTFSRGRDLSAWLGLVPRQASTGGRPKLLGITKRGSKYLRKLIIQGARAALPSLSRTTTPLGSWLRGLLSRAHGNTAVVALASKLVRIAWALLRNQTAFAAGGLAAA

SEQ ID NO: 59543 - protein, 420 aa, unidentified
MGIDLADRKQMVVVCDHDSKVLARRTFRCKAWDLGAALDWAAGRAVKAGYAGVTVACEPTGHRWRVLGQLAADRGMSYVCVQPALSSWARKTEDLTSDKTDDKDAVLIARLTAQLRCYLPEPVDETWGRLRHLGARREALLTEHTACVQQIRDLLECVWPAALTAAKHPFKSTTWVAALTVVVVRDGGDLARTRRLGPTRFAEQVGKEVIRRSKTKPCLRIVRNVFNALSDTAGVQSHRLGALERVGWTLADWDAARTNQTVVEQRMVAVLDELALTDLVCTIPGLSAVGAAAILSETGDLNRFTSARAVVKHAGLAPRERLSGTFTGKARLTGACRPGLRLATWRAIFATLRSNPVHAARYTHLTTRAEHPLKPTQAQAAVAAALLRQLHAIVTTGQVWDPAVAGHGTRRPPVEAPIAA

SEQ ID NO: 59544 - protein, 369 aa, unidentified
MTDLMLFVGLDVHKKTISVAVVEAAAGAVVRFYGTIANTPDSLRTLCRKLSKEGQQLHFCYEAGPCGYGVHRQLTRLGHRCDVVAPALIPRKVGDRVKTDRRDAMMLAQTLRAGQLTAVWVPDEAHEAMRDLVRLRTQAMRDLRKARQQLLSFLLRHGRNSPYGHWTKMHRRWLGGLVFAHPAQHLALEEMLQRIERAEALCDRLKAAILELVPQWSLAPVVQAIQALRGVSLIVAAAIVAEVGCFSRFESPRALMAYLGLNPSEHSSGATIRRGAITKTGNTLARTCLVEAAWTYRFPPRVSQIIRDRLKELPEPIRAVAWKAQVRLSARYRKLTAAGKPGPKVVVAIARELVGFIWAIARMVEPKFA

SEQ ID NO: 59545 - protein, 416 aa, unidentified
MLFIGDDWAEDHHDVELEDDEGRRLTRARLPEGLEGITRLHALVAEHAPPDWAELPPEQIAGQVVVGIETDRGPWVTALRAAGYQVFPINPLSAARYRERHSTSGAKSDAGDAHVLAEIVRLDRDHHRPLAGDSDLADAVKLVARAHQTAIWERTRHVLRLRSTLREFFPAAVEAFEDLAARDALALLARAPDPARAAKLTRAQVVAALRAARRHHVEAKAEELMALLRAPTLRQAPILQGGYAAVVVGEVGIISALNAQIAGLQQVMGDHFGRHPDAEIYLSQPGFGVVLAARALGEFGDDKERFANARARKNYSGQSPITRASGKKTIVLARYATNRRLSAALHLQAFAALSASPGARSYYDALRGRNIGHHAALRQLANRLVGILHGCLTTGTTYDEDTAWQHHRSDAENAAA

SEQ ID NO: 59546 - protein, 407 aa, unidentified
MRRTKRRSSKIRPALPMVHANAAAIDVGARMHVAAVGADRSAEPVRSFGTFTTDLHRLADWFAECGVETVVMESTSVYWIPIFELLEARGFTVFLVNARDAKHVPGRKTDVSDAQWLQRLHSHGLLRASFRPKGEIIELRAYLRQRERLLEYAASHIQHMQKALSEMNLQLHHVVADITGTTGLRIIRAILAGERDPAVLALLRDTRCHASVETITQALTGHYRAEHLFALEQALALYDAYQEKASACDARIEAVLKQLSFRRGRGVGPLPAPRRGMRRQPNGPAFDVRAALFALLGKDLTQINGLGPYLALKLIAECGADLSAWPSAKHFTSWLCLAPSNKISGGKVLSSRTRRSGSRAAALLRLAAVTIGRTDTALGAFYRRLSARIGKIKAINRDCAQDRGSLL

SEQ ID NO: 59547 - protein, 439 aa, unidentified
MEAVQRRCYWPGEPRPGQQGNGTAKIVSTPSRTRGGCARVDTTAGSEERSDRGVDSHQQCLMQNQSRERKTARRELNKPNVLHPAMEVLPVLSHTTIATTDYVGIDYHKSTIALTLGDKQGRVLDQVNLHNHTELIRDFFGQFAKLQCVVESCRGYEWLVDMLQDMGHTVHVGDSRSIKLIAHSRCKTDKVDSRILMELLAIGYLPTTYIPTAKEREYRDLLRHRSSLVRTATRSKLRVHALLDKENKGIRFPFSREGRRQLEELELSPSRRQILERELDVIDFVEEHAHRQQLRIHLLASYEPEVPRLRKIPGFDVLMATSFLAEVGDVRRFKNADQVAAYLGLVPRVYSSGNTKRCGRITKTGSKFMRWMLVQAAWAAIKTSDNLRHRFAVIARRRGQKVAIVAIARKLATIAFRILRDKSDYMEEKLDAGLARAAF

SEQ ID NO: 59548 - protein, 367 aa, unidentified
MDVHKESYTLCCFTPEDDKGYYHQTISPDYMMVLKYLERVRKLYAKQIGEEITFKCGYEAGCLGYTLHHQLNRSGVDCVILAPSSMPVANNKRIKTDKRDADNIAKCLAFRTYSKVHVPTAEDEAVKEYIRMRNAKKQLLKSTKQQINALVLRHGFRFDEGVKYWTKKHISWLRSLKPGGLLQETLSEYLTTYDYLSDKIERLDERIEELAKGEAYHENVKKLTCLIGVKTLTALSTIVEIGDFKRFANPERLAAYIGLVPGETSSGSKLVRLGITKAGNAQVRKMLVESAQGYTRGAIGYKSAELKRRQSGNTPEVITYADKANERLRRKFYRMTLRNGAKRNVAATAIARELACFMWGLMTGNTA

SEQ ID NO: 59549 - protein, 374 aa, unidentified
MSMAIKYVGLDVSKDKIVLAIANEGRSEPRYWGSIDHTKEAVRKLVNQLTKEGDVKLDVCYEAGPTGFDLQRWFLELFVECSVVAPTTLTRNTRIKTDKRDAIRLAQLWRARELTPVYVPSTEDEALRDLVRAREDAVEDQNRSRQRLTKFLLRHQRLLPKDKKPWSFAHEQWLDTLRFEQECEDIVFQEYRNCIRECGQRILRYEKEMEKQATSSSQAPMIQAFQALRGVALITATTLAAELGDISGRFVHPGQIMSYSGLVPSEKSSGGSRWQGGITKAGNAHIRRVLIEAAWNYRHSPAIRRGLRERLDGLSPTIQEISWQAQKRLHKKYKNLSAKGKQRGTIVTAIARELLGFIWAIAKEMEKQKQVSCS

SEQ ID NO: 59550 - protein, 411 aa, unidentified
MDGLSPLHRRVAGIDVHRMLHVITVLVENEDGTIIKYQQSFGGFKRDMMAMALWLLELQVDLVVMESTSIYWKSAYSHLERAGIFAMVVNAHFIKHVPGRKTDMCDSEWLAVLARFGLVRASFIPPKDLRELRLISRYRRKLSGMLASETNRLHKVLDDGGIKLGAVVSDIKGVSARAMVAGLVDGKPISELLDMALGSLKNKHEELGLSLDGDLSPRHLFILTELHEHILYLEKQLVRIDAKLLDAMKPYQWAFELLQTIPGVDAISSAMILIEIGDDMSQFGDADRLSSWAALCPGNNESAGKRKSGKTRKGNAIIRYILCECANAARNTKSSLAAKYRSLKIRKSHKKCIIAIAHKMIRIIYYMLSRREPYRDPGVDYEALSAQKNAPRWIKALKKIGKLPSVKSALA

SEQ ID NO: 59551 - protein, 420 aa, unidentified
MNMNAVGIDVSKGKSMVAILRPYGEIISKPFEVKHTVSGIRSLIEQIQSIDGESRIVMEHTGRYYEPLVRELSKADLFVSAINPKLIKDFGDNSLRKVKSDKADAVKIARYTLDSWTELRQYSLMDEIRNQLKTMNRQFDFYMKHKTAMKNNLISILDQTYPGANTYFDSPAREDGSQKWVDFSATYWHVDCVRKLSLNAFIDHYQKWCKRRKYNFSRSKAVEIYEASKELVSILPKDDLTKLIIKQAVEQLNTASQTVEQLRTMMNEAASKLPEYPVVMAMKGVGKSLGPQLMAEIGDVSRFTHKGAITAFAGVDPGVNESGSYEQKSVPASKRGSSTLRKTLFQVMDVLIKTKPQDDPVYLFMDKKRAQGKPYYVYMTAGANKFLRIYYGRVKEYLYSQNKYLVNTFILDQRISVVLF

SEQ ID NO: 59552 - protein, 351 aa, unidentified
MPRKSTKSKIATIGIDIGKNTFHLTGLDASGAVAMQTKLTRSQLARRLANLEPCLIGMEACSGAHHIARMLEMLGHDARLVPAQYVKPFLKGHKNDYRDAEAIAEAVQRPTMRFVKIKTSEQLDLLALHNVRTRLVRQRTAVINQVRGFLIERGIAVQKGPAALRRVLPEILGSNDDILSPRLVRIIEDLCDDWRRLDDRIDQLTSEIECLARRDENCKRLMTVPGIGPTIASAIVSAVGDASGFASGRNFSAWLGLVPRQFSTGDRTILGRISKRGNTYIRTLLVQAAHIILIKRPMVARQGLMDWIEAASKRLHRNVLVVALANRLARIAWSVLVRGQTYQSRRYVHAG

SEQ ID NO: 59553 - protein, 460 aa, unidentified
MPARLKLRTSAGAAPKAPTSERTSAREASYISKTQRRRAAKAANHKPMKTFNDLNHFAGFDWAKDHHNAVIIDRSGQIVESFQFAHSGEGWKVWRQKIEAYPALAVAIETSHGAAVEQLLESKATIYPMQPKAAQRYRDRKVPSGSKTDFVDAWCFADALRMDGHDWRALSPRDPIVEELRLLCRDEVELITQRTALVNQLQAALHEYYPAALEAFDDWTKPYAWAFVQEFPTSQQLVKTTVHRRKVFLHKHHLWRPQTAEKRLEIFARADQFCGGAPVTRAKSRLALSLIKLLQTLHKQLEEYRAQIEKLFAEHPDHDLFGSLPGAGEKLAPRLLSEIGSDRSEYPDAQSLQCVAGTAPVSFQSGQINRAKIRWHCNRSFRHTVHLWADLSRKGCQWAAEYYARKRQEGKSHACALRCLGQRWLKILWRMWQNRMPYNDSSHTERLARRLMPHCTSNHP

SEQ ID NO: 59554 - protein, 342 aa, unidentified
MKHIGIDLHTNSFTACYLENGKERIATFQLQGNGLQKFIDTLEQGDEVALEATGNSCFFRDQVISHVSRVVVIAPWQFAVIRQSVKKTDKNDARAIAFFLSKDMLPESRIKKADHTQLASLIQTRDQLVRLRVSLINKVHGLLNRHGRKVKKEKLTTQKGFEITVKAYTWDKLEQIEIEIIAEQLASLRNSLAKLEKEIVEFAKGVPGFNNLISIKGIGSLSAAILISTIGDIADFSKTGNLAAYLGIVPKVSQSNDQHLVGRITKRGSKIARKTLVQCTLIAKRYSPYLDTFYNHIKSRRGSGKAIIATARKFLNTIFYTLKNDWIFEDFTQFKLFTRQLS

SEQ ID NO: 59555 - protein, 318 aa, unidentified
MDGKRVIGVDVGKRWLDVAREGGARVDRHANDATGIATLVASLDPAGDVIVFERTGGYERGLEDALAAAGLAWSVVHSQRVMAFRQLQAIKAKTDRIDACLLKAFGRDRLNAGALRLGRSEDVTLGALLTRRRQLKASLHAERCRLDTAALMAVRASLARMIAHMEAEIAALEAELAAHEANNAELSAKQAVLVRRIGVGHATARALLAELPELGRLDRKQITALGGLAPRVHQSGGSEKRRGLAPGRAAVKTILFNPARTAIRHDPQIAAFCRRLRLKGKPGKLILTAVMRKILVQLNAMLRETLNTAHQGAAAPPA

SEQ ID NO: 59556 - protein, 410 aa, unidentified
MQVKYERCCGIDVHKDTVVACVIVSKPSGHVQKTIRTFSTMTGDLKALAQWLSETGCTQVAMESTGVYWKPVYNLLEGAFEILVVNAAHIKKFGNKTDVTDAEWLADLLRHGLLRGSFIPSARQRALRDLTRYRTRLIDDHSREVNRVQKVLEDANLKLASVASDVMGVSGRAILEQLIEGQRDPVVLADLAKGRLREKRAALEQALTGRFTAHHRFLLIQHLSHIDYLDEQIAKLDAEIADQIRPFQATVDRWDQLPGINQRGGQVIVAEVGADLKPFADGPHLASWGGMCPGNQESAGKRQSGKTRKGSKWLRRALVEAAHGAARTKNSYFATLYHRLAGRRGRKRALVAVGHSLLVTGYTLITRQVDYQDLGANYFDELNKDAVKRRTVKRLEQLGFQVELKPIVAA

SEQ ID NO: 59557 - protein, 410 aa, unidentified
MHHKLKYLYIGVDLHKRHHTAVMMTCFHEKRDEIQFENKPSAFPKFLQQVEKLAKKEGLTPVFGLEDVGGYGRGLTMFLNEHKYEVKSVNPALTISIRRSSPNNKKTDAWDAECVARILISNLDILPTANPHDLYYAISQLVTRRENIVSVVTGIKLQLHQLLGYHYPSYKKFFSQVDGKTALAFWLKYPSPSCLRGVSVDELATFLYKKSNRNMSTKKAEDILSLVQQDGDTSKDYQEANDFLIRNVVRDLIIRDHQLAQIDTELAKYLALLDYKLETMHGISTVTAAELIAEIGDISRFSSADKLANFAGIAPVQHSSGNKQKSKKSKLGNRSLYDIFYNLAIRQLGVSRAKKPNHPVYHSYYERKMAEGKTKWQAIICVMRKLVNVIYSMMKYKTEYKMPVLTEQAA

SEQ ID NO: 59558 - protein, 346 aa, unidentified
MNYIGTDTHIATLDFKVVNEAGIVKKAQKVVTGANNFLKFVKSVPKPRQVIIEEGPLAAWLLEICVRNGEKMVITDPKRNHWIGSSGKKADAIDAEKLAQLARGGYIKEIHHPIGGRRRFRELMTAYHDTVKSVTRIKNKIKAKFLQNGIACSGETVYLAGHRYQWRQKLPQESALLVIMDSLWQQLDQTEQNEEAILAEAKAQAKQYPEIKLLDGIPGIGFIHAATISAILETPHRFANKRKVWMYAGLGIDKETSGGKTYGENLSHEYNRLLKYTAKQAAQAALKTENAFRRTYLEMTLRKGIAPHRAELTIARDIIATAWAMWKKGECYNPEIDKKVKTDVKT

SEQ ID NO: 59559 - protein, 352 aa, unidentified
MRTSQKTAGIITTIGIDLGKNTFHLIGFDQRGAIILQQKVSRGQLERRLAIIPRCLIGMEACSGSHHIGRQLQAAGHDVRLIPAQYVKPFLKGHKNDYRDAEAIAEAVQRPTMHFVAIKTPEQMDLLALHRVRSRLVSQRTGVINQIRGFLIERGIIVRQGVVPLRKALPEILSSQTGRLSPRMIGLIADLTQDWRRLDERIAAVSAEIEALAEQNESCQRLMTVPGVGPIISSAVVAAIGDGAGFKQGRDFGAWLGLVPKQESTGDRTILGKISKRGNKYLRTLFVQAAHVVLARRPSAAMRGLWPWIEQASKRLHRNMLAIALANKLARIAWAVLARGRAYQPRITADAA

SEQ ID NO: 59560 - protein, 375 aa, unidentified
MNNNNTLYVGLDVHKESITVAYAINSEPVELMGKIGTSPTDIQNLCKRLRSKSSQVSIVYEAGPCGYGLYRRLVKSGFDCMVCAPSLIPKKPGERVKTDRRDAIRLVRSLRAGDLSAVYVPGIENEAFRDLARAWASARDDLRHARQRLKSFLLVHGVHYVGRADWGPAHRRWLSKYSFESPWRQLAFDEHRRTIEDRQAQCERLESALKEAVTEWRLYPVVEALQAMRGIQFITAVGLISELGDLTRFEHPRQLMSWFGITPSEYSSGGSRHQGSITKAGNSYARKLLVEAAWSYRHPARISPAIQKRQENLPRPVIDRAWDAQLRLCKRYRKLQAKGKNVNITIVAVARELAGFIWDMGRIAMSVAQQPQCHK

SEQ ID NO: 59561 - protein, 355 aa, unidentified
MLADRVDYIIGVDTHTATHTAAVVTPTGAALAHQTVPTDADGYLHVYRFAVEQAPGRRVWAIEGTGSYGAGLTTHLLEQGEWVVEVDRPARPARRNGAKTDDLDAVRAAREALGREHLAQPRQRGDREAIRVLVTTRQSAMQARTCAINHLKALVVNAPERLRRQLRALATDQLLARCARLRSHPTQPIEYRATIAALRRTAQRSLALAAEADDLHADLDTLIRRRAPWLLAEPGIGVICAAQLLNAWSHAGRLRSEAAFAMLGGAAPIEASSGKVVRHRLNRSGDRQLNRALHTIVLSRMAYHAETRAYVARRIAEGKTAREIQRCLKRYLARRLFKLLEAPPAHAQKEKIATT

SEQ ID NO: 59562 - protein, 410 aa, unidentified
MEVLHSHCAGLDVHKESVVACVRHMAGGKVTAPVKTFKTTTAELMLLSDWLSAEGVTHIVMEATGVYWKPVWHILSDGEFELILANAAHVKNVPGRKTDVNDAMWLADLIAHGLIRASFVPDEPTQQMRDLMRTRKQMVRERSSHVQRIQKTLEDANIKLDSVVTDILGLSGRRIIEALVAGQTMPQALATLAHRRIHASADELEAALRGRLTKHHRFLLKLHLDQIDAFDAAIAAIDQEVNVNVEPFRAAIELLSSIPGIGNLAATVIVSEIGIDMSRFPTDGHLISWAGLCPRNDESAGKRRSTKMKKGAPWLKTTLVQCAWAASRTNGSYLQGQYHRLRSRRGSKKAICAVAASMLTAAYHMLKNGAFYEDLGADHFDRREKNKQILRLVNRLQSLGYAVEITPQAA

SEQ ID NO: 59563 - protein, 347 aa, unidentified
MNASMIGLDISKSVFQVHGEDAAGCIVMQKRLRRAQVESFFAKLPPAVIGIEACGSSHYWARSLGALGHEVRLIPAAYVKPFVKRNKTDARDAAAICAALGRPDMRFVAIKTIEQQAARGLERSRDLLLKQHTQLTNSIRSQLAEFGIVAAQGRRGFAALAELIAAGDTRIPAALLAALQMLLAQVRALQQAVQELEDKIVAIAKADQAMRRLATIPGVGALIAHAMVAAVGNGKQFACARDFAAWCGLTPKQTSTAGKRRSQGISRMGEMRLRKLFALGAATIMRNARSRSATATTWQRGILARRPMKVAVLAQAAKTARIAWAILVSGETYQPQRTANRSLATAP

SEQ ID NO: 59564 - protein, 429 aa, unidentified
MQNESTPGARGPVFCGVDTHADSHWLCVLDWRGRRVLSRRFPADAAGYEALAGAIAAAGEPACVAMEGTSSYGAGLTRHLASLGMPVREALSPARTQRRRPGQGKCDESDAERAARAAMSGSRLGTPKSQDGWVDGVRCMLAARSGAVKARTSAINTARSLLTTAPEGLRSRFRGMAGPRLMEELPSVRAEGALGAALGALADLWAAARDAALDMERAIEASLEENCPALLAMYGCGPVSAAKLAVAAGDNPGRLRSEASFAAICGACPVPASSGKTVRHRLNRGGDRQANSALHEIARQRVMRDPETAEYAERARGRGKSDREVMRCLKRYVAREAYRALMRPHEIRRPEDASGLVAARRAAKVSQVRAASILGTSEKYISMLERGQRELKPIRRAYEAWVEAGLPLDWDRQAFEAERKMDSKKHLAK

SEQ ID NO: 59565 - protein, 320 aa, unidentified
MQTALNVGADVASKTVVVACAADTFMPRTVANENGALRAWLKSLPAGSRIGLESTGAYHELLADLAHAAGMTVYVLNPRDVKKYAEGVGQRGKTDRLDAQVIARYVAREHDQLHAYVAHSLAQRRLEQLLKRRSKLVALRVGLTQSWRGVAGVKAEVAAVAKAYARLLAQVDRLLKQLLTELPEIRVRVARVRTIPGYGALGGVAVAHALQQLPFTSAEAFIAHTGLDPRPRDSGDKRGRRRLSKRGPAELRATLHMCAMSASRTAAWGPYYQRQLAKGLSGTAALVILARKMARTAYSICRHNAVFDPTRLQSSTRHAP

SEQ ID NO: 59566 - protein, 366 aa, unidentified
MKKTSIVRVNGNMIFKGQKLTIGLDLGDQWSCYCVLDEAGKIILEQKVATTPEAMKKAFAKIPRSLIALETGTHSPWVSRLLTELGYKVIVAHAQKVQLITKSSRKDDRHDARTLARLARIDPELLGPVRHRSAQAQIHLTVIRARAELVRARTALVNAARGLVKSYGQRLPKCGTQQVSRELGAGLPAELREVLEPLLKEIESLNERIQEYEVRVEKIAKESYPHVELLKQVKGVGTQIALTYVLTLDDPHRFPKSREVGCFLGLRPGRRDSGESQPQMRISKEGDRYLRTMLVQGAHYILGPFGADSDLRRWGLKLAARGGKSAKKRAVVAVARKLAVLLHRLWVSGEVYEPLRNSQKVMRAVA

SEQ ID NO: 59567 - protein, 327 aa, unidentified
MGVKARRHKVEIMEQVQSITGVAGVDIGKLWLDVDVCEASHHQRFHHTPEGLAQMVVWLRDQGVHRVGMEASGQYERDVREALEASGFEAIVLQPLEVRAFARYRRIRLKSDKADAHLIAKATAAYEGVVARFDPYLVDLAELMTAYEQTSQLLAQVRTLCEHHRLEVIKAMDSERILYLEAQKVRLRQLILEAIRAHPDLKARFQLLKSLPGVGDITAMSLVIRMPELGRMAPGKPAALLGVAPFDRDSGQFHGKRFITGGRSRPRTFVYLAALSAKRMNSGFKAFAQRLLDGGKPKKVVIVAIMRKLIEAANIVLKRKTPWIKYA

SEQ ID NO: 59568 - protein, 408 aa, unidentified
MNPLYVGIDVSSKNNVIYLMLPNGDKHSSFSLANSHDGSTQLVKRIFTAMTSNNIDSVLIGLEATSVYGDNLVYFLKEDTTLASFDRKIHVLNPKQVNKFKESYNDLPKNDYVDAFVIADCLRFGRINKEVYMDDYRYKALQNLTRARYFTVTNLTKEKQRFINVLFKKYSTMTQEKVFSDTFSTTALAVYEKFESAETLAKMDLQELTAFIMEKGKNRFPDPDAVAKALQKAARSSYRLPKTVNDSVNQVLAISITSIRALESQIKAFDKAITKQMELLPNVLISIPGIGPVLSAGIMAEIGDINRFQNQAALAKYAGLAWQQHQSGDFEAQTTRMIHSGNRFLKYYLCEAAFSLVRCDKEYSRFYHLKYKEVNRFQHKRALALTARKFVRLVFALLKDNRLYRPAE

SEQ ID NO: 59569 - protein, 424 aa, unidentified
MNCTQNERINQVSEQTLVIGVDIASELNYARAFNWRGIEKGKVFKFFNNLEGFQAFNKWAHQVMSANKLTNIMVAAEPTGHYWFGLADYLKDEKLKLVLVNPFHVNRAKELDDNHPSKTDAKDPKTIAKLVIEGRYMEPYIPEGVYADLRIMYNCRQKVTKAMISLENQLKRWFKIYFPEYLSVFGNLSGQGSMAVLEKAVLPEDIISLGVDGINKLWRERKLRAVGMKRAESLYEAAVKSIGRREGSVGGRAEFRMLWEDYCHKMEQMEKLNIELESLLHKVPQAEEVLKMKGIGVVSVAGFFAEVGDLRRFESPKQIQKLAGLAIRENSSGKHKGQTTISKRGRARLRAVLFNAAIALVGRNGAFKSIHEYYIGRKANPLKKKQSIVAVSCKLIRIIYAICRHKEAYDEAKMLRDIRREQLA

SEQ ID NO: 59570 - protein, 307 aa, unidentified
MAVYIGVDFHPYEQTLAFVDEADGEIRYKRFLHSDKAGIKAFYRKCGKDAVIGTEATGSLWWFEKLLFDNGMTLKIGDPRMIRRAALSRHKNDHRDAETILDLLMRGTFPAITPRSEQSREMLDLLNYRQSLVSKRTSVVNQLQAFARSKGLPRFRLPAVKARKKIEEVETTQVERLLVSSRFVLCDELTRQIKAVEARLEEEANKEERAQLLMTHPGIGLINAMALVHTLGDVRRFRRKEEVVAFVGLDPLEKSSGETRRIGSISKRGSRLARYLLGQAAQASREKQSGSGMRYCDSLSNPYCSTV

SEQ ID NO: 59571 - protein, 457 aa, unidentified
MQSFYLGSDVSKGYADFVILDSRKQQVMKNFQLDDTFEGYCRLHDILSQFLAAHPDATLFAAVESTGGYENNWCNALVKFQSTLNIQTARLNPLGVMYNSKADLKRNNTDKISAQNIAEYLITHSEKVTYQQQDQMATLRKQWGFIKMLTKQSTQLLNQLESLLYTANTELLGYCKNGTPDWVLKVLLKYPTAAKLAKARVPALARIPYVTSERAQELAISAKRSVASASDRITEKLVAATVKQILNLKKTIDEQAELMVKECSMPEVDILKTFTGISDSSAIGLILEIQAIERFKTVKKLASFFGIHPVYKISGDGSGSFRMSKKGRKEPRKILFMVALTAIRSNPLIRNIYLERTEQGMEKMAAIGLCMHKILRILYGMLKHGKPFDPQIDLDNRQRSVKKKPAGRRDKSRRFQDYDSNAPISRRQNKKRLERKQSHSVNDTKFGINAPVPEFAS

SEQ ID NO: 59572 - protein, 497 aa, unidentified
MSTIMYRDPNENLSHTIFMGIDVSKDQHAICCIDSSYRVQKKLVIPNRKKGFQTLESILLGFKEQGVTVLAGLESTGVYGQSIYGFLQPLVSSVSLWNPFKVEAYRKFSPHPTTKTDAEDAFLIACFTYHQWTHPTSSPINLSASFSKRLAILREYTRVRIYYTEKRSNQVRRLSTLVEKIFPEFFDVFTSRWNQTAFHLMRHYPSPEQLGSVPTQELGQQIERWSKKQMKASVAGELQDLAKNTIAHPLDGEVIAMEIGHTVELILWFQDQLKKVEQRILAMSDEFPSVKILQTIPGMSTIMAMSIVSEVEPLSRFSRVESLRSYAGMDPRIKESGKSVHGKSFISKKGSRYLRRSLYYAANSVRQKDPVFGDYYKRKRNPHHTHRYAVLSTANKLLAVVYALLKKKQSYQASYEWNTKKNVQEQEKTLKVEKTILPSTPSNGSKTKDAPPQTPSPTSIPLEILFPTLQKRMENAQKANVRTPALPVYISLEKLLQ

SEQ ID NO: 59573 - protein, 405 aa, unidentified
MVRYIGMDVHREFAQLAVVEDGLVRDEGRIGVSPEALRAWAAGLRADDQVALEATGNSDAIANLLAPLVGRVVVSNPSKTRAIAEAKVKTDKVDARILAQLLAADFLPPVWLPDERTRSLRRQVTRRAHIVRQRTRLKNQVHAILARNLAPSPPVSDLFGTTGRHWLSRQDLPADERASVQALLRQLDFQGTELAAVDRELAVEAIGDPVVARLMTIPGIDAIAAISIVAAVGDFSRFTSPDKLVAYVGLNPKVRQSGNSTPVHGRISKAGRAQVRGVLVEAAWSASRAPGPLRAFYQRINPRRGFQTAVVATARKMTVLAWHLATKDQDYAFARPALVTHKRRKLELAAGAPSRRGNHRHPGAAYNDKQRRQQEAAAAARAERAYRVLVAHWQTRKPAGQHPQT

SEQ ID NO: 59574 - protein, 321 aa, unidentified
MTYIGIDVSKDTFVVAYSPDKNSKTKTFKNTTRGIHEFIRTISKDEHHCIMEATGNYSALLVYLLSEAGITTSLENPLKVKNFARAMLSTVKTDEIDARLIALYGEKMQPAPYKLRSDAILTLKQKRTVIRQLKKQLIATRNLKGSMEVLPFFDAKCKKSIDKTIAFLEKQIKDLEEDLASLAKSEYKKQMDLLTSVKGIGITLAAALIMATGGFTYFDNAKQLTRHLGLSPTYQQSGTSVNFKGHINRNGDSSLRSQLYVAAFASLRCNTECRACYDRLRSNGKPGKVAVIAVANKLIRQAFAVVTQEKPYVDGYISSKK

SEQ ID NO: 59575 - protein, 523 aa, unidentified
MARAFRSKKRSSLASQSIHKPRGVISPRVQAVGPEHFGIVCVDCAKARSKWMLSDFYARVLVPPTEVEHTQACLASMIRDLRTALEQARIRDQIVVIERTGRYHRPIQRAFDQAGFEVRIMHPLTTKQHRQPANPGNKTDDTDLSAMQRGAVNGFGLLEPPADPLSVRLQLLARHRRDLVEKTVALRSQIHEHLHAIMPGYSKCFEDIYDAQIPLWIARRFGSATAILQAGVPELIVQLRRAELRLHQPTLDKIIAWARSAPAAEDESAIHLKILSELDDDRLSKVRAVRAIEAELAGLLVQTPYLLLIGIPGINVVSAAEFAGEMGPIERYPTARAITGRAGLFPSRYQSDRVDYPDGQLVRCANRTLRRAIMMIADNLIKWNDHFRVLATGWQLHGRDARAARVQVAGRFSRIAYQMVAGRKAYRHPCCQQRDYILNKLLRFHTNNDIGYDQLMINLDAAVAQLPRSVYREEAAPLADELDRVLKKRGKGPRPLSEILPVVLAKLGVKPVRSPKSGEAILT

SEQ ID NO: 59576 - protein, 402 aa, unidentified
MNAVGIDVSKGKSMVAIMRPFGEIVSAPFEIKHTASGINSLVELINSVEGESRIVMEHTGRYYEVLAHQLSEANLFVSAINPKLIKDFDNDSLRKVKSDKADAVKIARYALDKWQNLKQYNVMDELRNQLKTMNRQFGFYIKHKTAMKNNLIGILDQTYPGVNTYFDSPARSDGSQKWVDFASTYWHVDCVRKMSLNSFIDHYQNWCKRKKYNFSQSKAEEIYGKAKELVPVLSKDAITKLIIKQAVDQLNSASTTVESLRTLMNETASKLPEYPVVMAMKGVGTSLGSQLMAEIGDVSRFTHKSAITAFAGVDPGVNESGSYEQKSVPTSKRGSSDLRKTLFQVMDVLIKTHPQDDPVYQFLDKKRAQGKPYYVYMTAGANKFLRIYYGRVKEYLSSLPES

SEQ ID NO: 59577 - protein, 343 aa, unidentified
MDHFAGLDVSVNETSVCIVDDTGRIVREAKVASEPEALLAVLTNSGYHFKRIGLEAGPLSQWLYSALAEANLPVICVETRHMRAVLKAQINKTDRNDARGMAQMMRAGLYRPVHVKTLRSQKLRMLLTHRKLLQSKAIAIENDLRGTLRNFGLKVGVVGAVKFEARIRELVENLPDLAVLVEPLLVVRRVLREQIAVMHHRLLTIVRDDEVCRRLMTVPGIGPVVALTYRATVDVPARFKNSKAVGAVFGLTPSKYQSGEINRTGAISKCGDEMMRVMLYEAAQIMLVRSAKWSWLKAWAMKIARHRGMKKAIVALARRLAVIMHRIWVDGTEFRWTREVVAA

SEQ ID NO: 59578 - protein, 256 aa, unidentified
MIAVLNGSGKLVMETILETKASSILQFIHGLRGELHVTWEEGTWAAWLYDLLQPQVHEILVCNPRRNALLKEGSKSDKVDARKLAELLRTGMLRPVYHGENGLRTLRELARSYQTISKDLTRVMNRLKALYRGWGIPCAGTQVYAPRYREEWLSKIPQTGVRRRAELLYQQLDGLQALRRNLRPEFLAESRKHKAAKLLRQIPCIGPIRAAHLIALMQTPHRFRSKRQLWTYSGLGIETHDSAQFRVVSIRTTTMR

SEQ ID NO: 59579 - protein, 402 aa, unidentified
MANGPTRFIGLDIHKEYFIAVGVNPEREVVFGPQRVLNYQVDDWVKRYLTPQDAVVLEMTTNTYLFYDILLPHVHSVIAVHPPNVLLVTGVKVQTDKKAALALAQLHAVGMLTGVWIPPNEVRDLRALIARREKMVRLSTIAKNRLHSILHRNHLILPEKPFSSEQRTWWESLPLTTTEQFLVHSDLDTLEFAQKQVEQAEECLKKASAQDERIPLLVQLPGVAMLTAITILAAIGDVNRFPNAKKLVGYAGLGTRVHDSGMTHNSGRITKAGRKDLRRAMVNAANHAVEHHIHWKKELERMEPHLGRSKAIVAIARKLLVAVWYVLSEQVVDRFADPRDVACSFLKYAYRVGVKNRPDKQSALAFTREQLDRLGIGKDLQEVPWGSTRRKLPPSKLLTEKE

SEQ ID NO: 59580 - protein, 346 aa, unidentified
MMIIGCDFHPSWQQVCWLDTETGESGEQKLVQASGDAERFYRQVAAPALIGMEATGNCHWLVDLLAEIGHELWVGDAAQIRASYVRQQKTDKRDAVHILKLLVEGRFPRIWMPSSQVRDLRQLLLHRYKLVMIRARVKNELQHLCLNQGVQRKRKLWSQAGQQMLRELPLKPWAGRRRDDLLKLMAMLDQQIGPLEEAVKAEAQGDKMARLLQTQPGVGPITDLAYVLTMGDVGRFPRGKQVASYLGLIPREHSSGGRQKLGAITKQGNRMLRMLLVEAAQIAVRYDPEFRREYLHRCHQKPKAVAKVAAARKLAVRLYWMLRTQTAYPEVARIESSPRLPLVGAS

SEQ ID NO: 59581 - protein, 428 aa, unidentified
MPQGSGLQGATLAHVTTSTIDPTLTEAAATEVFAGIDWGGSFHQICLIDEDGKVLRQQRVPHNAAGFDELDRLLTCHRARLRVAIERAEGLLVEHLHLLGVEIFCVSPKISARARERYRMAAAKSDAFDAFVLADTLRHEHRHWRALTPPSPVLAELRAISRDRDRIVIAQQATENRLRAVLEAYHPAPLHLFSTLDRDITLDFITDYPTPEQAGRVGTARMDGFCRRHGYSGRTQPEVLVERLRPHLLSAGEGTVAGKAFSASLFTEQLRMLNTHLRAYDKRLDELLERHPDTPIFTSFPGVGPVVAATLISEMGDDRHRFPAPGALLAEAGLSPVTRASGRTRQVRFRYASNRRMRHMIDWWMFTAIREDDWTRQAYDHARARGQGKYRALRGLGSRWTRILWRCWTDHTRYDPAIHHRNPEPTTA

SEQ ID NO: 59582 - protein, 346 aa, unidentified
MRFYDQQHDFYCGVDLHTRRMYLCILDREGNKRLHRNMRAKPLDFLNAIKGFRDDLVVGAECMFTWYWLADLCLDENIKFVLGHALYMKAIHGGKKKDDKIDSEKIARLMRGGTFPMSYVYPREMRATRDLLRRRTFLMRRRSELLAHVQMVNHQYNLDPFEKQLQYACNRDVLDRFEQDSARQNVEADLQMIGHYDQLLKQLESNLLRQAKLHDRQACFLLQTMPGVGNLLSLVLLYEMHTIDRFATVGDFLSYARLVTPKHTSDGKVTGHSGAKIGNPHLKWAFSEAVLMMMRHSEDAQHFVARKEKKHGKARAMTMLARKIARAVYQMLKRKEAFDAVKFFAN

SEQ ID NO: 59583 - protein, 320 aa, unidentified
MFSYCGIDVSKDRLDVVVLPDEECFSVRNDSAGWAELIERLRGFSIAAIGIEASGGYERGVMRALLAAGMAVRHVNPFRLRQFARASGVLAKNDPIDARMITSFVAIMPTRPAQRHAPAVERLAEMLAIRRQLSAEKVAAENASRLLENPMLQRLSRRRIARLTADIDMLDKHLVEIVASDAALGHRYQLLTSMPGVGSLLACTLIALLPELGSMSRKQVAALVGVAPYAFESGTLKGRRCIRGGRAPVRHVLYMAAMSASNWNPVLKVFHARLKAAGKLPKVAIVAVMRKMITALNAMVRDDVIWADRHRGRHPVPTAR

SEQ ID NO: 59584 - protein, 352 aa, unidentified
MQYIAFDSHKHFTYASVEEHTSRRIYDQRINHERGALKVFLKGCEPGSPVAVETIGNWYWIVDEIEEAGMIPQLVHARKAKMMLSSSKKTDKLDAHGMNRLQRTGTLPTVWIPDSKLRDTRELFRTRMVLSHQRTRIKNRIHSYLDKYGIKIENTSDIFNNKGRALIQSSLNYLPENTRFATHELLEELDLVQDKILKFQNRMSEVFSDNPDVKLLQTIPGIGPILSVVIFSEIGDIHRFPSASNLAAYSGTTPSVHASGGKYRYGRAPADTNRYLKWAFAEAANTVMQTRRRLKFQHIAGLYERVRKRKGHSVAIGAVSRHLAEASYWVLNKSEPYREPIKKSKAISSINK

SEQ ID NO: 59585 - protein, 369 aa, unidentified
MDDIIFVGLDVHKATVCIAVAEGGRDGDVRQLGVFENRPEILNKVVSRLSKGGRRLSFCYEAGPCGYGLHRLLTGYGHECVVIAPSLIPMKAGDRVKTDRRDALMLAKLHRAGELTAIWIPDAAHEAMRDLVRARATAVRVLVKARQHLQGFLLRHDRIYRGARAWTLAYRRWLSTVRFEHPAQQIVLQDYIHAVQEAETRRDRLTQQIEELLPNWSMAPVVAALQSMRGVALVVAVTVVAEVGDFRRFANPRQLMAYLGLVPSEHSSGSSVRRGGITKAGNALARRVLIEGAWTYRMSARVSRKLHDRLEGLPAAVRDIAWKAQLRLCARYRRLAAMGKSKVVVTTAIAREMVGFIWAIARLAQPALV

SEQ ID NO: 59586 - protein, 448 aa, unidentified
MSKIKTKNGNVKRISQLTVINPMVAGIDVSDTEMMVAFPISPKELEVRSFGCFTRDLKAIANTLREYQVTSVAMESTGVYWISLFLMLQEHGFEVYLVNAKHVKNVTGRKDDEGDAEWLQKLHSCGLLKASFQPDGLTRTLRDMVRHRKGLVNTSSTYLNRMQQALELMNIKLHTVISDIDGKTGRLIIEAILSGERNPEVLADLRDSRVKAGREEIIRSLEGHWTTEHLFQLKQCYQLYSTHREMIDECDREIEKQLAVMIASKNQGVLPGVPKAKRKVSSKHKMPFDLTYYLKEIFGVDVTEVFGIGEISALTILSEVGDDMSKWKTERHFTSWLGVAPNTEKSGGKIISSRIKKKRHHAGQAFRMAANSLSNSKSPLGDFYRRIRAKAGAGKAVVATARKLAVIFYKMVSNREAFNPEAMGNYQEKYKQKKINALRKKLELLEAA

SEQ ID NO: 59587 - protein, 444 aa, unidentified
MEIVNQHAAGIDVGSRSHFVAVGQGADQVREFGVYEDEVRELTQWLLSCHISTVAMESTGTYWQSLFTALQQAGLEVLLCNGKFTKNIKGRKTDVQDCQWIQRLHALGLLSGSFLPDQATEELRTYCRHRASLLETAAVTTQKMQKYLRLLNLRLDVVVRDITGQTGMAIIEAVCQGETNPEKLACFRHGNCRKSKEEIALALRGNGRRELLFTLAQELDMYKMLQDKIAACDAAIEQLLREQIGADKERRELRTDPKPYKRVNKNAPQQMDLNQLAYQYYGGVDLLRIEGVSHATVMALMSEVGAEGIRKFPTAKQFTNWLKLCPNTKVSGGRVLSSHIPKGSNRLKIALRNAANVIGNLRETHLSDFFKRVAFRKGRQAAVSATARKLAVIIWHMLTYRVPYNPPTQYLFLDEKRKLKLVQRIKKNIAKLDLKPEDVGFATA

SEQ ID NO: 59588 - protein, 441 aa, unidentified
MAFSKLQKRAIEKKSSLTNKLIIGIDPASKKHQVEFISPDGFPVMRSFSIFNTGEGFKRLLRKLEFVQKKYPSAEPVIAIEPSSHYWLNLCHFLKKRKFHIVLVPGLLVRRAREIEDQTTHKDDPKDCHLVAELAQNGKYCDERQPEGIWADLRHLSNAWLEISEEKTALRLKIRMLVDIFFPEFTTHFSDFLGATGRFLLANYPFPLDILAADLDQLAAQISVVSYKKLGIATVAALKKSAAATIGVNDGHTGAHSRLQALLERYNLCLRQQKDLSDEIESYLNCIDYTPYLLSLPGVSCVAIAILLGQCGDLRNFKSVKSLLSFAGLDLIFSDSGNSKSKRKISKRGRRHLRTILYQICLSFIKYHNIARRKYLKQLLAGKKPKQAIVSSISFFVRIMFVVTNEQREYKHPDASESLVAEIKNLETQLEEKRRKKSRKK

SEQ ID NO: 59589 - protein, 442 aa, unidentified
MNPIPNDPNPASTLVAAPALPRPEPAFAAFIAIDWADEKHAVALQAAGHTQIERTTLEQKPEALTQWIAGLRQRFAGAKIALILEQKRGALLWALQPHEHLVLYPINPQMSAKFRQAFHPSGAKDDPLDADLQLDILLHHRARLTAWQPDEATTRQLSLLVEGRRRFVADQVRATNRLRDALKSYFPQALALVGEDLSSRMACAFLKKWPRLASVQAVKPAVLRQFYYAHHSRSAELLAERLQIQAQAQPLTTDAAILAAQSLLVQSLAQELATLHPVLARYDQQIAQLFATQADFAIWESFPGAGPALGPRLAVAWGTQRDRFADRQAMSAYSGIAPVKEASGKALWIHMRWACPKFLRQTFHEMAKCSLQRCAWALCYYRMQIERGKGHHAAIRALAFKWQRIMWRCWQDRTRYDDAKYVASLKRSASDLYARLSAAPAK

SEQ ID NO: 59590 - protein, 332 aa, unidentified
MLTESGYKERHPQQASAKTLFDFLKKHFPDGEYHAVYESGFSGFSTYYALKEYGINCVVTHAADVPTTQYEEVMKTDKVDAAKLARSLRAGDIRPIYIREKENIDDRSVIRIRKTIQKQLSGYKARVKHLLHCNGVEIPERFARPGTHWSRAFIKWLKEDVVLLSSSRLSLDLLVKQVETIRQTLLDATKSIRKLAQTDRYRNNYELLISIPGIGVSVAMCILTEIYDVKRFRNENQFASYLGLIPTCHSSGEKTASGEKTFRGNKHLGPMIIEAAWIAIYRDYGLGMAYARYKQSMKPQEAIVKIARKMSNIIFSVLKNSRKYEPYRWDKE

SEQ ID NO: 59591 - protein, 371 aa, unidentified
MIVIGVDAHKRTHTLVALDAVSGVIRSAATVQASDDGALSALRFAAGLDSERVWAVEDCRHVTARLERALLGAGERVVRVPPSLTGESRKATRTPGKSDPIDARAVALAAIREGVENLPVAFLDEQAHQIRVLCDYRDQLMRERARLICRLRWHLVRIAPHLEAQIGPEALKGPRIRARLARQLGQLPASTELRVAKAQLRRINEITKEQQELFSELTTLLQAHAPQLLEQRSIGTVTAAVIIGRTAGAKRFRSEACFARHAGTAPIPASSGKTTRHRLHRGGDRQLNRAIHIIALGRVAWDPDTRAYIQRRVSDGKTKREAIRCLKRHIARQIWHLLYNTHPAPPAPPNSTPRPQVMGSLKTANTETALT

SEQ ID NO: 59592 - protein, 345 aa, unidentified
MQLHTIGIDLGKTLFHLVGLNQRGEVVVRKKFSRKQLLHFTANLQVELIGMEACGGSHFLGRALREQGHEVRLMPAQYVKPYVKTNKSDYIDAEAIAEAVERPKMRFVPIKSDDQLDLQSLYRVRERWVMRRTAVINQIRGLLLERGITLRQGRRHVDEALPGILEDASTKLSGAVRLLLAQLRLELDHLQMRIDEADAVIQKIAGENEACRRLVAIPGIGPVTATAIIAAIGNGAAFKKGRGFSAWLGIVPGEYTTGGKQKLLGISKRGNSYLRRLFVQGARAVLQQSTKQSSGLSAWLAQLTSRTHRNVAAVALANKLARMAWAVLAKNEPYRPPMLAVAATT

SEQ ID NO: 59593 - protein, 420 aa, unidentified
MFASTDLLVGVDVHRRTNVVQVMDGQGQVLTPPLHLANNRAGTAELSAQLAEMAQAGHFNTVHIAAEATGNYWLTFFCQLEQSPDLAAYPLTLYPFNPKVIHNFRKSLGDWDKTDDLDTAVITERLRFGRKLPYPFHMEERLLPLRTLTRYRTHLIGELVRVKSYTLSLVYLQTSEYTVDPAFADIFGHTSQAVLKEFPSLETIAAMPFDDLVEWLDVQGKRRFAQPEDNARRLQRIAQDSYRLPDDWLASVHTALSLSLRHLTSLQQLLARTDSAITDEMVHFPNSLTTIPGIGPVMAAGIIAEIGDLARFDFNEAKVASFAGLKWSHHQSADFIAEDTHLKRTGSDYLRYYLCEAAQLVRMHDAEYQAFYQKKYNEVRSHQHKRAIVLTARKLVRLVVRLLTTHEPFRARQAPSDKTC

SEQ ID NO: 59594 - protein, 406 aa, unidentified
MQVYLGIDCSQHSYEASFVNQAGAVLARLAIPSSPEGFLHLDAARDKLGIPPSDCLVALESAHNLLVDFLWDHGYSQVYVIAPHVIKSCRDRYRHSGARTDPSDAYVLADVLRTDRHRFYPWYPDQPSTRQIRAMNSLIGHLGRTIVRHSNRLRAVLARYYPGLLQAFRDIHGPVALHFIQAYPTPQATAQLTWEQFQLFARQHRYTHRGRVSRCFSRLRTPQPEAAPPIVEAYQQEAVLLAGLLLSLVEKRRALIRQMDLLFERHPDHTIFASLPGAGPQLAPALLAKFGDDRSRFPTPATIQALAGSCPVTDSSGKRRTVKFRRACDREFRHIAQQWARCSLQRSLWAQAYWSQVRPRCSSDSHALRCLANRWLAVAWSLWQKHQPYDEAYHLHQRALNTRLPT

SEQ ID NO: 59595 - protein, 389 aa, unidentified
MLCVGIDVAKRKHDCCIIDSDALKTVESFTFPNSREGFDMLLSKISELGIPKDKIRVGLEATGHYSSNLAHFISEHDLPLLTFNPLLTNRYKQGFSLRKTKTDKVDACAIAQMIVSGKGAQTYSSSLYHNEEMKSLSRYRSQTMQKCSKLKISVSRLVTILFPELEGLTSSIHLASIYALLKAYPGHEQIAHCSMKRLTHLLSDASQGRFDKSKALEIHQAACRSIGKVSFSASMELVHTITDIEVLKQHIVEIDEKLKEMVDQEESSIIDIPGIGYTLCASILGEVGDFKRFPDVDKLLAYAGMSPSKHDSGDYHSKHNKMEKRGSPYLRKTLYLAARLVAQNVPKFKEYLEKKLSEHKPYKIALSHVAKKLIRLIYRLGISGCPSFA

SEQ ID NO: 59596 - protein, 354 aa, unidentified
MSNKSTSIVATMGIDIGKNSFHVVGLDEHGAIVLRQKWSRSQIEVRLANMPPCLVGMEACVGAHHLSRKLQSQGHDARLMPAKYVRPYSKGQKNDFRDAEAIAEAVQRPTMKFVATKTAEQLDLQALHRVRERLVSQRTGIINQIRAFLLERGLAVRQGLRFLRTELPIILAKRTDVLSPRMMRIIEDLAGDWRRHDERIEGLSAEITALARQDAACARLMTVPGIGPIISSAMVAAIGNGGAFSKGRDFGAWLGLVPKQISTGDRTILGKISRQGNRYLRVLFVQAAWVVLVKITDWDRYGLKTWIEAAKKRMHHNVLAIALANKLARIAWAVLNKERNFECVRTAATSSRPA

SEQ ID NO: 59597 - protein, 373 aa, unidentified
MSAAFKPTTKEWMKEVEMSIYVGIDVHKRFCQAALMDEDGAILHELKFENTIEGAHRLVNLARSVNPHVKAVLEPSANYWLKIYDKLEDEGVEVKLSNPSRTKAIAEARVKMDKIDARMLAYLLRGDLVAESYVPTKKNRERRSLIRHRASLMRMRTEIKNRIHAILDKHDLPYDYTDLFGKQGVEWLRNLQLPTPDHQILQSNLQILETISAEIQNADIQIAKDAVTEDQAKLLMSMPGVDYYAAMILLSEIGDVKRFASPEKLASWVGLAPQVHQSGETQWTGHITKKGSKRARWILTQCAQSARQHDPRLREFYMRIEQKHGSSKAIVAVARKMLAIMHVMLTRNEPYRGENRQLTEQKHKRLERIADIA

SEQ ID NO: 59598 - protein, 367 aa, unidentified
MGWMAPLRHLGAKMPVGQKPPANREPSMNEITTVGLDLAKNVFQVHGVDAEGTTVLRKQLRRAQVLAFFSRLPRCLVGMEACARAHYWARELRTLGHEVRLMPAQYVKAYVKRNKNDAADAEAICEAVARPTMRFVPAKTAEQQAAVLLHRGRERLVRQRTMLVNALRGHLAEFGVIAPQGLRNVGRLIAIIRDEKDARLPGLARQVLQVLAVQIEQLEAAIAALEKQLMGWHKSNPVSQRLATIPGIGPIIATAIAAMVAEPSGFRSGREFAAWLGLVPRQNSTGGKNRLGGISKRGNQYLRRLLINGASANLLRSKATNADPWVIGLRRRRPSLVVAVALANKTARIAWAVMHRQENYQRMATAA

SEQ ID NO: 59599 - protein, 408 aa, unidentified
MNAVGIDVSKGKSMVAALRPMGEVALLPQEFLHTEVGLEQMAYAILALGENTRVIMEATGRYHEPVAAALHAYGIYVCVLNPLFIKQSGGGSIRKVKTDKADAMKIAKYGLDNWVDLREYTPMDTVRQQLKLCSRQYNLYMKTVVSLQNNLISLTDKTFPGVNELFSSPERADGHQKWVDFVITFWHCDCICYVSAKAFTERYQKWCKRKGYHFSAEKAQDVYLGSCGHFTTLPKNDNTKLLITTAAQQLLAGKMTLAALRTEMTRLAKQLPEYDIVRAMYGVGETTAVQLMAEIGDVRRFPRRSSIVGFAGVDPAVDQSGKHSAKSVPTTKRGSPHLRKTLYQIVCTYLKKSPVDEPVYQFLDKKRSEGKPYFVYMTAAQNKFLRIYYARVKECLEAFDAQQDTSQR

SEQ ID NO: 59600 - protein, 356 aa, unidentified
MSGTMPTDIIVGVDTHKHTHAAVAVTGLGACVAERTIKVGLAGYRELEAWARSLGNVRAFGIEGTGSYGAGLARFLREGGHVVHEVGRPDRRLRRRHGKTDHLDAEGAARAVLGGQAAALPKAGTSRAEMIRHLKVARDTAVKARTQAMLTLKAIIVGAPAALREHLEAITGKMALVRHLAALRPGPLTSTTASAEASLRAIARRWLDLDAEIKSHDSGLEALVEQGAPTMVEAHGIGTGTAAEMLVLVGDNPERIRSEAAFAKLCGACPIPASSGKTSRHRLNRGGHRQANAALHRVVVVRMRAHQPTIDYVRRRTAEGKSKPEIIRCLKRFVAREIFGHLCRAPRPAGPEQMAA

SEQ ID NO: 59601 - protein, 340 aa, unidentified
MTSTKYIGMDVHKESISIAVMNAAGKIVMECVIETKANMIVQCIDGLRGDLHVTFEEGTSAAWLYDLLKPHVTKLIVCDPRKNASMREDSQNDKIDARRLAELLRVDHLSPVYHGEHGLRTLKELVRSYLTVTKDLVRVKTRVKAIYRSWAIPCNGKEVYAACHRAEWLEKIKELGVRRRAEFYYQQLDALRVLRQGVRRELLAESKKQRAWKQLCQIPAIGPIRAAVLLGILQTPHRFRTKRPLWKYSGLAIETCSSADHRSIHGQLQRSKKNSVRGLNQNCNHDLKNLFKGGGGHRLQQTRSVPGVLRGFIGQRHEARNGPTDLGQKDCHHRSYGRKR
